United States Patent Application Publication US 2018/0305689 A1 - sequence listing, part 78

SEQ ID NO: 1124319 - RNA, 19 nt, Artificial Sequence
  Description of Artificial Sequence: Synthetic oligonucleotide
  Antisense strand to SEQ ID NO: 1124318
cuucacacaccaauguugc

SEQ ID NO: 1124320 - RNA, 19 nt, Artificial Sequence
  Description of Artificial Sequence: Synthetic oligonucleotide
  Sense strand starting at position 3 of SEQ ID NO: 916022
caacauuggugugugaaga

SEQ ID NO: 1124321 - RNA, 19 nt, Artificial Sequence
  Description of Artificial Sequence: Synthetic oligonucleotide
  Antisense strand to SEQ ID NO: 1124320
ucuucacacaccaauguug

SEQ ID NO: 1124322 - RNA, 19 nt, Artificial Sequence
  Description of Artificial Sequence: Synthetic oligonucleotide
  Sense strand starting at position 4 of SEQ ID NO: 916022
aacauuggugugugaagau

SEQ ID NO: 1124323 - RNA, 19 nt, Artificial Sequence
  Description of Artificial Sequence: Synthetic oligonucleotide
  Antisense strand to SEQ ID NO: 1124322
aucuucacacaccaauguu

SEQ ID NO: 1124324 - RNA, 19 nt, Artificial Sequence
  Description of Artificial Sequence: Synthetic oligonucleotide
  Sense strand starting at position 97 of SEQ ID NO: 916022
ccaaaugugugcccacuau

SEQ ID NO: 1124325 - RNA, 19 nt, Artificial Sequence
  Description of Artificial Sequence: Synthetic oligonucleotide
  Antisense strand to SEQ ID NO: 1124324
auagugggcacacauuugg

SEQ ID NO: 1124326 - RNA, 19 nt, Artificial Sequence
  Description of Artificial Sequence: Synthetic oligonucleotide
  Sense strand starting at position 101 of SEQ ID NO: 916022
augugugcccacuauguau

SEQ ID NO: 1124327 - RNA, 19 nt, Artificial Sequence
  Description of Artificial Sequence: Synthetic oligonucleotide
  Antisense strand to SEQ ID NO: 1124326
auacauagugggcacacau

SEQ ID NO: 1124328 - RNA, 19 nt, Artificial Sequence
  Description of Artificial Sequence: Synthetic oligonucleotide
  Sense strand starting at position 103 of SEQ ID NO: 916022
gugugcccacuauguauua

SEQ ID NO: 1124329 - RNA, 19 nt, Artificial Sequence
  Description of Artificial Sequence: Synthetic oligonucleotide
  Antisense strand to SEQ ID NO: 1124328
uaauacauagugggcacac

SEQ ID NO: 1124330 - RNA, 19 nt, Artificial Sequence
  Description of Artificial Sequence: Synthetic oligonucleotide
  Sense strand starting at position 121 of SEQ ID NO: 916022
agaaacuauuuauggcuga

SEQ ID NO: 1124331 - RNA, 19 nt, Artificial Sequence
  Description of Artificial Sequence: Synthetic oligonucleotide
  Antisense strand to SEQ ID NO: 1124330
ucagccauaaauaguuucu

SEQ ID NO: 1124332 - RNA, 19 nt, Artificial Sequence
  Description of Artificial Sequence: Synthetic oligonucleotide
  Sense strand starting at position 134 of SEQ ID NO: 916022
ggcugaccuuguuccagau

SEQ ID NO: 1124333 - RNA, 19 nt, Artificial Sequence
  Description of Artificial Sequence: Synthetic oligonucleotide
  Antisense strand to SEQ ID NO: 1124332
aucuggaacaaggucagcc

SEQ ID NO: 1124334 - RNA, 19 nt, Artificial Sequence
  Description of Artificial Sequence: Synthetic oligonucleotide
  Sense strand starting at position 245 of SEQ ID NO: 916022
aacguuaguaucguugcaa

SEQ ID NO: 1124335 - RNA, 19 nt, Artificial Sequence
  Description of Artificial Sequence: Synthetic oligonucleotide
  Antisense strand to SEQ ID NO: 1124334
uugcaacgauacuaacguu

SEQ ID NO: 1124336 - RNA, 19 nt, Artificial Sequence
  Description of Artificial Sequence: Synthetic oligonucleotide
  Sense strand starting at position 274 of SEQ ID NO: 916022
ccaauuagguaauuauguu

SEQ ID NO: 1124337 - RNA, 19 nt, Artificial Sequence
  Description of Artificial Sequence: Synthetic oligonucleotide
  Antisense strand to SEQ ID NO: 1124336
aacauaauuaccuaauugg

SEQ ID NO: 1124338 - RNA, 19 nt, Artificial Sequence
  Description of Artificial Sequence: Synthetic oligonucleotide
  Sense strand starting at position 278 of SEQ ID NO: 916022
uuagguaauuauguugaga

SEQ ID NO: 1124339 - RNA, 19 nt, Artificial Sequence
  Description of Artificial Sequence: Synthetic oligonucleotide
  Antisense strand to SEQ ID NO: 1124338
ucucaacauaauuaccuaa

SEQ ID NO: 1124340 - RNA, 19 nt, Artificial Sequence
  Description of Artificial Sequence: Synthetic oligonucleotide
  Sense strand starting at position 317 of SEQ ID NO: 916022
uggauaaguugagaucaau

SEQ ID NO: 1124341 - RNA, 19 nt, Artificial Sequence
  Description of Artificial Sequence: Synthetic oligonucleotide
  Antisense strand to SEQ ID NO: 1124340
auugaucucaacuuaucca

SEQ ID NO: 1124342 - RNA, 19 nt, Artificial Sequence
  Description of Artificial Sequence: Synthetic oligonucleotide
  Sense strand starting at position 387 of SEQ ID NO: 916022
caagaugaaugauucguuu

SEQ ID NO: 1124343 - RNA, 19 nt, Artificial Sequence
  Description of Artificial Sequence: Synthetic oligonucleotide
  Antisense strand to SEQ ID NO: 1124342
aaacgaaucauucaucuug

SEQ ID NO: 1124344 - RNA, 19 nt, Artificial Sequence
  Description of Artificial Sequence: Synthetic oligonucleotide
  Sense strand starting at position 443 of SEQ ID NO: 916022
cccuauuuguuagaccgau

SEQ ID NO: 1124345 - RNA, 19 nt, Artificial Sequence
  Description of Artificial Sequence: Synthetic oligonucleotide
  Antisense strand to SEQ ID NO: 1124344
aucggucuaacaaauaggg

SEQ ID NO: 1124346 - RNA, 19 nt, Artificial Sequence
  Description of Artificial Sequence: Synthetic oligonucleotide
  Sense strand starting at position 449 of SEQ ID NO: 916022
uuguuagaccgauguauuu

SEQ ID NO: 1124347 - RNA, 19 nt, Artificial Sequence
  Description of Artificial Sequence: Synthetic oligonucleotide
  Antisense strand to SEQ ID NO: 1124346
aaauacaucggucuaacaa

SEQ ID NO: 1124348 - RNA, 19 nt, Artificial Sequence
  Description of Artificial Sequence: Synthetic oligonucleotide
  Sense strand starting at position 498 of SEQ ID NO: 916022
auaauuguccuguacuuua

SEQ ID NO: 1124349 - RNA, 19 nt, Artificial Sequence
  Description of Artificial Sequence: Synthetic oligonucleotide
  Antisense strand to SEQ ID NO: 1124348
uaaaguacaggacaauuau

SEQ ID NO: 1124350 - RNA, 19 nt, Artificial Sequence
  Description of Artificial Sequence: Synthetic oligonucleotide
  Sense strand starting at position 501 of SEQ ID NO: 916022
auuguccuguacuuuagau

SEQ ID NO: 1124351 - RNA, 19 nt, Artificial Sequence
  Description of Artificial Sequence: Synthetic oligonucleotide
  Antisense strand to SEQ ID NO: 1124350
aucuaaaguacaggacaau

SEQ ID NO: 1124352 - RNA, 19 nt, Artificial Sequence
  Description of Artificial Sequence: Synthetic oligonucleotide
  Sense strand starting at position 553 of SEQ ID NO: 916022
uuauaauacgcagaggagu

SEQ ID NO: 1124353 - RNA, 19 nt, Artificial Sequence
  Description of Artificial Sequence: Synthetic oligonucleotide
  Antisense strand to SEQ ID NO: 1124352
acuccucugcguauuauaa

SEQ ID NO: 1124354 - RNA, 19 nt, Artificial Sequence
  Description of Artificial Sequence: Synthetic oligonucleotide
  Sense strand starting at position 593 of SEQ ID NO: 916022
uucagugguguguauggau

SEQ ID NO: 1124355 - RNA, 19 nt, Artificial Sequence
  Description of Artificial Sequence: Synthetic oligonucleotide
  Antisense strand to SEQ ID NO: 1124354
auccauacacaccacugaa

SEQ ID NO: 1124356 - RNA, 19 nt, Artificial Sequence
  Description of Artificial Sequence: Synthetic oligonucleotide
  Sense strand starting at position 914 of SEQ ID NO: 916022
ucuggaacugcguaauaug

SEQ ID NO: 1124357 - RNA, 19 nt, Artificial Sequence
  Description of Artificial Sequence: Synthetic oligonucleotide
  Antisense strand to SEQ ID NO: 1124356
cauauuacgcaguuccaga

SEQ ID NO: 1124358 - RNA, 19 nt, Artificial Sequence
  Description of Artificial Sequence: Synthetic oligonucleotide
  Sense strand starting at position 935 of SEQ ID NO: 916022
aaaguauuacagcguggua

SEQ ID NO: 1124359 - RNA, 19 nt, Artificial Sequence
  Description of Artificial Sequence: Synthetic oligonucleotide
  Antisense strand to SEQ ID NO: 1124358
uaccacgcuguaauacuuu

SEQ ID NO: 1124360 - RNA, 19 nt, Artificial Sequence
  Description of Artificial Sequence: Synthetic oligonucleotide
  Sense strand starting at position 1202 of SEQ ID NO: 916022
acaggcaaaucguuacuca

SEQ ID NO: 1124361 - RNA, 19 nt, Artificial Sequence
  Description of Artificial Sequence: Synthetic oligonucleotide
  Antisense strand to SEQ ID NO: 1124360
ugaguaacgauuugccugu

SEQ ID NO: 1124362 - RNA, 19 nt, Artificial Sequence
  Description of Artificial Sequence: Synthetic oligonucleotide
  Sense strand starting at position 1205 of SEQ ID NO: 916022
ggcaaaucguuacucagag

SEQ ID NO: 1124363 - RNA, 19 nt, Artificial Sequence
  Description of Artificial Sequence: Synthetic oligonucleotide
  Antisense strand to SEQ ID NO: 1124362
cucugaguaacgauuugcc

SEQ ID NO: 1124364 - RNA, 19 nt, Artificial Sequence
  Description of Artificial Sequence: Synthetic oligonucleotide
  Sense strand starting at position 1206 of SEQ ID NO: 916022
gcaaaucguuacucagagu

SEQ ID NO: 1124365 - RNA, 19 nt, Artificial Sequence
  Description of Artificial Sequence: Synthetic oligonucleotide
  Antisense strand to SEQ ID NO: 1124364
acucugaguaacgauuugc

SEQ ID NO: 1124366 - RNA, 19 nt, Artificial Sequence
  Description of Artificial Sequence: Synthetic oligonucleotide
  Sense strand starting at position 1212 of SEQ ID NO: 916022
cguuacucagaguaaacua

SEQ ID NO: 1124367 - RNA, 19 nt, Artificial Sequence
  Description of Artificial Sequence: Synthetic oligonucleotide
  Antisense strand to SEQ ID NO: 1124366
uaguuuacucugaguaacg

SEQ ID NO: 1124368 - RNA, 19 nt, Artificial Sequence
  Description of Artificial Sequence: Synthetic oligonucleotide
  Sense strand starting at position 1302 of SEQ ID NO: 916022
cgauacaacuugucaggga

SEQ ID NO: 1124369 - RNA, 19 nt, Artificial Sequence
  Description of Artificial Sequence: Synthetic oligonucleotide
  Antisense strand to SEQ ID NO: 1124368
ucccugacaaguuguaucg

SEQ ID NO: 1124370 - RNA, 19 nt, Artificial Sequence
  Description of Artificial Sequence: Synthetic oligonucleotide
  Sense strand starting at position 2767 of SEQ ID NO: 916022
ucuuucuuucccggaggga

SEQ ID NO: 1124371 - RNA, 19 nt, Artificial Sequence
  Description of Artificial Sequence: Synthetic oligonucleotide
  Antisense strand to SEQ ID NO: 1124370
ucccuccgggaaagaaaga

SEQ ID NO: 1124372 - RNA, 19 nt, Artificial Sequence
  Description of Artificial Sequence: Synthetic oligonucleotide
  Sense strand starting at position 2829 of SEQ ID NO: 916022
gguggaguggcuuaaagaa

SEQ ID NO: 1124373 - RNA, 19 nt, Artificial Sequence
  Description of Artificial Sequence: Synthetic oligonucleotide
  Antisense strand to SEQ ID NO: 1124372
uucuuuaagccacuccacc

SEQ ID NO: 1124374 - RNA, 19 nt, Artificial Sequence
  Description of Artificial Sequence: Synthetic oligonucleotide
  Sense strand starting at position 3390 of SEQ ID NO: 916022
cggauucucacccagguaa

SEQ ID NO: 1124375 - RNA, 19 nt, Artificial Sequence
  Description of Artificial Sequence: Synthetic oligonucleotide
  Antisense strand to SEQ ID NO: 1124374
uuaccugggugagaauccg

SEQ ID NO: 1124376 - RNA, 19 nt, Artificial Sequence
  Description of Artificial Sequence: Synthetic oligonucleotide
  Sense strand starting at position 3590 of SEQ ID NO: 916022
gaacucagcuccuuuguga

SEQ ID NO: 1124377 - RNA, 19 nt, Artificial Sequence
  Description of Artificial Sequence: Synthetic oligonucleotide
  Antisense strand to SEQ ID NO: 1124376
ucacaaaggagcugaguuc

SEQ ID NO: 1124378 - RNA, 19 nt, Artificial Sequence
  Description of Artificial Sequence: Synthetic oligonucleotide
  Sense strand starting at position 3605 of SEQ ID NO: 916022
gugaaaccuuucuugccga

SEQ ID NO: 1124379 - RNA, 19 nt, Artificial Sequence
  Description of Artificial Sequence: Synthetic oligonucleotide
  Antisense strand to SEQ ID NO: 1124378
ucggcaagaaagguuucac

SEQ ID NO: 1124380 - RNA, 19 nt, Artificial Sequence
  Description of Artificial Sequence: Synthetic oligonucleotide
  Sense strand starting at position 3665 of SEQ ID NO: 916022
aacuguucugguugcuaga

SEQ ID NO: 1124381 - RNA, 19 nt, Artificial Sequence
  Description of Artificial Sequence: Synthetic oligonucleotide
  Antisense strand to SEQ ID NO: 1124380
ucuagcaaccagaacaguu

SEQ ID NO: 1124382 - RNA, 19 nt, Artificial Sequence
  Description of Artificial Sequence: Synthetic oligonucleotide
  Sense strand starting at position 3667 of SEQ ID NO: 916022
cuguucugguugcuagauu

SEQ ID NO: 1124383 - RNA, 19 nt, Artificial Sequence
  Description of Artificial Sequence: Synthetic oligonucleotide
  Antisense strand to SEQ ID NO: 1124382
aaucuagcaaccagaacag

SEQ ID NO: 1124384 - RNA, 19 nt, Artificial Sequence
  Description of Artificial Sequence: Synthetic oligonucleotide
  Sense strand starting at position 3686 of SEQ ID NO: 916022
gcuuacgggcugucuuauu

SEQ ID NO: 1124385 - RNA, 19 nt, Artificial Sequence
  Description of Artificial Sequence: Synthetic oligonucleotide
  Antisense strand to SEQ ID NO: 1124384
aauaagacagcccguaagc

SEQ ID NO: 1124386 - RNA, 19 nt, Artificial Sequence
  Description of Artificial Sequence: Synthetic oligonucleotide
  Sense strand starting at position 3697 of SEQ ID NO: 916022
gucuuauugcaacaaagga

SEQ ID NO: 1124387 - RNA, 19 nt, Artificial Sequence
  Description of Artificial Sequence: Synthetic oligonucleotide
  Antisense strand to SEQ ID NO: 1124386
uccuuuguugcaauaagac

SEQ ID NO: 1124388 - RNA, 19 nt, Artificial Sequence
  Description of Artificial Sequence: Synthetic oligonucleotide
  Sense strand starting at position 3878 of SEQ ID NO: 916022
gcaggaaauugaccuuguu

SEQ ID NO: 1124389 - RNA, 19 nt, Artificial Sequence
  Description of Artificial Sequence: Synthetic oligonucleotide
  Antisense strand to SEQ ID NO: 1124388
aacaaggucaauuuccugc

SEQ ID NO: 1124390 - RNA, 19 nt, Artificial Sequence
  Description of Artificial Sequence: Synthetic oligonucleotide
  Sense strand starting at position 3932 of SEQ ID NO: 916022
ucuaaauuagcagaguagu

SEQ ID NO: 1124391 - RNA, 19 nt, Artificial Sequence
  Description of Artificial Sequence: Synthetic oligonucleotide
  Antisense strand to SEQ ID NO: 1124390
acuacucugcuaauuuaga

SEQ ID NO: 1124392 - RNA, 19 nt, Artificial Sequence
  Description of Artificial Sequence: Synthetic oligonucleotide
  Sense strand starting at position 3935 of SEQ ID NO: 916022
aaauuagcagaguaguaca

SEQ ID NO: 1124393 - RNA, 19 nt, Artificial Sequence
  Description of Artificial Sequence: Synthetic oligonucleotide
  Antisense strand to SEQ ID NO: 1124392
uguacuacucugcuaauuu

SEQ ID NO: 1124394 - RNA, 19 nt, Artificial Sequence
  Description of Artificial Sequence: Synthetic oligonucleotide
  Sense strand starting at position 3938 of SEQ ID NO: 916022
uuagcagaguaguacauuu

SEQ ID NO: 1124395 - RNA, 19 nt, Artificial Sequence
  Description of Artificial Sequence: Synthetic oligonucleotide
  Antisense strand to SEQ ID NO: 1124394
aaauguacuacucugcuaa

SEQ ID NO: 1124396 - RNA, 19 nt, Artificial Sequence
  Description of Artificial Sequence: Synthetic oligonucleotide
  Sense strand starting at position 3971 of SEQ ID NO: 916022
gcauaucacagagauggca

SEQ ID NO: 1124397 - RNA, 19 nt, Artificial Sequence
  Description of Artificial Sequence: Synthetic oligonucleotide
  Antisense strand to SEQ ID NO: 1124396
ugccaucucugugauaugc

SEQ ID NO: 1124398 - RNA, 19 nt, Artificial Sequence
  Description of Artificial Sequence: Synthetic oligonucleotide
  Sense strand starting at position 220 of SEQ ID NO: 916023
caaagaagguguuuacaua

SEQ ID NO: 1124399 - RNA, 19 nt, Artificial Sequence
  Description of Artificial Sequence: Synthetic oligonucleotide
  Antisense strand to SEQ ID NO: 1124398
uauguaaacaccuucuuug

SEQ ID NO: 1124400 - RNA, 19 nt, Artificial Sequence
  Description of Artificial Sequence: Synthetic oligonucleotide
  Sense strand starting at position 227 of SEQ ID NO: 916023
gguguuuacauagaucugu

SEQ ID NO: 1124401 - RNA, 19 nt, Artificial Sequence
  Description of Artificial Sequence: Synthetic oligonucleotide
  Antisense strand to SEQ ID NO: 1124400
acagaucuauguaaacacc

SEQ ID NO: 1124402 - RNA, 19 nt, Artificial Sequence
  Description of Artificial Sequence: Synthetic oligonucleotide
  Sense strand starting at position 373 of SEQ ID NO: 916023
cagggauuccuguggcacu

SEQ ID NO: 1124403 - RNA, 19 nt, Artificial Sequence
  Description of Artificial Sequence: Synthetic oligonucleotide
  Antisense strand to SEQ ID NO: 1124402
agugccacaggaaucccug

SEQ ID NO: 1124404 - RNA, 19 nt, Artificial Sequence
  Description of Artificial Sequence: Synthetic oligonucleotide
  Sense strand starting at position 395 of SEQ ID NO: 916023
ggaauuaucugcucugggu

SEQ ID NO: 1124405 - RNA, 19 nt, Artificial Sequence
  Description of Artificial Sequence: Synthetic oligonucleotide
  Antisense strand to SEQ ID NO: 1124404
acccagagcagauaauucc

SEQ ID NO: 1124406 - RNA, 19 nt, Artificial Sequence
  Description of Artificial Sequence: Synthetic oligonucleotide
  Sense strand starting at position 454 of SEQ ID NO: 916023
agccucuacgaagauugau

SEQ ID NO: 1124407 - RNA, 19 nt, Artificial Sequence
  Description of Artificial Sequence: Synthetic oligonucleotide
  Antisense strand to SEQ ID NO: 1124406
aucaaucuucguagaggcu

SEQ ID NO: 1124408 - RNA, 19 nt, Artificial Sequence
  Description of Artificial Sequence: Synthetic oligonucleotide
  Sense strand starting at position 482 of SEQ ID NO: 916023
uccagaggcaagugaaauu

SEQ ID NO: 1124409 - RNA, 19 nt, Artificial Sequence
  Description of Artificial Sequence: Synthetic oligonucleotide
  Antisense strand to SEQ ID NO: 1124408
aauuucacuugccucugga

SEQ ID NO: 1124410 - RNA, 19 nt, Artificial Sequence
  Description of Artificial Sequence: Synthetic oligonucleotide
  Sense strand starting at position 692 of SEQ ID NO: 916023
uggucauacuccuccucau

SEQ ID NO: 1124411 - RNA, 19 nt, Artificial Sequence
  Description of Artificial Sequence: Synthetic oligonucleotide
  Antisense strand to SEQ ID NO: 1124410
augaggaggaguaugacca

SEQ ID NO: 1124412 - RNA, 19 nt, Artificial Sequence
  Description of Artificial Sequence: Synthetic oligonucleotide
  Sense strand starting at position 864 of SEQ ID NO: 916023
cgucguuuccggaggaucu

SEQ ID NO: 1124413 - RNA, 19 nt, Artificial Sequence
  Description of Artificial Sequence: Synthetic oligonucleotide
  Antisense strand to SEQ ID NO: 1124412
agauccuccggaaacgacg

SEQ ID NO: 1124414 - RNA, 19 nt, Artificial Sequence
  Description of Artificial Sequence: Synthetic oligonucleotide
  Sense strand starting at position 973 of SEQ ID NO: 916023
guagaucugguucaugaug

SEQ ID NO: 1124415 - RNA, 19 nt, Artificial Sequence
  Description of Artificial Sequence: Synthetic oligonucleotide
  Antisense strand to SEQ ID NO: 1124414
caucaugaaccagaucuac

SEQ ID NO: 1124416 - RNA, 19 nt, Artificial Sequence
  Description of Artificial Sequence: Synthetic oligonucleotide
  Sense strand starting at position 987 of SEQ ID NO: 916023
ugaugaauugggugguguu

SEQ ID NO: 1124417 - RNA, 19 nt, Artificial Sequence
  Description of Artificial Sequence: Synthetic oligonucleotide
  Antisense strand to SEQ ID NO: 1124416
aacaccacccaauucauca

SEQ ID NO: 1124418 - RNA, 19 nt, Artificial Sequence
  Description of Artificial Sequence: Synthetic oligonucleotide
  Sense strand starting at position 1552 of SEQ ID NO: 916023
gagggucugagucaugguu

SEQ ID NO: 1124419 - RNA, 19 nt, Artificial Sequence
  Description of Artificial Sequence: Synthetic oligonucleotide
  Antisense strand to SEQ ID NO: 1124418
aaccaugacucagacccuc

SEQ ID NO: 1124420 - RNA, 19 nt, Artificial Sequence
  Description of Artificial Sequence: Synthetic oligonucleotide
  Sense strand starting at position 1580 of SEQ ID NO: 916023
ccgagagguccagauggua

SEQ ID NO: 1124421 - RNA, 19 nt, Artificial Sequence
  Description of Artificial Sequence: Synthetic oligonucleotide
  Antisense strand to SEQ ID NO: 1124420
uaccaucuggaccucucgg

SEQ ID NO: 1124422 - RNA, 19 nt, Artificial Sequence
  Description of Artificial Sequence: Synthetic oligonucleotide
  Sense strand starting at position 1752 of SEQ ID NO: 916023
gguaguaaucgcuuguccu

SEQ ID NO: 1124423 - RNA, 19 nt, Artificial Sequence
  Description of Artificial Sequence: Synthetic oligonucleotide
  Antisense strand to SEQ ID NO: 1124422
aggacaagcgauuacuacc

SEQ ID NO: 1124424 - RNA, 19 nt, Artificial Sequence
  Description of Artificial Sequence: Synthetic oligonucleotide
  Sense strand starting at position 2240 of SEQ ID NO: 916023
ggaggcaguuuauccgaaa

SEQ ID NO: 1124425 - RNA, 19 nt, Artificial Sequence
  Description of Artificial Sequence: Synthetic oligonucleotide
  Antisense strand to SEQ ID NO: 1124424
uuucggauaaacugccucc

SEQ ID NO: 1124426 - RNA, 19 nt, Artificial Sequence
  Description of Artificial Sequence: Synthetic oligonucleotide
  Sense strand starting at position 2241 of SEQ ID NO: 916023
gaggcaguuuauccgaaag

SEQ ID NO: 1124427 - RNA, 19 nt, Artificial Sequence
  Description of Artificial Sequence: Synthetic oligonucleotide
  Antisense strand to SEQ ID NO: 1124426
cuuucggauaaacugccuc

SEQ ID NO: 1124428 - RNA, 19 nt, Artificial Sequence
  Description of Artificial Sequence: Synthetic oligonucleotide
  Sense strand starting at position 2251 of SEQ ID NO: 916023
auccgaaagcuuuguauca

SEQ ID NO: 1124429 - RNA, 19 nt, Artificial Sequence
  Description of Artificial Sequence: Synthetic oligonucleotide
  Antisense strand to SEQ ID NO: 1124428
ugauacaaagcuuucggau

SEQ ID NO: 1124430 - RNA, 19 nt, Artificial Sequence
  Description of Artificial Sequence: Synthetic oligonucleotide
  Sense strand starting at position 2503 of SEQ ID NO: 916023
gcaugugcucacugacaaa

SEQ ID NO: 1124431 - RNA, 19 nt, Artificial Sequence
  Description of Artificial Sequence: Synthetic oligonucleotide
  Antisense strand to SEQ ID NO: 1124430
uuugucagugagcacaugc

SEQ ID NO: 1124432 - RNA, 19 nt, Artificial Sequence
  Description of Artificial Sequence: Synthetic oligonucleotide
  Sense strand starting at position 2526 of SEQ ID NO: 916023
ccugucaucuacccugaga

SEQ ID NO: 1124433 - RNA, 19 nt, Artificial Sequence
  Description of Artificial Sequence: Synthetic oligonucleotide
  Antisense strand to SEQ ID NO: 1124432
ucucaggguagaugacagg

SEQ ID NO: 1124434 - RNA, 19 nt, Artificial Sequence
  Description of Artificial Sequence: Synthetic oligonucleotide
  Sense strand starting at position 2529 of SEQ ID NO: 916023
gucaucuacccugagaggu

SEQ ID NO: 1124435 - RNA, 19 nt, Artificial Sequence
  Description of Artificial Sequence: Synthetic oligonucleotide
  Antisense strand to SEQ ID NO: 1124434
accucucaggguagaugac

SEQ ID NO: 1124436 - RNA, 19 nt, Artificial Sequence
  Description of Artificial Sequence: Synthetic oligonucleotide
  Sense strand starting at position 2660 of SEQ ID NO: 916023
aaaguuagguuccuaauga

SEQ ID NO: 1124437 - RNA, 19 nt, Artificial Sequence
  Description of Artificial Sequence: Synthetic oligonucleotide
  Antisense strand to SEQ ID NO: 1124436
ucauuaggaaccuaacuuu

SEQ ID NO: 1124438 - RNA, 19 nt, Artificial Sequence
  Description of Artificial Sequence: Synthetic oligonucleotide
  Sense strand starting at position 2670 of SEQ ID NO: 916023
uccuaaugacauugcuaug

SEQ ID NO: 1124439 - RNA, 19 nt, Artificial Sequence
  Description of Artificial Sequence: Synthetic oligonucleotide
  Antisense strand to SEQ ID NO: 1124438
cauagcaaugucauuagga

SEQ ID NO: 1124440 - RNA, 19 nt, Artificial Sequence
  Description of Artificial Sequence: Synthetic oligonucleotide
  Sense strand starting at position 2733 of SEQ ID NO: 916023
cauaacauuugggaaggua

SEQ ID NO: 1124441 - RNA, 19 nt, Artificial Sequence
  Description of Artificial Sequence: Synthetic oligonucleotide
  Antisense strand to SEQ ID NO: 1124440
uaccuucccaaauguuaug

SEQ ID NO: 1124442 - RNA, 19 nt, Artificial Sequence
  Description of Artificial Sequence: Synthetic oligonucleotide
  Sense strand starting at position 2762 of SEQ ID NO: 916023
gguaauauaccguacaugu

SEQ ID NO: 1124443 - RNA, 19 nt, Artificial Sequence
  Description of Artificial Sequence: Synthetic oligonucleotide
  Antisense strand to SEQ ID NO: 1124442
acauguacgguauauuacc

SEQ ID NO: 1124444 - RNA, 19 nt, Artificial Sequence
  Description of Artificial Sequence: Synthetic oligonucleotide
  Sense strand starting at position 2773 of SEQ ID NO: 916023
guacauguguaccucaauu

SEQ ID NO: 1124445 - RNA, 19 nt, Artificial Sequence
  Description of Artificial Sequence: Synthetic oligonucleotide
  Antisense strand to SEQ ID NO: 1124444
aauugagguacacauguac

SEQ ID NO: 1124446 - RNA, 19 nt, Artificial Sequence
  Description of Artificial Sequence: Synthetic oligonucleotide
  Sense strand starting at position 2775 of SEQ ID NO: 916023
acauguguaccucaauuaa

SEQ ID NO: 1124447 - RNA, 19 nt, Artificial Sequence
  Description of Artificial Sequence: Synthetic oligonucleotide
  Antisense strand to SEQ ID NO: 1124446
uuaauugagguacacaugu

SEQ ID NO: 1124448 - RNA, 19 nt, Artificial Sequence
  Description of Artificial Sequence: Synthetic oligonucleotide
  Sense strand starting at position 2824 of SEQ ID NO: 916023
acagguuuguccuugggaa

SEQ ID NO: 1124449 - RNA, 19 nt, Artificial Sequence
  Description of Artificial Sequence: Synthetic oligonucleotide
  Antisense strand to SEQ ID NO: 1124448
uucccaaggacaaaccugu

SEQ ID NO: 1124450 - RNA, 19 nt, Artificial Sequence
  Description of Artificial Sequence: Synthetic oligonucleotide
  Sense strand starting at position 2825 of SEQ ID NO: 916023
cagguuuguccuugggaag

SEQ ID NO: 1124451 - RNA, 19 nt, Artificial Sequence
  Description of Artificial Sequence: Synthetic oligonucleotide
  Antisense strand to SEQ ID NO: 1124450
cuucccaaggacaaaccug

SEQ ID NO: 1124452 - RNA, 19 nt, Artificial Sequence
  Description of Artificial Sequence: Synthetic oligonucleotide
  Sense strand starting at position 2826 of SEQ ID NO: 916023
agguuuguccuugggaaga

SEQ ID NO: 1124453 - RNA, 19 nt, Artificial Sequence
  Description of Artificial Sequence: Synthetic oligonucleotide
  Antisense strand to SEQ ID NO: 1124452
ucuucccaaggacaaaccu

SEQ ID NO: 1124454 - RNA, 19 nt, Artificial Sequence
  Description of Artificial Sequence: Synthetic oligonucleotide
  Sense strand starting at position 2845 of SEQ ID NO: 916023
ggaauauucugauugucuu

SEQ ID NO: 1124455 - RNA, 19 nt, Artificial Sequence
  Description of Artificial Sequence: Synthetic oligonucleotide
  Antisense strand to SEQ ID NO: 1124454
aagacaaucagaauauucc

SEQ ID NO: 1124456 - RNA, 19 nt, Artificial Sequence
  Description of Artificial Sequence: Synthetic oligonucleotide
  Sense strand starting at position 2899 of SEQ ID NO: 916023
acgggaagccuuuaaagca

SEQ ID NO: 1124457 - RNA, 19 nt, Artificial Sequence
  Description of Artificial Sequence: Synthetic oligonucleotide
  Antisense strand to SEQ ID NO: 1124456
ugcuuuaaaggcuucccgu

SEQ ID NO: 1124458 - RNA, 19 nt, Artificial Sequence
  Description of Artificial Sequence: Synthetic oligonucleotide
  Sense strand starting at position 2912 of SEQ ID NO: 916023
aaagcauugugguuaagca

SEQ ID NO: 1124459 - RNA, 19 nt, Artificial Sequence
  Description of Artificial Sequence: Synthetic oligonucleotide
  Antisense strand to SEQ ID NO: 1124458
ugcuuaaccacaaugcuuu

SEQ ID NO: 1124460 - RNA, 19 nt, Artificial Sequence
  Description of Artificial Sequence: Synthetic oligonucleotide
  Sense strand starting at position 2913 of SEQ ID NO: 916023
aagcauugugguuaagcau

SEQ ID NO: 1124461 - RNA, 19 nt, Artificial Sequence
  Description of Artificial Sequence: Synthetic oligonucleotide
  Antisense strand to SEQ ID NO: 1124460
augcuuaaccacaaugcuu

SEQ ID NO: 1124462 - RNA, 19 nt, Artificial Sequence
  Description of Artificial Sequence: Synthetic oligonucleotide
  Sense strand starting at position 2921 of SEQ ID NO: 916023
ugguuaagcauauggguuu

SEQ ID NO: 1124463 - RNA, 19 nt, Artificial Sequence
  Description of Artificial Sequence: Synthetic oligonucleotide
  Antisense strand to SEQ ID NO: 1124462
aaacccauaugcuuaacca

SEQ ID NO: 1124464 - RNA, 19 nt, Artificial Sequence
  Description of Artificial Sequence: Synthetic oligonucleotide
  Sense strand starting at position 3034 of SEQ ID NO: 916023
ccauacgguuguguaaaga

SEQ ID NO: 1124465 - RNA, 19 nt, Artificial Sequence
  Description of Artificial Sequence: Synthetic oligonucleotide
  Antisense strand to SEQ ID NO: 1124464
ucuuuacacaaccguaugg

SEQ ID NO: 1124466 - RNA, 19 nt, Artificial Sequence
  Description of Artificial Sequence: Synthetic oligonucleotide
  Sense strand starting at position 3197 of SEQ ID NO: 916023
cuaugaugcuaagugagga

SEQ ID NO: 1124467 - RNA, 19 nt, Artificial Sequence
  Description of Artificial Sequence: Synthetic oligonucleotide
  Antisense strand to SEQ ID NO: 1124466
uccucacuuagcaucauag

SEQ ID NO: 1124468 - RNA, 19 nt, Artificial Sequence
  Description of Artificial Sequence: Synthetic oligonucleotide
  Sense strand starting at position 3251 of SEQ ID NO: 916023
cccuguaaguacucaguaa

SEQ ID NO: 1124469 - RNA, 19 nt, Artificial Sequence
  Description of Artificial Sequence: Synthetic oligonucleotide
  Antisense strand to SEQ ID NO: 1124468
uuacugaguacuuacaggg

SEQ ID NO: 1124470 - RNA, 19 nt, Artificial Sequence
  Description of Artificial Sequence: Synthetic oligonucleotide
  Sense strand starting at position 3258 of SEQ ID NO: 916023
aguacucaguaacuguuaa

SEQ ID NO: 1124471 - RNA, 19 nt, Artificial Sequence
  Description of Artificial Sequence: Synthetic oligonucleotide
  Antisense strand to SEQ ID NO: 1124470
uuaacaguuacugaguacu

SEQ ID NO: 1124472 - RNA, 19 nt, Artificial Sequence
  Description of Artificial Sequence: Synthetic oligonucleotide
  Sense strand starting at position 3339 of SEQ ID NO: 916023
gcacuuguucuugaugcaa

SEQ ID NO: 1124473 - RNA, 19 nt, Artificial Sequence
  Description of Artificial Sequence: Synthetic oligonucleotide
  Antisense strand to SEQ ID NO: 1124472
uugcaucaagaacaagugc

SEQ ID NO: 1124474 - RNA, 19 nt, Artificial Sequence
  Description of Artificial Sequence: Synthetic oligonucleotide
  Sense strand starting at position 3665 of SEQ ID NO: 916023
ugcccugagaccuguagaa

SEQ ID NO: 1124475 - RNA, 19 nt, Artificial Sequence
  Description of Artificial Sequence: Synthetic oligonucleotide
  Antisense strand to SEQ ID NO: 1124474
uucuacaggucucagggca

SEQ ID NO: 1124476 - RNA, 19 nt, Artificial Sequence
  Description of Artificial Sequence: Synthetic oligonucleotide
  Sense strand starting at position 3797 of SEQ ID NO: 916023
gacucaccuuuggcaguua

SEQ ID NO: 1124477 - RNA, 19 nt, Artificial Sequence
  Description of Artificial Sequence: Synthetic oligonucleotide
  Antisense strand to SEQ ID NO: 1124476
uaacugccaaaggugaguc

SEQ ID NO: 1124478 - RNA, 19 nt, Artificial Sequence
  Description of Artificial Sequence: Synthetic oligonucleotide
  Sense strand starting at position 420 of SEQ ID NO: 916024
agagguuucgggugccaga

SEQ ID NO: 1124479 - RNA, 19 nt, Artificial Sequence
  Description of Artificial Sequence: Synthetic oligonucleotide
  Antisense strand to SEQ ID NO: 1124478
ucuggcacccgaaaccucu

SEQ ID NO: 1124480 - RNA, 19 nt, Artificial Sequence
  Description of Artificial Sequence: Synthetic oligonucleotide
  Sense strand starting at position 433 of SEQ ID NO: 916024
gccagaaaggucuguauuc

SEQ ID NO: 1124481 - RNA, 19 nt, Artificial Sequence
  Description of Artificial Sequence: Synthetic oligonucleotide
  Antisense strand to SEQ ID NO: 1124480
gaauacagaccuuucuggc

SEQ ID NO: 1124482 - RNA, 19 nt, Artificial Sequence
  Description of Artificial Sequence: Synthetic oligonucleotide
  Sense strand starting at position 716 of SEQ ID NO: 916024
guaaguaaucuucgugagg

SEQ ID NO: 1124483 - RNA, 19 nt, Artificial Sequence
  Description of Artificial Sequence: Synthetic oligonucleotide
  Antisense strand to SEQ ID NO: 1124482
ccucacgaagauuacuuac

SEQ ID NO: 1124484 - RNA, 19 nt, Artificial Sequence
  Description of Artificial Sequence: Synthetic oligonucleotide
  Sense strand starting at position 717 of SEQ ID NO: 916024
uaaguaaucuucgugaggu

SEQ ID NO: 1124485 - RNA, 19 nt, Artificial Sequence
  Description of Artificial Sequence: Synthetic oligonucleotide
  Antisense strand to SEQ ID NO: 1124484
accucacgaagauuacuua

SEQ ID NO: 1124486 - RNA, 19 nt, Artificial Sequence
  Description of Artificial Sequence: Synthetic oligonucleotide
  Sense strand starting at position 815 of SEQ ID NO: 916024
agccuuuccaaagggaguu

SEQ ID NO: 1124487 - RNA, 19 nt, Artificial Sequence
  Description of Artificial Sequence: Synthetic oligonucleotide
  Antisense strand to SEQ ID NO: 1124486
aacucccuuuggaaaggcu

SEQ ID NO: 1124488 - RNA, 19 nt, Artificial Sequence
  Description of Artificial Sequence: Synthetic oligonucleotide
  Sense strand starting at position 899 of SEQ ID NO: 916024
gggcaaagacuuggaguga

SEQ ID NO: 1124489 - RNA, 19 nt, Artificial Sequence
  Description of Artificial Sequence: Synthetic oligonucleotide
  Antisense strand to SEQ ID NO: 1124488
ucacuccaagucuuugccc

SEQ ID NO: 1124490 - RNA, 19 nt, Artificial Sequence
  Description of Artificial Sequence: Synthetic oligonucleotide
  Sense strand starting at position 956 of SEQ ID NO: 916024
gcguuucuucaaugggacu

SEQ ID NO: 1124491 - RNA, 19 nt, Artificial Sequence
  Description of Artificial Sequence: Synthetic oligonucleotide
  Antisense strand to SEQ ID NO: 1124490
agucccauugaagaaacgc

SEQ ID NO: 1124492 - RNA, 19 nt, Artificial Sequence
  Description of Artificial Sequence: Synthetic oligonucleotide
  Sense strand starting at position 1280 of SEQ ID NO: 916024
ccucgcuucucccagauuu

SEQ ID NO: 1124493 - RNA, 19 nt, Artificial Sequence
  Description of Artificial Sequence: Synthetic oligonucleotide
  Antisense strand to SEQ ID NO: 1124492
aaaucugggagaagcgagg

SEQ ID NO: 1124494 - RNA, 19 nt, Artificial Sequence
  Description of Artificial Sequence: Synthetic oligonucleotide
  Sense strand starting at position 2349 of SEQ ID NO: 916024
cugcccuuguauuuaagau

SEQ ID NO: 1124495 - RNA, 19 nt, Artificial Sequence
  Description of Artificial Sequence: Synthetic oligonucleotide
  Antisense strand to SEQ ID NO: 1124494
aucuuaaauacaagggcag

SEQ ID NO: 1124496 - RNA, 19 nt, Artificial Sequence
  Description of Artificial Sequence: Synthetic oligonucleotide
  Sense strand starting at position 2368 of SEQ ID NO: 916024
ccaggaauguaggguagau

SEQ ID NO: 1124497 - RNA, 19 nt, Artificial Sequence
  Description of Artificial Sequence: Synthetic oligonucleotide
  Antisense strand to SEQ ID NO: 1124496
aucuacccuacauuccugg

SEQ ID NO: 1124498 - RNA, 19 nt, Artificial Sequence
  Description of Artificial Sequence: Synthetic oligonucleotide
  Sense strand starting at position 2380 of SEQ ID NO: 916024
gguagauuaucugaagaug

SEQ ID NO: 1124499 - RNA, 19 nt, Artificial Sequence
  Description of Artificial Sequence: Synthetic oligonucleotide
  Antisense strand to SEQ ID NO: 1124498
caucuucagauaaucuacc

SEQ ID NO: 1124500 - RNA, 19 nt, Artificial Sequence
  Description of Artificial Sequence: Synthetic oligonucleotide
  Sense strand starting at position 2418 of SEQ ID NO: 916024
agaaauaggucccuuaagu

SEQ ID NO: 1124501 - RNA, 19 nt, Artificial Sequence
  Description of Artificial Sequence: Synthetic oligonucleotide
  Antisense strand to SEQ ID NO: 1124500
acuuaagggaccuauuucu

SEQ ID NO: 1124502 - RNA, 19 nt, Artificial Sequence
  Description of Artificial Sequence: Synthetic oligonucleotide
  Sense strand starting at position 2475 of SEQ ID NO: 916024
cucgcauacccagagauaa

SEQ ID NO: 1124503 - RNA, 19 nt, Artificial Sequence
  Description of Artificial Sequence: Synthetic oligonucleotide
  Antisense strand to SEQ ID NO: 1124502
uuaucucuggguaugcgag

SEQ ID NO: 1124504 - RNA, 19 nt, Artificial Sequence
  Description of Artificial Sequence: Synthetic oligonucleotide
  Sense strand starting at position 2493 of SEQ ID NO: 916024
aaggucaugucccugaagu

SEQ ID NO: 1124505 - RNA, 19 nt, Artificial Sequence
  Description of Artificial Sequence: Synthetic oligonucleotide
  Antisense strand to SEQ ID NO: 1124504
acuucagggacaugaccuu

SEQ ID NO: 1124506 - RNA, 19 nt, Artificial Sequence
  Description of Artificial Sequence: Synthetic oligonucleotide
  Sense strand starting at position 2495 of SEQ ID NO: 916024
ggucaugucccugaagucu

SEQ ID NO: 1124507 - RNA, 19 nt, Artificial Sequence
  Description of Artificial Sequence: Synthetic oligonucleotide
  Antisense strand to SEQ ID NO: 1124506
agacuucagggacaugacc

SEQ ID NO: 1124508 - RNA, 19 nt, Artificial Sequence
  Description of Artificial Sequence: Synthetic oligonucleotide
  Sense strand starting at position 2503 of SEQ ID NO: 916024
cccugaagucuguguuccu

SEQ ID NO: 1124509 - RNA, 19 nt, Artificial Sequence
  Description of Artificial Sequence: Synthetic oligonucleotide
  Antisense strand to SEQ ID NO: 1124508
aggaacacagacuucaggg

SEQ ID NO: 1124510 - RNA, 19 nt, Artificial Sequence
  Description of Artificial Sequence: Synthetic oligonucleotide
  Sense strand starting at position 2506 of SEQ ID NO: 916024
ugaagucuguguuccugau

SEQ ID NO: 1124511 - RNA, 19 nt, Artificial Sequence
  Description of Artificial Sequence: Synthetic oligonucleotide
  Antisense strand to SEQ ID NO: 1124510
aucaggaacacagacuuca

SEQ ID NO: 1124512 - RNA, 19 nt, Artificial Sequence
  Description of Artificial Sequence: Synthetic oligonucleotide
  Sense strand starting at position 2508 of SEQ ID NO: 916024
aagucuguguuccugauaa

SEQ ID NO: 1124513 - RNA, 19 nt, Artificial Sequence
  Description of Artificial Sequence: Synthetic oligonucleotide
  Antisense strand to SEQ ID NO: 1124512
uuaucaggaacacagacuu

SEQ ID NO: 1124514 - RNA, 19 nt, Artificial Sequence
  Description of Artificial Sequence: Synthetic oligonucleotide
  Sense strand starting at position 2510 of SEQ ID NO: 916024
gucuguguuccugauaacu

SEQ ID NO: 1124515 - RNA, 19 nt, Artificial Sequence
  Description of Artificial Sequence: Synthetic oligonucleotide
  Antisense strand to SEQ ID NO: 1124514
aguuaucaggaacacagac

SEQ ID NO: 1124516 - RNA, 19 nt, Artificial Sequence
  Description of Artificial Sequence: Synthetic oligonucleotide
  Sense strand starting at position 2518 of SEQ ID NO: 916024
uccugauaacuucgaagcu

SEQ ID NO: 1124517 - RNA, 19 nt, Artificial Sequence
  Description of Artificial Sequence: Synthetic oligonucleotide
  Antisense strand to SEQ ID NO: 1124516
agcuucgaaguuaucagga

SEQ ID NO: 1124518 - RNA, 19 nt, Artificial Sequence
  Description of Artificial Sequence: Synthetic oligonucleotide
  Sense strand starting at position 2527 of SEQ ID NO: 916024
cuucgaagcuguuucgaaa

SEQ ID NO: 1124519 - RNA, 19 nt, Artificial Sequence
  Description of Artificial Sequence: Synthetic oligonucleotide
  Antisense strand to SEQ ID NO: 1124518
uuucgaaacagcuucgaag

SEQ ID NO: 1124520 - RNA, 19 nt, Artificial Sequence
  Description of Artificial Sequence: Synthetic oligonucleotide
  Sense strand starting at position 2618 of SEQ ID NO: 916024
gagggagagguggguauua

SEQ ID NO: 1124521 - RNA, 19 nt, Artificial Sequence
  Description of Artificial Sequence: Synthetic oligonucleotide
  Antisense strand to SEQ ID NO: 1124520
uaauacccaccucucccuc

SEQ ID NO: 1124522 - RNA, 19 nt, Artificial Sequence
  Description of Artificial Sequence: Synthetic oligonucleotide
  Sense strand starting at position 2649 of SEQ ID NO: 916024
ggugcuucucuggagggau

SEQ ID NO: 1124523 - RNA, 19 nt, Artificial Sequence
  Description of Artificial Sequence: Synthetic oligonucleotide
  Antisense strand to SEQ ID NO: 1124522
aucccuccagagaagcacc

SEQ ID NO: 1124524 - RNA, 19 nt, Artificial Sequence
  Description of Artificial Sequence: Synthetic oligonucleotide
  Sense strand starting at position 2665 of SEQ ID NO: 916024
gauagaaugugauccucga

SEQ ID NO: 1124525 - RNA, 19 nt, Artificial Sequence
  Description of Artificial Sequence: Synthetic oligonucleotide
  Antisense strand to SEQ ID NO: 1124524
ucgaggaucacauucuauc

SEQ ID NO: 1124526 - RNA, 19 nt, Artificial Sequence
  Description of Artificial Sequence: Synthetic oligonucleotide
  Sense strand starting at position 2669 of SEQ ID NO: 916024
gaaugugauccucgagcag

SEQ ID NO: 1124527 - RNA, 19 nt, Artificial Sequence
  Description of Artificial Sequence: Synthetic oligonucleotide
  Antisense strand to SEQ ID NO: 1124526
cugcucgaggaucacauuc

SEQ ID NO: 1124528 - RNA, 19 nt, Artificial Sequence
  Description of Artificial Sequence: Synthetic oligonucleotide
  Sense strand starting at position 2683 of SEQ ID NO: 916024
agcagaaaccaucguguuu

SEQ ID NO: 1124529 - RNA, 19 nt, Artificial Sequence
  Description of Artificial Sequence: Synthetic oligonucleotide
  Antisense strand to SEQ ID NO: 1124528
aaacacgaugguuucugcu

SEQ ID NO: 1124530 - RNA, 19 nt, Artificial Sequence
  Description of Artificial Sequence: Synthetic oligonucleotide
  Sense strand starting at position 2880 of SEQ ID NO: 916024
cgaugcagcuuucuaggaa

SEQ ID NO: 1124531 - RNA, 19 nt, Artificial Sequence
  Description of Artificial Sequence: Synthetic oligonucleotide
  Antisense strand to SEQ ID NO: 1124530
uuccuagaaagcugcaucg

SEQ ID NO: 1124532 - RNA, 19 nt, Artificial Sequence
  Description of Artificial Sequence: Synthetic oligonucleotide
  Sense strand starting at position 2883 of SEQ ID NO: 916024
ugcagcuuucuaggaaaug

SEQ ID NO: 1124533 - RNA, 19 nt, Artificial Sequence
  Description of Artificial Sequence: Synthetic oligonucleotide
  Antisense strand to SEQ ID NO: 1124532
cauuuccuagaaagcugca

SEQ ID NO: 1124534 - RNA, 19 nt, Artificial Sequence
  Description of Artificial Sequence: Synthetic oligonucleotide
  Sense strand starting at position 3127 of SEQ ID NO: 916024
ugcucuaacgcaugcuuga

SEQ ID NO: 1124535 - RNA, 19 nt, Artificial Sequence
  Description of Artificial Sequence: Synthetic oligonucleotide
  Antisense strand to SEQ ID NO: 1124534
ucaagcaugcguuagagca

SEQ ID NO: 1124536 - RNA, 19 nt, Artificial Sequence
  Description of Artificial Sequence: Synthetic oligonucleotide
  Sense strand starting at position 3132 of SEQ ID NO: 916024
uaacgcaugcuugagucaa

SEQ ID NO: 1124537 - RNA, 19 nt, Artificial Sequence
  Description of Artificial Sequence: Synthetic oligonucleotide
  Antisense strand to SEQ ID NO: 1124536
uugacucaagcaugcguua

SEQ ID NO: 1124538 - RNA, 19 nt, Artificial Sequence
  Description of Artificial Sequence: Synthetic oligonucleotide
  Sense strand starting at position 3145 of SEQ ID NO: 916024
agucaaggcugucuuuaca

SEQ ID NO: 1124539 - RNA, 19 nt, Artificial Sequence
  Description of Artificial Sequence: Synthetic oligonucleotide
  Antisense strand to SEQ ID NO: 1124538
uguaaagacagccuugacu

SEQ ID NO: 1124540 - RNA, 19 nt, Artificial Sequence
  Description of Artificial Sequence: Synthetic oligonucleotide
  Sense strand starting at position 3152 of SEQ ID NO: 916024
gcugucuuuacaggagaua

SEQ ID NO: 1124541 - RNA, 19 nt, Artificial Sequence
  Description of Artificial Sequence: Synthetic oligonucleotide
  Antisense strand to SEQ ID NO: 1124540
uaucuccuguaaagacagc

SEQ ID NO: 1124542 - RNA, 19 nt, Artificial Sequence
  Description of Artificial Sequence: Synthetic oligonucleotide
  Sense strand starting at position 3421 of SEQ ID NO: 916024
cugggugagccguacacua

SEQ ID NO: 1124543 - RNA, 19 nt, Artificial Sequence
  Description of Artificial Sequence: Synthetic oligonucleotide
  Antisense strand to SEQ ID NO: 1124542
uaguguacggcucacccag

SEQ ID NO: 1124544 - RNA, 19 nt, Artificial Sequence
  Description of Artificial Sequence: Synthetic oligonucleotide
  Sense strand starting at position 3480 of SEQ ID NO: 916024
ggugcaagcgauuaacuca

SEQ ID NO: 1124545 - RNA, 19 nt, Artificial Sequence
  Description of Artificial Sequence: Synthetic oligonucleotide
  Antisense strand to SEQ ID NO: 1124544
ugaguuaaucgcuugcacc

SEQ ID NO: 1124546 - RNA, 19 nt, Artificial Sequence
  Description of Artificial Sequence: Synthetic oligonucleotide
  Sense strand starting at position 3658 of SEQ ID NO: 916024
cugauuguuaccgggcaga

SEQ ID NO: 1124547 - RNA, 19 nt, Artificial Sequence
  Description of Artificial Sequence: Synthetic oligonucleotide
  Antisense strand to SEQ ID NO: 1124546
ucugcccgguaacaaucag

SEQ ID NO: 1124548 - RNA, 19 nt, Artificial Sequence
  Description of Artificial Sequence: Synthetic oligonucleotide
  Sense strand starting at position 3661 of SEQ ID NO: 916024
auuguuaccgggcagauua

SEQ ID NO: 1124549 - RNA, 19 nt, Artificial Sequence
  Description of Artificial Sequence: Synthetic oligonucleotide
  Antisense strand to SEQ ID NO: 1124548
uaaucugcccgguaacaau

SEQ ID NO: 1124550 - RNA, 19 nt, Artificial Sequence
  Description of Artificial Sequence: Synthetic oligonucleotide
  Sense strand starting at position 3805 of SEQ ID NO: 916024
cgccuccgaccuuaucaau

SEQ ID NO: 1124551 - RNA, 19 nt, Artificial Sequence
  Description of Artificial Sequence: Synthetic oligonucleotide
  Antisense strand to SEQ ID NO: 1124550
auugauaaggucggaggcg

SEQ ID NO: 1124552 - RNA, 19 nt, Artificial Sequence
  Description of Artificial Sequence: Synthetic oligonucleotide
  Sense strand starting at position 3817 of SEQ ID NO: 916024
uaucaauagcagcgggaau

SEQ ID NO: 1124553 - RNA, 19 nt, Artificial Sequence
  Description of Artificial Sequence: Synthetic oligonucleotide
  Antisense strand to SEQ ID NO: 1124552
auucccgcugcuauugaua

SEQ ID NO: 1124554 - RNA, 19 nt, Artificial Sequence
  Description of Artificial Sequence: Synthetic oligonucleotide
  Sense strand starting at position 3893 of SEQ ID NO: 916024
gucuaauugcuguggaagc

SEQ ID NO: 1124555 - RNA, 19 nt, Artificial Sequence
  Description of Artificial Sequence: Synthetic oligonucleotide
  Antisense strand to SEQ ID NO: 1124554
gcuuccacagcaauuagac

SEQ ID NO: 1124556 - RNA, 19 nt, Artificial Sequence
  Description of Artificial Sequence: Synthetic oligonucleotide
  Sense strand starting at position 3903 of SEQ ID NO: 916024
uguggaagccauuagcuuu

SEQ ID NO: 1124557 - RNA, 19 nt, Artificial Sequence
  Description of Artificial Sequence: Synthetic oligonucleotide
  Antisense strand to SEQ ID NO: 1124556
aaagcuaauggcuuccaca

SEQ ID NO: 1124558 - RNA, 19 nt, Artificial Sequence
  Description of Artificial Sequence: Synthetic oligonucleotide
  Sense strand starting at position 209 of SEQ ID NO: 916025
caggaugcuuaggaaacaa

SEQ ID NO: 1124559 - RNA, 19 nt, Artificial Sequence
  Description of Artificial Sequence: Synthetic oligonucleotide
  Antisense strand to SEQ ID NO: 1124558
uuguuuccuaagcauccug

SEQ ID NO: 1124560 - RNA, 19 nt, Artificial Sequence
  Description of Artificial Sequence: Synthetic oligonucleotide
  Sense strand starting at position 795 of SEQ ID NO: 916025
ucaucacucuaaguaaguu

SEQ ID NO: 1124561 - RNA, 19 nt, Artificial Sequence
  Description of Artificial Sequence: Synthetic oligonucleotide
  Antisense strand to SEQ ID NO: 1124560
aacuuacuuagagugauga

SEQ ID NO: 1124562 - RNA, 19 nt, Artificial Sequence
  Description of Artificial Sequence: Synthetic oligonucleotide
  Sense strand starting at position 843 of SEQ ID NO: 916025
aacauuagauucgugggua

SEQ ID NO: 1124563 - RNA, 19 nt, Artificial Sequence
  Description of Artificial Sequence: Synthetic oligonucleotide
  Antisense strand to SEQ ID NO: 1124562
uacccacgaaucuaauguu

SEQ ID NO: 1124564 - RNA, 19 nt, Artificial Sequence
  Description of Artificial Sequence: Synthetic oligonucleotide
  Sense strand starting at position 1202 of SEQ ID NO: 916025
gaaucuuaacgucaccaga

SEQ ID NO: 1124565 - RNA, 19 nt, Artificial Sequence
  Description of Artificial Sequence: Synthetic oligonucleotide
  Antisense strand to SEQ ID NO: 1124564
ucuggugacguuaagauuc

SEQ ID NO: 1124566 - RNA, 19 nt, Artificial Sequence
  Description of Artificial Sequence: Synthetic oligonucleotide
  Sense strand starting at position 1247 of SEQ ID NO: 916025
guuggaagggcugguuaaa

SEQ ID NO: 1124567 - RNA, 19 nt, Artificial Sequence
  Description of Artificial Sequence: Synthetic oligonucleotide
  Antisense strand to SEQ ID NO: 1124566
uuuaaccagcccuuccaac

SEQ ID NO: 1124568 - RNA, 19 nt, Artificial Sequence
  Description of Artificial Sequence: Synthetic oligonucleotide
  Sense strand starting at position 1556 of SEQ ID NO: 916025
gccugcuggcgauaagaaa

SEQ ID NO: 1124569 - RNA, 19 nt, Artificial Sequence
  Description of Artificial Sequence: Synthetic oligonucleotide
  Antisense strand to SEQ ID NO: 1124568
uuucuuaucgccagcaggc

SEQ ID NO: 1124570 - RNA, 19 nt, Artificial Sequence
  Description of Artificial Sequence: Synthetic oligonucleotide
  Sense strand starting at position 1571 of SEQ ID NO: 916025
gaaaguucuuuaucugggu

SEQ ID NO: 1124571 - RNA, 19 nt, Artificial Sequence
  Description of Artificial Sequence: Synthetic oligonucleotide
  Antisense strand to SEQ ID NO: 1124570
acccagauaaagaacuuuc

SEQ ID NO: 1124572 - RNA, 19 nt, Artificial Sequence
  Description of Artificial Sequence: Synthetic oligonucleotide
  Sense strand starting at position 1624 of SEQ ID NO: 916025
cuguucucgagugaaauac

SEQ ID NO: 1124573 - RNA, 19 nt, Artificial Sequence
  Description of Artificial Sequence: Synthetic oligonucleotide
  Antisense strand to SEQ ID NO: 1124572
guauuucacucgagaacag

SEQ ID NO: 1124574 - RNA, 19 nt, Artificial Sequence
  Description of Artificial Sequence: Synthetic oligonucleotide
  Sense strand starting at position 1634 of SEQ ID NO: 916025
gugaaauaccaccguuugu

SEQ ID NO: 1124575 - RNA, 19 nt, Artificial Sequence
  Description of Artificial Sequence: Synthetic oligonucleotide
  Antisense strand to SEQ ID NO: 1124574
acaaacggugguauuucac

SEQ ID NO: 1124576 - RNA, 19 nt, Artificial Sequence
  Description of Artificial Sequence: Synthetic oligonucleotide
  Sense strand starting at position 1762 of SEQ ID NO: 916025
gcaacugcgacuugacgaa

SEQ ID NO: 1124577 - RNA, 19 nt, Artificial Sequence
  Description of Artificial Sequence: Synthetic oligonucleotide
  Antisense strand to SEQ ID NO: 1124576
uucgucaagucgcaguugc

SEQ ID NO: 1124578 - RNA, 19 nt, Artificial Sequence
  Description of Artificial Sequence: Synthetic oligonucleotide
  Sense strand starting at position 1843 of SEQ ID NO: 916025
gaccuacuuccggaaugca

SEQ ID NO: 1124579 - RNA, 19 nt, Artificial Sequence
  Description of Artificial Sequence: Synthetic oligonucleotide
  Antisense strand to SEQ ID NO: 1124578
ugcauuccggaaguagguc

SEQ ID NO: 1124580 - RNA, 19 nt, Artificial Sequence
  Description of Artificial Sequence: Synthetic oligonucleotide
  Sense strand starting at position 1881 of SEQ ID NO: 916025
cgaguuaacagccaauaug

SEQ ID NO: 1124581 - RNA, 19 nt, Artificial Sequence
  Description of Artificial Sequence: Synthetic oligonucleotide
  Antisense strand to SEQ ID NO: 1124580
cauauuggcuguuaacucg

SEQ ID NO: 1124582 - RNA, 19 nt, Artificial Sequence
  Description of Artificial Sequence: Synthetic oligonucleotide
  Sense strand starting at position 1965 of SEQ ID NO: 916025
guuagaaguucuuucuuaa

SEQ ID NO: 1124583 - RNA, 19 nt, Artificial Sequence
  Description of Artificial Sequence: Synthetic oligonucleotide
  Antisense strand to SEQ ID NO: 1124582
uuaagaaagaacuucuaac

SEQ ID NO: 1124584 - RNA, 19 nt, Artificial Sequence
  Description of Artificial Sequence: Synthetic oligonucleotide
  Sense strand starting at position 2090 of SEQ ID NO: 916025
cgguucuuacgagaacuuu

SEQ ID NO: 1124585 - RNA, 19 nt, Artificial Sequence
  Description of Artificial Sequence: Synthetic oligonucleotide
  Antisense strand to SEQ ID NO: 1124584
aaaguucucguaagaaccg

SEQ ID NO: 1124586 - RNA, 19 nt, Artificial Sequence
  Description of Artificial Sequence: Synthetic oligonucleotide
  Sense strand starting at position 2096 of SEQ ID NO: 916025
uuacgagaacuuuguuugu

SEQ ID NO: 1124587 - RNA, 19 nt, Artificial Sequence
  Description of Artificial Sequence: Synthetic oligonucleotide
  Antisense strand to SEQ ID NO: 1124586
acaaacaaaguucucguaa

SEQ ID NO: 1124588 - RNA, 19 nt, Artificial Sequence
  Description of Artificial Sequence: Synthetic oligonucleotide
  Sense strand starting at position 2098 of SEQ ID NO: 916025
acgagaacuuuguuuguga

SEQ ID NO: 1124589 - RNA, 19 nt, Artificial Sequence
  Description of Artificial Sequence: Synthetic oligonucleotide
  Antisense strand to SEQ ID NO: 1124588
ucacaaacaaaguucucgu

SEQ ID NO: 1124590 - RNA, 19 nt, Artificial Sequence
  Description of Artificial Sequence: Synthetic oligonucleotide
  Sense strand starting at position 2099 of SEQ ID NO: 916025
cgagaacuuuguuugugac

SEQ ID NO: 1124591 - RNA, 19 nt, Artificial Sequence
  Description of Artificial Sequence: Synthetic oligonucleotide
  Antisense strand to SEQ ID NO: 1124590
gucacaaacaaaguucucg

SEQ ID NO: 1124592 - RNA, 19 nt, Artificial Sequence
  Description of Artificial Sequence: Synthetic oligonucleotide
  Sense strand starting at position 2525 of SEQ ID NO: 916025
ggcucuuucguauaucgga

SEQ ID NO: 1124593 - RNA, 19 nt, Artificial Sequence
  Description of Artificial Sequence: Synthetic oligonucleotide
  Antisense strand to SEQ ID NO: 1124592
uccgauauacgaaagagcc

SEQ ID NO: 1124594 - RNA, 19 nt, Artificial Sequence
  Description of Artificial Sequence: Synthetic oligonucleotide
  Sense strand starting at position 2533 of SEQ ID NO: 916025
cguauaucggagcauaaag

SEQ ID NO: 1124595 - RNA, 19 nt, Artificial Sequence
  Description of Artificial Sequence: Synthetic oligonucleotide
  Antisense strand to SEQ ID NO: 1124594
cuuuaugcuccgauauacg

SEQ ID NO: 1124596 - RNA, 19 nt, Artificial Sequence
  Description of Artificial Sequence: Synthetic oligonucleotide
  Sense strand starting at position 2552 of SEQ ID NO: 916025
caacuagaaggcuguuaca

SEQ ID NO: 1124597 - RNA, 19 nt, Artificial Sequence
  Description of Artificial Sequence: Synthetic oligonucleotide
  Antisense strand to SEQ ID NO: 1124596
uguaacagccuucuaguug

SEQ ID NO: 1124598 - RNA, 19 nt, Artificial Sequence
  Description of Artificial Sequence: Synthetic oligonucleotide
  Sense strand starting at position 2565 of SEQ ID NO: 916025
guuacauuguugguagcaa

SEQ ID NO: 1124599 - RNA, 19 nt, Artificial Sequence
  Description of Artificial Sequence: Synthetic oligonucleotide
  Antisense strand to SEQ ID NO: 1124598
uugcuaccaacaauguaac

SEQ ID NO: 1124600 - RNA, 19 nt, Artificial Sequence
  Description of Artificial Sequence: Synthetic oligonucleotide
  Sense strand starting at position 2654 of SEQ ID NO: 916025
uuguucgccagugauccaa

SEQ ID NO: 1124601 - RNA, 19 nt, Artificial Sequence
  Description of Artificial Sequence: Synthetic oligonucleotide
  Antisense strand to SEQ ID NO: 1124600
uuggaucacuggcgaacaa

SEQ ID NO: 1124602 - RNA, 19 nt, Artificial Sequence
  Description of Artificial Sequence: Synthetic oligonucleotide
  Sense strand starting at position 2714 of SEQ ID NO: 916025
uuacaugucccaggcacaa

SEQ ID NO: 1124603 - RNA, 19 nt, Artificial Sequence
  Description of Artificial Sequence: Synthetic oligonucleotide
  Antisense strand to SEQ ID NO: 1124602
uugugccugggacauguaa

SEQ ID NO: 1124604 - RNA, 19 nt, Artificial Sequence
  Description of Artificial Sequence: Synthetic oligonucleotide
  Sense strand starting at position 2797 of SEQ ID NO: 916025
uugcgaaugggugaacuaa

SEQ ID NO: 1124605 - RNA, 19 nt, Artificial Sequence
  Description of Artificial Sequence: Synthetic oligonucleotide
  Antisense strand to SEQ ID NO: 1124604
uuaguucacccauucgcaa

SEQ ID NO: 1124606 - RNA, 19 nt, Artificial Sequence
  Description of Artificial Sequence: Synthetic oligonucleotide
  Sense strand starting at position 3176 of SEQ ID NO: 916025
uugcgagacuccuucucaa

SEQ ID NO: 1124607 - RNA, 19 nt, Artificial Sequence
  Description of Artificial Sequence: Synthetic oligonucleotide
  Antisense strand to SEQ ID NO: 1124606
uugagaaggagucucgcaa

SEQ ID NO: 1124608 - RNA, 19 nt, Artificial Sequence
  Description of Artificial Sequence: Synthetic oligonucleotide
  Sense strand starting at position 3245 of SEQ ID NO: 916025
uuuggugcugggcaagaua

SEQ ID NO: 1124609 - RNA, 19 nt, Artificial Sequence
  Description of Artificial Sequence: Synthetic oligonucleotide
  Antisense strand to SEQ ID NO: 1124608
uaucuugcccagcaccaaa

SEQ ID NO: 1124610 - RNA, 19 nt, Artificial Sequence
  Description of Artificial Sequence: Synthetic oligonucleotide
  Sense strand starting at position 3253 of SEQ ID NO: 916025
ugggcaagauaguuaacuu

SEQ ID NO: 1124611 - RNA, 19 nt, Artificial Sequence
  Description of Artificial Sequence: Synthetic oligonucleotide
  Antisense strand to SEQ ID NO: 1124610
aaguuaacuaucuugccca

SEQ ID NO: 1124612 - RNA, 19 nt, Artificial Sequence
  Description of Artificial Sequence: Synthetic oligonucleotide
  Sense strand starting at position 3287 of SEQ ID NO: 916025
cugugauaauaccuauguu

SEQ ID NO: 1124613 - RNA, 19 nt, Artificial Sequence
  Description of Artificial Sequence: Synthetic oligonucleotide
  Antisense strand to SEQ ID NO: 1124612
aacauagguauuaucacag

SEQ ID NO: 1124614 - RNA, 19 nt, Artificial Sequence
  Description of Artificial Sequence: Synthetic oligonucleotide
  Sense strand starting at position 3356 of SEQ ID NO: 916025
aguaccuaguacuuagaaa

SEQ ID NO: 1124615 - RNA, 19 nt, Artificial Sequence
  Description of Artificial Sequence: Synthetic oligonucleotide
  Antisense strand to SEQ ID NO: 1124614
uuucuaaguacuagguacu

SEQ ID NO: 1124616 - RNA, 19 nt, Artificial Sequence
  Description of Artificial Sequence: Synthetic oligonucleotide
  Sense strand starting at position 3471 of SEQ ID NO: 916025
aagcccuggcccuaguaaa

SEQ ID NO: 1124617 - RNA, 19 nt, Artificial Sequence
  Description of Artificial Sequence: Synthetic oligonucleotide
  Antisense strand to SEQ ID NO: 1124616
uuuacuagggccagggcuu

SEQ ID NO: 1124618 - RNA, 19 nt, Artificial Sequence
  Description of Artificial Sequence: Synthetic oligonucleotide
  Sense strand starting at position 3481 of SEQ ID NO: 916025
ccuaguaaauaguccauaa

SEQ ID NO: 1124619 - RNA, 19 nt, Artificial Sequence
  Description of Artificial Sequence: Synthetic oligonucleotide
  Antisense strand to SEQ ID NO: 1124618
uuauggacuauuuacuagg

SEQ ID NO: 1124620 - RNA, 19 nt, Artificial Sequence
  Description of Artificial Sequence: Synthetic oligonucleotide
  Sense strand starting at position 3550 of SEQ ID NO: 916025
uugggaguuugcccucacu

SEQ ID NO: 1124621 - RNA, 19 nt, Artificial Sequence
  Description of Artificial Sequence: Synthetic oligonucleotide
  Antisense strand to SEQ ID NO: 1124620
agugagggcaaacucccaa

SEQ ID NO: 1124622 - RNA, 19 nt, Artificial Sequence
  Description of Artificial Sequence: Synthetic oligonucleotide
  Sense strand starting at position 3553 of SEQ ID NO: 916025
ggaguuugcccucacuaca

SEQ ID NO: 1124623 - RNA, 19 nt, Artificial Sequence
  Description of Artificial Sequence: Synthetic oligonucleotide
  Antisense strand to SEQ ID NO: 1124622
uguagugagggcaaacucc

SEQ ID NO: 1124624 - RNA, 19 nt, Artificial Sequence
  Description of Artificial Sequence: Synthetic oligonucleotide
  Sense strand starting at position 3575 of SEQ ID NO: 916025
cuaauaaguguagaucuua

SEQ ID NO: 1124625 - RNA, 19 nt, Artificial Sequence
  Description of Artificial Sequence: Synthetic oligonucleotide
  Antisense strand to SEQ ID NO: 1124624
uaagaucuacacuuauuag

SEQ ID NO: 1124626 - RNA, 19 nt, Artificial Sequence
  Description of Artificial Sequence: Synthetic oligonucleotide
  Sense strand starting at position 3753 of SEQ ID NO: 916025
cuaggcaugggugaucuua

SEQ ID NO: 1124627 - RNA, 19 nt, Artificial Sequence
  Description of Artificial Sequence: Synthetic oligonucleotide
  Antisense strand to SEQ ID NO: 1124626
uaagaucacccaugccuag

SEQ ID NO: 1124628 - RNA, 19 nt, Artificial Sequence
  Description of Artificial Sequence: Synthetic oligonucleotide
  Sense strand starting at position 3755 of SEQ ID NO: 916025
aggcaugggugaucuuacu

SEQ ID NO: 1124629 - RNA, 19 nt, Artificial Sequence
  Description of Artificial Sequence: Synthetic oligonucleotide
  Antisense strand to SEQ ID NO: 1124628
aguaagaucacccaugccu

SEQ ID NO: 1124630 - RNA, 19 nt, Artificial Sequence
  Description of Artificial Sequence: Synthetic oligonucleotide
  Sense strand starting at position 3763 of SEQ ID NO: 916025
gugaucuuacuaugcuuga

SEQ ID NO: 1124631 - RNA, 19 nt, Artificial Sequence
  Description of Artificial Sequence: Synthetic oligonucleotide
  Antisense strand to SEQ ID NO: 1124630
ucaagcauaguaagaucac

SEQ ID NO: 1124632 - RNA, 19 nt, Artificial Sequence
  Description of Artificial Sequence: Synthetic oligonucleotide
  Sense strand starting at position 3764 of SEQ ID NO: 916025
ugaucuuacuaugcuugau

SEQ ID NO: 1124633 - RNA, 19 nt, Artificial Sequence
  Description of Artificial Sequence: Synthetic oligonucleotide
  Antisense strand to SEQ ID NO: 1124632
aucaagcauaguaagauca

SEQ ID NO: 1124634 - RNA, 19 nt, Artificial Sequence
  Description of Artificial Sequence: Synthetic oligonucleotide
  Sense strand starting at position 3767 of SEQ ID NO: 916025
ucuuacuaugcuugauugu

SEQ ID NO: 1124635 - RNA, 19 nt, Artificial Sequence
  Description of Artificial Sequence: Synthetic oligonucleotide
  Antisense strand to SEQ ID NO: 1124634
acaaucaagcauaguaaga

SEQ ID NO: 1124636 - RNA, 19 nt, Artificial Sequence
  Description of Artificial Sequence: Synthetic oligonucleotide
  Sense strand starting at position 3815 of SEQ ID NO: 916025
ucaggucaccucugccaua

SEQ ID NO: 1124637 - RNA, 19 nt, Artificial Sequence
  Description of Artificial Sequence: Synthetic oligonucleotide
  Antisense strand to SEQ ID NO: 1124636
uauggcagaggugaccuga

SEQ ID NO: 1124638 - RNA, 19 nt, Artificial Sequence
  Description of Artificial Sequence: Synthetic oligonucleotide
  Sense strand starting at position 29 of SEQ ID NO: 916026
guauuauuagguuggugaa

SEQ ID NO: 1124639 - RNA, 19 nt, Artificial Sequence
  Description of Artificial Sequence: Synthetic oligonucleotide
  Antisense strand to SEQ ID NO: 1124638
uucaccaaccuaauaauac

SEQ ID NO: 1124640 - RNA, 19 nt, Artificial Sequence
  Description of Artificial Sequence: Synthetic oligonucleotide
  Sense strand starting at position 30 of SEQ ID NO: 916026
uauuauuagguuggugaaa

SEQ ID NO: 1124641 - RNA, 19 nt, Artificial Sequence
  Description of Artificial Sequence: Synthetic oligonucleotide
  Antisense strand to SEQ ID NO: 1124640
uuucaccaaccuaauaaua

SEQ ID NO: 1124642 - RNA, 19 nt, Artificial Sequence
  Description of Artificial Sequence: Synthetic oligonucleotide
  Sense strand starting at position 215 of SEQ ID NO: 916026
gcacaucuugaagaaugca

SEQ ID NO: 1124643 - RNA, 19 nt, Artificial Sequence
  Description of Artificial Sequence: Synthetic oligonucleotide
  Antisense strand to SEQ ID NO: 1124642
ugcauucuucaagaugugc

SEQ ID NO: 1124644 - RNA, 19 nt, Artificial Sequence
  Description of Artificial Sequence: Synthetic oligonucleotide
  Sense strand starting at position 266 of SEQ ID NO: 916026
guauaaacacucuggauag

SEQ ID NO: 1124645 - RNA, 19 nt, Artificial Sequence
  Description of Artificial Sequence: Synthetic oligonucleotide
  Antisense strand to SEQ ID NO: 1124644
cuauccagaguguuuauac

SEQ ID NO: 1124646 - RNA, 19 nt, Artificial Sequence
  Description of Artificial Sequence: Synthetic oligonucleotide
  Sense strand starting at position 472 of SEQ ID NO: 916026
aggauaauauuugacaguu

SEQ ID NO: 1124647 - RNA, 19 nt, Artificial Sequence
  Description of Artificial Sequence: Synthetic oligonucleotide
  Antisense strand to SEQ ID NO: 1124646
aacugucaaauauuauccu

SEQ ID NO: 1124648 - RNA, 19 nt, Artificial Sequence
  Description of Artificial Sequence: Synthetic oligonucleotide
  Sense strand starting at position 499 of SEQ ID NO: 916026
aguguuaucuacuuacacu

SEQ ID NO: 1124649 - RNA, 19 nt, Artificial Sequence
  Description of Artificial Sequence: Synthetic oligonucleotide
  Antisense strand to SEQ ID NO: 1124648
aguguaaguagauaacacu

SEQ ID NO: 1124650 - RNA, 19 nt, Artificial Sequence
  Description of Artificial Sequence: Synthetic oligonucleotide
  Sense strand starting at position 644 of SEQ ID NO: 916026
agaagauguacgugcaaau

SEQ ID NO: 1124651 - RNA, 19 nt, Artificial Sequence
  Description of Artificial Sequence: Synthetic oligonucleotide
  Antisense strand to SEQ ID NO: 1124650
auuugcacguacaucuucu

SEQ ID NO: 1124652 - RNA, 19 nt, Artificial Sequence
  Description of Artificial Sequence: Synthetic oligonucleotide
  Sense strand starting at position 651 of SEQ ID NO: 916026
guacgugcaaaugauaaca

SEQ ID NO: 1124653 - RNA, 19 nt, Artificial Sequence
  Description of Artificial Sequence: Synthetic oligonucleotide
  Antisense strand to SEQ ID NO: 1124652
uguuaucauuugcacguac

SEQ ID NO: 1124654 - RNA, 19 nt, Artificial Sequence
  Description of Artificial Sequence: Synthetic oligonucleotide
  Sense strand starting at position 662 of SEQ ID NO: 916026
ugauaacaguacuugucau

SEQ ID NO: 1124655 - RNA, 19 nt, Artificial Sequence
  Description of Artificial Sequence: Synthetic oligonucleotide
  Antisense strand to SEQ ID NO: 1124654
augacaaguacuguuauca

SEQ ID NO: 1124656 - RNA, 19 nt, Artificial Sequence
  Description of Artificial Sequence: Synthetic oligonucleotide
  Sense strand starting at position 735 of SEQ ID NO: 916026
aggagaacauacuugucuu

SEQ ID NO: 1124657 - RNA, 19 nt, Artificial Sequence
  Description of Artificial Sequence: Synthetic oligonucleotide
  Antisense strand to SEQ ID NO: 1124656
aagacaaguauguucuccu

SEQ ID NO: 1124658 - RNA, 19 nt, Artificial Sequence
  Description of Artificial Sequence: Synthetic oligonucleotide
  Sense strand starting at position 1432 of SEQ ID NO: 916026
aggcauuccguuuaaguac

SEQ ID NO: 1124659 - RNA, 19 nt, Artificial Sequence
  Description of Artificial Sequence: Synthetic oligonucleotide
  Antisense strand to SEQ ID NO: 1124658
guacuuaaacggaaugccu

SEQ ID NO: 1124660 - RNA, 19 nt, Artificial Sequence
  Description of Artificial Sequence: Synthetic oligonucleotide
  Sense strand starting at position 1477 of SEQ ID NO: 916026
gccuuccacuagucuuaca

SEQ ID NO: 1124661 - RNA, 19 nt, Artificial Sequence
  Description of Artificial Sequence: Synthetic oligonucleotide
  Antisense strand to SEQ ID NO: 1124660
uguaagacuaguggaaggc

SEQ ID NO: 1124662 - RNA, 19 nt, Artificial Sequence
  Description of Artificial Sequence: Synthetic oligonucleotide
  Sense strand starting at position 1546 of SEQ ID NO: 916026
aagcuuccaucaucggaga

SEQ ID NO: 1124663 - RNA, 19 nt, Artificial Sequence
  Description of Artificial Sequence: Synthetic oligonucleotide
  Antisense strand to SEQ ID NO: 1124662
ucuccgaugauggaagcuu

SEQ ID NO: 1124664 - RNA, 19 nt, Artificial Sequence
  Description of Artificial Sequence: Synthetic oligonucleotide
  Sense strand starting at position 1547 of SEQ ID NO: 916026
agcuuccaucaucggagaa

SEQ ID NO: 1124665 - RNA, 19 nt, Artificial Sequence
  Description of Artificial Sequence: Synthetic oligonucleotide
  Antisense strand to SEQ ID NO: 1124664
uucuccgaugauggaagcu

SEQ ID NO: 1124666 - RNA, 19 nt, Artificial Sequence
  Description of Artificial Sequence: Synthetic oligonucleotide
  Sense strand starting at position 1548 of SEQ ID NO: 916026
gcuuccaucaucggagaaa

SEQ ID NO: 1124667 - RNA, 19 nt, Artificial Sequence
  Description of Artificial Sequence: Synthetic oligonucleotide
  Antisense strand to SEQ ID NO: 1124666
uuucuccgaugauggaagc

SEQ ID NO: 1124668 - RNA, 19 nt, Artificial Sequence
  Description of Artificial Sequence: Synthetic oligonucleotide
  Sense strand starting at position 1549 of SEQ ID NO: 916026
cuuccaucaucggagaaag

SEQ ID NO: 1124669 - RNA, 19 nt, Artificial Sequence
  Description of Artificial Sequence: Synthetic oligonucleotide
  Antisense strand to SEQ ID NO: 1124668
cuuucuccgaugauggaag

SEQ ID NO: 1124670 - RNA, 19 nt, Artificial Sequence
  Description of Artificial Sequence: Synthetic oligonucleotide
  Sense strand starting at position 1642 of SEQ ID NO: 916026
auuauacaccagcgagauu

SEQ ID NO: 1124671 - RNA, 19 nt, Artificial Sequence
  Description of Artificial Sequence: Synthetic oligonucleotide
  Antisense strand to SEQ ID NO: 1124670
aaucucgcugguguauaau

SEQ ID NO: 1124672 - RNA, 19 nt, Artificial Sequence
  Description of Artificial Sequence: Synthetic oligonucleotide
  Sense strand starting at position 1655 of SEQ ID NO: 916026
gagauugacaguuacguac

SEQ ID NO: 1124673 - RNA, 19 nt, Artificial Sequence
  Description of Artificial Sequence: Synthetic oligonucleotide
  Antisense strand to SEQ ID NO: 1124672
guacguaacugucaaucuc

SEQ ID NO: 1124674 - RNA, 19 nt, Artificial Sequence
  Description of Artificial Sequence: Synthetic oligonucleotide
  Sense strand starting at position 2400 of SEQ ID NO: 916026
uugccauagaaauggaguu

SEQ ID NO: 1124675 - RNA, 19 nt, Artificial Sequence
  Description of Artificial Sequence: Synthetic oligonucleotide
  Antisense strand to SEQ ID NO: 1124674
aacuccauuucuauggcaa

SEQ ID NO: 1124676 - RNA, 19 nt, Artificial Sequence
  Description of Artificial Sequence: Synthetic oligonucleotide
  Sense strand starting at position 2412 of SEQ ID NO: 916026
uggaguucuugcucacacu

SEQ ID NO: 1124677 - RNA, 19 nt, Artificial Sequence
  Description of Artificial Sequence: Synthetic oligonucleotide
  Antisense strand to SEQ ID NO: 1124676
agugugagcaagaacucca

SEQ ID NO: 1124678 - RNA, 19 nt, Artificial Sequence
  Description of Artificial Sequence: Synthetic oligonucleotide
  Sense strand starting at position 2413 of SEQ ID NO: 916026
ggaguucuugcucacacuu

SEQ ID NO: 1124679 - RNA, 19 nt, Artificial Sequence
  Description of Artificial Sequence: Synthetic oligonucleotide
  Antisense strand to SEQ ID NO: 1124678
aagugugagcaagaacucc

SEQ ID NO: 1124680 - RNA, 19 nt, Artificial Sequence
  Description of Artificial Sequence: Synthetic oligonucleotide
  Sense strand starting at position 2539 of SEQ ID NO: 916026
acuuccugucuccaggaaa

SEQ ID NO: 1124681 - RNA, 19 nt, Artificial Sequence
  Description of Artificial Sequence: Synthetic oligonucleotide
  Antisense strand to SEQ ID NO: 1124680
uuuccuggagacaggaagu

SEQ ID NO: 1124682 - RNA, 19 nt, Artificial Sequence
  Description of Artificial Sequence: Synthetic oligonucleotide
  Sense strand starting at position 2646 of SEQ ID NO: 916026
uuuacugaguauuacagaa

SEQ ID NO: 1124683 - RNA, 19 nt, Artificial Sequence
  Description of Artificial Sequence: Synthetic oligonucleotide
  Antisense strand to SEQ ID NO: 1124682
uucuguaauacucaguaaa

SEQ ID NO: 1124684 - RNA, 19 nt, Artificial Sequence
  Description of Artificial Sequence: Synthetic oligonucleotide
  Sense strand starting at position 2648 of SEQ ID NO: 916026
uacugaguauuacagaaga

SEQ ID NO: 1124685 - RNA, 19 nt, Artificial Sequence
  Description of Artificial Sequence: Synthetic oligonucleotide
  Antisense strand to SEQ ID NO: 1124684
ucuucuguaauacucagua

SEQ ID NO: 1124686 - RNA, 19 nt, Artificial Sequence
  Description of Artificial Sequence: Synthetic oligonucleotide
  Sense strand starting at position 2699 of SEQ ID NO: 916026
guuauuucuaacuggacgu

SEQ ID NO: 1124687 - RNA, 19 nt, Artificial Sequence
  Description of Artificial Sequence: Synthetic oligonucleotide
  Antisense strand to SEQ ID NO: 1124686
acguccaguuagaaauaac

SEQ ID NO: 1124688 - RNA, 19 nt, Artificial Sequence
  Description of Artificial Sequence: Synthetic oligonucleotide
  Sense strand starting at position 2734 of SEQ ID NO: 916026
ggucuugugaacugagaga

SEQ ID NO: 1124689 - RNA, 19 nt, Artificial Sequence
  Description of Artificial Sequence: Synthetic oligonucleotide
  Antisense strand to SEQ ID NO: 1124688
ucucucaguucacaagacc

SEQ ID NO: 1124690 - RNA, 19 nt, Artificial Sequence
  Description of Artificial Sequence: Synthetic oligonucleotide
  Sense strand starting at position 2749 of SEQ ID NO: 916026
gagagacauuuauaguauu

SEQ ID NO: 1124691 - RNA, 19 nt, Artificial Sequence
  Description of Artificial Sequence: Synthetic oligonucleotide
  Antisense strand to SEQ ID NO: 1124690
aauacuauaaaugucucuc

SEQ ID NO: 1124692 - RNA, 19 nt, Artificial Sequence
  Description of Artificial Sequence: Synthetic oligonucleotide
  Sense strand starting at position 2845 of SEQ ID NO: 916026
acgacuuauuagucuuugu

SEQ ID NO: 1124693 - RNA, 19 nt, Artificial Sequence
  Description of Artificial Sequence: Synthetic oligonucleotide
  Antisense strand to SEQ ID NO: 1124692
acaaagacuaauaagucgu

SEQ ID NO: 1124694 - RNA, 19 nt, Artificial Sequence
  Description of Artificial Sequence: Synthetic oligonucleotide
  Sense strand starting at position 2976 of SEQ ID NO: 916026
uaaguugacggaugucuaa

SEQ ID NO: 1124695 - RNA, 19 nt, Artificial Sequence
  Description of Artificial Sequence: Synthetic oligonucleotide
  Antisense strand to SEQ ID NO: 1124694
uuagacauccgucaacuua

SEQ ID NO: 1124696 - RNA, 19 nt, Artificial Sequence
  Description of Artificial Sequence: Synthetic oligonucleotide
  Sense strand starting at position 3050 of SEQ ID NO: 916026
uugacuaacugaucgcuua

SEQ ID NO: 1124697 - RNA, 19 nt, Artificial Sequence
  Description of Artificial Sequence: Synthetic oligonucleotide
  Antisense strand to SEQ ID NO: 1124696
uaagcgaucaguuagucaa

SEQ ID NO: 1124698 - RNA, 19 nt, Artificial Sequence
  Description of Artificial Sequence: Synthetic oligonucleotide
  Sense strand starting at position 3051 of SEQ ID NO: 916026
ugacuaacugaucgcuuaa

SEQ ID NO: 1124699 - RNA, 19 nt, Artificial Sequence
  Description of Artificial Sequence: Synthetic oligonucleotide
  Antisense strand to SEQ ID NO: 1124698
uuaagcgaucaguuaguca

SEQ ID NO: 1124700 - RNA, 19 nt, Artificial Sequence
  Description of Artificial Sequence: Synthetic oligonucleotide
  Sense strand starting at position 3577 of SEQ ID NO: 916026
uccucuaaguggguugauu

SEQ ID NO: 1124701 - RNA, 19 nt, Artificial Sequence
  Description of Artificial Sequence: Synthetic oligonucleotide
  Antisense strand to SEQ ID NO: 1124700
aaucaacccacuuagagga

SEQ ID NO: 1124702 - RNA, 19 nt, Artificial Sequence
  Description of Artificial Sequence: Synthetic oligonucleotide
  Sense strand starting at position 3767 of SEQ ID NO: 916026
auuggaauccaugggcaua

SEQ ID NO: 1124703 - RNA, 19 nt, Artificial Sequence
  Description of Artificial Sequence: Synthetic oligonucleotide
  Antisense strand to SEQ ID NO: 1124702
uaugcccauggauuccaau

SEQ ID NO: 1124704 - RNA, 19 nt, Artificial Sequence
  Description of Artificial Sequence: Synthetic oligonucleotide
  Sense strand starting at position 3778 of SEQ ID NO: 916026
ugggcauacccauacauau

SEQ ID NO: 1124705 - RNA, 19 nt, Artificial Sequence
  Description of Artificial Sequence: Synthetic oligonucleotide
  Antisense strand to SEQ ID NO: 1124704
auauguauggguaugccca

SEQ ID NO: 1124706 - RNA, 19 nt, Artificial Sequence
  Description of Artificial Sequence: Synthetic oligonucleotide
  Sense strand starting at position 3804 of SEQ ID NO: 916026
gucacaauacgauagcaga

SEQ ID NO: 1124707 - RNA, 19 nt, Artificial Sequence
  Description of Artificial Sequence: Synthetic oligonucleotide
  Antisense strand to SEQ ID NO: 1124706
ucugcuaucguauugugac

SEQ ID NO: 1124708 - RNA, 19 nt, Artificial Sequence
  Description of Artificial Sequence: Synthetic oligonucleotide
  Sense strand starting at position 3822 of SEQ ID NO: 916026
aguuauguggcagaguuga

SEQ ID NO: 1124709 - RNA, 19 nt, Artificial Sequence
  Description of Artificial Sequence: Synthetic oligonucleotide
  Antisense strand to SEQ ID NO: 1124708
ucaacucugccacauaacu

SEQ ID NO: 1124710 - RNA, 19 nt, Artificial Sequence
  Description of Artificial Sequence: Synthetic oligonucleotide
  Sense strand starting at position 3837 of SEQ ID NO: 916026
uugaguagucaugacaggu

SEQ ID NO: 1124711 - RNA, 19 nt, Artificial Sequence
  Description of Artificial Sequence: Synthetic oligonucleotide
  Antisense strand to SEQ ID NO: 1124710
accugucaugacuacucaa

SEQ ID NO: 1124712 - RNA, 19 nt, Artificial Sequence
  Description of Artificial Sequence: Synthetic oligonucleotide
  Sense strand starting at position 3841 of SEQ ID NO: 916026
guagucaugacagguugaa

SEQ ID NO: 1124713 - RNA, 19 nt, Artificial Sequence
  Description of Artificial Sequence: Synthetic oligonucleotide
  Antisense strand to SEQ ID NO: 1124712
uucaaccugucaugacuac

SEQ ID NO: 1124714 - RNA, 19 nt, Artificial Sequence
  Description of Artificial Sequence: Synthetic oligonucleotide
  Sense strand starting at position 3956 of SEQ ID NO: 916026
gggaguucaggcuggacaa

SEQ ID NO: 1124715 - RNA, 19 nt, Artificial Sequence
  Description of Artificial Sequence: Synthetic oligonucleotide
  Antisense strand to SEQ ID NO: 1124714
uuguccagccugaacuccc

SEQ ID NO: 1124716 - RNA, 19 nt, Artificial Sequence
  Description of Artificial Sequence: Synthetic oligonucleotide
  Sense strand starting at position 3957 of SEQ ID NO: 916026
ggaguucaggcuggacaaa

SEQ ID NO: 1124717 - RNA, 19 nt, Artificial Sequence
  Description of Artificial Sequence: Synthetic oligonucleotide
  Antisense strand to SEQ ID NO: 1124716
uuuguccagccugaacucc

SEQ ID NO: 1124718 - RNA, 19 nt, Artificial Sequence
  Description of Artificial Sequence: Synthetic oligonucleotide
  Sense strand starting at position 12 of SEQ ID NO: 916027
guauaaacacucuggauag

SEQ ID NO: 1124719 - RNA, 19 nt, Artificial Sequence
  Description of Artificial Sequence: Synthetic oligonucleotide
  Antisense strand to SEQ ID NO: 1124718
cuauccagaguguuuauac

SEQ ID NO: 1124720 - RNA, 19 nt, Artificial Sequence
  Description of Artificial Sequence: Synthetic oligonucleotide
  Sense strand starting at position 218 of SEQ ID NO: 916027
aggauaauauuugacaguu

SEQ ID NO: 1124721 - RNA, 19 nt, Artificial Sequence
  Description of Artificial Sequence: Synthetic oligonucleotide
  Antisense strand to SEQ ID NO: 1124720
aacugucaaauauuauccu

SEQ ID NO: 1124722 - RNA, 19 nt, Artificial Sequence
  Description of Artificial Sequence: Synthetic oligonucleotide
  Sense strand starting at position 245 of SEQ ID NO: 916027
aguguuaucuacuuacacu

SEQ ID NO: 1124723 - RNA, 19 nt, Artificial Sequence
  Description of Artificial Sequence: Synthetic oligonucleotide
  Antisense strand to SEQ ID NO: 1124722
aguguaaguagauaacacu

SEQ ID NO: 1124724 - RNA, 19 nt, Artificial Sequence
  Description of Artificial Sequence: Synthetic oligonucleotide
  Sense strand starting at position 390 of SEQ ID NO: 916027
agaagauguacgugcaaau

SEQ ID NO: 1124725 - RNA, 19 nt, Artificial Sequence
  Description of Artificial Sequence: Synthetic oligonucleotide
  Antisense strand to SEQ ID NO: 1124724
auuugcacguacaucuucu

SEQ ID NO: 1124726 - RNA, 19 nt, Artificial Sequence
  Description of Artificial Sequence: Synthetic oligonucleotide
  Sense strand starting at position 397 of SEQ ID NO: 916027
guacgugcaaaugauaaca

SEQ ID NO: 1124727 - RNA, 19 nt, Artificial Sequence
  Description of Artificial Sequence: Synthetic oligonucleotide
  Antisense strand to SEQ ID NO: 1124726
uguuaucauuugcacguac

SEQ ID NO: 1124728 - RNA, 19 nt, Artificial Sequence
  Description of Artificial Sequence: Synthetic oligonucleotide
  Sense strand starting at position 408 of SEQ ID NO: 916027
ugauaacaguacuugucau

SEQ ID NO: 1124729 - RNA, 19 nt, Artificial Sequence
  Description of Artificial Sequence: Synthetic oligonucleotide
  Antisense strand to SEQ ID NO: 1124728
augacaaguacuguuauca

SEQ ID NO: 1124730 - RNA, 19 nt, Artificial Sequence
  Description of Artificial Sequence: Synthetic oligonucleotide
  Sense strand starting at position 481 of SEQ ID NO: 916027
aggagaacauacuugucuu

SEQ ID NO: 1124731 - RNA, 19 nt, Artificial Sequence
  Description of Artificial Sequence: Synthetic oligonucleotide
  Antisense strand to SEQ ID NO: 1124730
aagacaaguauguucuccu

SEQ ID NO: 1124732 - RNA, 19 nt, Artificial Sequence
  Description of Artificial Sequence: Synthetic oligonucleotide
  Sense strand starting at position 1178 of SEQ ID NO: 916027
aggcauuccguuuaaguac

SEQ ID NO: 1124733 - RNA, 19 nt, Artificial Sequence
  Description of Artificial Sequence: Synthetic oligonucleotide
  Antisense strand to SEQ ID NO: 1124732
guacuuaaacggaaugccu

SEQ ID NO: 1124734 - RNA, 19 nt, Artificial Sequence
  Description of Artificial Sequence: Synthetic oligonucleotide
  Sense strand starting at position 1223 of SEQ ID NO: 916027
gccuuccacuagucuuaca

SEQ ID NO: 1124735 - RNA, 19 nt, Artificial Sequence
  Description of Artificial Sequence: Synthetic oligonucleotide
  Antisense strand to SEQ ID NO: 1124734
uguaagacuaguggaaggc

SEQ ID NO: 1124736 - RNA, 19 nt, Artificial Sequence
  Description of Artificial Sequence: Synthetic oligonucleotide
  Sense strand starting at position 1292 of SEQ ID NO: 916027
aagcuuccaucaucggaga

SEQ ID NO: 1124737 - RNA, 19 nt, Artificial Sequence
  Description of Artificial Sequence: Synthetic oligonucleotide
  Antisense strand to SEQ ID NO: 1124736
ucuccgaugauggaagcuu

SEQ ID NO: 1124738 - RNA, 19 nt, Artificial Sequence
  Description of Artificial Sequence: Synthetic oligonucleotide
  Sense strand starting at position 1293 of SEQ ID NO: 916027
agcuuccaucaucggagaa

SEQ ID NO: 1124739 - RNA, 19 nt, Artificial Sequence
  Description of Artificial Sequence: Synthetic oligonucleotide
  Antisense strand to SEQ ID NO: 1124738
uucuccgaugauggaagcu

SEQ ID NO: 1124740 - RNA, 19 nt, Artificial Sequence
  Description of Artificial Sequence: Synthetic oligonucleotide
  Sense strand starting at position 1294 of SEQ ID NO: 916027
gcuuccaucaucggagaaa

SEQ ID NO: 1124741 - RNA, 19 nt, Artificial Sequence
  Description of Artificial Sequence: Synthetic oligonucleotide
  Antisense strand to SEQ ID NO: 1124740
uuucuccgaugauggaagc

SEQ ID NO: 1124742 - RNA, 19 nt, Artificial Sequence
  Description of Artificial Sequence: Synthetic oligonucleotide
  Sense strand starting at position 1388 of SEQ ID NO: 916027
auuauacaccagcgagauu

SEQ ID NO: 1124743 - RNA, 19 nt, Artificial Sequence
  Description of Artificial Sequence: Synthetic oligonucleotide
  Antisense strand to SEQ ID NO: 1124742
aaucucgcugguguauaau

SEQ ID NO: 1124744 - RNA, 19 nt, Artificial Sequence
  Description of Artificial Sequence: Synthetic oligonucleotide
  Sense strand starting at position 1401 of SEQ ID NO: 916027
gagauugacaguuacguac

SEQ ID NO: 1124745 - RNA, 19 nt, Artificial Sequence
  Description of Artificial Sequence: Synthetic oligonucleotide
  Antisense strand to SEQ ID NO: 1124744
guacguaacugucaaucuc

SEQ ID NO: 1124746 - RNA, 19 nt, Artificial Sequence
  Description of Artificial Sequence: Synthetic oligonucleotide
  Sense strand starting at position 2146 of SEQ ID NO: 916027
uugccauagaaauggaguu

SEQ ID NO: 1124747 - RNA, 19 nt, Artificial Sequence
  Description of Artificial Sequence: Synthetic oligonucleotide
  Antisense strand to SEQ ID NO: 1124746
aacuccauuucuauggcaa

SEQ ID NO: 1124748 - RNA, 19 nt, Artificial Sequence
  Description of Artificial Sequence: Synthetic oligonucleotide
  Sense strand starting at position 2158 of SEQ ID NO: 916027
uggaguucuugcucacacu

SEQ ID NO: 1124749 - RNA, 19 nt, Artificial Sequence
  Description of Artificial Sequence: Synthetic oligonucleotide
  Antisense strand to SEQ ID NO: 1124748
agugugagcaagaacucca

SEQ ID NO: 1124750 - RNA, 19 nt, Artificial Sequence
  Description of Artificial Sequence: Synthetic oligonucleotide
  Sense strand starting at position 2159 of SEQ ID NO: 916027
ggaguucuugcucacacuu

SEQ ID NO: 1124751 - RNA, 19 nt, Artificial Sequence
  Description of Artificial Sequence: Synthetic oligonucleotide
  Antisense strand to SEQ ID NO: 1124750
aagugugagcaagaacucc

SEQ ID NO: 1124752 - RNA, 19 nt, Artificial Sequence
  Description of Artificial Sequence: Synthetic oligonucleotide
  Sense strand starting at position 2285 of SEQ ID NO: 916027
acuuccugucuccaggaaa

SEQ ID NO: 1124753 - RNA, 19 nt, Artificial Sequence
  Description of Artificial Sequence: Synthetic oligonucleotide
  Antisense strand to SEQ ID NO: 1124752
uuuccuggagacaggaagu

SEQ ID NO: 1124754 - RNA, 19 nt, Artificial Sequence
  Description of Artificial Sequence: Synthetic oligonucleotide
  Sense strand starting at position 2394 of SEQ ID NO: 916027
uacugaguauuacagaaga

SEQ ID NO: 1124755 - RNA, 19 nt, Artificial Sequence
  Description of Artificial Sequence: Synthetic oligonucleotide
  Antisense strand to SEQ ID NO: 1124754
ucuucuguaauacucagua

SEQ ID NO: 1124756 - RNA, 19 nt, Artificial Sequence
  Description of Artificial Sequence: Synthetic oligonucleotide
  Sense strand starting at position 2445 of SEQ ID NO: 916027
guuauuucuaacuggacgu

SEQ ID NO: 1124757 - RNA, 19 nt, Artificial Sequence
  Description of Artificial Sequence: Synthetic oligonucleotide
  Antisense strand to SEQ ID NO: 1124756
acguccaguuagaaauaac

SEQ ID NO: 1124758 - RNA, 19 nt, Artificial Sequence
  Description of Artificial Sequence: Synthetic oligonucleotide
  Sense strand starting at position 2480 of SEQ ID NO: 916027
ggucuugugaacugagaga

SEQ ID NO: 1124759 - RNA, 19 nt, Artificial Sequence
  Description of Artificial Sequence: Synthetic oligonucleotide
  Antisense strand to SEQ ID NO: 1124758
ucucucaguucacaagacc

SEQ ID NO: 1124760 - RNA, 19 nt, Artificial Sequence
  Description of Artificial Sequence: Synthetic oligonucleotide
  Sense strand starting at position 2495 of SEQ ID NO: 916027
gagagacauuuauaguauu

SEQ ID NO: 1124761 - RNA, 19 nt, Artificial Sequence
  Description of Artificial Sequence: Synthetic oligonucleotide
  Antisense strand to SEQ ID NO: 1124760
aauacuauaaaugucucuc

SEQ ID NO: 1124762 - RNA, 19 nt, Artificial Sequence
  Description of Artificial Sequence: Synthetic oligonucleotide
  Sense strand starting at position 2591 of SEQ ID NO: 916027
acgacuuauuagucuuugu

SEQ ID NO: 1124763 - RNA, 19 nt, Artificial Sequence
  Description of Artificial Sequence: Synthetic oligonucleotide
  Antisense strand to SEQ ID NO: 1124762
acaaagacuaauaagucgu

SEQ ID NO: 1124764 - RNA, 19 nt, Artificial Sequence
  Description of Artificial Sequence: Synthetic oligonucleotide
  Sense strand starting at position 2722 of SEQ ID NO: 916027
uaaguugacggaugucuaa

SEQ ID NO: 1124765 - RNA, 19 nt, Artificial Sequence
  Description of Artificial Sequence: Synthetic oligonucleotide
  Antisense strand to SEQ ID NO: 1124764
uuagacauccgucaacuua

SEQ ID NO: 1124766 - RNA, 19 nt, Artificial Sequence
  Description of Artificial Sequence: Synthetic oligonucleotide
  Sense strand starting at position 2796 of SEQ ID NO: 916027
uugacuaacugaucgcuua

SEQ ID NO: 1124767 - RNA, 19 nt, Artificial Sequence
  Description of Artificial Sequence: Synthetic oligonucleotide
  Antisense strand to SEQ ID NO: 1124766
uaagcgaucaguuagucaa

SEQ ID NO: 1124768 - RNA, 19 nt, Artificial Sequence
  Description of Artificial Sequence: Synthetic oligonucleotide
  Sense strand starting at position 2797 of SEQ ID NO: 916027
ugacuaacugaucgcuuaa

SEQ ID NO: 1124769 - RNA, 19 nt, Artificial Sequence
  Description of Artificial Sequence: Synthetic oligonucleotide
  Antisense strand to SEQ ID NO: 1124768
uuaagcgaucaguuaguca

SEQ ID NO: 1124770 - RNA, 19 nt, Artificial Sequence
  Description of Artificial Sequence: Synthetic oligonucleotide
  Sense strand starting at position 3323 of SEQ ID NO: 916027
uccucuaaguggguugauu

SEQ ID NO: 1124771 - RNA, 19 nt, Artificial Sequence
  Description of Artificial Sequence: Synthetic oligonucleotide
  Antisense strand to SEQ ID NO: 1124770
aaucaacccacuuagagga

SEQ ID NO: 1124772 - RNA, 19 nt, Artificial Sequence
  Description of Artificial Sequence: Synthetic oligonucleotide
  Sense strand starting at position 3513 of SEQ ID NO: 916027
auuggaauccaugggcaua

SEQ ID NO: 1124773 - RNA, 19 nt, Artificial Sequence
  Description of Artificial Sequence: Synthetic oligonucleotide
  Antisense strand to SEQ ID NO: 1124772
uaugcccauggauuccaau

SEQ ID NO: 1124774 - RNA, 19 nt, Artificial Sequence
  Description of Artificial Sequence: Synthetic oligonucleotide
  Sense strand starting at position 3524 of SEQ ID NO: 916027
ugggcauacccauacauau

SEQ ID NO: 1124775 - RNA, 19 nt, Artificial Sequence
  Description of Artificial Sequence: Synthetic oligonucleotide
  Antisense strand to SEQ ID NO: 1124774
auauguauggguaugccca

SEQ ID NO: 1124776 - RNA, 19 nt, Artificial Sequence
  Description of Artificial Sequence: Synthetic oligonucleotide
  Sense strand starting at position 3550 of SEQ ID NO: 916027
gucacaauacgauagcaga

SEQ ID NO: 1124777 - RNA, 19 nt, Artificial Sequence
  Description of Artificial Sequence: Synthetic oligonucleotide
  Antisense strand to SEQ ID NO: 1124776
ucugcuaucguauugugac

SEQ ID NO: 1124778 - RNA, 19 nt, Artificial Sequence
  Description of Artificial Sequence: Synthetic oligonucleotide
  Sense strand starting at position 3568 of SEQ ID NO: 916027
aguuauguggcagaguuga

SEQ ID NO: 1124779 - RNA, 19 nt, Artificial Sequence
  Description of Artificial Sequence: Synthetic oligonucleotide
  Antisense strand to SEQ ID NO: 1124778
ucaacucugccacauaacu

SEQ ID NO: 1124780 - RNA, 19 nt, Artificial Sequence
  Description of Artificial Sequence: Synthetic oligonucleotide
  Sense strand starting at position 3583 of SEQ ID NO: 916027
uugaguagucaugacaggu

SEQ ID NO: 1124781 - RNA, 19 nt, Artificial Sequence
  Description of Artificial Sequence: Synthetic oligonucleotide
  Antisense strand to SEQ ID NO: 1124780
accugucaugacuacucaa

SEQ ID NO: 1124782 - RNA, 19 nt, Artificial Sequence
  Description of Artificial Sequence: Synthetic oligonucleotide
  Sense strand starting at position 3587 of SEQ ID NO: 916027
guagucaugacagguugaa

SEQ ID NO: 1124783 - RNA, 19 nt, Artificial Sequence
  Description of Artificial Sequence: Synthetic oligonucleotide
  Antisense strand to SEQ ID NO: 1124782
uucaaccugucaugacuac

SEQ ID NO: 1124784 - RNA, 19 nt, Artificial Sequence
  Description of Artificial Sequence: Synthetic oligonucleotide
  Sense strand starting at position 3702 of SEQ ID NO: 916027
gggaguucaggcuggacaa

SEQ ID NO: 1124785 - RNA, 19 nt, Artificial Sequence
  Description of Artificial Sequence: Synthetic oligonucleotide
  Antisense strand to SEQ ID NO: 1124784
uuguccagccugaacuccc

SEQ ID NO: 1124786 - RNA, 19 nt, Artificial Sequence
  Description of Artificial Sequence: Synthetic oligonucleotide
  Sense strand starting at position 3703 of SEQ ID NO: 916027
ggaguucaggcuggacaaa

SEQ ID NO: 1124787 - RNA, 19 nt, Artificial Sequence
  Description of Artificial Sequence: Synthetic oligonucleotide
  Antisense strand to SEQ ID NO: 1124786
uuuguccagccugaacucc

SEQ ID NO: 1124788 - RNA, 19 nt, Artificial Sequence
  Description of Artificial Sequence: Synthetic oligonucleotide
  Sense strand starting at position 3788 of SEQ ID NO: 916027
uguacuuuccuaggcagau

SEQ ID NO: 1124789 - RNA, 19 nt, Artificial Sequence
  Description of Artificial Sequence: Synthetic oligonucleotide
  Antisense strand to SEQ ID NO: 1124788
aucugccuaggaaaguaca

SEQ ID NO: 1124790 - RNA, 19 nt, Artificial Sequence
  Description of Artificial Sequence: Synthetic oligonucleotide
  Sense strand starting at position 3789 of SEQ ID NO: 916027
guacuuuccuaggcagauc

SEQ ID NO: 1124791 - RNA, 19 nt, Artificial Sequence
  Description of Artificial Sequence: Synthetic oligonucleotide
  Antisense strand to SEQ ID NO: 1124790
gaucugccuaggaaaguac

SEQ ID NO: 1124792 - RNA, 19 nt, Artificial Sequence
  Description of Artificial Sequence: Synthetic oligonucleotide
  Sense strand starting at position 3814 of SEQ ID NO: 916027
cgcauucuggaaugagaag

SEQ ID NO: 1124793 - RNA, 19 nt, Artificial Sequence
  Description of Artificial Sequence: Synthetic oligonucleotide
  Antisense strand to SEQ ID NO: 1124792
cuucucauuccagaaugcg

SEQ ID NO: 1124794 - RNA, 19 nt, Artificial Sequence
  Description of Artificial Sequence: Synthetic oligonucleotide
  Sense strand starting at position 3848 of SEQ ID NO: 916027
cuaagaugccugcacaaua

SEQ ID NO: 1124795 - RNA, 19 nt, Artificial Sequence
  Description of Artificial Sequence: Synthetic oligonucleotide
  Antisense strand to SEQ ID NO: 1124794
uauugugcaggcaucuuag

SEQ ID NO: 1124796 - RNA, 19 nt, Artificial Sequence
  Description of Artificial Sequence: Synthetic oligonucleotide
  Sense strand starting at position 3915 of SEQ ID NO: 916027
uuuauuauguccucuggua

SEQ ID NO: 1124797 - RNA, 19 nt, Artificial Sequence
  Description of Artificial Sequence: Synthetic oligonucleotide
  Antisense strand to SEQ ID NO: 1124796
uaccagaggacauaauaaa

SEQ ID NO: 1124798 - RNA, 19 nt, Artificial Sequence
  Description of Artificial Sequence: Synthetic oligonucleotide
  Sense strand starting at position 3 of SEQ ID NO: 916028
aaauccuaaggucgauaga

SEQ ID NO: 1124799 - RNA, 19 nt, Artificial Sequence
  Description of Artificial Sequence: Synthetic oligonucleotide
  Antisense strand to SEQ ID NO: 1124798
ucuaucgaccuuaggauuu

SEQ ID NO: 1124800 - RNA, 19 nt, Artificial Sequence
  Description of Artificial Sequence: Synthetic oligonucleotide
  Sense strand starting at position 53 of SEQ ID NO: 916028
aaagacuaguuguaagaaa

SEQ ID NO: 1124801 - RNA, 19 nt, Artificial Sequence
  Description of Artificial Sequence: Synthetic oligonucleotide
  Antisense strand to SEQ ID NO: 1124800
uuucuuacaacuagucuuu

SEQ ID NO: 1124802 - RNA, 19 nt, Artificial Sequence
  Description of Artificial Sequence: Synthetic oligonucleotide
  Sense strand starting at position 215 of SEQ ID NO: 916028
gaugauagaugaucucagu

SEQ ID NO: 1124803 - RNA, 19 nt, Artificial Sequence
  Description of Artificial Sequence: Synthetic oligonucleotide
  Antisense strand to SEQ ID NO: 1124802
acugagaucaucuaucauc

SEQ ID NO: 1124804 - RNA, 19 nt, Artificial Sequence
  Description of Artificial Sequence: Synthetic oligonucleotide
  Sense strand starting at position 253 of SEQ ID NO: 916028
uagcuuuauguaggaaucu

SEQ ID NO: 1124805 - RNA, 19 nt, Artificial Sequence
  Description of Artificial Sequence: Synthetic oligonucleotide
  Antisense strand to SEQ ID NO: 1124804
agauuccuacauaaagcua

SEQ ID NO: 1124806 - RNA, 19 nt, Artificial Sequence
  Description of Artificial Sequence: Synthetic oligonucleotide
  Sense strand starting at position 329 of SEQ ID NO: 916028
uuacuaauguguuucccaa

SEQ ID NO: 1124807 - RNA, 19 nt, Artificial Sequence
  Description of Artificial Sequence: Synthetic oligonucleotide
  Antisense strand to SEQ ID NO: 1124806
uugggaaacacauuaguaa

SEQ ID NO: 1124808 - RNA, 19 nt, Artificial Sequence
  Description of Artificial Sequence: Synthetic oligonucleotide
  Sense strand starting at position 331 of SEQ ID NO: 916028
acuaauguguuucccaaau

SEQ ID NO: 1124809 - RNA, 19 nt, Artificial Sequence
  Description of Artificial Sequence: Synthetic oligonucleotide
  Antisense strand to SEQ ID NO: 1124808
auuugggaaacacauuagu

SEQ ID NO: 1124810 - RNA, 19 nt, Artificial Sequence
  Description of Artificial Sequence: Synthetic oligonucleotide
  Sense strand starting at position 443 of SEQ ID NO: 916028
auuucucuccugugaguuu

SEQ ID NO: 1124811 - RNA, 19 nt, Artificial Sequence
  Description of Artificial Sequence: Synthetic oligonucleotide
  Antisense strand to SEQ ID NO: 1124810
aaacucacaggagagaaau

SEQ ID NO: 1124812 - RNA, 19 nt, Artificial Sequence
  Description of Artificial Sequence: Synthetic oligonucleotide
  Sense strand starting at position 446 of SEQ ID NO: 916028
ucucuccugugaguuuauu

SEQ ID NO: 1124813 - RNA, 19 nt, Artificial Sequence
  Description of Artificial Sequence: Synthetic oligonucleotide
  Antisense strand to SEQ ID NO: 1124812
aauaaacucacaggagaga

SEQ ID NO: 1124814 - RNA, 19 nt, Artificial Sequence
  Description of Artificial Sequence: Synthetic oligonucleotide
  Sense strand starting at position 545 of SEQ ID NO: 916028
uggagcaugucaccuaguu

SEQ ID NO: 1124815 - RNA, 19 nt, Artificial Sequence
  Description of Artificial Sequence: Synthetic oligonucleotide
  Antisense strand to SEQ ID NO: 1124814
aacuaggugacaugcucca

SEQ ID NO: 1124816 - RNA, 19 nt, Artificial Sequence
  Description of Artificial Sequence: Synthetic oligonucleotide
  Sense strand starting at position 623 of SEQ ID NO: 916028
gggcuaaggcuguaaguaa

SEQ ID NO: 1124817 - RNA, 19 nt, Artificial Sequence
  Description of Artificial Sequence: Synthetic oligonucleotide
  Antisense strand to SEQ ID NO: 1124816
uuacuuacagccuuagccc

SEQ ID NO: 1124818 - RNA, 19 nt, Artificial Sequence
  Description of Artificial Sequence: Synthetic oligonucleotide
  Sense strand starting at position 736 of SEQ ID NO: 916028
ucuucugaagucugugaaa

SEQ ID NO: 1124819 - RNA, 19 nt, Artificial Sequence
  Description of Artificial Sequence: Synthetic oligonucleotide
  Antisense strand to SEQ ID NO: 1124818
uuucacagacuucagaaga

SEQ ID NO: 1124820 - RNA, 19 nt, Artificial Sequence
  Description of Artificial Sequence: Synthetic oligonucleotide
  Sense strand starting at position 964 of SEQ ID NO: 916028
gacggauuagcagaagguu

SEQ ID NO: 1124821 - RNA, 19 nt, Artificial Sequence
  Description of Artificial Sequence: Synthetic oligonucleotide
  Antisense strand to SEQ ID NO: 1124820
aaccuucugcuaauccguc

SEQ ID NO: 1124822 - RNA, 19 nt, Artificial Sequence
  Description of Artificial Sequence: Synthetic oligonucleotide
  Sense strand starting at position 994 of SEQ ID NO: 916028
cgagaauugcaaggucaac

SEQ ID NO: 1124823 - RNA, 19 nt, Artificial Sequence
  Description of Artificial Sequence: Synthetic oligonucleotide
  Antisense strand to SEQ ID NO: 1124822
guugaccuugcaauucucg

SEQ ID NO: 1124824 - RNA, 19 nt, Artificial Sequence
  Description of Artificial Sequence: Synthetic oligonucleotide
  Sense strand starting at position 1162 of SEQ ID NO: 916028
gccgcacugauagaggaua

SEQ ID NO: 1124825 - RNA, 19 nt, Artificial Sequence
  Description of Artificial Sequence: Synthetic oligonucleotide
  Antisense strand to SEQ ID NO: 1124824
uauccucuaucagugcggc

SEQ ID NO: 1124826 - RNA, 19 nt, Artificial Sequence
  Description of Artificial Sequence: Synthetic oligonucleotide
  Sense strand starting at position 1176 of SEQ ID NO: 916028
ggauaaguuccaugaguaa

SEQ ID NO: 1124827 - RNA, 19 nt, Artificial Sequence
  Description of Artificial Sequence: Synthetic oligonucleotide
  Antisense strand to SEQ ID NO: 1124826
uuacucauggaacuuaucc

SEQ ID NO: 1124828 - RNA, 19 nt, Artificial Sequence
  Description of Artificial Sequence: Synthetic oligonucleotide
  Sense strand starting at position 1364 of SEQ ID NO: 916028
ugcuguuauuacucucaua

SEQ ID NO: 1124829 - RNA, 19 nt, Artificial Sequence
  Description of Artificial Sequence: Synthetic oligonucleotide
  Antisense strand to SEQ ID NO: 1124828
uaugagaguaauaacagca

SEQ ID NO: 1124830 - RNA, 19 nt, Artificial Sequence
  Description of Artificial Sequence: Synthetic oligonucleotide
  Sense strand starting at position 1380 of SEQ ID NO: 916028
auaucuucucguuacucua

SEQ ID NO: 1124831 - RNA, 19 nt, Artificial Sequence
  Description of Artificial Sequence: Synthetic oligonucleotide
  Antisense strand to SEQ ID NO: 1124830
uagaguaacgagaagauau

SEQ ID NO: 1124832 - RNA, 19 nt, Artificial Sequence
  Description of Artificial Sequence: Synthetic oligonucleotide
  Sense strand starting at position 1580 of SEQ ID NO: 916028
aguuaacuuuaguuccuga

SEQ ID NO: 1124833 - RNA, 19 nt, Artificial Sequence
  Description of Artificial Sequence: Synthetic oligonucleotide
  Antisense strand to SEQ ID NO: 1124832
ucaggaacuaaaguuaacu

SEQ ID NO: 1124834 - RNA, 19 nt, Artificial Sequence
  Description of Artificial Sequence: Synthetic oligonucleotide
  Sense strand starting at position 1755 of SEQ ID NO: 916028
acauccauugacugucaua

SEQ ID NO: 1124835 - RNA, 19 nt, Artificial Sequence
  Description of Artificial Sequence: Synthetic oligonucleotide
  Antisense strand to SEQ ID NO: 1124834
uaugacagucaauggaugu

SEQ ID NO: 1124836 - RNA, 19 nt, Artificial Sequence
  Description of Artificial Sequence: Synthetic oligonucleotide
  Sense strand starting at position 1826 of SEQ ID NO: 916028
ccagcagauccagagucuu

SEQ ID NO: 1124837 - RNA, 19 nt, Artificial Sequence
  Description of Artificial Sequence: Synthetic oligonucleotide
  Antisense strand to SEQ ID NO: 1124836
aagacucuggaucugcugg

SEQ ID NO: 1124838 - RNA, 19 nt, Artificial Sequence
  Description of Artificial Sequence: Synthetic oligonucleotide
  Sense strand starting at position 1854 of SEQ ID NO: 916028
ccauucugaguuugcucau

SEQ ID NO: 1124839 - RNA, 19 nt, Artificial Sequence
  Description of Artificial Sequence: Synthetic oligonucleotide
  Antisense strand to SEQ ID NO: 1124838
augagcaaacucagaaugg

SEQ ID NO: 1124840 - RNA, 19 nt, Artificial Sequence
  Description of Artificial Sequence: Synthetic oligonucleotide
  Sense strand starting at position 1860 of SEQ ID NO: 916028
ugaguuugcucauuccaaa

SEQ ID NO: 1124841 - RNA, 19 nt, Artificial Sequence
  Description of Artificial Sequence: Synthetic oligonucleotide
  Antisense strand to SEQ ID NO: 1124840
uuuggaaugagcaaacuca

SEQ ID NO: 1124842 - RNA, 19 nt, Artificial Sequence
  Description of Artificial Sequence: Synthetic oligonucleotide
  Sense strand starting at position 2105 of SEQ ID NO: 916028
ggaaacacuucccacagau

SEQ ID NO: 1124843 - RNA, 19 nt, Artificial Sequence
  Description of Artificial Sequence: Synthetic oligonucleotide
  Antisense strand to SEQ ID NO: 1124842
aucugugggaaguguuucc

SEQ ID NO: 1124844 - RNA, 19 nt, Artificial Sequence
  Description of Artificial Sequence: Synthetic oligonucleotide
  Sense strand starting at position 2355 of SEQ ID NO: 916028
uuguguaaguuguugagac

SEQ ID NO: 1124845 - RNA, 19 nt, Artificial Sequence
  Description of Artificial Sequence: Synthetic oligonucleotide
  Antisense strand to SEQ ID NO: 1124844
gucucaacaacuuacacaa

SEQ ID NO: 1124846 - RNA, 19 nt, Artificial Sequence
  Description of Artificial Sequence: Synthetic oligonucleotide
  Sense strand starting at position 2357 of SEQ ID NO: 916028
guguaaguuguugagacac

SEQ ID NO: 1124847 - RNA, 19 nt, Artificial Sequence
  Description of Artificial Sequence: Synthetic oligonucleotide
  Antisense strand to SEQ ID NO: 1124846
gugucucaacaacuuacac

SEQ ID NO: 1124848 - RNA, 19 nt, Artificial Sequence
  Description of Artificial Sequence: Synthetic oligonucleotide
  Sense strand starting at position 2363 of SEQ ID NO: 916028
guuguugagacacagcauu

SEQ ID NO: 1124849 - RNA, 19 nt, Artificial Sequence
  Description of Artificial Sequence: Synthetic oligonucleotide
  Antisense strand to SEQ ID NO: 1124848
aaugcugugucucaacaac

SEQ ID NO: 1124850 - RNA, 19 nt, Artificial Sequence
  Description of Artificial Sequence: Synthetic oligonucleotide
  Sense strand starting at position 2392 of SEQ ID NO: 916028
uuucuaaugggaugaagua

SEQ ID NO: 1124851 - RNA, 19 nt, Artificial Sequence
  Description of Artificial Sequence: Synthetic oligonucleotide
  Antisense strand to SEQ ID NO: 1124850
uacuucaucccauuagaaa

SEQ ID NO: 1124852 - RNA, 19 nt, Artificial Sequence
  Description of Artificial Sequence: Synthetic oligonucleotide
  Sense strand starting at position 2581 of SEQ ID NO: 916028
ccuaucuauugagagaaag

SEQ ID NO: 1124853 - RNA, 19 nt, Artificial Sequence
  Description of Artificial Sequence: Synthetic oligonucleotide
  Antisense strand to SEQ ID NO: 1124852
cuuucucucaauagauagg

SEQ ID NO: 1124854 - RNA, 19 nt, Artificial Sequence
  Description of Artificial Sequence: Synthetic oligonucleotide
  Sense strand starting at position 2636 of SEQ ID NO: 916028
ggcuuaaauuguguccuaa

SEQ ID NO: 1124855 - RNA, 19 nt, Artificial Sequence
  Description of Artificial Sequence: Synthetic oligonucleotide
  Antisense strand to SEQ ID NO: 1124854
uuaggacacaauuuaagcc

SEQ ID NO: 1124856 - RNA, 19 nt, Artificial Sequence
  Description of Artificial Sequence: Synthetic oligonucleotide
  Sense strand starting at position 2792 of SEQ ID NO: 916028
uugucagguguuagugaug

SEQ ID NO: 1124857 - RNA, 19 nt, Artificial Sequence
  Description of Artificial Sequence: Synthetic oligonucleotide
  Antisense strand to SEQ ID NO: 1124856
caucacuaacaccugacaa

SEQ ID NO: 1124858 - RNA, 19 nt, Artificial Sequence
  Description of Artificial Sequence: Synthetic oligonucleotide
  Sense strand starting at position 2803 of SEQ ID NO: 916028
uagugaugggccugaaaug

SEQ ID NO: 1124859 - RNA, 19 nt, Artificial Sequence
  Description of Artificial Sequence: Synthetic oligonucleotide
  Antisense strand to SEQ ID NO: 1124858
cauuucaggcccaucacua

SEQ ID NO: 1124860 - RNA, 19 nt, Artificial Sequence
  Description of Artificial Sequence: Synthetic oligonucleotide
  Sense strand starting at position 2901 of SEQ ID NO: 916028
acuucucaggcaugccaaa

SEQ ID NO: 1124861 - RNA, 19 nt, Artificial Sequence
  Description of Artificial Sequence: Synthetic oligonucleotide
  Antisense strand to SEQ ID NO: 1124860
uuuggcaugccugagaagu

SEQ ID NO: 1124862 - RNA, 19 nt, Artificial Sequence
  Description of Artificial Sequence: Synthetic oligonucleotide
  Sense strand starting at position 2928 of SEQ ID NO: 916028
ugccucaugguaugucaua

SEQ ID NO: 1124863 - RNA, 19 nt, Artificial Sequence
  Description of Artificial Sequence: Synthetic oligonucleotide
  Antisense strand to SEQ ID NO: 1124862
uaugacauaccaugaggca

SEQ ID NO: 1124864 - RNA, 19 nt, Artificial Sequence
  Description of Artificial Sequence: Synthetic oligonucleotide
  Sense strand starting at position 2980 of SEQ ID NO: 916028
cccguaccuuucucuaaga

SEQ ID NO: 1124865 - RNA, 19 nt, Artificial Sequence
  Description of Artificial Sequence: Synthetic oligonucleotide
  Antisense strand to SEQ ID NO: 1124864
ucuuagagaaagguacggg

SEQ ID NO: 1124866 - RNA, 19 nt, Artificial Sequence
  Description of Artificial Sequence: Synthetic oligonucleotide
  Sense strand starting at position 2981 of SEQ ID NO: 916028
ccguaccuuucucuaagau

SEQ ID NO: 1124867 - RNA, 19 nt, Artificial Sequence
  Description of Artificial Sequence: Synthetic oligonucleotide
  Antisense strand to SEQ ID NO: 1124866
aucuuagagaaagguacgg

SEQ ID NO: 1124868 - RNA, 19 nt, Artificial Sequence
  Description of Artificial Sequence: Synthetic oligonucleotide
  Sense strand starting at position 2982 of SEQ ID NO: 916028
cguaccuuucucuaagaua

SEQ ID NO: 1124869 - RNA, 19 nt, Artificial Sequence
  Description of Artificial Sequence: Synthetic oligonucleotide
  Antisense strand to SEQ ID NO: 1124868
uaucuuagagaaagguacg

SEQ ID NO: 1124870 - RNA, 19 nt, Artificial Sequence
  Description of Artificial Sequence: Synthetic oligonucleotide
  Sense strand starting at position 3106 of SEQ ID NO: 916028
acuuaugaggguugucaau

SEQ ID NO: 1124871 - RNA, 19 nt, Artificial Sequence
  Description of Artificial Sequence: Synthetic oligonucleotide
  Antisense strand to SEQ ID NO: 1124870
auugacaacccucauaagu

SEQ ID NO: 1124872 - RNA, 19 nt, Artificial Sequence
  Description of Artificial Sequence: Synthetic oligonucleotide
  Sense strand starting at position 3108 of SEQ ID NO: 916028
uuaugaggguugucaauua

SEQ ID NO: 1124873 - RNA, 19 nt, Artificial Sequence
  Description of Artificial Sequence: Synthetic oligonucleotide
  Antisense strand to SEQ ID NO: 1124872
uaauugacaacccucauaa

SEQ ID NO: 1124874 - RNA, 19 nt, Artificial Sequence
  Description of Artificial Sequence: Synthetic oligonucleotide
  Sense strand starting at position 3584 of SEQ ID NO: 916028
gcgaguagugccgcuauaa

SEQ ID NO: 1124875 - RNA, 19 nt, Artificial Sequence
  Description of Artificial Sequence: Synthetic oligonucleotide
  Antisense strand to SEQ ID NO: 1124874
uuauagcggcacuacucgc

SEQ ID NO: 1124876 - RNA, 19 nt, Artificial Sequence
  Description of Artificial Sequence: Synthetic oligonucleotide
  Sense strand starting at position 3585 of SEQ ID NO: 916028
cgaguagugccgcuauaaa

SEQ ID NO: 1124877 - RNA, 19 nt, Artificial Sequence
  Description of Artificial Sequence: Synthetic oligonucleotide
  Antisense strand to SEQ ID NO: 1124876
uuuauagcggcacuacucg

SEQ ID NO: 1124878 - RNA, 19 nt, Artificial Sequence
  Description of Artificial Sequence: Synthetic oligonucleotide
  Sense strand starting at position 82 of SEQ ID NO: 916029
uguguaaucccagacaaca

SEQ ID NO: 1124879 - RNA, 19 nt, Artificial Sequence
  Description of Artificial Sequence: Synthetic oligonucleotide
  Antisense strand to SEQ ID NO: 1124878
uguugucugggauuacaca

SEQ ID NO: 1124880 - RNA, 19 nt, Artificial Sequence
  Description of Artificial Sequence: Synthetic oligonucleotide
  Sense strand starting at position 254 of SEQ ID NO: 916029
cgggcacuucucuaagaag

SEQ ID NO: 1124881 - RNA, 19 nt, Artificial Sequence
  Description of Artificial Sequence: Synthetic oligonucleotide
  Antisense strand to SEQ ID NO: 1124880
cuucuuagagaagugcccg

SEQ ID NO: 1124882 - RNA, 19 nt, Artificial Sequence
  Description of Artificial Sequence: Synthetic oligonucleotide
  Sense strand starting at position 540 of SEQ ID NO: 916029
aaaccucauguguaggauu

SEQ ID NO: 1124883 - RNA, 19 nt, Artificial Sequence
  Description of Artificial Sequence: Synthetic oligonucleotide
  Antisense strand to SEQ ID NO: 1124882
aauccuacacaugagguuu

SEQ ID NO: 1124884 - RNA, 19 nt, Artificial Sequence
  Description of Artificial Sequence: Synthetic oligonucleotide
  Sense strand starting at position 542 of SEQ ID NO: 916029
accucauguguaggauuau

SEQ ID NO: 1124885 - RNA, 19 nt, Artificial Sequence
  Description of Artificial Sequence: Synthetic oligonucleotide
  Antisense strand to SEQ ID NO: 1124884
auaauccuacacaugaggu

SEQ ID NO: 1124886 - RNA, 19 nt, Artificial Sequence
  Description of Artificial Sequence: Synthetic oligonucleotide
  Sense strand starting at position 690 of SEQ ID NO: 916029
aucugaugaacgugaacaa

SEQ ID NO: 1124887 - RNA, 19 nt, Artificial Sequence
  Description of Artificial Sequence: Synthetic oligonucleotide
  Antisense strand to SEQ ID NO: 1124886
uuguucacguucaucagau

SEQ ID NO: 1124888 - RNA, 19 nt, Artificial Sequence
  Description of Artificial Sequence: Synthetic oligonucleotide
  Sense strand starting at position 746 of SEQ ID NO: 916029
guauaauugccagaacuug

SEQ ID NO: 1124889 - RNA, 19 nt, Artificial Sequence
  Description of Artificial Sequence: Synthetic oligonucleotide
  Antisense strand to SEQ ID NO: 1124888
caaguucuggcaauuauac

SEQ ID NO: 1124890 - RNA, 19 nt, Artificial Sequence
  Description of Artificial Sequence: Synthetic oligonucleotide
  Sense strand starting at position 918 of SEQ ID NO: 916029
uaagaugagccuugcuaga

SEQ ID NO: 1124891 - RNA, 19 nt, Artificial Sequence
  Description of Artificial Sequence: Synthetic oligonucleotide
  Antisense strand to SEQ ID NO: 1124890
ucuagcaaggcucaucuua

SEQ ID NO: 1124892 - RNA, 19 nt, Artificial Sequence
  Description of Artificial Sequence: Synthetic oligonucleotide
  Sense strand starting at position 920 of SEQ ID NO: 916029
agaugagccuugcuagaua

SEQ ID NO: 1124893 - RNA, 19 nt, Artificial Sequence
  Description of Artificial Sequence: Synthetic oligonucleotide
  Antisense strand to SEQ ID NO: 1124892
uaucuagcaaggcucaucu

SEQ ID NO: 1124894 - RNA, 19 nt, Artificial Sequence
  Description of Artificial Sequence: Synthetic oligonucleotide
  Sense strand starting at position 923 of SEQ ID NO: 916029
ugagccuugcuagauagaa

SEQ ID NO: 1124895 - RNA, 19 nt, Artificial Sequence
  Description of Artificial Sequence: Synthetic oligonucleotide
  Antisense strand to SEQ ID NO: 1124894
uucuaucuagcaaggcuca

SEQ ID NO: 1124896 - RNA, 19 nt, Artificial Sequence
  Description of Artificial Sequence: Synthetic oligonucleotide
  Sense strand starting at position 1081 of SEQ ID NO: 916029
uaguaauugcacugaggaa

SEQ ID NO: 1124897 - RNA, 19 nt, Artificial Sequence
  Description of Artificial Sequence: Synthetic oligonucleotide
  Antisense strand to SEQ ID NO: 1124896
uuccucagugcaauuacua

SEQ ID NO: 1124898 - RNA, 19 nt, Artificial Sequence
  Description of Artificial Sequence: Synthetic oligonucleotide
  Sense strand starting at position 1197 of SEQ ID NO: 916029
cuucgugauucuuuauuuc

SEQ ID NO: 1124899 - RNA, 19 nt, Artificial Sequence
  Description of Artificial Sequence: Synthetic oligonucleotide
  Antisense strand to SEQ ID NO: 1124898
gaaauaaagaaucacgaag

SEQ ID NO: 1124900 - RNA, 19 nt, Artificial Sequence
  Description of Artificial Sequence: Synthetic oligonucleotide
  Sense strand starting at position 1217 of SEQ ID NO: 916029
acgaaaugucuaugaagug

SEQ ID NO: 1124901 - RNA, 19 nt, Artificial Sequence
  Description of Artificial Sequence: Synthetic oligonucleotide
  Antisense strand to SEQ ID NO: 1124900
cacuucauagacauuucgu

SEQ ID NO: 1124902 - RNA, 19 nt, Artificial Sequence
  Description of Artificial Sequence: Synthetic oligonucleotide
  Sense strand starting at position 1239 of SEQ ID NO: 916029
gugcaaagguuacuacuaa

SEQ ID NO: 1124903 - RNA, 19 nt, Artificial Sequence
  Description of Artificial Sequence: Synthetic oligonucleotide
  Antisense strand to SEQ ID NO: 1124902
uuaguaguaaccuuugcac

SEQ ID NO: 1124904 - RNA, 19 nt, Artificial Sequence
  Description of Artificial Sequence: Synthetic oligonucleotide
  Sense strand starting at position 1260 of SEQ ID NO: 916029
ucagaugugcugugaaaga

SEQ ID NO: 1124905 - RNA, 19 nt, Artificial Sequence
  Description of Artificial Sequence: Synthetic oligonucleotide
  Antisense strand to SEQ ID NO: 1124904
ucuuucacagcacaucuga

SEQ ID NO: 1124906 - RNA, 19 nt, Artificial Sequence
  Description of Artificial Sequence: Synthetic oligonucleotide
  Sense strand starting at position 1312 of SEQ ID NO: 916029
cucuuuaggguccaucaaa

SEQ ID NO: 1124907 - RNA, 19 nt, Artificial Sequence
  Description of Artificial Sequence: Synthetic oligonucleotide
  Antisense strand to SEQ ID NO: 1124906
uuugauggacccuaaagag

SEQ ID NO: 1124908 - RNA, 19 nt, Artificial Sequence
  Description of Artificial Sequence: Synthetic oligonucleotide
  Sense strand starting at position 1411 of SEQ ID NO: 916029
agacuuagcugguccugaa

SEQ ID NO: 1124909 - RNA, 19 nt, Artificial Sequence
  Description of Artificial Sequence: Synthetic oligonucleotide
  Antisense strand to SEQ ID NO: 1124908
uucaggaccagcuaagucu

SEQ ID NO: 1124910 - RNA, 19 nt, Artificial Sequence
  Description of Artificial Sequence: Synthetic oligonucleotide
  Sense strand starting at position 1472 of SEQ ID NO: 916029
ucaguuaguccuuauaagu

SEQ ID NO: 1124911 - RNA, 19 nt, Artificial Sequence
  Description of Artificial Sequence: Synthetic oligonucleotide
  Antisense strand to SEQ ID NO: 1124910
acuuauaaggacuaacuga

SEQ ID NO: 1124912 - RNA, 19 nt, Artificial Sequence
  Description of Artificial Sequence: Synthetic oligonucleotide
  Sense strand starting at position 1533 of SEQ ID NO: 916029
auagguuacaugugugaau

SEQ ID NO: 1124913 - RNA, 19 nt, Artificial Sequence
  Description of Artificial Sequence: Synthetic oligonucleotide
  Antisense strand to SEQ ID NO: 1124912
auucacacauguaaccuau

SEQ ID NO: 1124914 - RNA, 19 nt, Artificial Sequence
  Description of Artificial Sequence: Synthetic oligonucleotide
  Sense strand starting at position 1535 of SEQ ID NO: 916029
agguuacaugugugaauua

SEQ ID NO: 1124915 - RNA, 19 nt, Artificial Sequence
  Description of Artificial Sequence: Synthetic oligonucleotide
  Antisense strand to SEQ ID NO: 1124914
uaauucacacauguaaccu

SEQ ID NO: 1124916 - RNA, 19 nt, Artificial Sequence
  Description of Artificial Sequence: Synthetic oligonucleotide
  Sense strand starting at position 1939 of SEQ ID NO: 916029
ucauuaugggucuaucucu

SEQ ID NO: 1124917 - RNA, 19 nt, Artificial Sequence
  Description of Artificial Sequence: Synthetic oligonucleotide
  Antisense strand to SEQ ID NO: 1124916
agagauagacccauaauga

SEQ ID NO: 1124918 - RNA, 19 nt, Artificial Sequence
  Description of Artificial Sequence: Synthetic oligonucleotide
  Sense strand starting at position 2028 of SEQ ID NO: 916029
aucugcuauuuggaaauga

SEQ ID NO: 1124919 - RNA, 19 nt, Artificial Sequence
  Description of Artificial Sequence: Synthetic oligonucleotide
  Antisense strand to SEQ ID NO: 1124918
ucauuuccaaauagcagau

SEQ ID NO: 1124920 - RNA, 19 nt, Artificial Sequence
  Description of Artificial Sequence: Synthetic oligonucleotide
  Sense strand starting at position 2125 of SEQ ID NO: 916029
uccuuaucacguuaggaua

SEQ ID NO: 1124921 - RNA, 19 nt, Artificial Sequence
  Description of Artificial Sequence: Synthetic oligonucleotide
  Antisense strand to SEQ ID NO: 1124920
uauccuaacgugauaagga

SEQ ID NO: 1124922 - RNA, 19 nt, Artificial Sequence
  Description of Artificial Sequence: Synthetic oligonucleotide
  Sense strand starting at position 2164 of SEQ ID NO: 916029
auaauaugccuggaaaguc

SEQ ID NO: 1124923 - RNA, 19 nt, Artificial Sequence
  Description of Artificial Sequence: Synthetic oligonucleotide
  Antisense strand to SEQ ID NO: 1124922
gacuuuccaggcauauuau

SEQ ID NO: 1124924 - RNA, 19 nt, Artificial Sequence
  Description of Artificial Sequence: Synthetic oligonucleotide
  Sense strand starting at position 2261 of SEQ ID NO: 916029
ccauaaaugugaucuuguc

SEQ ID NO: 1124925 - RNA, 19 nt, Artificial Sequence
  Description of Artificial Sequence: Synthetic oligonucleotide
  Antisense strand to SEQ ID NO: 1124924
gacaagaucacauuuaugg

SEQ ID NO: 1124926 - RNA, 19 nt, Artificial Sequence
  Description of Artificial Sequence: Synthetic oligonucleotide
  Sense strand starting at position 2412 of SEQ ID NO: 916029
gaaagcuuugcugaugaaa

SEQ ID NO: 1124927 - RNA, 19 nt, Artificial Sequence
  Description of Artificial Sequence: Synthetic oligonucleotide
  Antisense strand to SEQ ID NO: 1124926
uuucaucagcaaagcuuuc

SEQ ID NO: 1124928 - RNA, 19 nt, Artificial Sequence
  Description of Artificial Sequence: Synthetic oligonucleotide
  Sense strand starting at position 2415 of SEQ ID NO: 916029
agcuuugcugaugaaacau

SEQ ID NO: 1124929 - RNA, 19 nt, Artificial Sequence
  Description of Artificial Sequence: Synthetic oligonucleotide
  Antisense strand to SEQ ID NO: 1124928
auguuucaucagcaaagcu

SEQ ID NO: 1124930 - RNA, 19 nt, Artificial Sequence
  Description of Artificial Sequence: Synthetic oligonucleotide
  Sense strand starting at position 2622 of SEQ ID NO: 916029
ugagcucauagugauuguu

SEQ ID NO: 1124931 - RNA, 19 nt, Artificial Sequence
  Description of Artificial Sequence: Synthetic oligonucleotide
  Antisense strand to SEQ ID NO: 1124930
aacaaucacuaugagcuca

SEQ ID NO: 1124932 - RNA, 19 nt, Artificial Sequence
  Description of Artificial Sequence: Synthetic oligonucleotide
  Sense strand starting at position 2694 of SEQ ID NO: 916029
uuucccuuccuugauaugu

SEQ ID NO: 1124933 - RNA, 19 nt, Artificial Sequence
  Description of Artificial Sequence: Synthetic oligonucleotide
  Antisense strand to SEQ ID NO: 1124932
acauaucaaggaagggaaa

SEQ ID NO: 1124934 - RNA, 19 nt, Artificial Sequence
  Description of Artificial Sequence: Synthetic oligonucleotide
  Sense strand starting at position 2699 of SEQ ID NO: 916029
cuuccuugauauguuaaga

SEQ ID NO: 1124935 - RNA, 19 nt, Artificial Sequence
  Description of Artificial Sequence: Synthetic oligonucleotide
  Antisense strand to SEQ ID NO: 1124934
ucuuaacauaucaaggaag

SEQ ID NO: 1124936 - RNA, 19 nt, Artificial Sequence
  Description of Artificial Sequence: Synthetic oligonucleotide
  Sense strand starting at position 2707 of SEQ ID NO: 916029
auauguuaagaaugguaga

SEQ ID NO: 1124937 - RNA, 19 nt, Artificial Sequence
  Description of Artificial Sequence: Synthetic oligonucleotide
  Antisense strand to SEQ ID NO: 1124936
ucuaccauucuuaacauau

SEQ ID NO: 1124938 - RNA, 19 nt, Artificial Sequence
  Description of Artificial Sequence: Synthetic oligonucleotide
  Sense strand starting at position 2753 of SEQ ID NO: 916029
cccgauuacagugacaagu

SEQ ID NO: 1124939 - RNA, 19 nt, Artificial Sequence
  Description of Artificial Sequence: Synthetic oligonucleotide
  Antisense strand to SEQ ID NO: 1124938
acuugucacuguaaucggg

SEQ ID NO: 1124940 - RNA, 19 nt, Artificial Sequence
  Description of Artificial Sequence: Synthetic oligonucleotide
  Sense strand starting at position 3080 of SEQ ID NO: 916029
cggagcuugcuagauauga

SEQ ID NO: 1124941 - RNA, 19 nt, Artificial Sequence
  Description of Artificial Sequence: Synthetic oligonucleotide
  Antisense strand to SEQ ID NO: 1124940
ucauaucuagcaagcuccg

SEQ ID NO: 1124942 - RNA, 19 nt, Artificial Sequence
  Description of Artificial Sequence: Synthetic oligonucleotide
  Sense strand starting at position 3089 of SEQ ID NO: 916029
cuagauaugagcgagaugu

SEQ ID NO: 1124943 - RNA, 19 nt, Artificial Sequence
  Description of Artificial Sequence: Synthetic oligonucleotide
  Antisense strand to SEQ ID NO: 1124942
acaucucgcucauaucuag

SEQ ID NO: 1124944 - RNA, 19 nt, Artificial Sequence
  Description of Artificial Sequence: Synthetic oligonucleotide
  Sense strand starting at position 3495 of SEQ ID NO: 916029
auugcuauucuuugauaga

SEQ ID NO: 1124945 - RNA, 19 nt, Artificial Sequence
  Description of Artificial Sequence: Synthetic oligonucleotide
  Antisense strand to SEQ ID NO: 1124944
ucuaucaaagaauagcaau

SEQ ID NO: 1124946 - RNA, 19 nt, Artificial Sequence
  Description of Artificial Sequence: Synthetic oligonucleotide
  Sense strand starting at position 3647 of SEQ ID NO: 916029
aagcauaagggaugugaua

SEQ ID NO: 1124947 - RNA, 19 nt, Artificial Sequence
  Description of Artificial Sequence: Synthetic oligonucleotide
  Antisense strand to SEQ ID NO: 1124946
uaucacaucccuuaugcuu

SEQ ID NO: 1124948 - RNA, 19 nt, Artificial Sequence
  Description of Artificial Sequence: Synthetic oligonucleotide
  Sense strand starting at position 3649 of SEQ ID NO: 916029
gcauaagggaugugauaac

SEQ ID NO: 1124949 - RNA, 19 nt, Artificial Sequence
  Description of Artificial Sequence: Synthetic oligonucleotide
  Antisense strand to SEQ ID NO: 1124948
guuaucacaucccuuaugc

SEQ ID NO: 1124950 - RNA, 19 nt, Artificial Sequence
  Description of Artificial Sequence: Synthetic oligonucleotide
  Sense strand starting at position 3708 of SEQ ID NO: 916029
cucacacagggcuauaauu

SEQ ID NO: 1124951 - RNA, 19 nt, Artificial Sequence
  Description of Artificial Sequence: Synthetic oligonucleotide
  Antisense strand to SEQ ID NO: 1124950
aauuauagcccugugugag

SEQ ID NO: 1124952 - RNA, 19 nt, Artificial Sequence
  Description of Artificial Sequence: Synthetic oligonucleotide
  Sense strand starting at position 3794 of SEQ ID NO: 916029
cugcuauuccauggacuga

SEQ ID NO: 1124953 - RNA, 19 nt, Artificial Sequence
  Description of Artificial Sequence: Synthetic oligonucleotide
  Antisense strand to SEQ ID NO: 1124952
ucaguccauggaauagcag

SEQ ID NO: 1124954 - RNA, 19 nt, Artificial Sequence
  Description of Artificial Sequence: Synthetic oligonucleotide
  Sense strand starting at position 3893 of SEQ ID NO: 916029
uaauuaagguuacuugaga

SEQ ID NO: 1124955 - RNA, 19 nt, Artificial Sequence
  Description of Artificial Sequence: Synthetic oligonucleotide
  Antisense strand to SEQ ID NO: 1124954
ucucaaguaaccuuaauua

SEQ ID NO: 1124956 - RNA, 19 nt, Artificial Sequence
  Description of Artificial Sequence: Synthetic oligonucleotide
  Sense strand starting at position 3894 of SEQ ID NO: 916029
aauuaagguuacuugagau

SEQ ID NO: 1124957 - RNA, 19 nt, Artificial Sequence
  Description of Artificial Sequence: Synthetic oligonucleotide
  Antisense strand to SEQ ID NO: 1124956
aucucaaguaaccuuaauu

SEQ ID NO: 1124958 - RNA, 19 nt, Artificial Sequence
  Description of Artificial Sequence: Synthetic oligonucleotide
  Sense strand starting at position 306 of SEQ ID NO: 916030
gggcucaagucucuacaaa

SEQ ID NO: 1124959 - RNA, 19 nt, Artificial Sequence
  Description of Artificial Sequence: Synthetic oligonucleotide
  Antisense strand to SEQ ID NO: 1124958
uuuguagagacuugagccc

SEQ ID NO: 1124960 - RNA, 19 nt, Artificial Sequence
  Description of Artificial Sequence: Synthetic oligonucleotide
  Sense strand starting at position 469 of SEQ ID NO: 916030
agacuagaagauugcuuga

SEQ ID NO: 1124961 - RNA, 19 nt, Artificial Sequence
  Description of Artificial Sequence: Synthetic oligonucleotide
  Antisense strand to SEQ ID NO: 1124960
ucaagcaaucuucuagucu

SEQ ID NO: 1124962 - RNA, 19 nt, Artificial Sequence
  Description of Artificial Sequence: Synthetic oligonucleotide
  Sense strand starting at position 624 of SEQ ID NO: 916030
gcaaguagguaguuuaaua

SEQ ID NO: 1124963 - RNA, 19 nt, Artificial Sequence
  Description of Artificial Sequence: Synthetic oligonucleotide
  Antisense strand to SEQ ID NO: 1124962
uauuaaacuaccuacuugc

SEQ ID NO: 1124964 - RNA, 19 nt, Artificial Sequence
  Description of Artificial Sequence: Synthetic oligonucleotide
  Sense strand starting at position 632 of SEQ ID NO: 916030
guaguuuaauaguuacagu

SEQ ID NO: 1124965 - RNA, 19 nt, Artificial Sequence
  Description of Artificial Sequence: Synthetic oligonucleotide
  Antisense strand to SEQ ID NO: 1124964
acuguaacuauuaaacuac

SEQ ID NO: 1124966 - RNA, 19 nt, Artificial Sequence
  Description of Artificial Sequence: Synthetic oligonucleotide
  Sense strand starting at position 646 of SEQ ID NO: 916030
acaguuaccugguucuaaa

SEQ ID NO: 1124967 - RNA, 19 nt, Artificial Sequence
  Description of Artificial Sequence: Synthetic oligonucleotide
  Antisense strand to SEQ ID NO: 1124966
uuuagaaccagguaacugu

SEQ ID NO: 1124968 - RNA, 19 nt, Artificial Sequence
  Description of Artificial Sequence: Synthetic oligonucleotide
  Sense strand starting at position 666 of SEQ ID NO: 916030
agugucuugcuagagaaca

SEQ ID NO: 1124969 - RNA, 19 nt, Artificial Sequence
  Description of Artificial Sequence: Synthetic oligonucleotide
  Antisense strand to SEQ ID NO: 1124968
uguucucuagcaagacacu

SEQ ID NO: 1124970 - RNA, 19 nt, Artificial Sequence
  Description of Artificial Sequence: Synthetic oligonucleotide
  Sense strand starting at position 723 of SEQ ID NO: 916030
uguauacuggccguaguuu

SEQ ID NO: 1124971 - RNA, 19 nt, Artificial Sequence
  Description of Artificial Sequence: Synthetic oligonucleotide
  Antisense strand to SEQ ID NO: 1124970
aaacuacggccaguauaca

SEQ ID NO: 1124972 - RNA, 19 nt, Artificial Sequence
  Description of Artificial Sequence: Synthetic oligonucleotide
  Sense strand starting at position 743 of SEQ ID NO: 916030
ugaaauuguagcgaagaug

SEQ ID NO: 1124973 - RNA, 19 nt, Artificial Sequence
  Description of Artificial Sequence: Synthetic oligonucleotide
  Antisense strand to SEQ ID NO: 1124972
caucuucgcuacaauuuca

SEQ ID NO: 1124974 - RNA, 19 nt, Artificial Sequence
  Description of Artificial Sequence: Synthetic oligonucleotide
  Sense strand starting at position 785 of SEQ ID NO: 916030
agcacaacugcagauauua

SEQ ID NO: 1124975 - RNA, 19 nt, Artificial Sequence
  Description of Artificial Sequence: Synthetic oligonucleotide
  Antisense strand to SEQ ID NO: 1124974
uaauaucugcaguugugcu

SEQ ID NO: 1124976 - RNA, 19 nt, Artificial Sequence
  Description of Artificial Sequence: Synthetic oligonucleotide
  Sense strand starting at position 991 of SEQ ID NO: 916030
ggaacacagucaguuuauu

SEQ ID NO: 1124977 - RNA, 19 nt, Artificial Sequence
  Description of Artificial Sequence: Synthetic oligonucleotide
  Antisense strand to SEQ ID NO: 1124976
aauaaacugacuguguucc

SEQ ID NO: 1124978 - RNA, 19 nt, Artificial Sequence
  Description of Artificial Sequence: Synthetic oligonucleotide
  Sense strand starting at position 1017 of SEQ ID NO: 916030
gguugcuugcccgaaaucu

SEQ ID NO: 1124979 - RNA, 19 nt, Artificial Sequence
  Description of Artificial Sequence: Synthetic oligonucleotide
  Antisense strand to SEQ ID NO: 1124978
agauuucgggcaagcaacc

SEQ ID NO: 1124980 - RNA, 19 nt, Artificial Sequence
  Description of Artificial Sequence: Synthetic oligonucleotide
  Sense strand starting at position 1135 of SEQ ID NO: 916030
cuagaugucugcccacguu

SEQ ID NO: 1124981 - RNA, 19 nt, Artificial Sequence
  Description of Artificial Sequence: Synthetic oligonucleotide
  Antisense strand to SEQ ID NO: 1124980
aacgugggcagacaucuag

SEQ ID NO: 1124982 - RNA, 19 nt, Artificial Sequence
  Description of Artificial Sequence: Synthetic oligonucleotide
  Sense strand starting at position 1138 of SEQ ID NO: 916030
gaugucugcccacguuaau

SEQ ID NO: 1124983 - RNA, 19 nt, Artificial Sequence
  Description of Artificial Sequence: Synthetic oligonucleotide
  Antisense strand to SEQ ID NO: 1124982
auuaacgugggcagacauc

SEQ ID NO: 1124984 - RNA, 19 nt, Artificial Sequence
  Description of Artificial Sequence: Synthetic oligonucleotide
  Sense strand starting at position 1202 of SEQ ID NO: 916030
ugcugugagccuugaagaa

SEQ ID NO: 1124985 - RNA, 19 nt, Artificial Sequence
  Description of Artificial Sequence: Synthetic oligonucleotide
  Antisense strand to SEQ ID NO: 1124984
uucuucaaggcucacagca

SEQ ID NO: 1124986 - RNA, 19 nt, Artificial Sequence
  Description of Artificial Sequence: Synthetic oligonucleotide
  Sense strand starting at position 1451 of SEQ ID NO: 916030
cgaggaauguuccugggag

SEQ ID NO: 1124987 - RNA, 19 nt, Artificial Sequence
  Description of Artificial Sequence: Synthetic oligonucleotide
  Antisense strand to SEQ ID NO: 1124986
cucccaggaacauuccucg

SEQ ID NO: 1124988 - RNA, 19 nt, Artificial Sequence
  Description of Artificial Sequence: Synthetic oligonucleotide
  Sense strand starting at position 1452 of SEQ ID NO: 916030
gaggaauguuccugggagg

SEQ ID NO: 1124989 - RNA, 19 nt, Artificial Sequence
  Description of Artificial Sequence: Synthetic oligonucleotide
  Antisense strand to SEQ ID NO: 1124988
ccucccaggaacauuccuc

SEQ ID NO: 1124990 - RNA, 19 nt, Artificial Sequence
  Description of Artificial Sequence: Synthetic oligonucleotide
  Sense strand starting at position 2071 of SEQ ID NO: 916030
acaugagccuuccuuaguu

SEQ ID NO: 1124991 - RNA, 19 nt, Artificial Sequence
  Description of Artificial Sequence: Synthetic oligonucleotide
  Antisense strand to SEQ ID NO: 1124990
aacuaaggaaggcucaugu

SEQ ID NO: 1124992 - RNA, 19 nt, Artificial Sequence
  Description of Artificial Sequence: Synthetic oligonucleotide
  Sense strand starting at position 2466 of SEQ ID NO: 916030
cgcaacauuucugcagcaa

SEQ ID NO: 1124993 - RNA, 19 nt, Artificial Sequence
  Description of Artificial Sequence: Synthetic oligonucleotide
  Antisense strand to SEQ ID NO: 1124992
uugcugcagaaauguugcg

SEQ ID NO: 1124994 - RNA, 19 nt, Artificial Sequence
  Description of Artificial Sequence: Synthetic oligonucleotide
  Sense strand starting at position 2546 of SEQ ID NO: 916030
ugguuugauggccaaacga

SEQ ID NO: 1124995 - RNA, 19 nt, Artificial Sequence
  Description of Artificial Sequence: Synthetic oligonucleotide
  Antisense strand to SEQ ID NO: 1124994
ucguuuggccaucaaacca

SEQ ID NO: 1124996 - RNA, 19 nt, Artificial Sequence
  Description of Artificial Sequence: Synthetic oligonucleotide
  Sense strand starting at position 2556 of SEQ ID NO: 916030
gccaaacgaguuugcuaca

SEQ ID NO: 1124997 - RNA, 19 nt, Artificial Sequence
  Description of Artificial Sequence: Synthetic oligonucleotide
  Antisense strand to SEQ ID NO: 1124996
uguagcaaacucguuuggc

SEQ ID NO: 1124998 - RNA, 19 nt, Artificial Sequence
  Description of Artificial Sequence: Synthetic oligonucleotide
  Sense strand starting at position 2561 of SEQ ID NO: 916030
acgaguuugcuacagaaug

SEQ ID NO: 1124999 - RNA, 19 nt, Artificial Sequence
  Description of Artificial Sequence: Synthetic oligonucleotide
  Antisense strand to SEQ ID NO: 1124998
cauucuguagcaaacucgu

SEQ ID NO: 1125000 - RNA, 19 nt, Artificial Sequence
  Description of Artificial Sequence: Synthetic oligonucleotide
  Sense strand starting at position 2569 of SEQ ID NO: 916030
gcuacagaaugcucagaau

SEQ ID NO: 1125001 - RNA, 19 nt, Artificial Sequence
  Description of Artificial Sequence: Synthetic oligonucleotide
  Antisense strand to SEQ ID NO: 1125000
auucugagcauucuguagc

SEQ ID NO: 1125002 - RNA, 19 nt, Artificial Sequence
  Description of Artificial Sequence: Synthetic oligonucleotide
  Sense strand starting at position 2803 of SEQ ID NO: 916030
uggagcaucuucucuccua

SEQ ID NO: 1125003 - RNA, 19 nt, Artificial Sequence
  Description of Artificial Sequence: Synthetic oligonucleotide
  Antisense strand to SEQ ID NO: 1125002
uaggagagaagaugcucca

SEQ ID NO: 1125004 - RNA, 19 nt, Artificial Sequence
  Description of Artificial Sequence: Synthetic oligonucleotide
  Sense strand starting at position 2825 of SEQ ID NO: 916030
uugggcacuugggauuaaa

SEQ ID NO: 1125005 - RNA, 19 nt, Artificial Sequence
  Description of Artificial Sequence: Synthetic oligonucleotide
  Antisense strand to SEQ ID NO: 1125004
uuuaaucccaagugcccaa

SEQ ID NO: 1125006 - RNA, 19 nt, Artificial Sequence
  Description of Artificial Sequence: Synthetic oligonucleotide
  Sense strand starting at position 2828 of SEQ ID NO: 916030
ggcacuugggauuaaaggu

SEQ ID NO: 1125007 - RNA, 19 nt, Artificial Sequence
  Description of Artificial Sequence: Synthetic oligonucleotide
  Antisense strand to SEQ ID NO: 1125006
accuuuaaucccaagugcc

SEQ ID NO: 1125008 - RNA, 19 nt, Artificial Sequence
  Description of Artificial Sequence: Synthetic oligonucleotide
  Sense strand starting at position 2837 of SEQ ID NO: 916030
gauuaaagguagcuuccua

SEQ ID NO: 1125009 - RNA, 19 nt, Artificial Sequence
  Description of Artificial Sequence: Synthetic oligonucleotide
  Antisense strand to SEQ ID NO: 1125008
uaggaagcuaccuuuaauc

SEQ ID NO: 1125010 - RNA, 19 nt, Artificial Sequence
  Description of Artificial Sequence: Synthetic oligonucleotide
  Sense strand starting at position 2894 of SEQ ID NO: 916030
caagacugauuucgggaua

SEQ ID NO: 1125011 - RNA, 19 nt, Artificial Sequence
  Description of Artificial Sequence: Synthetic oligonucleotide
  Antisense strand to SEQ ID NO: 1125010
uaucccgaaaucagucuug

SEQ ID NO: 1125012 - RNA, 19 nt, Artificial Sequence
  Description of Artificial Sequence: Synthetic oligonucleotide
  Sense strand starting at position 2895 of SEQ ID NO: 916030
aagacugauuucgggauau

SEQ ID NO: 1125013 - RNA, 19 nt, Artificial Sequence
  Description of Artificial Sequence: Synthetic oligonucleotide
  Antisense strand to SEQ ID NO: 1125012
auaucccgaaaucagucuu

SEQ ID NO: 1125014 - RNA, 19 nt, Artificial Sequence
  Description of Artificial Sequence: Synthetic oligonucleotide
  Sense strand starting at position 2995 of SEQ ID NO: 916030
cgauauguggaguggcuua

SEQ ID NO: 1125015 - RNA, 19 nt, Artificial Sequence
  Description of Artificial Sequence: Synthetic oligonucleotide
  Antisense strand to SEQ ID NO: 1125014
uaagccacuccacauaucg

SEQ ID NO: 1125016 - RNA, 19 nt, Artificial Sequence
  Description of Artificial Sequence: Synthetic oligonucleotide
  Sense strand starting at position 3097 of SEQ ID NO: 916030
ucagaucuguucucuaucu

SEQ ID NO: 1125017 - RNA, 19 nt, Artificial Sequence
  Description of Artificial Sequence: Synthetic oligonucleotide
  Antisense strand to SEQ ID NO: 1125016
agauagagaacagaucuga

SEQ ID NO: 1125018 - RNA, 19 nt, Artificial Sequence
  Description of Artificial Sequence: Synthetic oligonucleotide
  Sense strand starting at position 3099 of SEQ ID NO: 916030
agaucuguucucuaucuca

SEQ ID NO: 1125019 - RNA, 19 nt, Artificial Sequence
  Description of Artificial Sequence: Synthetic oligonucleotide
  Antisense strand to SEQ ID NO: 1125018
ugagauagagaacagaucu

SEQ ID NO: 1125020 - RNA, 19 nt, Artificial Sequence
  Description of Artificial Sequence: Synthetic oligonucleotide
  Sense strand starting at position 3110 of SEQ ID NO: 916030
cuaucucacucuguaguuu

SEQ ID NO: 1125021 - RNA, 19 nt, Artificial Sequence
  Description of Artificial Sequence: Synthetic oligonucleotide
  Antisense strand to SEQ ID NO: 1125020
aaacuacagagugagauag

SEQ ID NO: 1125022 - RNA, 19 nt, Artificial Sequence
  Description of Artificial Sequence: Synthetic oligonucleotide
  Sense strand starting at position 3210 of SEQ ID NO: 916030
gccacauuugggugugauu

SEQ ID NO: 1125023 - RNA, 19 nt, Artificial Sequence
  Description of Artificial Sequence: Synthetic oligonucleotide
  Antisense strand to SEQ ID NO: 1125022
aaucacacccaaauguggc

SEQ ID NO: 1125024 - RNA, 19 nt, Artificial Sequence
  Description of Artificial Sequence: Synthetic oligonucleotide
  Sense strand starting at position 3229 of SEQ ID NO: 916030
cagagagcuguuuaugcaa

SEQ ID NO: 1125025 - RNA, 19 nt, Artificial Sequence
  Description of Artificial Sequence: Synthetic oligonucleotide
  Antisense strand to SEQ ID NO: 1125024
uugcauaaacagcucucug

SEQ ID NO: 1125026 - RNA, 19 nt, Artificial Sequence
  Description of Artificial Sequence: Synthetic oligonucleotide
  Sense strand starting at position 3333 of SEQ ID NO: 916030
auuuccagguugugguaaa

SEQ ID NO: 1125027 - RNA, 19 nt, Artificial Sequence
  Description of Artificial Sequence: Synthetic oligonucleotide
  Antisense strand to SEQ ID NO: 1125026
uuuaccacaaccuggaaau

SEQ ID NO: 1125028 - RNA, 19 nt, Artificial Sequence
  Description of Artificial Sequence: Synthetic oligonucleotide
  Sense strand starting at position 3343 of SEQ ID NO: 916030
ugugguaaauguguucacu

SEQ ID NO: 1125029 - RNA, 19 nt, Artificial Sequence
  Description of Artificial Sequence: Synthetic oligonucleotide
  Antisense strand to SEQ ID NO: 1125028
agugaacacauuuaccaca

SEQ ID NO: 1125030 - RNA, 19 nt, Artificial Sequence
  Description of Artificial Sequence: Synthetic oligonucleotide
  Sense strand starting at position 3423 of SEQ ID NO: 916030
ucagaagaaucaugaggaa

SEQ ID NO: 1125031 - RNA, 19 nt, Artificial Sequence
  Description of Artificial Sequence: Synthetic oligonucleotide
  Antisense strand to SEQ ID NO: 1125030
uuccucaugauucuucuga

SEQ ID NO: 1125032 - RNA, 19 nt, Artificial Sequence
  Description of Artificial Sequence: Synthetic oligonucleotide
  Sense strand starting at position 3456 of SEQ ID NO: 916030
gaagaaacuugucgaacag

SEQ ID NO: 1125033 - RNA, 19 nt, Artificial Sequence
  Description of Artificial Sequence: Synthetic oligonucleotide
  Antisense strand to SEQ ID NO: 1125032
cuguucgacaaguuucuuc

SEQ ID NO: 1125034 - RNA, 19 nt, Artificial Sequence
  Description of Artificial Sequence: Synthetic oligonucleotide
  Sense strand starting at position 3516 of SEQ ID NO: 916030
ggaacugcucacuagccua

SEQ ID NO: 1125035 - RNA, 19 nt, Artificial Sequence
  Description of Artificial Sequence: Synthetic oligonucleotide
  Antisense strand to SEQ ID NO: 1125034
uaggcuagugagcaguucc

SEQ ID NO: 1125036 - RNA, 19 nt, Artificial Sequence
  Description of Artificial Sequence: Synthetic oligonucleotide
  Sense strand starting at position 3539 of SEQ ID NO: 916030
ugcuguccucugggccaaa

SEQ ID NO: 1125037 - RNA, 19 nt, Artificial Sequence
  Description of Artificial Sequence: Synthetic oligonucleotide
  Antisense strand to SEQ ID NO: 1125036
uuuggcccagaggacagca

SEQ ID NO: 1125038 - RNA, 19 nt, Artificial Sequence
  Description of Artificial Sequence: Synthetic oligonucleotide
  Sense strand starting at position 237 of SEQ ID NO: 916031
gugcaagacaauuggucua

SEQ ID NO: 1125039 - RNA, 19 nt, Artificial Sequence
  Description of Artificial Sequence: Synthetic oligonucleotide
  Antisense strand to SEQ ID NO: 1125038
uagaccaauugucuugcac

SEQ ID NO: 1125040 - RNA, 19 nt, Artificial Sequence
  Description of Artificial Sequence: Synthetic oligonucleotide
  Sense strand starting at position 242 of SEQ ID NO: 916031
agacaauuggucuagccaa

SEQ ID NO: 1125041 - RNA, 19 nt, Artificial Sequence
  Description of Artificial Sequence: Synthetic oligonucleotide
  Antisense strand to SEQ ID NO: 1125040
uuggcuagaccaauugucu

SEQ ID NO: 1125042 - RNA, 19 nt, Artificial Sequence
  Description of Artificial Sequence: Synthetic oligonucleotide
  Sense strand starting at position 363 of SEQ ID NO: 916031
agaccucuccuauguaagu

SEQ ID NO: 1125043 - RNA, 19 nt, Artificial Sequence
  Description of Artificial Sequence: Synthetic oligonucleotide
  Antisense strand to SEQ ID NO: 1125042
acuuacauaggagaggucu

SEQ ID NO: 1125044 - RNA, 19 nt, Artificial Sequence
  Description of Artificial Sequence: Synthetic oligonucleotide
  Sense strand starting at position 372 of SEQ ID NO: 916031
cuauguaagugcucccaca

SEQ ID NO: 1125045 - RNA, 19 nt, Artificial Sequence
  Description of Artificial Sequence: Synthetic oligonucleotide
  Antisense strand to SEQ ID NO: 1125044
ugugggagcacuuacauag

SEQ ID NO: 1125046 - RNA, 19 nt, Artificial Sequence
  Description of Artificial Sequence: Synthetic oligonucleotide
  Sense strand starting at position 380 of SEQ ID NO: 916031
gugcucccacauugaaaga

SEQ ID NO: 1125047 - RNA, 19 nt, Artificial Sequence
  Description of Artificial Sequence: Synthetic oligonucleotide
  Antisense strand to SEQ ID NO: 1125046
ucuuucaaugugggagcac

SEQ ID NO: 1125048 - RNA, 19 nt, Artificial Sequence
  Description of Artificial Sequence: Synthetic oligonucleotide
  Sense strand starting at position 399 of SEQ ID NO: 916031
gggaaaucaucucccgagu

SEQ ID NO: 1125049 - RNA, 19 nt, Artificial Sequence
  Description of Artificial Sequence: Synthetic oligonucleotide
  Antisense strand to SEQ ID NO: 1125048
acucgggagaugauuuccc

SEQ ID NO: 1125050 - RNA, 19 nt, Artificial Sequence
  Description of Artificial Sequence: Synthetic oligonucleotide
  Sense strand starting at position 628 of SEQ ID NO: 916031
gagugaaaucuuugaauua

SEQ ID NO: 1125051 - RNA, 19 nt, Artificial Sequence
  Description of Artificial Sequence: Synthetic oligonucleotide
  Antisense strand to SEQ ID NO: 1125050
uaauucaaagauuucacuc

SEQ ID NO: 1125052 - RNA, 19 nt, Artificial Sequence
  Description of Artificial Sequence: Synthetic oligonucleotide
  Sense strand starting at position 835 of SEQ ID NO: 916031
gacagugaguccucacucu

SEQ ID NO: 1125053 - RNA, 19 nt, Artificial Sequence
  Description of Artificial Sequence: Synthetic oligonucleotide
  Antisense strand to SEQ ID NO: 1125052
agagugaggacucacuguc

SEQ ID NO: 1125054 - RNA, 19 nt, Artificial Sequence
  Description of Artificial Sequence: Synthetic oligonucleotide
  Sense strand starting at position 939 of SEQ ID NO: 916031
ucgaauccguuucuuaaau

SEQ ID NO: 1125055 - RNA, 19 nt, Artificial Sequence
  Description of Artificial Sequence: Synthetic oligonucleotide
  Antisense strand to SEQ ID NO: 1125054
auuuaagaaacggauucga

SEQ ID NO: 1125056 - RNA, 19 nt, Artificial Sequence
  Description of Artificial Sequence: Synthetic oligonucleotide
  Sense strand starting at position 973 of SEQ ID NO: 916031
agauauguaucugcaacuu

SEQ ID NO: 1125057 - RNA, 19 nt, Artificial Sequence
  Description of Artificial Sequence: Synthetic oligonucleotide
  Antisense strand to SEQ ID NO: 1125056
aaguugcagauacauaucu

SEQ ID NO: 1125058 - RNA, 19 nt, Artificial Sequence
  Description of Artificial Sequence: Synthetic oligonucleotide
  Sense strand starting at position 1071 of SEQ ID NO: 916031
agcuaacuagaguagaagu

SEQ ID NO: 1125059 - RNA, 19 nt, Artificial Sequence
  Description of Artificial Sequence: Synthetic oligonucleotide
  Antisense strand to SEQ ID NO: 1125058
acuucuacucuaguuagcu

SEQ ID NO: 1125060 - RNA, 19 nt, Artificial Sequence
  Description of Artificial Sequence: Synthetic oligonucleotide
  Sense strand starting at position 1200 of SEQ ID NO: 916031
cgacuuaugaaaugcugca

SEQ ID NO: 1125061 - RNA, 19 nt, Artificial Sequence
  Description of Artificial Sequence: Synthetic oligonucleotide
  Antisense strand to SEQ ID NO: 1125060
ugcagcauuucauaagucg

SEQ ID NO: 1125062 - RNA, 19 nt, Artificial Sequence
  Description of Artificial Sequence: Synthetic oligonucleotide
  Sense strand starting at position 1205 of SEQ ID NO: 916031
uaugaaaugcugcaaguau

SEQ ID NO: 1125063 - RNA, 19 nt, Artificial Sequence
  Description of Artificial Sequence: Synthetic oligonucleotide
  Antisense strand to SEQ ID NO: 1125062
auacuugcagcauuucaua

SEQ ID NO: 1125064 - RNA, 19 nt, Artificial Sequence
  Description of Artificial Sequence: Synthetic oligonucleotide
  Sense strand starting at position 1221 of SEQ ID NO: 916031
uaugauauuuggugucaau

SEQ ID NO: 1125065 - RNA, 19 nt, Artificial Sequence
  Description of Artificial Sequence: Synthetic oligonucleotide
  Antisense strand to SEQ ID NO: 1125064
auugacaccaaauaucaua

SEQ ID NO: 1125066 - RNA, 19 nt, Artificial Sequence
  Description of Artificial Sequence: Synthetic oligonucleotide
  Sense strand starting at position 1241 of SEQ ID NO: 916031
uuuggagauugucccguua

SEQ ID NO: 1125067 - RNA, 19 nt, Artificial Sequence
  Description of Artificial Sequence: Synthetic oligonucleotide
  Antisense strand to SEQ ID NO: 1125066
uaacgggacaaucuccaaa

SEQ ID NO: 1125068 - RNA, 19 nt, Artificial Sequence
  Description of Artificial Sequence: Synthetic oligonucleotide
  Sense strand starting at position 1497 of SEQ ID NO: 916031
cugggauagucuccagucu

SEQ ID NO: 1125069 - RNA, 19 nt, Artificial Sequence
  Description of Artificial Sequence: Synthetic oligonucleotide
  Antisense strand to SEQ ID NO: 1125068
agacuggagacuaucccag

SEQ ID NO: 1125070 - RNA, 19 nt, Artificial Sequence
  Description of Artificial Sequence: Synthetic oligonucleotide
  Sense strand starting at position 1498 of SEQ ID NO: 916031
ugggauagucuccagucuu

SEQ ID NO: 1125071 - RNA, 19 nt, Artificial Sequence
  Description of Artificial Sequence: Synthetic oligonucleotide
  Antisense strand to SEQ ID NO: 1125070
aagacuggagacuauccca

SEQ ID NO: 1125072 - RNA, 19 nt, Artificial Sequence
  Description of Artificial Sequence: Synthetic oligonucleotide
  Sense strand starting at position 1525 of SEQ ID NO: 916031
cucugaucuugcuauuuag

SEQ ID NO: 1125073 - RNA, 19 nt, Artificial Sequence
  Description of Artificial Sequence: Synthetic oligonucleotide
  Antisense strand to SEQ ID NO: 1125072
cuaaauagcaagaucagag

SEQ ID NO: 1125074 - RNA, 19 nt, Artificial Sequence
  Description of Artificial Sequence: Synthetic oligonucleotide
  Sense strand starting at position 1654 of SEQ ID NO: 916031
gugggaaaucgcugcucau

SEQ ID NO: 1125075 - RNA, 19 nt, Artificial Sequence
  Description of Artificial Sequence: Synthetic oligonucleotide
  Antisense strand to SEQ ID NO: 1125074
augagcagcgauuucccac

SEQ ID NO: 1125076 - RNA, 19 nt, Artificial Sequence
  Description of Artificial Sequence: Synthetic oligonucleotide
  Sense strand starting at position 1657 of SEQ ID NO: 916031
ggaaaucgcugcucaugac

SEQ ID NO: 1125077 - RNA, 19 nt, Artificial Sequence
  Description of Artificial Sequence: Synthetic oligonucleotide
  Antisense strand to SEQ ID NO: 1125076
gucaugagcagcgauuucc

SEQ ID NO: 1125078 - RNA, 19 nt, Artificial Sequence
  Description of Artificial Sequence: Synthetic oligonucleotide
  Sense strand starting at position 1734 of SEQ ID NO: 916031
agcacauuccugugcaucu

SEQ ID NO: 1125079 - RNA, 19 nt, Artificial Sequence
  Description of Artificial Sequence: Synthetic oligonucleotide
  Antisense strand to SEQ ID NO: 1125078
agaugcacaggaaugugcu

SEQ ID NO: 1125080 - RNA, 19 nt, Artificial Sequence
  Description of Artificial Sequence: Synthetic oligonucleotide
  Sense strand starting at position 2129 of SEQ ID NO: 916031
acuguuaagcggcaagaaa

SEQ ID NO: 1125081 - RNA, 19 nt, Artificial Sequence
  Description of Artificial Sequence: Synthetic oligonucleotide
  Antisense strand to SEQ ID NO: 1125080
uuucuugccgcuuaacagu

SEQ ID NO: 1125082 - RNA, 19 nt, Artificial Sequence
  Description of Artificial Sequence: Synthetic oligonucleotide
  Sense strand starting at position 2309 of SEQ ID NO: 916031
ggguaucuguggaggcuuu

SEQ ID NO: 1125083 - RNA, 19 nt, Artificial Sequence
  Description of Artificial Sequence: Synthetic oligonucleotide
  Antisense strand to SEQ ID NO: 1125082
aaagccuccacagauaccc

SEQ ID NO: 1125084 - RNA, 19 nt, Artificial Sequence
  Description of Artificial Sequence: Synthetic oligonucleotide
  Sense strand starting at position 2310 of SEQ ID NO: 916031
gguaucuguggaggcuuua

SEQ ID NO: 1125085 - RNA, 19 nt, Artificial Sequence
  Description of Artificial Sequence: Synthetic oligonucleotide
  Antisense strand to SEQ ID NO: 1125084
uaaagccuccacagauacc

SEQ ID NO: 1125086 - RNA, 19 nt, Artificial Sequence
  Description of Artificial Sequence: Synthetic oligonucleotide
  Sense strand starting at position 2356 of SEQ ID NO: 916031
gugggcugagcagagaaua

SEQ ID NO: 1125087 - RNA, 19 nt, Artificial Sequence
  Description of Artificial Sequence: Synthetic oligonucleotide
  Antisense strand to SEQ ID NO: 1125086
uauucucugcucagcccac

SEQ ID NO: 1125088 - RNA, 19 nt, Artificial Sequence
  Description of Artificial Sequence: Synthetic oligonucleotide
  Sense strand starting at position 2465 of SEQ ID NO: 916031
ccaugaacucucuauguga

SEQ ID NO: 1125089 - RNA, 19 nt, Artificial Sequence
  Description of Artificial Sequence: Synthetic oligonucleotide
  Antisense strand to SEQ ID NO: 1125088
ucacauagagaguucaugg

SEQ ID NO: 1125090 - RNA, 19 nt, Artificial Sequence
  Description of Artificial Sequence: Synthetic oligonucleotide
  Sense strand starting at position 2467 of SEQ ID NO: 916031
augaacucucuaugugagu

SEQ ID NO: 1125091 - RNA, 19 nt, Artificial Sequence
  Description of Artificial Sequence: Synthetic oligonucleotide
  Antisense strand to SEQ ID NO: 1125090
acucacauagagaguucau

SEQ ID NO: 1125092 - RNA, 19 nt, Artificial Sequence
  Description of Artificial Sequence: Synthetic oligonucleotide
  Sense strand starting at position 2468 of SEQ ID NO: 916031
ugaacucucuaugugagua

SEQ ID NO: 1125093 - RNA, 19 nt, Artificial Sequence
  Description of Artificial Sequence: Synthetic oligonucleotide
  Antisense strand to SEQ ID NO: 1125092
uacucacauagagaguuca

SEQ ID NO: 1125094 - RNA, 19 nt, Artificial Sequence
  Description of Artificial Sequence: Synthetic oligonucleotide
  Sense strand starting at position 2480 of SEQ ID NO: 916031
gugaguauccgucugccca

SEQ ID NO: 1125095 - RNA, 19 nt, Artificial Sequence
  Description of Artificial Sequence: Synthetic oligonucleotide
  Antisense strand to SEQ ID NO: 1125094
ugggcagacggauacucac

SEQ ID NO: 1125096 - RNA, 19 nt, Artificial Sequence
  Description of Artificial Sequence: Synthetic oligonucleotide
  Sense strand starting at position 2482 of SEQ ID NO: 916031
gaguauccgucugcccauu

SEQ ID NO: 1125097 - RNA, 19 nt, Artificial Sequence
  Description of Artificial Sequence: Synthetic oligonucleotide
  Antisense strand to SEQ ID NO: 1125096
aaugggcagacggauacuc

SEQ ID NO: 1125098 - RNA, 19 nt, Artificial Sequence
  Description of Artificial Sequence: Synthetic oligonucleotide
  Sense strand starting at position 2651 of SEQ ID NO: 916031
aaauaaauuggguguaauc

SEQ ID NO: 1125099 - RNA, 19 nt, Artificial Sequence
  Description of Artificial Sequence: Synthetic oligonucleotide
  Antisense strand to SEQ ID NO: 1125098
gauuacacccaauuuauuu

SEQ ID NO: 1125100 - RNA, 19 nt, Artificial Sequence
  Description of Artificial Sequence: Synthetic oligonucleotide
  Sense strand starting at position 2653 of SEQ ID NO: 916031
auaaauuggguguaaucuu

SEQ ID NO: 1125101 - RNA, 19 nt, Artificial Sequence
  Description of Artificial Sequence: Synthetic oligonucleotide
  Antisense strand to SEQ ID NO: 1125100
aagauuacacccaauuuau

SEQ ID NO: 1125102 - RNA, 19 nt, Artificial Sequence
  Description of Artificial Sequence: Synthetic oligonucleotide
  Sense strand starting at position 2660 of SEQ ID NO: 916031
ggguguaaucuuugacacc

SEQ ID NO: 1125103 - RNA, 19 nt, Artificial Sequence
  Description of Artificial Sequence: Synthetic oligonucleotide
  Antisense strand to SEQ ID NO: 1125102
ggugucaaagauuacaccc

SEQ ID NO: 1125104 - RNA, 19 nt, Artificial Sequence
  Description of Artificial Sequence: Synthetic oligonucleotide
  Sense strand starting at position 2712 of SEQ ID NO: 916031
ccaguuccuguggauguua

SEQ ID NO: 1125105 - RNA, 19 nt, Artificial Sequence
  Description of Artificial Sequence: Synthetic oligonucleotide
  Antisense strand to SEQ ID NO: 1125104
uaacauccacaggaacugg

SEQ ID NO: 1125106 - RNA, 19 nt, Artificial Sequence
  Description of Artificial Sequence: Synthetic oligonucleotide
  Sense strand starting at position 2720 of SEQ ID NO: 916031
uguggauguuaccuucuaa

SEQ ID NO: 1125107 - RNA, 19 nt, Artificial Sequence
  Description of Artificial Sequence: Synthetic oligonucleotide
  Antisense strand to SEQ ID NO: 1125106
uuagaagguaacauccaca

SEQ ID NO: 1125108 - RNA, 19 nt, Artificial Sequence
  Description of Artificial Sequence: Synthetic oligonucleotide
  Sense strand starting at position 3123 of SEQ ID NO: 916031
uugcgacuccaacaauuaa

SEQ ID NO: 1125109 - RNA, 19 nt, Artificial Sequence
  Description of Artificial Sequence: Synthetic oligonucleotide
  Antisense strand to SEQ ID NO: 1125108
uuaauuguuggagucgcaa

SEQ ID NO: 1125110 - RNA, 19 nt, Artificial Sequence
  Description of Artificial Sequence: Synthetic oligonucleotide
  Sense strand starting at position 3173 of SEQ ID NO: 916031
ucaucuguagcauauagua

SEQ ID NO: 1125111 - RNA, 19 nt, Artificial Sequence
  Description of Artificial Sequence: Synthetic oligonucleotide
  Antisense strand to SEQ ID NO: 1125110
uacuauaugcuacagauga

SEQ ID NO: 1125112 - RNA, 19 nt, Artificial Sequence
  Description of Artificial Sequence: Synthetic oligonucleotide
  Sense strand starting at position 3183 of SEQ ID NO: 916031
cauauaguacugugugcua

SEQ ID NO: 1125113 - RNA, 19 nt, Artificial Sequence
  Description of Artificial Sequence: Synthetic oligonucleotide
  Antisense strand to SEQ ID NO: 1125112
uagcacacaguacuauaug

SEQ ID NO: 1125114 - RNA, 19 nt, Artificial Sequence
  Description of Artificial Sequence: Synthetic oligonucleotide
  Sense strand starting at position 3895 of SEQ ID NO: 916031
guaccuggcagugaagaau

SEQ ID NO: 1125115 - RNA, 19 nt, Artificial Sequence
  Description of Artificial Sequence: Synthetic oligonucleotide
  Antisense strand to SEQ ID NO: 1125114
auucuucacugccagguac

SEQ ID NO: 1125116 - RNA, 19 nt, Artificial Sequence
  Description of Artificial Sequence: Synthetic oligonucleotide
  Sense strand starting at position 3906 of SEQ ID NO: 916031
ugaagaaugcaaugacuau

SEQ ID NO: 1125117 - RNA, 19 nt, Artificial Sequence
  Description of Artificial Sequence: Synthetic oligonucleotide
  Antisense strand to SEQ ID NO: 1125116
auagucauugcauucuuca

SEQ ID NO: 1125118 - RNA, 19 nt, Artificial Sequence
  Description of Artificial Sequence: Synthetic oligonucleotide
  Sense strand starting at position 31 of SEQ ID NO: 916032
gcgcaucagcugugacuaa

SEQ ID NO: 1125119 - RNA, 19 nt, Artificial Sequence
  Description of Artificial Sequence: Synthetic oligonucleotide
  Antisense strand to SEQ ID NO: 1125118
uuagucacagcugaugcgc

SEQ ID NO: 1125120 - RNA, 19 nt, Artificial Sequence
  Description of Artificial Sequence: Synthetic oligonucleotide
  Sense strand starting at position 49 of SEQ ID NO: 916032
agguuccucuggccaguua

SEQ ID NO: 1125121 - RNA, 19 nt, Artificial Sequence
  Description of Artificial Sequence: Synthetic oligonucleotide
  Antisense strand to SEQ ID NO: 1125120
uaacuggccagaggaaccu

SEQ ID NO: 1125122 - RNA, 19 nt, Artificial Sequence
  Description of Artificial Sequence: Synthetic oligonucleotide
  Sense strand starting at position 96 of SEQ ID NO: 916032
gcaagagugaugugucccu

SEQ ID NO: 1125123 - RNA, 19 nt, Artificial Sequence
  Description of Artificial Sequence: Synthetic oligonucleotide
  Antisense strand to SEQ ID NO: 1125122
agggacacaucacucuugc

SEQ ID NO: 1125124 - RNA, 19 nt, Artificial Sequence
  Description of Artificial Sequence: Synthetic oligonucleotide
  Sense strand starting at position 101 of SEQ ID NO: 916032
agugaugugucccucccua

SEQ ID NO: 1125125 - RNA, 19 nt, Artificial Sequence
  Description of Artificial Sequence: Synthetic oligonucleotide
  Antisense strand to SEQ ID NO: 1125124
uagggagggacacaucacu

SEQ ID NO: 1125126 - RNA, 19 nt, Artificial Sequence
  Description of Artificial Sequence: Synthetic oligonucleotide
  Sense strand starting at position 342 of SEQ ID NO: 916032
gugguugggucaccagaca

SEQ ID NO: 1125127 - RNA, 19 nt, Artificial Sequence
  Description of Artificial Sequence: Synthetic oligonucleotide
  Antisense strand to SEQ ID NO: 1125126
ugucuggugacccaaccac

SEQ ID NO: 1125128 - RNA, 19 nt, Artificial Sequence
  Description of Artificial Sequence: Synthetic oligonucleotide
  Sense strand starting at position 407 of SEQ ID NO: 916032
uggccauucucgguggaaa

SEQ ID NO: 1125129 - RNA, 19 nt, Artificial Sequence
  Description of Artificial Sequence: Synthetic oligonucleotide
  Antisense strand to SEQ ID NO: 1125128
uuuccaccgagaauggcca

SEQ ID NO: 1125130 - RNA, 19 nt, Artificial Sequence
  Description of Artificial Sequence: Synthetic oligonucleotide
  Sense strand starting at position 408 of SEQ ID NO: 916032
ggccauucucgguggaaac

SEQ ID NO: 1125131 - RNA, 19 nt, Artificial Sequence
  Description of Artificial Sequence: Synthetic oligonucleotide
  Antisense strand to SEQ ID NO: 1125130
guuuccaccgagaauggcc

SEQ ID NO: 1125132 - RNA, 19 nt, Artificial Sequence
  Description of Artificial Sequence: Synthetic oligonucleotide
  Sense strand starting at position 409 of SEQ ID NO: 916032
gccauucucgguggaaaca

SEQ ID NO: 1125133 - RNA, 19 nt, Artificial Sequence
  Description of Artificial Sequence: Synthetic oligonucleotide
  Antisense strand to SEQ ID NO: 1125132
uguuuccaccgagaauggc

SEQ ID NO: 1125134 - RNA, 19 nt, Artificial Sequence
  Description of Artificial Sequence: Synthetic oligonucleotide
  Sense strand starting at position 410 of SEQ ID NO: 916032
ccauucucgguggaaacaa

SEQ ID NO: 1125135 - RNA, 19 nt, Artificial Sequence
  Description of Artificial Sequence: Synthetic oligonucleotide
  Antisense strand to SEQ ID NO: 1125134
uuguuuccaccgagaaugg

SEQ ID NO: 1125136 - RNA, 19 nt, Artificial Sequence
  Description of Artificial Sequence: Synthetic oligonucleotide
  Sense strand starting at position 429 of SEQ ID NO: 916032
gccucagguguccaggaaa

SEQ ID NO: 1125137 - RNA, 19 nt, Artificial Sequence
  Description of Artificial Sequence: Synthetic oligonucleotide
  Antisense strand to SEQ ID NO: 1125136
uuuccuggacaccugaggc

SEQ ID NO: 1125138 - RNA, 19 nt, Artificial Sequence
  Description of Artificial Sequence: Synthetic oligonucleotide
  Sense strand starting at position 834 of SEQ ID NO: 916032
ccucuuuacccgcaggaga

SEQ ID NO: 1125139 - RNA, 19 nt, Artificial Sequence
  Description of Artificial Sequence: Synthetic oligonucleotide
  Antisense strand to SEQ ID NO: 1125138
ucuccugcggguaaagagg

SEQ ID NO: 1125140 - RNA, 19 nt, Artificial Sequence
  Description of Artificial Sequence: Synthetic oligonucleotide
  Sense strand starting at position 964 of SEQ ID NO: 916032
ccagucuccgggcgucaaa

SEQ ID NO: 1125141 - RNA, 19 nt, Artificial Sequence
  Description of Artificial Sequence: Synthetic oligonucleotide
  Antisense strand to SEQ ID NO: 1125140
uuugacgcccggagacugg

SEQ ID NO: 1125142 - RNA, 19 nt, Artificial Sequence
  Description of Artificial Sequence: Synthetic oligonucleotide
  Sense strand starting at position 1138 of SEQ ID NO: 916032
ggaacuucgaagcaaaguu

SEQ ID NO: 1125143 - RNA, 19 nt, Artificial Sequence
  Description of Artificial Sequence: Synthetic oligonucleotide
  Antisense strand to SEQ ID NO: 1125142
aacuuugcuucgaaguucc

SEQ ID NO: 1125144 - RNA, 19 nt, Artificial Sequence
  Description of Artificial Sequence: Synthetic oligonucleotide
  Sense strand starting at position 1731 of SEQ ID NO: 916032
gugacaauguggucuguga

SEQ ID NO: 1125145 - RNA, 19 nt, Artificial Sequence
  Description of Artificial Sequence: Synthetic oligonucleotide
  Antisense strand to SEQ ID NO: 1125144
ucacagaccacauugucac

SEQ ID NO: 1125146 - RNA, 19 nt, Artificial Sequence
  Description of Artificial Sequence: Synthetic oligonucleotide
  Sense strand starting at position 1735 of SEQ ID NO: 916032
caauguggucugugagguu

SEQ ID NO: 1125147 - RNA, 19 nt, Artificial Sequence
  Description of Artificial Sequence: Synthetic oligonucleotide
  Antisense strand to SEQ ID NO: 1125146
aaccucacagaccacauug

SEQ ID NO: 1125148 - RNA, 19 nt, Artificial Sequence
  Description of Artificial Sequence: Synthetic oligonucleotide
  Sense strand starting at position 1909 of SEQ ID NO: 916032
ggugucucccaacauucua

SEQ ID NO: 1125149 - RNA, 19 nt, Artificial Sequence
  Description of Artificial Sequence: Synthetic oligonucleotide
  Antisense strand to SEQ ID NO: 1125148
uagaauguugggagacacc

SEQ ID NO: 1125150 - RNA, 19 nt, Artificial Sequence
  Description of Artificial Sequence: Synthetic oligonucleotide
  Sense strand starting at position 1986 of SEQ ID NO: 916032
cagggauccuagucugaga

SEQ ID NO: 1125151 - RNA, 19 nt, Artificial Sequence
  Description of Artificial Sequence: Synthetic oligonucleotide
  Antisense strand to SEQ ID NO: 1125150
ucucagacuaggaucccug

SEQ ID NO: 1125152 - RNA, 19 nt, Artificial Sequence
  Description of Artificial Sequence: Synthetic oligonucleotide
  Sense strand starting at position 2084 of SEQ ID NO: 916032
gaggauugacaaggucugu

SEQ ID NO: 1125153 - RNA, 19 nt, Artificial Sequence
  Description of Artificial Sequence: Synthetic oligonucleotide
  Antisense strand to SEQ ID NO: 1125152
acagaccuugucaauccuc

SEQ ID NO: 1125154 - RNA, 19 nt, Artificial Sequence
  Description of Artificial Sequence: Synthetic oligonucleotide
  Sense strand starting at position 2124 of SEQ ID NO: 916032
uccugcauccgucugugau

SEQ ID NO: 1125155 - RNA, 19 nt, Artificial Sequence
  Description of Artificial Sequence: Synthetic oligonucleotide
  Antisense strand to SEQ ID NO: 1125154
aucacagacggaugcagga

SEQ ID NO: 1125156 - RNA, 19 nt, Artificial Sequence
  Description of Artificial Sequence: Synthetic oligonucleotide
  Sense strand starting at position 2125 of SEQ ID NO: 916032
ccugcauccgucugugaua

SEQ ID NO: 1125157 - RNA, 19 nt, Artificial Sequence
  Description of Artificial Sequence: Synthetic oligonucleotide
  Antisense strand to SEQ ID NO: 1125156
uaucacagacggaugcagg

SEQ ID NO: 1125158 - RNA, 19 nt, Artificial Sequence
  Description of Artificial Sequence: Synthetic oligonucleotide
  Sense strand starting at position 2177 of SEQ ID NO: 916032
aggcuuacauccucuggau

SEQ ID NO: 1125159 - RNA, 19 nt, Artificial Sequence
  Description of Artificial Sequence: Synthetic oligonucleotide
  Antisense strand to SEQ ID NO: 1125158
auccagaggauguaagccu

SEQ ID NO: 1125160 - RNA, 19 nt, Artificial Sequence
  Description of Artificial Sequence: Synthetic oligonucleotide
  Sense strand starting at position 2201 of SEQ ID NO: 916032
cgucuuaucccagaagaca

SEQ ID NO: 1125161 - RNA, 19 nt, Artificial Sequence
  Description of Artificial Sequence: Synthetic oligonucleotide
  Antisense strand to SEQ ID NO: 1125160
ugucuucugggauaagacg

SEQ ID NO: 1125162 - RNA, 19 nt, Artificial Sequence
  Description of Artificial Sequence: Synthetic oligonucleotide
  Sense strand starting at position 2404 of SEQ ID NO: 916032
uccugagucuuaguguaug

SEQ ID NO: 1125163 - RNA, 19 nt, Artificial Sequence
  Description of Artificial Sequence: Synthetic oligonucleotide
  Antisense strand to SEQ ID NO: 1125162
cauacacuaagacucagga

SEQ ID NO: 1125164 - RNA, 19 nt, Artificial Sequence
  Description of Artificial Sequence: Synthetic oligonucleotide
  Sense strand starting at position 2407 of SEQ ID NO: 916032
ugagucuuaguguaugugu

SEQ ID NO: 1125165 - RNA, 19 nt, Artificial Sequence
  Description of Artificial Sequence: Synthetic oligonucleotide
  Antisense strand to SEQ ID NO: 1125164
acacauacacuaagacuca

SEQ ID NO: 1125166 - RNA, 19 nt, Artificial Sequence
  Description of Artificial Sequence: Synthetic oligonucleotide
  Sense strand starting at position 2414 of SEQ ID NO: 916032
uaguguauguguguacaca

SEQ ID NO: 1125167 - RNA, 19 nt, Artificial Sequence
  Description of Artificial Sequence: Synthetic oligonucleotide
  Antisense strand to SEQ ID NO: 1125166
uguguacacacauacacua

SEQ ID NO: 1125168 - RNA, 19 nt, Artificial Sequence
  Description of Artificial Sequence: Synthetic oligonucleotide
  Sense strand starting at position 2415 of SEQ ID NO: 916032
aguguauguguguacacaa

SEQ ID NO: 1125169 - RNA, 19 nt, Artificial Sequence
  Description of Artificial Sequence: Synthetic oligonucleotide
  Antisense strand to SEQ ID NO: 1125168
uuguguacacacauacacu

SEQ ID NO: 1125170 - RNA, 19 nt, Artificial Sequence
  Description of Artificial Sequence: Synthetic oligonucleotide
  Sense strand starting at position 2482 of SEQ ID NO: 916032
ugagaagcaucuuccagga

SEQ ID NO: 1125171 - RNA, 19 nt, Artificial Sequence
  Description of Artificial Sequence: Synthetic oligonucleotide
  Antisense strand to SEQ ID NO: 1125170
uccuggaagaugcuucuca

SEQ ID NO: 1125172 - RNA, 19 nt, Artificial Sequence
  Description of Artificial Sequence: Synthetic oligonucleotide
  Sense strand starting at position 2606 of SEQ ID NO: 916032
ucaucagguuccuuauugu

SEQ ID NO: 1125173 - RNA, 19 nt, Artificial Sequence
  Description of Artificial Sequence: Synthetic oligonucleotide
  Antisense strand to SEQ ID NO: 1125172
acaauaaggaaccugauga

SEQ ID NO: 1125174 - RNA, 19 nt, Artificial Sequence
  Description of Artificial Sequence: Synthetic oligonucleotide
  Sense strand starting at position 2719 of SEQ ID NO: 916032
uggccacacugugaagaaa

SEQ ID NO: 1125175 - RNA, 19 nt, Artificial Sequence
  Description of Artificial Sequence: Synthetic oligonucleotide
  Antisense strand to SEQ ID NO: 1125174
uuucuucacaguguggcca

SEQ ID NO: 1125176 - RNA, 19 nt, Artificial Sequence
  Description of Artificial Sequence: Synthetic oligonucleotide
  Sense strand starting at position 2808 of SEQ ID NO: 916032
agcagaaggaugugcucaa

SEQ ID NO: 1125177 - RNA, 19 nt, Artificial Sequence
  Description of Artificial Sequence: Synthetic oligonucleotide
  Antisense strand to SEQ ID NO: 1125176
uugagcacauccuucugcu

SEQ ID NO: 1125178 - RNA, 19 nt, Artificial Sequence
  Description of Artificial Sequence: Synthetic oligonucleotide
  Sense strand starting at position 2812 of SEQ ID NO: 916032
gaaggaugugcucaaggug

SEQ ID NO: 1125179 - RNA, 19 nt, Artificial Sequence
  Description of Artificial Sequence: Synthetic oligonucleotide
  Antisense strand to SEQ ID NO: 1125178
caccuugagcacauccuuc

SEQ ID NO: 1125180 - RNA, 19 nt, Artificial Sequence
  Description of Artificial Sequence: Synthetic oligonucleotide
  Sense strand starting at position 2867 of SEQ ID NO: 916032
gaagcagucgacuguggaa

SEQ ID NO: 1125181 - RNA, 19 nt, Artificial Sequence
  Description of Artificial Sequence: Synthetic oligonucleotide
  Antisense strand to SEQ ID NO: 1125180
uuccacagucgacugcuuc

SEQ ID NO: 1125182 - RNA, 19 nt, Artificial Sequence
  Description of Artificial Sequence: Synthetic oligonucleotide
  Sense strand starting at position 2983 of SEQ ID NO: 916032
gaucaagauugagagacua

SEQ ID NO: 1125183 - RNA, 19 nt, Artificial Sequence
  Description of Artificial Sequence: Synthetic oligonucleotide
  Antisense strand to SEQ ID NO: 1125182
uagucucucaaucuugauc

SEQ ID NO: 1125184 - RNA, 19 nt, Artificial Sequence
  Description of Artificial Sequence: Synthetic oligonucleotide
  Sense strand starting at position 3121 of SEQ ID NO: 916032
uguuaacuguuaucauggu

SEQ ID NO: 1125185 - RNA, 19 nt, Artificial Sequence
  Description of Artificial Sequence: Synthetic oligonucleotide
  Antisense strand to SEQ ID NO: 1125184
accaugauaacaguuaaca

SEQ ID NO: 1125186 - RNA, 19 nt, Artificial Sequence
  Description of Artificial Sequence: Synthetic oligonucleotide
  Sense strand starting at position 3127 of SEQ ID NO: 916032
cuguuaucaugguuaacaa

SEQ ID NO: 1125187 - RNA, 19 nt, Artificial Sequence
  Description of Artificial Sequence: Synthetic oligonucleotide
  Antisense strand to SEQ ID NO: 1125186
uuguuaaccaugauaacag

SEQ ID NO: 1125188 - RNA, 19 nt, Artificial Sequence
  Description of Artificial Sequence: Synthetic oligonucleotide
  Sense strand starting at position 3128 of SEQ ID NO: 916032
uguuaucaugguuaacaaa

SEQ ID NO: 1125189 - RNA, 19 nt, Artificial Sequence
  Description of Artificial Sequence: Synthetic oligonucleotide
  Antisense strand to SEQ ID NO: 1125188
uuuguuaaccaugauaaca

SEQ ID NO: 1125190 - RNA, 19 nt, Artificial Sequence
  Description of Artificial Sequence: Synthetic oligonucleotide
  Sense strand starting at position 3147 of SEQ ID NO: 916032
acggucauauaauaugauu

SEQ ID NO: 1125191 - RNA, 19 nt, Artificial Sequence
  Description of Artificial Sequence: Synthetic oligonucleotide
  Antisense strand to SEQ ID NO: 1125190
aaucauauuauaugaccgu

SEQ ID NO: 1125192 - RNA, 19 nt, Artificial Sequence
  Description of Artificial Sequence: Synthetic oligonucleotide
  Sense strand starting at position 3169 of SEQ ID NO: 916032
uagagaaguuacucuaguu

SEQ ID NO: 1125193 - RNA, 19 nt, Artificial Sequence
  Description of Artificial Sequence: Synthetic oligonucleotide
  Antisense strand to SEQ ID NO: 1125192
aacuagaguaacuucucua

SEQ ID NO: 1125194 - RNA, 19 nt, Artificial Sequence
  Description of Artificial Sequence: Synthetic oligonucleotide
  Sense strand starting at position 3222 of SEQ ID NO: 916032
caaugcauuuguuacagga

SEQ ID NO: 1125195 - RNA, 19 nt, Artificial Sequence
  Description of Artificial Sequence: Synthetic oligonucleotide
  Antisense strand to SEQ ID NO: 1125194
uccuguaacaaaugcauug

SEQ ID NO: 1125196 - RNA, 19 nt, Artificial Sequence
  Description of Artificial Sequence: Synthetic oligonucleotide
  Sense strand starting at position 3300 of SEQ ID NO: 916032
gggcgagucgcagugcaaa

SEQ ID NO: 1125197 - RNA, 19 nt, Artificial Sequence
  Description of Artificial Sequence: Synthetic oligonucleotide
  Antisense strand to SEQ ID NO: 1125196
uuugcacugcgacucgccc

SEQ ID NO: 1125198 - RNA, 19 nt, Artificial Sequence
  Description of Artificial Sequence: Synthetic oligonucleotide
  Sense strand starting at position 281 of SEQ ID NO: 916033
ccaccaacaugauaagaga

SEQ ID NO: 1125199 - RNA, 19 nt, Artificial Sequence
  Description of Artificial Sequence: Synthetic oligonucleotide
  Antisense strand to SEQ ID NO: 1125198
ucucuuaucauguuggugg

SEQ ID NO: 1125200 - RNA, 19 nt, Artificial Sequence
  Description of Artificial Sequence: Synthetic oligonucleotide
  Sense strand starting at position 339 of SEQ ID NO: 916033
aaguuuggagucuaugcau

SEQ ID NO: 1125201 - RNA, 19 nt, Artificial Sequence
  Description of Artificial Sequence: Synthetic oligonucleotide
  Antisense strand to SEQ ID NO: 1125200
augcauagacuccaaacuu

SEQ ID NO: 1125202 - RNA, 19 nt, Artificial Sequence
  Description of Artificial Sequence: Synthetic oligonucleotide
  Sense strand starting at position 491 of SEQ ID NO: 916033
cccaacucaccgugaucau

SEQ ID NO: 1125203 - RNA, 19 nt, Artificial Sequence
  Description of Artificial Sequence: Synthetic oligonucleotide
  Antisense strand to SEQ ID NO: 1125202
augaucacggugaguuggg

SEQ ID NO: 1125204 - RNA, 19 nt, Artificial Sequence
  Description of Artificial Sequence: Synthetic oligonucleotide
  Sense strand starting at position 492 of SEQ ID NO: 916033
ccaacucaccgugaucaua

SEQ ID NO: 1125205 - RNA, 19 nt, Artificial Sequence
  Description of Artificial Sequence: Synthetic oligonucleotide
  Antisense strand to SEQ ID NO: 1125204
uaugaucacggugaguugg

SEQ ID NO: 1125206 - RNA, 19 nt, Artificial Sequence
  Description of Artificial Sequence: Synthetic oligonucleotide
  Sense strand starting at position 500 of SEQ ID NO: 916033
ccgugaucauaagacaaua

SEQ ID NO: 1125207 - RNA, 19 nt, Artificial Sequence
  Description of Artificial Sequence: Synthetic oligonucleotide
  Antisense strand to SEQ ID NO: 1125206
uauugucuuaugaucacgg

SEQ ID NO: 1125208 - RNA, 19 nt, Artificial Sequence
  Description of Artificial Sequence: Synthetic oligonucleotide
  Sense strand starting at position 620 of SEQ ID NO: 916033
ccuggauuauggucugacu

SEQ ID NO: 1125209 - RNA, 19 nt, Artificial Sequence
  Description of Artificial Sequence: Synthetic oligonucleotide
  Antisense strand to SEQ ID NO: 1125208
agucagaccauaauccagg

SEQ ID NO: 1125210 - RNA, 19 nt, Artificial Sequence
  Description of Artificial Sequence: Synthetic oligonucleotide
  Sense strand starting at position 622 of SEQ ID NO: 916033
uggauuauggucugacuca

SEQ ID NO: 1125211 - RNA, 19 nt, Artificial Sequence
  Description of Artificial Sequence: Synthetic oligonucleotide
  Antisense strand to SEQ ID NO: 1125210
ugagucagaccauaaucca

SEQ ID NO: 1125212 - RNA, 19 nt, Artificial Sequence
  Description of Artificial Sequence: Synthetic oligonucleotide
  Sense strand starting at position 623 of SEQ ID NO: 916033
ggauuauggucugacucag

SEQ ID NO: 1125213 - RNA, 19 nt, Artificial Sequence
  Description of Artificial Sequence: Synthetic oligonucleotide
  Antisense strand to SEQ ID NO: 1125212
cugagucagaccauaaucc

SEQ ID NO: 1125214 - RNA, 19 nt, Artificial Sequence
  Description of Artificial Sequence: Synthetic oligonucleotide
  Sense strand starting at position 803 of SEQ ID NO: 916033
cucacaccucuagggaauu

SEQ ID NO: 1125215 - RNA, 19 nt, Artificial Sequence
  Description of Artificial Sequence: Synthetic oligonucleotide
  Antisense strand to SEQ ID NO: 1125214
aauucccuagaggugugag

SEQ ID NO: 1125216 - RNA, 19 nt, Artificial Sequence
  Description of Artificial Sequence: Synthetic oligonucleotide
  Sense strand starting at position 804 of SEQ ID NO: 916033
ucacaccucuagggaauuu

SEQ ID NO: 1125217 - RNA, 19 nt, Artificial Sequence
  Description of Artificial Sequence: Synthetic oligonucleotide
  Antisense strand to SEQ ID NO: 1125216
aaauucccuagagguguga

SEQ ID NO: 1125218 - RNA, 19 nt, Artificial Sequence
  Description of Artificial Sequence: Synthetic oligonucleotide
  Sense strand starting at position 889 of SEQ ID NO: 916033
cucuuuaaucagggacaug

SEQ ID NO: 1125219 - RNA, 19 nt, Artificial Sequence
  Description of Artificial Sequence: Synthetic oligonucleotide
  Antisense strand to SEQ ID NO: 1125218
caugucccugauuaaagag

SEQ ID NO: 1125220 - RNA, 19 nt, Artificial Sequence
  Description of Artificial Sequence: Synthetic oligonucleotide
  Sense strand starting at position 1072 of SEQ ID NO: 916033
agguuccucuggccaguua

SEQ ID NO: 1125221 - RNA, 19 nt, Artificial Sequence
  Description of Artificial Sequence: Synthetic oligonucleotide
  Antisense strand to SEQ ID NO: 1125220
uaacuggccagaggaaccu

SEQ ID NO: 1125222 - RNA, 19 nt, Artificial Sequence
  Description of Artificial Sequence: Synthetic oligonucleotide
  Sense strand starting at position 1119 of SEQ ID NO: 916033
gcaagagugaugugucccu

SEQ ID NO: 1125223 - RNA, 19 nt, Artificial Sequence
  Description of Artificial Sequence: Synthetic oligonucleotide
  Antisense strand to SEQ ID NO: 1125222
agggacacaucacucuugc

SEQ ID NO: 1125224 - RNA, 19 nt, Artificial Sequence
  Description of Artificial Sequence: Synthetic oligonucleotide
  Sense strand starting at position 1124 of SEQ ID NO: 916033
agugaugugucccucccua

SEQ ID NO: 1125225 - RNA, 19 nt, Artificial Sequence
  Description of Artificial Sequence: Synthetic oligonucleotide
  Antisense strand to SEQ ID NO: 1125224
uagggagggacacaucacu

SEQ ID NO: 1125226 - RNA, 19 nt, Artificial Sequence
  Description of Artificial Sequence: Synthetic oligonucleotide
  Sense strand starting at position 1365 of SEQ ID NO: 916033
gugguugggucaccagaca

SEQ ID NO: 1125227 - RNA, 19 nt, Artificial Sequence
  Description of Artificial Sequence: Synthetic oligonucleotide
  Antisense strand to SEQ ID NO: 1125226
ugucuggugacccaaccac

SEQ ID NO: 1125228 - RNA, 19 nt, Artificial Sequence
  Description of Artificial Sequence: Synthetic oligonucleotide
  Sense strand starting at position 1430 of SEQ ID NO: 916033
uggccauucucgguggaaa

SEQ ID NO: 1125229 - RNA, 19 nt, Artificial Sequence
  Description of Artificial Sequence: Synthetic oligonucleotide
  Antisense strand to SEQ ID NO: 1125228
uuuccaccgagaauggcca

SEQ ID NO: 1125230 - RNA, 19 nt, Artificial Sequence
  Description of Artificial Sequence: Synthetic oligonucleotide
  Sense strand starting at position 1431 of SEQ ID NO: 916033
ggccauucucgguggaaac

SEQ ID NO: 1125231 - RNA, 19 nt, Artificial Sequence
  Description of Artificial Sequence: Synthetic oligonucleotide
  Antisense strand to SEQ ID NO: 1125230
guuuccaccgagaauggcc

SEQ ID NO: 1125232 - RNA, 19 nt, Artificial Sequence
  Description of Artificial Sequence: Synthetic oligonucleotide
  Sense strand starting at position 1432 of SEQ ID NO: 916033
gccauucucgguggaaaca

SEQ ID NO: 1125233 - RNA, 19 nt, Artificial Sequence
  Description of Artificial Sequence: Synthetic oligonucleotide
  Antisense strand to SEQ ID NO: 1125232
uguuuccaccgagaauggc

SEQ ID NO: 1125234 - RNA, 19 nt, Artificial Sequence
  Description of Artificial Sequence: Synthetic oligonucleotide
  Sense strand starting at position 1433 of SEQ ID NO: 916033
ccauucucgguggaaacaa

SEQ ID NO: 1125235 - RNA, 19 nt, Artificial Sequence
  Description of Artificial Sequence: Synthetic oligonucleotide
  Antisense strand to SEQ ID NO: 1125234
uuguuuccaccgagaaugg

SEQ ID NO: 1125236 - RNA, 19 nt, Artificial Sequence
  Description of Artificial Sequence: Synthetic oligonucleotide
  Sense strand starting at position 1452 of SEQ ID NO: 916033
gccucagguguccaggaaa

SEQ ID NO: 1125237 - RNA, 19 nt, Artificial Sequence
  Description of Artificial Sequence: Synthetic oligonucleotide
  Antisense strand to SEQ ID NO: 1125236
uuuccuggacaccugaggc

SEQ ID NO: 1125238 - RNA, 19 nt, Artificial Sequence
  Description of Artificial Sequence: Synthetic oligonucleotide
  Sense strand starting at position 1857 of SEQ ID NO: 916033
ccucuuuacccgcaggaga

SEQ ID NO: 1125239 - RNA, 19 nt, Artificial Sequence
  Description of Artificial Sequence: Synthetic oligonucleotide
  Antisense strand to SEQ ID NO: 1125238
ucuccugcggguaaagagg

SEQ ID NO: 1125240 - RNA, 19 nt, Artificial Sequence
  Description of Artificial Sequence: Synthetic oligonucleotide
  Sense strand starting at position 2161 of SEQ ID NO: 916033
ggaacuucgaagcaaaguu

SEQ ID NO: 1125241 - RNA, 19 nt, Artificial Sequence
  Description of Artificial Sequence: Synthetic oligonucleotide
  Antisense strand to SEQ ID NO: 1125240
aacuuugcuucgaaguucc

SEQ ID NO: 1125242 - RNA, 19 nt, Artificial Sequence
  Description of Artificial Sequence: Synthetic oligonucleotide
  Sense strand starting at position 2754 of SEQ ID NO: 916033
gugacaauguggucuguga

SEQ ID NO: 1125243 - RNA, 19 nt, Artificial Sequence
  Description of Artificial Sequence: Synthetic oligonucleotide
  Antisense strand to SEQ ID NO: 1125242
ucacagaccacauugucac

SEQ ID NO: 1125244 - RNA, 19 nt, Artificial Sequence
  Description of Artificial Sequence: Synthetic oligonucleotide
  Sense strand starting at position 2758 of SEQ ID NO: 916033
caauguggucugugagguu

SEQ ID NO: 1125245 - RNA, 19 nt, Artificial Sequence
  Description of Artificial Sequence: Synthetic oligonucleotide
  Antisense strand to SEQ ID NO: 1125244
aaccucacagaccacauug

SEQ ID NO: 1125246 - RNA, 19 nt, Artificial Sequence
  Description of Artificial Sequence: Synthetic oligonucleotide
  Sense strand starting at position 2932 of SEQ ID NO: 916033
ggugucucccaacauucua

SEQ ID NO: 1125247 - RNA, 19 nt, Artificial Sequence
  Description of Artificial Sequence: Synthetic oligonucleotide
  Antisense strand to SEQ ID NO: 1125246
uagaauguugggagacacc

SEQ ID NO: 1125248 - RNA, 19 nt, Artificial Sequence
  Description of Artificial Sequence: Synthetic oligonucleotide
  Sense strand starting at position 3009 of SEQ ID NO: 916033
cagggauccuagucugaga

SEQ ID NO: 1125249 - RNA, 19 nt, Artificial Sequence
  Description of Artificial Sequence: Synthetic oligonucleotide
  Antisense strand to SEQ ID NO: 1125248
ucucagacuaggaucccug

SEQ ID NO: 1125250 - RNA, 19 nt, Artificial Sequence
  Description of Artificial Sequence: Synthetic oligonucleotide
  Sense strand starting at position 3107 of SEQ ID NO: 916033
gaggauugacaaggucugu

SEQ ID NO: 1125251 - RNA, 19 nt, Artificial Sequence
  Description of Artificial Sequence: Synthetic oligonucleotide
  Antisense strand to SEQ ID NO: 1125250
acagaccuugucaauccuc

SEQ ID NO: 1125252 - RNA, 19 nt, Artificial Sequence
  Description of Artificial Sequence: Synthetic oligonucleotide
  Sense strand starting at position 3147 of SEQ ID NO: 916033
uccugcauccgucugugau

SEQ ID NO: 1125253 - RNA, 19 nt, Artificial Sequence
  Description of Artificial Sequence: Synthetic oligonucleotide
  Antisense strand to SEQ ID NO: 1125252
aucacagacggaugcagga

SEQ ID NO: 1125254 - RNA, 19 nt, Artificial Sequence
  Description of Artificial Sequence: Synthetic oligonucleotide
  Sense strand starting at position 3148 of SEQ ID NO: 916033
ccugcauccgucugugaua

SEQ ID NO: 1125255 - RNA, 19 nt, Artificial Sequence
  Description of Artificial Sequence: Synthetic oligonucleotide
  Antisense strand to SEQ ID NO: 1125254
uaucacagacggaugcagg

SEQ ID NO: 1125256 - RNA, 19 nt, Artificial Sequence
  Description of Artificial Sequence: Synthetic oligonucleotide
  Sense strand starting at position 3200 of SEQ ID NO: 916033
aggcuuacauccucuggau

SEQ ID NO: 1125257 - RNA, 19 nt, Artificial Sequence
  Description of Artificial Sequence: Synthetic oligonucleotide
  Antisense strand to SEQ ID NO: 1125256
auccagaggauguaagccu

SEQ ID NO: 1125258 - RNA, 19 nt, Artificial Sequence
  Description of Artificial Sequence: Synthetic oligonucleotide
  Sense strand starting at position 3224 of SEQ ID NO: 916033
cgucuuaucccagaagaca

SEQ ID NO: 1125259 - RNA, 19 nt, Artificial Sequence
  Description of Artificial Sequence: Synthetic oligonucleotide
  Antisense strand to SEQ ID NO: 1125258
ugucuucugggauaagacg

SEQ ID NO: 1125260 - RNA, 19 nt, Artificial Sequence
  Description of Artificial Sequence: Synthetic oligonucleotide
  Sense strand starting at position 3427 of SEQ ID NO: 916033
uccugagucuuaguguaug

SEQ ID NO: 1125261 - RNA, 19 nt, Artificial Sequence
  Description of Artificial Sequence: Synthetic oligonucleotide
  Antisense strand to SEQ ID NO: 1125260
cauacacuaagacucagga

SEQ ID NO: 1125262 - RNA, 19 nt, Artificial Sequence
  Description of Artificial Sequence: Synthetic oligonucleotide
  Sense strand starting at position 3430 of SEQ ID NO: 916033
ugagucuuaguguaugugu

SEQ ID NO: 1125263 - RNA, 19 nt, Artificial Sequence
  Description of Artificial Sequence: Synthetic oligonucleotide
  Antisense strand to SEQ ID NO: 1125262
acacauacacuaagacuca

SEQ ID NO: 1125264 - RNA, 19 nt, Artificial Sequence
  Description of Artificial Sequence: Synthetic oligonucleotide
  Sense strand starting at position 3437 of SEQ ID NO: 916033
uaguguauguguguacaca

SEQ ID NO: 1125265 - RNA, 19 nt, Artificial Sequence
  Description of Artificial Sequence: Synthetic oligonucleotide
  Antisense strand to SEQ ID NO: 1125264
uguguacacacauacacua

SEQ ID NO: 1125266 - RNA, 19 nt, Artificial Sequence
  Description of Artificial Sequence: Synthetic oligonucleotide
  Sense strand starting at position 3438 of SEQ ID NO: 916033
aguguauguguguacacaa

SEQ ID NO: 1125267 - RNA, 19 nt, Artificial Sequence
  Description of Artificial Sequence: Synthetic oligonucleotide
  Antisense strand to SEQ ID NO: 1125266
uuguguacacacauacacu

SEQ ID NO: 1125268 - RNA, 19 nt, Artificial Sequence
  Description of Artificial Sequence: Synthetic oligonucleotide
  Sense strand starting at position 3505 of SEQ ID NO: 916033
ugagaagcaucuuccagga

SEQ ID NO: 1125269 - RNA, 19 nt, Artificial Sequence
  Description of Artificial Sequence: Synthetic oligonucleotide
  Antisense strand to SEQ ID NO: 1125268
uccuggaagaugcuucuca

SEQ ID NO: 1125270 - RNA, 19 nt, Artificial Sequence
  Description of Artificial Sequence: Synthetic oligonucleotide
  Sense strand starting at position 3629 of SEQ ID NO: 916033
ucaucagguuccuuauugu

SEQ ID NO: 1125271 - RNA, 19 nt, Artificial Sequence
  Description of Artificial Sequence: Synthetic oligonucleotide
  Antisense strand to SEQ ID NO: 1125270
acaauaaggaaccugauga

SEQ ID NO: 1125272 - RNA, 19 nt, Artificial Sequence
  Description of Artificial Sequence: Synthetic oligonucleotide
  Sense strand starting at position 3831 of SEQ ID NO: 916033
agcagaaggaugugcucaa

SEQ ID NO: 1125273 - RNA, 19 nt, Artificial Sequence
  Description of Artificial Sequence: Synthetic oligonucleotide
  Antisense strand to SEQ ID NO: 1125272
uugagcacauccuucugcu

SEQ ID NO: 1125274 - RNA, 19 nt, Artificial Sequence
  Description of Artificial Sequence: Synthetic oligonucleotide
  Sense strand starting at position 3835 of SEQ ID NO: 916033
gaaggaugugcucaaggug

SEQ ID NO: 1125275 - RNA, 19 nt, Artificial Sequence
  Description of Artificial Sequence: Synthetic oligonucleotide
  Antisense strand to SEQ ID NO: 1125274
caccuugagcacauccuuc

SEQ ID NO: 1125276 - RNA, 19 nt, Artificial Sequence
  Description of Artificial Sequence: Synthetic oligonucleotide
  Sense strand starting at position 3890 of SEQ ID NO: 916033
gaagcagucgacuguggaa

SEQ ID NO: 1125277 - RNA, 19 nt, Artificial Sequence
  Description of Artificial Sequence: Synthetic oligonucleotide
  Antisense strand to SEQ ID NO: 1125276
uuccacagucgacugcuuc

SEQ ID NO: 1125278 - RNA, 19 nt, Artificial Sequence
  Description of Artificial Sequence: Synthetic oligonucleotide
  Sense strand starting at position 449 of SEQ ID NO: 916034
ccaccaacaugauaagaga

SEQ ID NO: 1125279 - RNA, 19 nt, Artificial Sequence
  Description of Artificial Sequence: Synthetic oligonucleotide
  Antisense strand to SEQ ID NO: 1125278
ucucuuaucauguuggugg

SEQ ID NO: 1125280 - RNA, 19 nt, Artificial Sequence
  Description of Artificial Sequence: Synthetic oligonucleotide
  Sense strand starting at position 507 of SEQ ID NO: 916034
aaguuuggagucuaugcau

SEQ ID NO: 1125281 - RNA, 19 nt, Artificial Sequence
  Description of Artificial Sequence: Synthetic oligonucleotide
  Antisense strand to SEQ ID NO: 1125280
augcauagacuccaaacuu

SEQ ID NO: 1125282 - RNA, 19 nt, Artificial Sequence
  Description of Artificial Sequence: Synthetic oligonucleotide
  Sense strand starting at position 659 of SEQ ID NO: 916034
cccaacucaccgugaucau

SEQ ID NO: 1125283 - RNA, 19 nt, Artificial Sequence
  Description of Artificial Sequence: Synthetic oligonucleotide
  Antisense strand to SEQ ID NO: 1125282
augaucacggugaguuggg

SEQ ID NO: 1125284 - RNA, 19 nt, Artificial Sequence
  Description of Artificial Sequence: Synthetic oligonucleotide
  Sense strand starting at position 660 of SEQ ID NO: 916034
ccaacucaccgugaucaua

SEQ ID NO: 1125285 - RNA, 19 nt, Artificial Sequence
  Description of Artificial Sequence: Synthetic oligonucleotide
  Antisense strand to SEQ ID NO: 1125284
uaugaucacggugaguugg

SEQ ID NO: 1125286 - RNA, 19 nt, Artificial Sequence
  Description of Artificial Sequence: Synthetic oligonucleotide
  Sense strand starting at position 668 of SEQ ID NO: 916034
ccgugaucauaagacaaua

SEQ ID NO: 1125287 - RNA, 19 nt, Artificial Sequence
  Description of Artificial Sequence: Synthetic oligonucleotide
  Antisense strand to SEQ ID NO: 1125286
uauugucuuaugaucacgg

SEQ ID NO: 1125288 - RNA, 19 nt, Artificial Sequence
  Description of Artificial Sequence: Synthetic oligonucleotide
  Sense strand starting at position 788 of SEQ ID NO: 916034
ccuggauuauggucugacu

SEQ ID NO: 1125289 - RNA, 19 nt, Artificial Sequence
  Description of Artificial Sequence: Synthetic oligonucleotide
  Antisense strand to SEQ ID NO: 1125288
agucagaccauaauccagg

SEQ ID NO: 1125290 - RNA, 19 nt, Artificial Sequence
  Description of Artificial Sequence: Synthetic oligonucleotide
  Sense strand starting at position 790 of SEQ ID NO: 916034
uggauuauggucugacuca

SEQ ID NO: 1125291 - RNA, 19 nt, Artificial Sequence
  Description of Artificial Sequence: Synthetic oligonucleotide
  Antisense strand to SEQ ID NO: 1125290
ugagucagaccauaaucca

SEQ ID NO: 1125292 - RNA, 19 nt, Artificial Sequence
  Description of Artificial Sequence: Synthetic oligonucleotide
  Sense strand starting at position 791 of SEQ ID NO: 916034
ggauuauggucugacucag

SEQ ID NO: 1125293 - RNA, 19 nt, Artificial Sequence
  Description of Artificial Sequence: Synthetic oligonucleotide
  Antisense strand to SEQ ID NO: 1125292
cugagucagaccauaaucc

SEQ ID NO: 1125294 - RNA, 19 nt, Artificial Sequence
  Description of Artificial Sequence: Synthetic oligonucleotide
  Sense strand starting at position 971 of SEQ ID NO: 916034
cucacaccucuagggaauu

SEQ ID NO: 1125295 - RNA, 19 nt, Artificial Sequence
  Description of Artificial Sequence: Synthetic oligonucleotide
  Antisense strand to SEQ ID NO: 1125294
aauucccuagaggugugag

SEQ ID NO: 1125296 - RNA, 19 nt, Artificial Sequence
  Description of Artificial Sequence: Synthetic oligonucleotide
  Sense strand starting at position 972 of SEQ ID NO: 916034
ucacaccucuagggaauuu

SEQ ID NO: 1125297 - RNA, 19 nt, Artificial Sequence
  Description of Artificial Sequence: Synthetic oligonucleotide
  Antisense strand to SEQ ID NO: 1125296
aaauucccuagagguguga

SEQ ID NO: 1125298 - RNA, 19 nt, Artificial Sequence
  Description of Artificial Sequence: Synthetic oligonucleotide
  Sense strand starting at position 1057 of SEQ ID NO: 916034
cucuuuaaucagggacaug

SEQ ID NO: 1125299 - RNA, 19 nt, Artificial Sequence
  Description of Artificial Sequence: Synthetic oligonucleotide
  Antisense strand to SEQ ID NO: 1125298
caugucccugauuaaagag

SEQ ID NO: 1125300 - RNA, 19 nt, Artificial Sequence
  Description of Artificial Sequence: Synthetic oligonucleotide
  Sense strand starting at position 1222 of SEQ ID NO: 916034
gcgcaucagcugugacuaa

SEQ ID NO: 1125301 - RNA, 19 nt, Artificial Sequence
  Description of Artificial Sequence: Synthetic oligonucleotide
  Antisense strand to SEQ ID NO: 1125300
uuagucacagcugaugcgc

SEQ ID NO: 1125302 - RNA, 19 nt, Artificial Sequence
  Description of Artificial Sequence: Synthetic oligonucleotide
  Sense strand starting at position 1240 of SEQ ID NO: 916034
agguuccucuggccaguua

SEQ ID NO: 1125303 - RNA, 19 nt, Artificial Sequence
  Description of Artificial Sequence: Synthetic oligonucleotide
  Antisense strand to SEQ ID NO: 1125302
uaacuggccagaggaaccu

SEQ ID NO: 1125304 - RNA, 19 nt, Artificial Sequence
  Description of Artificial Sequence: Synthetic oligonucleotide
  Sense strand starting at position 1287 of SEQ ID NO: 916034
gcaagagugaugugucccu

SEQ ID NO: 1125305 - RNA, 19 nt, Artificial Sequence
  Description of Artificial Sequence: Synthetic oligonucleotide
  Antisense strand to SEQ ID NO: 1125304
agggacacaucacucuugc

SEQ ID NO: 1125306 - RNA, 19 nt, Artificial Sequence
  Description of Artificial Sequence: Synthetic oligonucleotide
  Sense strand starting at position 1292 of SEQ ID NO: 916034
agugaugugucccucccua

SEQ ID NO: 1125307 - RNA, 19 nt, Artificial Sequence
  Description of Artificial Sequence: Synthetic oligonucleotide
  Antisense strand to SEQ ID NO: 1125306
uagggagggacacaucacu

SEQ ID NO: 1125308 - RNA, 19 nt, Artificial Sequence
  Description of Artificial Sequence: Synthetic oligonucleotide
  Sense strand starting at position 1533 of SEQ ID NO: 916034
gugguugggucaccagaca

SEQ ID NO: 1125309 - RNA, 19 nt, Artificial Sequence
  Description of Artificial Sequence: Synthetic oligonucleotide
  Antisense strand to SEQ ID NO: 1125308
ugucuggugacccaaccac

SEQ ID NO: 1125310 - RNA, 19 nt, Artificial Sequence
  Description of Artificial Sequence: Synthetic oligonucleotide
  Sense strand starting at position 1598 of SEQ ID NO: 916034
uggccauucucgguggaaa

SEQ ID NO: 1125311 - RNA, 19 nt, Artificial Sequence
  Description of Artificial Sequence: Synthetic oligonucleotide
  Antisense strand to SEQ ID NO: 1125310
uuuccaccgagaauggcca

SEQ ID NO: 1125312 - RNA, 19 nt, Artificial Sequence
  Description of Artificial Sequence: Synthetic oligonucleotide
  Sense strand starting at position 1599 of SEQ ID NO: 916034
ggccauucucgguggaaac

SEQ ID NO: 1125313 - RNA, 19 nt, Artificial Sequence
  Description of Artificial Sequence: Synthetic oligonucleotide
  Antisense strand to SEQ ID NO: 1125312
guuuccaccgagaauggcc

SEQ ID NO: 1125314 - RNA, 19 nt, Artificial Sequence
  Description of Artificial Sequence: Synthetic oligonucleotide
  Sense strand starting at position 1600 of SEQ ID NO: 916034
gccauucucgguggaaaca

SEQ ID NO: 1125315 - RNA, 19 nt, Artificial Sequence
  Description of Artificial Sequence: Synthetic oligonucleotide
  Antisense strand to SEQ ID NO: 1125314
uguuuccaccgagaauggc

SEQ ID NO: 1125316 - RNA, 19 nt, Artificial Sequence
  Description of Artificial Sequence: Synthetic oligonucleotide
  Sense strand starting at position 1601 of SEQ ID NO: 916034
ccauucucgguggaaacaa

SEQ ID NO: 1125317 - RNA, 19 nt, Artificial Sequence
  Description of Artificial Sequence: Synthetic oligonucleotide
  Antisense strand to SEQ ID NO: 1125316
uuguuuccaccgagaaugg

SEQ ID NO: 1125318 - RNA, 19 nt, Artificial Sequence
  Description of Artificial Sequence: Synthetic oligonucleotide
  Sense strand starting at position 1620 of SEQ ID NO: 916034
gccucagguguccaggaaa

SEQ ID NO: 1125319 - RNA, 19 nt, Artificial Sequence
  Description of Artificial Sequence: Synthetic oligonucleotide
  Antisense strand to SEQ ID NO: 1125318
uuuccuggacaccugaggc

SEQ ID NO: 1125320 - RNA, 19 nt, Artificial Sequence
  Description of Artificial Sequence: Synthetic oligonucleotide
  Sense strand starting at position 2025 of SEQ ID NO: 916034
ccucuuuacccgcaggaga

SEQ ID NO: 1125321 - RNA, 19 nt, Artificial Sequence
  Description of Artificial Sequence: Synthetic oligonucleotide
  Antisense strand to SEQ ID NO: 1125320
ucuccugcggguaaagagg

SEQ ID NO: 1125322 - RNA, 19 nt, Artificial Sequence
  Description of Artificial Sequence: Synthetic oligonucleotide
  Sense strand starting at position 2155 of SEQ ID NO: 916034
ccagucuccgggcgucaaa

SEQ ID NO: 1125323 - RNA, 19 nt, Artificial Sequence
  Description of Artificial Sequence: Synthetic oligonucleotide
  Antisense strand to SEQ ID NO: 1125322
uuugacgcccggagacugg

SEQ ID NO: 1125324 - RNA, 19 nt, Artificial Sequence
  Description of Artificial Sequence: Synthetic oligonucleotide
  Sense strand starting at position 2329 of SEQ ID NO: 916034
ggaacuucgaagcaaaguu

SEQ ID NO: 1125325 - RNA, 19 nt, Artificial Sequence
  Description of Artificial Sequence: Synthetic oligonucleotide
  Antisense strand to SEQ ID NO: 1125324
aacuuugcuucgaaguucc

SEQ ID NO: 1125326 - RNA, 19 nt, Artificial Sequence
  Description of Artificial Sequence: Synthetic oligonucleotide
  Sense strand starting at position 2922 of SEQ ID NO: 916034
gugacaauguggucuguga

SEQ ID NO: 1125327 - RNA, 19 nt, Artificial Sequence
  Description of Artificial Sequence: Synthetic oligonucleotide
  Antisense strand to SEQ ID NO: 1125326
ucacagaccacauugucac

SEQ ID NO: 1125328 - RNA, 19 nt, Artificial Sequence
  Description of Artificial Sequence: Synthetic oligonucleotide
  Sense strand starting at position 2926 of SEQ ID NO: 916034
caauguggucugugagguu

SEQ ID NO: 1125329 - RNA, 19 nt, Artificial Sequence
  Description of Artificial Sequence: Synthetic oligonucleotide
  Antisense strand to SEQ ID NO: 1125328
aaccucacagaccacauug

SEQ ID NO: 1125330 - RNA, 19 nt, Artificial Sequence
  Description of Artificial Sequence: Synthetic oligonucleotide
  Sense strand starting at position 3100 of SEQ ID NO: 916034
ggugucucccaacauucua

SEQ ID NO: 1125331 - RNA, 19 nt, Artificial Sequence
  Description of Artificial Sequence: Synthetic oligonucleotide
  Antisense strand to SEQ ID NO: 1125330
uagaauguugggagacacc

SEQ ID NO: 1125332 - RNA, 19 nt, Artificial Sequence
  Description of Artificial Sequence: Synthetic oligonucleotide
  Sense strand starting at position 3177 of SEQ ID NO: 916034
cagggauccuagucugaga

SEQ ID NO: 1125333 - RNA, 19 nt, Artificial Sequence
  Description of Artificial Sequence: Synthetic oligonucleotide
  Antisense strand to SEQ ID NO: 1125332
ucucagacuaggaucccug

SEQ ID NO: 1125334 - RNA, 19 nt, Artificial Sequence
  Description of Artificial Sequence: Synthetic oligonucleotide
  Sense strand starting at position 3275 of SEQ ID NO: 916034
gaggauugacaaggucugu

SEQ ID NO: 1125335 - RNA, 19 nt, Artificial Sequence
  Description of Artificial Sequence: Synthetic oligonucleotide
  Antisense strand to SEQ ID NO: 1125334
acagaccuugucaauccuc

SEQ ID NO: 1125336 - RNA, 19 nt, Artificial Sequence
  Description of Artificial Sequence: Synthetic oligonucleotide
  Sense strand starting at position 3315 of SEQ ID NO: 916034
uccugcauccgucugugau

SEQ ID NO: 1125337 - RNA, 19 nt, Artificial Sequence
  Description of Artificial Sequence: Synthetic oligonucleotide
  Antisense strand to SEQ ID NO: 1125336
aucacagacggaugcagga

SEQ ID NO: 1125338 - RNA, 19 nt, Artificial Sequence
  Description of Artificial Sequence: Synthetic oligonucleotide
  Sense strand starting at position 3316 of SEQ ID NO: 916034
ccugcauccgucugugaua

SEQ ID NO: 1125339 - RNA, 19 nt, Artificial Sequence
  Description of Artificial Sequence: Synthetic oligonucleotide
  Antisense strand to SEQ ID NO: 1125338
uaucacagacggaugcagg

SEQ ID NO: 1125340 - RNA, 19 nt, Artificial Sequence
  Description of Artificial Sequence: Synthetic oligonucleotide
  Sense strand starting at position 3368 of SEQ ID NO: 916034
aggcuuacauccucuggau

SEQ ID NO: 1125341 - RNA, 19 nt, Artificial Sequence
  Description of Artificial Sequence: Synthetic oligonucleotide
  Antisense strand to SEQ ID NO: 1125340
auccagaggauguaagccu

SEQ ID NO: 1125342 - RNA, 19 nt, Artificial Sequence
  Description of Artificial Sequence: Synthetic oligonucleotide
  Sense strand starting at position 3392 of SEQ ID NO: 916034
cgucuuaucccagaagaca

SEQ ID NO: 1125343 - RNA, 19 nt, Artificial Sequence
  Description of Artificial Sequence: Synthetic oligonucleotide
  Antisense strand to SEQ ID NO: 1125342
ugucuucugggauaagacg

SEQ ID NO: 1125344 - RNA, 19 nt, Artificial Sequence
  Description of Artificial Sequence: Synthetic oligonucleotide
  Sense strand starting at position 3595 of SEQ ID NO: 916034
uccugagucuuaguguaug

SEQ ID NO: 1125345 - RNA, 19 nt, Artificial Sequence
  Description of Artificial Sequence: Synthetic oligonucleotide
  Antisense strand to SEQ ID NO: 1125344
cauacacuaagacucagga

SEQ ID NO: 1125346 - RNA, 19 nt, Artificial Sequence
  Description of Artificial Sequence: Synthetic oligonucleotide
  Sense strand starting at position 3598 of SEQ ID NO: 916034
ugagucuuaguguaugugu

SEQ ID NO: 1125347 - RNA, 19 nt, Artificial Sequence
  Description of Artificial Sequence: Synthetic oligonucleotide
  Antisense strand to SEQ ID NO: 1125346
acacauacacuaagacuca

SEQ ID NO: 1125348 - RNA, 19 nt, Artificial Sequence
  Description of Artificial Sequence: Synthetic oligonucleotide
  Sense strand starting at position 3605 of SEQ ID NO: 916034
uaguguauguguguacaca

SEQ ID NO: 1125349 - RNA, 19 nt, Artificial Sequence
  Description of Artificial Sequence: Synthetic oligonucleotide
  Antisense strand to SEQ ID NO: 1125348
uguguacacacauacacua

SEQ ID NO: 1125350 - RNA, 19 nt, Artificial Sequence
  Description of Artificial Sequence: Synthetic oligonucleotide
  Sense strand starting at position 3606 of SEQ ID NO: 916034
aguguauguguguacacaa

SEQ ID NO: 1125351 - RNA, 19 nt, Artificial Sequence
  Description of Artificial Sequence: Synthetic oligonucleotide
  Antisense strand to SEQ ID NO: 1125350
uuguguacacacauacacu

SEQ ID NO: 1125352 - RNA, 19 nt, Artificial Sequence
  Description of Artificial Sequence: Synthetic oligonucleotide
  Sense strand starting at position 3673 of SEQ ID NO: 916034
ugagaagcaucuuccagga

SEQ ID NO: 1125353 - RNA, 19 nt, Artificial Sequence
  Description of Artificial Sequence: Synthetic oligonucleotide
  Antisense strand to SEQ ID NO: 1125352
uccuggaagaugcuucuca

SEQ ID NO: 1125354 - RNA, 19 nt, Artificial Sequence
  Description of Artificial Sequence: Synthetic oligonucleotide
  Sense strand starting at position 3797 of SEQ ID NO: 916034
ucaucagguuccuuauugu

SEQ ID NO: 1125355 - RNA, 19 nt, Artificial Sequence
  Description of Artificial Sequence: Synthetic oligonucleotide
  Antisense strand to SEQ ID NO: 1125354
acaauaaggaaccugauga

SEQ ID NO: 1125356 - RNA, 19 nt, Artificial Sequence
  Description of Artificial Sequence: Synthetic oligonucleotide
  Sense strand starting at position 3910 of SEQ ID NO: 916034
uggccacacugugaagaaa

SEQ ID NO: 1125357 - RNA, 19 nt, Artificial Sequence
  Description of Artificial Sequence: Synthetic oligonucleotide
  Antisense strand to SEQ ID NO: 1125356
uuucuucacaguguggcca

SEQ ID NO: 1125358 - RNA, 19 nt, Artificial Sequence
  Description of Artificial Sequence: Synthetic oligonucleotide
  Sense strand starting at position 416 of SEQ ID NO: 916035
ggaaguuguuauuaaacuc

SEQ ID NO: 1125359 - RNA, 19 nt, Artificial Sequence
  Description of Artificial Sequence: Synthetic oligonucleotide
  Antisense strand to SEQ ID NO: 1125358
gaguuuaauaacaacuucc

SEQ ID NO: 1125360 - RNA, 19 nt, Artificial Sequence
  Description of Artificial Sequence: Synthetic oligonucleotide
  Sense strand starting at position 579 of SEQ ID NO: 916035
ccaccaacaugauaagaga

SEQ ID NO: 1125361 - RNA, 19 nt, Artificial Sequence
  Description of Artificial Sequence: Synthetic oligonucleotide
  Antisense strand to SEQ ID NO: 1125360
ucucuuaucauguuggugg

SEQ ID NO: 1125362 - RNA, 19 nt, Artificial Sequence
  Description of Artificial Sequence: Synthetic oligonucleotide
  Sense strand starting at position 637 of SEQ ID NO: 916035
aaguuuggagucuaugcau

SEQ ID NO: 1125363 - RNA, 19 nt, Artificial Sequence
  Description of Artificial Sequence: Synthetic oligonucleotide
  Antisense strand to SEQ ID NO: 1125362
augcauagacuccaaacuu

SEQ ID NO: 1125364 - RNA, 19 nt, Artificial Sequence
  Description of Artificial Sequence: Synthetic oligonucleotide
  Sense strand starting at position 789 of SEQ ID NO: 916035
cccaacucaccgugaucau

SEQ ID NO: 1125365 - RNA, 19 nt, Artificial Sequence
  Description of Artificial Sequence: Synthetic oligonucleotide
  Antisense strand to SEQ ID NO: 1125364
augaucacggugaguuggg

SEQ ID NO: 1125366 - RNA, 19 nt, Artificial Sequence
  Description of Artificial Sequence: Synthetic oligonucleotide
  Sense strand starting at position 790 of SEQ ID NO: 916035
ccaacucaccgugaucaua

SEQ ID NO: 1125367 - RNA, 19 nt, Artificial Sequence
  Description of Artificial Sequence: Synthetic oligonucleotide
  Antisense strand to SEQ ID NO: 1125366
uaugaucacggugaguugg

SEQ ID NO: 1125368 - RNA, 19 nt, Artificial Sequence
  Description of Artificial Sequence: Synthetic oligonucleotide
  Sense strand starting at position 798 of SEQ ID NO: 916035
ccgugaucauaagacaaua

SEQ ID NO: 1125369 - RNA, 19 nt, Artificial Sequence
  Description of Artificial Sequence: Synthetic oligonucleotide
  Antisense strand to SEQ ID NO: 1125368
uauugucuuaugaucacgg

SEQ ID NO: 1125370 - RNA, 19 nt, Artificial Sequence
  Description of Artificial Sequence: Synthetic oligonucleotide
  Sense strand starting at position 918 of SEQ ID NO: 916035
ccuggauuauggucugacu

SEQ ID NO: 1125371 - RNA, 19 nt, Artificial Sequence
  Description of Artificial Sequence: Synthetic oligonucleotide
  Antisense strand to SEQ ID NO: 1125370
agucagaccauaauccagg

SEQ ID NO: 1125372 - RNA, 19 nt, Artificial Sequence
  Description of Artificial Sequence: Synthetic oligonucleotide
  Sense strand starting at position 920 of SEQ ID NO: 916035
uggauuauggucugacuca

SEQ ID NO: 1125373 - RNA, 19 nt, Artificial Sequence
  Description of Artificial Sequence: Synthetic oligonucleotide
  Antisense strand to SEQ ID NO: 1125372
ugagucagaccauaaucca

SEQ ID NO: 1125374 - RNA, 19 nt, Artificial Sequence
  Description of Artificial Sequence: Synthetic oligonucleotide
  Sense strand starting at position 921 of SEQ ID NO: 916035
ggauuauggucugacucag

SEQ ID NO: 1125375 - RNA, 19 nt, Artificial Sequence
  Description of Artificial Sequence: Synthetic oligonucleotide
  Antisense strand to SEQ ID NO: 1125374
cugagucagaccauaaucc

SEQ ID NO: 1125376 - RNA, 19 nt, Artificial Sequence
  Description of Artificial Sequence: Synthetic oligonucleotide
  Sense strand starting at position 1101 of SEQ ID NO: 916035
cucacaccucuagggaauu

SEQ ID NO: 1125377 - RNA, 19 nt, Artificial Sequence
  Description of Artificial Sequence: Synthetic oligonucleotide
  Antisense strand to SEQ ID NO: 1125376
aauucccuagaggugugag

SEQ ID NO: 1125378 - RNA, 19 nt, Artificial Sequence
  Description of Artificial Sequence: Synthetic oligonucleotide
  Sense strand starting at position 1102 of SEQ ID NO: 916035
ucacaccucuagggaauuu

SEQ ID NO: 1125379 - RNA, 19 nt, Artificial Sequence
  Description of Artificial Sequence: Synthetic oligonucleotide
  Antisense strand to SEQ ID NO: 1125378
aaauucccuagagguguga

SEQ ID NO: 1125380 - RNA, 19 nt, Artificial Sequence
  Description of Artificial Sequence: Synthetic oligonucleotide
  Sense strand starting at position 1187 of SEQ ID NO: 916035
cucuuuaaucagggacaug

SEQ ID NO: 1125381 - RNA, 19 nt, Artificial Sequence
  Description of Artificial Sequence: Synthetic oligonucleotide
  Antisense strand to SEQ ID NO: 1125380
caugucccugauuaaagag

SEQ ID NO: 1125382 - RNA, 19 nt, Artificial Sequence
  Description of Artificial Sequence: Synthetic oligonucleotide
  Sense strand starting at position 1352 of SEQ ID NO: 916035
gcgcaucagcugugacuaa

SEQ ID NO: 1125383 - RNA, 19 nt, Artificial Sequence
  Description of Artificial Sequence: Synthetic oligonucleotide
  Antisense strand to SEQ ID NO: 1125382
uuagucacagcugaugcgc

SEQ ID NO: 1125384 - RNA, 19 nt, Artificial Sequence
  Description of Artificial Sequence: Synthetic oligonucleotide
  Sense strand starting at position 1370 of SEQ ID NO: 916035
agguuccucuggccaguua

SEQ ID NO: 1125385 - RNA, 19 nt, Artificial Sequence
  Description of Artificial Sequence: Synthetic oligonucleotide
  Antisense strand to SEQ ID NO: 1125384
uaacuggccagaggaaccu

SEQ ID NO: 1125386 - RNA, 19 nt, Artificial Sequence
  Description of Artificial Sequence: Synthetic oligonucleotide
  Sense strand starting at position 1417 of SEQ ID NO: 916035
gcaagagugaugugucccu

SEQ ID NO: 1125387 - RNA, 19 nt, Artificial Sequence
  Description of Artificial Sequence: Synthetic oligonucleotide
  Antisense strand to SEQ ID NO: 1125386
agggacacaucacucuugc

SEQ ID NO: 1125388 - RNA, 19 nt, Artificial Sequence
  Description of Artificial Sequence: Synthetic oligonucleotide
  Sense strand starting at position 1422 of SEQ ID NO: 916035
agugaugugucccucccua

SEQ ID NO: 1125389 - RNA, 19 nt, Artificial Sequence
  Description of Artificial Sequence: Synthetic oligonucleotide
  Antisense strand to SEQ ID NO: 1125388
uagggagggacacaucacu

SEQ ID NO: 1125390 - RNA, 19 nt, Artificial Sequence
  Description of Artificial Sequence: Synthetic oligonucleotide
  Sense strand starting at position 1663 of SEQ ID NO: 916035
gugguugggucaccagaca

SEQ ID NO: 1125391 - RNA, 19 nt, Artificial Sequence
  Description of Artificial Sequence: Synthetic oligonucleotide
  Antisense strand to SEQ ID NO: 1125390
ugucuggugacccaaccac

SEQ ID NO: 1125392 - RNA, 19 nt, Artificial Sequence
  Description of Artificial Sequence: Synthetic oligonucleotide
  Sense strand starting at position 1728 of SEQ ID NO: 916035
uggccauucucgguggaaa

SEQ ID NO: 1125393 - RNA, 19 nt, Artificial Sequence
  Description of Artificial Sequence: Synthetic oligonucleotide
  Antisense strand to SEQ ID NO: 1125392
uuuccaccgagaauggcca

SEQ ID NO: 1125394 - RNA, 19 nt, Artificial Sequence
  Description of Artificial Sequence: Synthetic oligonucleotide
  Sense strand starting at position 1729 of SEQ ID NO: 916035
ggccauucucgguggaaac

SEQ ID NO: 1125395 - RNA, 19 nt, Artificial Sequence
  Description of Artificial Sequence: Synthetic oligonucleotide
  Antisense strand to SEQ ID NO: 1125394
guuuccaccgagaauggcc

SEQ ID NO: 1125396 - RNA, 19 nt, Artificial Sequence
  Description of Artificial Sequence: Synthetic oligonucleotide
  Sense strand starting at position 1730 of SEQ ID NO: 916035
gccauucucgguggaaaca

SEQ ID NO: 1125397 - RNA, 19 nt, Artificial Sequence
  Description of Artificial Sequence: Synthetic oligonucleotide
  Antisense strand to SEQ ID NO: 1125396
uguuuccaccgagaauggc

SEQ ID NO: 1125398 - RNA, 19 nt, Artificial Sequence
  Description of Artificial Sequence: Synthetic oligonucleotide
  Sense strand starting at position 1731 of SEQ ID NO: 916035
ccauucucgguggaaacaa

SEQ ID NO: 1125399 - RNA, 19 nt, Artificial Sequence
  Description of Artificial Sequence: Synthetic oligonucleotide
  Antisense strand to SEQ ID NO: 1125398
uuguuuccaccgagaaugg

SEQ ID NO: 1125400 - RNA, 19 nt, Artificial Sequence
  Description of Artificial Sequence: Synthetic oligonucleotide
  Sense strand starting at position 1750 of SEQ ID NO: 916035
gccucagguguccaggaaa

SEQ ID NO: 1125401 - RNA, 19 nt, Artificial Sequence
  Description of Artificial Sequence: Synthetic oligonucleotide
  Antisense strand to SEQ ID NO: 1125400
uuuccuggacaccugaggc

SEQ ID NO: 1125402 - RNA, 19 nt, Artificial Sequence
  Description of Artificial Sequence: Synthetic oligonucleotide
  Sense strand starting at position 2155 of SEQ ID NO: 916035
ccucuuuacccgcaggaga

SEQ ID NO: 1125403 - RNA, 19 nt, Artificial Sequence
  Description of Artificial Sequence: Synthetic oligonucleotide
  Antisense strand to SEQ ID NO: 1125402
ucuccugcggguaaagagg

SEQ ID NO: 1125404 - RNA, 19 nt, Artificial Sequence
  Description of Artificial Sequence: Synthetic oligonucleotide
  Sense strand starting at position 2285 of SEQ ID NO: 916035
ccagucuccgggcgucaaa

SEQ ID NO: 1125405 - RNA, 19 nt, Artificial Sequence
  Description of Artificial Sequence: Synthetic oligonucleotide
  Antisense strand to SEQ ID NO: 1125404
uuugacgcccggagacugg

SEQ ID NO: 1125406 - RNA, 19 nt, Artificial Sequence
  Description of Artificial Sequence: Synthetic oligonucleotide
  Sense strand starting at position 2459 of SEQ ID NO: 916035
ggaacuucgaagcaaaguu

SEQ ID NO: 1125407 - RNA, 19 nt, Artificial Sequence
  Description of Artificial Sequence: Synthetic oligonucleotide
  Antisense strand to SEQ ID NO: 1125406
aacuuugcuucgaaguucc

SEQ ID NO: 1125408 - RNA, 19 nt, Artificial Sequence
  Description of Artificial Sequence: Synthetic oligonucleotide
  Sense strand starting at position 3052 of SEQ ID NO: 916035
gugacaauguggucuguga

SEQ ID NO: 1125409 - RNA, 19 nt, Artificial Sequence
  Description of Artificial Sequence: Synthetic oligonucleotide
  Antisense strand to SEQ ID NO: 1125408
ucacagaccacauugucac

SEQ ID NO: 1125410 - RNA, 19 nt, Artificial Sequence
  Description of Artificial Sequence: Synthetic oligonucleotide
  Sense strand starting at position 3056 of SEQ ID NO: 916035
caauguggucugugagguu

SEQ ID NO: 1125411 - RNA, 19 nt, Artificial Sequence
  Description of Artificial Sequence: Synthetic oligonucleotide
  Antisense strand to SEQ ID NO: 1125410
aaccucacagaccacauug

SEQ ID NO: 1125412 - RNA, 19 nt, Artificial Sequence
  Description of Artificial Sequence: Synthetic oligonucleotide
  Sense strand starting at position 3230 of SEQ ID NO: 916035
ggugucucccaacauucua

SEQ ID NO: 1125413 - RNA, 19 nt, Artificial Sequence
  Description of Artificial Sequence: Synthetic oligonucleotide
  Antisense strand to SEQ ID NO: 1125412
uagaauguugggagacacc

SEQ ID NO: 1125414 - RNA, 19 nt, Artificial Sequence
  Description of Artificial Sequence: Synthetic oligonucleotide
  Sense strand starting at position 3307 of SEQ ID NO: 916035
cagggauccuagucugaga

SEQ ID NO: 1125415 - RNA, 19 nt, Artificial Sequence
  Description of Artificial Sequence: Synthetic oligonucleotide
  Antisense strand to SEQ ID NO: 1125414
ucucagacuaggaucccug

SEQ ID NO: 1125416 - RNA, 19 nt, Artificial Sequence
  Description of Artificial Sequence: Synthetic oligonucleotide
  Sense strand starting at position 3405 of SEQ ID NO: 916035
gaggauugacaaggucugu

SEQ ID NO: 1125417 - RNA, 19 nt, Artificial Sequence
  Description of Artificial Sequence: Synthetic oligonucleotide
  Antisense strand to SEQ ID NO: 1125416
acagaccuugucaauccuc

SEQ ID NO: 1125418 - RNA, 19 nt, Artificial Sequence
  Description of Artificial Sequence: Synthetic oligonucleotide
  Sense strand starting at position 3445 of SEQ ID NO: 916035
uccugcauccgucugugau

SEQ ID NO: 1125419 - RNA, 19 nt, Artificial Sequence
  Description of Artificial Sequence: Synthetic oligonucleotide
  Antisense strand to SEQ ID NO: 1125418
aucacagacggaugcagga

SEQ ID NO: 1125420 - RNA, 19 nt, Artificial Sequence
  Description of Artificial Sequence: Synthetic oligonucleotide
  Sense strand starting at position 3446 of SEQ ID NO: 916035
ccugcauccgucugugaua

SEQ ID NO: 1125421 - RNA, 19 nt, Artificial Sequence
  Description of Artificial Sequence: Synthetic oligonucleotide
  Antisense strand to SEQ ID NO: 1125420
uaucacagacggaugcagg

SEQ ID NO: 1125422 - RNA, 19 nt, Artificial Sequence
  Description of Artificial Sequence: Synthetic oligonucleotide
  Sense strand starting at position 3498 of SEQ ID NO: 916035
aggcuuacauccucuggau

SEQ ID NO: 1125423 - RNA, 19 nt, Artificial Sequence
  Description of Artificial Sequence: Synthetic oligonucleotide
  Antisense strand to SEQ ID NO: 1125422
auccagaggauguaagccu

SEQ ID NO: 1125424 - RNA, 19 nt, Artificial Sequence
  Description of Artificial Sequence: Synthetic oligonucleotide
  Sense strand starting at position 3522 of SEQ ID NO: 916035
cgucuuaucccagaagaca

SEQ ID NO: 1125425 - RNA, 19 nt, Artificial Sequence
  Description of Artificial Sequence: Synthetic oligonucleotide
  Antisense strand to SEQ ID NO: 1125424
ugucuucugggauaagacg

SEQ ID NO: 1125426 - RNA, 19 nt, Artificial Sequence
  Description of Artificial Sequence: Synthetic oligonucleotide
  Sense strand starting at position 3725 of SEQ ID NO: 916035
uccugagucuuaguguaug

SEQ ID NO: 1125427 - RNA, 19 nt, Artificial Sequence
  Description of Artificial Sequence: Synthetic oligonucleotide
  Antisense strand to SEQ ID NO: 1125426
cauacacuaagacucagga

SEQ ID NO: 1125428 - RNA, 19 nt, Artificial Sequence
  Description of Artificial Sequence: Synthetic oligonucleotide
  Sense strand starting at position 3728 of SEQ ID NO: 916035
ugagucuuaguguaugugu

SEQ ID NO: 1125429 - RNA, 19 nt, Artificial Sequence
  Description of Artificial Sequence: Synthetic oligonucleotide
  Antisense strand to SEQ ID NO: 1125428
acacauacacuaagacuca

SEQ ID NO: 1125430 - RNA, 19 nt, Artificial Sequence
  Description of Artificial Sequence: Synthetic oligonucleotide
  Sense strand starting at position 3735 of SEQ ID NO: 916035
uaguguauguguguacaca

SEQ ID NO: 1125431 - RNA, 19 nt, Artificial Sequence
  Description of Artificial Sequence: Synthetic oligonucleotide
  Antisense strand to SEQ ID NO: 1125430
uguguacacacauacacua

SEQ ID NO: 1125432 - RNA, 19 nt, Artificial Sequence
  Description of Artificial Sequence: Synthetic oligonucleotide
  Sense strand starting at position 3736 of SEQ ID NO: 916035
aguguauguguguacacaa

SEQ ID NO: 1125433 - RNA, 19 nt, Artificial Sequence
  Description of Artificial Sequence: Synthetic oligonucleotide
  Antisense strand to SEQ ID NO: 1125432
uuguguacacacauacacu

SEQ ID NO: 1125434 - RNA, 19 nt, Artificial Sequence
  Description of Artificial Sequence: Synthetic oligonucleotide
  Sense strand starting at position 3803 of SEQ ID NO: 916035
ugagaagcaucuuccagga

SEQ ID NO: 1125435 - RNA, 19 nt, Artificial Sequence
  Description of Artificial Sequence: Synthetic oligonucleotide
  Antisense strand to SEQ ID NO: 1125434
uccuggaagaugcuucuca

SEQ ID NO: 1125436 - RNA, 19 nt, Artificial Sequence
  Description of Artificial Sequence: Synthetic oligonucleotide
  Sense strand starting at position 3927 of SEQ ID NO: 916035
ucaucagguuccuuauugu

SEQ ID NO: 1125437 - RNA, 19 nt, Artificial Sequence
  Description of Artificial Sequence: Synthetic oligonucleotide
  Antisense strand to SEQ ID NO: 1125436
acaauaaggaaccugauga

SEQ ID NO: 1125438 - RNA, 19 nt, Artificial Sequence
  Description of Artificial Sequence: Synthetic oligonucleotide
  Sense strand starting at position 231 of SEQ ID NO: 916036
aucgccuucucguugaaau

SEQ ID NO: 1125439 - RNA, 19 nt, Artificial Sequence
  Description of Artificial Sequence: Synthetic oligonucleotide
  Antisense strand to SEQ ID NO: 1125438
auuucaacgagaaggcgau

SEQ ID NO: 1125440 - RNA, 19 nt, Artificial Sequence
  Description of Artificial Sequence: Synthetic oligonucleotide
  Sense strand starting at position 233 of SEQ ID NO: 916036
cgccuucucguugaaauua

SEQ ID NO: 1125441 - RNA, 19 nt, Artificial Sequence
  Description of Artificial Sequence: Synthetic oligonucleotide
  Antisense strand to SEQ ID NO: 1125440
uaauuucaacgagaaggcg

SEQ ID NO: 1125442 - RNA, 19 nt, Artificial Sequence
  Description of Artificial Sequence: Synthetic oligonucleotide
  Sense strand starting at position 241 of SEQ ID NO: 916036
cguugaaauuaaucccaca

SEQ ID NO: 1125443 - RNA, 19 nt, Artificial Sequence
  Description of Artificial Sequence: Synthetic oligonucleotide
  Antisense strand to SEQ ID NO: 1125442
ugugggauuaauuucaacg

SEQ ID NO: 1125444 - RNA, 19 nt, Artificial Sequence
  Description of Artificial Sequence: Synthetic oligonucleotide
  Sense strand starting at position 270 of SEQ ID NO: 916036
acauuaaugcagcaggagu

SEQ ID NO: 1125445 - RNA, 19 nt, Artificial Sequence
  Description of Artificial Sequence: Synthetic oligonucleotide
  Antisense strand to SEQ ID NO: 1125444
acuccugcugcauuaaugu

SEQ ID NO: 1125446 - RNA, 19 nt, Artificial Sequence
  Description of Artificial Sequence: Synthetic oligonucleotide
  Sense strand starting at position 292 of SEQ ID NO: 916036
ggacucgguucuucgacau

SEQ ID NO: 1125447 - RNA, 19 nt, Artificial Sequence
  Description of Artificial Sequence: Synthetic oligonucleotide
  Antisense strand to SEQ ID NO: 1125446
augucgaagaaccgagucc

SEQ ID NO: 1125448 - RNA, 19 nt, Artificial Sequence
  Description of Artificial Sequence: Synthetic oligonucleotide
  Sense strand starting at position 296 of SEQ ID NO: 916036
ucgguucuucgacauggaa

SEQ ID NO: 1125449 - RNA, 19 nt, Artificial Sequence
  Description of Artificial Sequence: Synthetic oligonucleotide
  Antisense strand to SEQ ID NO: 1125448
uuccaugucgaagaaccga

SEQ ID NO: 1125450 - RNA, 19 nt, Artificial Sequence
  Description of Artificial Sequence: Synthetic oligonucleotide
  Sense strand starting at position 322 of SEQ ID NO: 916036
ucucccaaucuguguaguu

SEQ ID NO: 1125451 - RNA, 19 nt, Artificial Sequence
  Description of Artificial Sequence: Synthetic oligonucleotide
  Antisense strand to SEQ ID NO: 1125450
aacuacacagauugggaga

SEQ ID NO: 1125452 - RNA, 19 nt, Artificial Sequence
  Description of Artificial Sequence: Synthetic oligonucleotide
  Sense strand starting at position 323 of SEQ ID NO: 916036
cucccaaucuguguaguua

SEQ ID NO: 1125453 - RNA, 19 nt, Artificial Sequence
  Description of Artificial Sequence: Synthetic oligonucleotide
  Antisense strand to SEQ ID NO: 1125452
uaacuacacagauugggag

SEQ ID NO: 1125454 - RNA, 19 nt, Artificial Sequence
  Description of Artificial Sequence: Synthetic oligonucleotide
  Sense strand starting at position 384 of SEQ ID NO: 916036
agaagaagguuguuaagug

SEQ ID NO: 1125455 - RNA, 19 nt, Artificial Sequence
  Description of Artificial Sequence: Synthetic oligonucleotide
  Antisense strand to SEQ ID NO: 1125454
cacuuaacaaccuucuucu

SEQ ID NO: 1125456 - RNA, 19 nt, Artificial Sequence
  Description of Artificial Sequence: Synthetic oligonucleotide
  Sense strand starting at position 385 of SEQ ID NO: 916036
gaagaagguuguuaaguga

SEQ ID NO: 1125457 - RNA, 19 nt, Artificial Sequence
  Description of Artificial Sequence: Synthetic oligonucleotide
  Antisense strand to SEQ ID NO: 1125456
ucacuuaacaaccuucuuc

SEQ ID NO: 1125458 - RNA, 19 nt, Artificial Sequence
  Description of Artificial Sequence: Synthetic oligonucleotide
  Sense strand starting at position 1031 of SEQ ID NO: 916036
ccaccaacaugauaagaga

SEQ ID NO: 1125459 - RNA, 19 nt, Artificial Sequence
  Description of Artificial Sequence: Synthetic oligonucleotide
  Antisense strand to SEQ ID NO: 1125458
ucucuuaucauguuggugg

SEQ ID NO: 1125460 - RNA, 19 nt, Artificial Sequence
  Description of Artificial Sequence: Synthetic oligonucleotide
  Sense strand starting at position 1089 of SEQ ID NO: 916036
aaguuuggagucuaugcau

SEQ ID NO: 1125461 - RNA, 19 nt, Artificial Sequence
  Description of Artificial Sequence: Synthetic oligonucleotide
  Antisense strand to SEQ ID NO: 1125460
augcauagacuccaaacuu

SEQ ID NO: 1125462 - RNA, 19 nt, Artificial Sequence
  Description of Artificial Sequence: Synthetic oligonucleotide
  Sense strand starting at position 1241 of SEQ ID NO: 916036
cccaacucaccgugaucau

SEQ ID NO: 1125463 - RNA, 19 nt, Artificial Sequence
  Description of Artificial Sequence: Synthetic oligonucleotide
  Antisense strand to SEQ ID NO: 1125462
augaucacggugaguuggg

SEQ ID NO: 1125464 - RNA, 19 nt, Artificial Sequence
  Description of Artificial Sequence: Synthetic oligonucleotide
  Sense strand starting at position 1242 of SEQ ID NO: 916036
ccaacucaccgugaucaua

SEQ ID NO: 1125465 - RNA, 19 nt, Artificial Sequence
  Description of Artificial Sequence: Synthetic oligonucleotide
  Antisense strand to SEQ ID NO: 1125464
uaugaucacggugaguugg

SEQ ID NO: 1125466 - RNA, 19 nt, Artificial Sequence
  Description of Artificial Sequence: Synthetic oligonucleotide
  Sense strand starting at position 1250 of SEQ ID NO: 916036
ccgugaucauaagacaaua

SEQ ID NO: 1125467 - RNA, 19 nt, Artificial Sequence
  Description of Artificial Sequence: Synthetic oligonucleotide
  Antisense strand to SEQ ID NO: 1125466
uauugucuuaugaucacgg

SEQ ID NO: 1125468 - RNA, 19 nt, Artificial Sequence
  Description of Artificial Sequence: Synthetic oligonucleotide
  Sense strand starting at position 1370 of SEQ ID NO: 916036
ccuggauuauggucugacu

SEQ ID NO: 1125469 - RNA, 19 nt, Artificial Sequence
  Description of Artificial Sequence: Synthetic oligonucleotide
  Antisense strand to SEQ ID NO: 1125468
agucagaccauaauccagg

SEQ ID NO: 1125470 - RNA, 19 nt, Artificial Sequence
  Description of Artificial Sequence: Synthetic oligonucleotide
  Sense strand starting at position 1372 of SEQ ID NO: 916036
uggauuauggucugacuca

SEQ ID NO: 1125471 - RNA, 19 nt, Artificial Sequence
  Description of Artificial Sequence: Synthetic oligonucleotide
  Antisense strand to SEQ ID NO: 1125470
ugagucagaccauaaucca

SEQ ID NO: 1125472 - RNA, 19 nt, Artificial Sequence
  Description of Artificial Sequence: Synthetic oligonucleotide
  Sense strand starting at position 1373 of SEQ ID NO: 916036
ggauuauggucugacucag

SEQ ID NO: 1125473 - RNA, 19 nt, Artificial Sequence
  Description of Artificial Sequence: Synthetic oligonucleotide
  Antisense strand to SEQ ID NO: 1125472
cugagucagaccauaaucc

SEQ ID NO: 1125474 - RNA, 19 nt, Artificial Sequence
  Description of Artificial Sequence: Synthetic oligonucleotide
  Sense strand starting at position 1553 of SEQ ID NO: 916036
cucacaccucuagggaauu

SEQ ID NO: 1125475 - RNA, 19 nt, Artificial Sequence
  Description of Artificial Sequence: Synthetic oligonucleotide
  Antisense strand to SEQ ID NO: 1125474
aauucccuagaggugugag

SEQ ID NO: 1125476 - RNA, 19 nt, Artificial Sequence
  Description of Artificial Sequence: Synthetic oligonucleotide
  Sense strand starting at position 1554 of SEQ ID NO: 916036
ucacaccucuagggaauuu

SEQ ID NO: 1125477 - RNA, 19 nt, Artificial Sequence
  Description of Artificial Sequence: Synthetic oligonucleotide
  Antisense strand to SEQ ID NO: 1125476
aaauucccuagagguguga

SEQ ID NO: 1125478 - RNA, 19 nt, Artificial Sequence
  Description of Artificial Sequence: Synthetic oligonucleotide
  Sense strand starting at position 1639 of SEQ ID NO: 916036
cucuuuaaucagggacaug

SEQ ID NO: 1125479 - RNA, 19 nt, Artificial Sequence
  Description of Artificial Sequence: Synthetic oligonucleotide
  Antisense strand to SEQ ID NO: 1125478
caugucccugauuaaagag

SEQ ID NO: 1125480 - RNA, 19 nt, Artificial Sequence
  Description of Artificial Sequence: Synthetic oligonucleotide
  Sense strand starting at position 1822 of SEQ ID NO: 916036
agguuccucuggccaguua

SEQ ID NO: 1125481 - RNA, 19 nt, Artificial Sequence
  Description of Artificial Sequence: Synthetic oligonucleotide
  Antisense strand to SEQ ID NO: 1125480
uaacuggccagaggaaccu

SEQ ID NO: 1125482 - RNA, 19 nt, Artificial Sequence
  Description of Artificial Sequence: Synthetic oligonucleotide
  Sense strand starting at position 1869 of SEQ ID NO: 916036
gcaagagugaugugucccu

SEQ ID NO: 1125483 - RNA, 19 nt, Artificial Sequence
  Description of Artificial Sequence: Synthetic oligonucleotide
  Antisense strand to SEQ ID NO: 1125482
agggacacaucacucuugc

SEQ ID NO: 1125484 - RNA, 19 nt, Artificial Sequence
  Description of Artificial Sequence: Synthetic oligonucleotide
  Sense strand starting at position 1874 of SEQ ID NO: 916036
agugaugugucccucccua

SEQ ID NO: 1125485 - RNA, 19 nt, Artificial Sequence
  Description of Artificial Sequence: Synthetic oligonucleotide
  Antisense strand to SEQ ID NO: 1125484
uagggagggacacaucacu

SEQ ID NO: 1125486 - RNA, 19 nt, Artificial Sequence
  Description of Artificial Sequence: Synthetic oligonucleotide
  Sense strand starting at position 2115 of SEQ ID NO: 916036
gugguugggucaccagaca

SEQ ID NO: 1125487 - RNA, 19 nt, Artificial Sequence
  Description of Artificial Sequence: Synthetic oligonucleotide
  Antisense strand to SEQ ID NO: 1125486
ugucuggugacccaaccac

SEQ ID NO: 1125488 - RNA, 19 nt, Artificial Sequence
  Description of Artificial Sequence: Synthetic oligonucleotide
  Sense strand starting at position 2180 of SEQ ID NO: 916036
uggccauucucgguggaaa

SEQ ID NO: 1125489 - RNA, 19 nt, Artificial Sequence
  Description of Artificial Sequence: Synthetic oligonucleotide
  Antisense strand to SEQ ID NO: 1125488
uuuccaccgagaauggcca

SEQ ID NO: 1125490 - RNA, 19 nt, Artificial Sequence
  Description of Artificial Sequence: Synthetic oligonucleotide
  Sense strand starting at position 2181 of SEQ ID NO: 916036
ggccauucucgguggaaac

SEQ ID NO: 1125491 - RNA, 19 nt, Artificial Sequence
  Description of Artificial Sequence: Synthetic oligonucleotide
  Antisense strand to SEQ ID NO: 1125490
guuuccaccgagaauggcc

SEQ ID NO: 1125492 - RNA, 19 nt, Artificial Sequence
  Description of Artificial Sequence: Synthetic oligonucleotide
  Sense strand starting at position 2182 of SEQ ID NO: 916036
gccauucucgguggaaaca

SEQ ID NO: 1125493 - RNA, 19 nt, Artificial Sequence
  Description of Artificial Sequence: Synthetic oligonucleotide
  Antisense strand to SEQ ID NO: 1125492
uguuuccaccgagaauggc

SEQ ID NO: 1125494 - RNA, 19 nt, Artificial Sequence
  Description of Artificial Sequence: Synthetic oligonucleotide
  Sense strand starting at position 2183 of SEQ ID NO: 916036
ccauucucgguggaaacaa

SEQ ID NO: 1125495 - RNA, 19 nt, Artificial Sequence
  Description of Artificial Sequence: Synthetic oligonucleotide
  Antisense strand to SEQ ID NO: 1125494
uuguuuccaccgagaaugg

SEQ ID NO: 1125496 - RNA, 19 nt, Artificial Sequence
  Description of Artificial Sequence: Synthetic oligonucleotide
  Sense strand starting at position 2202 of SEQ ID NO: 916036
gccucagguguccaggaaa

SEQ ID NO: 1125497 - RNA, 19 nt, Artificial Sequence
  Description of Artificial Sequence: Synthetic oligonucleotide
  Antisense strand to SEQ ID NO: 1125496
uuuccuggacaccugaggc

SEQ ID NO: 1125498 - RNA, 19 nt, Artificial Sequence
  Description of Artificial Sequence: Synthetic oligonucleotide
  Sense strand starting at position 2607 of SEQ ID NO: 916036
ccucuuuacccgcaggaga

SEQ ID NO: 1125499 - RNA, 19 nt, Artificial Sequence
  Description of Artificial Sequence: Synthetic oligonucleotide
  Antisense strand to SEQ ID NO: 1125498
ucuccugcggguaaagagg

SEQ ID NO: 1125500 - RNA, 19 nt, Artificial Sequence
  Description of Artificial Sequence: Synthetic oligonucleotide
  Sense strand starting at position 2911 of SEQ ID NO: 916036
ggaacuucgaagcaaaguu

SEQ ID NO: 1125501 - RNA, 19 nt, Artificial Sequence
  Description of Artificial Sequence: Synthetic oligonucleotide
  Antisense strand to SEQ ID NO: 1125500
aacuuugcuucgaaguucc

SEQ ID NO: 1125502 - RNA, 19 nt, Artificial Sequence
  Description of Artificial Sequence: Synthetic oligonucleotide
  Sense strand starting at position 3504 of SEQ ID NO: 916036
gugacaauguggucuguga

SEQ ID NO: 1125503 - RNA, 19 nt, Artificial Sequence
  Description of Artificial Sequence: Synthetic oligonucleotide
  Antisense strand to SEQ ID NO: 1125502
ucacagaccacauugucac

SEQ ID NO: 1125504 - RNA, 19 nt, Artificial Sequence
  Description of Artificial Sequence: Synthetic oligonucleotide
  Sense strand starting at position 3508 of SEQ ID NO: 916036
caauguggucugugagguu

SEQ ID NO: 1125505 - RNA, 19 nt, Artificial Sequence
  Description of Artificial Sequence: Synthetic oligonucleotide
  Antisense strand to SEQ ID NO: 1125504
aaccucacagaccacauug

SEQ ID NO: 1125506 - RNA, 19 nt, Artificial Sequence
  Description of Artificial Sequence: Synthetic oligonucleotide
  Sense strand starting at position 3682 of SEQ ID NO: 916036
ggugucucccaacauucua

SEQ ID NO: 1125507 - RNA, 19 nt, Artificial Sequence
  Description of Artificial Sequence: Synthetic oligonucleotide
  Antisense strand to SEQ ID NO: 1125506
uagaauguugggagacacc

SEQ ID NO: 1125508 - RNA, 19 nt, Artificial Sequence
  Description of Artificial Sequence: Synthetic oligonucleotide
  Sense strand starting at position 3759 of SEQ ID NO: 916036
cagggauccuagucugaga

SEQ ID NO: 1125509 - RNA, 19 nt, Artificial Sequence
  Description of Artificial Sequence: Synthetic oligonucleotide
  Antisense strand to SEQ ID NO: 1125508
ucucagacuaggaucccug

SEQ ID NO: 1125510 - RNA, 19 nt, Artificial Sequence
  Description of Artificial Sequence: Synthetic oligonucleotide
  Sense strand starting at position 3857 of SEQ ID NO: 916036
gaggauugacaaggucugu

SEQ ID NO: 1125511 - RNA, 19 nt, Artificial Sequence
  Description of Artificial Sequence: Synthetic oligonucleotide
  Antisense strand to SEQ ID NO: 1125510
acagaccuugucaauccuc

SEQ ID NO: 1125512 - RNA, 19 nt, Artificial Sequence
  Description of Artificial Sequence: Synthetic oligonucleotide
  Sense strand starting at position 3897 of SEQ ID NO: 916036
uccugcauccgucugugau

SEQ ID NO: 1125513 - RNA, 19 nt, Artificial Sequence
  Description of Artificial Sequence: Synthetic oligonucleotide
  Antisense strand to SEQ ID NO: 1125512
aucacagacggaugcagga

SEQ ID NO: 1125514 - RNA, 19 nt, Artificial Sequence
  Description of Artificial Sequence: Synthetic oligonucleotide
  Sense strand starting at position 3950 of SEQ ID NO: 916036
aggcuuacauccucuggau

SEQ ID NO: 1125515 - RNA, 19 nt, Artificial Sequence
  Description of Artificial Sequence: Synthetic oligonucleotide
  Antisense strand to SEQ ID NO: 1125514
auccagaggauguaagccu

SEQ ID NO: 1125516 - RNA, 19 nt, Artificial Sequence
  Description of Artificial Sequence: Synthetic oligonucleotide
  Sense strand starting at position 3974 of SEQ ID NO: 916036
cgucuuaucccagaagaca

SEQ ID NO: 1125517 - RNA, 19 nt, Artificial Sequence
  Description of Artificial Sequence: Synthetic oligonucleotide
  Antisense strand to SEQ ID NO: 1125516
ugucuucugggauaagacg

SEQ ID NO: 1125518 - RNA, 19 nt, Artificial Sequence
  Description of Artificial Sequence: Synthetic oligonucleotide
  Sense strand starting at position 5 of SEQ ID NO: 916037
ugcucaggguuaucucuua

SEQ ID NO: 1125519 - RNA, 19 nt, Artificial Sequence
  Description of Artificial Sequence: Synthetic oligonucleotide
  Antisense strand to SEQ ID NO: 1125518
uaagagauaacccugagca

SEQ ID NO: 1125520 - RNA, 19 nt, Artificial Sequence
  Description of Artificial Sequence: Synthetic oligonucleotide
  Sense strand starting at position 13 of SEQ ID NO: 916037
guuaucucuuaccucgaca

SEQ ID NO: 1125521 - RNA, 19 nt, Artificial Sequence
  Description of Artificial Sequence: Synthetic oligonucleotide
  Antisense strand to SEQ ID NO: 1125520
ugucgagguaagagauaac

SEQ ID NO: 1125522 - RNA, 19 nt, Artificial Sequence
  Description of Artificial Sequence: Synthetic oligonucleotide
  Sense strand starting at position 343 of SEQ ID NO: 916037
aucgccuucucguugaaau

SEQ ID NO: 1125523 - RNA, 19 nt, Artificial Sequence
  Description of Artificial Sequence: Synthetic oligonucleotide
  Antisense strand to SEQ ID NO: 1125522
auuucaacgagaaggcgau

SEQ ID NO: 1125524 - RNA, 19 nt, Artificial Sequence
  Description of Artificial Sequence: Synthetic oligonucleotide
  Sense strand starting at position 345 of SEQ ID NO: 916037
cgccuucucguugaaauua

SEQ ID NO: 1125525 - RNA, 19 nt, Artificial Sequence
  Description of Artificial Sequence: Synthetic oligonucleotide
  Antisense strand to SEQ ID NO: 1125524
uaauuucaacgagaaggcg

SEQ ID NO: 1125526 - RNA, 19 nt, Artificial Sequence
  Description of Artificial Sequence: Synthetic oligonucleotide
  Sense strand starting at position 353 of SEQ ID NO: 916037
cguugaaauuaaucccaca

SEQ ID NO: 1125527 - RNA, 19 nt, Artificial Sequence
  Description of Artificial Sequence: Synthetic oligonucleotide
  Antisense strand to SEQ ID NO: 1125526
ugugggauuaauuucaacg

SEQ ID NO: 1125528 - RNA, 19 nt, Artificial Sequence
  Description of Artificial Sequence: Synthetic oligonucleotide
  Sense strand starting at position 382 of SEQ ID NO: 916037
acauuaaugcagcaggagu

SEQ ID NO: 1125529 - RNA, 19 nt, Artificial Sequence
  Description of Artificial Sequence: Synthetic oligonucleotide
  Antisense strand to SEQ ID NO: 1125528
acuccugcugcauuaaugu

SEQ ID NO: 1125530 - RNA, 19 nt, Artificial Sequence
  Description of Artificial Sequence: Synthetic oligonucleotide
  Sense strand starting at position 404 of SEQ ID NO: 916037
ggacucgguucuucgacau

SEQ ID NO: 1125531 - RNA, 19 nt, Artificial Sequence
  Description of Artificial Sequence: Synthetic oligonucleotide
  Antisense strand to SEQ ID NO: 1125530
augucgaagaaccgagucc

SEQ ID NO: 1125532 - RNA, 19 nt, Artificial Sequence
  Description of Artificial Sequence: Synthetic oligonucleotide
  Sense strand starting at position 408 of SEQ ID NO: 916037
ucgguucuucgacauggaa

SEQ ID NO: 1125533 - RNA, 19 nt, Artificial Sequence
  Description of Artificial Sequence: Synthetic oligonucleotide
  Antisense strand to SEQ ID NO: 1125532
uuccaugucgaagaaccga

SEQ ID NO: 1125534 - RNA, 19 nt, Artificial Sequence
  Description of Artificial Sequence: Synthetic oligonucleotide
  Sense strand starting at position 434 of SEQ ID NO: 916037
ucucccaaucuguguaguu

SEQ ID NO: 1125535 - RNA, 19 nt, Artificial Sequence
  Description of Artificial Sequence: Synthetic oligonucleotide
  Antisense strand to SEQ ID NO: 1125534
aacuacacagauugggaga

SEQ ID NO: 1125536 - RNA, 19 nt, Artificial Sequence
  Description of Artificial Sequence: Synthetic oligonucleotide
  Sense strand starting at position 435 of SEQ ID NO: 916037
cucccaaucuguguaguua

SEQ ID NO: 1125537 - RNA, 19 nt, Artificial Sequence
  Description of Artificial Sequence: Synthetic oligonucleotide
  Antisense strand to SEQ ID NO: 1125536
uaacuacacagauugggag

SEQ ID NO: 1125538 - RNA, 19 nt, Artificial Sequence
  Description of Artificial Sequence: Synthetic oligonucleotide
  Sense strand starting at position 496 of SEQ ID NO: 916037
agaagaagguuguuaagug

SEQ ID NO: 1125539 - RNA, 19 nt, Artificial Sequence
  Description of Artificial Sequence: Synthetic oligonucleotide
  Antisense strand to SEQ ID NO: 1125538
cacuuaacaaccuucuucu

SEQ ID NO: 1125540 - RNA, 19 nt, Artificial Sequence
  Description of Artificial Sequence: Synthetic oligonucleotide
  Sense strand starting at position 497 of SEQ ID NO: 916037
gaagaagguuguuaaguga

SEQ ID NO: 1125541 - RNA, 19 nt, Artificial Sequence
  Description of Artificial Sequence: Synthetic oligonucleotide
  Antisense strand to SEQ ID NO: 1125540
ucacuuaacaaccuucuuc

SEQ ID NO: 1125542 - RNA, 19 nt, Artificial Sequence
  Description of Artificial Sequence: Synthetic oligonucleotide
  Sense strand starting at position 1143 of SEQ ID NO: 916037
ccaccaacaugauaagaga

SEQ ID NO: 1125543 - RNA, 19 nt, Artificial Sequence
  Description of Artificial Sequence: Synthetic oligonucleotide
  Antisense strand to SEQ ID NO: 1125542
ucucuuaucauguuggugg

SEQ ID NO: 1125544 - RNA, 19 nt, Artificial Sequence
  Description of Artificial Sequence: Synthetic oligonucleotide
  Sense strand starting at position 1201 of SEQ ID NO: 916037
aaguuuggagucuaugcau

SEQ ID NO: 1125545 - RNA, 19 nt, Artificial Sequence
  Description of Artificial Sequence: Synthetic oligonucleotide
  Antisense strand to SEQ ID NO: 1125544
augcauagacuccaaacuu

SEQ ID NO: 1125546 - RNA, 19 nt, Artificial Sequence
  Description of Artificial Sequence: Synthetic oligonucleotide
  Sense strand starting at position 1353 of SEQ ID NO: 916037
cccaacucaccgugaucau

SEQ ID NO: 1125547 - RNA, 19 nt, Artificial Sequence
  Description of Artificial Sequence: Synthetic oligonucleotide
  Antisense strand to SEQ ID NO: 1125546
augaucacggugaguuggg

SEQ ID NO: 1125548 - RNA, 19 nt, Artificial Sequence
  Description of Artificial Sequence: Synthetic oligonucleotide
  Sense strand starting at position 1354 of SEQ ID NO: 916037
ccaacucaccgugaucaua

SEQ ID NO: 1125549 - RNA, 19 nt, Artificial Sequence
  Description of Artificial Sequence: Synthetic oligonucleotide
  Antisense strand to SEQ ID NO: 1125548
uaugaucacggugaguugg

SEQ ID NO: 1125550 - RNA, 19 nt, Artificial Sequence
  Description of Artificial Sequence: Synthetic oligonucleotide
  Sense strand starting at position 1362 of SEQ ID NO: 916037
ccgugaucauaagacaaua

SEQ ID NO: 1125551 - RNA, 19 nt, Artificial Sequence
  Description of Artificial Sequence: Synthetic oligonucleotide
  Antisense strand to SEQ ID NO: 1125550
uauugucuuaugaucacgg

SEQ ID NO: 1125552 - RNA, 19 nt, Artificial Sequence
  Description of Artificial Sequence: Synthetic oligonucleotide
  Sense strand starting at position 1482 of SEQ ID NO: 916037
ccuggauuauggucugacu

SEQ ID NO: 1125553 - RNA, 19 nt, Artificial Sequence
  Description of Artificial Sequence: Synthetic oligonucleotide
  Antisense strand to SEQ ID NO: 1125552
agucagaccauaauccagg

SEQ ID NO: 1125554 - RNA, 19 nt, Artificial Sequence
  Description of Artificial Sequence: Synthetic oligonucleotide
  Sense strand starting at position 1484 of SEQ ID NO: 916037
uggauuauggucugacuca

SEQ ID NO: 1125555 - RNA, 19 nt, Artificial Sequence
  Description of Artificial Sequence: Synthetic oligonucleotide
  Antisense strand to SEQ ID NO: 1125554
ugagucagaccauaaucca

SEQ ID NO: 1125556 - RNA, 19 nt, Artificial Sequence
  Description of Artificial Sequence: Synthetic oligonucleotide
  Sense strand starting at position 1485 of SEQ ID NO: 916037
ggauuauggucugacucag

SEQ ID NO: 1125557 - RNA, 19 nt, Artificial Sequence
  Description of Artificial Sequence: Synthetic oligonucleotide
  Antisense strand to SEQ ID NO: 1125556
cugagucagaccauaaucc

SEQ ID NO: 1125558 - RNA, 19 nt, Artificial Sequence
  Description of Artificial Sequence: Synthetic oligonucleotide
  Sense strand starting at position 1665 of SEQ ID NO: 916037
cucacaccucuagggaauu

SEQ ID NO: 1125559 - RNA, 19 nt, Artificial Sequence
  Description of Artificial Sequence: Synthetic oligonucleotide
  Antisense strand to SEQ ID NO: 1125558
aauucccuagaggugugag

SEQ ID NO: 1125560 - RNA, 19 nt, Artificial Sequence
  Description of Artificial Sequence: Synthetic oligonucleotide
  Sense strand starting at position 1666 of SEQ ID NO: 916037
ucacaccucuagggaauuu

SEQ ID NO: 1125561 - RNA, 19 nt, Artificial Sequence
  Description of Artificial Sequence: Synthetic oligonucleotide
  Antisense strand to SEQ ID NO: 1125560
aaauucccuagagguguga

SEQ ID NO: 1125562 - RNA, 19 nt, Artificial Sequence
  Description of Artificial Sequence: Synthetic oligonucleotide
  Sense strand starting at position 1751 of SEQ ID NO: 916037
cucuuuaaucagggacaug

SEQ ID NO: 1125563 - RNA, 19 nt, Artificial Sequence
  Description of Artificial Sequence: Synthetic oligonucleotide
  Antisense strand to SEQ ID NO: 1125562
caugucccugauuaaagag

SEQ ID NO: 1125564 - RNA, 19 nt, Artificial Sequence
  Description of Artificial Sequence: Synthetic oligonucleotide
  Sense strand starting at position 1934 of SEQ ID NO: 916037
agguuccucuggccaguua

SEQ ID NO: 1125565 - RNA, 19 nt, Artificial Sequence
  Description of Artificial Sequence: Synthetic oligonucleotide
  Antisense strand to SEQ ID NO: 1125564
uaacuggccagaggaaccu

SEQ ID NO: 1125566 - RNA, 19 nt, Artificial Sequence
  Description of Artificial Sequence: Synthetic oligonucleotide
  Sense strand starting at position 1981 of SEQ ID NO: 916037
gcaagagugaugugucccu

SEQ ID NO: 1125567 - RNA, 19 nt, Artificial Sequence
  Description of Artificial Sequence: Synthetic oligonucleotide
  Antisense strand to SEQ ID NO: 1125566
agggacacaucacucuugc

SEQ ID NO: 1125568 - RNA, 19 nt, Artificial Sequence
  Description of Artificial Sequence: Synthetic oligonucleotide
  Sense strand starting at position 1986 of SEQ ID NO: 916037
agugaugugucccucccua

SEQ ID NO: 1125569 - RNA, 19 nt, Artificial Sequence
  Description of Artificial Sequence: Synthetic oligonucleotide
  Antisense strand to SEQ ID NO: 1125568
uagggagggacacaucacu

SEQ ID NO: 1125570 - RNA, 19 nt, Artificial Sequence
  Description of Artificial Sequence: Synthetic oligonucleotide
  Sense strand starting at position 2227 of SEQ ID NO: 916037
gugguugggucaccagaca

SEQ ID NO: 1125571 - RNA, 19 nt, Artificial Sequence
  Description of Artificial Sequence: Synthetic oligonucleotide
  Antisense strand to SEQ ID NO: 1125570
ugucuggugacccaaccac

SEQ ID NO: 1125572 - RNA, 19 nt, Artificial Sequence
  Description of Artificial Sequence: Synthetic oligonucleotide
  Sense strand starting at position 2292 of SEQ ID NO: 916037
uggccauucucgguggaaa

SEQ ID NO: 1125573 - RNA, 19 nt, Artificial Sequence
  Description of Artificial Sequence: Synthetic oligonucleotide
  Antisense strand to SEQ ID NO: 1125572
uuuccaccgagaauggcca

SEQ ID NO: 1125574 - RNA, 19 nt, Artificial Sequence
  Description of Artificial Sequence: Synthetic oligonucleotide
  Sense strand starting at position 2293 of SEQ ID NO: 916037
ggccauucucgguggaaac

SEQ ID NO: 1125575 - RNA, 19 nt, Artificial Sequence
  Description of Artificial Sequence: Synthetic oligonucleotide
  Antisense strand to SEQ ID NO: 1125574
guuuccaccgagaauggcc

SEQ ID NO: 1125576 - RNA, 19 nt, Artificial Sequence
  Description of Artificial Sequence: Synthetic oligonucleotide
  Sense strand starting at position 2294 of SEQ ID NO: 916037
gccauucucgguggaaaca

SEQ ID NO: 1125577 - RNA, 19 nt, Artificial Sequence
  Description of Artificial Sequence: Synthetic oligonucleotide
  Antisense strand to SEQ ID NO: 1125576
uguuuccaccgagaauggc

SEQ ID NO: 1125578 - RNA, 19 nt, Artificial Sequence
  Description of Artificial Sequence: Synthetic oligonucleotide
  Sense strand starting at position 2295 of SEQ ID NO: 916037
ccauucucgguggaaacaa

SEQ ID NO: 1125579 - RNA, 19 nt, Artificial Sequence
  Description of Artificial Sequence: Synthetic oligonucleotide
  Antisense strand to SEQ ID NO: 1125578
uuguuuccaccgagaaugg

SEQ ID NO: 1125580 - RNA, 19 nt, Artificial Sequence
  Description of Artificial Sequence: Synthetic oligonucleotide
  Sense strand starting at position 2314 of SEQ ID NO: 916037
gccucagguguccaggaaa

SEQ ID NO: 1125581 - RNA, 19 nt, Artificial Sequence
  Description of Artificial Sequence: Synthetic oligonucleotide
  Antisense strand to SEQ ID NO: 1125580
uuuccuggacaccugaggc

SEQ ID NO: 1125582 - RNA, 19 nt, Artificial Sequence
  Description of Artificial Sequence: Synthetic oligonucleotide
  Sense strand starting at position 2719 of SEQ ID NO: 916037
ccucuuuacccgcaggaga

SEQ ID NO: 1125583 - RNA, 19 nt, Artificial Sequence
  Description of Artificial Sequence: Synthetic oligonucleotide
  Antisense strand to SEQ ID NO: 1125582
ucuccugcggguaaagagg

SEQ ID NO: 1125584 - RNA, 19 nt, Artificial Sequence
  Description of Artificial Sequence: Synthetic oligonucleotide
  Sense strand starting at position 2849 of SEQ ID NO: 916037
ccagucuccgggcgucaaa

SEQ ID NO: 1125585 - RNA, 19 nt, Artificial Sequence
  Description of Artificial Sequence: Synthetic oligonucleotide
  Antisense strand to SEQ ID NO: 1125584
uuugacgcccggagacugg

SEQ ID NO: 1125586 - RNA, 19 nt, Artificial Sequence
  Description of Artificial Sequence: Synthetic oligonucleotide
  Sense strand starting at position 3023 of SEQ ID NO: 916037
ggaacuucgaagcaaaguu

SEQ ID NO: 1125587 - RNA, 19 nt, Artificial Sequence
  Description of Artificial Sequence: Synthetic oligonucleotide
  Antisense strand to SEQ ID NO: 1125586
aacuuugcuucgaaguucc

SEQ ID NO: 1125588 - RNA, 19 nt, Artificial Sequence
  Description of Artificial Sequence: Synthetic oligonucleotide
  Sense strand starting at position 3616 of SEQ ID NO: 916037
gugacaauguggucuguga

SEQ ID NO: 1125589 - RNA, 19 nt, Artificial Sequence
  Description of Artificial Sequence: Synthetic oligonucleotide
  Antisense strand to SEQ ID NO: 1125588
ucacagaccacauugucac

SEQ ID NO: 1125590 - RNA, 19 nt, Artificial Sequence
  Description of Artificial Sequence: Synthetic oligonucleotide
  Sense strand starting at position 3620 of SEQ ID NO: 916037
caauguggucugugagguu

SEQ ID NO: 1125591 - RNA, 19 nt, Artificial Sequence
  Description of Artificial Sequence: Synthetic oligonucleotide
  Antisense strand to SEQ ID NO: 1125590
aaccucacagaccacauug

SEQ ID NO: 1125592 - RNA, 19 nt, Artificial Sequence
  Description of Artificial Sequence: Synthetic oligonucleotide
  Sense strand starting at position 3794 of SEQ ID NO: 916037
ggugucucccaacauucua

SEQ ID NO: 1125593 - RNA, 19 nt, Artificial Sequence
  Description of Artificial Sequence: Synthetic oligonucleotide
  Antisense strand to SEQ ID NO: 1125592
uagaauguugggagacacc

SEQ ID NO: 1125594 - RNA, 19 nt, Artificial Sequence
  Description of Artificial Sequence: Synthetic oligonucleotide
  Sense strand starting at position 3871 of SEQ ID NO: 916037
cagggauccuagucugaga

SEQ ID NO: 1125595 - RNA, 19 nt, Artificial Sequence
  Description of Artificial Sequence: Synthetic oligonucleotide
  Antisense strand to SEQ ID NO: 1125594
ucucagacuaggaucccug

SEQ ID NO: 1125596 - RNA, 19 nt, Artificial Sequence
  Description of Artificial Sequence: Synthetic oligonucleotide
  Sense strand starting at position 3969 of SEQ ID NO: 916037
gaggauugacaaggucugu

SEQ ID NO: 1125597 - RNA, 19 nt, Artificial Sequence
  Description of Artificial Sequence: Synthetic oligonucleotide
  Antisense strand to SEQ ID NO: 1125596
acagaccuugucaauccuc

SEQ ID NO: 1125598 - RNA, 19 nt, Artificial Sequence
  Description of Artificial Sequence: Synthetic oligonucleotide
  Sense strand starting at position 12 of SEQ ID NO: 916038
aaguuuggagucuaugcau

SEQ ID NO: 1125599 - RNA, 19 nt, Artificial Sequence
  Description of Artificial Sequence: Synthetic oligonucleotide
  Antisense strand to SEQ ID NO: 1125598
augcauagacuccaaacuu

SEQ ID NO: 1125600 - RNA, 19 nt, Artificial Sequence
  Description of Artificial Sequence: Synthetic oligonucleotide
  Sense strand starting at position 164 of SEQ ID NO: 916038
cccaacucaccgugaucau

SEQ ID NO: 1125601 - RNA, 19 nt, Artificial Sequence
  Description of Artificial Sequence: Synthetic oligonucleotide
  Antisense strand to SEQ ID NO: 1125600
augaucacggugaguuggg

SEQ ID NO: 1125602 - RNA, 19 nt, Artificial Sequence
  Description of Artificial Sequence: Synthetic oligonucleotide
  Sense strand starting at position 165 of SEQ ID NO: 916038
ccaacucaccgugaucaua

SEQ ID NO: 1125603 - RNA, 19 nt, Artificial Sequence
  Description of Artificial Sequence: Synthetic oligonucleotide
  Antisense strand to SEQ ID NO: 1125602
uaugaucacggugaguugg

SEQ ID NO: 1125604 - RNA, 19 nt, Artificial Sequence
  Description of Artificial Sequence: Synthetic oligonucleotide
  Sense strand starting at position 293 of SEQ ID NO: 916038
ccuggauuauggucugacu

SEQ ID NO: 1125605 - RNA, 19 nt, Artificial Sequence
  Description of Artificial Sequence: Synthetic oligonucleotide
  Antisense strand to SEQ ID NO: 1125604
agucagaccauaauccagg

SEQ ID NO: 1125606 - RNA, 19 nt, Artificial Sequence
  Description of Artificial Sequence: Synthetic oligonucleotide
  Sense strand starting at position 295 of SEQ ID NO: 916038
uggauuauggucugacuca

SEQ ID NO: 1125607 - RNA, 19 nt, Artificial Sequence
  Description of Artificial Sequence: Synthetic oligonucleotide
  Antisense strand to SEQ ID NO: 1125606
ugagucagaccauaaucca

SEQ ID NO: 1125608 - RNA, 19 nt, Artificial Sequence
  Description of Artificial Sequence: Synthetic oligonucleotide
  Sense strand starting at position 476 of SEQ ID NO: 916038
cucacaccucuagggaauu

SEQ ID NO: 1125609 - RNA, 19 nt, Artificial Sequence
  Description of Artificial Sequence: Synthetic oligonucleotide
  Antisense strand to SEQ ID NO: 1125608
aauucccuagaggugugag

SEQ ID NO: 1125610 - RNA, 19 nt, Artificial Sequence
  Description of Artificial Sequence: Synthetic oligonucleotide
  Sense strand starting at position 477 of SEQ ID NO: 916038
ucacaccucuagggaauuu

SEQ ID NO: 1125611 - RNA, 19 nt, Artificial Sequence
  Description of Artificial Sequence: Synthetic oligonucleotide
  Antisense strand to SEQ ID NO: 1125610
aaauucccuagagguguga

SEQ ID NO: 1125612 - RNA, 19 nt, Artificial Sequence
  Description of Artificial Sequence: Synthetic oligonucleotide
  Sense strand starting at position 562 of SEQ ID NO: 916038
cucuuuaaucagggacaug

SEQ ID NO: 1125613 - RNA, 19 nt, Artificial Sequence
  Description of Artificial Sequence: Synthetic oligonucleotide
  Antisense strand to SEQ ID NO: 1125612
caugucccugauuaaagag

SEQ ID NO: 1125614 - RNA, 19 nt, Artificial Sequence
  Description of Artificial Sequence: Synthetic oligonucleotide
  Sense strand starting at position 745 of SEQ ID NO: 916038
agguuccucuggccaguua

SEQ ID NO: 1125615 - RNA, 19 nt, Artificial Sequence
  Description of Artificial Sequence: Synthetic oligonucleotide
  Antisense strand to SEQ ID NO: 1125614
uaacuggccagaggaaccu

SEQ ID NO: 1125616 - RNA, 19 nt, Artificial Sequence
  Description of Artificial Sequence: Synthetic oligonucleotide
  Sense strand starting at position 797 of SEQ ID NO: 916038
agugaugugucccucccua

SEQ ID NO: 1125617 - RNA, 19 nt, Artificial Sequence
  Description of Artificial Sequence: Synthetic oligonucleotide
  Antisense strand to SEQ ID NO: 1125616
uagggagggacacaucacu

SEQ ID NO: 1125618 - RNA, 19 nt, Artificial Sequence
  Description of Artificial Sequence: Synthetic oligonucleotide
  Sense strand starting at position 1038 of SEQ ID NO: 916038
gugguugggucaccagaca

SEQ ID NO: 1125619 - RNA, 19 nt, Artificial Sequence
  Description of Artificial Sequence: Synthetic oligonucleotide
  Antisense strand to SEQ ID NO: 1125618
ugucuggugacccaaccac

SEQ ID NO: 1125620 - RNA, 19 nt, Artificial Sequence
  Description of Artificial Sequence: Synthetic oligonucleotide
  Sense strand starting at position 1103 of SEQ ID NO: 916038
uggccauucucgguggaaa

SEQ ID NO: 1125621 - RNA, 19 nt, Artificial Sequence
  Description of Artificial Sequence: Synthetic oligonucleotide
  Antisense strand to SEQ ID NO: 1125620
uuuccaccgagaauggcca

SEQ ID NO: 1125622 - RNA, 19 nt, Artificial Sequence
  Description of Artificial Sequence: Synthetic oligonucleotide
  Sense strand starting at position 1104 of SEQ ID NO: 916038
ggccauucucgguggaaac

SEQ ID NO: 1125623 - RNA, 19 nt, Artificial Sequence
  Description of Artificial Sequence: Synthetic oligonucleotide
  Antisense strand to SEQ ID NO: 1125622
guuuccaccgagaauggcc

SEQ ID NO: 1125624 - RNA, 19 nt, Artificial Sequence
  Description of Artificial Sequence: Synthetic oligonucleotide
  Sense strand starting at position 1105 of SEQ ID NO: 916038
gccauucucgguggaaaca

SEQ ID NO: 1125625 - RNA, 19 nt, Artificial Sequence
  Description of Artificial Sequence: Synthetic oligonucleotide
  Antisense strand to SEQ ID NO: 1125624
uguuuccaccgagaauggc

SEQ ID NO: 1125626 - RNA, 19 nt, Artificial Sequence
  Description of Artificial Sequence: Synthetic oligonucleotide
  Sense strand starting at position 1106 of SEQ ID NO: 916038
ccauucucgguggaaacaa

SEQ ID NO: 1125627 - RNA, 19 nt, Artificial Sequence
  Description of Artificial Sequence: Synthetic oligonucleotide
  Antisense strand to SEQ ID NO: 1125626
uuguuuccaccgagaaugg

SEQ ID NO: 1125628 - RNA, 19 nt, Artificial Sequence
  Description of Artificial Sequence: Synthetic oligonucleotide
  Sense strand starting at position 1125 of SEQ ID NO: 916038
gccucagguguccaggaaa

SEQ ID NO: 1125629 - RNA, 19 nt, Artificial Sequence
  Description of Artificial Sequence: Synthetic oligonucleotide
  Antisense strand to SEQ ID NO: 1125628
uuuccuggacaccugaggc

SEQ ID NO: 1125630 - RNA, 19 nt, Artificial Sequence
  Description of Artificial Sequence: Synthetic oligonucleotide
  Sense strand starting at position 1530 of SEQ ID NO: 916038
ccucuuuacccgcaggaga

SEQ ID NO: 1125631 - RNA, 19 nt, Artificial Sequence
  Description of Artificial Sequence: Synthetic oligonucleotide
  Antisense strand to SEQ ID NO: 1125630
ucuccugcggguaaagagg

SEQ ID NO: 1125632 - RNA, 19 nt, Artificial Sequence
  Description of Artificial Sequence: Synthetic oligonucleotide
  Sense strand starting at position 1834 of SEQ ID NO: 916038
ggaacuucgaagcaaaguu

SEQ ID NO: 1125633 - RNA, 19 nt, Artificial Sequence
  Description of Artificial Sequence: Synthetic oligonucleotide
  Antisense strand to SEQ ID NO: 1125632
aacuuugcuucgaaguucc

SEQ ID NO: 1125634 - RNA, 19 nt, Artificial Sequence
  Description of Artificial Sequence: Synthetic oligonucleotide
  Sense strand starting at position 2427 of SEQ ID NO: 916038
gugacaauguggucuguga

SEQ ID NO: 1125635 - RNA, 19 nt, Artificial Sequence
  Description of Artificial Sequence: Synthetic oligonucleotide
  Antisense strand to SEQ ID NO: 1125634
ucacagaccacauugucac

SEQ ID NO: 1125636 - RNA, 19 nt, Artificial Sequence
  Description of Artificial Sequence: Synthetic oligonucleotide
  Sense strand starting at position 2431 of SEQ ID NO: 916038
caauguggucugugagguu

SEQ ID NO: 1125637 - RNA, 19 nt, Artificial Sequence
  Description of Artificial Sequence: Synthetic oligonucleotide
  Antisense strand to SEQ ID NO: 1125636
aaccucacagaccacauug

SEQ ID NO: 1125638 - RNA, 19 nt, Artificial Sequence
  Description of Artificial Sequence: Synthetic oligonucleotide
  Sense strand starting at position 2605 of SEQ ID NO: 916038
ggugucucccaacauucua

SEQ ID NO: 1125639 - RNA, 19 nt, Artificial Sequence
  Description of Artificial Sequence: Synthetic oligonucleotide
  Antisense strand to SEQ ID NO: 1125638
uagaauguugggagacacc

SEQ ID NO: 1125640 - RNA, 19 nt, Artificial Sequence
  Description of Artificial Sequence: Synthetic oligonucleotide
  Sense strand starting at position 2682 of SEQ ID NO: 916038
cagggauccuagucugaga

SEQ ID NO: 1125641 - RNA, 19 nt, Artificial Sequence
  Description of Artificial Sequence: Synthetic oligonucleotide
  Antisense strand to SEQ ID NO: 1125640
ucucagacuaggaucccug

SEQ ID NO: 1125642 - RNA, 19 nt, Artificial Sequence
  Description of Artificial Sequence: Synthetic oligonucleotide
  Sense strand starting at position 2780 of SEQ ID NO: 916038
gaggauugacaaggucugu

SEQ ID NO: 1125643 - RNA, 19 nt, Artificial Sequence
  Description of Artificial Sequence: Synthetic oligonucleotide
  Antisense strand to SEQ ID NO: 1125642
acagaccuugucaauccuc

SEQ ID NO: 1125644 - RNA, 19 nt, Artificial Sequence
  Description of Artificial Sequence: Synthetic oligonucleotide
  Sense strand starting at position 2820 of SEQ ID NO: 916038
uccugcauccgucugugau

SEQ ID NO: 1125645 - RNA, 19 nt, Artificial Sequence
  Description of Artificial Sequence: Synthetic oligonucleotide
  Antisense strand to SEQ ID NO: 1125644
aucacagacggaugcagga

SEQ ID NO: 1125646 - RNA, 19 nt, Artificial Sequence
  Description of Artificial Sequence: Synthetic oligonucleotide
  Sense strand starting at position 2873 of SEQ ID NO: 916038
aggcuuacauccucuggau

SEQ ID NO: 1125647 - RNA, 19 nt, Artificial Sequence
  Description of Artificial Sequence: Synthetic oligonucleotide
  Antisense strand to SEQ ID NO: 1125646
auccagaggauguaagccu

SEQ ID NO: 1125648 - RNA, 19 nt, Artificial Sequence
  Description of Artificial Sequence: Synthetic oligonucleotide
  Sense strand starting at position 2897 of SEQ ID NO: 916038
cgucuuaucccagaagaca

SEQ ID NO: 1125649 - RNA, 19 nt, Artificial Sequence
  Description of Artificial Sequence: Synthetic oligonucleotide
  Antisense strand to SEQ ID NO: 1125648
ugucuucugggauaagacg

SEQ ID NO: 1125650 - RNA, 19 nt, Artificial Sequence
  Description of Artificial Sequence: Synthetic oligonucleotide
  Sense strand starting at position 3100 of SEQ ID NO: 916038
uccugagucuuaguguaug

SEQ ID NO: 1125651 - RNA, 19 nt, Artificial Sequence
  Description of Artificial Sequence: Synthetic oligonucleotide
  Antisense strand to SEQ ID NO: 1125650
cauacacuaagacucagga

SEQ ID NO: 1125652 - RNA, 19 nt, Artificial Sequence
  Description of Artificial Sequence: Synthetic oligonucleotide
  Sense strand starting at position 3103 of SEQ ID NO: 916038
ugagucuuaguguaugugu

SEQ ID NO: 1125653 - RNA, 19 nt, Artificial Sequence
  Description of Artificial Sequence: Synthetic oligonucleotide
  Antisense strand to SEQ ID NO: 1125652
acacauacacuaagacuca

SEQ ID NO: 1125654 - RNA, 19 nt, Artificial Sequence
  Description of Artificial Sequence: Synthetic oligonucleotide
  Sense strand starting at position 3111 of SEQ ID NO: 916038
aguguauguguguacacaa

SEQ ID NO: 1125655 - RNA, 19 nt, Artificial Sequence
  Description of Artificial Sequence: Synthetic oligonucleotide
  Antisense strand to SEQ ID NO: 1125654
uuguguacacacauacacu

SEQ ID NO: 1125656 - RNA, 19 nt, Artificial Sequence
  Description of Artificial Sequence: Synthetic oligonucleotide
  Sense strand starting at position 3178 of SEQ ID NO: 916038
ugagaagcaucuuccagga

SEQ ID NO: 1125657 - RNA, 19 nt, Artificial Sequence
  Description of Artificial Sequence: Synthetic oligonucleotide
  Antisense strand to SEQ ID NO: 1125656
uccuggaagaugcuucuca

SEQ ID NO: 1125658 - RNA, 19 nt, Artificial Sequence
  Description of Artificial Sequence: Synthetic oligonucleotide
  Sense strand starting at position 3302 of SEQ ID NO: 916038
ucaucagguuccuuauugu

SEQ ID NO: 1125659 - RNA, 19 nt, Artificial Sequence
  Description of Artificial Sequence: Synthetic oligonucleotide
  Antisense strand to SEQ ID NO: 1125658
acaauaaggaaccugauga

SEQ ID NO: 1125660 - RNA, 19 nt, Artificial Sequence
  Description of Artificial Sequence: Synthetic oligonucleotide
  Sense strand starting at position 3504 of SEQ ID NO: 916038
agcagaaggaugugcucaa

SEQ ID NO: 1125661 - RNA, 19 nt, Artificial Sequence
  Description of Artificial Sequence: Synthetic oligonucleotide
  Antisense strand to SEQ ID NO: 1125660
uugagcacauccuucugcu

SEQ ID NO: 1125662 - RNA, 19 nt, Artificial Sequence
  Description of Artificial Sequence: Synthetic oligonucleotide
  Sense strand starting at position 3508 of SEQ ID NO: 916038
gaaggaugugcucaaggug

SEQ ID NO: 1125663 - RNA, 19 nt, Artificial Sequence
  Description of Artificial Sequence: Synthetic oligonucleotide
  Antisense strand to SEQ ID NO: 1125662
caccuugagcacauccuuc

SEQ ID NO: 1125664 - RNA, 19 nt, Artificial Sequence
  Description of Artificial Sequence: Synthetic oligonucleotide
  Sense strand starting at position 3563 of SEQ ID NO: 916038
gaagcagucgacuguggaa

SEQ ID NO: 1125665 - RNA, 19 nt, Artificial Sequence
  Description of Artificial Sequence: Synthetic oligonucleotide
  Antisense strand to SEQ ID NO: 1125664
uuccacagucgacugcuuc

SEQ ID NO: 1125666 - RNA, 19 nt, Artificial Sequence
  Description of Artificial Sequence: Synthetic oligonucleotide
  Sense strand starting at position 3679 of SEQ ID NO: 916038
gaucaagauugagagacua

SEQ ID NO: 1125667 - RNA, 19 nt, Artificial Sequence
  Description of Artificial Sequence: Synthetic oligonucleotide
  Antisense strand to SEQ ID NO: 1125666
uagucucucaaucuugauc

SEQ ID NO: 1125668 - RNA, 19 nt, Artificial Sequence
  Description of Artificial Sequence: Synthetic oligonucleotide
  Sense strand starting at position 3817 of SEQ ID NO: 916038
uguuaacuguuaucauggu

SEQ ID NO: 1125669 - RNA, 19 nt, Artificial Sequence
  Description of Artificial Sequence: Synthetic oligonucleotide
  Antisense strand to SEQ ID NO: 1125668
accaugauaacaguuaaca

SEQ ID NO: 1125670 - RNA, 19 nt, Artificial Sequence
  Description of Artificial Sequence: Synthetic oligonucleotide
  Sense strand starting at position 3823 of SEQ ID NO: 916038
cuguuaucaugguuaacaa

SEQ ID NO: 1125671 - RNA, 19 nt, Artificial Sequence
  Description of Artificial Sequence: Synthetic oligonucleotide
  Antisense strand to SEQ ID NO: 1125670
uuguuaaccaugauaacag

SEQ ID NO: 1125672 - RNA, 19 nt, Artificial Sequence
  Description of Artificial Sequence: Synthetic oligonucleotide
  Sense strand starting at position 3824 of SEQ ID NO: 916038
uguuaucaugguuaacaaa

SEQ ID NO: 1125673 - RNA, 19 nt, Artificial Sequence
  Description of Artificial Sequence: Synthetic oligonucleotide
  Antisense strand to SEQ ID NO: 1125672
uuuguuaaccaugauaaca

SEQ ID NO: 1125674 - RNA, 19 nt, Artificial Sequence
  Description of Artificial Sequence: Synthetic oligonucleotide
  Sense strand starting at position 3865 of SEQ ID NO: 916038
uagagaaguuacucuaguu

SEQ ID NO: 1125675 - RNA, 19 nt, Artificial Sequence
  Description of Artificial Sequence: Synthetic oligonucleotide
  Antisense strand to SEQ ID NO: 1125674
aacuagaguaacuucucua

SEQ ID NO: 1125676 - RNA, 19 nt, Artificial Sequence
  Description of Artificial Sequence: Synthetic oligonucleotide
  Sense strand starting at position 3918 of SEQ ID NO: 916038
caaugcauuuguuacagga

SEQ ID NO: 1125677 - RNA, 19 nt, Artificial Sequence
  Description of Artificial Sequence: Synthetic oligonucleotide
  Antisense strand to SEQ ID NO: 1125676
uccuguaacaaaugcauug

SEQ ID NO: 1125678 - RNA, 19 nt, Artificial Sequence
  Description of Artificial Sequence: Synthetic oligonucleotide
  Sense strand starting at position 3 of SEQ ID NO: 916039
cccaacucaccgugaucau

SEQ ID NO: 1125679 - RNA, 19 nt, Artificial Sequence
  Description of Artificial Sequence: Synthetic oligonucleotide
  Antisense strand to SEQ ID NO: 1125678
augaucacggugaguuggg

SEQ ID NO: 1125680 - RNA, 19 nt, Artificial Sequence
  Description of Artificial Sequence: Synthetic oligonucleotide
  Sense strand starting at position 4 of SEQ ID NO: 916039
ccaacucaccgugaucaua

SEQ ID NO: 1125681 - RNA, 19 nt, Artificial Sequence
  Description of Artificial Sequence: Synthetic oligonucleotide
  Antisense strand to SEQ ID NO: 1125680
uaugaucacggugaguugg

SEQ ID NO: 1125682 - RNA, 19 nt, Artificial Sequence
  Description of Artificial Sequence: Synthetic oligonucleotide
  Sense strand starting at position 132 of SEQ ID NO: 916039
ccuggauuauggucugacu

SEQ ID NO: 1125683 - RNA, 19 nt, Artificial Sequence
  Description of Artificial Sequence: Synthetic oligonucleotide
  Antisense strand to SEQ ID NO: 1125682
agucagaccauaauccagg

SEQ ID NO: 1125684 - RNA, 19 nt, Artificial Sequence
  Description of Artificial Sequence: Synthetic oligonucleotide
  Sense strand starting at position 134 of SEQ ID NO: 916039
uggauuauggucugacuca

SEQ ID NO: 1125685 - RNA, 19 nt, Artificial Sequence
  Description of Artificial Sequence: Synthetic oligonucleotide
  Antisense strand to SEQ ID NO: 1125684
ugagucagaccauaaucca

SEQ ID NO: 1125686 - RNA, 19 nt, Artificial Sequence
  Description of Artificial Sequence: Synthetic oligonucleotide
  Sense strand starting at position 315 of SEQ ID NO: 916039
cucacaccucuagggaauu

SEQ ID NO: 1125687 - RNA, 19 nt, Artificial Sequence
  Description of Artificial Sequence: Synthetic oligonucleotide
  Antisense strand to SEQ ID NO: 1125686
aauucccuagaggugugag

SEQ ID NO: 1125688 - RNA, 19 nt, Artificial Sequence
  Description of Artificial Sequence: Synthetic oligonucleotide
  Sense strand starting at position 316 of SEQ ID NO: 916039
ucacaccucuagggaauuu

SEQ ID NO: 1125689 - RNA, 19 nt, Artificial Sequence
  Description of Artificial Sequence: Synthetic oligonucleotide
  Antisense strand to SEQ ID NO: 1125688
aaauucccuagagguguga

SEQ ID NO: 1125690 - RNA, 19 nt, Artificial Sequence
  Description of Artificial Sequence: Synthetic oligonucleotide
  Sense strand starting at position 401 of SEQ ID NO: 916039
cucuuuaaucagggacaug

SEQ ID NO: 1125691 - RNA, 19 nt, Artificial Sequence
  Description of Artificial Sequence: Synthetic oligonucleotide
  Antisense strand to SEQ ID NO: 1125690
caugucccugauuaaagag

SEQ ID NO: 1125692 - RNA, 19 nt, Artificial Sequence
  Description of Artificial Sequence: Synthetic oligonucleotide
  Sense strand starting at position 584 of SEQ ID NO: 916039
agguuccucuggccaguua

SEQ ID NO: 1125693 - RNA, 19 nt, Artificial Sequence
  Description of Artificial Sequence: Synthetic oligonucleotide
  Antisense strand to SEQ ID NO: 1125692
uaacuggccagaggaaccu

SEQ ID NO: 1125694 - RNA, 19 nt, Artificial Sequence
  Description of Artificial Sequence: Synthetic oligonucleotide
  Sense strand starting at position 636 of SEQ ID NO: 916039
agugaugugucccucccua

SEQ ID NO: 1125695 - RNA, 19 nt, Artificial Sequence
  Description of Artificial Sequence: Synthetic oligonucleotide
  Antisense strand to SEQ ID NO: 1125694
uagggagggacacaucacu

SEQ ID NO: 1125696 - RNA, 19 nt, Artificial Sequence
  Description of Artificial Sequence: Synthetic oligonucleotide
  Sense strand starting at position 877 of SEQ ID NO: 916039
gugguugggucaccagaca

SEQ ID NO: 1125697 - RNA, 19 nt, Artificial Sequence
  Description of Artificial Sequence: Synthetic oligonucleotide
  Antisense strand to SEQ ID NO: 1125696
ugucuggugacccaaccac

SEQ ID NO: 1125698 - RNA, 19 nt, Artificial Sequence
  Description of Artificial Sequence: Synthetic oligonucleotide
  Sense strand starting at position 942 of SEQ ID NO: 916039
uggccauucucgguggaaa

SEQ ID NO: 1125699 - RNA, 19 nt, Artificial Sequence
  Description of Artificial Sequence: Synthetic oligonucleotide
  Antisense strand to SEQ ID NO: 1125698
uuuccaccgagaauggcca

SEQ ID NO: 1125700 - RNA, 19 nt, Artificial Sequence
  Description of Artificial Sequence: Synthetic oligonucleotide
  Sense strand starting at position 943 of SEQ ID NO: 916039
ggccauucucgguggaaac

SEQ ID NO: 1125701 - RNA, 19 nt, Artificial Sequence
  Description of Artificial Sequence: Synthetic oligonucleotide
  Antisense strand to SEQ ID NO: 1125700
guuuccaccgagaauggcc

SEQ ID NO: 1125702 - RNA, 19 nt, Artificial Sequence
  Description of Artificial Sequence: Synthetic oligonucleotide
  Sense strand starting at position 944 of SEQ ID NO: 916039
gccauucucgguggaaaca

SEQ ID NO: 1125703 - RNA, 19 nt, Artificial Sequence
  Description of Artificial Sequence: Synthetic oligonucleotide
  Antisense strand to SEQ ID NO: 1125702
uguuuccaccgagaauggc

SEQ ID NO: 1125704 - RNA, 19 nt, Artificial Sequence
  Description of Artificial Sequence: Synthetic oligonucleotide
  Sense strand starting at position 945 of SEQ ID NO: 916039
ccauucucgguggaaacaa

SEQ ID NO: 1125705 - RNA, 19 nt, Artificial Sequence
  Description of Artificial Sequence: Synthetic oligonucleotide
  Antisense strand to SEQ ID NO: 1125704
uuguuuccaccgagaaugg

SEQ ID NO: 1125706 - RNA, 19 nt, Artificial Sequence
  Description of Artificial Sequence: Synthetic oligonucleotide
  Sense strand starting at position 964 of SEQ ID NO: 916039
gccucagguguccaggaaa

SEQ ID NO: 1125707 - RNA, 19 nt, Artificial Sequence
  Description of Artificial Sequence: Synthetic oligonucleotide
  Antisense strand to SEQ ID NO: 1125706
uuuccuggacaccugaggc

SEQ ID NO: 1125708 - RNA, 19 nt, Artificial Sequence
  Description of Artificial Sequence: Synthetic oligonucleotide
  Sense strand starting at position 1369 of SEQ ID NO: 916039
ccucuuuacccgcaggaga

SEQ ID NO: 1125709 - RNA, 19 nt, Artificial Sequence
  Description of Artificial Sequence: Synthetic oligonucleotide
  Antisense strand to SEQ ID NO: 1125708
ucuccugcggguaaagagg

SEQ ID NO: 1125710 - RNA, 19 nt, Artificial Sequence
  Description of Artificial Sequence: Synthetic oligonucleotide
  Sense strand starting at position 1673 of SEQ ID NO: 916039
ggaacuucgaagcaaaguu

SEQ ID NO: 1125711 - RNA, 19 nt, Artificial Sequence
  Description of Artificial Sequence: Synthetic oligonucleotide
  Antisense strand to SEQ ID NO: 1125710
aacuuugcuucgaaguucc

SEQ ID NO: 1125712 - RNA, 19 nt, Artificial Sequence
  Description of Artificial Sequence: Synthetic oligonucleotide
  Sense strand starting at position 2266 of SEQ ID NO: 916039
gugacaauguggucuguga

SEQ ID NO: 1125713 - RNA, 19 nt, Artificial Sequence
  Description of Artificial Sequence: Synthetic oligonucleotide
  Antisense strand to SEQ ID NO: 1125712
ucacagaccacauugucac

SEQ ID NO: 1125714 - RNA, 19 nt, Artificial Sequence
  Description of Artificial Sequence: Synthetic oligonucleotide
  Sense strand starting at position 2270 of SEQ ID NO: 916039
caauguggucugugagguu

SEQ ID NO: 1125715 - RNA, 19 nt, Artificial Sequence
  Description of Artificial Sequence: Synthetic oligonucleotide
  Antisense strand to SEQ ID NO: 1125714
aaccucacagaccacauug

SEQ ID NO: 1125716 - RNA, 19 nt, Artificial Sequence
  Description of Artificial Sequence: Synthetic oligonucleotide
  Sense strand starting at position 2444 of SEQ ID NO: 916039
ggugucucccaacauucua

SEQ ID NO: 1125717 - RNA, 19 nt, Artificial Sequence
  Description of Artificial Sequence: Synthetic oligonucleotide
  Antisense strand to SEQ ID NO: 1125716
uagaauguugggagacacc

SEQ ID NO: 1125718 - RNA, 19 nt, Artificial Sequence
  Description of Artificial Sequence: Synthetic oligonucleotide
  Sense strand starting at position 2521 of SEQ ID NO: 916039
cagggauccuagucugaga

SEQ ID NO: 1125719 - RNA, 19 nt, Artificial Sequence
  Description of Artificial Sequence: Synthetic oligonucleotide
  Antisense strand to SEQ ID NO: 1125718
ucucagacuaggaucccug

SEQ ID NO: 1125720 - RNA, 19 nt, Artificial Sequence
  Description of Artificial Sequence: Synthetic oligonucleotide
  Sense strand starting at position 2619 of SEQ ID NO: 916039
gaggauugacaaggucugu

SEQ ID NO: 1125721 - RNA, 19 nt, Artificial Sequence
  Description of Artificial Sequence: Synthetic oligonucleotide
  Antisense strand to SEQ ID NO: 1125720
acagaccuugucaauccuc

SEQ ID NO: 1125722 - RNA, 19 nt, Artificial Sequence
  Description of Artificial Sequence: Synthetic oligonucleotide
  Sense strand starting at position 2659 of SEQ ID NO: 916039
uccugcauccgucugugau

SEQ ID NO: 1125723 - RNA, 19 nt, Artificial Sequence
  Description of Artificial Sequence: Synthetic oligonucleotide
  Antisense strand to SEQ ID NO: 1125722
aucacagacggaugcagga

SEQ ID NO: 1125724 - RNA, 19 nt, Artificial Sequence
  Description of Artificial Sequence: Synthetic oligonucleotide
  Sense strand starting at position 2712 of SEQ ID NO: 916039
aggcuuacauccucuggau

SEQ ID NO: 1125725 - RNA, 19 nt, Artificial Sequence
  Description of Artificial Sequence: Synthetic oligonucleotide
  Antisense strand to SEQ ID NO: 1125724
auccagaggauguaagccu

SEQ ID NO: 1125726 - RNA, 19 nt, Artificial Sequence
  Description of Artificial Sequence: Synthetic oligonucleotide
  Sense strand starting at position 2736 of SEQ ID NO: 916039
cgucuuaucccagaagaca

SEQ ID NO: 1125727 - RNA, 19 nt, Artificial Sequence
  Description of Artificial Sequence: Synthetic oligonucleotide
  Antisense strand to SEQ ID NO: 1125726
ugucuucugggauaagacg

SEQ ID NO: 1125728 - RNA, 19 nt, Artificial Sequence
  Description of Artificial Sequence: Synthetic oligonucleotide
  Sense strand starting at position 2939 of SEQ ID NO: 916039
uccugagucuuaguguaug

SEQ ID NO: 1125729 - RNA, 19 nt, Artificial Sequence
  Description of Artificial Sequence: Synthetic oligonucleotide
  Antisense strand to SEQ ID NO: 1125728
cauacacuaagacucagga

SEQ ID NO: 1125730 - RNA, 19 nt, Artificial Sequence
  Description of Artificial Sequence: Synthetic oligonucleotide
  Sense strand starting at position 2942 of SEQ ID NO: 916039
ugagucuuaguguaugugu

SEQ ID NO: 1125731 - RNA, 19 nt, Artificial Sequence
  Description of Artificial Sequence: Synthetic oligonucleotide
  Antisense strand to SEQ ID NO: 1125730
acacauacacuaagacuca

SEQ ID NO: 1125732 - RNA, 19 nt, Artificial Sequence
  Description of Artificial Sequence: Synthetic oligonucleotide
  Sense strand starting at position 2950 of SEQ ID NO: 916039
aguguauguguguacacaa

SEQ ID NO: 1125733 - RNA, 19 nt, Artificial Sequence
  Description of Artificial Sequence: Synthetic oligonucleotide
  Antisense strand to SEQ ID NO: 1125732
uuguguacacacauacacu

SEQ ID NO: 1125734 - RNA, 19 nt, Artificial Sequence
  Description of Artificial Sequence: Synthetic oligonucleotide
  Sense strand starting at position 3017 of SEQ ID NO: 916039
ugagaagcaucuuccagga

SEQ ID NO: 1125735 - RNA, 19 nt, Artificial Sequence
  Description of Artificial Sequence: Synthetic oligonucleotide
  Antisense strand to SEQ ID NO: 1125734
uccuggaagaugcuucuca

SEQ ID NO: 1125736 - RNA, 19 nt, Artificial Sequence
  Description of Artificial Sequence: Synthetic oligonucleotide
  Sense strand starting at position 3141 of SEQ ID NO: 916039
ucaucagguuccuuauugu

SEQ ID NO: 1125737 - RNA, 19 nt, Artificial Sequence
  Description of Artificial Sequence: Synthetic oligonucleotide
  Antisense strand to SEQ ID NO: 1125736
acaauaaggaaccugauga

SEQ ID NO: 1125738 - RNA, 19 nt, Artificial Sequence
  Description of Artificial Sequence: Synthetic oligonucleotide
  Sense strand starting at position 3343 of SEQ ID NO: 916039
agcagaaggaugugcucaa

SEQ ID NO: 1125739 - RNA, 19 nt, Artificial Sequence
  Description of Artificial Sequence: Synthetic oligonucleotide
  Antisense strand to SEQ ID NO: 1125738
uugagcacauccuucugcu

SEQ ID NO: 1125740 - RNA, 19 nt, Artificial Sequence
  Description of Artificial Sequence: Synthetic oligonucleotide
  Sense strand starting at position 3347 of SEQ ID NO: 916039
gaaggaugugcucaaggug

SEQ ID NO: 1125741 - RNA, 19 nt, Artificial Sequence
  Description of Artificial Sequence: Synthetic oligonucleotide
  Antisense strand to SEQ ID NO: 1125740
caccuugagcacauccuuc

SEQ ID NO: 1125742 - RNA, 19 nt, Artificial Sequence
  Description of Artificial Sequence: Synthetic oligonucleotide
  Sense strand starting at position 3402 of SEQ ID NO: 916039
gaagcagucgacuguggaa

SEQ ID NO: 1125743 - RNA, 19 nt, Artificial Sequence
  Description of Artificial Sequence: Synthetic oligonucleotide
  Antisense strand to SEQ ID NO: 1125742
uuccacagucgacugcuuc

SEQ ID NO: 1125744 - RNA, 19 nt, Artificial Sequence
  Description of Artificial Sequence: Synthetic oligonucleotide
  Sense strand starting at position 3518 of SEQ ID NO: 916039
gaucaagauugagagacua

SEQ ID NO: 1125745 - RNA, 19 nt, Artificial Sequence
  Description of Artificial Sequence: Synthetic oligonucleotide
  Antisense strand to SEQ ID NO: 1125744
uagucucucaaucuugauc

SEQ ID NO: 1125746 - RNA, 19 nt, Artificial Sequence
  Description of Artificial Sequence: Synthetic oligonucleotide
  Sense strand starting at position 3656 of SEQ ID NO: 916039
uguuaacuguuaucauggu

SEQ ID NO: 1125747 - RNA, 19 nt, Artificial Sequence
  Description of Artificial Sequence: Synthetic oligonucleotide
  Antisense strand to SEQ ID NO: 1125746
accaugauaacaguuaaca

SEQ ID NO: 1125748 - RNA, 19 nt, Artificial Sequence
  Description of Artificial Sequence: Synthetic oligonucleotide
  Sense strand starting at position 3662 of SEQ ID NO: 916039
cuguuaucaugguuaacaa

SEQ ID NO: 1125749 - RNA, 19 nt, Artificial Sequence
  Description of Artificial Sequence: Synthetic oligonucleotide
  Antisense strand to SEQ ID NO: 1125748
uuguuaaccaugauaacag

SEQ ID NO: 1125750 - RNA, 19 nt, Artificial Sequence
  Description of Artificial Sequence: Synthetic oligonucleotide
  Sense strand starting at position 3663 of SEQ ID NO: 916039
uguuaucaugguuaacaaa

SEQ ID NO: 1125751 - RNA, 19 nt, Artificial Sequence
  Description of Artificial Sequence: Synthetic oligonucleotide
  Antisense strand to SEQ ID NO: 1125750
uuuguuaaccaugauaaca

SEQ ID NO: 1125752 - RNA, 19 nt, Artificial Sequence
  Description of Artificial Sequence: Synthetic oligonucleotide
  Sense strand starting at position 3704 of SEQ ID NO: 916039
uagagaaguuacucuaguu

SEQ ID NO: 1125753 - RNA, 19 nt, Artificial Sequence
  Description of Artificial Sequence: Synthetic oligonucleotide
  Antisense strand to SEQ ID NO: 1125752
aacuagaguaacuucucua

SEQ ID NO: 1125754 - RNA, 19 nt, Artificial Sequence
  Description of Artificial Sequence: Synthetic oligonucleotide
  Sense strand starting at position 3757 of SEQ ID NO: 916039
caaugcauuuguuacagga

SEQ ID NO: 1125755 - RNA, 19 nt, Artificial Sequence
  Description of Artificial Sequence: Synthetic oligonucleotide
  Antisense strand to SEQ ID NO: 1125754
uccuguaacaaaugcauug

SEQ ID NO: 1125756 - RNA, 19 nt, Artificial Sequence
  Description of Artificial Sequence: Synthetic oligonucleotide
  Sense strand starting at position 3835 of SEQ ID NO: 916039
gggcgagucgcagugcaaa

SEQ ID NO: 1125757 - RNA, 19 nt, Artificial Sequence
  Description of Artificial Sequence: Synthetic oligonucleotide
  Antisense strand to SEQ ID NO: 1125756
uuugcacugcgacucgccc

SEQ ID NO: 1125758 - RNA, 19 nt, Artificial Sequence
  Description of Artificial Sequence: Synthetic oligonucleotide
  Sense strand starting at position 299 of SEQ ID NO: 916040
auuacaauugagggcuauu

SEQ ID NO: 1125759 - RNA, 19 nt, Artificial Sequence
  Description of Artificial Sequence: Synthetic oligonucleotide
  Antisense strand to SEQ ID NO: 1125758
aauagcccucaauuguaau

SEQ ID NO: 1125760 - RNA, 19 nt, Artificial Sequence
  Description of Artificial Sequence: Synthetic oligonucleotide
  Sense strand starting at position 302 of SEQ ID NO: 916040
acaauugagggcuauuguu

SEQ ID NO: 1125761 - RNA, 19 nt, Artificial Sequence
  Description of Artificial Sequence: Synthetic oligonucleotide
  Antisense strand to SEQ ID NO: 1125760
aacaauagcccucaauugu

SEQ ID NO: 1125762 - RNA, 19 nt, Artificial Sequence
  Description of Artificial Sequence: Synthetic oligonucleotide
  Sense strand starting at position 333 of SEQ ID NO: 916040
acuuaucuccuaggugaca

SEQ ID NO: 1125763 - RNA, 19 nt, Artificial Sequence
  Description of Artificial Sequence: Synthetic oligonucleotide
  Antisense strand to SEQ ID NO: 1125762
ugucaccuaggagauaagu

SEQ ID NO: 1125764 - RNA, 19 nt, Artificial Sequence
  Description of Artificial Sequence: Synthetic oligonucleotide
  Sense strand starting at position 334 of SEQ ID NO: 916040
cuuaucuccuaggugacaa

SEQ ID NO: 1125765 - RNA, 19 nt, Artificial Sequence
  Description of Artificial Sequence: Synthetic oligonucleotide
  Antisense strand to SEQ ID NO: 1125764
uugucaccuaggagauaag

SEQ ID NO: 1125766 - RNA, 19 nt, Artificial Sequence
  Description of Artificial Sequence: Synthetic oligonucleotide
  Sense strand starting at position 388 of SEQ ID NO: 916040
ucagguccugcacauuaau

SEQ ID NO: 1125767 - RNA, 19 nt, Artificial Sequence
  Description of Artificial Sequence: Synthetic oligonucleotide
  Antisense strand to SEQ ID NO: 1125766
auuaaugugcaggaccuga

SEQ ID NO: 1125768 - RNA, 19 nt, Artificial Sequence
  Description of Artificial Sequence: Synthetic oligonucleotide
  Sense strand starting at position 564 of SEQ ID NO: 916040
gcucucuauuuauugagua

SEQ ID NO: 1125769 - RNA, 19 nt, Artificial Sequence
  Description of Artificial Sequence: Synthetic oligonucleotide
  Antisense strand to SEQ ID NO: 1125768
uacucaauaaauagagagc

SEQ ID NO: 1125770 - RNA, 19 nt, Artificial Sequence
  Description of Artificial Sequence: Synthetic oligonucleotide
  Sense strand starting at position 719 of SEQ ID NO: 916040
auggauuuaugagaaguaa

SEQ ID NO: 1125771 - RNA, 19 nt, Artificial Sequence
  Description of Artificial Sequence: Synthetic oligonucleotide
  Antisense strand to SEQ ID NO: 1125770
uuacuucucauaaauccau

SEQ ID NO: 1125772 - RNA, 19 nt, Artificial Sequence
  Description of Artificial Sequence: Synthetic oligonucleotide
  Sense strand starting at position 727 of SEQ ID NO: 916040
augagaaguaacugauguu

SEQ ID NO: 1125773 - RNA, 19 nt, Artificial Sequence
  Description of Artificial Sequence: Synthetic oligonucleotide
  Antisense strand to SEQ ID NO: 1125772
aacaucaguuacuucucau

SEQ ID NO: 1125774 - RNA, 19 nt, Artificial Sequence
  Description of Artificial Sequence: Synthetic oligonucleotide
  Sense strand starting at position 856 of SEQ ID NO: 916040
ugcugacaaguagacuaau

SEQ ID NO: 1125775 - RNA, 19 nt, Artificial Sequence
  Description of Artificial Sequence: Synthetic oligonucleotide
  Antisense strand to SEQ ID NO: 1125774
auuagucuacuugucagca

SEQ ID NO: 1125776 - RNA, 19 nt, Artificial Sequence
  Description of Artificial Sequence: Synthetic oligonucleotide
  Sense strand starting at position 1000 of SEQ ID NO: 916040
auaagcuagauauguggau

SEQ ID NO: 1125777 - RNA, 19 nt, Artificial Sequence
  Description of Artificial Sequence: Synthetic oligonucleotide
  Antisense strand to SEQ ID NO: 1125776
auccacauaucuagcuuau

SEQ ID NO: 1125778 - RNA, 19 nt, Artificial Sequence
  Description of Artificial Sequence: Synthetic oligonucleotide
  Sense strand starting at position 1001 of SEQ ID NO: 916040
uaagcuagauauguggaua

SEQ ID NO: 1125779 - RNA, 19 nt, Artificial Sequence
  Description of Artificial Sequence: Synthetic oligonucleotide
  Antisense strand to SEQ ID NO: 1125778
uauccacauaucuagcuua

SEQ ID NO: 1125780 - RNA, 19 nt, Artificial Sequence
  Description of Artificial Sequence: Synthetic oligonucleotide
  Sense strand starting at position 1109 of SEQ ID NO: 916040
agucuuugaagccagagau

SEQ ID NO: 1125781 - RNA, 19 nt, Artificial Sequence
  Description of Artificial Sequence: Synthetic oligonucleotide
  Antisense strand to SEQ ID NO: 1125780
aucucuggcuucaaagacu

SEQ ID NO: 1125782 - RNA, 19 nt, Artificial Sequence
  Description of Artificial Sequence: Synthetic oligonucleotide
  Sense strand starting at position 1654 of SEQ ID NO: 916040
agaagaaccugucuucucu

SEQ ID NO: 1125783 - RNA, 19 nt, Artificial Sequence
  Description of Artificial Sequence: Synthetic oligonucleotide
  Antisense strand to SEQ ID NO: 1125782
agagaagacagguucuucu

SEQ ID NO: 1125784 - RNA, 19 nt, Artificial Sequence
  Description of Artificial Sequence: Synthetic oligonucleotide
  Sense strand starting at position 1780 of SEQ ID NO: 916040
guauaucuuguauaacuac

SEQ ID NO: 1125785 - RNA, 19 nt, Artificial Sequence
  Description of Artificial Sequence: Synthetic oligonucleotide
  Antisense strand to SEQ ID NO: 1125784
guaguuauacaagauauac

SEQ ID NO: 1125786 - RNA, 19 nt, Artificial Sequence
  Description of Artificial Sequence: Synthetic oligonucleotide
  Sense strand starting at position 1825 of SEQ ID NO: 916040
gagaguaaauaggcaauca

SEQ ID NO: 1125787 - RNA, 19 nt, Artificial Sequence
  Description of Artificial Sequence: Synthetic oligonucleotide
  Antisense strand to SEQ ID NO: 1125786
ugauugccuauuuacucuc

SEQ ID NO: 1125788 - RNA, 19 nt, Artificial Sequence
  Description of Artificial Sequence: Synthetic oligonucleotide
  Sense strand starting at position 2023 of SEQ ID NO: 916040
aguuuauacucccugauga

SEQ ID NO: 1125789 - RNA, 19 nt, Artificial Sequence
  Description of Artificial Sequence: Synthetic oligonucleotide
  Antisense strand to SEQ ID NO: 1125788
ucaucagggaguauaaacu

SEQ ID NO: 1125790 - RNA, 19 nt, Artificial Sequence
  Description of Artificial Sequence: Synthetic oligonucleotide
  Sense strand starting at position 2130 of SEQ ID NO: 916040
uguguuguuguggugaagu

SEQ ID NO: 1125791 - RNA, 19 nt, Artificial Sequence
  Description of Artificial Sequence: Synthetic oligonucleotide
  Antisense strand to SEQ ID NO: 1125790
acuucaccacaacaacaca

SEQ ID NO: 1125792 - RNA, 19 nt, Artificial Sequence
  Description of Artificial Sequence: Synthetic oligonucleotide
  Sense strand starting at position 2274 of SEQ ID NO: 916040
gagacagcauaaucuaagu

SEQ ID NO: 1125793 - RNA, 19 nt, Artificial Sequence
  Description of Artificial Sequence: Synthetic oligonucleotide
  Antisense strand to SEQ ID NO: 1125792
acuuagauuaugcugucuc

SEQ ID NO: 1125794 - RNA, 19 nt, Artificial Sequence
  Description of Artificial Sequence: Synthetic oligonucleotide
  Sense strand starting at position 2279 of SEQ ID NO: 916040
agcauaaucuaaguaaaga

SEQ ID NO: 1125795 - RNA, 19 nt, Artificial Sequence
  Description of Artificial Sequence: Synthetic oligonucleotide
  Antisense strand to SEQ ID NO: 1125794
ucuuuacuuagauuaugcu

SEQ ID NO: 1125796 - RNA, 19 nt, Artificial Sequence
  Description of Artificial Sequence: Synthetic oligonucleotide
  Sense strand starting at position 2316 of SEQ ID NO: 916040
cugucuuugagaugaagau

SEQ ID NO: 1125797 - RNA, 19 nt, Artificial Sequence
  Description of Artificial Sequence: Synthetic oligonucleotide
  Antisense strand to SEQ ID NO: 1125796
aucuucaucucaaagacag

SEQ ID NO: 1125798 - RNA, 19 nt, Artificial Sequence
  Description of Artificial Sequence: Synthetic oligonucleotide
  Sense strand starting at position 2340 of SEQ ID NO: 916040
ggagaaggagaguguagua

SEQ ID NO: 1125799 - RNA, 19 nt, Artificial Sequence
  Description of Artificial Sequence: Synthetic oligonucleotide
  Antisense strand to SEQ ID NO: 1125798
uacuacacucuccuucucc

SEQ ID NO: 1125800 - RNA, 19 nt, Artificial Sequence
  Description of Artificial Sequence: Synthetic oligonucleotide
  Sense strand starting at position 2373 of SEQ ID NO: 916040
cguuuaucgauuuaugcau

SEQ ID NO: 1125801 - RNA, 19 nt, Artificial Sequence
  Description of Artificial Sequence: Synthetic oligonucleotide
  Antisense strand to SEQ ID NO: 1125800
augcauaaaucgauaaacg

SEQ ID NO: 1125802 - RNA, 19 nt, Artificial Sequence
  Description of Artificial Sequence: Synthetic oligonucleotide
  Sense strand starting at position 2453 of SEQ ID NO: 916040
uuuauugcugaacaugaau

SEQ ID NO: 1125803 - RNA, 19 nt, Artificial Sequence
  Description of Artificial Sequence: Synthetic oligonucleotide
  Antisense strand to SEQ ID NO: 1125802
auucauguucagcaauaaa

SEQ ID NO: 1125804 - RNA, 19 nt, Artificial Sequence
  Description of Artificial Sequence: Synthetic oligonucleotide
  Sense strand starting at position 2476 of SEQ ID NO: 916040
agaucucuaugcucaugga

SEQ ID NO: 1125805 - RNA, 19 nt, Artificial Sequence
  Description of Artificial Sequence: Synthetic oligonucleotide
  Antisense strand to SEQ ID NO: 1125804
uccaugagcauagagaucu

SEQ ID NO: 1125806 - RNA, 19 nt, Artificial Sequence
  Description of Artificial Sequence: Synthetic oligonucleotide
  Sense strand starting at position 2477 of SEQ ID NO: 916040
gaucucuaugcucauggau

SEQ ID NO: 1125807 - RNA, 19 nt, Artificial Sequence
  Description of Artificial Sequence: Synthetic oligonucleotide
  Antisense strand to SEQ ID NO: 1125806
auccaugagcauagagauc

SEQ ID NO: 1125808 - RNA, 19 nt, Artificial Sequence
  Description of Artificial Sequence: Synthetic oligonucleotide
  Sense strand starting at position 2521 of SEQ ID NO: 916040
uuuagaaagcuacgaauug

SEQ ID NO: 1125809 - RNA, 19 nt, Artificial Sequence
  Description of Artificial Sequence: Synthetic oligonucleotide
  Antisense strand to SEQ ID NO: 1125808
caauucguagcuuucuaaa

SEQ ID NO: 1125810 - RNA, 19 nt, Artificial Sequence
  Description of Artificial Sequence: Synthetic oligonucleotide
  Sense strand starting at position 2579 of SEQ ID NO: 916040
agauguaucacguaguaag

SEQ ID NO: 1125811 - RNA, 19 nt, Artificial Sequence
  Description of Artificial Sequence: Synthetic oligonucleotide
  Antisense strand to SEQ ID NO: 1125810
cuuacuacgugauacaucu

SEQ ID NO: 1125812 - RNA, 19 nt, Artificial Sequence
  Description of Artificial Sequence: Synthetic oligonucleotide
  Sense strand starting at position 2589 of SEQ ID NO: 916040
cguaguaagaaguaagaau

SEQ ID NO: 1125813 - RNA, 19 nt, Artificial Sequence
  Description of Artificial Sequence: Synthetic oligonucleotide
  Antisense strand to SEQ ID NO: 1125812
auucuuacuucuuacuacg

SEQ ID NO: 1125814 - RNA, 19 nt, Artificial Sequence
  Description of Artificial Sequence: Synthetic oligonucleotide
  Sense strand starting at position 2881 of SEQ ID NO: 916040
cagucaacgcaagaugaau

SEQ ID NO: 1125815 - RNA, 19 nt, Artificial Sequence
  Description of Artificial Sequence: Synthetic oligonucleotide
  Antisense strand to SEQ ID NO: 1125814
auucaucuugcguugacug

SEQ ID NO: 1125816 - RNA, 19 nt, Artificial Sequence
  Description of Artificial Sequence: Synthetic oligonucleotide
  Sense strand starting at position 3249 of SEQ ID NO: 916040
uugaaaggcuuccuaucaa

SEQ ID NO: 1125817 - RNA, 19 nt, Artificial Sequence
  Description of Artificial Sequence: Synthetic oligonucleotide
  Antisense strand to SEQ ID NO: 1125816
uugauaggaagccuuucaa

SEQ ID NO: 1125818 - RNA, 19 nt, Artificial Sequence
  Description of Artificial Sequence: Synthetic oligonucleotide
  Sense strand starting at position 3608 of SEQ ID NO: 916040
aucuguuucccuuacuaga

SEQ ID NO: 1125819 - RNA, 19 nt, Artificial Sequence
  Description of Artificial Sequence: Synthetic oligonucleotide
  Antisense strand to SEQ ID NO: 1125818
ucuaguaagggaaacagau

SEQ ID NO: 1125820 - RNA, 19 nt, Artificial Sequence
  Description of Artificial Sequence: Synthetic oligonucleotide
  Sense strand starting at position 3722 of SEQ ID NO: 916040
uacugaaugcgugaaugaa

SEQ ID NO: 1125821 - RNA, 19 nt, Artificial Sequence
  Description of Artificial Sequence: Synthetic oligonucleotide
  Antisense strand to SEQ ID NO: 1125820
uucauucacgcauucagua

SEQ ID NO: 1125822 - RNA, 19 nt, Artificial Sequence
  Description of Artificial Sequence: Synthetic oligonucleotide
  Sense strand starting at position 3802 of SEQ ID NO: 916040
uaggauuguuugguugaga

SEQ ID NO: 1125823 - RNA, 19 nt, Artificial Sequence
  Description of Artificial Sequence: Synthetic oligonucleotide
  Antisense strand to SEQ ID NO: 1125822
ucucaaccaaacaauccua

SEQ ID NO: 1125824 - RNA, 19 nt, Artificial Sequence
  Description of Artificial Sequence: Synthetic oligonucleotide
  Sense strand starting at position 3803 of SEQ ID NO: 916040
aggauuguuugguugagaa

SEQ ID NO: 1125825 - RNA, 19 nt, Artificial Sequence
  Description of Artificial Sequence: Synthetic oligonucleotide
  Antisense strand to SEQ ID NO: 1125824
uucucaaccaaacaauccu

SEQ ID NO: 1125826 - RNA, 19 nt, Artificial Sequence
  Description of Artificial Sequence: Synthetic oligonucleotide
  Sense strand starting at position 3805 of SEQ ID NO: 916040
gauuguuugguugagaagu

SEQ ID NO: 1125827 - RNA, 19 nt, Artificial Sequence
  Description of Artificial Sequence: Synthetic oligonucleotide
  Antisense strand to SEQ ID NO: 1125826
acuucucaaccaaacaauc

SEQ ID NO: 1125828 - RNA, 19 nt, Artificial Sequence
  Description of Artificial Sequence: Synthetic oligonucleotide
  Sense strand starting at position 3845 of SEQ ID NO: 916040
ugcaaagaaccagguaaua

SEQ ID NO: 1125829 - RNA, 19 nt, Artificial Sequence
  Description of Artificial Sequence: Synthetic oligonucleotide
  Antisense strand to SEQ ID NO: 1125828
uauuaccugguucuuugca

SEQ ID NO: 1125830 - RNA, 19 nt, Artificial Sequence
  Description of Artificial Sequence: Synthetic oligonucleotide
  Sense strand starting at position 3888 of SEQ ID NO: 916040
uauauaggucaucaggcau

SEQ ID NO: 1125831 - RNA, 19 nt, Artificial Sequence
  Description of Artificial Sequence: Synthetic oligonucleotide
  Antisense strand to SEQ ID NO: 1125830
augccugaugaccuauaua

SEQ ID NO: 1125832 - RNA, 19 nt, Artificial Sequence
  Description of Artificial Sequence: Synthetic oligonucleotide
  Sense strand starting at position 3907 of SEQ ID NO: 916040
ggucuuguugaggagguca

SEQ ID NO: 1125833 - RNA, 19 nt, Artificial Sequence
  Description of Artificial Sequence: Synthetic oligonucleotide
  Antisense strand to SEQ ID NO: 1125832
ugaccuccucaacaagacc

SEQ ID NO: 1125834 - RNA, 19 nt, Artificial Sequence
  Description of Artificial Sequence: Synthetic oligonucleotide
  Sense strand starting at position 3912 of SEQ ID NO: 916040
uguugaggaggucauaugu

SEQ ID NO: 1125835 - RNA, 19 nt, Artificial Sequence
  Description of Artificial Sequence: Synthetic oligonucleotide
  Antisense strand to SEQ ID NO: 1125834
acauaugaccuccucaaca

SEQ ID NO: 1125836 - RNA, 19 nt, Artificial Sequence
  Description of Artificial Sequence: Synthetic oligonucleotide
  Sense strand starting at position 3918 of SEQ ID NO: 916040
ggaggucauauguggaauu

SEQ ID NO: 1125837 - RNA, 19 nt, Artificial Sequence
  Description of Artificial Sequence: Synthetic oligonucleotide
  Antisense strand to SEQ ID NO: 1125836
aauuccacauaugaccucc

SEQ ID NO: 1125838 - RNA, 19 nt, Artificial Sequence
  Description of Artificial Sequence: Synthetic oligonucleotide
  Sense strand starting at position 127 of SEQ ID NO: 916041
ggaagucagucucugcaaa

SEQ ID NO: 1125839 - RNA, 19 nt, Artificial Sequence
  Description of Artificial Sequence: Synthetic oligonucleotide
  Antisense strand to SEQ ID NO: 1125838
uuugcagagacugacuucc

SEQ ID NO: 1125840 - RNA, 19 nt, Artificial Sequence
  Description of Artificial Sequence: Synthetic oligonucleotide
  Sense strand starting at position 128 of SEQ ID NO: 916041
gaagucagucucugcaaau

SEQ ID NO: 1125841 - RNA, 19 nt, Artificial Sequence
  Description of Artificial Sequence: Synthetic oligonucleotide
  Antisense strand to SEQ ID NO: 1125840
auuugcagagacugacuuc

SEQ ID NO: 1125842 - RNA, 19 nt, Artificial Sequence
  Description of Artificial Sequence: Synthetic oligonucleotide
  Sense strand starting at position 183 of SEQ ID NO: 916041
aggagugaaucuuagaaga

SEQ ID NO: 1125843 - RNA, 19 nt, Artificial Sequence
  Description of Artificial Sequence: Synthetic oligonucleotide
  Antisense strand to SEQ ID NO: 1125842
ucuucuaagauucacuccu

SEQ ID NO: 1125844 - RNA, 19 nt, Artificial Sequence
  Description of Artificial Sequence: Synthetic oligonucleotide
  Sense strand starting at position 476 of SEQ ID NO: 916041
uggucuugaaccuggauga

SEQ ID NO: 1125845 - RNA, 19 nt, Artificial Sequence
  Description of Artificial Sequence: Synthetic oligonucleotide
  Antisense strand to SEQ ID NO: 1125844
ucauccagguucaagacca

SEQ ID NO: 1125846 - RNA, 19 nt, Artificial Sequence
  Description of Artificial Sequence: Synthetic oligonucleotide
  Sense strand starting at position 477 of SEQ ID NO: 916041
ggucuugaaccuggaugaa

SEQ ID NO: 1125847 - RNA, 19 nt, Artificial Sequence
  Description of Artificial Sequence: Synthetic oligonucleotide
  Antisense strand to SEQ ID NO: 1125846
uucauccagguucaagacc

SEQ ID NO: 1125848 - RNA, 19 nt, Artificial Sequence
  Description of Artificial Sequence: Synthetic oligonucleotide
  Sense strand starting at position 616 of SEQ ID NO: 916041
cuaucuugagaguggcaua

SEQ ID NO: 1125849 - RNA, 19 nt, Artificial Sequence
  Description of Artificial Sequence: Synthetic oligonucleotide
  Antisense strand to SEQ ID NO: 1125848
uaugccacucucaagauag

SEQ ID NO: 1125850 - RNA, 19 nt, Artificial Sequence
  Description of Artificial Sequence: Synthetic oligonucleotide
  Sense strand starting at position 658 of SEQ ID NO: 916041
gcggcaaguauugucaugu

SEQ ID NO: 1125851 - RNA, 19 nt, Artificial Sequence
  Description of Artificial Sequence: Synthetic oligonucleotide
  Antisense strand to SEQ ID NO: 1125850
acaugacaauacuugccgc

SEQ ID NO: 1125852 - RNA, 19 nt, Artificial Sequence
  Description of Artificial Sequence: Synthetic oligonucleotide
  Sense strand starting at position 928 of SEQ ID NO: 916041
cugaucucucccggaaaug

SEQ ID NO: 1125853 - RNA, 19 nt, Artificial Sequence
  Description of Artificial Sequence: Synthetic oligonucleotide
  Antisense strand to SEQ ID NO: 1125852
cauuuccgggagagaucag

SEQ ID NO: 1125854 - RNA, 19 nt, Artificial Sequence
  Description of Artificial Sequence: Synthetic oligonucleotide
  Sense strand starting at position 1009 of SEQ ID NO: 916041
cugaguucucuccagugaa

SEQ ID NO: 1125855 - RNA, 19 nt, Artificial Sequence
  Description of Artificial Sequence: Synthetic oligonucleotide
  Antisense strand to SEQ ID NO: 1125854
uucacuggagagaacucag

SEQ ID NO: 1125856 - RNA, 19 nt, Artificial Sequence
  Description of Artificial Sequence: Synthetic oligonucleotide
  Sense strand starting at position 1012 of SEQ ID NO: 916041
aguucucuccagugaagau

SEQ ID NO: 1125857 - RNA, 19 nt, Artificial Sequence
  Description of Artificial Sequence: Synthetic oligonucleotide
  Antisense strand to SEQ ID NO: 1125856
aucuucacuggagagaacu

SEQ ID NO: 1125858 - RNA, 19 nt, Artificial Sequence
  Description of Artificial Sequence: Synthetic oligonucleotide
  Sense strand starting at position 1024 of SEQ ID NO: 916041
ugaagauacuuaucguccu

SEQ ID NO: 1125859 - RNA, 19 nt, Artificial Sequence
  Description of Artificial Sequence: Synthetic oligonucleotide
  Antisense strand to SEQ ID NO: 1125858
aggacgauaaguaucuuca

SEQ ID NO: 1125860 - RNA, 19 nt, Artificial Sequence
  Description of Artificial Sequence: Synthetic oligonucleotide
  Sense strand starting at position 1027 of SEQ ID NO: 916041
agauacuuaucguccuuga

SEQ ID NO: 1125861 - RNA, 19 nt, Artificial Sequence
  Description of Artificial Sequence: Synthetic oligonucleotide
  Antisense strand to SEQ ID NO: 1125860
ucaaggacgauaaguaucu

SEQ ID NO: 1125862 - RNA, 19 nt, Artificial Sequence
  Description of Artificial Sequence: Synthetic oligonucleotide
  Sense strand starting at position 1031 of SEQ ID NO: 916041
acuuaucguccuugaaaga

SEQ ID NO: 1125863 - RNA, 19 nt, Artificial Sequence
  Description of Artificial Sequence: Synthetic oligonucleotide
  Antisense strand to SEQ ID NO: 1125862
ucuuucaaggacgauaagu

SEQ ID NO: 1125864 - RNA, 19 nt, Artificial Sequence
  Description of Artificial Sequence: Synthetic oligonucleotide
  Sense strand starting at position 1032 of SEQ ID NO: 916041
cuuaucguccuugaaagaa

SEQ ID NO: 1125865 - RNA, 19 nt, Artificial Sequence
  Description of Artificial Sequence: Synthetic oligonucleotide
  Antisense strand to SEQ ID NO: 1125864
uucuuucaaggacgauaag

SEQ ID NO: 1125866 - RNA, 19 nt, Artificial Sequence
  Description of Artificial Sequence: Synthetic oligonucleotide
  Sense strand starting at position 2382 of SEQ ID NO: 916041
ucugcuuugcgaggauuua

SEQ ID NO: 1125867 - RNA, 19 nt, Artificial Sequence
  Description of Artificial Sequence: Synthetic oligonucleotide
  Antisense strand to SEQ ID NO: 1125866
uaaauccucgcaaagcaga

SEQ ID NO: 1125868 - RNA, 19 nt, Artificial Sequence
  Description of Artificial Sequence: Synthetic oligonucleotide
  Sense strand starting at position 2863 of SEQ ID NO: 916041
cugacuucucccggaccca

SEQ ID NO: 1125869 - RNA, 19 nt, Artificial Sequence
  Description of Artificial Sequence: Synthetic oligonucleotide
  Antisense strand to SEQ ID NO: 1125868
uggguccgggagaagucag

SEQ ID NO: 1125870 - RNA, 19 nt, Artificial Sequence
  Description of Artificial Sequence: Synthetic oligonucleotide
  Sense strand starting at position 2945 of SEQ ID NO: 916041
guaggaauucugugggucu

SEQ ID NO: 1125871 - RNA, 19 nt, Artificial Sequence
  Description of Artificial Sequence: Synthetic oligonucleotide
  Antisense strand to SEQ ID NO: 1125870
agacccacagaauuccuac

SEQ ID NO: 1125872 - RNA, 19 nt, Artificial Sequence
  Description of Artificial Sequence: Synthetic oligonucleotide
  Sense strand starting at position 2947 of SEQ ID NO: 916041
aggaauucugugggucuuu

SEQ ID NO: 1125873 - RNA, 19 nt, Artificial Sequence
  Description of Artificial Sequence: Synthetic oligonucleotide
  Antisense strand to SEQ ID NO: 1125872
aaagacccacagaauuccu

SEQ ID NO: 1125874 - RNA, 19 nt, Artificial Sequence
  Description of Artificial Sequence: Synthetic oligonucleotide
  Sense strand starting at position 2948 of SEQ ID NO: 916041
ggaauucugugggucuuua

SEQ ID NO: 1125875 - RNA, 19 nt, Artificial Sequence
  Description of Artificial Sequence: Synthetic oligonucleotide
  Antisense strand to SEQ ID NO: 1125874
uaaagacccacagaauucc

SEQ ID NO: 1125876 - RNA, 19 nt, Artificial Sequence
  Description of Artificial Sequence: Synthetic oligonucleotide
  Sense strand starting at position 2952 of SEQ ID NO: 916041
uucugugggucuuuaaaca

SEQ ID NO: 1125877 - RNA, 19 nt, Artificial Sequence
  Description of Artificial Sequence: Synthetic oligonucleotide
  Antisense strand to SEQ ID NO: 1125876
uguuuaaagacccacagaa

SEQ ID NO: 1125878 - RNA, 19 nt, Artificial Sequence
  Description of Artificial Sequence: Synthetic oligonucleotide
  Sense strand starting at position 2978 of SEQ ID NO: 916041
ccugauucucuggagugga

SEQ ID NO: 1125879 - RNA, 19 nt, Artificial Sequence
  Description of Artificial Sequence: Synthetic oligonucleotide
  Antisense strand to SEQ ID NO: 1125878
uccacuccagagaaucagg

SEQ ID NO: 1125880 - RNA, 19 nt, Artificial Sequence
  Description of Artificial Sequence: Synthetic oligonucleotide
  Sense strand starting at position 2997 of SEQ ID NO: 916041
cgaggagagucaccuucuu

SEQ ID NO: 1125881 - RNA, 19 nt, Artificial Sequence
  Description of Artificial Sequence: Synthetic oligonucleotide
  Antisense strand to SEQ ID NO: 1125880
aagaaggugacucuccucg

SEQ ID NO: 1125882 - RNA, 19 nt, Artificial Sequence
  Description of Artificial Sequence: Synthetic oligonucleotide
  Sense strand starting at position 3025 of SEQ ID NO: 916041
ccgaaucccuuuguauuau

SEQ ID NO: 1125883 - RNA, 19 nt, Artificial Sequence
  Description of Artificial Sequence: Synthetic oligonucleotide
  Antisense strand to SEQ ID NO: 1125882
auaauacaaagggauucgg

SEQ ID NO: 1125884 - RNA, 19 nt, Artificial Sequence
  Description of Artificial Sequence: Synthetic oligonucleotide
  Sense strand starting at position 3060 of SEQ ID NO: 916041
ccuuuacuguccuuuauga

SEQ ID NO: 1125885 - RNA, 19 nt, Artificial Sequence
  Description of Artificial Sequence: Synthetic oligonucleotide
  Antisense strand to SEQ ID NO: 1125884
ucauaaaggacaguaaagg

SEQ ID NO: 1125886 - RNA, 19 nt, Artificial Sequence
  Description of Artificial Sequence: Synthetic oligonucleotide
  Sense strand starting at position 3062 of SEQ ID NO: 916041
uuuacuguccuuuaugauu

SEQ ID NO: 1125887 - RNA, 19 nt, Artificial Sequence
  Description of Artificial Sequence: Synthetic oligonucleotide
  Antisense strand to SEQ ID NO: 1125886
aaucauaaaggacaguaaa

SEQ ID NO: 1125888 - RNA, 19 nt, Artificial Sequence
  Description of Artificial Sequence: Synthetic oligonucleotide
  Sense strand starting at position 3185 of SEQ ID NO: 916041
gcuguuauuugccuguuua

SEQ ID NO: 1125889 - RNA, 19 nt, Artificial Sequence
  Description of Artificial Sequence: Synthetic oligonucleotide
  Antisense strand to SEQ ID NO: 1125888
uaaacaggcaaauaacagc

SEQ ID NO: 1125890 - RNA, 19 nt, Artificial Sequence
  Description of Artificial Sequence: Synthetic oligonucleotide
  Sense strand starting at position 3186 of SEQ ID NO: 916041
cuguuauuugccuguuuau

SEQ ID NO: 1125891 - RNA, 19 nt, Artificial Sequence
  Description of Artificial Sequence: Synthetic oligonucleotide
  Antisense strand to SEQ ID NO: 1125890
auaaacaggcaaauaacag

SEQ ID NO: 1125892 - RNA, 19 nt, Artificial Sequence
  Description of Artificial Sequence: Synthetic oligonucleotide
  Sense strand starting at position 3198 of SEQ ID NO: 916041
uguuuauuaucaguagacu

SEQ ID NO: 1125893 - RNA, 19 nt, Artificial Sequence
  Description of Artificial Sequence: Synthetic oligonucleotide
  Antisense strand to SEQ ID NO: 1125892
agucuacugauaauaaaca

SEQ ID NO: 1125894 - RNA, 19 nt, Artificial Sequence
  Description of Artificial Sequence: Synthetic oligonucleotide
  Sense strand starting at position 3199 of SEQ ID NO: 916041
guuuauuaucaguagacuu

SEQ ID NO: 1125895 - RNA, 19 nt, Artificial Sequence
  Description of Artificial Sequence: Synthetic oligonucleotide
  Antisense strand to SEQ ID NO: 1125894
aagucuacugauaauaaac

SEQ ID NO: 1125896 - RNA, 19 nt, Artificial Sequence
  Description of Artificial Sequence: Synthetic oligonucleotide
  Sense strand starting at position 3201 of SEQ ID NO: 916041
uuauuaucaguagacuugu

SEQ ID NO: 1125897 - RNA, 19 nt, Artificial Sequence
  Description of Artificial Sequence: Synthetic oligonucleotide
  Antisense strand to SEQ ID NO: 1125896
acaagucuacugauaauaa

SEQ ID NO: 1125898 - RNA, 19 nt, Artificial Sequence
  Description of Artificial Sequence: Synthetic oligonucleotide
  Sense strand starting at position 3207 of SEQ ID NO: 916041
ucaguagacuugucucauu

SEQ ID NO: 1125899 - RNA, 19 nt, Artificial Sequence
  Description of Artificial Sequence: Synthetic oligonucleotide
  Antisense strand to SEQ ID NO: 1125898
aaugagacaagucuacuga

SEQ ID NO: 1125900 - RNA, 19 nt, Artificial Sequence
  Description of Artificial Sequence: Synthetic oligonucleotide
  Sense strand starting at position 3212 of SEQ ID NO: 916041
agacuugucucauugguuc

SEQ ID NO: 1125901 - RNA, 19 nt, Artificial Sequence
  Description of Artificial Sequence: Synthetic oligonucleotide
  Antisense strand to SEQ ID NO: 1125900
gaaccaaugagacaagucu

SEQ ID NO: 1125902 - RNA, 19 nt, Artificial Sequence
  Description of Artificial Sequence: Synthetic oligonucleotide
  Sense strand starting at position 3287 of SEQ ID NO: 916041
auggauuaguccuuguuuc

SEQ ID NO: 1125903 - RNA, 19 nt, Artificial Sequence
  Description of Artificial Sequence: Synthetic oligonucleotide
  Antisense strand to SEQ ID NO: 1125902
gaaacaaggacuaauccau

SEQ ID NO: 1125904 - RNA, 19 nt, Artificial Sequence
  Description of Artificial Sequence: Synthetic oligonucleotide
  Sense strand starting at position 3353 of SEQ ID NO: 916041
gagggugauaggugcaguu

SEQ ID NO: 1125905 - RNA, 19 nt, Artificial Sequence
  Description of Artificial Sequence: Synthetic oligonucleotide
  Antisense strand to SEQ ID NO: 1125904
aacugcaccuaucacccuc

SEQ ID NO: 1125906 - RNA, 19 nt, Artificial Sequence
  Description of Artificial Sequence: Synthetic oligonucleotide
  Sense strand starting at position 3451 of SEQ ID NO: 916041
gaaaguugccgccaaggga

SEQ ID NO: 1125907 - RNA, 19 nt, Artificial Sequence
  Description of Artificial Sequence: Synthetic oligonucleotide
  Antisense strand to SEQ ID NO: 1125906
ucccuuggcggcaacuuuc

SEQ ID NO: 1125908 - RNA, 19 nt, Artificial Sequence
  Description of Artificial Sequence: Synthetic oligonucleotide
  Sense strand starting at position 3532 of SEQ ID NO: 916041
ggguaguuugugggaaggu

SEQ ID NO: 1125909 - RNA, 19 nt, Artificial Sequence
  Description of Artificial Sequence: Synthetic oligonucleotide
  Antisense strand to SEQ ID NO: 1125908
accuucccacaaacuaccc

SEQ ID NO: 1125910 - RNA, 19 nt, Artificial Sequence
  Description of Artificial Sequence: Synthetic oligonucleotide
  Sense strand starting at position 3551 of SEQ ID NO: 916041
gagaaagagccuugugcuc

SEQ ID NO: 1125911 - RNA, 19 nt, Artificial Sequence
  Description of Artificial Sequence: Synthetic oligonucleotide
  Antisense strand to SEQ ID NO: 1125910
gagcacaaggcucuuucuc

SEQ ID NO: 1125912 - RNA, 19 nt, Artificial Sequence
  Description of Artificial Sequence: Synthetic oligonucleotide
  Sense strand starting at position 3762 of SEQ ID NO: 916041
acgggauugcauggaacau

SEQ ID NO: 1125913 - RNA, 19 nt, Artificial Sequence
  Description of Artificial Sequence: Synthetic oligonucleotide
  Antisense strand to SEQ ID NO: 1125912
auguuccaugcaaucccgu

SEQ ID NO: 1125914 - RNA, 19 nt, Artificial Sequence
  Description of Artificial Sequence: Synthetic oligonucleotide
  Sense strand starting at position 3774 of SEQ ID NO: 916041
ggaacauggagauguugua

SEQ ID NO: 1125915 - RNA, 19 nt, Artificial Sequence
  Description of Artificial Sequence: Synthetic oligonucleotide
  Antisense strand to SEQ ID NO: 1125914
uacaacaucuccauguucc

SEQ ID NO: 1125916 - RNA, 19 nt, Artificial Sequence
  Description of Artificial Sequence: Synthetic oligonucleotide
  Sense strand starting at position 3825 of SEQ ID NO: 916041
agcagugguagaugaaagu

SEQ ID NO: 1125917 - RNA, 19 nt, Artificial Sequence
  Description of Artificial Sequence: Synthetic oligonucleotide
  Antisense strand to SEQ ID NO: 1125916
acuuucaucuaccacugcu

SEQ ID NO: 1125918 - RNA, 19 nt, Artificial Sequence
  Description of Artificial Sequence: Synthetic oligonucleotide
  Sense strand starting at position 276 of SEQ ID NO: 916042
gugagauggguccgaagca

SEQ ID NO: 1125919 - RNA, 19 nt, Artificial Sequence
  Description of Artificial Sequence: Synthetic oligonucleotide
  Antisense strand to SEQ ID NO: 1125918
ugcuucggacccaucucac

SEQ ID NO: 1125920 - RNA, 19 nt, Artificial Sequence
  Description of Artificial Sequence: Synthetic oligonucleotide
  Sense strand starting at position 607 of SEQ ID NO: 916042
ugccaaggcccucagauau

SEQ ID NO: 1125921 - RNA, 19 nt, Artificial Sequence
  Description of Artificial Sequence: Synthetic oligonucleotide
  Antisense strand to SEQ ID NO: 1125920
auaucugagggccuuggca

SEQ ID NO: 1125922 - RNA, 19 nt, Artificial Sequence
  Description of Artificial Sequence: Synthetic oligonucleotide
  Sense strand starting at position 935 of SEQ ID NO: 916042
agggaaugccugugagaag

SEQ ID NO: 1125923 - RNA, 19 nt, Artificial Sequence
  Description of Artificial Sequence: Synthetic oligonucleotide
  Antisense strand to SEQ ID NO: 1125922
cuucucacaggcauucccu

SEQ ID NO: 1125924 - RNA, 19 nt, Artificial Sequence
  Description of Artificial Sequence: Synthetic oligonucleotide
  Sense strand starting at position 942 of SEQ ID NO: 916042
gccugugagaagugacuca

SEQ ID NO: 1125925 - RNA, 19 nt, Artificial Sequence
  Description of Artificial Sequence: Synthetic oligonucleotide
  Antisense strand to SEQ ID NO: 1125924
ugagucacuucucacaggc

SEQ ID NO: 1125926 - RNA, 19 nt, Artificial Sequence
  Description of Artificial Sequence: Synthetic oligonucleotide
  Sense strand starting at position 1017 of SEQ ID NO: 916042
cccaguuuccagugaagaa

SEQ ID NO: 1125927 - RNA, 19 nt, Artificial Sequence
  Description of Artificial Sequence: Synthetic oligonucleotide
  Antisense strand to SEQ ID NO: 1125926
uucuucacuggaaacuggg

SEQ ID NO: 1125928 - RNA, 19 nt, Artificial Sequence
  Description of Artificial Sequence: Synthetic oligonucleotide
  Sense strand starting at position 1029 of SEQ ID NO: 916042
ugaagaaacuuccuggcga

SEQ ID NO: 1125929 - RNA, 19 nt, Artificial Sequence
  Description of Artificial Sequence: Synthetic oligonucleotide
  Antisense strand to SEQ ID NO: 1125928
ucgccaggaaguuucuuca

SEQ ID NO: 1125930 - RNA, 19 nt, Artificial Sequence
  Description of Artificial Sequence: Synthetic oligonucleotide
  Sense strand starting at position 1066 of SEQ ID NO: 916042
ggaguuaaugacugcugca

SEQ ID NO: 1125931 - RNA, 19 nt, Artificial Sequence
  Description of Artificial Sequence: Synthetic oligonucleotide
  Antisense strand to SEQ ID NO: 1125930
ugcagcagucauuaacucc

SEQ ID NO: 1125932 - RNA, 19 nt, Artificial Sequence
  Description of Artificial Sequence: Synthetic oligonucleotide
  Sense strand starting at position 1111 of SEQ ID NO: 916042
ugcugagcccucuaacuua

SEQ ID NO: 1125933 - RNA, 19 nt, Artificial Sequence
  Description of Artificial Sequence: Synthetic oligonucleotide
  Antisense strand to SEQ ID NO: 1125932
uaaguuagagggcucagca

SEQ ID NO: 1125934 - RNA, 19 nt, Artificial Sequence
  Description of Artificial Sequence: Synthetic oligonucleotide
  Sense strand starting at position 1194 of SEQ ID NO: 916042
ggcucaacucccgaaguua

SEQ ID NO: 1125935 - RNA, 19 nt, Artificial Sequence
  Description of Artificial Sequence: Synthetic oligonucleotide
  Antisense strand to SEQ ID NO: 1125934
uaacuucgggaguugagcc

SEQ ID NO: 1125936 - RNA, 19 nt, Artificial Sequence
  Description of Artificial Sequence: Synthetic oligonucleotide
  Sense strand starting at position 1316 of SEQ ID NO: 916042
gcuguuggucugggagaac

SEQ ID NO: 1125937 - RNA, 19 nt, Artificial Sequence
  Description of Artificial Sequence: Synthetic oligonucleotide
  Antisense strand to SEQ ID NO: 1125936
guucucccagaccaacagc

SEQ ID NO: 1125938 - RNA, 19 nt, Artificial Sequence
  Description of Artificial Sequence: Synthetic oligonucleotide
  Sense strand starting at position 1335 of SEQ ID NO: 916042
gucuaucauggugacugua

SEQ ID NO: 1125939 - RNA, 19 nt, Artificial Sequence
  Description of Artificial Sequence: Synthetic oligonucleotide
  Antisense strand to SEQ ID NO: 1125938
uacagucaccaugauagac

SEQ ID NO: 1125940 - RNA, 19 nt, Artificial Sequence
  Description of Artificial Sequence: Synthetic oligonucleotide
  Sense strand starting at position 1351 of SEQ ID NO: 916042
guaggugucaauggacuga

SEQ ID NO: 1125941 - RNA, 19 nt, Artificial Sequence
  Description of Artificial Sequence: Synthetic oligonucleotide
  Antisense strand to SEQ ID NO: 1125940
ucaguccauugacaccuac

SEQ ID NO: 1125942 - RNA, 19 nt, Artificial Sequence
  Description of Artificial Sequence: Synthetic oligonucleotide
  Sense strand starting at position 1356 of SEQ ID NO: 916042
ugucaauggacugaugcua

SEQ ID NO: 1125943 - RNA, 19 nt, Artificial Sequence
  Description of Artificial Sequence: Synthetic oligonucleotide
  Antisense strand to SEQ ID NO: 1125942
uagcaucaguccauugaca

SEQ ID NO: 1125944 - RNA, 19 nt, Artificial Sequence
  Description of Artificial Sequence: Synthetic oligonucleotide
  Sense strand starting at position 1512 of SEQ ID NO: 916042
uagaaucaugagugauuac

SEQ ID NO: 1125945 - RNA, 19 nt, Artificial Sequence
  Description of Artificial Sequence: Synthetic oligonucleotide
  Antisense strand to SEQ ID NO: 1125944
guaaucacucaugauucua

SEQ ID NO: 1125946 - RNA, 19 nt, Artificial Sequence
  Description of Artificial Sequence: Synthetic oligonucleotide
  Sense strand starting at position 1589 of SEQ ID NO: 916042
gcuuuauugguugacagcu

SEQ ID NO: 1125947 - RNA, 19 nt, Artificial Sequence
  Description of Artificial Sequence: Synthetic oligonucleotide
  Antisense strand to SEQ ID NO: 1125946
agcugucaaccaauaaagc

SEQ ID NO: 1125948 - RNA, 19 nt, Artificial Sequence
  Description of Artificial Sequence: Synthetic oligonucleotide
  Sense strand starting at position 1597 of SEQ ID NO: 916042
gguugacagcuguaucagu

SEQ ID NO: 1125949 - RNA, 19 nt, Artificial Sequence
  Description of Artificial Sequence: Synthetic oligonucleotide
  Antisense strand to SEQ ID NO: 1125948
acugauacagcugucaacc

SEQ ID NO: 1125950 - RNA, 19 nt, Artificial Sequence
  Description of Artificial Sequence: Synthetic oligonucleotide
  Sense strand starting at position 1604 of SEQ ID NO: 916042
agcuguaucagucacucga

SEQ ID NO: 1125951 - RNA, 19 nt, Artificial Sequence
  Description of Artificial Sequence: Synthetic oligonucleotide
  Antisense strand to SEQ ID NO: 1125950
ucgagugacugauacagcu

SEQ ID NO: 1125952 - RNA, 19 nt, Artificial Sequence
  Description of Artificial Sequence: Synthetic oligonucleotide
  Sense strand starting at position 1722 of SEQ ID NO: 916042
cuggaauugagaggccuaa

SEQ ID NO: 1125953 - RNA, 19 nt, Artificial Sequence
  Description of Artificial Sequence: Synthetic oligonucleotide
  Antisense strand to SEQ ID NO: 1125952
uuaggccucucaauuccag

SEQ ID NO: 1125954 - RNA, 19 nt, Artificial Sequence
  Description of Artificial Sequence: Synthetic oligonucleotide
  Sense strand starting at position 2789 of SEQ ID NO: 916042
agaggaaagcucuagucgu

SEQ ID NO: 1125955 - RNA, 19 nt, Artificial Sequence
  Description of Artificial Sequence: Synthetic oligonucleotide
  Antisense strand to SEQ ID NO: 1125954
acgacuagagcuuuccucu

SEQ ID NO: 1125956 - RNA, 19 nt, Artificial Sequence
  Description of Artificial Sequence: Synthetic oligonucleotide
  Sense strand starting at position 2891 of SEQ ID NO: 916042
uuuaaaguauuccuagaga

SEQ ID NO: 1125957 - RNA, 19 nt, Artificial Sequence
  Description of Artificial Sequence: Synthetic oligonucleotide
  Antisense strand to SEQ ID NO: 1125956
ucucuaggaauacuuuaaa

SEQ ID NO: 1125958 - RNA, 19 nt, Artificial Sequence
  Description of Artificial Sequence: Synthetic oligonucleotide
  Sense strand starting at position 2913 of SEQ ID NO: 916042
gguuucuuucucggaggau

SEQ ID NO: 1125959 - RNA, 19 nt, Artificial Sequence
  Description of Artificial Sequence: Synthetic oligonucleotide
  Antisense strand to SEQ ID NO: 1125958
auccuccgagaaagaaacc

SEQ ID NO: 1125960 - RNA, 19 nt, Artificial Sequence
  Description of Artificial Sequence: Synthetic oligonucleotide
  Sense strand starting at position 2960 of SEQ ID NO: 916042
acucuuggcuaguuacaca

SEQ ID NO: 1125961 - RNA, 19 nt, Artificial Sequence
  Description of Artificial Sequence: Synthetic oligonucleotide
  Antisense strand to SEQ ID NO: 1125960
uguguaacuagccaagagu

SEQ ID NO: 1125962 - RNA, 19 nt, Artificial Sequence
  Description of Artificial Sequence: Synthetic oligonucleotide
  Sense strand starting at position 3165 of SEQ ID NO: 916042
uguauucugccagaaccag

SEQ ID NO: 1125963 - RNA, 19 nt, Artificial Sequence
  Description of Artificial Sequence: Synthetic oligonucleotide
  Antisense strand to SEQ ID NO: 1125962
cugguucuggcagaauaca

SEQ ID NO: 1125964 - RNA, 19 nt, Artificial Sequence
  Description of Artificial Sequence: Synthetic oligonucleotide
  Sense strand starting at position 3273 of SEQ ID NO: 916042
ucaggaucaucacugugau

SEQ ID NO: 1125965 - RNA, 19 nt, Artificial Sequence
  Description of Artificial Sequence: Synthetic oligonucleotide
  Antisense strand to SEQ ID NO: 1125964
aucacagugaugauccuga

SEQ ID NO: 1125966 - RNA, 19 nt, Artificial Sequence
  Description of Artificial Sequence: Synthetic oligonucleotide
  Sense strand starting at position 3274 of SEQ ID NO: 916042
caggaucaucacugugauu

SEQ ID NO: 1125967 - RNA, 19 nt, Artificial Sequence
  Description of Artificial Sequence: Synthetic oligonucleotide
  Antisense strand to SEQ ID NO: 1125966
aaucacagugaugauccug

SEQ ID NO: 1125968 - RNA, 19 nt, Artificial Sequence
  Description of Artificial Sequence: Synthetic oligonucleotide
  Sense strand starting at position 3286 of SEQ ID NO: 916042
ugugauuugugguuugcuu

SEQ ID NO: 1125969 - RNA, 19 nt, Artificial Sequence
  Description of Artificial Sequence: Synthetic oligonucleotide
  Antisense strand to SEQ ID NO: 1125968
aagcaaaccacaaaucaca

SEQ ID NO: 1125970 - RNA, 19 nt, Artificial Sequence
  Description of Artificial Sequence: Synthetic oligonucleotide
  Sense strand starting at position 3357 of SEQ ID NO: 916042
cuggcuuuggcagagguaa

SEQ ID NO: 1125971 - RNA, 19 nt, Artificial Sequence
  Description of Artificial Sequence: Synthetic oligonucleotide
  Antisense strand to SEQ ID NO: 1125970
uuaccucugccaaagccag

SEQ ID NO: 1125972 - RNA, 19 nt, Artificial Sequence
  Description of Artificial Sequence: Synthetic oligonucleotide
  Sense strand starting at position 3405 of SEQ ID NO: 916042
guucccaauccuuggugaa

SEQ ID NO: 1125973 - RNA, 19 nt, Artificial Sequence
  Description of Artificial Sequence: Synthetic oligonucleotide
  Antisense strand to SEQ ID NO: 1125972
uucaccaaggauugggaac

SEQ ID NO: 1125974 - RNA, 19 nt, Artificial Sequence
  Description of Artificial Sequence: Synthetic oligonucleotide
  Sense strand starting at position 3406 of SEQ ID NO: 916042
uucccaauccuuggugaaa

SEQ ID NO: 1125975 - RNA, 19 nt, Artificial Sequence
  Description of Artificial Sequence: Synthetic oligonucleotide
  Antisense strand to SEQ ID NO: 1125974
uuucaccaaggauugggaa

SEQ ID NO: 1125976 - RNA, 19 nt, Artificial Sequence
  Description of Artificial Sequence: Synthetic oligonucleotide
  Sense strand starting at position 3407 of SEQ ID NO: 916042
ucccaauccuuggugaaau

SEQ ID NO: 1125977 - RNA, 19 nt, Artificial Sequence
  Description of Artificial Sequence: Synthetic oligonucleotide
  Antisense strand to SEQ ID NO: 1125976
auuucaccaaggauuggga

SEQ ID NO: 1125978 - RNA, 19 nt, Artificial Sequence
  Description of Artificial Sequence: Synthetic oligonucleotide
  Sense strand starting at position 3417 of SEQ ID NO: 916042
uggugaaaucagcaucuuu

SEQ ID NO: 1125979 - RNA, 19 nt, Artificial Sequence
  Description of Artificial Sequence: Synthetic oligonucleotide
  Antisense strand to SEQ ID NO: 1125978
aaagaugcugauuucacca

SEQ ID NO: 1125980 - RNA, 19 nt, Artificial Sequence
  Description of Artificial Sequence: Synthetic oligonucleotide
  Sense strand starting at position 3446 of SEQ ID NO: 916042
agaggaguuuaaucacuuc

SEQ ID NO: 1125981 - RNA, 19 nt, Artificial Sequence
  Description of Artificial Sequence: Synthetic oligonucleotide
  Antisense strand to SEQ ID NO: 1125980
gaagugauuaaacuccucu

SEQ ID NO: 1125982 - RNA, 19 nt, Artificial Sequence
  Description of Artificial Sequence: Synthetic oligonucleotide
  Sense strand starting at position 3572 of SEQ ID NO: 916042
cuuaguaacugcuuugaau

SEQ ID NO: 1125983 - RNA, 19 nt, Artificial Sequence
  Description of Artificial Sequence: Synthetic oligonucleotide
  Antisense strand to SEQ ID NO: 1125982
auucaaagcaguuacuaag

SEQ ID NO: 1125984 - RNA, 19 nt, Artificial Sequence
  Description of Artificial Sequence: Synthetic oligonucleotide
  Sense strand starting at position 3656 of SEQ ID NO: 916042
cagugugcccuaguucuuu

SEQ ID NO: 1125985 - RNA, 19 nt, Artificial Sequence
  Description of Artificial Sequence: Synthetic oligonucleotide
  Antisense strand to SEQ ID NO: 1125984
aaagaacuagggcacacug

SEQ ID NO: 1125986 - RNA, 19 nt, Artificial Sequence
  Description of Artificial Sequence: Synthetic oligonucleotide
  Sense strand starting at position 3706 of SEQ ID NO: 916042
ucaaauugggcucauggua

SEQ ID NO: 1125987 - RNA, 19 nt, Artificial Sequence
  Description of Artificial Sequence: Synthetic oligonucleotide
  Antisense strand to SEQ ID NO: 1125986
uaccaugagcccaauuuga

SEQ ID NO: 1125988 - RNA, 19 nt, Artificial Sequence
  Description of Artificial Sequence: Synthetic oligonucleotide
  Sense strand starting at position 3722 of SEQ ID NO: 916042
guagaaagagcuuaguuga

SEQ ID NO: 1125989 - RNA, 19 nt, Artificial Sequence
  Description of Artificial Sequence: Synthetic oligonucleotide
  Antisense strand to SEQ ID NO: 1125988
ucaacuaagcucuuucuac

SEQ ID NO: 1125990 - RNA, 19 nt, Artificial Sequence
  Description of Artificial Sequence: Synthetic oligonucleotide
  Sense strand starting at position 3725 of SEQ ID NO: 916042
gaaagagcuuaguugaccu

SEQ ID NO: 1125991 - RNA, 19 nt, Artificial Sequence
  Description of Artificial Sequence: Synthetic oligonucleotide
  Antisense strand to SEQ ID NO: 1125990
aggucaacuaagcucuuuc

SEQ ID NO: 1125992 - RNA, 19 nt, Artificial Sequence
  Description of Artificial Sequence: Synthetic oligonucleotide
  Sense strand starting at position 3745 of SEQ ID NO: 916042
cccggugagaaaugcucua

SEQ ID NO: 1125993 - RNA, 19 nt, Artificial Sequence
  Description of Artificial Sequence: Synthetic oligonucleotide
  Antisense strand to SEQ ID NO: 1125992
uagagcauuucucaccggg

SEQ ID NO: 1125994 - RNA, 19 nt, Artificial Sequence
  Description of Artificial Sequence: Synthetic oligonucleotide
  Sense strand starting at position 3798 of SEQ ID NO: 916042
ggaagugguacagagcaau

SEQ ID NO: 1125995 - RNA, 19 nt, Artificial Sequence
  Description of Artificial Sequence: Synthetic oligonucleotide
  Antisense strand to SEQ ID NO: 1125994
auugcucuguaccacuucc

SEQ ID NO: 1125996 - RNA, 19 nt, Artificial Sequence
  Description of Artificial Sequence: Synthetic oligonucleotide
  Sense strand starting at position 3801 of SEQ ID NO: 916042
agugguacagagcaaucua

SEQ ID NO: 1125997 - RNA, 19 nt, Artificial Sequence
  Description of Artificial Sequence: Synthetic oligonucleotide
  Antisense strand to SEQ ID NO: 1125996
uagauugcucuguaccacu

SEQ ID NO: 1125998 - RNA, 19 nt, Artificial Sequence
  Description of Artificial Sequence: Synthetic oligonucleotide
  Sense strand starting at position 74 of SEQ ID NO: 916043
gggaaagaauugucugucu

SEQ ID NO: 1125999 - RNA, 19 nt, Artificial Sequence
  Description of Artificial Sequence: Synthetic oligonucleotide
  Antisense strand to SEQ ID NO: 1125998
agacagacaauucuuuccc

SEQ ID NO: 1126000 - RNA, 19 nt, Artificial Sequence
  Description of Artificial Sequence: Synthetic oligonucleotide
  Sense strand starting at position 76 of SEQ ID NO: 916043
gaaagaauugucugucuuu

SEQ ID NO: 1126001 - RNA, 19 nt, Artificial Sequence
  Description of Artificial Sequence: Synthetic oligonucleotide
  Antisense strand to SEQ ID NO: 1126000
aaagacagacaauucuuuc

SEQ ID NO: 1126002 - RNA, 19 nt, Artificial Sequence
  Description of Artificial Sequence: Synthetic oligonucleotide
  Sense strand starting at position 87 of SEQ ID NO: 916043
cugucuuuaggucaagcau

SEQ ID NO: 1126003 - RNA, 19 nt, Artificial Sequence
  Description of Artificial Sequence: Synthetic oligonucleotide
  Antisense strand to SEQ ID NO: 1126002
augcuugaccuaaagacag

SEQ ID NO: 1126004 - RNA, 19 nt, Artificial Sequence
  Description of Artificial Sequence: Synthetic oligonucleotide
  Sense strand starting at position 98 of SEQ ID NO: 916043
ucaagcauuuccugauaag

SEQ ID NO: 1126005 - RNA, 19 nt, Artificial Sequence
  Description of Artificial Sequence: Synthetic oligonucleotide
  Antisense strand to SEQ ID NO: 1126004
cuuaucaggaaaugcuuga

SEQ ID NO: 1126006 - RNA, 19 nt, Artificial Sequence
  Description of Artificial Sequence: Synthetic oligonucleotide
  Sense strand starting at position 101 of SEQ ID NO: 916043
agcauuuccugauaaguga

SEQ ID NO: 1126007 - RNA, 19 nt, Artificial Sequence
  Description of Artificial Sequence: Synthetic oligonucleotide
  Antisense strand to SEQ ID NO: 1126006
ucacuuaucaggaaaugcu

SEQ ID NO: 1126008 - RNA, 19 nt, Artificial Sequence
  Description of Artificial Sequence: Synthetic oligonucleotide
  Sense strand starting at position 109 of SEQ ID NO: 916043
cugauaagugacugaaggu

SEQ ID NO: 1126009 - RNA, 19 nt, Artificial Sequence
  Description of Artificial Sequence: Synthetic oligonucleotide
  Antisense strand to SEQ ID NO: 1126008
accuucagucacuuaucag

SEQ ID NO: 1126010 - RNA, 19 nt, Artificial Sequence
  Description of Artificial Sequence: Synthetic oligonucleotide
  Sense strand starting at position 146 of SEQ ID NO: 916043
cuuugcugacccuaggaau

SEQ ID NO: 1126011 - RNA, 19 nt, Artificial Sequence
  Description of Artificial Sequence: Synthetic oligonucleotide
  Antisense strand to SEQ ID NO: 1126010
auuccuagggucagcaaag

SEQ ID NO: 1126012 - RNA, 19 nt, Artificial Sequence
  Description of Artificial Sequence: Synthetic oligonucleotide
  Sense strand starting at position 200 of SEQ ID NO: 916043
ucuugaaagugaccuguua

SEQ ID NO: 1126013 - RNA, 19 nt, Artificial Sequence
  Description of Artificial Sequence: Synthetic oligonucleotide
  Antisense strand to SEQ ID NO: 1126012
uaacaggucacuuucaaga

SEQ ID NO: 1126014 - RNA, 19 nt, Artificial Sequence
  Description of Artificial Sequence: Synthetic oligonucleotide
  Sense strand starting at position 256 of SEQ ID NO: 916043
ugaccaacgaggugucuuu

SEQ ID NO: 1126015 - RNA, 19 nt, Artificial Sequence
  Description of Artificial Sequence: Synthetic oligonucleotide
  Antisense strand to SEQ ID NO: 1126014
aaagacaccucguugguca

SEQ ID NO: 1126016 - RNA, 19 nt, Artificial Sequence
  Description of Artificial Sequence: Synthetic oligonucleotide
  Sense strand starting at position 262 of SEQ ID NO: 916043
acgaggugucuuuggugga

SEQ ID NO: 1126017 - RNA, 19 nt, Artificial Sequence
  Description of Artificial Sequence: Synthetic oligonucleotide
  Antisense strand to SEQ ID NO: 1126016
uccaccaaagacaccucgu

SEQ ID NO: 1126018 - RNA, 19 nt, Artificial Sequence
  Description of Artificial Sequence: Synthetic oligonucleotide
  Sense strand starting at position 266 of SEQ ID NO: 916043
ggugucuuugguggacaua

SEQ ID NO: 1126019 - RNA, 19 nt, Artificial Sequence
  Description of Artificial Sequence: Synthetic oligonucleotide
  Antisense strand to SEQ ID NO: 1126018
uauguccaccaaagacacc

SEQ ID NO: 1126020 - RNA, 19 nt, Artificial Sequence
  Description of Artificial Sequence: Synthetic oligonucleotide
  Sense strand starting at position 267 of SEQ ID NO: 916043
gugucuuugguggacauau

SEQ ID NO: 1126021 - RNA, 19 nt, Artificial Sequence
  Description of Artificial Sequence: Synthetic oligonucleotide
  Antisense strand to SEQ ID NO: 1126020
auauguccaccaaagacac

SEQ ID NO: 1126022 - RNA, 19 nt, Artificial Sequence
  Description of Artificial Sequence: Synthetic oligonucleotide
  Sense strand starting at position 356 of SEQ ID NO: 916043
auuguuaacggccauguga

SEQ ID NO: 1126023 - RNA, 19 nt, Artificial Sequence
  Description of Artificial Sequence: Synthetic oligonucleotide
  Antisense strand to SEQ ID NO: 1126022
ucacauggccguuaacaau

SEQ ID NO: 1126024 - RNA, 19 nt, Artificial Sequence
  Description of Artificial Sequence: Synthetic oligonucleotide
  Sense strand starting at position 414 of SEQ ID NO: 916043
agagaaguucaaggcaguu

SEQ ID NO: 1126025 - RNA, 19 nt, Artificial Sequence
  Description of Artificial Sequence: Synthetic oligonucleotide
  Antisense strand to SEQ ID NO: 1126024
aacugccuugaacuucucu

SEQ ID NO: 1126026 - RNA, 19 nt, Artificial Sequence
  Description of Artificial Sequence: Synthetic oligonucleotide
  Sense strand starting at position 798 of SEQ ID NO: 916043
ggaggcugcccugaucuuu

SEQ ID NO: 1126027 - RNA, 19 nt, Artificial Sequence
  Description of Artificial Sequence: Synthetic oligonucleotide
  Antisense strand to SEQ ID NO: 1126026
aaagaucagggcagccucc

SEQ ID NO: 1126028 - RNA, 19 nt, Artificial Sequence
  Description of Artificial Sequence: Synthetic oligonucleotide
  Sense strand starting at position 2290 of SEQ ID NO: 916043
acaguucuccacugacuuu

SEQ ID NO: 1126029 - RNA, 19 nt, Artificial Sequence
  Description of Artificial Sequence: Synthetic oligonucleotide
  Antisense strand to SEQ ID NO: 1126028
aaagucaguggagaacugu

SEQ ID NO: 1126030 - RNA, 19 nt, Artificial Sequence
  Description of Artificial Sequence: Synthetic oligonucleotide
  Sense strand starting at position 2297 of SEQ ID NO: 916043
uccacugacuuucuagaga

SEQ ID NO: 1126031 - RNA, 19 nt, Artificial Sequence
  Description of Artificial Sequence: Synthetic oligonucleotide
  Antisense strand to SEQ ID NO: 1126030
ucucuagaaagucagugga

SEQ ID NO: 1126032 - RNA, 19 nt, Artificial Sequence
  Description of Artificial Sequence: Synthetic oligonucleotide
  Sense strand starting at position 2345 of SEQ ID NO: 916043
uguugauggcugcaacuuu

SEQ ID NO: 1126033 - RNA, 19 nt, Artificial Sequence
  Description of Artificial Sequence: Synthetic oligonucleotide
  Antisense strand to SEQ ID NO: 1126032
aaaguugcagccaucaaca

SEQ ID NO: 1126034 - RNA, 19 nt, Artificial Sequence
  Description of Artificial Sequence: Synthetic oligonucleotide
  Sense strand starting at position 2482 of SEQ ID NO: 916043
ugcugaguccucuaaggac

SEQ ID NO: 1126035 - RNA, 19 nt, Artificial Sequence
  Description of Artificial Sequence: Synthetic oligonucleotide
  Antisense strand to SEQ ID NO: 1126034
guccuuagaggacucagca

SEQ ID NO: 1126036 - RNA, 19 nt, Artificial Sequence
  Description of Artificial Sequence: Synthetic oligonucleotide
  Sense strand starting at position 2500 of SEQ ID NO: 916043
cggagagucuagcugggau

SEQ ID NO: 1126037 - RNA, 19 nt, Artificial Sequence
  Description of Artificial Sequence: Synthetic oligonucleotide
  Antisense strand to SEQ ID NO: 1126036
aucccagcuagacucuccg

SEQ ID NO: 1126038 - RNA, 19 nt, Artificial Sequence
  Description of Artificial Sequence: Synthetic oligonucleotide
  Sense strand starting at position 2502 of SEQ ID NO: 916043
gagagucuagcugggauga

SEQ ID NO: 1126039 - RNA, 19 nt, Artificial Sequence
  Description of Artificial Sequence: Synthetic oligonucleotide
  Antisense strand to SEQ ID NO: 1126038
ucaucccagcuagacucuc

SEQ ID NO: 1126040 - RNA, 19 nt, Artificial Sequence
  Description of Artificial Sequence: Synthetic oligonucleotide
  Sense strand starting at position 2503 of SEQ ID NO: 916043
agagucuagcugggaugaa

SEQ ID NO: 1126041 - RNA, 19 nt, Artificial Sequence
  Description of Artificial Sequence: Synthetic oligonucleotide
  Antisense strand to SEQ ID NO: 1126040
uucaucccagcuagacucu

SEQ ID NO: 1126042 - RNA, 19 nt, Artificial Sequence
  Description of Artificial Sequence: Synthetic oligonucleotide
  Sense strand starting at position 2550 of SEQ ID NO: 916043
gaacguuaugagcggagaa

SEQ ID NO: 1126043 - RNA, 19 nt, Artificial Sequence
  Description of Artificial Sequence: Synthetic oligonucleotide
  Antisense strand to SEQ ID NO: 1126042
uucuccgcucauaacguuc

SEQ ID NO: 1126044 - RNA, 19 nt, Artificial Sequence
  Description of Artificial Sequence: Synthetic oligonucleotide
  Sense strand starting at position 2551 of SEQ ID NO: 916043
aacguuaugagcggagaaa

SEQ ID NO: 1126045 - RNA, 19 nt, Artificial Sequence
  Description of Artificial Sequence: Synthetic oligonucleotide
  Antisense strand to SEQ ID NO: 1126044
uuucuccgcucauaacguu

SEQ ID NO: 1126046 - RNA, 19 nt, Artificial Sequence
  Description of Artificial Sequence: Synthetic oligonucleotide
  Sense strand starting at position 2552 of SEQ ID NO: 916043
acguuaugagcggagaaau

SEQ ID NO: 1126047 - RNA, 19 nt, Artificial Sequence
  Description of Artificial Sequence: Synthetic oligonucleotide
  Antisense strand to SEQ ID NO: 1126046
auuucuccgcucauaacgu

SEQ ID NO: 1126048 - RNA, 19 nt, Artificial Sequence
  Description of Artificial Sequence: Synthetic oligonucleotide
  Sense strand starting at position 2563 of SEQ ID NO: 916043
ggagaaauacaaggugcua

SEQ ID NO: 1126049 - RNA, 19 nt, Artificial Sequence
  Description of Artificial Sequence: Synthetic oligonucleotide
  Antisense strand to SEQ ID NO: 1126048
uagcaccuuguauuucucc

SEQ ID NO: 1126050 - RNA, 19 nt, Artificial Sequence
  Description of Artificial Sequence: Synthetic oligonucleotide
  Sense strand starting at position 2681 of SEQ ID NO: 916043
ucuccuuucccagaggcua

SEQ ID NO: 1126051 - RNA, 19 nt, Artificial Sequence
  Description of Artificial Sequence: Synthetic oligonucleotide
  Antisense strand to SEQ ID NO: 1126050
uagccucugggaaaggaga

SEQ ID NO: 1126052 - RNA, 19 nt, Artificial Sequence
  Description of Artificial Sequence: Synthetic oligonucleotide
  Sense strand starting at position 2820 of SEQ ID NO: 916043
gggagauaaugagaggauu

SEQ ID NO: 1126053 - RNA, 19 nt, Artificial Sequence
  Description of Artificial Sequence: Synthetic oligonucleotide
  Antisense strand to SEQ ID NO: 1126052
aauccucucauuaucuccc

SEQ ID NO: 1126054 - RNA, 19 nt, Artificial Sequence
  Description of Artificial Sequence: Synthetic oligonucleotide
  Sense strand starting at position 2900 of SEQ ID NO: 916043
aguccugugaagugagaua

SEQ ID NO: 1126055 - RNA, 19 nt, Artificial Sequence
  Description of Artificial Sequence: Synthetic oligonucleotide
  Antisense strand to SEQ ID NO: 1126054
uaucucacuucacaggacu

SEQ ID NO: 1126056 - RNA, 19 nt, Artificial Sequence
  Description of Artificial Sequence: Synthetic oligonucleotide
  Sense strand starting at position 2932 of SEQ ID NO: 916043
auguuaacacccggaagua

SEQ ID NO: 1126057 - RNA, 19 nt, Artificial Sequence
  Description of Artificial Sequence: Synthetic oligonucleotide
  Antisense strand to SEQ ID NO: 1126056
uacuuccggguguuaacau

SEQ ID NO: 1126058 - RNA, 19 nt, Artificial Sequence
  Description of Artificial Sequence: Synthetic oligonucleotide
  Sense strand starting at position 2947 of SEQ ID NO: 916043
aguagaagcugcuuugaag

SEQ ID NO: 1126059 - RNA, 19 nt, Artificial Sequence
  Description of Artificial Sequence: Synthetic oligonucleotide
  Antisense strand to SEQ ID NO: 1126058
cuucaaagcagcuucuacu

SEQ ID NO: 1126060 - RNA, 19 nt, Artificial Sequence
  Description of Artificial Sequence: Synthetic oligonucleotide
  Sense strand starting at position 2972 of SEQ ID NO: 916043
aucacauuaugugcuaaga

SEQ ID NO: 1126061 - RNA, 19 nt, Artificial Sequence
  Description of Artificial Sequence: Synthetic oligonucleotide
  Antisense strand to SEQ ID NO: 1126060
ucuuagcacauaaugugau

SEQ ID NO: 1126062 - RNA, 19 nt, Artificial Sequence
  Description of Artificial Sequence: Synthetic oligonucleotide
  Sense strand starting at position 3101 of SEQ ID NO: 916043
guuauauccaacgaucgua

SEQ ID NO: 1126063 - RNA, 19 nt, Artificial Sequence
  Description of Artificial Sequence: Synthetic oligonucleotide
  Antisense strand to SEQ ID NO: 1126062
uacgaucguuggauauaac

SEQ ID NO: 1126064 - RNA, 19 nt, Artificial Sequence
  Description of Artificial Sequence: Synthetic oligonucleotide
  Sense strand starting at position 3182 of SEQ ID NO: 916043
augcucuacgcguauuuaa

SEQ ID NO: 1126065 - RNA, 19 nt, Artificial Sequence
  Description of Artificial Sequence: Synthetic oligonucleotide
  Antisense strand to SEQ ID NO: 1126064
uuaaauacgcguagagcau

SEQ ID NO: 1126066 - RNA, 19 nt, Artificial Sequence
  Description of Artificial Sequence: Synthetic oligonucleotide
  Sense strand starting at position 3237 of SEQ ID NO: 916043
caagcuuuccguuagaaca

SEQ ID NO: 1126067 - RNA, 19 nt, Artificial Sequence
  Description of Artificial Sequence: Synthetic oligonucleotide
  Antisense strand to SEQ ID NO: 1126066
uguucuaacggaaagcuug

SEQ ID NO: 1126068 - RNA, 19 nt, Artificial Sequence
  Description of Artificial Sequence: Synthetic oligonucleotide
  Sense strand starting at position 3251 of SEQ ID NO: 916043
gaacaagugcgcuuuguuu

SEQ ID NO: 1126069 - RNA, 19 nt, Artificial Sequence
  Description of Artificial Sequence: Synthetic oligonucleotide
  Antisense strand to SEQ ID NO: 1126068
aaacaaagcgcacuuguuc

SEQ ID NO: 1126070 - RNA, 19 nt, Artificial Sequence
  Description of Artificial Sequence: Synthetic oligonucleotide
  Sense strand starting at position 3397 of SEQ ID NO: 916043
gccuauuuauaugaaagga

SEQ ID NO: 1126071 - RNA, 19 nt, Artificial Sequence
  Description of Artificial Sequence: Synthetic oligonucleotide
  Antisense strand to SEQ ID NO: 1126070
uccuuucauauaaauaggc

SEQ ID NO: 1126072 - RNA, 19 nt, Artificial Sequence
  Description of Artificial Sequence: Synthetic oligonucleotide
  Sense strand starting at position 3786 of SEQ ID NO: 916043
aggugauuauuugauugau

SEQ ID NO: 1126073 - RNA, 19 nt, Artificial Sequence
  Description of Artificial Sequence: Synthetic oligonucleotide
  Antisense strand to SEQ ID NO: 1126072
aucaaucaaauaaucaccu

SEQ ID NO: 1126074 - RNA, 19 nt, Artificial Sequence
  Description of Artificial Sequence: Synthetic oligonucleotide
  Sense strand starting at position 3796 of SEQ ID NO: 916043
uugauugauugguuuguua

SEQ ID NO: 1126075 - RNA, 19 nt, Artificial Sequence
  Description of Artificial Sequence: Synthetic oligonucleotide
  Antisense strand to SEQ ID NO: 1126074
uaacaaaccaaucaaucaa

SEQ ID NO: 1126076 - RNA, 19 nt, Artificial Sequence
  Description of Artificial Sequence: Synthetic oligonucleotide
  Sense strand starting at position 3798 of SEQ ID NO: 916043
gauugauugguuuguuauu

SEQ ID NO: 1126077 - RNA, 19 nt, Artificial Sequence
  Description of Artificial Sequence: Synthetic oligonucleotide
  Antisense strand to SEQ ID NO: 1126076
aauaacaaaccaaucaauc

SEQ ID NO: 1126078 - RNA, 19 nt, Artificial Sequence
  Description of Artificial Sequence: Synthetic oligonucleotide
  Sense strand starting at position 4 of SEQ ID NO: 916044
gaaagagaggacuguguuu

SEQ ID NO: 1126079 - RNA, 19 nt, Artificial Sequence
  Description of Artificial Sequence: Synthetic oligonucleotide
  Antisense strand to SEQ ID NO: 1126078
aaacacaguccucucuuuc

SEQ ID NO: 1126080 - RNA, 19 nt, Artificial Sequence
  Description of Artificial Sequence: Synthetic oligonucleotide
  Sense strand starting at position 11 of SEQ ID NO: 916044
aggacuguguuucuccauu

SEQ ID NO: 1126081 - RNA, 19 nt, Artificial Sequence
  Description of Artificial Sequence: Synthetic oligonucleotide
  Antisense strand to SEQ ID NO: 1126080
aauggagaaacacaguccu

SEQ ID NO: 1126082 - RNA, 19 nt, Artificial Sequence
  Description of Artificial Sequence: Synthetic oligonucleotide
  Sense strand starting at position 76 of SEQ ID NO: 916044
agccuuuauuauguuggau

SEQ ID NO: 1126083 - RNA, 19 nt, Artificial Sequence
  Description of Artificial Sequence: Synthetic oligonucleotide
  Antisense strand to SEQ ID NO: 1126082
auccaacauaauaaaggcu

SEQ ID NO: 1126084 - RNA, 19 nt, Artificial Sequence
  Description of Artificial Sequence: Synthetic oligonucleotide
  Sense strand starting at position 88 of SEQ ID NO: 916044
guuggauuauaguuacaua

SEQ ID NO: 1126085 - RNA, 19 nt, Artificial Sequence
  Description of Artificial Sequence: Synthetic oligonucleotide
  Antisense strand to SEQ ID NO: 1126084
uauguaacuauaauccaac

SEQ ID NO: 1126086 - RNA, 19 nt, Artificial Sequence
  Description of Artificial Sequence: Synthetic oligonucleotide
  Sense strand starting at position 113 of SEQ ID NO: 916044
agcuauuucucccaaugga

SEQ ID NO: 1126087 - RNA, 19 nt, Artificial Sequence
  Description of Artificial Sequence: Synthetic oligonucleotide
  Antisense strand to SEQ ID NO: 1126086
uccauugggagaaauagcu

SEQ ID NO: 1126088 - RNA, 19 nt, Artificial Sequence
  Description of Artificial Sequence: Synthetic oligonucleotide
  Sense strand starting at position 186 of SEQ ID NO: 916044
cuacauccugugcauugaa

SEQ ID NO: 1126089 - RNA, 19 nt, Artificial Sequence
  Description of Artificial Sequence: Synthetic oligonucleotide
  Antisense strand to SEQ ID NO: 1126088
uucaaugcacaggauguag

SEQ ID NO: 1126090 - RNA, 19 nt, Artificial Sequence
  Description of Artificial Sequence: Synthetic oligonucleotide
  Sense strand starting at position 230 of SEQ ID NO: 916044
uagcucugggagugaagaa

SEQ ID NO: 1126091 - RNA, 19 nt, Artificial Sequence
  Description of Artificial Sequence: Synthetic oligonucleotide
  Antisense strand to SEQ ID NO: 1126090
uucuucacucccagagcua

SEQ ID NO: 1126092 - RNA, 19 nt, Artificial Sequence
  Description of Artificial Sequence: Synthetic oligonucleotide
  Sense strand starting at position 335 of SEQ ID NO: 916044
ucaaaucccguuuaucuga

SEQ ID NO: 1126093 - RNA, 19 nt, Artificial Sequence
  Description of Artificial Sequence: Synthetic oligonucleotide
  Antisense strand to SEQ ID NO: 1126092
ucagauaaacgggauuuga

SEQ ID NO: 1126094 - RNA, 19 nt, Artificial Sequence
  Description of Artificial Sequence: Synthetic oligonucleotide
  Sense strand starting at position 382 of SEQ ID NO: 916044
uagguugacucacuagagu

SEQ ID NO: 1126095 - RNA, 19 nt, Artificial Sequence
  Description of Artificial Sequence: Synthetic oligonucleotide
  Antisense strand to SEQ ID NO: 1126094
acucuagugagucaaccua

SEQ ID NO: 1126096 - RNA, 19 nt, Artificial Sequence
  Description of Artificial Sequence: Synthetic oligonucleotide
  Sense strand starting at position 560 of SEQ ID NO: 916044
aagacaugcccaugaugag

SEQ ID NO: 1126097 - RNA, 19 nt, Artificial Sequence
  Description of Artificial Sequence: Synthetic oligonucleotide
  Antisense strand to SEQ ID NO: 1126096
cucaucaugggcaugucuu

SEQ ID NO: 1126098 - RNA, 19 nt, Artificial Sequence
  Description of Artificial Sequence: Synthetic oligonucleotide
  Sense strand starting at position 588 of SEQ ID NO: 916044
ugagaagcauuaccuugau

SEQ ID NO: 1126099 - RNA, 19 nt, Artificial Sequence
  Description of Artificial Sequence: Synthetic oligonucleotide
  Antisense strand to SEQ ID NO: 1126098
aucaagguaaugcuucuca

SEQ ID NO: 1126100 - RNA, 19 nt, Artificial Sequence
  Description of Artificial Sequence: Synthetic oligonucleotide
  Sense strand starting at position 591 of SEQ ID NO: 916044
gaagcauuaccuugaugag

SEQ ID NO: 1126101 - RNA, 19 nt, Artificial Sequence
  Description of Artificial Sequence: Synthetic oligonucleotide
  Antisense strand to SEQ ID NO: 1126100
cucaucaagguaaugcuuc

SEQ ID NO: 1126102 - RNA, 19 nt, Artificial Sequence
  Description of Artificial Sequence: Synthetic oligonucleotide
  Sense strand starting at position 727 of SEQ ID NO: 916044
gaaggaaaguuugaggaaa

SEQ ID NO: 1126103 - RNA, 19 nt, Artificial Sequence
  Description of Artificial Sequence: Synthetic oligonucleotide
  Antisense strand to SEQ ID NO: 1126102
uuuccucaaacuuuccuuc

SEQ ID NO: 1126104 - RNA, 19 nt, Artificial Sequence
  Description of Artificial Sequence: Synthetic oligonucleotide
  Sense strand starting at position 740 of SEQ ID NO: 916044
aggaaauggagguguguga

SEQ ID NO: 1126105 - RNA, 19 nt, Artificial Sequence
  Description of Artificial Sequence: Synthetic oligonucleotide
  Antisense strand to SEQ ID NO: 1126104
ucacacaccuccauuuccu

SEQ ID NO: 1126106 - RNA, 19 nt, Artificial Sequence
  Description of Artificial Sequence: Synthetic oligonucleotide
  Sense strand starting at position 744 of SEQ ID NO: 916044
aauggaggugugugagaga

SEQ ID NO: 1126107 - RNA, 19 nt, Artificial Sequence
  Description of Artificial Sequence: Synthetic oligonucleotide
  Antisense strand to SEQ ID NO: 1126106
ucucucacacaccuccauu

SEQ ID NO: 1126108 - RNA, 19 nt, Artificial Sequence
  Description of Artificial Sequence: Synthetic oligonucleotide
  Sense strand starting at position 763 of SEQ ID NO: 916044
gagaaaugcccacacugua

SEQ ID NO: 1126109 - RNA, 19 nt, Artificial Sequence
  Description of Artificial Sequence: Synthetic oligonucleotide
  Antisense strand to SEQ ID NO: 1126108
uacagugugggcauuucuc

SEQ ID NO: 1126110 - RNA, 19 nt, Artificial Sequence
  Description of Artificial Sequence: Synthetic oligonucleotide
  Sense strand starting at position 823 of SEQ ID NO: 916044
gacgcauacuuacuugaca

SEQ ID NO: 1126111 - RNA, 19 nt, Artificial Sequence
  Description of Artificial Sequence: Synthetic oligonucleotide
  Antisense strand to SEQ ID NO: 1126110
ugucaaguaaguaugcguc

SEQ ID NO: 1126112 - RNA, 19 nt, Artificial Sequence
  Description of Artificial Sequence: Synthetic oligonucleotide
  Sense strand starting at position 824 of SEQ ID NO: 916044
acgcauacuuacuugacaa

SEQ ID NO: 1126113 - RNA, 19 nt, Artificial Sequence
  Description of Artificial Sequence: Synthetic oligonucleotide
  Antisense strand to SEQ ID NO: 1126112
uugucaaguaaguaugcgu

SEQ ID NO: 1126114 - RNA, 19 nt, Artificial Sequence
  Description of Artificial Sequence: Synthetic oligonucleotide
  Sense strand starting at position 1050 of SEQ ID NO: 916044
aagagcuaauucuugggua

SEQ ID NO: 1126115 - RNA, 19 nt, Artificial Sequence
  Description of Artificial Sequence: Synthetic oligonucleotide
  Antisense strand to SEQ ID NO: 1126114
uacccaagaauuagcucuu

SEQ ID NO: 1126116 - RNA, 19 nt, Artificial Sequence
  Description of Artificial Sequence: Synthetic oligonucleotide
  Sense strand starting at position 1253 of SEQ ID NO: 916044
agaauucuaaggugagggu

SEQ ID NO: 1126117 - RNA, 19 nt, Artificial Sequence
  Description of Artificial Sequence: Synthetic oligonucleotide
  Antisense strand to SEQ ID NO: 1126116
acccucaccuuagaauucu

SEQ ID NO: 1126118 - RNA, 19 nt, Artificial Sequence
  Description of Artificial Sequence: Synthetic oligonucleotide
  Sense strand starting at position 1407 of SEQ ID NO: 916044
gcacgauccggcucaguuu

SEQ ID NO: 1126119 - RNA, 19 nt, Artificial Sequence
  Description of Artificial Sequence: Synthetic oligonucleotide
  Antisense strand to SEQ ID NO: 1126118
aaacugagccggaucgugc

SEQ ID NO: 1126120 - RNA, 19 nt, Artificial Sequence
  Description of Artificial Sequence: Synthetic oligonucleotide
  Sense strand starting at position 1474 of SEQ ID NO: 916044
ggaguauaaguauacucuu

SEQ ID NO: 1126121 - RNA, 19 nt, Artificial Sequence
  Description of Artificial Sequence: Synthetic oligonucleotide
  Antisense strand to SEQ ID NO: 1126120
aagaguauacuuauacucc

SEQ ID NO: 1126122 - RNA, 19 nt, Artificial Sequence
  Description of Artificial Sequence: Synthetic oligonucleotide
  Sense strand starting at position 2026 of SEQ ID NO: 916044
ucuauuggucaacgucaga

SEQ ID NO: 1126123 - RNA, 19 nt, Artificial Sequence
  Description of Artificial Sequence: Synthetic oligonucleotide
  Antisense strand to SEQ ID NO: 1126122
ucugacguugaccaauaga

SEQ ID NO: 1126124 - RNA, 19 nt, Artificial Sequence
  Description of Artificial Sequence: Synthetic oligonucleotide
  Sense strand starting at position 2171 of SEQ ID NO: 916044
gguccaaguuuccuaccua

SEQ ID NO: 1126125 - RNA, 19 nt, Artificial Sequence
  Description of Artificial Sequence: Synthetic oligonucleotide
  Antisense strand to SEQ ID NO: 1126124
uagguaggaaacuuggacc

SEQ ID NO: 1126126 - RNA, 19 nt, Artificial Sequence
  Description of Artificial Sequence: Synthetic oligonucleotide
  Sense strand starting at position 2191 of SEQ ID NO: 916044
gucucuagucuguagggau

SEQ ID NO: 1126127 - RNA, 19 nt, Artificial Sequence
  Description of Artificial Sequence: Synthetic oligonucleotide
  Antisense strand to SEQ ID NO: 1126126
aucccuacagacuagagac

SEQ ID NO: 1126128 - RNA, 19 nt, Artificial Sequence
  Description of Artificial Sequence: Synthetic oligonucleotide
  Sense strand starting at position 2428 of SEQ ID NO: 916044
ugagaaguuccugguuuaa

SEQ ID NO: 1126129 - RNA, 19 nt, Artificial Sequence
  Description of Artificial Sequence: Synthetic oligonucleotide
  Antisense strand to SEQ ID NO: 1126128
uuaaaccaggaacuucuca

SEQ ID NO: 1126130 - RNA, 19 nt, Artificial Sequence
  Description of Artificial Sequence: Synthetic oligonucleotide
  Sense strand starting at position 2430 of SEQ ID NO: 916044
agaaguuccugguuuaauu

SEQ ID NO: 1126131 - RNA, 19 nt, Artificial Sequence
  Description of Artificial Sequence: Synthetic oligonucleotide
  Antisense strand to SEQ ID NO: 1126130
aauuaaaccaggaacuucu

SEQ ID NO: 1126132 - RNA, 19 nt, Artificial Sequence
  Description of Artificial Sequence: Synthetic oligonucleotide
  Sense strand starting at position 2520 of SEQ ID NO: 916044
agugcaucaagaugagagu

SEQ ID NO: 1126133 - RNA, 19 nt, Artificial Sequence
  Description of Artificial Sequence: Synthetic oligonucleotide
  Antisense strand to SEQ ID NO: 1126132
acucucaucuugaugcacu

SEQ ID NO: 1126134 - RNA, 19 nt, Artificial Sequence
  Description of Artificial Sequence: Synthetic oligonucleotide
  Sense strand starting at position 2552 of SEQ ID NO: 916044
cagaaacugucauugagua

SEQ ID NO: 1126135 - RNA, 19 nt, Artificial Sequence
  Description of Artificial Sequence: Synthetic oligonucleotide
  Antisense strand to SEQ ID NO: 1126134
uacucaaugacaguuucug

SEQ ID NO: 1126136 - RNA, 19 nt, Artificial Sequence
  Description of Artificial Sequence: Synthetic oligonucleotide
  Sense strand starting at position 2553 of SEQ ID NO: 916044
agaaacugucauugaguag

SEQ ID NO: 1126137 - RNA, 19 nt, Artificial Sequence
  Description of Artificial Sequence: Synthetic oligonucleotide
  Antisense strand to SEQ ID NO: 1126136
cuacucaaugacaguuucu

SEQ ID NO: 1126138 - RNA, 19 nt, Artificial Sequence
  Description of Artificial Sequence: Synthetic oligonucleotide
  Sense strand starting at position 2598 of SEQ ID NO: 916044
ccaggaucccuuugucagu

SEQ ID NO: 1126139 - RNA, 19 nt, Artificial Sequence
  Description of Artificial Sequence: Synthetic oligonucleotide
  Antisense strand to SEQ ID NO: 1126138
acugacaaagggauccugg

SEQ ID NO: 1126140 - RNA, 19 nt, Artificial Sequence
  Description of Artificial Sequence: Synthetic oligonucleotide
  Sense strand starting at position 2668 of SEQ ID NO: 916044
gaggaagggcuaugcaaau

SEQ ID NO: 1126141 - RNA, 19 nt, Artificial Sequence
  Description of Artificial Sequence: Synthetic oligonucleotide
  Antisense strand to SEQ ID NO: 1126140
auuugcauagcccuuccuc

SEQ ID NO: 1126142 - RNA, 19 nt, Artificial Sequence
  Description of Artificial Sequence: Synthetic oligonucleotide
  Sense strand starting at position 2832 of SEQ ID NO: 916044
aagguauguguggauaugu

SEQ ID NO: 1126143 - RNA, 19 nt, Artificial Sequence
  Description of Artificial Sequence: Synthetic oligonucleotide
  Antisense strand to SEQ ID NO: 1126142
acauauccacacauaccuu

SEQ ID NO: 1126144 - RNA, 19 nt, Artificial Sequence
  Description of Artificial Sequence: Synthetic oligonucleotide
  Sense strand starting at position 2902 of SEQ ID NO: 916044
guccuccuaaugggagaua

SEQ ID NO: 1126145 - RNA, 19 nt, Artificial Sequence
  Description of Artificial Sequence: Synthetic oligonucleotide
  Antisense strand to SEQ ID NO: 1126144
uaucucccauuaggaggac

SEQ ID NO: 1126146 - RNA, 19 nt, Artificial Sequence
  Description of Artificial Sequence: Synthetic oligonucleotide
  Sense strand starting at position 2913 of SEQ ID NO: 916044
gggagauagcggcaauauu

SEQ ID NO: 1126147 - RNA, 19 nt, Artificial Sequence
  Description of Artificial Sequence: Synthetic oligonucleotide
  Antisense strand to SEQ ID NO: 1126146
aauauugccgcuaucuccc

SEQ ID NO: 1126148 - RNA, 19 nt, Artificial Sequence
  Description of Artificial Sequence: Synthetic oligonucleotide
  Sense strand starting at position 3117 of SEQ ID NO: 916044
gugaaaugugcaggagacu

SEQ ID NO: 1126149 - RNA, 19 nt, Artificial Sequence
  Description of Artificial Sequence: Synthetic oligonucleotide
  Antisense strand to SEQ ID NO: 1126148
agucuccugcacauuucac

SEQ ID NO: 1126150 - RNA, 19 nt, Artificial Sequence
  Description of Artificial Sequence: Synthetic oligonucleotide
  Sense strand starting at position 3176 of SEQ ID NO: 916044
ggagucagagaauguggua

SEQ ID NO: 1126151 - RNA, 19 nt, Artificial Sequence
  Description of Artificial Sequence: Synthetic oligonucleotide
  Antisense strand to SEQ ID NO: 1126150
uaccacauucucugacucc

SEQ ID NO: 1126152 - RNA, 19 nt, Artificial Sequence
  Description of Artificial Sequence: Synthetic oligonucleotide
  Sense strand starting at position 3188 of SEQ ID NO: 916044
ugugguauuggguaagaac

SEQ ID NO: 1126153 - RNA, 19 nt, Artificial Sequence
  Description of Artificial Sequence: Synthetic oligonucleotide
  Antisense strand to SEQ ID NO: 1126152
guucuuacccaauaccaca

SEQ ID NO: 1126154 - RNA, 19 nt, Artificial Sequence
  Description of Artificial Sequence: Synthetic oligonucleotide
  Sense strand starting at position 3331 of SEQ ID NO: 916044
gggauugggccucgugaca

SEQ ID NO: 1126155 - RNA, 19 nt, Artificial Sequence
  Description of Artificial Sequence: Synthetic oligonucleotide
  Antisense strand to SEQ ID NO: 1126154
ugucacgaggcccaauccc

SEQ ID NO: 1126156 - RNA, 19 nt, Artificial Sequence
  Description of Artificial Sequence: Synthetic oligonucleotide
  Sense strand starting at position 3513 of SEQ ID NO: 916044
aggguuacagcacacauua

SEQ ID NO: 1126157 - RNA, 19 nt, Artificial Sequence
  Description of Artificial Sequence: Synthetic oligonucleotide
  Antisense strand to SEQ ID NO: 1126156
uaaugugugcuguaacccu

SEQ ID NO: 1126158 - RNA, 19 nt, Artificial Sequence
  Description of Artificial Sequence: Synthetic oligonucleotide
  Sense strand starting at position 288 of SEQ ID NO: 916045
cgagcugucuccugagucu

SEQ ID NO: 1126159 - RNA, 19 nt, Artificial Sequence
  Description of Artificial Sequence: Synthetic oligonucleotide
  Antisense strand to SEQ ID NO: 1126158
agacucaggagacagcucg

SEQ ID NO: 1126160 - RNA, 19 nt, Artificial Sequence
  Description of Artificial Sequence: Synthetic oligonucleotide
  Sense strand starting at position 448 of SEQ ID NO: 916045
ugaugagacacaugcggau

SEQ ID NO: 1126161 - RNA, 19 nt, Artificial Sequence
  Description of Artificial Sequence: Synthetic oligonucleotide
  Antisense strand to SEQ ID NO: 1126160
auccgcaugugucucauca

SEQ ID NO: 1126162 - RNA, 19 nt, Artificial Sequence
  Description of Artificial Sequence: Synthetic oligonucleotide
  Sense strand starting at position 468 of SEQ ID NO: 916045
augagacacgugcgcuaua

SEQ ID NO: 1126163 - RNA, 19 nt, Artificial Sequence
  Description of Artificial Sequence: Synthetic oligonucleotide
  Antisense strand to SEQ ID NO: 1126162
uauagcgcacgugucucau

SEQ ID NO: 1126164 - RNA, 19 nt, Artificial Sequence
  Description of Artificial Sequence: Synthetic oligonucleotide
  Sense strand starting at position 677 of SEQ ID NO: 916045
gguucugauccuggucacu

SEQ ID NO: 1126165 - RNA, 19 nt, Artificial Sequence
  Description of Artificial Sequence: Synthetic oligonucleotide
  Antisense strand to SEQ ID NO: 1126164
agugaccaggaucagaacc

SEQ ID NO: 1126166 - RNA, 19 nt, Artificial Sequence
  Description of Artificial Sequence: Synthetic oligonucleotide
  Sense strand starting at position 751 of SEQ ID NO: 916045
aggcguuugcaagauccca

SEQ ID NO: 1126167 - RNA, 19 nt, Artificial Sequence
  Description of Artificial Sequence: Synthetic oligonucleotide
  Antisense strand to SEQ ID NO: 1126166
ugggaucuugcaaacgccu

SEQ ID NO: 1126168 - RNA, 19 nt, Artificial Sequence
  Description of Artificial Sequence: Synthetic oligonucleotide
  Sense strand starting at position 988 of SEQ ID NO: 916045
ggcagugcuucccaagaga

SEQ ID NO: 1126169 - RNA, 19 nt, Artificial Sequence
  Description of Artificial Sequence: Synthetic oligonucleotide
  Antisense strand to SEQ ID NO: 1126168
ucucuugggaagcacugcc

SEQ ID NO: 1126170 - RNA, 19 nt, Artificial Sequence
  Description of Artificial Sequence: Synthetic oligonucleotide
  Sense strand starting at position 1016 of SEQ ID NO: 916045
ggcuccaguuccuacuauu

SEQ ID NO: 1126171 - RNA, 19 nt, Artificial Sequence
  Description of Artificial Sequence: Synthetic oligonucleotide
  Antisense strand to SEQ ID NO: 1126170
aauaguaggaacuggagcc

SEQ ID NO: 1126172 - RNA, 19 nt, Artificial Sequence
  Description of Artificial Sequence: Synthetic oligonucleotide
  Sense strand starting at position 1019 of SEQ ID NO: 916045
uccaguuccuacuauuuga

SEQ ID NO: 1126173 - RNA, 19 nt, Artificial Sequence
  Description of Artificial Sequence: Synthetic oligonucleotide
  Antisense strand to SEQ ID NO: 1126172
ucaaauaguaggaacugga

SEQ ID NO: 1126174 - RNA, 19 nt, Artificial Sequence
  Description of Artificial Sequence: Synthetic oligonucleotide
  Sense strand starting at position 1175 of SEQ ID NO: 916045
ggugucuaguccuggagag

SEQ ID NO: 1126175 - RNA, 19 nt, Artificial Sequence
  Description of Artificial Sequence: Synthetic oligonucleotide
  Antisense strand to SEQ ID NO: 1126174
cucuccaggacuagacacc

SEQ ID NO: 1126176 - RNA, 19 nt, Artificial Sequence
  Description of Artificial Sequence: Synthetic oligonucleotide
  Sense strand starting at position 1176 of SEQ ID NO: 916045
gugucuaguccuggagaga

SEQ ID NO: 1126177 - RNA, 19 nt, Artificial Sequence
  Description of Artificial Sequence: Synthetic oligonucleotide
  Antisense strand to SEQ ID NO: 1126176
ucucuccaggacuagacac

SEQ ID NO: 1126178 - RNA, 19 nt, Artificial Sequence
  Description of Artificial Sequence: Synthetic oligonucleotide
  Sense strand starting at position 1177 of SEQ ID NO: 916045
ugucuaguccuggagagag

SEQ ID NO: 1126179 - RNA, 19 nt, Artificial Sequence
  Description of Artificial Sequence: Synthetic oligonucleotide
  Antisense strand to SEQ ID NO: 1126178
cucucuccaggacuagaca

SEQ ID NO: 1126180 - RNA, 19 nt, Artificial Sequence
  Description of Artificial Sequence: Synthetic oligonucleotide
  Sense strand starting at position 1550 of SEQ ID NO: 916045
gagggaugaugacaaggaa

SEQ ID NO: 1126181 - RNA, 19 nt, Artificial Sequence
  Description of Artificial Sequence: Synthetic oligonucleotide
  Antisense strand to SEQ ID NO: 1126180
uuccuugucaucaucccuc

SEQ ID NO: 1126182 - RNA, 19 nt, Artificial Sequence
  Description of Artificial Sequence: Synthetic oligonucleotide
  Sense strand starting at position 1595 of SEQ ID NO: 916045
gaguccaucuuggaugcaa

SEQ ID NO: 1126183 - RNA, 19 nt, Artificial Sequence
  Description of Artificial Sequence: Synthetic oligonucleotide
  Antisense strand to SEQ ID NO: 1126182
uugcauccaagauggacuc

SEQ ID NO: 1126184 - RNA, 19 nt, Artificial Sequence
  Description of Artificial Sequence: Synthetic oligonucleotide
  Sense strand starting at position 1597 of SEQ ID NO: 916045
guccaucuuggaugcaaau

SEQ ID NO: 1126185 - RNA, 19 nt, Artificial Sequence
  Description of Artificial Sequence: Synthetic oligonucleotide
  Antisense strand to SEQ ID NO: 1126184
auuugcauccaagauggac

SEQ ID NO: 1126186 - RNA, 19 nt, Artificial Sequence
  Description of Artificial Sequence: Synthetic oligonucleotide
  Sense strand starting at position 1935 of SEQ ID NO: 916045
aguccuaccuggcaacaaa

SEQ ID NO: 1126187 - RNA, 19 nt, Artificial Sequence
  Description of Artificial Sequence: Synthetic oligonucleotide
  Antisense strand to SEQ ID NO: 1126186
uuuguugccagguaggacu

SEQ ID NO: 1126188 - RNA, 19 nt, Artificial Sequence
  Description of Artificial Sequence: Synthetic oligonucleotide
  Sense strand starting at position 2017 of SEQ ID NO: 916045
cuguuugcucuuugggacu

SEQ ID NO: 1126189 - RNA, 19 nt, Artificial Sequence
  Description of Artificial Sequence: Synthetic oligonucleotide
  Antisense strand to SEQ ID NO: 1126188
agucccaaagagcaaacag

SEQ ID NO: 1126190 - RNA, 19 nt, Artificial Sequence
  Description of Artificial Sequence: Synthetic oligonucleotide
  Sense strand starting at position 2102 of SEQ ID NO: 916045
acaccucaguguccaagau

SEQ ID NO: 1126191 - RNA, 19 nt, Artificial Sequence
  Description of Artificial Sequence: Synthetic oligonucleotide
  Antisense strand to SEQ ID NO: 1126190
aucuuggacacugaggugu

SEQ ID NO: 1126192 - RNA, 19 nt, Artificial Sequence
  Description of Artificial Sequence: Synthetic oligonucleotide
  Sense strand starting at position 2172 of SEQ ID NO: 916045
aggucaacguuugcaaaca

SEQ ID NO: 1126193 - RNA, 19 nt, Artificial Sequence
  Description of Artificial Sequence: Synthetic oligonucleotide
  Antisense strand to SEQ ID NO: 1126192
uguuugcaaacguugaccu

SEQ ID NO: 1126194 - RNA, 19 nt, Artificial Sequence
  Description of Artificial Sequence: Synthetic oligonucleotide
  Sense strand starting at position 2173 of SEQ ID NO: 916045
ggucaacguuugcaaacaa

SEQ ID NO: 1126195 - RNA, 19 nt, Artificial Sequence
  Description of Artificial Sequence: Synthetic oligonucleotide
  Antisense strand to SEQ ID NO: 1126194
uuguuugcaaacguugacc

SEQ ID NO: 1126196 - RNA, 19 nt, Artificial Sequence
  Description of Artificial Sequence: Synthetic oligonucleotide
  Sense strand starting at position 2300 of SEQ ID NO: 916045
ugggaagucuguuuccgac

SEQ ID NO: 1126197 - RNA, 19 nt, Artificial Sequence
  Description of Artificial Sequence: Synthetic oligonucleotide
  Antisense strand to SEQ ID NO: 1126196
gucggaaacagacuuccca

SEQ ID NO: 1126198 - RNA, 19 nt, Artificial Sequence
  Description of Artificial Sequence: Synthetic oligonucleotide
  Sense strand starting at position 2302 of SEQ ID NO: 916045
ggaagucuguuuccgacca

SEQ ID NO: 1126199 - RNA, 19 nt, Artificial Sequence
  Description of Artificial Sequence: Synthetic oligonucleotide
  Antisense strand to SEQ ID NO: 1126198
uggucggaaacagacuucc

SEQ ID NO: 1126200 - RNA, 19 nt, Artificial Sequence
  Description of Artificial Sequence: Synthetic oligonucleotide
  Sense strand starting at position 2303 of SEQ ID NO: 916045
gaagucuguuuccgaccaa

SEQ ID NO: 1126201 - RNA, 19 nt, Artificial Sequence
  Description of Artificial Sequence: Synthetic oligonucleotide
  Antisense strand to SEQ ID NO: 1126200
uuggucggaaacagacuuc

SEQ ID NO: 1126202 - RNA, 19 nt, Artificial Sequence
  Description of Artificial Sequence: Synthetic oligonucleotide
  Sense strand starting at position 2314 of SEQ ID NO: 916045
ccgaccaagugucagagaa

SEQ ID NO: 1126203 - RNA, 19 nt, Artificial Sequence
  Description of Artificial Sequence: Synthetic oligonucleotide
  Antisense strand to SEQ ID NO: 1126202
uucucugacacuuggucgg

SEQ ID NO: 1126204 - RNA, 19 nt, Artificial Sequence
  Description of Artificial Sequence: Synthetic oligonucleotide
  Sense strand starting at position 2316 of SEQ ID NO: 916045
gaccaagugucagagaaga

SEQ ID NO: 1126205 - RNA, 19 nt, Artificial Sequence
  Description of Artificial Sequence: Synthetic oligonucleotide
  Antisense strand to SEQ ID NO: 1126204
ucuucucugacacuugguc

SEQ ID NO: 1126206 - RNA, 19 nt, Artificial Sequence
  Description of Artificial Sequence: Synthetic oligonucleotide
  Sense strand starting at position 2366 of SEQ ID NO: 916045
cuacgaaucccucaauguu

SEQ ID NO: 1126207 - RNA, 19 nt, Artificial Sequence
  Description of Artificial Sequence: Synthetic oligonucleotide
  Antisense strand to SEQ ID NO: 1126206
aacauugagggauucguag

SEQ ID NO: 1126208 - RNA, 19 nt, Artificial Sequence
  Description of Artificial Sequence: Synthetic oligonucleotide
  Sense strand starting at position 2439 of SEQ ID NO: 916045
acaacuucuggaggaguuu

SEQ ID NO: 1126209 - RNA, 19 nt, Artificial Sequence
  Description of Artificial Sequence: Synthetic oligonucleotide
  Antisense strand to SEQ ID NO: 1126208
aaacuccuccagaaguugu

SEQ ID NO: 1126210 - RNA, 19 nt, Artificial Sequence
  Description of Artificial Sequence: Synthetic oligonucleotide
  Sense strand starting at position 2448 of SEQ ID NO: 916045
ggaggaguuuccugggagc

SEQ ID NO: 1126211 - RNA, 19 nt, Artificial Sequence
  Description of Artificial Sequence: Synthetic oligonucleotide
  Antisense strand to SEQ ID NO: 1126210
gcucccaggaaacuccucc

SEQ ID NO: 1126212 - RNA, 19 nt, Artificial Sequence
  Description of Artificial Sequence: Synthetic oligonucleotide
  Sense strand starting at position 3360 of SEQ ID NO: 916045
cggccaaguucgguuugua

SEQ ID NO: 1126213 - RNA, 19 nt, Artificial Sequence
  Description of Artificial Sequence: Synthetic oligonucleotide
  Antisense strand to SEQ ID NO: 1126212
uacaaaccgaacuuggccg

SEQ ID NO: 1126214 - RNA, 19 nt, Artificial Sequence
  Description of Artificial Sequence: Synthetic oligonucleotide
  Sense strand starting at position 3363 of SEQ ID NO: 916045
ccaaguucgguuuguaaga

SEQ ID NO: 1126215 - RNA, 19 nt, Artificial Sequence
  Description of Artificial Sequence: Synthetic oligonucleotide
  Antisense strand to SEQ ID NO: 1126214
ucuuacaaaccgaacuugg

SEQ ID NO: 1126216 - RNA, 19 nt, Artificial Sequence
  Description of Artificial Sequence: Synthetic oligonucleotide
  Sense strand starting at position 3365 of SEQ ID NO: 916045
aaguucgguuuguaagaca

SEQ ID NO: 1126217 - RNA, 19 nt, Artificial Sequence
  Description of Artificial Sequence: Synthetic oligonucleotide
  Antisense strand to SEQ ID NO: 1126216
ugucuuacaaaccgaacuu

SEQ ID NO: 1126218 - RNA, 19 nt, Artificial Sequence
  Description of Artificial Sequence: Synthetic oligonucleotide
  Sense strand starting at position 3934 of SEQ ID NO: 916045
gguggcgagugguguauuu

SEQ ID NO: 1126219 - RNA, 19 nt, Artificial Sequence
  Description of Artificial Sequence: Synthetic oligonucleotide
  Antisense strand to SEQ ID NO: 1126218
aaauacaccacucgccacc

SEQ ID NO: 1126220 - RNA, 19 nt, Artificial Sequence
  Description of Artificial Sequence: Synthetic oligonucleotide
  Sense strand starting at position 3936 of SEQ ID NO: 916045
uggcgagugguguauuuaa

SEQ ID NO: 1126221 - RNA, 19 nt, Artificial Sequence
  Description of Artificial Sequence: Synthetic oligonucleotide
  Antisense strand to SEQ ID NO: 1126220
uuaaauacaccacucgcca

SEQ ID NO: 1126222 - RNA, 19 nt, Artificial Sequence
  Description of Artificial Sequence: Synthetic oligonucleotide
  Sense strand starting at position 3943 of SEQ ID NO: 916045
ugguguauuuaagcacgua

SEQ ID NO: 1126223 - RNA, 19 nt, Artificial Sequence
  Description of Artificial Sequence: Synthetic oligonucleotide
  Antisense strand to SEQ ID NO: 1126222
uacgugcuuaaauacacca

SEQ ID NO: 1126224 - RNA, 19 nt, Artificial Sequence
  Description of Artificial Sequence: Synthetic oligonucleotide
  Sense strand starting at position 3944 of SEQ ID NO: 916045
gguguauuuaagcacguag

SEQ ID NO: 1126225 - RNA, 19 nt, Artificial Sequence
  Description of Artificial Sequence: Synthetic oligonucleotide
  Antisense strand to SEQ ID NO: 1126224
cuacgugcuuaaauacacc

SEQ ID NO: 1126226 - RNA, 19 nt, Artificial Sequence
  Description of Artificial Sequence: Synthetic oligonucleotide
  Sense strand starting at position 3946 of SEQ ID NO: 916045
uguauuuaagcacguagau

SEQ ID NO: 1126227 - RNA, 19 nt, Artificial Sequence
  Description of Artificial Sequence: Synthetic oligonucleotide
  Antisense strand to SEQ ID NO: 1126226
aucuacgugcuuaaauaca

SEQ ID NO: 1126228 - RNA, 19 nt, Artificial Sequence
  Description of Artificial Sequence: Synthetic oligonucleotide
  Sense strand starting at position 3955 of SEQ ID NO: 916045
gcacguagaucauuccaga

SEQ ID NO: 1126229 - RNA, 19 nt, Artificial Sequence
  Description of Artificial Sequence: Synthetic oligonucleotide
  Antisense strand to SEQ ID NO: 1126228
ucuggaaugaucuacgugc

SEQ ID NO: 1126230 - RNA, 19 nt, Artificial Sequence
  Description of Artificial Sequence: Synthetic oligonucleotide
  Sense strand starting at position 279 of SEQ ID NO: 916046
cggcucaucccuuggagau

SEQ ID NO: 1126231 - RNA, 19 nt, Artificial Sequence
  Description of Artificial Sequence: Synthetic oligonucleotide
  Antisense strand to SEQ ID NO: 1126230
aucuccaagggaugagccg

SEQ ID NO: 1126232 - RNA, 19 nt, Artificial Sequence
  Description of Artificial Sequence: Synthetic oligonucleotide
  Sense strand starting at position 280 of SEQ ID NO: 916046
ggcucaucccuuggagaug

SEQ ID NO: 1126233 - RNA, 19 nt, Artificial Sequence
  Description of Artificial Sequence: Synthetic oligonucleotide
  Antisense strand to SEQ ID NO: 1126232
caucuccaagggaugagcc

SEQ ID NO: 1126234 - RNA, 19 nt, Artificial Sequence
  Description of Artificial Sequence: Synthetic oligonucleotide
  Sense strand starting at position 281 of SEQ ID NO: 916046
gcucaucccuuggagaugu

SEQ ID NO: 1126235 - RNA, 19 nt, Artificial Sequence
  Description of Artificial Sequence: Synthetic oligonucleotide
  Antisense strand to SEQ ID NO: 1126234
acaucuccaagggaugagc

SEQ ID NO: 1126236 - RNA, 19 nt, Artificial Sequence
  Description of Artificial Sequence: Synthetic oligonucleotide
  Sense strand starting at position 417 of SEQ ID NO: 916046
gggucacagucuggaaagu

SEQ ID NO: 1126237 - RNA, 19 nt, Artificial Sequence
  Description of Artificial Sequence: Synthetic oligonucleotide
  Antisense strand to SEQ ID NO: 1126236
acuuuccagacugugaccc

SEQ ID NO: 1126238 - RNA, 19 nt, Artificial Sequence
  Description of Artificial Sequence: Synthetic oligonucleotide
  Sense strand starting at position 613 of SEQ ID NO: 916046
gccucacuugcccaagaaa

SEQ ID NO: 1126239 - RNA, 19 nt, Artificial Sequence
  Description of Artificial Sequence: Synthetic oligonucleotide
  Antisense strand to SEQ ID NO: 1126238
uuucuugggcaagugaggc

SEQ ID NO: 1126240 - RNA, 19 nt, Artificial Sequence
  Description of Artificial Sequence: Synthetic oligonucleotide
  Sense strand starting at position 798 of SEQ ID NO: 916046
agggccuugggcugagaaa

SEQ ID NO: 1126241 - RNA, 19 nt, Artificial Sequence
  Description of Artificial Sequence: Synthetic oligonucleotide
  Antisense strand to SEQ ID NO: 1126240
uuucucagcccaaggcccu

SEQ ID NO: 1126242 - RNA, 19 nt, Artificial Sequence
  Description of Artificial Sequence: Synthetic oligonucleotide
  Sense strand starting at position 809 of SEQ ID NO: 916046
cugagaaagcuccguccca

SEQ ID NO: 1126243 - RNA, 19 nt, Artificial Sequence
  Description of Artificial Sequence: Synthetic oligonucleotide
  Antisense strand to SEQ ID NO: 1126242
ugggacggagcuuucucag

SEQ ID NO: 1126244 - RNA, 19 nt, Artificial Sequence
  Description of Artificial Sequence: Synthetic oligonucleotide
  Sense strand starting at position 810 of SEQ ID NO: 916046
ugagaaagcuccgucccau

SEQ ID NO: 1126245 - RNA, 19 nt, Artificial Sequence
  Description of Artificial Sequence: Synthetic oligonucleotide
  Antisense strand to SEQ ID NO: 1126244
augggacggagcuuucuca

SEQ ID NO: 1126246 - RNA, 19 nt, Artificial Sequence
  Description of Artificial Sequence: Synthetic oligonucleotide
  Sense strand starting at position 866 of SEQ ID NO: 916046
cucugauggugggaagcau

SEQ ID NO: 1126247 - RNA, 19 nt, Artificial Sequence
  Description of Artificial Sequence: Synthetic oligonucleotide
  Antisense strand to SEQ ID NO: 1126246
augcuucccaccaucagag

SEQ ID NO: 1126248 - RNA, 19 nt, Artificial Sequence
  Description of Artificial Sequence: Synthetic oligonucleotide
  Sense strand starting at position 976 of SEQ ID NO: 916046
gcgguacugugaagacguu

SEQ ID NO: 1126249 - RNA, 19 nt, Artificial Sequence
  Description of Artificial Sequence: Synthetic oligonucleotide
  Antisense strand to SEQ ID NO: 1126248
aacgucuucacaguaccgc

SEQ ID NO: 1126250 - RNA, 19 nt, Artificial Sequence
  Description of Artificial Sequence: Synthetic oligonucleotide
  Sense strand starting at position 1166 of SEQ ID NO: 916046
cgguuugaccagcauauaa

SEQ ID NO: 1126251 - RNA, 19 nt, Artificial Sequence
  Description of Artificial Sequence: Synthetic oligonucleotide
  Antisense strand to SEQ ID NO: 1126250
uuauaugcuggucaaaccg

SEQ ID NO: 1126252 - RNA, 19 nt, Artificial Sequence
  Description of Artificial Sequence: Synthetic oligonucleotide
  Sense strand starting at position 1168 of SEQ ID NO: 916046
guuugaccagcauauaaga

SEQ ID NO: 1126253 - RNA, 19 nt, Artificial Sequence
  Description of Artificial Sequence: Synthetic oligonucleotide
  Antisense strand to SEQ ID NO: 1126252
ucuuauaugcuggucaaac

SEQ ID NO: 1126254 - RNA, 19 nt, Artificial Sequence
  Description of Artificial Sequence: Synthetic oligonucleotide
  Sense strand starting at position 1187 of SEQ ID NO: 916046
uggauaaugaaauguagcu

SEQ ID NO: 1126255 - RNA, 19 nt, Artificial Sequence
  Description of Artificial Sequence: Synthetic oligonucleotide
  Antisense strand to SEQ ID NO: 1126254
agcuacauuucauuaucca

SEQ ID NO: 1126256 - RNA, 19 nt, Artificial Sequence
  Description of Artificial Sequence: Synthetic oligonucleotide
  Sense strand starting at position 1451 of SEQ ID NO: 916046
uugcuucuaugcgcucaaa

SEQ ID NO: 1126257 - RNA, 19 nt, Artificial Sequence
  Description of Artificial Sequence: Synthetic oligonucleotide
  Antisense strand to SEQ ID NO: 1126256
uuugagcgcauagaagcaa

SEQ ID NO: 1126258 - RNA, 19 nt, Artificial Sequence
  Description of Artificial Sequence: Synthetic oligonucleotide
  Sense strand starting at position 1452 of SEQ ID NO: 916046
ugcuucuaugcgcucaaau

SEQ ID NO: 1126259 - RNA, 19 nt, Artificial Sequence
  Description of Artificial Sequence: Synthetic oligonucleotide
  Antisense strand to SEQ ID NO: 1126258
auuugagcgcauagaagca

SEQ ID NO: 1126260 - RNA, 19 nt, Artificial Sequence
  Description of Artificial Sequence: Synthetic oligonucleotide
  Sense strand starting at position 1453 of SEQ ID NO: 916046
gcuucuaugcgcucaaauc

SEQ ID NO: 1126261 - RNA, 19 nt, Artificial Sequence
  Description of Artificial Sequence: Synthetic oligonucleotide
  Antisense strand to SEQ ID NO: 1126260
gauuugagcgcauagaagc

SEQ ID NO: 1126262 - RNA, 19 nt, Artificial Sequence
  Description of Artificial Sequence: Synthetic oligonucleotide
  Sense strand starting at position 1454 of SEQ ID NO: 916046
cuucuaugcgcucaaaucu

SEQ ID NO: 1126263 - RNA, 19 nt, Artificial Sequence
  Description of Artificial Sequence: Synthetic oligonucleotide
  Antisense strand to SEQ ID NO: 1126262
agauuugagcgcauagaag

SEQ ID NO: 1126264 - RNA, 19 nt, Artificial Sequence
  Description of Artificial Sequence: Synthetic oligonucleotide
  Sense strand starting at position 1497 of SEQ ID NO: 916046
acaggaaggccuuggagua

SEQ ID NO: 1126265 - RNA, 19 nt, Artificial Sequence
  Description of Artificial Sequence: Synthetic oligonucleotide
  Antisense strand to SEQ ID NO: 1126264
uacuccaaggccuuccugu

SEQ ID NO: 1126266 - RNA, 19 nt, Artificial Sequence
  Description of Artificial Sequence: Synthetic oligonucleotide
  Sense strand starting at position 1498 of SEQ ID NO: 916046
caggaaggccuuggaguau

SEQ ID NO: 1126267 - RNA, 19 nt, Artificial Sequence
  Description of Artificial Sequence: Synthetic oligonucleotide
  Antisense strand to SEQ ID NO: 1126266
auacuccaaggccuuccug

SEQ ID NO: 1126268 - RNA, 19 nt, Artificial Sequence
  Description of Artificial Sequence: Synthetic oligonucleotide
  Sense strand starting at position 1509 of SEQ ID NO: 916046
uggaguauuugagacccaa

SEQ ID NO: 1126269 - RNA, 19 nt, Artificial Sequence
  Description of Artificial Sequence: Synthetic oligonucleotide
  Antisense strand to SEQ ID NO: 1126268
uugggucucaaauacucca

SEQ ID NO: 1126270 - RNA, 19 nt, Artificial Sequence
  Description of Artificial Sequence: Synthetic oligonucleotide
  Sense strand starting at position 1649 of SEQ ID NO: 916046
ggaccagacucuuagcagu

SEQ ID NO: 1126271 - RNA, 19 nt, Artificial Sequence
  Description of Artificial Sequence: Synthetic oligonucleotide
  Antisense strand to SEQ ID NO: 1126270
acugcuaagagucuggucc

SEQ ID NO: 1126272 - RNA, 19 nt, Artificial Sequence
  Description of Artificial Sequence: Synthetic oligonucleotide
  Sense strand starting at position 1652 of SEQ ID NO: 916046
ccagacucuuagcagucua

SEQ ID NO: 1126273 - RNA, 19 nt, Artificial Sequence
  Description of Artificial Sequence: Synthetic oligonucleotide
  Antisense strand to SEQ ID NO: 1126272
uagacugcuaagagucugg

SEQ ID NO: 1126274 - RNA, 19 nt, Artificial Sequence
  Description of Artificial Sequence: Synthetic oligonucleotide
  Sense strand starting at position 1680 of SEQ ID NO: 916046
ggcucuguaucccaagaca

SEQ ID NO: 1126275 - RNA, 19 nt, Artificial Sequence
  Description of Artificial Sequence: Synthetic oligonucleotide
  Antisense strand to SEQ ID NO: 1126274
ugucuugggauacagagcc

SEQ ID NO: 1126276 - RNA, 19 nt, Artificial Sequence
  Description of Artificial Sequence: Synthetic oligonucleotide
  Sense strand starting at position 1713 of SEQ ID NO: 916046
ccacauaugggaugcaaca

SEQ ID NO: 1126277 - RNA, 19 nt, Artificial Sequence
  Description of Artificial Sequence: Synthetic oligonucleotide
  Antisense strand to SEQ ID NO: 1126276
uguugcaucccauaugugg

SEQ ID NO: 1126278 - RNA, 19 nt, Artificial Sequence
  Description of Artificial Sequence: Synthetic oligonucleotide
  Sense strand starting at position 1853 of SEQ ID NO: 916046
gccauuagcggguaaagga

SEQ ID NO: 1126279 - RNA, 19 nt, Artificial Sequence
  Description of Artificial Sequence: Synthetic oligonucleotide
  Antisense strand to SEQ ID NO: 1126278
uccuuuacccgcuaauggc

SEQ ID NO: 1126280 - RNA, 19 nt, Artificial Sequence
  Description of Artificial Sequence: Synthetic oligonucleotide
  Sense strand starting at position 1892 of SEQ ID NO: 916046
agcgguaaccauggagaau

SEQ ID NO: 1126281 - RNA, 19 nt, Artificial Sequence
  Description of Artificial Sequence: Synthetic oligonucleotide
  Antisense strand to SEQ ID NO: 1126280
auucuccaugguuaccgcu

SEQ ID NO: 1126282 - RNA, 19 nt, Artificial Sequence
  Description of Artificial Sequence: Synthetic oligonucleotide
  Sense strand starting at position 1893 of SEQ ID NO: 916046
gcgguaaccauggagaauu

SEQ ID NO: 1126283 - RNA, 19 nt, Artificial Sequence
  Description of Artificial Sequence: Synthetic oligonucleotide
  Antisense strand to SEQ ID NO: 1126282
aauucuccaugguuaccgc

SEQ ID NO: 1126284 - RNA, 19 nt, Artificial Sequence
  Description of Artificial Sequence: Synthetic oligonucleotide
  Sense strand starting at position 2428 of SEQ ID NO: 916046
ugaugagacacaugcggau

SEQ ID NO: 1126285 - RNA, 19 nt, Artificial Sequence
  Description of Artificial Sequence: Synthetic oligonucleotide
  Antisense strand to SEQ ID NO: 1126284
auccgcaugugucucauca

SEQ ID NO: 1126286 - RNA, 19 nt, Artificial Sequence
  Description of Artificial Sequence: Synthetic oligonucleotide
  Sense strand starting at position 2448 of SEQ ID NO: 916046
augagacacgugcgcuaua

SEQ ID NO: 1126287 - RNA, 19 nt, Artificial Sequence
  Description of Artificial Sequence: Synthetic oligonucleotide
  Antisense strand to SEQ ID NO: 1126286
uauagcgcacgugucucau

SEQ ID NO: 1126288 - RNA, 19 nt, Artificial Sequence
  Description of Artificial Sequence: Synthetic oligonucleotide
  Sense strand starting at position 2657 of SEQ ID NO: 916046
gguucugauccuggucacu

SEQ ID NO: 1126289 - RNA, 19 nt, Artificial Sequence
  Description of Artificial Sequence: Synthetic oligonucleotide
  Antisense strand to SEQ ID NO: 1126288
agugaccaggaucagaacc

SEQ ID NO: 1126290 - RNA, 19 nt, Artificial Sequence
  Description of Artificial Sequence: Synthetic oligonucleotide
  Sense strand starting at position 2731 of SEQ ID NO: 916046
aggcguuugcaagauccca

SEQ ID NO: 1126291 - RNA, 19 nt, Artificial Sequence
  Description of Artificial Sequence: Synthetic oligonucleotide
  Antisense strand to SEQ ID NO: 1126290
ugggaucuugcaaacgccu

SEQ ID NO: 1126292 - RNA, 19 nt, Artificial Sequence
  Description of Artificial Sequence: Synthetic oligonucleotide
  Sense strand starting at position 2968 of SEQ ID NO: 916046
ggcagugcuucccaagaga

SEQ ID NO: 1126293 - RNA, 19 nt, Artificial Sequence
  Description of Artificial Sequence: Synthetic oligonucleotide
  Antisense strand to SEQ ID NO: 1126292
ucucuugggaagcacugcc

SEQ ID NO: 1126294 - RNA, 19 nt, Artificial Sequence
  Description of Artificial Sequence: Synthetic oligonucleotide
  Sense strand starting at position 2996 of SEQ ID NO: 916046
ggcuccaguuccuacuauu

SEQ ID NO: 1126295 - RNA, 19 nt, Artificial Sequence
  Description of Artificial Sequence: Synthetic oligonucleotide
  Antisense strand to SEQ ID NO: 1126294
aauaguaggaacuggagcc

SEQ ID NO: 1126296 - RNA, 19 nt, Artificial Sequence
  Description of Artificial Sequence: Synthetic oligonucleotide
  Sense strand starting at position 2999 of SEQ ID NO: 916046
uccaguuccuacuauuuga

SEQ ID NO: 1126297 - RNA, 19 nt, Artificial Sequence
  Description of Artificial Sequence: Synthetic oligonucleotide
  Antisense strand to SEQ ID NO: 1126296
ucaaauaguaggaacugga

SEQ ID NO: 1126298 - RNA, 19 nt, Artificial Sequence
  Description of Artificial Sequence: Synthetic oligonucleotide
  Sense strand starting at position 3156 of SEQ ID NO: 916046
gugucuaguccuggagaga

SEQ ID NO: 1126299 - RNA, 19 nt, Artificial Sequence
  Description of Artificial Sequence: Synthetic oligonucleotide
  Antisense strand to SEQ ID NO: 1126298
ucucuccaggacuagacac

SEQ ID NO: 1126300 - RNA, 19 nt, Artificial Sequence
  Description of Artificial Sequence: Synthetic oligonucleotide
  Sense strand starting at position 3157 of SEQ ID NO: 916046
ugucuaguccuggagagag

SEQ ID NO: 1126301 - RNA, 19 nt, Artificial Sequence
  Description of Artificial Sequence: Synthetic oligonucleotide
  Antisense strand to SEQ ID NO: 1126300
cucucuccaggacuagaca

SEQ ID NO: 1126302 - RNA, 19 nt, Artificial Sequence
  Description of Artificial Sequence: Synthetic oligonucleotide
  Sense strand starting at position 3530 of SEQ ID NO: 916046
gagggaugaugacaaggaa

SEQ ID NO: 1126303 - RNA, 19 nt, Artificial Sequence
  Description of Artificial Sequence: Synthetic oligonucleotide
  Antisense strand to SEQ ID NO: 1126302
uuccuugucaucaucccuc

SEQ ID NO: 1126304 - RNA, 19 nt, Artificial Sequence
  Description of Artificial Sequence: Synthetic oligonucleotide
  Sense strand starting at position 3575 of SEQ ID NO: 916046
gaguccaucuuggaugcaa

SEQ ID NO: 1126305 - RNA, 19 nt, Artificial Sequence
  Description of Artificial Sequence: Synthetic oligonucleotide
  Antisense strand to SEQ ID NO: 1126304
uugcauccaagauggacuc

SEQ ID NO: 1126306 - RNA, 19 nt, Artificial Sequence
  Description of Artificial Sequence: Synthetic oligonucleotide
  Sense strand starting at position 3577 of SEQ ID NO: 916046
guccaucuuggaugcaaau

SEQ ID NO: 1126307 - RNA, 19 nt, Artificial Sequence
  Description of Artificial Sequence: Synthetic oligonucleotide
  Antisense strand to SEQ ID NO: 1126306
auuugcauccaagauggac

SEQ ID NO: 1126308 - RNA, 19 nt, Artificial Sequence
  Description of Artificial Sequence: Synthetic oligonucleotide
  Sense strand starting at position 3915 of SEQ ID NO: 916046
aguccuaccuggcaacaaa

SEQ ID NO: 1126309 - RNA, 19 nt, Artificial Sequence
  Description of Artificial Sequence: Synthetic oligonucleotide
  Antisense strand to SEQ ID NO: 1126308
uuuguugccagguaggacu

SEQ ID NO: 1126310 - RNA, 19 nt, Artificial Sequence
  Description of Artificial Sequence: Synthetic oligonucleotide
  Sense strand starting at position 196 of SEQ ID NO: 916047
acaccucaguguccaagau

SEQ ID NO: 1126311 - RNA, 19 nt, Artificial Sequence
  Description of Artificial Sequence: Synthetic oligonucleotide
  Antisense strand to SEQ ID NO: 1126310
aucuuggacacugaggugu

SEQ ID NO: 1126312 - RNA, 19 nt, Artificial Sequence
  Description of Artificial Sequence: Synthetic oligonucleotide
  Sense strand starting at position 266 of SEQ ID NO: 916047
aggucaacguuugcaaaca

SEQ ID NO: 1126313 - RNA, 19 nt, Artificial Sequence
  Description of Artificial Sequence: Synthetic oligonucleotide
  Antisense strand to SEQ ID NO: 1126312
uguuugcaaacguugaccu

SEQ ID NO: 1126314 - RNA, 19 nt, Artificial Sequence
  Description of Artificial Sequence: Synthetic oligonucleotide
  Sense strand starting at position 394 of SEQ ID NO: 916047
ugggaagucuguuuccgac

SEQ ID NO: 1126315 - RNA, 19 nt, Artificial Sequence
  Description of Artificial Sequence: Synthetic oligonucleotide
  Antisense strand to SEQ ID NO: 1126314
gucggaaacagacuuccca

SEQ ID NO: 1126316 - RNA, 19 nt, Artificial Sequence
  Description of Artificial Sequence: Synthetic oligonucleotide
  Sense strand starting at position 396 of SEQ ID NO: 916047
ggaagucuguuuccgacca

SEQ ID NO: 1126317 - RNA, 19 nt, Artificial Sequence
  Description of Artificial Sequence: Synthetic oligonucleotide
  Antisense strand to SEQ ID NO: 1126316
uggucggaaacagacuucc

SEQ ID NO: 1126318 - RNA, 19 nt, Artificial Sequence
  Description of Artificial Sequence: Synthetic oligonucleotide
  Sense strand starting at position 460 of SEQ ID NO: 916047
cuacgaaucccucaauguu

SEQ ID NO: 1126319 - RNA, 19 nt, Artificial Sequence
  Description of Artificial Sequence: Synthetic oligonucleotide
  Antisense strand to SEQ ID NO: 1126318
aacauugagggauucguag

SEQ ID NO: 1126320 - RNA, 19 nt, Artificial Sequence
  Description of Artificial Sequence: Synthetic oligonucleotide
  Sense strand starting at position 533 of SEQ ID NO: 916047
acaacuucuggaggaguuu

SEQ ID NO: 1126321 - RNA, 19 nt, Artificial Sequence
  Description of Artificial Sequence: Synthetic oligonucleotide
  Antisense strand to SEQ ID NO: 1126320
aaacuccuccagaaguugu

SEQ ID NO: 1126322 - RNA, 19 nt, Artificial Sequence
  Description of Artificial Sequence: Synthetic oligonucleotide
  Sense strand starting at position 1457 of SEQ ID NO: 916047
ccaaguucgguuuguaaga

SEQ ID NO: 1126323 - RNA, 19 nt, Artificial Sequence
  Description of Artificial Sequence: Synthetic oligonucleotide
  Antisense strand to SEQ ID NO: 1126322
ucuuacaaaccgaacuugg

SEQ ID NO: 1126324 - RNA, 19 nt, Artificial Sequence
  Description of Artificial Sequence: Synthetic oligonucleotide
  Sense strand starting at position 2030 of SEQ ID NO: 916047
uggcgagugguguauuuaa

SEQ ID NO: 1126325 - RNA, 19 nt, Artificial Sequence
  Description of Artificial Sequence: Synthetic oligonucleotide
  Antisense strand to SEQ ID NO: 1126324
uuaaauacaccacucgcca

SEQ ID NO: 1126326 - RNA, 19 nt, Artificial Sequence
  Description of Artificial Sequence: Synthetic oligonucleotide
  Sense strand starting at position 2037 of SEQ ID NO: 916047
ugguguauuuaagcacgua

SEQ ID NO: 1126327 - RNA, 19 nt, Artificial Sequence
  Description of Artificial Sequence: Synthetic oligonucleotide
  Antisense strand to SEQ ID NO: 1126326
uacgugcuuaaauacacca

SEQ ID NO: 1126328 - RNA, 19 nt, Artificial Sequence
  Description of Artificial Sequence: Synthetic oligonucleotide
  Sense strand starting at position 2038 of SEQ ID NO: 916047
gguguauuuaagcacguag

SEQ ID NO: 1126329 - RNA, 19 nt, Artificial Sequence
  Description of Artificial Sequence: Synthetic oligonucleotide
  Antisense strand to SEQ ID NO: 1126328
cuacgugcuuaaauacacc

SEQ ID NO: 1126330 - RNA, 19 nt, Artificial Sequence
  Description of Artificial Sequence: Synthetic oligonucleotide
  Sense strand starting at position 2040 of SEQ ID NO: 916047
uguauuuaagcacguagau

SEQ ID NO: 1126331 - RNA, 19 nt, Artificial Sequence
  Description of Artificial Sequence: Synthetic oligonucleotide
  Antisense strand to SEQ ID NO: 1126330
aucuacgugcuuaaauaca

SEQ ID NO: 1126332 - RNA, 19 nt, Artificial Sequence
  Description of Artificial Sequence: Synthetic oligonucleotide
  Sense strand starting at position 2049 of SEQ ID NO: 916047
gcacguagaucauuccaga

SEQ ID NO: 1126333 - RNA, 19 nt, Artificial Sequence
  Description of Artificial Sequence: Synthetic oligonucleotide
  Antisense strand to SEQ ID NO: 1126332
ucuggaaugaucuacgugc

SEQ ID NO: 1126334 - RNA, 19 nt, Artificial Sequence
  Description of Artificial Sequence: Synthetic oligonucleotide
  Sense strand starting at position 2095 of SEQ ID NO: 916047
uagaauaaccgaugcuuga

SEQ ID NO: 1126335 - RNA, 19 nt, Artificial Sequence
  Description of Artificial Sequence: Synthetic oligonucleotide
  Antisense strand to SEQ ID NO: 1126334
ucaagcaucgguuauucua

SEQ ID NO: 1126336 - RNA, 19 nt, Artificial Sequence
  Description of Artificial Sequence: Synthetic oligonucleotide
  Sense strand starting at position 2099 of SEQ ID NO: 916047
auaaccgaugcuugacauu

SEQ ID NO: 1126337 - RNA, 19 nt, Artificial Sequence
  Description of Artificial Sequence: Synthetic oligonucleotide
  Antisense strand to SEQ ID NO: 1126336
aaugucaagcaucgguuau

SEQ ID NO: 1126338 - RNA, 19 nt, Artificial Sequence
  Description of Artificial Sequence: Synthetic oligonucleotide
  Sense strand starting at position 2135 of SEQ ID NO: 916047
augucucugucuguaugaa

SEQ ID NO: 1126339 - RNA, 19 nt, Artificial Sequence
  Description of Artificial Sequence: Synthetic oligonucleotide
  Antisense strand to SEQ ID NO: 1126338
uucauacagacagagacau

SEQ ID NO: 1126340 - RNA, 19 nt, Artificial Sequence
  Description of Artificial Sequence: Synthetic oligonucleotide
  Sense strand starting at position 2177 of SEQ ID NO: 916047
ccaagacuccuuugagacu

SEQ ID NO: 1126341 - RNA, 19 nt, Artificial Sequence
  Description of Artificial Sequence: Synthetic oligonucleotide
  Antisense strand to SEQ ID NO: 1126340
agucucaaaggagucuugg

SEQ ID NO: 1126342 - RNA, 19 nt, Artificial Sequence
  Description of Artificial Sequence: Synthetic oligonucleotide
  Sense strand starting at position 2260 of SEQ ID NO: 916047
cacaauuucgugcguagac

SEQ ID NO: 1126343 - RNA, 19 nt, Artificial Sequence
  Description of Artificial Sequence: Synthetic oligonucleotide
  Antisense strand to SEQ ID NO: 1126342
gucuacgcacgaaauugug

SEQ ID NO: 1126344 - RNA, 19 nt, Artificial Sequence
  Description of Artificial Sequence: Synthetic oligonucleotide
  Sense strand starting at position 2261 of SEQ ID NO: 916047
acaauuucgugcguagacu

SEQ ID NO: 1126345 - RNA, 19 nt, Artificial Sequence
  Description of Artificial Sequence: Synthetic oligonucleotide
  Antisense strand to SEQ ID NO: 1126344
agucuacgcacgaaauugu

SEQ ID NO: 1126346 - RNA, 19 nt, Artificial Sequence
  Description of Artificial Sequence: Synthetic oligonucleotide
  Sense strand starting at position 2273 of SEQ ID NO: 916047
guagacucacuccaguauu

SEQ ID NO: 1126347 - RNA, 19 nt, Artificial Sequence
  Description of Artificial Sequence: Synthetic oligonucleotide
  Antisense strand to SEQ ID NO: 1126346
aauacuggagugagucuac

SEQ ID NO: 1126348 - RNA, 19 nt, Artificial Sequence
  Description of Artificial Sequence: Synthetic oligonucleotide
  Sense strand starting at position 2323 of SEQ ID NO: 916047
guuccaagcgcugaggaua

SEQ ID NO: 1126349 - RNA, 19 nt, Artificial Sequence
  Description of Artificial Sequence: Synthetic oligonucleotide
  Antisense strand to SEQ ID NO: 1126348
uauccucagcgcuuggaac

SEQ ID NO: 1126350 - RNA, 19 nt, Artificial Sequence
  Description of Artificial Sequence: Synthetic oligonucleotide
  Sense strand starting at position 2374 of SEQ ID NO: 916047
uggaguuuacgggacaauu

SEQ ID NO: 1126351 - RNA, 19 nt, Artificial Sequence
  Description of Artificial Sequence: Synthetic oligonucleotide
  Antisense strand to SEQ ID NO: 1126350
aauugucccguaaacucca

SEQ ID NO: 1126352 - RNA, 19 nt, Artificial Sequence
  Description of Artificial Sequence: Synthetic oligonucleotide
  Sense strand starting at position 2427 of SEQ ID NO: 916047
cuuggauccgauugaaaug

SEQ ID NO: 1126353 - RNA, 19 nt, Artificial Sequence
  Description of Artificial Sequence: Synthetic oligonucleotide
  Antisense strand to SEQ ID NO: 1126352
cauuucaaucggauccaag

SEQ ID NO: 1126354 - RNA, 19 nt, Artificial Sequence
  Description of Artificial Sequence: Synthetic oligonucleotide
  Sense strand starting at position 2445 of SEQ ID NO: 916047
guaaccauccaguguauuu

SEQ ID NO: 1126355 - RNA, 19 nt, Artificial Sequence
  Description of Artificial Sequence: Synthetic oligonucleotide
  Antisense strand to SEQ ID NO: 1126354
aaauacacuggaugguuac

SEQ ID NO: 1126356 - RNA, 19 nt, Artificial Sequence
  Description of Artificial Sequence: Synthetic oligonucleotide
  Sense strand starting at position 2531 of SEQ ID NO: 916047
uggaguucugccgaaguag

SEQ ID NO: 1126357 - RNA, 19 nt, Artificial Sequence
  Description of Artificial Sequence: Synthetic oligonucleotide
  Antisense strand to SEQ ID NO: 1126356
cuacuucggcagaacucca

SEQ ID NO: 1126358 - RNA, 19 nt, Artificial Sequence
  Description of Artificial Sequence: Synthetic oligonucleotide
  Sense strand starting at position 2545 of SEQ ID NO: 916047
aguaguaaagcucguuaaa

SEQ ID NO: 1126359 - RNA, 19 nt, Artificial Sequence
  Description of Artificial Sequence: Synthetic oligonucleotide
  Antisense strand to SEQ ID NO: 1126358
uuuaacgagcuuuacuacu

SEQ ID NO: 1126360 - RNA, 19 nt, Artificial Sequence
  Description of Artificial Sequence: Synthetic oligonucleotide
  Sense strand starting at position 2640 of SEQ ID NO: 916047
gcaucaucuccggaucuga

SEQ ID NO: 1126361 - RNA, 19 nt, Artificial Sequence
  Description of Artificial Sequence: Synthetic oligonucleotide
  Antisense strand to SEQ ID NO: 1126360
ucagauccggagaugaugc

SEQ ID NO: 1126362 - RNA, 19 nt, Artificial Sequence
  Description of Artificial Sequence: Synthetic oligonucleotide
  Sense strand starting at position 2694 of SEQ ID NO: 916047
ccugcuucuuccuuuagga

SEQ ID NO: 1126363 - RNA, 19 nt, Artificial Sequence
  Description of Artificial Sequence: Synthetic oligonucleotide
  Antisense strand to SEQ ID NO: 1126362
uccuaaaggaagaagcagg

SEQ ID NO: 1126364 - RNA, 19 nt, Artificial Sequence
  Description of Artificial Sequence: Synthetic oligonucleotide
  Sense strand starting at position 2776 of SEQ ID NO: 916047
gccagcacuagcgaagaau

SEQ ID NO: 1126365 - RNA, 19 nt, Artificial Sequence
  Description of Artificial Sequence: Synthetic oligonucleotide
  Antisense strand to SEQ ID NO: 1126364
auucuucgcuagugcuggc

SEQ ID NO: 1126366 - RNA, 19 nt, Artificial Sequence
  Description of Artificial Sequence: Synthetic oligonucleotide
  Sense strand starting at position 2785 of SEQ ID NO: 916047
agcgaagaaugcucaguga

SEQ ID NO: 1126367 - RNA, 19 nt, Artificial Sequence
  Description of Artificial Sequence: Synthetic oligonucleotide
  Antisense strand to SEQ ID NO: 1126366
ucacugagcauucuucgcu

SEQ ID NO: 1126368 - RNA, 19 nt, Artificial Sequence
  Description of Artificial Sequence: Synthetic oligonucleotide
  Sense strand starting at position 2788 of SEQ ID NO: 916047
gaagaaugcucagugaaac

SEQ ID NO: 1126369 - RNA, 19 nt, Artificial Sequence
  Description of Artificial Sequence: Synthetic oligonucleotide
  Antisense strand to SEQ ID NO: 1126368
guuucacugagcauucuuc

SEQ ID NO: 1126370 - RNA, 19 nt, Artificial Sequence
  Description of Artificial Sequence: Synthetic oligonucleotide
  Sense strand starting at position 2799 of SEQ ID NO: 916047
agugaaaccuuauuccaug

SEQ ID NO: 1126371 - RNA, 19 nt, Artificial Sequence
  Description of Artificial Sequence: Synthetic oligonucleotide
  Antisense strand to SEQ ID NO: 1126370
cauggaauaagguuucacu

SEQ ID NO: 1126372 - RNA, 19 nt, Artificial Sequence
  Description of Artificial Sequence: Synthetic oligonucleotide
  Sense strand starting at position 2800 of SEQ ID NO: 916047
gugaaaccuuauuccauga

SEQ ID NO: 1126373 - RNA, 19 nt, Artificial Sequence
  Description of Artificial Sequence: Synthetic oligonucleotide
  Antisense strand to SEQ ID NO: 1126372
ucauggaauaagguuucac

SEQ ID NO: 1126374 - RNA, 19 nt, Artificial Sequence
  Description of Artificial Sequence: Synthetic oligonucleotide
  Sense strand starting at position 2871 of SEQ ID NO: 916047
agcgcaguccaauggaaau

SEQ ID NO: 1126375 - RNA, 19 nt, Artificial Sequence
  Description of Artificial Sequence: Synthetic oligonucleotide
  Antisense strand to SEQ ID NO: 1126374
auuuccauuggacugcgcu

SEQ ID NO: 1126376 - RNA, 19 nt, Artificial Sequence
  Description of Artificial Sequence: Synthetic oligonucleotide
  Sense strand starting at position 2926 of SEQ ID NO: 916047
guagucacauuugagaaag

SEQ ID NO: 1126377 - RNA, 19 nt, Artificial Sequence
  Description of Artificial Sequence: Synthetic oligonucleotide
  Antisense strand to SEQ ID NO: 1126376
cuuucucaaaugugacuac

SEQ ID NO: 1126378 - RNA, 19 nt, Artificial Sequence
  Description of Artificial Sequence: Synthetic oligonucleotide
  Sense strand starting at position 3326 of SEQ ID NO: 916047
uucuaugagugcucugaac

SEQ ID NO: 1126379 - RNA, 19 nt, Artificial Sequence
  Description of Artificial Sequence: Synthetic oligonucleotide
  Antisense strand to SEQ ID NO: 1126378
guucagagcacucauagaa

SEQ ID NO: 1126380 - RNA, 19 nt, Artificial Sequence
  Description of Artificial Sequence: Synthetic oligonucleotide
  Sense strand starting at position 3333 of SEQ ID NO: 916047
agugcucugaaccgaucua

SEQ ID NO: 1126381 - RNA, 19 nt, Artificial Sequence
  Description of Artificial Sequence: Synthetic oligonucleotide
  Antisense strand to SEQ ID NO: 1126380
uagaucgguucagagcacu

SEQ ID NO: 1126382 - RNA, 19 nt, Artificial Sequence
  Description of Artificial Sequence: Synthetic oligonucleotide
  Sense strand starting at position 3334 of SEQ ID NO: 916047
gugcucugaaccgaucuau

SEQ ID NO: 1126383 - RNA, 19 nt, Artificial Sequence
  Description of Artificial Sequence: Synthetic oligonucleotide
  Antisense strand to SEQ ID NO: 1126382
auagaucgguucagagcac

SEQ ID NO: 1126384 - RNA, 19 nt, Artificial Sequence
  Description of Artificial Sequence: Synthetic oligonucleotide
  Sense strand starting at position 3477 of SEQ ID NO: 916047
aucucaaagcacugggaua

SEQ ID NO: 1126385 - RNA, 19 nt, Artificial Sequence
  Description of Artificial Sequence: Synthetic oligonucleotide
  Antisense strand to SEQ ID NO: 1126384
uaucccagugcuuugagau

SEQ ID NO: 1126386 - RNA, 19 nt, Artificial Sequence
  Description of Artificial Sequence: Synthetic oligonucleotide
  Sense strand starting at position 3504 of SEQ ID NO: 916047
cagccaauagcguuguauu

SEQ ID NO: 1126387 - RNA, 19 nt, Artificial Sequence
  Description of Artificial Sequence: Synthetic oligonucleotide
  Antisense strand to SEQ ID NO: 1126386
aauacaacgcuauuggcug

SEQ ID NO: 1126388 - RNA, 19 nt, Artificial Sequence
  Description of Artificial Sequence: Synthetic oligonucleotide
  Sense strand starting at position 3505 of SEQ ID NO: 916047
agccaauagcguuguauuu

SEQ ID NO: 1126389 - RNA, 19 nt, Artificial Sequence
  Description of Artificial Sequence: Synthetic oligonucleotide
  Antisense strand to SEQ ID NO: 1126388
aaauacaacgcuauuggcu

SEQ ID NO: 1126390 - RNA, 19 nt, Artificial Sequence
  Description of Artificial Sequence: Synthetic oligonucleotide
  Sense strand starting at position 137 of SEQ ID NO: 916048
aagguauggaugugguuua

SEQ ID NO: 1126391 - RNA, 19 nt, Artificial Sequence
  Description of Artificial Sequence: Synthetic oligonucleotide
  Antisense strand to SEQ ID NO: 1126390
uaaaccacauccauaccuu

SEQ ID NO: 1126392 - RNA, 19 nt, Artificial Sequence
  Description of Artificial Sequence: Synthetic oligonucleotide
  Sense strand starting at position 142 of SEQ ID NO: 916048
auggaugugguuuaugaac

SEQ ID NO: 1126393 - RNA, 19 nt, Artificial Sequence
  Description of Artificial Sequence: Synthetic oligonucleotide
  Antisense strand to SEQ ID NO: 1126392
guucauaaaccacauccau

SEQ ID NO: 1126394 - RNA, 19 nt, Artificial Sequence
  Description of Artificial Sequence: Synthetic oligonucleotide
  Sense strand starting at position 148 of SEQ ID NO: 916048
gugguuuaugaacaagcga

SEQ ID NO: 1126395 - RNA, 19 nt, Artificial Sequence
  Description of Artificial Sequence: Synthetic oligonucleotide
  Antisense strand to SEQ ID NO: 1126394
ucgcuuguucauaaaccac

SEQ ID NO: 1126396 - RNA, 19 nt, Artificial Sequence
  Description of Artificial Sequence: Synthetic oligonucleotide
  Sense strand starting at position 203 of SEQ ID NO: 916048
ccauacuuucgacgaaaca

SEQ ID NO: 1126397 - RNA, 19 nt, Artificial Sequence
  Description of Artificial Sequence: Synthetic oligonucleotide
  Antisense strand to SEQ ID NO: 1126396
uguuucgucgaaaguaugg

SEQ ID NO: 1126398 - RNA, 19 nt, Artificial Sequence
  Description of Artificial Sequence: Synthetic oligonucleotide
  Sense strand starting at position 214 of SEQ ID NO: 916048
acgaaacaucucugcaaag

SEQ ID NO: 1126399 - RNA, 19 nt, Artificial Sequence
  Description of Artificial Sequence: Synthetic oligonucleotide
  Antisense strand to SEQ ID NO: 1126398
cuuugcagagauguuucgu

SEQ ID NO: 1126400 - RNA, 19 nt, Artificial Sequence
  Description of Artificial Sequence: Synthetic oligonucleotide
  Sense strand starting at position 215 of SEQ ID NO: 916048
cgaaacaucucugcaaaga

SEQ ID NO: 1126401 - RNA, 19 nt, Artificial Sequence
  Description of Artificial Sequence: Synthetic oligonucleotide
  Antisense strand to SEQ ID NO: 1126400
ucuuugcagagauguuucg

SEQ ID NO: 1126402 - RNA, 19 nt, Artificial Sequence
  Description of Artificial Sequence: Synthetic oligonucleotide
  Sense strand starting at position 367 of SEQ ID NO: 916048
acacaacuugcuugacuga

SEQ ID NO: 1126403 - RNA, 19 nt, Artificial Sequence
  Description of Artificial Sequence: Synthetic oligonucleotide
  Antisense strand to SEQ ID NO: 1126402
ucagucaagcaaguugugu

SEQ ID NO: 1126404 - RNA, 19 nt, Artificial Sequence
  Description of Artificial Sequence: Synthetic oligonucleotide
  Sense strand starting at position 395 of SEQ ID NO: 916048
gcacaugacuucucaauug

SEQ ID NO: 1126405 - RNA, 19 nt, Artificial Sequence
  Description of Artificial Sequence: Synthetic oligonucleotide
  Antisense strand to SEQ ID NO: 1126404
caauugagaagucaugugc

SEQ ID NO: 1126406 - RNA, 19 nt, Artificial Sequence
  Description of Artificial Sequence: Synthetic oligonucleotide
  Sense strand starting at position 456 of SEQ ID NO: 916048
gguaccaucuuucuacuga

SEQ ID NO: 1126407 - RNA, 19 nt, Artificial Sequence
  Description of Artificial Sequence: Synthetic oligonucleotide
  Antisense strand to SEQ ID NO: 1126406
ucaguagaaagaugguacc

SEQ ID NO: 1126408 - RNA, 19 nt, Artificial Sequence
  Description of Artificial Sequence: Synthetic oligonucleotide
  Sense strand starting at position 574 of SEQ ID NO: 916048
ucagaucucggugaacgau

SEQ ID NO: 1126409 - RNA, 19 nt, Artificial Sequence
  Description of Artificial Sequence: Synthetic oligonucleotide
  Antisense strand to SEQ ID NO: 1126408
aucguucaccgagaucuga

SEQ ID NO: 1126410 - RNA, 19 nt, Artificial Sequence
  Description of Artificial Sequence: Synthetic oligonucleotide
  Sense strand starting at position 591 of SEQ ID NO: 916048
augcaauuggcaugaagga

SEQ ID NO: 1126411 - RNA, 19 nt, Artificial Sequence
  Description of Artificial Sequence: Synthetic oligonucleotide
  Antisense strand to SEQ ID NO: 1126410
uccuucaugccaauugcau

SEQ ID NO: 1126412 - RNA, 19 nt, Artificial Sequence
  Description of Artificial Sequence: Synthetic oligonucleotide
  Sense strand starting at position 790 of SEQ ID NO: 916048
gggugccuuguccagauau

SEQ ID NO: 1126413 - RNA, 19 nt, Artificial Sequence
  Description of Artificial Sequence: Synthetic oligonucleotide
  Antisense strand to SEQ ID NO: 1126412
auaucuggacaaggcaccc

SEQ ID NO: 1126414 - RNA, 19 nt, Artificial Sequence
  Description of Artificial Sequence: Synthetic oligonucleotide
  Sense strand starting at position 821 of SEQ ID NO: 916048
uggucuacaugcucaaaca

SEQ ID NO: 1126415 - RNA, 19 nt, Artificial Sequence
  Description of Artificial Sequence: Synthetic oligonucleotide
  Antisense strand to SEQ ID NO: 1126414
uguuugagcauguagacca

SEQ ID NO: 1126416 - RNA, 19 nt, Artificial Sequence
  Description of Artificial Sequence: Synthetic oligonucleotide
  Sense strand starting at position 1056 of SEQ ID NO: 916048
acaacauugggaugcucaa

SEQ ID NO: 1126417 - RNA, 19 nt, Artificial Sequence
  Description of Artificial Sequence: Synthetic oligonucleotide
  Antisense strand to SEQ ID NO: 1126416
uugagcaucccaauguugu

SEQ ID NO: 1126418 - RNA, 19 nt, Artificial Sequence
  Description of Artificial Sequence: Synthetic oligonucleotide
  Sense strand starting at position 1248 of SEQ ID NO: 916048
ggcucauaucgagagguag

SEQ ID NO: 1126419 - RNA, 19 nt, Artificial Sequence
  Description of Artificial Sequence: Synthetic oligonucleotide
  Antisense strand to SEQ ID NO: 1126418
cuaccucucgauaugagcc

SEQ ID NO: 1126420 - RNA, 19 nt, Artificial Sequence
  Description of Artificial Sequence: Synthetic oligonucleotide
  Sense strand starting at position 1320 of SEQ ID NO: 916048
cgcuuacagaguuaggaug

SEQ ID NO: 1126421 - RNA, 19 nt, Artificial Sequence
  Description of Artificial Sequence: Synthetic oligonucleotide
  Antisense strand to SEQ ID NO: 1126420
cauccuaacucuguaagcg

SEQ ID NO: 1126422 - RNA, 19 nt, Artificial Sequence
  Description of Artificial Sequence: Synthetic oligonucleotide
  Sense strand starting at position 1326 of SEQ ID NO: 916048
cagaguuaggaugguauga

SEQ ID NO: 1126423 - RNA, 19 nt, Artificial Sequence
  Description of Artificial Sequence: Synthetic oligonucleotide
  Antisense strand to SEQ ID NO: 1126422
ucauaccauccuaacucug

SEQ ID NO: 1126424 - RNA, 19 nt, Artificial Sequence
  Description of Artificial Sequence: Synthetic oligonucleotide
  Sense strand starting at position 1695 of SEQ ID NO: 916048
ugguucucauuccugggaa

SEQ ID NO: 1126425 - RNA, 19 nt, Artificial Sequence
  Description of Artificial Sequence: Synthetic oligonucleotide
  Antisense strand to SEQ ID NO: 1126424
uucccaggaaugagaacca

SEQ ID NO: 1126426 - RNA, 19 nt, Artificial Sequence
  Description of Artificial Sequence: Synthetic oligonucleotide
  Sense strand starting at position 2085 of SEQ ID NO: 916048
uugacauugcucugaggag

SEQ ID NO: 1126427 - RNA, 19 nt, Artificial Sequence
  Description of Artificial Sequence: Synthetic oligonucleotide
  Antisense strand to SEQ ID NO: 1126426
cuccucagagcaaugucaa

SEQ ID NO: 1126428 - RNA, 19 nt, Artificial Sequence
  Description of Artificial Sequence: Synthetic oligonucleotide
  Sense strand starting at position 2363 of SEQ ID NO: 916048
uucgcuccaccaugagaaa

SEQ ID NO: 1126429 - RNA, 19 nt, Artificial Sequence
  Description of Artificial Sequence: Synthetic oligonucleotide
  Antisense strand to SEQ ID NO: 1126428
uuucucaugguggagcgaa

SEQ ID NO: 1126430 - RNA, 19 nt, Artificial Sequence
  Description of Artificial Sequence: Synthetic oligonucleotide
  Sense strand starting at position 2435 of SEQ ID NO: 916048
gagugcuugcuuccagugu

SEQ ID NO: 1126431 - RNA, 19 nt, Artificial Sequence
  Description of Artificial Sequence: Synthetic oligonucleotide
  Antisense strand to SEQ ID NO: 1126430
acacuggaagcaagcacuc

SEQ ID NO: 1126432 - RNA, 19 nt, Artificial Sequence
  Description of Artificial Sequence: Synthetic oligonucleotide
  Sense strand starting at position 2507 of SEQ ID NO: 916048
ugguacgacuaucuauaaa

SEQ ID NO: 1126433 - RNA, 19 nt, Artificial Sequence
  Description of Artificial Sequence: Synthetic oligonucleotide
  Antisense strand to SEQ ID NO: 1126432
uuuauagauagucguacca

SEQ ID NO: 1126434 - RNA, 19 nt, Artificial Sequence
  Description of Artificial Sequence: Synthetic oligonucleotide
  Sense strand starting at position 2709 of SEQ ID NO: 916048
ggccaucuggcagagaagu

SEQ ID NO: 1126435 - RNA, 19 nt, Artificial Sequence
  Description of Artificial Sequence: Synthetic oligonucleotide
  Antisense strand to SEQ ID NO: 1126434
acuucucugccagauggcc

SEQ ID NO: 1126436 - RNA, 19 nt, Artificial Sequence
  Description of Artificial Sequence: Synthetic oligonucleotide
  Sense strand starting at position 2711 of SEQ ID NO: 916048
ccaucuggcagagaaguua

SEQ ID NO: 1126437 - RNA, 19 nt, Artificial Sequence
  Description of Artificial Sequence: Synthetic oligonucleotide
  Antisense strand to SEQ ID NO: 1126436
uaacuucucugccagaugg

SEQ ID NO: 1126438 - RNA, 19 nt, Artificial Sequence
  Description of Artificial Sequence: Synthetic oligonucleotide
  Sense strand starting at position 2790 of SEQ ID NO: 916048
agguucuaugauuauguga

SEQ ID NO: 1126439 - RNA, 19 nt, Artificial Sequence
  Description of Artificial Sequence: Synthetic oligonucleotide
  Antisense strand to SEQ ID NO: 1126438
ucacauaaucauagaaccu

SEQ ID NO: 1126440 - RNA, 19 nt, Artificial Sequence
  Description of Artificial Sequence: Synthetic oligonucleotide
  Sense strand starting at position 2806 of SEQ ID NO: 916048
ugauauuuguaugugugca

SEQ ID NO: 1126441 - RNA, 19 nt, Artificial Sequence
  Description of Artificial Sequence: Synthetic oligonucleotide
  Antisense strand to SEQ ID NO: 1126440
ugcacacauacaaauauca

SEQ ID NO: 1126442 - RNA, 19 nt, Artificial Sequence
  Description of Artificial Sequence: Synthetic oligonucleotide
  Sense strand starting at position 2894 of SEQ ID NO: 916048
auugcacaugugcaagaaa

SEQ ID NO: 1126443 - RNA, 19 nt, Artificial Sequence
  Description of Artificial Sequence: Synthetic oligonucleotide
  Antisense strand to SEQ ID NO: 1126442
uuucuugcacaugugcaau

SEQ ID NO: 1126444 - RNA, 19 nt, Artificial Sequence
  Description of Artificial Sequence: Synthetic oligonucleotide
  Sense strand starting at position 2897 of SEQ ID NO: 916048
gcacaugugcaagaaaguu

SEQ ID NO: 1126445 - RNA, 19 nt, Artificial Sequence
  Description of Artificial Sequence: Synthetic oligonucleotide
  Antisense strand to SEQ ID NO: 1126444
aacuuucuugcacaugugc

SEQ ID NO: 1126446 - RNA, 19 nt, Artificial Sequence
  Description of Artificial Sequence: Synthetic oligonucleotide
  Sense strand starting at position 3197 of SEQ ID NO: 916048
guuagugucucauuuguga

SEQ ID NO: 1126447 - RNA, 19 nt, Artificial Sequence
  Description of Artificial Sequence: Synthetic oligonucleotide
  Antisense strand to SEQ ID NO: 1126446
ucacaaaugagacacuaac

SEQ ID NO: 1126448 - RNA, 19 nt, Artificial Sequence
  Description of Artificial Sequence: Synthetic oligonucleotide
  Sense strand starting at position 3287 of SEQ ID NO: 916048
uuaaccaucuggcugagaa

SEQ ID NO: 1126449 - RNA, 19 nt, Artificial Sequence
  Description of Artificial Sequence: Synthetic oligonucleotide
  Antisense strand to SEQ ID NO: 1126448
uucucagccagaugguuaa

SEQ ID NO: 1126450 - RNA, 19 nt, Artificial Sequence
  Description of Artificial Sequence: Synthetic oligonucleotide
  Sense strand starting at position 3477 of SEQ ID NO: 916048
gggcucaagaggugaaugu

SEQ ID NO: 1126451 - RNA, 19 nt, Artificial Sequence
  Description of Artificial Sequence: Synthetic oligonucleotide
  Antisense strand to SEQ ID NO: 1126450
acauucaccucuugagccc

SEQ ID NO: 1126452 - RNA, 19 nt, Artificial Sequence
  Description of Artificial Sequence: Synthetic oligonucleotide
  Sense strand starting at position 3478 of SEQ ID NO: 916048
ggcucaagaggugaauguu

SEQ ID NO: 1126453 - RNA, 19 nt, Artificial Sequence
  Description of Artificial Sequence: Synthetic oligonucleotide
  Antisense strand to SEQ ID NO: 1126452
aacauucaccucuugagcc

SEQ ID NO: 1126454 - RNA, 19 nt, Artificial Sequence
  Description of Artificial Sequence: Synthetic oligonucleotide
  Sense strand starting at position 3546 of SEQ ID NO: 916048
cuaagauaauugucuguga

SEQ ID NO: 1126455 - RNA, 19 nt, Artificial Sequence
  Description of Artificial Sequence: Synthetic oligonucleotide
  Antisense strand to SEQ ID NO: 1126454
ucacagacaauuaucuuag

SEQ ID NO: 1126456 - RNA, 19 nt, Artificial Sequence
  Description of Artificial Sequence: Synthetic oligonucleotide
  Sense strand starting at position 3547 of SEQ ID NO: 916048
uaagauaauugucugugag

SEQ ID NO: 1126457 - RNA, 19 nt, Artificial Sequence
  Description of Artificial Sequence: Synthetic oligonucleotide
  Antisense strand to SEQ ID NO: 1126456
cucacagacaauuaucuua

SEQ ID NO: 1126458 - RNA, 19 nt, Artificial Sequence
  Description of Artificial Sequence: Synthetic oligonucleotide
  Sense strand starting at position 3548 of SEQ ID NO: 916048
aagauaauugucugugagu

SEQ ID NO: 1126459 - RNA, 19 nt, Artificial Sequence
  Description of Artificial Sequence: Synthetic oligonucleotide
  Antisense strand to SEQ ID NO: 1126458
acucacagacaauuaucuu

SEQ ID NO: 1126460 - RNA, 19 nt, Artificial Sequence
  Description of Artificial Sequence: Synthetic oligonucleotide
  Sense strand starting at position 3639 of SEQ ID NO: 916048
cugucuuugcaacagaaga

SEQ ID NO: 1126461 - RNA, 19 nt, Artificial Sequence
  Description of Artificial Sequence: Synthetic oligonucleotide
  Antisense strand to SEQ ID NO: 1126460
ucuucuguugcaaagacag

SEQ ID NO: 1126462 - RNA, 19 nt, Artificial Sequence
  Description of Artificial Sequence: Synthetic oligonucleotide
  Sense strand starting at position 3857 of SEQ ID NO: 916048
guauguuugacccaaugag

SEQ ID NO: 1126463 - RNA, 19 nt, Artificial Sequence
  Description of Artificial Sequence: Synthetic oligonucleotide
  Antisense strand to SEQ ID NO: 1126462
cucauugggucaaacauac

SEQ ID NO: 1126464 - RNA, 19 nt, Artificial Sequence
  Description of Artificial Sequence: Synthetic oligonucleotide
  Sense strand starting at position 3921 of SEQ ID NO: 916048
gggagaauguaaguguaag

SEQ ID NO: 1126465 - RNA, 19 nt, Artificial Sequence
  Description of Artificial Sequence: Synthetic oligonucleotide
  Antisense strand to SEQ ID NO: 1126464
cuuacacuuacauucuccc

SEQ ID NO: 1126466 - RNA, 19 nt, Artificial Sequence
  Description of Artificial Sequence: Synthetic oligonucleotide
  Sense strand starting at position 3922 of SEQ ID NO: 916048
ggagaauguaaguguaaga

SEQ ID NO: 1126467 - RNA, 19 nt, Artificial Sequence
  Description of Artificial Sequence: Synthetic oligonucleotide
  Antisense strand to SEQ ID NO: 1126466
ucuuacacuuacauucucc

SEQ ID NO: 1126468 - RNA, 19 nt, Artificial Sequence
  Description of Artificial Sequence: Synthetic oligonucleotide
  Sense strand starting at position 3960 of SEQ ID NO: 916048
gguagaacuuggccucaga

SEQ ID NO: 1126469 - RNA, 19 nt, Artificial Sequence
  Description of Artificial Sequence: Synthetic oligonucleotide
  Antisense strand to SEQ ID NO: 1126468
ucugaggccaaguucuacc

SEQ ID NO: 1126470 - RNA, 19 nt, Artificial Sequence
  Description of Artificial Sequence: Synthetic oligonucleotide
  Sense strand starting at position 118 of SEQ ID NO: 916049
gagaaaguaucucugggca

SEQ ID NO: 1126471 - RNA, 19 nt, Artificial Sequence
  Description of Artificial Sequence: Synthetic oligonucleotide
  Antisense strand to SEQ ID NO: 1126470
ugcccagagauacuuucuc

SEQ ID NO: 1126472 - RNA, 19 nt, Artificial Sequence
  Description of Artificial Sequence: Synthetic oligonucleotide
  Sense strand starting at position 122 of SEQ ID NO: 916049
aaguaucucugggcauaga

SEQ ID NO: 1126473 - RNA, 19 nt, Artificial Sequence
  Description of Artificial Sequence: Synthetic oligonucleotide
  Antisense strand to SEQ ID NO: 1126472
ucuaugcccagagauacuu

SEQ ID NO: 1126474 - RNA, 19 nt, Artificial Sequence
  Description of Artificial Sequence: Synthetic oligonucleotide
  Sense strand starting at position 123 of SEQ ID NO: 916049
aguaucucugggcauagaa

SEQ ID NO: 1126475 - RNA, 19 nt, Artificial Sequence
  Description of Artificial Sequence: Synthetic oligonucleotide
  Antisense strand to SEQ ID NO: 1126474
uucuaugcccagagauacu

SEQ ID NO: 1126476 - RNA, 19 nt, Artificial Sequence
  Description of Artificial Sequence: Synthetic oligonucleotide
  Sense strand starting at position 289 of SEQ ID NO: 916049
gugcgugcuccuuuaguga

SEQ ID NO: 1126477 - RNA, 19 nt, Artificial Sequence
  Description of Artificial Sequence: Synthetic oligonucleotide
  Antisense strand to SEQ ID NO: 1126476
ucacuaaaggagcacgcac

SEQ ID NO: 1126478 - RNA, 19 nt, Artificial Sequence
  Description of Artificial Sequence: Synthetic oligonucleotide
  Sense strand starting at position 695 of SEQ ID NO: 916049
gucacauaccuaggaguug

SEQ ID NO: 1126479 - RNA, 19 nt, Artificial Sequence
  Description of Artificial Sequence: Synthetic oligonucleotide
  Antisense strand to SEQ ID NO: 1126478
caacuccuagguaugugac

SEQ ID NO: 1126480 - RNA, 19 nt, Artificial Sequence
  Description of Artificial Sequence: Synthetic oligonucleotide
  Sense strand starting at position 721 of SEQ ID NO: 916049
gagggaccgcgauguauua

SEQ ID NO: 1126481 - RNA, 19 nt, Artificial Sequence
  Description of Artificial Sequence: Synthetic oligonucleotide
  Antisense strand to SEQ ID NO: 1126480
uaauacaucgcggucccuc

SEQ ID NO: 1126482 - RNA, 19 nt, Artificial Sequence
  Description of Artificial Sequence: Synthetic oligonucleotide
  Sense strand starting at position 744 of SEQ ID NO: 916049
agggaaauuaucggaucuu

SEQ ID NO: 1126483 - RNA, 19 nt, Artificial Sequence
  Description of Artificial Sequence: Synthetic oligonucleotide
  Antisense strand to SEQ ID NO: 1126482
aagauccgauaauuucccu

SEQ ID NO: 1126484 - RNA, 19 nt, Artificial Sequence
  Description of Artificial Sequence: Synthetic oligonucleotide
  Sense strand starting at position 927 of SEQ ID NO: 916049
cacauucuaugguugggaa

SEQ ID NO: 1126485 - RNA, 19 nt, Artificial Sequence
  Description of Artificial Sequence: Synthetic oligonucleotide
  Antisense strand to SEQ ID NO: 1126484
uucccaaccauagaaugug

SEQ ID NO: 1126486 - RNA, 19 nt, Artificial Sequence
  Description of Artificial Sequence: Synthetic oligonucleotide
  Sense strand starting at position 928 of SEQ ID NO: 916049
acauucuaugguugggaaa

SEQ ID NO: 1126487 - RNA, 19 nt, Artificial Sequence
  Description of Artificial Sequence: Synthetic oligonucleotide
  Antisense strand to SEQ ID NO: 1126486
uuucccaaccauagaaugu

SEQ ID NO: 1126488 - RNA, 19 nt, Artificial Sequence
  Description of Artificial Sequence: Synthetic oligonucleotide
  Sense strand starting at position 929 of SEQ ID NO: 916049
cauucuaugguugggaaag

SEQ ID NO: 1126489 - RNA, 19 nt, Artificial Sequence
  Description of Artificial Sequence: Synthetic oligonucleotide
  Antisense strand to SEQ ID NO: 1126488
cuuucccaaccauagaaug

SEQ ID NO: 1126490 - RNA, 19 nt, Artificial Sequence
  Description of Artificial Sequence: Synthetic oligonucleotide
  Sense strand starting at position 941 of SEQ ID NO: 916049
gggaaagggucauuaccgu

SEQ ID NO: 1126491 - RNA, 19 nt, Artificial Sequence
  Description of Artificial Sequence: Synthetic oligonucleotide
  Antisense strand to SEQ ID NO: 1126490
acgguaaugacccuuuccc

SEQ ID NO: 1126492 - RNA, 19 nt, Artificial Sequence
  Description of Artificial Sequence: Synthetic oligonucleotide
  Sense strand starting at position 2124 of SEQ ID NO: 916049
cuggcuggccucggagaaa

SEQ ID NO: 1126493 - RNA, 19 nt, Artificial Sequence
  Description of Artificial Sequence: Synthetic oligonucleotide
  Antisense strand to SEQ ID NO: 1126492
uuucuccgaggccagccag

SEQ ID NO: 1126494 - RNA, 19 nt, Artificial Sequence
  Description of Artificial Sequence: Synthetic oligonucleotide
  Sense strand starting at position 2127 of SEQ ID NO: 916049
gcuggccucggagaaauua

SEQ ID NO: 1126495 - RNA, 19 nt, Artificial Sequence
  Description of Artificial Sequence: Synthetic oligonucleotide
  Antisense strand to SEQ ID NO: 1126494
uaauuucuccgaggccagc

SEQ ID NO: 1126496 - RNA, 19 nt, Artificial Sequence
  Description of Artificial Sequence: Synthetic oligonucleotide
  Sense strand starting at position 2486 of SEQ ID NO: 916049
agccuuaacccagaaguuu

SEQ ID NO: 1126497 - RNA, 19 nt, Artificial Sequence
  Description of Artificial Sequence: Synthetic oligonucleotide
  Antisense strand to SEQ ID NO: 1126496
aaacuucuggguuaaggcu

SEQ ID NO: 1126498 - RNA, 19 nt, Artificial Sequence
  Description of Artificial Sequence: Synthetic oligonucleotide
  Sense strand starting at position 2588 of SEQ ID NO: 916049
ggcacuuaucaugaacuca

SEQ ID NO: 1126499 - RNA, 19 nt, Artificial Sequence
  Description of Artificial Sequence: Synthetic oligonucleotide
  Antisense strand to SEQ ID NO: 1126498
ugaguucaugauaagugcc

SEQ ID NO: 1126500 - RNA, 19 nt, Artificial Sequence
  Description of Artificial Sequence: Synthetic oligonucleotide
  Sense strand starting at position 2698 of SEQ ID NO: 916049
agcugucucagacacguuu

SEQ ID NO: 1126501 - RNA, 19 nt, Artificial Sequence
  Description of Artificial Sequence: Synthetic oligonucleotide
  Antisense strand to SEQ ID NO: 1126500
aaacgugucugagacagcu

SEQ ID NO: 1126502 - RNA, 19 nt, Artificial Sequence
  Description of Artificial Sequence: Synthetic oligonucleotide
  Sense strand starting at position 2750 of SEQ ID NO: 916049
ggaucuuccuucccaagca

SEQ ID NO: 1126503 - RNA, 19 nt, Artificial Sequence
  Description of Artificial Sequence: Synthetic oligonucleotide
  Antisense strand to SEQ ID NO: 1126502
ugcuugggaaggaagaucc

SEQ ID NO: 1126504 - RNA, 19 nt, Artificial Sequence
  Description of Artificial Sequence: Synthetic oligonucleotide
  Sense strand starting at position 2769 of SEQ ID NO: 916049
caguuaaggccauggacau

SEQ ID NO: 1126505 - RNA, 19 nt, Artificial Sequence
  Description of Artificial Sequence: Synthetic oligonucleotide
  Antisense strand to SEQ ID NO: 1126504
auguccauggccuuaacug

SEQ ID NO: 1126506 - RNA, 19 nt, Artificial Sequence
  Description of Artificial Sequence: Synthetic oligonucleotide
  Sense strand starting at position 2770 of SEQ ID NO: 916049
aguuaaggccauggacauu

SEQ ID NO: 1126507 - RNA, 19 nt, Artificial Sequence
  Description of Artificial Sequence: Synthetic oligonucleotide
  Antisense strand to SEQ ID NO: 1126506
aauguccauggccuuaacu

SEQ ID NO: 1126508 - RNA, 19 nt, Artificial Sequence
  Description of Artificial Sequence: Synthetic oligonucleotide
  Sense strand starting at position 2799 of SEQ ID NO: 916049
gggaacucgucccuuucua

SEQ ID NO: 1126509 - RNA, 19 nt, Artificial Sequence
  Description of Artificial Sequence: Synthetic oligonucleotide
  Antisense strand to SEQ ID NO: 1126508
uagaaagggacgaguuccc

SEQ ID NO: 1126510 - RNA, 19 nt, Artificial Sequence
  Description of Artificial Sequence: Synthetic oligonucleotide
  Sense strand starting at position 2821 of SEQ ID NO: 916049
uucuguucuuucccgggau

SEQ ID NO: 1126511 - RNA, 19 nt, Artificial Sequence
  Description of Artificial Sequence: Synthetic oligonucleotide
  Antisense strand to SEQ ID NO: 1126510
aucccgggaaagaacagaa

SEQ ID NO: 1126512 - RNA, 19 nt, Artificial Sequence
  Description of Artificial Sequence: Synthetic oligonucleotide
  Sense strand starting at position 2825 of SEQ ID NO: 916049
guucuuucccgggauugua

SEQ ID NO: 1126513 - RNA, 19 nt, Artificial Sequence
  Description of Artificial Sequence: Synthetic oligonucleotide
  Antisense strand to SEQ ID NO: 1126512
uacaaucccgggaaagaac

SEQ ID NO: 1126514 - RNA, 19 nt, Artificial Sequence
  Description of Artificial Sequence: Synthetic oligonucleotide
  Sense strand starting at position 2843 of SEQ ID NO: 916049
agcaguuuccucuaccuga

SEQ ID NO: 1126515 - RNA, 19 nt, Artificial Sequence
  Description of Artificial Sequence: Synthetic oligonucleotide
  Antisense strand to SEQ ID NO: 1126514
ucagguagaggaaacugcu

SEQ ID NO: 1126516 - RNA, 19 nt, Artificial Sequence
  Description of Artificial Sequence: Synthetic oligonucleotide
  Sense strand starting at position 3225 of SEQ ID NO: 916049
acccaucaucuugguuuga

SEQ ID NO: 1126517 - RNA, 19 nt, Artificial Sequence
  Description of Artificial Sequence: Synthetic oligonucleotide
  Antisense strand to SEQ ID NO: 1126516
ucaaaccaagaugaugggu

SEQ ID NO: 1126518 - RNA, 19 nt, Artificial Sequence
  Description of Artificial Sequence: Synthetic oligonucleotide
  Sense strand starting at position 3234 of SEQ ID NO: 916049
cuugguuugagccaaaguu

SEQ ID NO: 1126519 - RNA, 19 nt, Artificial Sequence
  Description of Artificial Sequence: Synthetic oligonucleotide
  Antisense strand to SEQ ID NO: 1126518
aacuuuggcucaaaccaag

SEQ ID NO: 1126520 - RNA, 19 nt, Artificial Sequence
  Description of Artificial Sequence: Synthetic oligonucleotide
  Sense strand starting at position 3315 of SEQ ID NO: 916049
gcaccuaugcuacagauga

SEQ ID NO: 1126521 - RNA, 19 nt, Artificial Sequence
  Description of Artificial Sequence: Synthetic oligonucleotide
  Antisense strand to SEQ ID NO: 1126520
ucaucuguagcauaggugc

SEQ ID NO: 1126522 - RNA, 19 nt, Artificial Sequence
  Description of Artificial Sequence: Synthetic oligonucleotide
  Sense strand starting at position 3325 of SEQ ID NO: 916049
uacagaugagcuugaugug

SEQ ID NO: 1126523 - RNA, 19 nt, Artificial Sequence
  Description of Artificial Sequence: Synthetic oligonucleotide
  Antisense strand to SEQ ID NO: 1126522
cacaucaagcucaucugua

SEQ ID NO: 1126524 - RNA, 19 nt, Artificial Sequence
  Description of Artificial Sequence: Synthetic oligonucleotide
  Sense strand starting at position 3334 of SEQ ID NO: 916049
gcuugauguguagcuuguu

SEQ ID NO: 1126525 - RNA, 19 nt, Artificial Sequence
  Description of Artificial Sequence: Synthetic oligonucleotide
  Antisense strand to SEQ ID NO: 1126524
aacaagcuacacaucaagc

SEQ ID NO: 1126526 - RNA, 19 nt, Artificial Sequence
  Description of Artificial Sequence: Synthetic oligonucleotide
  Sense strand starting at position 3359 of SEQ ID NO: 916049
gccacaucuuguccacuuu

SEQ ID NO: 1126527 - RNA, 19 nt, Artificial Sequence
  Description of Artificial Sequence: Synthetic oligonucleotide
  Antisense strand to SEQ ID NO: 1126526
aaaguggacaagauguggc

SEQ ID NO: 1126528 - RNA, 19 nt, Artificial Sequence
  Description of Artificial Sequence: Synthetic oligonucleotide
  Sense strand starting at position 3380 of SEQ ID NO: 916049
gugccuaccucaucucaua

SEQ ID NO: 1126529 - RNA, 19 nt, Artificial Sequence
  Description of Artificial Sequence: Synthetic oligonucleotide
  Antisense strand to SEQ ID NO: 1126528
uaugagaugagguaggcac

SEQ ID NO: 1126530 - RNA, 19 nt, Artificial Sequence
  Description of Artificial Sequence: Synthetic oligonucleotide
  Sense strand starting at position 3475 of SEQ ID NO: 916049
ucgagacucagagagguuu

SEQ ID NO: 1126531 - RNA, 19 nt, Artificial Sequence
  Description of Artificial Sequence: Synthetic oligonucleotide
  Antisense strand to SEQ ID NO: 1126530
aaaccucucugagucucga

SEQ ID NO: 1126532 - RNA, 19 nt, Artificial Sequence
  Description of Artificial Sequence: Synthetic oligonucleotide
  Sense strand starting at position 3483 of SEQ ID NO: 916049
cagagagguuuccugucca

SEQ ID NO: 1126533 - RNA, 19 nt, Artificial Sequence
  Description of Artificial Sequence: Synthetic oligonucleotide
  Antisense strand to SEQ ID NO: 1126532
uggacaggaaaccucucug

SEQ ID NO: 1126534 - RNA, 19 nt, Artificial Sequence
  Description of Artificial Sequence: Synthetic oligonucleotide
  Sense strand starting at position 3487 of SEQ ID NO: 916049
gagguuuccuguccaggga

SEQ ID NO: 1126535 - RNA, 19 nt, Artificial Sequence
  Description of Artificial Sequence: Synthetic oligonucleotide
  Antisense strand to SEQ ID NO: 1126534
ucccuggacaggaaaccuc

SEQ ID NO: 1126536 - RNA, 19 nt, Artificial Sequence
  Description of Artificial Sequence: Synthetic oligonucleotide
  Sense strand starting at position 3490 of SEQ ID NO: 916049
guuuccuguccagggacau

SEQ ID NO: 1126537 - RNA, 19 nt, Artificial Sequence
  Description of Artificial Sequence: Synthetic oligonucleotide
  Antisense strand to SEQ ID NO: 1126536
augucccuggacaggaaac

SEQ ID NO: 1126538 - RNA, 19 nt, Artificial Sequence
  Description of Artificial Sequence: Synthetic oligonucleotide
  Sense strand starting at position 3537 of SEQ ID NO: 916049
agaugcaagucuccuaaca

SEQ ID NO: 1126539 - RNA, 19 nt, Artificial Sequence
  Description of Artificial Sequence: Synthetic oligonucleotide
  Antisense strand to SEQ ID NO: 1126538
uguuaggagacuugcaucu

SEQ ID NO: 1126540 - RNA, 19 nt, Artificial Sequence
  Description of Artificial Sequence: Synthetic oligonucleotide
  Sense strand starting at position 3645 of SEQ ID NO: 916049
agguccugcugucuuacaa

SEQ ID NO: 1126541 - RNA, 19 nt, Artificial Sequence
  Description of Artificial Sequence: Synthetic oligonucleotide
  Antisense strand to SEQ ID NO: 1126540
uuguaagacagcaggaccu

SEQ ID NO: 1126542 - RNA, 19 nt, Artificial Sequence
  Description of Artificial Sequence: Synthetic oligonucleotide
  Sense strand starting at position 3702 of SEQ ID NO: 916049
ugcagauguuuccuugaug

SEQ ID NO: 1126543 - RNA, 19 nt, Artificial Sequence
  Description of Artificial Sequence: Synthetic oligonucleotide
  Antisense strand to SEQ ID NO: 1126542
caucaaggaaacaucugca

SEQ ID NO: 1126544 - RNA, 19 nt, Artificial Sequence
  Description of Artificial Sequence: Synthetic oligonucleotide
  Sense strand starting at position 3723 of SEQ ID NO: 916049
gccuguggucacugauauu

SEQ ID NO: 1126545 - RNA, 19 nt, Artificial Sequence
  Description of Artificial Sequence: Synthetic oligonucleotide
  Antisense strand to SEQ ID NO: 1126544
aauaucagugaccacaggc

SEQ ID NO: 1126546 - RNA, 19 nt, Artificial Sequence
  Description of Artificial Sequence: Synthetic oligonucleotide
  Sense strand starting at position 3726 of SEQ ID NO: 916049
uguggucacugauauuuaa

SEQ ID NO: 1126547 - RNA, 19 nt, Artificial Sequence
  Description of Artificial Sequence: Synthetic oligonucleotide
  Antisense strand to SEQ ID NO: 1126546
uuaaauaucagugaccaca

SEQ ID NO: 1126548 - RNA, 19 nt, Artificial Sequence
  Description of Artificial Sequence: Synthetic oligonucleotide
  Sense strand starting at position 3914 of SEQ ID NO: 916049
gucucauccucuuuaguuu

SEQ ID NO: 1126549 - RNA, 19 nt, Artificial Sequence
  Description of Artificial Sequence: Synthetic oligonucleotide
  Antisense strand to SEQ ID NO: 1126548
aaacuaaagaggaugagac

SEQ ID NO: 1126550 - RNA, 19 nt, Artificial Sequence
  Description of Artificial Sequence: Synthetic oligonucleotide
  Sense strand starting at position 76 of SEQ ID NO: 916050
ggcuuaggucuccagagcu

SEQ ID NO: 1126551 - RNA, 19 nt, Artificial Sequence
  Description of Artificial Sequence: Synthetic oligonucleotide
  Antisense strand to SEQ ID NO: 1126550
agcucuggagaccuaagcc

SEQ ID NO: 1126552 - RNA, 19 nt, Artificial Sequence
  Description of Artificial Sequence: Synthetic oligonucleotide
  Sense strand starting at position 499 of SEQ ID NO: 916050
cuucuagcaccucauguua

SEQ ID NO: 1126553 - RNA, 19 nt, Artificial Sequence
  Description of Artificial Sequence: Synthetic oligonucleotide
  Antisense strand to SEQ ID NO: 1126552
uaacaugaggugcuagaag

SEQ ID NO: 1126554 - RNA, 19 nt, Artificial Sequence
  Description of Artificial Sequence: Synthetic oligonucleotide
  Sense strand starting at position 569 of SEQ ID NO: 916050
cucugauugcagugauauc

SEQ ID NO: 1126555 - RNA, 19 nt, Artificial Sequence
  Description of Artificial Sequence: Synthetic oligonucleotide
  Antisense strand to SEQ ID NO: 1126554
gauaucacugcaaucagag

SEQ ID NO: 1126556 - RNA, 19 nt, Artificial Sequence
  Description of Artificial Sequence: Synthetic oligonucleotide
  Sense strand starting at position 579 of SEQ ID NO: 916050
agugauaucuucucaaagu

SEQ ID NO: 1126557 - RNA, 19 nt, Artificial Sequence
  Description of Artificial Sequence: Synthetic oligonucleotide
  Antisense strand to SEQ ID NO: 1126556
acuuugagaagauaucacu

SEQ ID NO: 1126558 - RNA, 19 nt, Artificial Sequence
  Description of Artificial Sequence: Synthetic oligonucleotide
  Sense strand starting at position 609 of SEQ ID NO: 916050
ucaguuaauuugccagguu

SEQ ID NO: 1126559 - RNA, 19 nt, Artificial Sequence
  Description of Artificial Sequence: Synthetic oligonucleotide
  Antisense strand to SEQ ID NO: 1126558
aaccuggcaaauuaacuga

SEQ ID NO: 1126560 - RNA, 19 nt, Artificial Sequence
  Description of Artificial Sequence: Synthetic oligonucleotide
  Sense strand starting at position 610 of SEQ ID NO: 916050
caguuaauuugccagguuu

SEQ ID NO: 1126561 - RNA, 19 nt, Artificial Sequence
  Description of Artificial Sequence: Synthetic oligonucleotide
  Antisense strand to SEQ ID NO: 1126560
aaaccuggcaaauuaacug

SEQ ID NO: 1126562 - RNA, 19 nt, Artificial Sequence
  Description of Artificial Sequence: Synthetic oligonucleotide
  Sense strand starting at position 612 of SEQ ID NO: 916050
guuaauuugccagguuuac

SEQ ID NO: 1126563 - RNA, 19 nt, Artificial Sequence
  Description of Artificial Sequence: Synthetic oligonucleotide
  Antisense strand to SEQ ID NO: 1126562
guaaaccuggcaaauuaac

SEQ ID NO: 1126564 - RNA, 19 nt, Artificial Sequence
  Description of Artificial Sequence: Synthetic oligonucleotide
  Sense strand starting at position 618 of SEQ ID NO: 916050
uugccagguuuacauauuu

SEQ ID NO: 1126565 - RNA, 19 nt, Artificial Sequence
  Description of Artificial Sequence: Synthetic oligonucleotide
  Antisense strand to SEQ ID NO: 1126564
aaauauguaaaccuggcaa

SEQ ID NO: 1126566 - RNA, 19 nt, Artificial Sequence
  Description of Artificial Sequence: Synthetic oligonucleotide
  Sense strand starting at position 774 of SEQ ID NO: 916050
aguggugugcgugugaguu

SEQ ID NO: 1126567 - RNA, 19 nt, Artificial Sequence
  Description of Artificial Sequence: Synthetic oligonucleotide
  Antisense strand to SEQ ID NO: 1126566
aacucacacgcacaccacu

SEQ ID NO: 1126568 - RNA, 19 nt, Artificial Sequence
  Description of Artificial Sequence: Synthetic oligonucleotide
  Sense strand starting at position 846 of SEQ ID NO: 916050
gcacaagugcugucgcuga

SEQ ID NO: 1126569 - RNA, 19 nt, Artificial Sequence
  Description of Artificial Sequence: Synthetic oligonucleotide
  Antisense strand to SEQ ID NO: 1126568
ucagcgacagcacuugugc

SEQ ID NO: 1126570 - RNA, 19 nt, Artificial Sequence
  Description of Artificial Sequence: Synthetic oligonucleotide
  Sense strand starting at position 850 of SEQ ID NO: 916050
aagugcugucgcugagaau

SEQ ID NO: 1126571 - RNA, 19 nt, Artificial Sequence
  Description of Artificial Sequence: Synthetic oligonucleotide
  Antisense strand to SEQ ID NO: 1126570
auucucagcgacagcacuu

SEQ ID NO: 1126572 - RNA, 19 nt, Artificial Sequence
  Description of Artificial Sequence: Synthetic oligonucleotide
  Sense strand starting at position 851 of SEQ ID NO: 916050
agugcugucgcugagaaua

SEQ ID NO: 1126573 - RNA, 19 nt, Artificial Sequence
  Description of Artificial Sequence: Synthetic oligonucleotide
  Antisense strand to SEQ ID NO: 1126572
uauucucagcgacagcacu

SEQ ID NO: 1126574 - RNA, 19 nt, Artificial Sequence
  Description of Artificial Sequence: Synthetic oligonucleotide
  Sense strand starting at position 856 of SEQ ID NO: 916050
ugucgcugagaauauaaau

SEQ ID NO: 1126575 - RNA, 19 nt, Artificial Sequence
  Description of Artificial Sequence: Synthetic oligonucleotide
  Antisense strand to SEQ ID NO: 1126574
auuuauauucucagcgaca

SEQ ID NO: 1126576 - RNA, 19 nt, Artificial Sequence
  Description of Artificial Sequence: Synthetic oligonucleotide
  Sense strand starting at position 888 of SEQ ID NO: 916050
gggugugugccuugaagag

SEQ ID NO: 1126577 - RNA, 19 nt, Artificial Sequence
  Description of Artificial Sequence: Synthetic oligonucleotide
  Antisense strand to SEQ ID NO: 1126576
cucuucaaggcacacaccc

SEQ ID NO: 1126578 - RNA, 19 nt, Artificial Sequence
  Description of Artificial Sequence: Synthetic oligonucleotide
  Sense strand starting at position 1009 of SEQ ID NO: 916050
uggagagcugcuuguugau

SEQ ID NO: 1126579 - RNA, 19 nt, Artificial Sequence
  Description of Artificial Sequence: Synthetic oligonucleotide
  Antisense strand to SEQ ID NO: 1126578
aucaacaagcagcucucca

SEQ ID NO: 1126580 - RNA, 19 nt, Artificial Sequence
  Description of Artificial Sequence: Synthetic oligonucleotide
  Sense strand starting at position 1071 of SEQ ID NO: 916050
agcucuuauuuggguggaa

SEQ ID NO: 1126581 - RNA, 19 nt, Artificial Sequence
  Description of Artificial Sequence: Synthetic oligonucleotide
  Antisense strand to SEQ ID NO: 1126580
uuccacccaaauaagagcu

SEQ ID NO: 1126582 - RNA, 19 nt, Artificial Sequence
  Description of Artificial Sequence: Synthetic oligonucleotide
  Sense strand starting at position 1219 of SEQ ID NO: 916050
gugagugaugacuaagcau

SEQ ID NO: 1126583 - RNA, 19 nt, Artificial Sequence
  Description of Artificial Sequence: Synthetic oligonucleotide
  Antisense strand to SEQ ID NO: 1126582
augcuuagucaucacucac

SEQ ID NO: 1126584 - RNA, 19 nt, Artificial Sequence
  Description of Artificial Sequence: Synthetic oligonucleotide
  Sense strand starting at position 1268 of SEQ ID NO: 916050
gcgauugugcuuugaggaa

SEQ ID NO: 1126585 - RNA, 19 nt, Artificial Sequence
  Description of Artificial Sequence: Synthetic oligonucleotide
  Antisense strand to SEQ ID NO: 1126584
uuccucaaagcacaaucgc

SEQ ID NO: 1126586 - RNA, 19 nt, Artificial Sequence
  Description of Artificial Sequence: Synthetic oligonucleotide
  Sense strand starting at position 1272 of SEQ ID NO: 916050
uugugcuuugaggaauguu

SEQ ID NO: 1126587 - RNA, 19 nt, Artificial Sequence
  Description of Artificial Sequence: Synthetic oligonucleotide
  Antisense strand to SEQ ID NO: 1126586
aacauuccucaaagcacaa

SEQ ID NO: 1126588 - RNA, 19 nt, Artificial Sequence
  Description of Artificial Sequence: Synthetic oligonucleotide
  Sense strand starting at position 1280 of SEQ ID NO: 916050
ugaggaauguuagccuugu

SEQ ID NO: 1126589 - RNA, 19 nt, Artificial Sequence
  Description of Artificial Sequence: Synthetic oligonucleotide
  Antisense strand to SEQ ID NO: 1126588
acaaggcuaacauuccuca

SEQ ID NO: 1126590 - RNA, 19 nt, Artificial Sequence
  Description of Artificial Sequence: Synthetic oligonucleotide
  Sense strand starting at position 1286 of SEQ ID NO: 916050
auguuagccuugucugcaa

SEQ ID NO: 1126591 - RNA, 19 nt, Artificial Sequence
  Description of Artificial Sequence: Synthetic oligonucleotide
  Antisense strand to SEQ ID NO: 1126590
uugcagacaaggcuaacau

SEQ ID NO: 1126592 - RNA, 19 nt, Artificial Sequence
  Description of Artificial Sequence: Synthetic oligonucleotide
  Sense strand starting at position 1289 of SEQ ID NO: 916050
uuagccuugucugcaaauu

SEQ ID NO: 1126593 - RNA, 19 nt, Artificial Sequence
  Description of Artificial Sequence: Synthetic oligonucleotide
  Antisense strand to SEQ ID NO: 1126592
aauuugcagacaaggcuaa

SEQ ID NO: 1126594 - RNA, 19 nt, Artificial Sequence
  Description of Artificial Sequence: Synthetic oligonucleotide
  Sense strand starting at position 1309 of SEQ ID NO: 916050
acaguuccucucuaacgaa

SEQ ID NO: 1126595 - RNA, 19 nt, Artificial Sequence
  Description of Artificial Sequence: Synthetic oligonucleotide
  Antisense strand to SEQ ID NO: 1126594
uucguuagagaggaacugu

SEQ ID NO: 1126596 - RNA, 19 nt, Artificial Sequence
  Description of Artificial Sequence: Synthetic oligonucleotide
  Sense strand starting at position 1408 of SEQ ID NO: 916050
ccagaacuccggcaugcua

SEQ ID NO: 1126597 - RNA, 19 nt, Artificial Sequence
  Description of Artificial Sequence: Synthetic oligonucleotide
  Antisense strand to SEQ ID NO: 1126596
uagcaugccggaguucugg

SEQ ID NO: 1126598 - RNA, 19 nt, Artificial Sequence
  Description of Artificial Sequence: Synthetic oligonucleotide
  Sense strand starting at position 1476 of SEQ ID NO: 916050
gucuccucuuugcucaaga

SEQ ID NO: 1126599 - RNA, 19 nt, Artificial Sequence
  Description of Artificial Sequence: Synthetic oligonucleotide
  Antisense strand to SEQ ID NO: 1126598
ucuugagcaaagaggagac

SEQ ID NO: 1126600 - RNA, 19 nt, Artificial Sequence
  Description of Artificial Sequence: Synthetic oligonucleotide
  Sense strand starting at position 1547 of SEQ ID NO: 916050
ccuaaugcuuuggcaagau

SEQ ID NO: 1126601 - RNA, 19 nt, Artificial Sequence
  Description of Artificial Sequence: Synthetic oligonucleotide
  Antisense strand to SEQ ID NO: 1126600
aucuugccaaagcauuagg

SEQ ID NO: 1126602 - RNA, 19 nt, Artificial Sequence
  Description of Artificial Sequence: Synthetic oligonucleotide
  Sense strand starting at position 1557 of SEQ ID NO: 916050
uggcaagauucuccagggu

SEQ ID NO: 1126603 - RNA, 19 nt, Artificial Sequence
  Description of Artificial Sequence: Synthetic oligonucleotide
  Antisense strand to SEQ ID NO: 1126602
acccuggagaaucuugcca

SEQ ID NO: 1126604 - RNA, 19 nt, Artificial Sequence
  Description of Artificial Sequence: Synthetic oligonucleotide
  Sense strand starting at position 1956 of SEQ ID NO: 916050
gcauguugccgauggagua

SEQ ID NO: 1126605 - RNA, 19 nt, Artificial Sequence
  Description of Artificial Sequence: Synthetic oligonucleotide
  Antisense strand to SEQ ID NO: 1126604
uacuccaucggcaacaugc

SEQ ID NO: 1126606 - RNA, 19 nt, Artificial Sequence
  Description of Artificial Sequence: Synthetic oligonucleotide
  Sense strand starting at position 1982 of SEQ ID NO: 916050
gccuucuugcuuggaccaa

SEQ ID NO: 1126607 - RNA, 19 nt, Artificial Sequence
  Description of Artificial Sequence: Synthetic oligonucleotide
  Antisense strand to SEQ ID NO: 1126606
uugguccaagcaagaaggc

SEQ ID NO: 1126608 - RNA, 19 nt, Artificial Sequence
  Description of Artificial Sequence: Synthetic oligonucleotide
  Sense strand starting at position 2031 of SEQ ID NO: 916050
cugacugucuucuugccaa

SEQ ID NO: 1126609 - RNA, 19 nt, Artificial Sequence
  Description of Artificial Sequence: Synthetic oligonucleotide
  Antisense strand to SEQ ID NO: 1126608
uuggcaagaagacagucag

SEQ ID NO: 1126610 - RNA, 19 nt, Artificial Sequence
  Description of Artificial Sequence: Synthetic oligonucleotide
  Sense strand starting at position 2317 of SEQ ID NO: 916050
agacuugcccugugcacua

SEQ ID NO: 1126611 - RNA, 19 nt, Artificial Sequence
  Description of Artificial Sequence: Synthetic oligonucleotide
  Antisense strand to SEQ ID NO: 1126610
uagugcacagggcaagucu

SEQ ID NO: 1126612 - RNA, 19 nt, Artificial Sequence
  Description of Artificial Sequence: Synthetic oligonucleotide
  Sense strand starting at position 2455 of SEQ ID NO: 916050
gguguaaaugcagacacaa

SEQ ID NO: 1126613 - RNA, 19 nt, Artificial Sequence
  Description of Artificial Sequence: Synthetic oligonucleotide
  Antisense strand to SEQ ID NO: 1126612
uugugucugcauuuacacc

SEQ ID NO: 1126614 - RNA, 19 nt, Artificial Sequence
  Description of Artificial Sequence: Synthetic oligonucleotide
  Sense strand starting at position 2681 of SEQ ID NO: 916050
cgagguuccugcaggagau

SEQ ID NO: 1126615 - RNA, 19 nt, Artificial Sequence
  Description of Artificial Sequence: Synthetic oligonucleotide
  Antisense strand to SEQ ID NO: 1126614
aucuccugcaggaaccucg

SEQ ID NO: 1126616 - RNA, 19 nt, Artificial Sequence
  Description of Artificial Sequence: Synthetic oligonucleotide
  Sense strand starting at position 2953 of SEQ ID NO: 916050
gauugagacuacucuggcu

SEQ ID NO: 1126617 - RNA, 19 nt, Artificial Sequence
  Description of Artificial Sequence: Synthetic oligonucleotide
  Antisense strand to SEQ ID NO: 1126616
agccagaguagucucaauc

SEQ ID NO: 1126618 - RNA, 19 nt, Artificial Sequence
  Description of Artificial Sequence: Synthetic oligonucleotide
  Sense strand starting at position 2955 of SEQ ID NO: 916050
uugagacuacucuggcuaa

SEQ ID NO: 1126619 - RNA, 19 nt, Artificial Sequence
  Description of Artificial Sequence: Synthetic oligonucleotide
  Antisense strand to SEQ ID NO: 1126618
uuagccagaguagucucaa

SEQ ID NO: 1126620 - RNA, 19 nt, Artificial Sequence
  Description of Artificial Sequence: Synthetic oligonucleotide
  Sense strand starting at position 3467 of SEQ ID NO: 916050
gggugcagcagucauggua

SEQ ID NO: 1126621 - RNA, 19 nt, Artificial Sequence
  Description of Artificial Sequence: Synthetic oligonucleotide
  Antisense strand to SEQ ID NO: 1126620
uaccaugacugcugcaccc

SEQ ID NO: 1126622 - RNA, 19 nt, Artificial Sequence
  Description of Artificial Sequence: Synthetic oligonucleotide
  Sense strand starting at position 3631 of SEQ ID NO: 916050
augcucuuugaaggaaucu

SEQ ID NO: 1126623 - RNA, 19 nt, Artificial Sequence
  Description of Artificial Sequence: Synthetic oligonucleotide
  Antisense strand to SEQ ID NO: 1126622
agauuccuucaaagagcau

SEQ ID NO: 1126624 - RNA, 19 nt, Artificial Sequence
  Description of Artificial Sequence: Synthetic oligonucleotide
  Sense strand starting at position 3670 of SEQ ID NO: 916050
ucuagagcuguucagagga

SEQ ID NO: 1126625 - RNA, 19 nt, Artificial Sequence
  Description of Artificial Sequence: Synthetic oligonucleotide
  Antisense strand to SEQ ID NO: 1126624
uccucugaacagcucuaga

SEQ ID NO: 1126626 - RNA, 19 nt, Artificial Sequence
  Description of Artificial Sequence: Synthetic oligonucleotide
  Sense strand starting at position 3692 of SEQ ID NO: 916050
gcacuuugaugcucagaua

SEQ ID NO: 1126627 - RNA, 19 nt, Artificial Sequence
  Description of Artificial Sequence: Synthetic oligonucleotide
  Antisense strand to SEQ ID NO: 1126626
uaucugagcaucaaagugc

SEQ ID NO: 1126628 - RNA, 19 nt, Artificial Sequence
  Description of Artificial Sequence: Synthetic oligonucleotide
  Sense strand starting at position 3887 of SEQ ID NO: 916050
agguuaccucuuuacauca

SEQ ID NO: 1126629 - RNA, 19 nt, Artificial Sequence
  Description of Artificial Sequence: Synthetic oligonucleotide
  Antisense strand to SEQ ID NO: 1126628
ugauguaaagagguaaccu

SEQ ID NO: 1126630 - RNA, 19 nt, Artificial Sequence
  Description of Artificial Sequence: Synthetic oligonucleotide
  Sense strand starting at position 17 of SEQ ID NO: 916051
uuuaaacuccgcuauaaug

SEQ ID NO: 1126631 - RNA, 19 nt, Artificial Sequence
  Description of Artificial Sequence: Synthetic oligonucleotide
  Antisense strand to SEQ ID NO: 1126630
cauuauagcggaguuuaaa

SEQ ID NO: 1126632 - RNA, 19 nt, Artificial Sequence
  Description of Artificial Sequence: Synthetic oligonucleotide
  Sense strand starting at position 33 of SEQ ID NO: 916051
augugaugucuacaaagcu

SEQ ID NO: 1126633 - RNA, 19 nt, Artificial Sequence
  Description of Artificial Sequence: Synthetic oligonucleotide
  Antisense strand to SEQ ID NO: 1126632
agcuuuguagacaucacau

SEQ ID NO: 1126634 - RNA, 19 nt, Artificial Sequence
  Description of Artificial Sequence: Synthetic oligonucleotide
  Sense strand starting at position 379 of SEQ ID NO: 916051
acuacuccucaguauugau

SEQ ID NO: 1126635 - RNA, 19 nt, Artificial Sequence
  Description of Artificial Sequence: Synthetic oligonucleotide
  Antisense strand to SEQ ID NO: 1126634
aucaauacugaggaguagu

SEQ ID NO: 1126636 - RNA, 19 nt, Artificial Sequence
  Description of Artificial Sequence: Synthetic oligonucleotide
  Sense strand starting at position 457 of SEQ ID NO: 916051
cagucauugucugcauuug

SEQ ID NO: 1126637 - RNA, 19 nt, Artificial Sequence
  Description of Artificial Sequence: Synthetic oligonucleotide
  Antisense strand to SEQ ID NO: 1126636
caaaugcagacaaugacug

SEQ ID NO: 1126638 - RNA, 19 nt, Artificial Sequence
  Description of Artificial Sequence: Synthetic oligonucleotide
  Sense strand starting at position 458 of SEQ ID NO: 916051
agucauugucugcauuugu

SEQ ID NO: 1126639 - RNA, 19 nt, Artificial Sequence
  Description of Artificial Sequence: Synthetic oligonucleotide
  Antisense strand to SEQ ID NO: 1126638
acaaaugcagacaaugacu

SEQ ID NO: 1126640 - RNA, 19 nt, Artificial Sequence
  Description of Artificial Sequence: Synthetic oligonucleotide
  Sense strand starting at position 627 of SEQ ID NO: 916051
aguggugauguagauauua

SEQ ID NO: 1126641 - RNA, 19 nt, Artificial Sequence
  Description of Artificial Sequence: Synthetic oligonucleotide
  Antisense strand to SEQ ID NO: 1126640
uaauaucuacaucaccacu

SEQ ID NO: 1126642 - RNA, 19 nt, Artificial Sequence
  Description of Artificial Sequence: Synthetic oligonucleotide
  Sense strand starting at position 744 of SEQ ID NO: 916051
auuagugacugaguaauuc

SEQ ID NO: 1126643 - RNA, 19 nt, Artificial Sequence
  Description of Artificial Sequence: Synthetic oligonucleotide
  Antisense strand to SEQ ID NO: 1126642
gaauuacucagucacuaau

SEQ ID NO: 1126644 - RNA, 19 nt, Artificial Sequence
  Description of Artificial Sequence: Synthetic oligonucleotide
  Sense strand starting at position 748 of SEQ ID NO: 916051
gugacugaguaauucugaa

SEQ ID NO: 1126645 - RNA, 19 nt, Artificial Sequence
  Description of Artificial Sequence: Synthetic oligonucleotide
  Antisense strand to SEQ ID NO: 1126644
uucagaauuacucagucac

SEQ ID NO: 1126646 - RNA, 19 nt, Artificial Sequence
  Description of Artificial Sequence: Synthetic oligonucleotide
  Sense strand starting at position 876 of SEQ ID NO: 916051
acacuuccagauugugaca

SEQ ID NO: 1126647 - RNA, 19 nt, Artificial Sequence
  Description of Artificial Sequence: Synthetic oligonucleotide
  Antisense strand to SEQ ID NO: 1126646
ugucacaaucuggaagugu

SEQ ID NO: 1126648 - RNA, 19 nt, Artificial Sequence
  Description of Artificial Sequence: Synthetic oligonucleotide
  Sense strand starting at position 1040 of SEQ ID NO: 916051
ggucaucugggucaacuuu

SEQ ID NO: 1126649 - RNA, 19 nt, Artificial Sequence
  Description of Artificial Sequence: Synthetic oligonucleotide
  Antisense strand to SEQ ID NO: 1126648
aaaguugacccagaugacc

SEQ ID NO: 1126650 - RNA, 19 nt, Artificial Sequence
  Description of Artificial Sequence: Synthetic oligonucleotide
  Sense strand starting at position 1447 of SEQ ID NO: 916051
guggaaggccgacaaucau

SEQ ID NO: 1126651 - RNA, 19 nt, Artificial Sequence
  Description of Artificial Sequence: Synthetic oligonucleotide
  Antisense strand to SEQ ID NO: 1126650
augauugucggccuuccac

SEQ ID NO: 1126652 - RNA, 19 nt, Artificial Sequence
  Description of Artificial Sequence: Synthetic oligonucleotide
  Sense strand starting at position 1641 of SEQ ID NO: 916051
gcguggagugacucgcuaa

SEQ ID NO: 1126653 - RNA, 19 nt, Artificial Sequence
  Description of Artificial Sequence: Synthetic oligonucleotide
  Antisense strand to SEQ ID NO: 1126652
uuagcgagucacuccacgc

SEQ ID NO: 1126654 - RNA, 19 nt, Artificial Sequence
  Description of Artificial Sequence: Synthetic oligonucleotide
  Sense strand starting at position 1911 of SEQ ID NO: 916051
gugggugaugcuuuacguu

SEQ ID NO: 1126655 - RNA, 19 nt, Artificial Sequence
  Description of Artificial Sequence: Synthetic oligonucleotide
  Antisense strand to SEQ ID NO: 1126654
aacguaaagcaucacccac

SEQ ID NO: 1126656 - RNA, 19 nt, Artificial Sequence
  Description of Artificial Sequence: Synthetic oligonucleotide
  Sense strand starting at position 2278 of SEQ ID NO: 916051
ucgagcugucggucagcau

SEQ ID NO: 1126657 - RNA, 19 nt, Artificial Sequence
  Description of Artificial Sequence: Synthetic oligonucleotide
  Antisense strand to SEQ ID NO: 1126656
augcugaccgacagcucga

SEQ ID NO: 1126658 - RNA, 19 nt, Artificial Sequence
  Description of Artificial Sequence: Synthetic oligonucleotide
  Sense strand starting at position 2292 of SEQ ID NO: 916051
agcauauugggaggaauug

SEQ ID NO: 1126659 - RNA, 19 nt, Artificial Sequence
  Description of Artificial Sequence: Synthetic oligonucleotide
  Antisense strand to SEQ ID NO: 1126658
caauuccucccaauaugcu

SEQ ID NO: 1126660 - RNA, 19 nt, Artificial Sequence
  Description of Artificial Sequence: Synthetic oligonucleotide
  Sense strand starting at position 2317 of SEQ ID NO: 916051
gcaguccuggguuagagaa

SEQ ID NO: 1126661 - RNA, 19 nt, Artificial Sequence
  Description of Artificial Sequence: Synthetic oligonucleotide
  Antisense strand to SEQ ID NO: 1126660
uucucuaacccaggacugc

SEQ ID NO: 1126662 - RNA, 19 nt, Artificial Sequence
  Description of Artificial Sequence: Synthetic oligonucleotide
  Sense strand starting at position 2429 of SEQ ID NO: 916051
uagugccuucuguaagaag

SEQ ID NO: 1126663 - RNA, 19 nt, Artificial Sequence
  Description of Artificial Sequence: Synthetic oligonucleotide
  Antisense strand to SEQ ID NO: 1126662
cuucuuacagaaggcacua

SEQ ID NO: 1126664 - RNA, 19 nt, Artificial Sequence
  Description of Artificial Sequence: Synthetic oligonucleotide
  Sense strand starting at position 2479 of SEQ ID NO: 916051
aucagaaucugucuugaua

SEQ ID NO: 1126665 - RNA, 19 nt, Artificial Sequence
  Description of Artificial Sequence: Synthetic oligonucleotide
  Antisense strand to SEQ ID NO: 1126664
uaucaagacagauucugau

SEQ ID NO: 1126666 - RNA, 19 nt, Artificial Sequence
  Description of Artificial Sequence: Synthetic oligonucleotide
  Sense strand starting at position 2482 of SEQ ID NO: 916051
agaaucugucuugauaguu

SEQ ID NO: 1126667 - RNA, 19 nt, Artificial Sequence
  Description of Artificial Sequence: Synthetic oligonucleotide
  Antisense strand to SEQ ID NO: 1126666
aacuaucaagacagauucu

SEQ ID NO: 1126668 - RNA, 19 nt, Artificial Sequence
  Description of Artificial Sequence: Synthetic oligonucleotide
  Sense strand starting at position 2488 of SEQ ID NO: 916051
ugucuugauaguuagagug

SEQ ID NO: 1126669 - RNA, 19 nt, Artificial Sequence
  Description of Artificial Sequence: Synthetic oligonucleotide
  Antisense strand to SEQ ID NO: 1126668
cacucuaacuaucaagaca

SEQ ID NO: 1126670 - RNA, 19 nt, Artificial Sequence
  Description of Artificial Sequence: Synthetic oligonucleotide
  Sense strand starting at position 2719 of SEQ ID NO: 916051
aggacucaccuguacuauu

SEQ ID NO: 1126671 - RNA, 19 nt, Artificial Sequence
  Description of Artificial Sequence: Synthetic oligonucleotide
  Antisense strand to SEQ ID NO: 1126670
aauaguacaggugaguccu

SEQ ID NO: 1126672 - RNA, 19 nt, Artificial Sequence
  Description of Artificial Sequence: Synthetic oligonucleotide
  Sense strand starting at position 2779 of SEQ ID NO: 916051
gcgccuucucugguguuua

SEQ ID NO: 1126673 - RNA, 19 nt, Artificial Sequence
  Description of Artificial Sequence: Synthetic oligonucleotide
  Antisense strand to SEQ ID NO: 1126672
uaaacaccagagaaggcgc

SEQ ID NO: 1126674 - RNA, 19 nt, Artificial Sequence
  Description of Artificial Sequence: Synthetic oligonucleotide
  Sense strand starting at position 2977 of SEQ ID NO: 916051
auuacuguacuugacagua

SEQ ID NO: 1126675 - RNA, 19 nt, Artificial Sequence
  Description of Artificial Sequence: Synthetic oligonucleotide
  Antisense strand to SEQ ID NO: 1126674
uacugucaaguacaguaau

SEQ ID NO: 1126676 - RNA, 19 nt, Artificial Sequence
  Description of Artificial Sequence: Synthetic oligonucleotide
  Sense strand starting at position 3053 of SEQ ID NO: 916051
auaaguagcucaguacaaa

SEQ ID NO: 1126677 - RNA, 19 nt, Artificial Sequence
  Description of Artificial Sequence: Synthetic oligonucleotide
  Antisense strand to SEQ ID NO: 1126676
uuuguacugagcuacuuau

SEQ ID NO: 1126678 - RNA, 19 nt, Artificial Sequence
  Description of Artificial Sequence: Synthetic oligonucleotide
  Sense strand starting at position 3116 of SEQ ID NO: 916051
uuagauuuauaggaaugac

SEQ ID NO: 1126679 - RNA, 19 nt, Artificial Sequence
  Description of Artificial Sequence: Synthetic oligonucleotide
  Antisense strand to SEQ ID NO: 1126678
gucauuccuauaaaucuaa

SEQ ID NO: 1126680 - RNA, 19 nt, Artificial Sequence
  Description of Artificial Sequence: Synthetic oligonucleotide
  Sense strand starting at position 3210 of SEQ ID NO: 916051
gaaauaggugcuuacauug

SEQ ID NO: 1126681 - RNA, 19 nt, Artificial Sequence
  Description of Artificial Sequence: Synthetic oligonucleotide
  Antisense strand to SEQ ID NO: 1126680
caauguaagcaccuauuuc

SEQ ID NO: 1126682 - RNA, 19 nt, Artificial Sequence
  Description of Artificial Sequence: Synthetic oligonucleotide
  Sense strand starting at position 3279 of SEQ ID NO: 916051
acuuaaauagugugauuga

SEQ ID NO: 1126683 - RNA, 19 nt, Artificial Sequence
  Description of Artificial Sequence: Synthetic oligonucleotide
  Antisense strand to SEQ ID NO: 1126682
ucaaucacacuauuuaagu

SEQ ID NO: 1126684 - RNA, 19 nt, Artificial Sequence
  Description of Artificial Sequence: Synthetic oligonucleotide
  Sense strand starting at position 3282 of SEQ ID NO: 916051
uaaauagugugauugaaca

SEQ ID NO: 1126685 - RNA, 19 nt, Artificial Sequence
  Description of Artificial Sequence: Synthetic oligonucleotide
  Antisense strand to SEQ ID NO: 1126684
uguucaaucacacuauuua

SEQ ID NO: 1126686 - RNA, 19 nt, Artificial Sequence
  Description of Artificial Sequence: Synthetic oligonucleotide
  Sense strand starting at position 3368 of SEQ ID NO: 916051
auauuugugaagugcuugu

SEQ ID NO: 1126687 - RNA, 19 nt, Artificial Sequence
  Description of Artificial Sequence: Synthetic oligonucleotide
  Antisense strand to SEQ ID NO: 1126686
acaagcacuucacaaauau

SEQ ID NO: 1126688 - RNA, 19 nt, Artificial Sequence
  Description of Artificial Sequence: Synthetic oligonucleotide
  Sense strand starting at position 3498 of SEQ ID NO: 916051
augggaugguguuucugga

SEQ ID NO: 1126689 - RNA, 19 nt, Artificial Sequence
  Description of Artificial Sequence: Synthetic oligonucleotide
  Antisense strand to SEQ ID NO: 1126688
uccagaaacaccaucccau

SEQ ID NO: 1126690 - RNA, 19 nt, Artificial Sequence
  Description of Artificial Sequence: Synthetic oligonucleotide
  Sense strand starting at position 3506 of SEQ ID NO: 916051
guguuucuggaaagguguu

SEQ ID NO: 1126691 - RNA, 19 nt, Artificial Sequence
  Description of Artificial Sequence: Synthetic oligonucleotide
  Antisense strand to SEQ ID NO: 1126690
aacaccuuuccagaaacac

SEQ ID NO: 1126692 - RNA, 19 nt, Artificial Sequence
  Description of Artificial Sequence: Synthetic oligonucleotide
  Sense strand starting at position 3512 of SEQ ID NO: 916051
cuggaaagguguucugauc

SEQ ID NO: 1126693 - RNA, 19 nt, Artificial Sequence
  Description of Artificial Sequence: Synthetic oligonucleotide
  Antisense strand to SEQ ID NO: 1126692
gaucagaacaccuuuccag

SEQ ID NO: 1126694 - RNA, 19 nt, Artificial Sequence
  Description of Artificial Sequence: Synthetic oligonucleotide
  Sense strand starting at position 3550 of SEQ ID NO: 916051
ccuggaucucgccaagaaa

SEQ ID NO: 1126695 - RNA, 19 nt, Artificial Sequence
  Description of Artificial Sequence: Synthetic oligonucleotide
  Antisense strand to SEQ ID NO: 1126694
uuucuuggcgagauccagg

SEQ ID NO: 1126696 - RNA, 19 nt, Artificial Sequence
  Description of Artificial Sequence: Synthetic oligonucleotide
  Sense strand starting at position 3565 of SEQ ID NO: 916051
gaaagaauuggaggugcau

SEQ ID NO: 1126697 - RNA, 19 nt, Artificial Sequence
  Description of Artificial Sequence: Synthetic oligonucleotide
  Antisense strand to SEQ ID NO: 1126696
augcaccuccaauucuuuc

SEQ ID NO: 1126698 - RNA, 19 nt, Artificial Sequence
  Description of Artificial Sequence: Synthetic oligonucleotide
  Sense strand starting at position 3603 of SEQ ID NO: 916051
uagacuaaggauuguuaua

SEQ ID NO: 1126699 - RNA, 19 nt, Artificial Sequence
  Description of Artificial Sequence: Synthetic oligonucleotide
  Antisense strand to SEQ ID NO: 1126698
uauaacaauccuuagucua

SEQ ID NO: 1126700 - RNA, 19 nt, Artificial Sequence
  Description of Artificial Sequence: Synthetic oligonucleotide
  Sense strand starting at position 3605 of SEQ ID NO: 916051
gacuaaggauuguuauagu

SEQ ID NO: 1126701 - RNA, 19 nt, Artificial Sequence
  Description of Artificial Sequence: Synthetic oligonucleotide
  Antisense strand to SEQ ID NO: 1126700
acuauaacaauccuuaguc

SEQ ID NO: 1126702 - RNA, 19 nt, Artificial Sequence
  Description of Artificial Sequence: Synthetic oligonucleotide
  Sense strand starting at position 3685 of SEQ ID NO: 916051
aggccauuccuagaucuga

SEQ ID NO: 1126703 - RNA, 19 nt, Artificial Sequence
  Description of Artificial Sequence: Synthetic oligonucleotide
  Antisense strand to SEQ ID NO: 1126702
ucagaucuaggaauggccu

SEQ ID NO: 1126704 - RNA, 19 nt, Artificial Sequence
  Description of Artificial Sequence: Synthetic oligonucleotide
  Sense strand starting at position 3922 of SEQ ID NO: 916051
agucuuuaugaucaguauc

SEQ ID NO: 1126705 - RNA, 19 nt, Artificial Sequence
  Description of Artificial Sequence: Synthetic oligonucleotide
  Antisense strand to SEQ ID NO: 1126704
gauacugaucauaaagacu

SEQ ID NO: 1126706 - RNA, 19 nt, Artificial Sequence
  Description of Artificial Sequence: Synthetic oligonucleotide
  Sense strand starting at position 3925 of SEQ ID NO: 916051
cuuuaugaucaguaucuug

SEQ ID NO: 1126707 - RNA, 19 nt, Artificial Sequence
  Description of Artificial Sequence: Synthetic oligonucleotide
  Antisense strand to SEQ ID NO: 1126706
caagauacugaucauaaag

SEQ ID NO: 1126708 - RNA, 19 nt, Artificial Sequence
  Description of Artificial Sequence: Synthetic oligonucleotide
  Sense strand starting at position 3965 of SEQ ID NO: 916051
ugugacuuagaaugacuga

SEQ ID NO: 1126709 - RNA, 19 nt, Artificial Sequence
  Description of Artificial Sequence: Synthetic oligonucleotide
  Antisense strand to SEQ ID NO: 1126708
ucagucauucuaagucaca

SEQ ID NO: 1126710 - RNA, 19 nt, Artificial Sequence
  Description of Artificial Sequence: Synthetic oligonucleotide
  Sense strand starting at position 178 of SEQ ID NO: 916052
cagccugagcgacaagaau

SEQ ID NO: 1126711 - RNA, 19 nt, Artificial Sequence
  Description of Artificial Sequence: Synthetic oligonucleotide
  Antisense strand to SEQ ID NO: 1126710
auucuugucgcucaggcug

SEQ ID NO: 1126712 - RNA, 19 nt, Artificial Sequence
  Description of Artificial Sequence: Synthetic oligonucleotide
  Sense strand starting at position 236 of SEQ ID NO: 916052
ugugaauaaucaguguuuc

SEQ ID NO: 1126713 - RNA, 19 nt, Artificial Sequence
  Description of Artificial Sequence: Synthetic oligonucleotide
  Antisense strand to SEQ ID NO: 1126712
gaaacacugauuauucaca

SEQ ID NO: 1126714 - RNA, 19 nt, Artificial Sequence
  Description of Artificial Sequence: Synthetic oligonucleotide
  Sense strand starting at position 260 of SEQ ID NO: 916052
cccagugcugcauggaauu

SEQ ID NO: 1126715 - RNA, 19 nt, Artificial Sequence
  Description of Artificial Sequence: Synthetic oligonucleotide
  Antisense strand to SEQ ID NO: 1126714
aauuccaugcagcacuggg

SEQ ID NO: 1126716 - RNA, 19 nt, Artificial Sequence
  Description of Artificial Sequence: Synthetic oligonucleotide
  Sense strand starting at position 291 of SEQ ID NO: 916052
ucacuauuauuugagaaug

SEQ ID NO: 1126717 - RNA, 19 nt, Artificial Sequence
  Description of Artificial Sequence: Synthetic oligonucleotide
  Antisense strand to SEQ ID NO: 1126716
cauucucaaauaauaguga

SEQ ID NO: 1126718 - RNA, 19 nt, Artificial Sequence
  Description of Artificial Sequence: Synthetic oligonucleotide
  Sense strand starting at position 301 of SEQ ID NO: 916052
uugagaauguucuaaauac

SEQ ID NO: 1126719 - RNA, 19 nt, Artificial Sequence
  Description of Artificial Sequence: Synthetic oligonucleotide
  Antisense strand to SEQ ID NO: 1126718
guauuuagaacauucucaa

SEQ ID NO: 1126720 - RNA, 19 nt, Artificial Sequence
  Description of Artificial Sequence: Synthetic oligonucleotide
  Sense strand starting at position 417 of SEQ ID NO: 916052
auuugcaacucucaggaga

SEQ ID NO: 1126721 - RNA, 19 nt, Artificial Sequence
  Description of Artificial Sequence: Synthetic oligonucleotide
  Antisense strand to SEQ ID NO: 1126720
ucuccugagaguugcaaau

SEQ ID NO: 1126722 - RNA, 19 nt, Artificial Sequence
  Description of Artificial Sequence: Synthetic oligonucleotide
  Sense strand starting at position 430 of SEQ ID NO: 916052
aggagaguccugugugaca

SEQ ID NO: 1126723 - RNA, 19 nt, Artificial Sequence
  Description of Artificial Sequence: Synthetic oligonucleotide
  Antisense strand to SEQ ID NO: 1126722
ugucacacaggacucuccu

SEQ ID NO: 1126724 - RNA, 19 nt, Artificial Sequence
  Description of Artificial Sequence: Synthetic oligonucleotide
  Sense strand starting at position 432 of SEQ ID NO: 916052
gagaguccugugugacacu

SEQ ID NO: 1126725 - RNA, 19 nt, Artificial Sequence
  Description of Artificial Sequence: Synthetic oligonucleotide
  Antisense strand to SEQ ID NO: 1126724
agugucacacaggacucuc

SEQ ID NO: 1126726 - RNA, 19 nt, Artificial Sequence
  Description of Artificial Sequence: Synthetic oligonucleotide
  Sense strand starting at position 441 of SEQ ID NO: 916052
gugugacacuuauaauuua

SEQ ID NO: 1126727 - RNA, 19 nt, Artificial Sequence
  Description of Artificial Sequence: Synthetic oligonucleotide
  Antisense strand to SEQ ID NO: 1126726
uaaauuauaagugucacac

SEQ ID NO: 1126728 - RNA, 19 nt, Artificial Sequence
  Description of Artificial Sequence: Synthetic oligonucleotide
  Sense strand starting at position 815 of SEQ ID NO: 916052
aaaggugaguauuaauucu

SEQ ID NO: 1126729 - RNA, 19 nt, Artificial Sequence
  Description of Artificial Sequence: Synthetic oligonucleotide
  Antisense strand to SEQ ID NO: 1126728
agaauuaauacucaccuuu

SEQ ID NO: 1126730 - RNA, 19 nt, Artificial Sequence
  Description of Artificial Sequence: Synthetic oligonucleotide
  Sense strand starting at position 878 of SEQ ID NO: 916052
cagguaacuguaggauaga

SEQ ID NO: 1126731 - RNA, 19 nt, Artificial Sequence
  Description of Artificial Sequence: Synthetic oligonucleotide
  Antisense strand to SEQ ID NO: 1126730
ucuauccuacaguuaccug

SEQ ID NO: 1126732 - RNA, 19 nt, Artificial Sequence
  Description of Artificial Sequence: Synthetic oligonucleotide
  Sense strand starting at position 879 of SEQ ID NO: 916052
agguaacuguaggauagau

SEQ ID NO: 1126733 - RNA, 19 nt, Artificial Sequence
  Description of Artificial Sequence: Synthetic oligonucleotide
  Antisense strand to SEQ ID NO: 1126732
aucuauccuacaguuaccu

SEQ ID NO: 1126734 - RNA, 19 nt, Artificial Sequence
  Description of Artificial Sequence: Synthetic oligonucleotide
  Sense strand starting at position 921 of SEQ ID NO: 916052
augucagacuuguuuacag

SEQ ID NO: 1126735 - RNA, 19 nt, Artificial Sequence
  Description of Artificial Sequence: Synthetic oligonucleotide
  Antisense strand to SEQ ID NO: 1126734
cuguaaacaagucugacau

SEQ ID NO: 1126736 - RNA, 19 nt, Artificial Sequence
  Description of Artificial Sequence: Synthetic oligonucleotide
  Sense strand starting at position 923 of SEQ ID NO: 916052
gucagacuuguuuacagac

SEQ ID NO: 1126737 - RNA, 19 nt, Artificial Sequence
  Description of Artificial Sequence: Synthetic oligonucleotide
  Antisense strand to SEQ ID NO: 1126736
gucuguaaacaagucugac

SEQ ID NO: 1126738 - RNA, 19 nt, Artificial Sequence
  Description of Artificial Sequence: Synthetic oligonucleotide
  Sense strand starting at position 936 of SEQ ID NO: 916052
acagacauguugcuuggua

SEQ ID NO: 1126739 - RNA, 19 nt, Artificial Sequence
  Description of Artificial Sequence: Synthetic oligonucleotide
  Antisense strand to SEQ ID NO: 1126738
uaccaagcaacaugucugu

SEQ ID NO: 1126740 - RNA, 19 nt, Artificial Sequence
  Description of Artificial Sequence: Synthetic oligonucleotide
  Sense strand starting at position 937 of SEQ ID NO: 916052
cagacauguugcuugguaa

SEQ ID NO: 1126741 - RNA, 19 nt, Artificial Sequence
  Description of Artificial Sequence: Synthetic oligonucleotide
  Antisense strand to SEQ ID NO: 1126740
uuaccaagcaacaugucug

SEQ ID NO: 1126742 - RNA, 19 nt, Artificial Sequence
  Description of Artificial Sequence: Synthetic oligonucleotide
  Sense strand starting at position 938 of SEQ ID NO: 916052
agacauguugcuugguaac

SEQ ID NO: 1126743 - RNA, 19 nt, Artificial Sequence
  Description of Artificial Sequence: Synthetic oligonucleotide
  Antisense strand to SEQ ID NO: 1126742
guuaccaagcaacaugucu

SEQ ID NO: 1126744 - RNA, 19 nt, Artificial Sequence
  Description of Artificial Sequence: Synthetic oligonucleotide
  Sense strand starting at position 986 of SEQ ID NO: 916052
uuuagagcugcuuaaaguc

SEQ ID NO: 1126745 - RNA, 19 nt, Artificial Sequence
  Description of Artificial Sequence: Synthetic oligonucleotide
  Antisense strand to SEQ ID NO: 1126744
gacuuuaagcagcucuaaa

SEQ ID NO: 1126746 - RNA, 19 nt, Artificial Sequence
  Description of Artificial Sequence: Synthetic oligonucleotide
  Sense strand starting at position 994 of SEQ ID NO: 916052
ugcuuaaagucugaacaga

SEQ ID NO: 1126747 - RNA, 19 nt, Artificial Sequence
  Description of Artificial Sequence: Synthetic oligonucleotide
  Antisense strand to SEQ ID NO: 1126746
ucuguucagacuuuaagca

SEQ ID NO: 1126748 - RNA, 19 nt, Artificial Sequence
  Description of Artificial Sequence: Synthetic oligonucleotide
  Sense strand starting at position 1004 of SEQ ID NO: 916052
cugaacagauuaugaagua

SEQ ID NO: 1126749 - RNA, 19 nt, Artificial Sequence
  Description of Artificial Sequence: Synthetic oligonucleotide
  Antisense strand to SEQ ID NO: 1126748
uacuucauaaucuguucag

SEQ ID NO: 1126750 - RNA, 19 nt, Artificial Sequence
  Description of Artificial Sequence: Synthetic oligonucleotide
  Sense strand starting at position 1049 of SEQ ID NO: 916052
agucuuuccuuauccuaga

SEQ ID NO: 1126751 - RNA, 19 nt, Artificial Sequence
  Description of Artificial Sequence: Synthetic oligonucleotide
  Antisense strand to SEQ ID NO: 1126750
ucuaggauaaggaaagacu

SEQ ID NO: 1126752 - RNA, 19 nt, Artificial Sequence
  Description of Artificial Sequence: Synthetic oligonucleotide
  Sense strand starting at position 1065 of SEQ ID NO: 916052
agagaucuguaagauuuga

SEQ ID NO: 1126753 - RNA, 19 nt, Artificial Sequence
  Description of Artificial Sequence: Synthetic oligonucleotide
  Antisense strand to SEQ ID NO: 1126752
ucaaaucuuacagaucucu

SEQ ID NO: 1126754 - RNA, 19 nt, Artificial Sequence
  Description of Artificial Sequence: Synthetic oligonucleotide
  Sense strand starting at position 1070 of SEQ ID NO: 916052
ucuguaagauuugaaagag

SEQ ID NO: 1126755 - RNA, 19 nt, Artificial Sequence
  Description of Artificial Sequence: Synthetic oligonucleotide
  Antisense strand to SEQ ID NO: 1126754
cucuuucaaaucuuacaga

SEQ ID NO: 1126756 - RNA, 19 nt, Artificial Sequence
  Description of Artificial Sequence: Synthetic oligonucleotide
  Sense strand starting at position 1121 of SEQ ID NO: 916052
aauacuuagcaguggauau

SEQ ID NO: 1126757 - RNA, 19 nt, Artificial Sequence
  Description of Artificial Sequence: Synthetic oligonucleotide
  Antisense strand to SEQ ID NO: 1126756
auauccacugcuaaguauu

SEQ ID NO: 1126758 - RNA, 19 nt, Artificial Sequence
  Description of Artificial Sequence: Synthetic oligonucleotide
  Sense strand starting at position 1134 of SEQ ID NO: 916052
ggauauucuuaagagcaaa

SEQ ID NO: 1126759 - RNA, 19 nt, Artificial Sequence
  Description of Artificial Sequence: Synthetic oligonucleotide
  Antisense strand to SEQ ID NO: 1126758
uuugcucuuaagaauaucc

SEQ ID NO: 1126760 - RNA, 19 nt, Artificial Sequence
  Description of Artificial Sequence: Synthetic oligonucleotide
  Sense strand starting at position 1176 of SEQ ID NO: 916052
guuggacacugaggauuaa

SEQ ID NO: 1126761 - RNA, 19 nt, Artificial Sequence
  Description of Artificial Sequence: Synthetic oligonucleotide
  Antisense strand to SEQ ID NO: 1126760
uuaauccucaguguccaac

SEQ ID NO: 1126762 - RNA, 19 nt, Artificial Sequence
  Description of Artificial Sequence: Synthetic oligonucleotide
  Sense strand starting at position 1230 of SEQ ID NO: 916052
uuagguguuuaucucagua

SEQ ID NO: 1126763 - RNA, 19 nt, Artificial Sequence
  Description of Artificial Sequence: Synthetic oligonucleotide
  Antisense strand to SEQ ID NO: 1126762
uacugagauaaacaccuaa

SEQ ID NO: 1126764 - RNA, 19 nt, Artificial Sequence
  Description of Artificial Sequence: Synthetic oligonucleotide
  Sense strand starting at position 1234 of SEQ ID NO: 916052
guguuuaucucaguaauga

SEQ ID NO: 1126765 - RNA, 19 nt, Artificial Sequence
  Description of Artificial Sequence: Synthetic oligonucleotide
  Antisense strand to SEQ ID NO: 1126764
ucauuacugagauaaacac

SEQ ID NO: 1126766 - RNA, 19 nt, Artificial Sequence
  Description of Artificial Sequence: Synthetic oligonucleotide
  Sense strand starting at position 1235 of SEQ ID NO: 916052
uguuuaucucaguaaugac

SEQ ID NO: 1126767 - RNA, 19 nt, Artificial Sequence
  Description of Artificial Sequence: Synthetic oligonucleotide
  Antisense strand to SEQ ID NO: 1126766
gucauuacugagauaaaca

SEQ ID NO: 1126768 - RNA, 19 nt, Artificial Sequence
  Description of Artificial Sequence: Synthetic oligonucleotide
  Sense strand starting at position 1245 of SEQ ID NO: 916052
aguaaugacagucgacauc

SEQ ID NO: 1126769 - RNA, 19 nt, Artificial Sequence
  Description of Artificial Sequence: Synthetic oligonucleotide
  Antisense strand to SEQ ID NO: 1126768
gaugucgacugucauuacu

SEQ ID NO: 1126770 - RNA, 19 nt, Artificial Sequence
  Description of Artificial Sequence: Synthetic oligonucleotide
  Sense strand starting at position 1321 of SEQ ID NO: 916052
guaaauuaagcuggaggua

SEQ ID NO: 1126771 - RNA, 19 nt, Artificial Sequence
  Description of Artificial Sequence: Synthetic oligonucleotide
  Antisense strand to SEQ ID NO: 1126770
uaccuccagcuuaauuuac

SEQ ID NO: 1126772 - RNA, 19 nt, Artificial Sequence
  Description of Artificial Sequence: Synthetic oligonucleotide
  Sense strand starting at position 1330 of SEQ ID NO: 916052
gcuggagguacuuaaacgu

SEQ ID NO: 1126773 - RNA, 19 nt, Artificial Sequence
  Description of Artificial Sequence: Synthetic oligonucleotide
  Antisense strand to SEQ ID NO: 1126772
acguuuaaguaccuccagc

SEQ ID NO: 1126774 - RNA, 19 nt, Artificial Sequence
  Description of Artificial Sequence: Synthetic oligonucleotide
  Sense strand starting at position 1338 of SEQ ID NO: 916052
uacuuaaacgucuggccaa

SEQ ID NO: 1126775 - RNA, 19 nt, Artificial Sequence
  Description of Artificial Sequence: Synthetic oligonucleotide
  Antisense strand to SEQ ID NO: 1126774
uuggccagacguuuaagua

SEQ ID NO: 1126776 - RNA, 19 nt, Artificial Sequence
  Description of Artificial Sequence: Synthetic oligonucleotide
  Sense strand starting at position 1341 of SEQ ID NO: 916052
uuaaacgucuggccaauua

SEQ ID NO: 1126777 - RNA, 19 nt, Artificial Sequence
  Description of Artificial Sequence: Synthetic oligonucleotide
  Antisense strand to SEQ ID NO: 1126776
uaauuggccagacguuuaa

SEQ ID NO: 1126778 - RNA, 19 nt, Artificial Sequence
  Description of Artificial Sequence: Synthetic oligonucleotide
  Sense strand starting at position 1448 of SEQ ID NO: 916052
acgagcuuccacuacuuua

SEQ ID NO: 1126779 - RNA, 19 nt, Artificial Sequence
  Description of Artificial Sequence: Synthetic oligonucleotide
  Antisense strand to SEQ ID NO: 1126778
uaaaguaguggaagcucgu

SEQ ID NO: 1126780 - RNA, 19 nt, Artificial Sequence
  Description of Artificial Sequence: Synthetic oligonucleotide
  Sense strand starting at position 1493 of SEQ ID NO: 916052
ggcaguuuguggagggaca

SEQ ID NO: 1126781 - RNA, 19 nt, Artificial Sequence
  Description of Artificial Sequence: Synthetic oligonucleotide
  Antisense strand to SEQ ID NO: 1126780
ugucccuccacaaacugcc

SEQ ID NO: 1126782 - RNA, 19 nt, Artificial Sequence
  Description of Artificial Sequence: Synthetic oligonucleotide
  Sense strand starting at position 1494 of SEQ ID NO: 916052
gcaguuuguggagggacaa

SEQ ID NO: 1126783 - RNA, 19 nt, Artificial Sequence
  Description of Artificial Sequence: Synthetic oligonucleotide
  Antisense strand to SEQ ID NO: 1126782
uugucccuccacaaacugc

SEQ ID NO: 1126784 - RNA, 19 nt, Artificial Sequence
  Description of Artificial Sequence: Synthetic oligonucleotide
  Sense strand starting at position 1495 of SEQ ID NO: 916052
caguuuguggagggacaaa

SEQ ID NO: 1126785 - RNA, 19 nt, Artificial Sequence
  Description of Artificial Sequence: Synthetic oligonucleotide
  Antisense strand to SEQ ID NO: 1126784
uuugucccuccacaaacug

SEQ ID NO: 1126786 - RNA, 19 nt, Artificial Sequence
  Description of Artificial Sequence: Synthetic oligonucleotide
  Sense strand starting at position 1794 of SEQ ID NO: 916052
gugaaguaucccgggagag

SEQ ID NO: 1126787 - RNA, 19 nt, Artificial Sequence
  Description of Artificial Sequence: Synthetic oligonucleotide
  Antisense strand to SEQ ID NO: 1126786
cucucccgggauacuucac

SEQ ID NO: 1126788 - RNA, 19 nt, Artificial Sequence
  Description of Artificial Sequence: Synthetic oligonucleotide
  Sense strand starting at position 1796 of SEQ ID NO: 916052
gaaguaucccgggagaggu

SEQ ID NO: 1126789 - RNA, 19 nt, Artificial Sequence
  Description of Artificial Sequence: Synthetic oligonucleotide
  Antisense strand to SEQ ID NO: 1126788
accucucccgggauacuuc

SEQ ID NO: 1126790 - RNA, 19 nt, Artificial Sequence
  Description of Artificial Sequence: Synthetic oligonucleotide
  Sense strand starting at position 13 of SEQ ID NO: 916053
gaacgucuggcagagcauu

SEQ ID NO: 1126791 - RNA, 19 nt, Artificial Sequence
  Description of Artificial Sequence: Synthetic oligonucleotide
  Antisense strand to SEQ ID NO: 1126790
aaugcucugccagacguuc

SEQ ID NO: 1126792 - RNA, 19 nt, Artificial Sequence
  Description of Artificial Sequence: Synthetic oligonucleotide
  Sense strand starting at position 46 of SEQ ID NO: 916053
gcacaaauacuacgaauaa

SEQ ID NO: 1126793 - RNA, 19 nt, Artificial Sequence
  Description of Artificial Sequence: Synthetic oligonucleotide
  Antisense strand to SEQ ID NO: 1126792
uuauucguaguauuugugc

SEQ ID NO: 1126794 - RNA, 19 nt, Artificial Sequence
  Description of Artificial Sequence: Synthetic oligonucleotide
  Sense strand starting at position 58 of SEQ ID NO: 916053
cgaauaaauggaugcguga

SEQ ID NO: 1126795 - RNA, 19 nt, Artificial Sequence
  Description of Artificial Sequence: Synthetic oligonucleotide
  Antisense strand to SEQ ID NO: 1126794
ucacgcauccauuuauucg

SEQ ID NO: 1126796 - RNA, 19 nt, Artificial Sequence
  Description of Artificial Sequence: Synthetic oligonucleotide
  Sense strand starting at position 61 of SEQ ID NO: 916053
auaaauggaugcgugacua

SEQ ID NO: 1126797 - RNA, 19 nt, Artificial Sequence
  Description of Artificial Sequence: Synthetic oligonucleotide
  Antisense strand to SEQ ID NO: 1126796
uagucacgcauccauuuau

SEQ ID NO: 1126798 - RNA, 19 nt, Artificial Sequence
  Description of Artificial Sequence: Synthetic oligonucleotide
  Sense strand starting at position 69 of SEQ ID NO: 916053
augcgugacuagcuaaaua

SEQ ID NO: 1126799 - RNA, 19 nt, Artificial Sequence
  Description of Artificial Sequence: Synthetic oligonucleotide
  Antisense strand to SEQ ID NO: 1126798
uauuuagcuagucacgcau

SEQ ID NO: 1126800 - RNA, 19 nt, Artificial Sequence
  Description of Artificial Sequence: Synthetic oligonucleotide
  Sense strand starting at position 212 of SEQ ID NO: 916053
agggcauuccugcauuaca

SEQ ID NO: 1126801 - RNA, 19 nt, Artificial Sequence
  Description of Artificial Sequence: Synthetic oligonucleotide
  Antisense strand to SEQ ID NO: 1126800
uguaaugcaggaaugcccu

SEQ ID NO: 1126802 - RNA, 19 nt, Artificial Sequence
  Description of Artificial Sequence: Synthetic oligonucleotide
  Sense strand starting at position 292 of SEQ ID NO: 916053
aggccuauggcagaaacau

SEQ ID NO: 1126803 - RNA, 19 nt, Artificial Sequence
  Description of Artificial Sequence: Synthetic oligonucleotide
  Antisense strand to SEQ ID NO: 1126802
auguuucugccauaggccu

SEQ ID NO: 1126804 - RNA, 19 nt, Artificial Sequence
  Description of Artificial Sequence: Synthetic oligonucleotide
  Sense strand starting at position 301 of SEQ ID NO: 916053
gcagaaacaugucuccuuu

SEQ ID NO: 1126805 - RNA, 19 nt, Artificial Sequence
  Description of Artificial Sequence: Synthetic oligonucleotide
  Antisense strand to SEQ ID NO: 1126804
aaaggagacauguuucugc

SEQ ID NO: 1126806 - RNA, 19 nt, Artificial Sequence
  Description of Artificial Sequence: Synthetic oligonucleotide
  Sense strand starting at position 320 of SEQ ID NO: 916053
cuuggagucugaguagacu

SEQ ID NO: 1126807 - RNA, 19 nt, Artificial Sequence
  Description of Artificial Sequence: Synthetic oligonucleotide
  Antisense strand to SEQ ID NO: 1126806
agucuacucagacuccaag

SEQ ID NO: 1126808 - RNA, 19 nt, Artificial Sequence
  Description of Artificial Sequence: Synthetic oligonucleotide
  Sense strand starting at position 383 of SEQ ID NO: 916053
acaccaaagccucagugaa

SEQ ID NO: 1126809 - RNA, 19 nt, Artificial Sequence
  Description of Artificial Sequence: Synthetic oligonucleotide
  Antisense strand to SEQ ID NO: 1126808
uucacugaggcuuuggugu

SEQ ID NO: 1126810 - RNA, 19 nt, Artificial Sequence
  Description of Artificial Sequence: Synthetic oligonucleotide
  Sense strand starting at position 385 of SEQ ID NO: 916053
accaaagccucagugaaua

SEQ ID NO: 1126811 - RNA, 19 nt, Artificial Sequence
  Description of Artificial Sequence: Synthetic oligonucleotide
  Antisense strand to SEQ ID NO: 1126810
uauucacugaggcuuuggu

SEQ ID NO: 1126812 - RNA, 19 nt, Artificial Sequence
  Description of Artificial Sequence: Synthetic oligonucleotide
  Sense strand starting at position 396 of SEQ ID NO: 916053
agugaauaucuuuaucuug

SEQ ID NO: 1126813 - RNA, 19 nt, Artificial Sequence
  Description of Artificial Sequence: Synthetic oligonucleotide
  Antisense strand to SEQ ID NO: 1126812
caagauaaagauauucacu

SEQ ID NO: 1126814 - RNA, 19 nt, Artificial Sequence
  Description of Artificial Sequence: Synthetic oligonucleotide
  Sense strand starting at position 398 of SEQ ID NO: 916053
ugaauaucuuuaucuugga

SEQ ID NO: 1126815 - RNA, 19 nt, Artificial Sequence
  Description of Artificial Sequence: Synthetic oligonucleotide
  Antisense strand to SEQ ID NO: 1126814
uccaagauaaagauauuca

SEQ ID NO: 1126816 - RNA, 19 nt, Artificial Sequence
  Description of Artificial Sequence: Synthetic oligonucleotide
  Sense strand starting at position 442 of SEQ ID NO: 916053
ggugaaaucaugugguuga

SEQ ID NO: 1126817 - RNA, 19 nt, Artificial Sequence
  Description of Artificial Sequence: Synthetic oligonucleotide
  Antisense strand to SEQ ID NO: 1126816
ucaaccacaugauuucacc

SEQ ID NO: 1126818 - RNA, 19 nt, Artificial Sequence
  Description of Artificial Sequence: Synthetic oligonucleotide
  Sense strand starting at position 443 of SEQ ID NO: 916053
gugaaaucaugugguugaa

SEQ ID NO: 1126819 - RNA, 19 nt, Artificial Sequence
  Description of Artificial Sequence: Synthetic oligonucleotide
  Antisense strand to SEQ ID NO: 1126818
uucaaccacaugauuucac

SEQ ID NO: 1126820 - RNA, 19 nt, Artificial Sequence
  Description of Artificial Sequence: Synthetic oligonucleotide
  Sense strand starting at position 445 of SEQ ID NO: 916053
gaaaucaugugguugaaca

SEQ ID NO: 1126821 - RNA, 19 nt, Artificial Sequence
  Description of Artificial Sequence: Synthetic oligonucleotide
  Antisense strand to SEQ ID NO: 1126820
uguucaaccacaugauuuc

SEQ ID NO: 1126822 - RNA, 19 nt, Artificial Sequence
  Description of Artificial Sequence: Synthetic oligonucleotide
  Sense strand starting at position 446 of SEQ ID NO: 916053
aaaucaugugguugaacaa

SEQ ID NO: 1126823 - RNA, 19 nt, Artificial Sequence
  Description of Artificial Sequence: Synthetic oligonucleotide
  Antisense strand to SEQ ID NO: 1126822
uuguucaaccacaugauuu

SEQ ID NO: 1126824 - RNA, 19 nt, Artificial Sequence
  Description of Artificial Sequence: Synthetic oligonucleotide
  Sense strand starting at position 837 of SEQ ID NO: 916053
auagcuguccucugauaaa

SEQ ID NO: 1126825 - RNA, 19 nt, Artificial Sequence
  Description of Artificial Sequence: Synthetic oligonucleotide
  Antisense strand to SEQ ID NO: 1126824
uuuaucagaggacagcuau

SEQ ID NO: 1126826 - RNA, 19 nt, Artificial Sequence
  Description of Artificial Sequence: Synthetic oligonucleotide
  Sense strand starting at position 913 of SEQ ID NO: 916053
aggccuguucugcaacuaa

SEQ ID NO: 1126827 - RNA, 19 nt, Artificial Sequence
  Description of Artificial Sequence: Synthetic oligonucleotide
  Antisense strand to SEQ ID NO: 1126826
uuaguugcagaacaggccu

SEQ ID NO: 1126828 - RNA, 19 nt, Artificial Sequence
  Description of Artificial Sequence: Synthetic oligonucleotide
  Sense strand starting at position 1013 of SEQ ID NO: 916053
acgugcaugaguugacaua

SEQ ID NO: 1126829 - RNA, 19 nt, Artificial Sequence
  Description of Artificial Sequence: Synthetic oligonucleotide
  Antisense strand to SEQ ID NO: 1126828
uaugucaacucaugcacgu

SEQ ID NO: 1126830 - RNA, 19 nt, Artificial Sequence
  Description of Artificial Sequence: Synthetic oligonucleotide
  Sense strand starting at position 1083 of SEQ ID NO: 916053
acucaagcguccuaacaaa

SEQ ID NO: 1126831 - RNA, 19 nt, Artificial Sequence
  Description of Artificial Sequence: Synthetic oligonucleotide
  Antisense strand to SEQ ID NO: 1126830
uuuguuaggacgcuugagu

SEQ ID NO: 1126832 - RNA, 19 nt, Artificial Sequence
  Description of Artificial Sequence: Synthetic oligonucleotide
  Sense strand starting at position 1101 of SEQ ID NO: 916053
aucuuaagagucugaugag

SEQ ID NO: 1126833 - RNA, 19 nt, Artificial Sequence
  Description of Artificial Sequence: Synthetic oligonucleotide
  Antisense strand to SEQ ID NO: 1126832
cucaucagacucuuaagau

SEQ ID NO: 1126834 - RNA, 19 nt, Artificial Sequence
  Description of Artificial Sequence: Synthetic oligonucleotide
  Sense strand starting at position 1102 of SEQ ID NO: 916053
ucuuaagagucugaugagu

SEQ ID NO: 1126835 - RNA, 19 nt, Artificial Sequence
  Description of Artificial Sequence: Synthetic oligonucleotide
  Antisense strand to SEQ ID NO: 1126834
acucaucagacucuuaaga

SEQ ID NO: 1126836 - RNA, 19 nt, Artificial Sequence
  Description of Artificial Sequence: Synthetic oligonucleotide
  Sense strand starting at position 1107 of SEQ ID NO: 916053
agagucugaugaguccauu

SEQ ID NO: 1126837 - RNA, 19 nt, Artificial Sequence
  Description of Artificial Sequence: Synthetic oligonucleotide
  Antisense strand to SEQ ID NO: 1126836
aauggacucaucagacucu

SEQ ID NO: 1126838 - RNA, 19 nt, Artificial Sequence
  Description of Artificial Sequence: Synthetic oligonucleotide
  Sense strand starting at position 1110 of SEQ ID NO: 916053
gucugaugaguccauuccu

SEQ ID NO: 1126839 - RNA, 19 nt, Artificial Sequence
  Description of Artificial Sequence: Synthetic oligonucleotide
  Antisense strand to SEQ ID NO: 1126838
aggaauggacucaucagac

SEQ ID NO: 1126840 - RNA, 19 nt, Artificial Sequence
  Description of Artificial Sequence: Synthetic oligonucleotide
  Sense strand starting at position 2274 of SEQ ID NO: 916053
gggcuucucuuggauguca

SEQ ID NO: 1126841 - RNA, 19 nt, Artificial Sequence
  Description of Artificial Sequence: Synthetic oligonucleotide
  Antisense strand to SEQ ID NO: 1126840
ugacauccaagagaagccc

SEQ ID NO: 1126842 - RNA, 19 nt, Artificial Sequence
  Description of Artificial Sequence: Synthetic oligonucleotide
  Sense strand starting at position 3456 of SEQ ID NO: 916053
auaaauagccaauguuuga

SEQ ID NO: 1126843 - RNA, 19 nt, Artificial Sequence
  Description of Artificial Sequence: Synthetic oligonucleotide
  Antisense strand to SEQ ID NO: 1126842
ucaaacauuggcuauuuau

SEQ ID NO: 1126844 - RNA, 19 nt, Artificial Sequence
  Description of Artificial Sequence: Synthetic oligonucleotide
  Sense strand starting at position 3475 of SEQ ID NO: 916053
ugagguuuccugugugcca

SEQ ID NO: 1126845 - RNA, 19 nt, Artificial Sequence
  Description of Artificial Sequence: Synthetic oligonucleotide
  Antisense strand to SEQ ID NO: 1126844
uggcacacaggaaaccuca

SEQ ID NO: 1126846 - RNA, 19 nt, Artificial Sequence
  Description of Artificial Sequence: Synthetic oligonucleotide
  Sense strand starting at position 3539 of SEQ ID NO: 916053
cuauaaaguugaucuuguu

SEQ ID NO: 1126847 - RNA, 19 nt, Artificial Sequence
  Description of Artificial Sequence: Synthetic oligonucleotide
  Antisense strand to SEQ ID NO: 1126846
aacaagaucaacuuuauag

SEQ ID NO: 1126848 - RNA, 19 nt, Artificial Sequence
  Description of Artificial Sequence: Synthetic oligonucleotide
  Sense strand starting at position 3605 of SEQ ID NO: 916053
gcccaaaguuauguaggua

SEQ ID NO: 1126849 - RNA, 19 nt, Artificial Sequence
  Description of Artificial Sequence: Synthetic oligonucleotide
  Antisense strand to SEQ ID NO: 1126848
uaccuacauaacuuugggc

SEQ ID NO: 1126850 - RNA, 19 nt, Artificial Sequence
  Description of Artificial Sequence: Synthetic oligonucleotide
  Sense strand starting at position 3608 of SEQ ID NO: 916053
caaaguuauguagguaaga

SEQ ID NO: 1126851 - RNA, 19 nt, Artificial Sequence
  Description of Artificial Sequence: Synthetic oligonucleotide
  Antisense strand to SEQ ID NO: 1126850
ucuuaccuacauaacuuug

SEQ ID NO: 1126852 - RNA, 19 nt, Artificial Sequence
  Description of Artificial Sequence: Synthetic oligonucleotide
  Sense strand starting at position 3609 of SEQ ID NO: 916053
aaaguuauguagguaagaa

SEQ ID NO: 1126853 - RNA, 19 nt, Artificial Sequence
  Description of Artificial Sequence: Synthetic oligonucleotide
  Antisense strand to SEQ ID NO: 1126852
uucuuaccuacauaacuuu

SEQ ID NO: 1126854 - RNA, 19 nt, Artificial Sequence
  Description of Artificial Sequence: Synthetic oligonucleotide
  Sense strand starting at position 3624 of SEQ ID NO: 916053
agaagugguagcuaguguu

SEQ ID NO: 1126855 - RNA, 19 nt, Artificial Sequence
  Description of Artificial Sequence: Synthetic oligonucleotide
  Antisense strand to SEQ ID NO: 1126854
aacacuagcuaccacuucu

SEQ ID NO: 1126856 - RNA, 19 nt, Artificial Sequence
  Description of Artificial Sequence: Synthetic oligonucleotide
  Sense strand starting at position 3628 of SEQ ID NO: 916053
gugguagcuaguguuaagu

SEQ ID NO: 1126857 - RNA, 19 nt, Artificial Sequence
  Description of Artificial Sequence: Synthetic oligonucleotide
  Antisense strand to SEQ ID NO: 1126856
acuuaacacuagcuaccac

SEQ ID NO: 1126858 - RNA, 19 nt, Artificial Sequence
  Description of Artificial Sequence: Synthetic oligonucleotide
  Sense strand starting at position 3644 of SEQ ID NO: 916053
agucaaguuuaaucuaaag

SEQ ID NO: 1126859 - RNA, 19 nt, Artificial Sequence
  Description of Artificial Sequence: Synthetic oligonucleotide
  Antisense strand to SEQ ID NO: 1126858
cuuuagauuaaacuugacu

SEQ ID NO: 1126860 - RNA, 19 nt, Artificial Sequence
  Description of Artificial Sequence: Synthetic oligonucleotide
  Sense strand starting at position 3726 of SEQ ID NO: 916053
ggagguguaaaucgaacgu

SEQ ID NO: 1126861 - RNA, 19 nt, Artificial Sequence
  Description of Artificial Sequence: Synthetic oligonucleotide
  Antisense strand to SEQ ID NO: 1126860
acguucgauuuacaccucc

SEQ ID NO: 1126862 - RNA, 19 nt, Artificial Sequence
  Description of Artificial Sequence: Synthetic oligonucleotide
  Sense strand starting at position 3816 of SEQ ID NO: 916053
gagacaaacgcugaucugu

SEQ ID NO: 1126863 - RNA, 19 nt, Artificial Sequence
  Description of Artificial Sequence: Synthetic oligonucleotide
  Antisense strand to SEQ ID NO: 1126862
acagaucagcguuugucuc

SEQ ID NO: 1126864 - RNA, 19 nt, Artificial Sequence
  Description of Artificial Sequence: Synthetic oligonucleotide
  Sense strand starting at position 3818 of SEQ ID NO: 916053
gacaaacgcugaucuguaa

SEQ ID NO: 1126865 - RNA, 19 nt, Artificial Sequence
  Description of Artificial Sequence: Synthetic oligonucleotide
  Antisense strand to SEQ ID NO: 1126864
uuacagaucagcguuuguc

SEQ ID NO: 1126866 - RNA, 19 nt, Artificial Sequence
  Description of Artificial Sequence: Synthetic oligonucleotide
  Sense strand starting at position 3895 of SEQ ID NO: 916053
gugaauaugcugggucucu

SEQ ID NO: 1126867 - RNA, 19 nt, Artificial Sequence
  Description of Artificial Sequence: Synthetic oligonucleotide
  Antisense strand to SEQ ID NO: 1126866
agagacccagcauauucac

SEQ ID NO: 1126868 - RNA, 19 nt, Artificial Sequence
  Description of Artificial Sequence: Synthetic oligonucleotide
  Sense strand starting at position 3963 of SEQ ID NO: 916053
auuugagaaucauacauug

SEQ ID NO: 1126869 - RNA, 19 nt, Artificial Sequence
  Description of Artificial Sequence: Synthetic oligonucleotide
  Antisense strand to SEQ ID NO: 1126868
caauguaugauucucaaau

SEQ ID NO: 1126870 - RNA, 19 nt, Artificial Sequence
  Description of Artificial Sequence: Synthetic oligonucleotide
  Sense strand starting at position 436 of SEQ ID NO: 916054
ggauccuacuagcacagau

SEQ ID NO: 1126871 - RNA, 19 nt, Artificial Sequence
  Description of Artificial Sequence: Synthetic oligonucleotide
  Antisense strand to SEQ ID NO: 1126870
aucugugcuaguaggaucc

SEQ ID NO: 1126872 - RNA, 19 nt, Artificial Sequence
  Description of Artificial Sequence: Synthetic oligonucleotide
  Sense strand starting at position 603 of SEQ ID NO: 916054
ugcagagcauuccucaaga

SEQ ID NO: 1126873 - RNA, 19 nt, Artificial Sequence
  Description of Artificial Sequence: Synthetic oligonucleotide
  Antisense strand to SEQ ID NO: 1126872
ucuugaggaaugcucugca

SEQ ID NO: 1126874 - RNA, 19 nt, Artificial Sequence
  Description of Artificial Sequence: Synthetic oligonucleotide
  Sense strand starting at position 775 of SEQ ID NO: 916054
agaggagucacucgggaga

SEQ ID NO: 1126875 - RNA, 19 nt, Artificial Sequence
  Description of Artificial Sequence: Synthetic oligonucleotide
  Antisense strand to SEQ ID NO: 1126874
ucucccgagugacuccucu

SEQ ID NO: 1126876 - RNA, 19 nt, Artificial Sequence
  Description of Artificial Sequence: Synthetic oligonucleotide
  Sense strand starting at position 1142 of SEQ ID NO: 916054
ggcugaacuuaguuccaca

SEQ ID NO: 1126877 - RNA, 19 nt, Artificial Sequence
  Description of Artificial Sequence: Synthetic oligonucleotide
  Antisense strand to SEQ ID NO: 1126876
uguggaacuaaguucagcc

SEQ ID NO: 1126878 - RNA, 19 nt, Artificial Sequence
  Description of Artificial Sequence: Synthetic oligonucleotide
  Sense strand starting at position 1440 of SEQ ID NO: 916054
aaggcuguccucugggaca

SEQ ID NO: 1126879 - RNA, 19 nt, Artificial Sequence
  Description of Artificial Sequence: Synthetic oligonucleotide
  Antisense strand to SEQ ID NO: 1126878
ugucccagaggacagccuu

SEQ ID NO: 1126880 - RNA, 19 nt, Artificial Sequence
  Description of Artificial Sequence: Synthetic oligonucleotide
  Sense strand starting at position 1665 of SEQ ID NO: 916054
gcaagacuccggcaggguu

SEQ ID NO: 1126881 - RNA, 19 nt, Artificial Sequence
  Description of Artificial Sequence: Synthetic oligonucleotide
  Antisense strand to SEQ ID NO: 1126880
aacccugccggagucuugc

SEQ ID NO: 1126882 - RNA, 19 nt, Artificial Sequence
  Description of Artificial Sequence: Synthetic oligonucleotide
  Sense strand starting at position 1962 of SEQ ID NO: 916054
uccagcgucgccucuuaaa

SEQ ID NO: 1126883 - RNA, 19 nt, Artificial Sequence
  Description of Artificial Sequence: Synthetic oligonucleotide
  Antisense strand to SEQ ID NO: 1126882
uuuaagaggcgacgcugga

SEQ ID NO: 1126884 - RNA, 19 nt, Artificial Sequence
  Description of Artificial Sequence: Synthetic oligonucleotide
  Sense strand starting at position 1974 of SEQ ID NO: 916054
ucuuaaagggccugaaaca

SEQ ID NO: 1126885 - RNA, 19 nt, Artificial Sequence
  Description of Artificial Sequence: Synthetic oligonucleotide
  Antisense strand to SEQ ID NO: 1126884
uguuucaggcccuuuaaga

SEQ ID NO: 1126886 - RNA, 19 nt, Artificial Sequence
  Description of Artificial Sequence: Synthetic oligonucleotide
  Sense strand starting at position 2324 of SEQ ID NO: 916054
gccagagacugcugacauc

SEQ ID NO: 1126887 - RNA, 19 nt, Artificial Sequence
  Description of Artificial Sequence: Synthetic oligonucleotide
  Antisense strand to SEQ ID NO: 1126886
gaugucagcagucucuggc

SEQ ID NO: 1126888 - RNA, 19 nt, Artificial Sequence
  Description of Artificial Sequence: Synthetic oligonucleotide
  Sense strand starting at position 2896 of SEQ ID NO: 916054
cuggaaagcuaucccauaa

SEQ ID NO: 1126889 - RNA, 19 nt, Artificial Sequence
  Description of Artificial Sequence: Synthetic oligonucleotide
  Antisense strand to SEQ ID NO: 1126888
uuaugggauagcuuuccag

SEQ ID NO: 1126890 - RNA, 19 nt, Artificial Sequence
  Description of Artificial Sequence: Synthetic oligonucleotide
  Sense strand starting at position 3112 of SEQ ID NO: 916054
cugucagucuauucuaaca

SEQ ID NO: 1126891 - RNA, 19 nt, Artificial Sequence
  Description of Artificial Sequence: Synthetic oligonucleotide
  Antisense strand to SEQ ID NO: 1126890
uguuagaauagacugacag

SEQ ID NO: 1126892 - RNA, 19 nt, Artificial Sequence
  Description of Artificial Sequence: Synthetic oligonucleotide
  Sense strand starting at position 3202 of SEQ ID NO: 916054
cccuuucugggccaaagua

SEQ ID NO: 1126893 - RNA, 19 nt, Artificial Sequence
  Description of Artificial Sequence: Synthetic oligonucleotide
  Antisense strand to SEQ ID NO: 1126892
uacuuuggcccagaaaggg

SEQ ID NO: 1126894 - RNA, 19 nt, Artificial Sequence
  Description of Artificial Sequence: Synthetic oligonucleotide
  Sense strand starting at position 3215 of SEQ ID NO: 916054
aaaguaguauccuggcaaa

SEQ ID NO: 1126895 - RNA, 19 nt, Artificial Sequence
  Description of Artificial Sequence: Synthetic oligonucleotide
  Antisense strand to SEQ ID NO: 1126894
uuugccaggauacuacuuu

SEQ ID NO: 1126896 - RNA, 19 nt, Artificial Sequence
  Description of Artificial Sequence: Synthetic oligonucleotide
  Sense strand starting at position 3575 of SEQ ID NO: 916054
aucccaucacgaugugaac

SEQ ID NO: 1126897 - RNA, 19 nt, Artificial Sequence
  Description of Artificial Sequence: Synthetic oligonucleotide
  Antisense strand to SEQ ID NO: 1126896
guucacaucgugaugggau

SEQ ID NO: 1126898 - RNA, 19 nt, Artificial Sequence
  Description of Artificial Sequence: Synthetic oligonucleotide
  Sense strand starting at position 3796 of SEQ ID NO: 916054
gggagaacugcugagcacu

SEQ ID NO: 1126899 - RNA, 19 nt, Artificial Sequence
  Description of Artificial Sequence: Synthetic oligonucleotide
  Antisense strand to SEQ ID NO: 1126898
agugcucagcaguucuccc

SEQ ID NO: 1126900 - RNA, 19 nt, Artificial Sequence
  Description of Artificial Sequence: Synthetic oligonucleotide
  Sense strand starting at position 3807 of SEQ ID NO: 916054
ugagcacuguuucccaauu

SEQ ID NO: 1126901 - RNA, 19 nt, Artificial Sequence
  Description of Artificial Sequence: Synthetic oligonucleotide
  Antisense strand to SEQ ID NO: 1126900
aauugggaaacagugcuca

SEQ ID NO: 1126902 - RNA, 19 nt, Artificial Sequence
  Description of Artificial Sequence: Synthetic oligonucleotide
  Sense strand starting at position 3846 of SEQ ID NO: 916054
ucccacugguuccaagaga

SEQ ID NO: 1126903 - RNA, 19 nt, Artificial Sequence
  Description of Artificial Sequence: Synthetic oligonucleotide
  Antisense strand to SEQ ID NO: 1126902
ucucuuggaaccaguggga

SEQ ID NO: 1126904 - RNA, 19 nt, Artificial Sequence
  Description of Artificial Sequence: Synthetic oligonucleotide
  Sense strand starting at position 3878 of SEQ ID NO: 916054
uaagauuuaucgugguccu

SEQ ID NO: 1126905 - RNA, 19 nt, Artificial Sequence
  Description of Artificial Sequence: Synthetic oligonucleotide
  Antisense strand to SEQ ID NO: 1126904
aggaccacgauaaaucuua

SEQ ID NO: 1126906 - RNA, 19 nt, Artificial Sequence
  Description of Artificial Sequence: Synthetic oligonucleotide
  Sense strand starting at position 3879 of SEQ ID NO: 916054
aagauuuaucgugguccuu

SEQ ID NO: 1126907 - RNA, 19 nt, Artificial Sequence
  Description of Artificial Sequence: Synthetic oligonucleotide
  Antisense strand to SEQ ID NO: 1126906
aaggaccacgauaaaucuu

SEQ ID NO: 1126908 - RNA, 19 nt, Artificial Sequence
  Description of Artificial Sequence: Synthetic oligonucleotide
  Sense strand starting at position 3881 of SEQ ID NO: 916054
gauuuaucgugguccuucu

SEQ ID NO: 1126909 - RNA, 19 nt, Artificial Sequence
  Description of Artificial Sequence: Synthetic oligonucleotide
  Antisense strand to SEQ ID NO: 1126908
agaaggaccacgauaaauc

SEQ ID NO: 1126910 - RNA, 19 nt, Artificial Sequence
  Description of Artificial Sequence: Synthetic oligonucleotide
  Sense strand starting at position 3895 of SEQ ID NO: 916054
cuucuagaggcuggaagau

SEQ ID NO: 1126911 - RNA, 19 nt, Artificial Sequence
  Description of Artificial Sequence: Synthetic oligonucleotide
  Antisense strand to SEQ ID NO: 1126910
aucuuccagccucuagaag

SEQ ID NO: 1126912 - RNA, 19 nt, Artificial Sequence
  Description of Artificial Sequence: Synthetic oligonucleotide
  Sense strand starting at position 3904 of SEQ ID NO: 916054
gcuggaagaugauacuuaa

SEQ ID NO: 1126913 - RNA, 19 nt, Artificial Sequence
  Description of Artificial Sequence: Synthetic oligonucleotide
  Antisense strand to SEQ ID NO: 1126912
uuaaguaucaucuuccagc

SEQ ID NO: 1126914 - RNA, 19 nt, Artificial Sequence
  Description of Artificial Sequence: Synthetic oligonucleotide
  Sense strand starting at position 237 of SEQ ID NO: 916055
ggcaaauaauaugcugaaa

SEQ ID NO: 1126915 - RNA, 19 nt, Artificial Sequence
  Description of Artificial Sequence: Synthetic oligonucleotide
  Antisense strand to SEQ ID NO: 1126914
uuucagcauauuauuugcc

SEQ ID NO: 1126916 - RNA, 19 nt, Artificial Sequence
  Description of Artificial Sequence: Synthetic oligonucleotide
  Sense strand starting at position 262 of SEQ ID NO: 916055
accgcaaacuuacugagau

SEQ ID NO: 1126917 - RNA, 19 nt, Artificial Sequence
  Description of Artificial Sequence: Synthetic oligonucleotide
  Antisense strand to SEQ ID NO: 1126916
aucucaguaaguuugcggu

SEQ ID NO: 1126918 - RNA, 19 nt, Artificial Sequence
  Description of Artificial Sequence: Synthetic oligonucleotide
  Sense strand starting at position 263 of SEQ ID NO: 916055
ccgcaaacuuacugagaua

SEQ ID NO: 1126919 - RNA, 19 nt, Artificial Sequence
  Description of Artificial Sequence: Synthetic oligonucleotide
  Antisense strand to SEQ ID NO: 1126918
uaucucaguaaguuugcgg

SEQ ID NO: 1126920 - RNA, 19 nt, Artificial Sequence
  Description of Artificial Sequence: Synthetic oligonucleotide
  Sense strand starting at position 647 of SEQ ID NO: 916055
agugaagaauuccaacuua

SEQ ID NO: 1126921 - RNA, 19 nt, Artificial Sequence
  Description of Artificial Sequence: Synthetic oligonucleotide
  Antisense strand to SEQ ID NO: 1126920
uaaguuggaauucuucacu

SEQ ID NO: 1126922 - RNA, 19 nt, Artificial Sequence
  Description of Artificial Sequence: Synthetic oligonucleotide
  Sense strand starting at position 734 of SEQ ID NO: 916055
ggcagaagugaaugaugcu

SEQ ID NO: 1126923 - RNA, 19 nt, Artificial Sequence
  Description of Artificial Sequence: Synthetic oligonucleotide
  Antisense strand to SEQ ID NO: 1126922
agcaucauucacuucugcc

SEQ ID NO: 1126924 - RNA, 19 nt, Artificial Sequence
  Description of Artificial Sequence: Synthetic oligonucleotide
  Sense strand starting at position 740 of SEQ ID NO: 916055
agugaaugaugcuggauga

SEQ ID NO: 1126925 - RNA, 19 nt, Artificial Sequence
  Description of Artificial Sequence: Synthetic oligonucleotide
  Antisense strand to SEQ ID NO: 1126924
ucauccagcaucauucacu

SEQ ID NO: 1126926 - RNA, 19 nt, Artificial Sequence
  Description of Artificial Sequence: Synthetic oligonucleotide
  Sense strand starting at position 781 of SEQ ID NO: 916055
gcuccagaaugagaagaaa

SEQ ID NO: 1126927 - RNA, 19 nt, Artificial Sequence
  Description of Artificial Sequence: Synthetic oligonucleotide
  Antisense strand to SEQ ID NO: 1126926
uuucuucucauucuggagc

SEQ ID NO: 1126928 - RNA, 19 nt, Artificial Sequence
  Description of Artificial Sequence: Synthetic oligonucleotide
  Sense strand starting at position 949 of SEQ ID NO: 916055
accaucauuugaggauaga

SEQ ID NO: 1126929 - RNA, 19 nt, Artificial Sequence
  Description of Artificial Sequence: Synthetic oligonucleotide
  Antisense strand to SEQ ID NO: 1126928
ucuauccucaaaugauggu

SEQ ID NO: 1126930 - RNA, 19 nt, Artificial Sequence
  Description of Artificial Sequence: Synthetic oligonucleotide
  Sense strand starting at position 1418 of SEQ ID NO: 916055
ggauccuacuagcacagau

SEQ ID NO: 1126931 - RNA, 19 nt, Artificial Sequence
  Description of Artificial Sequence: Synthetic oligonucleotide
  Antisense strand to SEQ ID NO: 1126930
aucugugcuaguaggaucc

SEQ ID NO: 1126932 - RNA, 19 nt, Artificial Sequence
  Description of Artificial Sequence: Synthetic oligonucleotide
  Sense strand starting at position 1585 of SEQ ID NO: 916055
ugcagagcauuccucaaga

SEQ ID NO: 1126933 - RNA, 19 nt, Artificial Sequence
  Description of Artificial Sequence: Synthetic oligonucleotide
  Antisense strand to SEQ ID NO: 1126932
ucuugaggaaugcucugca

SEQ ID NO: 1126934 - RNA, 19 nt, Artificial Sequence
  Description of Artificial Sequence: Synthetic oligonucleotide
  Sense strand starting at position 1757 of SEQ ID NO: 916055
agaggagucacucgggaga

SEQ ID NO: 1126935 - RNA, 19 nt, Artificial Sequence
  Description of Artificial Sequence: Synthetic oligonucleotide
  Antisense strand to SEQ ID NO: 1126934
ucucccgagugacuccucu

SEQ ID NO: 1126936 - RNA, 19 nt, Artificial Sequence
  Description of Artificial Sequence: Synthetic oligonucleotide
  Sense strand starting at position 2124 of SEQ ID NO: 916055
ggcugaacuuaguuccaca

SEQ ID NO: 1126937 - RNA, 19 nt, Artificial Sequence
  Description of Artificial Sequence: Synthetic oligonucleotide
  Antisense strand to SEQ ID NO: 1126936
uguggaacuaaguucagcc

SEQ ID NO: 1126938 - RNA, 19 nt, Artificial Sequence
  Description of Artificial Sequence: Synthetic oligonucleotide
  Sense strand starting at position 2422 of SEQ ID NO: 916055
aaggcuguccucugggaca

SEQ ID NO: 1126939 - RNA, 19 nt, Artificial Sequence
  Description of Artificial Sequence: Synthetic oligonucleotide
  Antisense strand to SEQ ID NO: 1126938
ugucccagaggacagccuu

SEQ ID NO: 1126940 - RNA, 19 nt, Artificial Sequence
  Description of Artificial Sequence: Synthetic oligonucleotide
  Sense strand starting at position 2647 of SEQ ID NO: 916055
gcaagacuccggcaggguu

SEQ ID NO: 1126941 - RNA, 19 nt, Artificial Sequence
  Description of Artificial Sequence: Synthetic oligonucleotide
  Antisense strand to SEQ ID NO: 1126940
aacccugccggagucuugc

SEQ ID NO: 1126942 - RNA, 19 nt, Artificial Sequence
  Description of Artificial Sequence: Synthetic oligonucleotide
  Sense strand starting at position 2944 of SEQ ID NO: 916055
uccagcgucgccucuuaaa

SEQ ID NO: 1126943 - RNA, 19 nt, Artificial Sequence
  Description of Artificial Sequence: Synthetic oligonucleotide
  Antisense strand to SEQ ID NO: 1126942
uuuaagaggcgacgcugga

SEQ ID NO: 1126944 - RNA, 19 nt, Artificial Sequence
  Description of Artificial Sequence: Synthetic oligonucleotide
  Sense strand starting at position 2956 of SEQ ID NO: 916055
ucuuaaagggccugaaaca

SEQ ID NO: 1126945 - RNA, 19 nt, Artificial Sequence
  Description of Artificial Sequence: Synthetic oligonucleotide
  Antisense strand to SEQ ID NO: 1126944
uguuucaggcccuuuaaga

SEQ ID NO: 1126946 - RNA, 19 nt, Artificial Sequence
  Description of Artificial Sequence: Synthetic oligonucleotide
  Sense strand starting at position 3306 of SEQ ID NO: 916055
gccagagacugcugacauc

SEQ ID NO: 1126947 - RNA, 19 nt, Artificial Sequence
  Description of Artificial Sequence: Synthetic oligonucleotide
  Antisense strand to SEQ ID NO: 1126946
gaugucagcagucucuggc

SEQ ID NO: 1126948 - RNA, 19 nt, Artificial Sequence
  Description of Artificial Sequence: Synthetic oligonucleotide
  Sense strand starting at position 3878 of SEQ ID NO: 916055
cuggaaagcuaucccauaa

SEQ ID NO: 1126949 - RNA, 19 nt, Artificial Sequence
  Description of Artificial Sequence: Synthetic oligonucleotide
  Antisense strand to SEQ ID NO: 1126948
uuaugggauagcuuuccag

SEQ ID NO: 1126950 - RNA, 19 nt, Artificial Sequence
  Description of Artificial Sequence: Synthetic oligonucleotide
  Sense strand starting at position 64 of SEQ ID NO: 916056
aagugcuaacgcuaaaguu

SEQ ID NO: 1126951 - RNA, 19 nt, Artificial Sequence
  Description of Artificial Sequence: Synthetic oligonucleotide
  Antisense strand to SEQ ID NO: 1126950
aacuuuagcguuagcacuu

SEQ ID NO: 1126952 - RNA, 19 nt, Artificial Sequence
  Description of Artificial Sequence: Synthetic oligonucleotide
  Sense strand starting at position 72 of SEQ ID NO: 916056
acgcuaaaguuccuucuaa

SEQ ID NO: 1126953 - RNA, 19 nt, Artificial Sequence
  Description of Artificial Sequence: Synthetic oligonucleotide
  Antisense strand to SEQ ID NO: 1126952
uuagaaggaacuuuagcgu

SEQ ID NO: 1126954 - RNA, 19 nt, Artificial Sequence
  Description of Artificial Sequence: Synthetic oligonucleotide
  Sense strand starting at position 73 of SEQ ID NO: 916056
cgcuaaaguuccuucuaag

SEQ ID NO: 1126955 - RNA, 19 nt, Artificial Sequence
  Description of Artificial Sequence: Synthetic oligonucleotide
  Antisense strand to SEQ ID NO: 1126954
cuuagaaggaacuuuagcg

SEQ ID NO: 1126956 - RNA, 19 nt, Artificial Sequence
  Description of Artificial Sequence: Synthetic oligonucleotide
  Sense strand starting at position 121 of SEQ ID NO: 916056
agagcaaaucuaugaagua

SEQ ID NO: 1126957 - RNA, 19 nt, Artificial Sequence
  Description of Artificial Sequence: Synthetic oligonucleotide
  Antisense strand to SEQ ID NO: 1126956
uacuucauagauuugcucu

SEQ ID NO: 1126958 - RNA, 19 nt, Artificial Sequence
  Description of Artificial Sequence: Synthetic oligonucleotide
  Sense strand starting at position 142 of SEQ ID NO: 916056
uacauaggcgcagaaagau

SEQ ID NO: 1126959 - RNA, 19 nt, Artificial Sequence
  Description of Artificial Sequence: Synthetic oligonucleotide
  Antisense strand to SEQ ID NO: 1126958
aucuuucugcgccuaugua

SEQ ID NO: 1126960 - RNA, 19 nt, Artificial Sequence
  Description of Artificial Sequence: Synthetic oligonucleotide
  Sense strand starting at position 154 of SEQ ID NO: 916056
gaaagaugucguuagccca

SEQ ID NO: 1126961 - RNA, 19 nt, Artificial Sequence
  Description of Artificial Sequence: Synthetic oligonucleotide
  Antisense strand to SEQ ID NO: 1126960
ugggcuaacgacaucuuuc

SEQ ID NO: 1126962 - RNA, 19 nt, Artificial Sequence
  Description of Artificial Sequence: Synthetic oligonucleotide
  Sense strand starting at position 169 of SEQ ID NO: 916056
cccagaguaauguguugac

SEQ ID NO: 1126963 - RNA, 19 nt, Artificial Sequence
  Description of Artificial Sequence: Synthetic oligonucleotide
  Antisense strand to SEQ ID NO: 1126962
gucaacacauuacucuggg

SEQ ID NO: 1126964 - RNA, 19 nt, Artificial Sequence
  Description of Artificial Sequence: Synthetic oligonucleotide
  Sense strand starting at position 173 of SEQ ID NO: 916056
gaguaauguguugacagau

SEQ ID NO: 1126965 - RNA, 19 nt, Artificial Sequence
  Description of Artificial Sequence: Synthetic oligonucleotide
  Antisense strand to SEQ ID NO: 1126964
aucugucaacacauuacuc

SEQ ID NO: 1126966 - RNA, 19 nt, Artificial Sequence
  Description of Artificial Sequence: Synthetic oligonucleotide
  Sense strand starting at position 360 of SEQ ID NO: 916056
ugacuugauacuggaaugu

SEQ ID NO: 1126967 - RNA, 19 nt, Artificial Sequence
  Description of Artificial Sequence: Synthetic oligonucleotide
  Antisense strand to SEQ ID NO: 1126966
acauuccaguaucaaguca

SEQ ID NO: 1126968 - RNA, 19 nt, Artificial Sequence
  Description of Artificial Sequence: Synthetic oligonucleotide
  Sense strand starting at position 463 of SEQ ID NO: 916056
gcaggugaaucacuuuagu

SEQ ID NO: 1126969 - RNA, 19 nt, Artificial Sequence
  Description of Artificial Sequence: Synthetic oligonucleotide
  Antisense strand to SEQ ID NO: 1126968
acuaaagugauucaccugc

SEQ ID NO: 1126970 - RNA, 19 nt, Artificial Sequence
  Description of Artificial Sequence: Synthetic oligonucleotide
  Sense strand starting at position 503 of SEQ ID NO: 916056
gggcaauauggcgaaagcu

SEQ ID NO: 1126971 - RNA, 19 nt, Artificial Sequence
  Description of Artificial Sequence: Synthetic oligonucleotide
  Antisense strand to SEQ ID NO: 1126970
agcuuucgccauauugccc

SEQ ID NO: 1126972 - RNA, 19 nt, Artificial Sequence
  Description of Artificial Sequence: Synthetic oligonucleotide
  Sense strand starting at position 816 of SEQ ID NO: 916056
gaguauaaugucggagcua

SEQ ID NO: 1126973 - RNA, 19 nt, Artificial Sequence
  Description of Artificial Sequence: Synthetic oligonucleotide
  Antisense strand to SEQ ID NO: 1126972
uagcuccgacauuauacuc

SEQ ID NO: 1126974 - RNA, 19 nt, Artificial Sequence
  Description of Artificial Sequence: Synthetic oligonucleotide
  Sense strand starting at position 1016 of SEQ ID NO: 916056
gcuuuccagguuuauuaaa

SEQ ID NO: 1126975 - RNA, 19 nt, Artificial Sequence
  Description of Artificial Sequence: Synthetic oligonucleotide
  Antisense strand to SEQ ID NO: 1126974
uuuaauaaaccuggaaagc

SEQ ID NO: 1126976 - RNA, 19 nt, Artificial Sequence
  Description of Artificial Sequence: Synthetic oligonucleotide
  Sense strand starting at position 1237 of SEQ ID NO: 916056
guccacauaucugugaauu

SEQ ID NO: 1126977 - RNA, 19 nt, Artificial Sequence
  Description of Artificial Sequence: Synthetic oligonucleotide
  Antisense strand to SEQ ID NO: 1126976
aauucacagauauguggac

SEQ ID NO: 1126978 - RNA, 19 nt, Artificial Sequence
  Description of Artificial Sequence: Synthetic oligonucleotide
  Sense strand starting at position 1336 of SEQ ID NO: 916056
uauugcauucuggagagua

SEQ ID NO: 1126979 - RNA, 19 nt, Artificial Sequence
  Description of Artificial Sequence: Synthetic oligonucleotide
  Antisense strand to SEQ ID NO: 1126978
uacucuccagaaugcaaua

SEQ ID NO: 1126980 - RNA, 19 nt, Artificial Sequence
  Description of Artificial Sequence: Synthetic oligonucleotide
  Sense strand starting at position 1338 of SEQ ID NO: 916056
uugcauucuggagaguaua

SEQ ID NO: 1126981 - RNA, 19 nt, Artificial Sequence
  Description of Artificial Sequence: Synthetic oligonucleotide
  Antisense strand to SEQ ID NO: 1126980
uauacucuccagaaugcaa

SEQ ID NO: 1126982 - RNA, 19 nt, Artificial Sequence
  Description of Artificial Sequence: Synthetic oligonucleotide
  Sense strand starting at position 1377 of SEQ ID NO: 916056
aguuguaacgaaggcuaaa

SEQ ID NO: 1126983 - RNA, 19 nt, Artificial Sequence
  Description of Artificial Sequence: Synthetic oligonucleotide
  Antisense strand to SEQ ID NO: 1126982
uuuagccuucguuacaacu

SEQ ID NO: 1126984 - RNA, 19 nt, Artificial Sequence
  Description of Artificial Sequence: Synthetic oligonucleotide
  Sense strand starting at position 1391 of SEQ ID NO: 916056
cuaaaugaugugcgugaau

SEQ ID NO: 1126985 - RNA, 19 nt, Artificial Sequence
  Description of Artificial Sequence: Synthetic oligonucleotide
  Antisense strand to SEQ ID NO: 1126984
auucacgcacaucauuuag

SEQ ID NO: 1126986 - RNA, 19 nt, Artificial Sequence
  Description of Artificial Sequence: Synthetic oligonucleotide
  Sense strand starting at position 1393 of SEQ ID NO: 916056
aaaugaugugcgugaauca

SEQ ID NO: 1126987 - RNA, 19 nt, Artificial Sequence
  Description of Artificial Sequence: Synthetic oligonucleotide
  Antisense strand to SEQ ID NO: 1126986
ugauucacgcacaucauuu

SEQ ID NO: 1126988 - RNA, 19 nt, Artificial Sequence
  Description of Artificial Sequence: Synthetic oligonucleotide
  Sense strand starting at position 1394 of SEQ ID NO: 916056
aaugaugugcgugaaucau

SEQ ID NO: 1126989 - RNA, 19 nt, Artificial Sequence
  Description of Artificial Sequence: Synthetic oligonucleotide
  Antisense strand to SEQ ID NO: 1126988
augauucacgcacaucauu

SEQ ID NO: 1126990 - RNA, 19 nt, Artificial Sequence
  Description of Artificial Sequence: Synthetic oligonucleotide
  Sense strand starting at position 1404 of SEQ ID NO: 916056
gugaaucaugcgcaagaau

SEQ ID NO: 1126991 - RNA, 19 nt, Artificial Sequence
  Description of Artificial Sequence: Synthetic oligonucleotide
  Antisense strand to SEQ ID NO: 1126990
auucuugcgcaugauucac

SEQ ID NO: 1126992 - RNA, 19 nt, Artificial Sequence
  Description of Artificial Sequence: Synthetic oligonucleotide
  Sense strand starting at position 1415 of SEQ ID NO: 916056
gcaagaaucggugggcaga

SEQ ID NO: 1126993 - RNA, 19 nt, Artificial Sequence
  Description of Artificial Sequence: Synthetic oligonucleotide
  Antisense strand to SEQ ID NO: 1126992
ucugcccaccgauucuugc

SEQ ID NO: 1126994 - RNA, 19 nt, Artificial Sequence
  Description of Artificial Sequence: Synthetic oligonucleotide
  Sense strand starting at position 1416 of SEQ ID NO: 916056
caagaaucggugggcagaa

SEQ ID NO: 1126995 - RNA, 19 nt, Artificial Sequence
  Description of Artificial Sequence: Synthetic oligonucleotide
  Antisense strand to SEQ ID NO: 1126994
uucugcccaccgauucuug

SEQ ID NO: 1126996 - RNA, 19 nt, Artificial Sequence
  Description of Artificial Sequence: Synthetic oligonucleotide
  Sense strand starting at position 1713 of SEQ ID NO: 916056
ggauucacaucugcggaga

SEQ ID NO: 1126997 - RNA, 19 nt, Artificial Sequence
  Description of Artificial Sequence: Synthetic oligonucleotide
  Antisense strand to SEQ ID NO: 1126996
ucuccgcagaugugaaucc

SEQ ID NO: 1126998 - RNA, 19 nt, Artificial Sequence
  Description of Artificial Sequence: Synthetic oligonucleotide
  Sense strand starting at position 2300 of SEQ ID NO: 916056
cuuaguugucacgagguag

SEQ ID NO: 1126999 - RNA, 19 nt, Artificial Sequence
  Description of Artificial Sequence: Synthetic oligonucleotide
  Antisense strand to SEQ ID NO: 1126998
cuaccucgugacaacuaag

SEQ ID NO: 1127000 - RNA, 19 nt, Artificial Sequence
  Description of Artificial Sequence: Synthetic oligonucleotide
  Sense strand starting at position 2329 of SEQ ID NO: 916056
gacccuuucggguacaguu

SEQ ID NO: 1127001 - RNA, 19 nt, Artificial Sequence
  Description of Artificial Sequence: Synthetic oligonucleotide
  Antisense strand to SEQ ID NO: 1127000
aacuguacccgaaaggguc

SEQ ID NO: 1127002 - RNA, 19 nt, Artificial Sequence
  Description of Artificial Sequence: Synthetic oligonucleotide
  Sense strand starting at position 2463 of SEQ ID NO: 916056
gggucuuccuguucugaac

SEQ ID NO: 1127003 - RNA, 19 nt, Artificial Sequence
  Description of Artificial Sequence: Synthetic oligonucleotide
  Antisense strand to SEQ ID NO: 1127002
guucagaacaggaagaccc

SEQ ID NO: 1127004 - RNA, 19 nt, Artificial Sequence
  Description of Artificial Sequence: Synthetic oligonucleotide
  Sense strand starting at position 2972 of SEQ ID NO: 916056
ugagucucucaacgccaaa

SEQ ID NO: 1127005 - RNA, 19 nt, Artificial Sequence
  Description of Artificial Sequence: Synthetic oligonucleotide
  Antisense strand to SEQ ID NO: 1127004
uuuggcguugagagacuca

SEQ ID NO: 1127006 - RNA, 19 nt, Artificial Sequence
  Description of Artificial Sequence: Synthetic oligonucleotide
  Sense strand starting at position 2975 of SEQ ID NO: 916056
gucucucaacgccaaaguu

SEQ ID NO: 1127007 - RNA, 19 nt, Artificial Sequence
  Description of Artificial Sequence: Synthetic oligonucleotide
  Antisense strand to SEQ ID NO: 1127006
aacuuuggcguugagagac

SEQ ID NO: 1127008 - RNA, 19 nt, Artificial Sequence
  Description of Artificial Sequence: Synthetic oligonucleotide
  Sense strand starting at position 2984 of SEQ ID NO: 916056
cgccaaaguuaaucugaaa

SEQ ID NO: 1127009 - RNA, 19 nt, Artificial Sequence
  Description of Artificial Sequence: Synthetic oligonucleotide
  Antisense strand to SEQ ID NO: 1127008
uuucagauuaacuuuggcg

SEQ ID NO: 1127010 - RNA, 19 nt, Artificial Sequence
  Description of Artificial Sequence: Synthetic oligonucleotide
  Sense strand starting at position 3007 of SEQ ID NO: 916056
aguucagucccugauggga

SEQ ID NO: 1127011 - RNA, 19 nt, Artificial Sequence
  Description of Artificial Sequence: Synthetic oligonucleotide
  Antisense strand to SEQ ID NO: 1127010
ucccaucagggacugaacu

SEQ ID NO: 1127012 - RNA, 19 nt, Artificial Sequence
  Description of Artificial Sequence: Synthetic oligonucleotide
  Sense strand starting at position 3023 of SEQ ID NO: 916056
ggaagcaggguuuggauau

SEQ ID NO: 1127013 - RNA, 19 nt, Artificial Sequence
  Description of Artificial Sequence: Synthetic oligonucleotide
  Antisense strand to SEQ ID NO: 1127012
auauccaaacccugcuucc

SEQ ID NO: 1127014 - RNA, 19 nt, Artificial Sequence
  Description of Artificial Sequence: Synthetic oligonucleotide
  Sense strand starting at position 3053 of SEQ ID NO: 916056
cuguccucccuuuggaauu

SEQ ID NO: 1127015 - RNA, 19 nt, Artificial Sequence
  Description of Artificial Sequence: Synthetic oligonucleotide
  Antisense strand to SEQ ID NO: 1127014
aauuccaaagggaggacag

SEQ ID NO: 1127016 - RNA, 19 nt, Artificial Sequence
  Description of Artificial Sequence: Synthetic oligonucleotide
  Sense strand starting at position 3121 of SEQ ID NO: 916056
ccaaacggucuguagcauu

SEQ ID NO: 1127017 - RNA, 19 nt, Artificial Sequence
  Description of Artificial Sequence: Synthetic oligonucleotide
  Antisense strand to SEQ ID NO: 1127016
aaugcuacagaccguuugg

SEQ ID NO: 1127018 - RNA, 19 nt, Artificial Sequence
  Description of Artificial Sequence: Synthetic oligonucleotide
  Sense strand starting at position 3250 of SEQ ID NO: 916056
ggaaaucuacuuuguagag

SEQ ID NO: 1127019 - RNA, 19 nt, Artificial Sequence
  Description of Artificial Sequence: Synthetic oligonucleotide
  Antisense strand to SEQ ID NO: 1127018
cucuacaaaguagauuucc

SEQ ID NO: 1127020 - RNA, 19 nt, Artificial Sequence
  Description of Artificial Sequence: Synthetic oligonucleotide
  Sense strand starting at position 3251 of SEQ ID NO: 916056
gaaaucuacuuuguagaga

SEQ ID NO: 1127021 - RNA, 19 nt, Artificial Sequence
  Description of Artificial Sequence: Synthetic oligonucleotide
  Antisense strand to SEQ ID NO: 1127020
ucucuacaaaguagauuuc

SEQ ID NO: 1127022 - RNA, 19 nt, Artificial Sequence
  Description of Artificial Sequence: Synthetic oligonucleotide
  Sense strand starting at position 3388 of SEQ ID NO: 916056
cggcaucugcauuagaaug

SEQ ID NO: 1127023 - RNA, 19 nt, Artificial Sequence
  Description of Artificial Sequence: Synthetic oligonucleotide
  Antisense strand to SEQ ID NO: 1127022
cauucuaaugcagaugccg

SEQ ID NO: 1127024 - RNA, 19 nt, Artificial Sequence
  Description of Artificial Sequence: Synthetic oligonucleotide
  Sense strand starting at position 3396 of SEQ ID NO: 916056
gcauuagaauggccagagu

SEQ ID NO: 1127025 - RNA, 19 nt, Artificial Sequence
  Description of Artificial Sequence: Synthetic oligonucleotide
  Antisense strand to SEQ ID NO: 1127024
acucuggccauucuaaugc

SEQ ID NO: 1127026 - RNA, 19 nt, Artificial Sequence
  Description of Artificial Sequence: Synthetic oligonucleotide
  Sense strand starting at position 3515 of SEQ ID NO: 916056
ccgucuuagcuggacauga

SEQ ID NO: 1127027 - RNA, 19 nt, Artificial Sequence
  Description of Artificial Sequence: Synthetic oligonucleotide
  Antisense strand to SEQ ID NO: 1127026
ucauguccagcuaagacgg

SEQ ID NO: 1127028 - RNA, 19 nt, Artificial Sequence
  Description of Artificial Sequence: Synthetic oligonucleotide
  Sense strand starting at position 3691 of SEQ ID NO: 916056
cuuugucucccuuagcuua

SEQ ID NO: 1127029 - RNA, 19 nt, Artificial Sequence
  Description of Artificial Sequence: Synthetic oligonucleotide
  Antisense strand to SEQ ID NO: 1127028
uaagcuaagggagacaaag

SEQ ID NO: 1127030 - RNA, 19 nt, Artificial Sequence
  Description of Artificial Sequence: Synthetic oligonucleotide
  Sense strand starting at position 297 of SEQ ID NO: 916057
aaauguaggcucgaucaaa

SEQ ID NO: 1127031 - RNA, 19 nt, Artificial Sequence
  Description of Artificial Sequence: Synthetic oligonucleotide
  Antisense strand to SEQ ID NO: 1127030
uuugaucgagccuacauuu

SEQ ID NO: 1127032 - RNA, 19 nt, Artificial Sequence
  Description of Artificial Sequence: Synthetic oligonucleotide
  Sense strand starting at position 590 of SEQ ID NO: 916057
cuguauuucuguuaaucca

SEQ ID NO: 1127033 - RNA, 19 nt, Artificial Sequence
  Description of Artificial Sequence: Synthetic oligonucleotide
  Antisense strand to SEQ ID NO: 1127032
uggauuaacagaaauacag

SEQ ID NO: 1127034 - RNA, 19 nt, Artificial Sequence
  Description of Artificial Sequence: Synthetic oligonucleotide
  Sense strand starting at position 691 of SEQ ID NO: 916057
aguaaugucacagaaugug

SEQ ID NO: 1127035 - RNA, 19 nt, Artificial Sequence
  Description of Artificial Sequence: Synthetic oligonucleotide
  Antisense strand to SEQ ID NO: 1127034
cacauucugugacauuacu

SEQ ID NO: 1127036 - RNA, 19 nt, Artificial Sequence
  Description of Artificial Sequence: Synthetic oligonucleotide
  Sense strand starting at position 701 of SEQ ID NO: 916057
cagaaugugcaauguaaua

SEQ ID NO: 1127037 - RNA, 19 nt, Artificial Sequence
  Description of Artificial Sequence: Synthetic oligonucleotide
  Antisense strand to SEQ ID NO: 1127036
uauuacauugcacauucug

SEQ ID NO: 1127038 - RNA, 19 nt, Artificial Sequence
  Description of Artificial Sequence: Synthetic oligonucleotide
  Sense strand starting at position 713 of SEQ ID NO: 916057
uguaauauuuaucccacgu

SEQ ID NO: 1127039 - RNA, 19 nt, Artificial Sequence
  Description of Artificial Sequence: Synthetic oligonucleotide
  Antisense strand to SEQ ID NO: 1127038
acgugggauaaauauuaca

SEQ ID NO: 1127040 - RNA, 19 nt, Artificial Sequence
  Description of Artificial Sequence: Synthetic oligonucleotide
  Sense strand starting at position 717 of SEQ ID NO: 916057
auauuuaucccacguagua

SEQ ID NO: 1127041 - RNA, 19 nt, Artificial Sequence
  Description of Artificial Sequence: Synthetic oligonucleotide
  Antisense strand to SEQ ID NO: 1127040
uacuacgugggauaaauau

SEQ ID NO: 1127042 - RNA, 19 nt, Artificial Sequence
  Description of Artificial Sequence: Synthetic oligonucleotide
  Sense strand starting at position 789 of SEQ ID NO: 916057
cccaaagggugcuucugau

SEQ ID NO: 1127043 - RNA, 19 nt, Artificial Sequence
  Description of Artificial Sequence: Synthetic oligonucleotide
  Antisense strand to SEQ ID NO: 1127042
aucagaagcacccuuuggg

SEQ ID NO: 1127044 - RNA, 19 nt, Artificial Sequence
  Description of Artificial Sequence: Synthetic oligonucleotide
  Sense strand starting at position 975 of SEQ ID NO: 916057
agaggaaguuaccucuuaa

SEQ ID NO: 1127045 - RNA, 19 nt, Artificial Sequence
  Description of Artificial Sequence: Synthetic oligonucleotide
  Antisense strand to SEQ ID NO: 1127044
uuaagagguaacuuccucu

SEQ ID NO: 1127046 - RNA, 19 nt, Artificial Sequence
  Description of Artificial Sequence: Synthetic oligonucleotide
  Sense strand starting at position 1237 of SEQ ID NO: 916057
ggaggaucugcgcggacau

SEQ ID NO: 1127047 - RNA, 19 nt, Artificial Sequence
  Description of Artificial Sequence: Synthetic oligonucleotide
  Antisense strand to SEQ ID NO: 1127046
auguccgcgcagauccucc

SEQ ID NO: 1127048 - RNA, 19 nt, Artificial Sequence
  Description of Artificial Sequence: Synthetic oligonucleotide
  Sense strand starting at position 1238 of SEQ ID NO: 916057
gaggaucugcgcggacaua

SEQ ID NO: 1127049 - RNA, 19 nt, Artificial Sequence
  Description of Artificial Sequence: Synthetic oligonucleotide
  Antisense strand to SEQ ID NO: 1127048
uauguccgcgcagauccuc

SEQ ID NO: 1127050 - RNA, 19 nt, Artificial Sequence
  Description of Artificial Sequence: Synthetic oligonucleotide
  Sense strand starting at position 1324 of SEQ ID NO: 916057
gggauaguggcgugacagu

SEQ ID NO: 1127051 - RNA, 19 nt, Artificial Sequence
  Description of Artificial Sequence: Synthetic oligonucleotide
  Antisense strand to SEQ ID NO: 1127050
acugucacgccacuauccc

SEQ ID NO: 1127052 - RNA, 19 nt, Artificial Sequence
  Description of Artificial Sequence: Synthetic oligonucleotide
  Sense strand starting at position 2109 of SEQ ID NO: 916057
cuuguuaucggcgaucaag

SEQ ID NO: 1127053 - RNA, 19 nt, Artificial Sequence
  Description of Artificial Sequence: Synthetic oligonucleotide
  Antisense strand to SEQ ID NO: 1127052
cuugaucgccgauaacaag

SEQ ID NO: 1127054 - RNA, 19 nt, Artificial Sequence
  Description of Artificial Sequence: Synthetic oligonucleotide
  Sense strand starting at position 2281 of SEQ ID NO: 916057
aguguuagccacugcagga

SEQ ID NO: 1127055 - RNA, 19 nt, Artificial Sequence
  Description of Artificial Sequence: Synthetic oligonucleotide
  Antisense strand to SEQ ID NO: 1127054
uccugcaguggcuaacacu

SEQ ID NO: 1127056 - RNA, 19 nt, Artificial Sequence
  Description of Artificial Sequence: Synthetic oligonucleotide
  Sense strand starting at position 2379 of SEQ ID NO: 916057
aucuguccugcuugguaaa

SEQ ID NO: 1127057 - RNA, 19 nt, Artificial Sequence
  Description of Artificial Sequence: Synthetic oligonucleotide
  Antisense strand to SEQ ID NO: 1127056
uuuaccaagcaggacagau

SEQ ID NO: 1127058 - RNA, 19 nt, Artificial Sequence
  Description of Artificial Sequence: Synthetic oligonucleotide
  Sense strand starting at position 2447 of SEQ ID NO: 916057
auguauucgcucuagagac

SEQ ID NO: 1127059 - RNA, 19 nt, Artificial Sequence
  Description of Artificial Sequence: Synthetic oligonucleotide
  Antisense strand to SEQ ID NO: 1127058
gucucuagagcgaauacau

SEQ ID NO: 1127060 - RNA, 19 nt, Artificial Sequence
  Description of Artificial Sequence: Synthetic oligonucleotide
  Sense strand starting at position 2840 of SEQ ID NO: 916057
gccagaaauugcuuccaag

SEQ ID NO: 1127061 - RNA, 19 nt, Artificial Sequence
  Description of Artificial Sequence: Synthetic oligonucleotide
  Antisense strand to SEQ ID NO: 1127060
cuuggaagcaauuucuggc

SEQ ID NO: 1127062 - RNA, 19 nt, Artificial Sequence
  Description of Artificial Sequence: Synthetic oligonucleotide
  Sense strand starting at position 3090 of SEQ ID NO: 916057
cgaauaaagccauguuuau

SEQ ID NO: 1127063 - RNA, 19 nt, Artificial Sequence
  Description of Artificial Sequence: Synthetic oligonucleotide
  Antisense strand to SEQ ID NO: 1127062
auaaacauggcuuuauucg

SEQ ID NO: 1127064 - RNA, 19 nt, Artificial Sequence
  Description of Artificial Sequence: Synthetic oligonucleotide
  Sense strand starting at position 3156 of SEQ ID NO: 916057
ucaguugugacagaccgua

SEQ ID NO: 1127065 - RNA, 19 nt, Artificial Sequence
  Description of Artificial Sequence: Synthetic oligonucleotide
  Antisense strand to SEQ ID NO: 1127064
uacggucugucacaacuga

SEQ ID NO: 1127066 - RNA, 19 nt, Artificial Sequence
  Description of Artificial Sequence: Synthetic oligonucleotide
  Sense strand starting at position 3187 of SEQ ID NO: 916057
ccuggacuauguccuacua

SEQ ID NO: 1127067 - RNA, 19 nt, Artificial Sequence
  Description of Artificial Sequence: Synthetic oligonucleotide
  Antisense strand to SEQ ID NO: 1127066
uaguaggacauaguccagg

SEQ ID NO: 1127068 - RNA, 19 nt, Artificial Sequence
  Description of Artificial Sequence: Synthetic oligonucleotide
  Sense strand starting at position 3236 of SEQ ID NO: 916057
gccuuagagcaaugagggu

SEQ ID NO: 1127069 - RNA, 19 nt, Artificial Sequence
  Description of Artificial Sequence: Synthetic oligonucleotide
  Antisense strand to SEQ ID NO: 1127068
acccucauugcucuaaggc

SEQ ID NO: 1127070 - RNA, 19 nt, Artificial Sequence
  Description of Artificial Sequence: Synthetic oligonucleotide
  Sense strand starting at position 3245 of SEQ ID NO: 916057
caaugagggucucuacaga

SEQ ID NO: 1127071 - RNA, 19 nt, Artificial Sequence
  Description of Artificial Sequence: Synthetic oligonucleotide
  Antisense strand to SEQ ID NO: 1127070
ucuguagagacccucauug

SEQ ID NO: 1127072 - RNA, 19 nt, Artificial Sequence
  Description of Artificial Sequence: Synthetic oligonucleotide
  Sense strand starting at position 3266 of SEQ ID NO: 916057
aagcguauaugucuuagga

SEQ ID NO: 1127073 - RNA, 19 nt, Artificial Sequence
  Description of Artificial Sequence: Synthetic oligonucleotide
  Antisense strand to SEQ ID NO: 1127072
uccuaagacauauacgcuu

SEQ ID NO: 1127074 - RNA, 19 nt, Artificial Sequence
  Description of Artificial Sequence: Synthetic oligonucleotide
  Sense strand starting at position 3294 of SEQ ID NO: 916057
uccucaucuuuagugugaa

SEQ ID NO: 1127075 - RNA, 19 nt, Artificial Sequence
  Description of Artificial Sequence: Synthetic oligonucleotide
  Antisense strand to SEQ ID NO: 1127074
uucacacuaaagaugagga

SEQ ID NO: 1127076 - RNA, 19 nt, Artificial Sequence
  Description of Artificial Sequence: Synthetic oligonucleotide
  Sense strand starting at position 3363 of SEQ ID NO: 916057
uuuaacaaugcugguuuau

SEQ ID NO: 1127077 - RNA, 19 nt, Artificial Sequence
  Description of Artificial Sequence: Synthetic oligonucleotide
  Antisense strand to SEQ ID NO: 1127076
auaaaccagcauuguuaaa

SEQ ID NO: 1127078 - RNA, 19 nt, Artificial Sequence
  Description of Artificial Sequence: Synthetic oligonucleotide
  Sense strand starting at position 3365 of SEQ ID NO: 916057
uaacaaugcugguuuaugu

SEQ ID NO: 1127079 - RNA, 19 nt, Artificial Sequence
  Description of Artificial Sequence: Synthetic oligonucleotide
  Antisense strand to SEQ ID NO: 1127078
acauaaaccagcauuguua

SEQ ID NO: 1127080 - RNA, 19 nt, Artificial Sequence
  Description of Artificial Sequence: Synthetic oligonucleotide
  Sense strand starting at position 3383 of SEQ ID NO: 916057
ugcagugaacuugacagua

SEQ ID NO: 1127081 - RNA, 19 nt, Artificial Sequence
  Description of Artificial Sequence: Synthetic oligonucleotide
  Antisense strand to SEQ ID NO: 1127080
uacugucaaguucacugca

SEQ ID NO: 1127082 - RNA, 19 nt, Artificial Sequence
  Description of Artificial Sequence: Synthetic oligonucleotide
  Sense strand starting at position 3416 of SEQ ID NO: 916057
uaccgaugccaugaacagu

SEQ ID NO: 1127083 - RNA, 19 nt, Artificial Sequence
  Description of Artificial Sequence: Synthetic oligonucleotide
  Antisense strand to SEQ ID NO: 1127082
acuguucauggcaucggua

SEQ ID NO: 1127084 - RNA, 19 nt, Artificial Sequence
  Description of Artificial Sequence: Synthetic oligonucleotide
  Sense strand starting at position 3451 of SEQ ID NO: 916057
uuucuagauuagccgauuu

SEQ ID NO: 1127085 - RNA, 19 nt, Artificial Sequence
  Description of Artificial Sequence: Synthetic oligonucleotide
  Antisense strand to SEQ ID NO: 1127084
aaaucggcuaaucuagaaa

SEQ ID NO: 1127086 - RNA, 19 nt, Artificial Sequence
  Description of Artificial Sequence: Synthetic oligonucleotide
  Sense strand starting at position 3675 of SEQ ID NO: 916057
gguaauguuccagggugca

SEQ ID NO: 1127087 - RNA, 19 nt, Artificial Sequence
  Description of Artificial Sequence: Synthetic oligonucleotide
  Antisense strand to SEQ ID NO: 1127086
ugcacccuggaacauuacc

SEQ ID NO: 1127088 - RNA, 19 nt, Artificial Sequence
  Description of Artificial Sequence: Synthetic oligonucleotide
  Sense strand starting at position 3690 of SEQ ID NO: 916057
ugcacuuaugaacaugagu

SEQ ID NO: 1127089 - RNA, 19 nt, Artificial Sequence
  Description of Artificial Sequence: Synthetic oligonucleotide
  Antisense strand to SEQ ID NO: 1127088
acucauguucauaagugca

SEQ ID NO: 1127090 - RNA, 19 nt, Artificial Sequence
  Description of Artificial Sequence: Synthetic oligonucleotide
  Sense strand starting at position 3695 of SEQ ID NO: 916057
uuaugaacaugagugaauu

SEQ ID NO: 1127091 - RNA, 19 nt, Artificial Sequence
  Description of Artificial Sequence: Synthetic oligonucleotide
  Antisense strand to SEQ ID NO: 1127090
aauucacucauguucauaa

SEQ ID NO: 1127092 - RNA, 19 nt, Artificial Sequence
  Description of Artificial Sequence: Synthetic oligonucleotide
  Sense strand starting at position 3705 of SEQ ID NO: 916057
gagugaauugcacaagcau

SEQ ID NO: 1127093 - RNA, 19 nt, Artificial Sequence
  Description of Artificial Sequence: Synthetic oligonucleotide
  Antisense strand to SEQ ID NO: 1127092
augcuugugcaauucacuc

SEQ ID NO: 1127094 - RNA, 19 nt, Artificial Sequence
  Description of Artificial Sequence: Synthetic oligonucleotide
  Sense strand starting at position 3717 of SEQ ID NO: 916057
caagcauauguugacugaa

SEQ ID NO: 1127095 - RNA, 19 nt, Artificial Sequence
  Description of Artificial Sequence: Synthetic oligonucleotide
  Antisense strand to SEQ ID NO: 1127094
uucagucaacauaugcuug

SEQ ID NO: 1127096 - RNA, 19 nt, Artificial Sequence
  Description of Artificial Sequence: Synthetic oligonucleotide
  Sense strand starting at position 3762 of SEQ ID NO: 916057
cagcuuggauugucauaac

SEQ ID NO: 1127097 - RNA, 19 nt, Artificial Sequence
  Description of Artificial Sequence: Synthetic oligonucleotide
  Antisense strand to SEQ ID NO: 1127096
guuaugacaauccaagcug

SEQ ID NO: 1127098 - RNA, 19 nt, Artificial Sequence
  Description of Artificial Sequence: Synthetic oligonucleotide
  Sense strand starting at position 3858 of SEQ ID NO: 916057
ccaagacugguacgauguu

SEQ ID NO: 1127099 - RNA, 19 nt, Artificial Sequence
  Description of Artificial Sequence: Synthetic oligonucleotide
  Antisense strand to SEQ ID NO: 1127098
aacaucguaccagucuugg

SEQ ID NO: 1127100 - RNA, 19 nt, Artificial Sequence
  Description of Artificial Sequence: Synthetic oligonucleotide
  Sense strand starting at position 3870 of SEQ ID NO: 916057
cgauguuuccauggucauc

SEQ ID NO: 1127101 - RNA, 19 nt, Artificial Sequence
  Description of Artificial Sequence: Synthetic oligonucleotide
  Antisense strand to SEQ ID NO: 1127100
gaugaccauggaaacaucg

SEQ ID NO: 1127102 - RNA, 19 nt, Artificial Sequence
  Description of Artificial Sequence: Synthetic oligonucleotide
  Sense strand starting at position 3875 of SEQ ID NO: 916057
uuuccauggucaucaggaa

SEQ ID NO: 1127103 - RNA, 19 nt, Artificial Sequence
  Description of Artificial Sequence: Synthetic oligonucleotide
  Antisense strand to SEQ ID NO: 1127102
uuccugaugaccauggaaa

SEQ ID NO: 1127104 - RNA, 19 nt, Artificial Sequence
  Description of Artificial Sequence: Synthetic oligonucleotide
  Sense strand starting at position 3929 of SEQ ID NO: 916057
ucugacuuguaucuauaag

SEQ ID NO: 1127105 - RNA, 19 nt, Artificial Sequence
  Description of Artificial Sequence: Synthetic oligonucleotide
  Antisense strand to SEQ ID NO: 1127104
cuuauagauacaagucaga

SEQ ID NO: 1127106 - RNA, 19 nt, Artificial Sequence
  Description of Artificial Sequence: Synthetic oligonucleotide
  Sense strand starting at position 3981 of SEQ ID NO: 916057
ccagucaucuuauuugugu

SEQ ID NO: 1127107 - RNA, 19 nt, Artificial Sequence
  Description of Artificial Sequence: Synthetic oligonucleotide
  Antisense strand to SEQ ID NO: 1127106
acacaaauaagaugacugg

SEQ ID NO: 1127108 - RNA, 19 nt, Artificial Sequence
  Description of Artificial Sequence: Synthetic oligonucleotide
  Sense strand starting at position 3982 of SEQ ID NO: 916057
cagucaucuuauuuguguu

SEQ ID NO: 1127109 - RNA, 19 nt, Artificial Sequence
  Description of Artificial Sequence: Synthetic oligonucleotide
  Antisense strand to SEQ ID NO: 1127108
aacacaaauaagaugacug

SEQ ID NO: 1127110 - RNA, 19 nt, Artificial Sequence
  Description of Artificial Sequence: Synthetic oligonucleotide
  Sense strand starting at position 27 of SEQ ID NO: 916058
aaacgcaggcuugaugaau

SEQ ID NO: 1127111 - RNA, 19 nt, Artificial Sequence
  Description of Artificial Sequence: Synthetic oligonucleotide
  Antisense strand to SEQ ID NO: 1127110
auucaucaagccugcguuu

SEQ ID NO: 1127112 - RNA, 19 nt, Artificial Sequence
  Description of Artificial Sequence: Synthetic oligonucleotide
  Sense strand starting at position 35 of SEQ ID NO: 916058
gcuugaugaauucgggacu

SEQ ID NO: 1127113 - RNA, 19 nt, Artificial Sequence
  Description of Artificial Sequence: Synthetic oligonucleotide
  Antisense strand to SEQ ID NO: 1127112
agucccgaauucaucaagc

SEQ ID NO: 1127114 - RNA, 19 nt, Artificial Sequence
  Description of Artificial Sequence: Synthetic oligonucleotide
  Sense strand starting at position 46 of SEQ ID NO: 916058
ucgggacugcgucuguuua

SEQ ID NO: 1127115 - RNA, 19 nt, Artificial Sequence
  Description of Artificial Sequence: Synthetic oligonucleotide
  Antisense strand to SEQ ID NO: 1127114
uaaacagacgcagucccga

SEQ ID NO: 1127116 - RNA, 19 nt, Artificial Sequence
  Description of Artificial Sequence: Synthetic oligonucleotide
  Sense strand starting at position 56 of SEQ ID NO: 916058
gucuguuuaaaguguuaga

SEQ ID NO: 1127117 - RNA, 19 nt, Artificial Sequence
  Description of Artificial Sequence: Synthetic oligonucleotide
  Antisense strand to SEQ ID NO: 1127116
ucuaacacuuuaaacagac

SEQ ID NO: 1127118 - RNA, 19 nt, Artificial Sequence
  Description of Artificial Sequence: Synthetic oligonucleotide
  Sense strand starting at position 67 of SEQ ID NO: 916058
guguuagauacacagugaa

SEQ ID NO: 1127119 - RNA, 19 nt, Artificial Sequence
  Description of Artificial Sequence: Synthetic oligonucleotide
  Antisense strand to SEQ ID NO: 1127118
uucacuguguaucuaacac

SEQ ID NO: 1127120 - RNA, 19 nt, Artificial Sequence
  Description of Artificial Sequence: Synthetic oligonucleotide
  Sense strand starting at position 189 of SEQ ID NO: 916058
cugugacuacgcugagaaa

SEQ ID NO: 1127121 - RNA, 19 nt, Artificial Sequence
  Description of Artificial Sequence: Synthetic oligonucleotide
  Antisense strand to SEQ ID NO: 1127120
uuucucagcguagucacag

SEQ ID NO: 1127122 - RNA, 19 nt, Artificial Sequence
  Description of Artificial Sequence: Synthetic oligonucleotide
  Sense strand starting at position 316 of SEQ ID NO: 916058
cgcguuacccggaaggcuu

SEQ ID NO: 1127123 - RNA, 19 nt, Artificial Sequence
  Description of Artificial Sequence: Synthetic oligonucleotide
  Antisense strand to SEQ ID NO: 1127122
aagccuuccggguaacgcg

SEQ ID NO: 1127124 - RNA, 19 nt, Artificial Sequence
  Description of Artificial Sequence: Synthetic oligonucleotide
  Sense strand starting at position 488 of SEQ ID NO: 916058
uggaacuuugccugagcca

SEQ ID NO: 1127125 - RNA, 19 nt, Artificial Sequence
  Description of Artificial Sequence: Synthetic oligonucleotide
  Antisense strand to SEQ ID NO: 1127124
uggcucaggcaaaguucca

SEQ ID NO: 1127126 - RNA, 19 nt, Artificial Sequence
  Description of Artificial Sequence: Synthetic oligonucleotide
  Sense strand starting at position 609 of SEQ ID NO: 916058
uggccaaaguuuccuccaa

SEQ ID NO: 1127127 - RNA, 19 nt, Artificial Sequence
  Description of Artificial Sequence: Synthetic oligonucleotide
  Antisense strand to SEQ ID NO: 1127126
uuggaggaaacuuuggcca

SEQ ID NO: 1127128 - RNA, 19 nt, Artificial Sequence
  Description of Artificial Sequence: Synthetic oligonucleotide
  Sense strand starting at position 610 of SEQ ID NO: 916058
ggccaaaguuuccuccaaa

SEQ ID NO: 1127129 - RNA, 19 nt, Artificial Sequence
  Description of Artificial Sequence: Synthetic oligonucleotide
  Antisense strand to SEQ ID NO: 1127128
uuuggaggaaacuuuggcc

SEQ ID NO: 1127130 - RNA, 19 nt, Artificial Sequence
  Description of Artificial Sequence: Synthetic oligonucleotide
  Sense strand starting at position 994 of SEQ ID NO: 916058
gagggaguuucguucuccu

SEQ ID NO: 1127131 - RNA, 19 nt, Artificial Sequence
  Description of Artificial Sequence: Synthetic oligonucleotide
  Antisense strand to SEQ ID NO: 1127130
aggagaacgaaacucccuc

SEQ ID NO: 1127132 - RNA, 19 nt, Artificial Sequence
  Description of Artificial Sequence: Synthetic oligonucleotide
  Sense strand starting at position 998 of SEQ ID NO: 916058
gaguuucguucuccucaaa

SEQ ID NO: 1127133 - RNA, 19 nt, Artificial Sequence
  Description of Artificial Sequence: Synthetic oligonucleotide
  Antisense strand to SEQ ID NO: 1127132
uuugaggagaacgaaacuc

SEQ ID NO: 1127134 - RNA, 19 nt, Artificial Sequence
  Description of Artificial Sequence: Synthetic oligonucleotide
  Sense strand starting at position 2176 of SEQ ID NO: 916058
ggagguugugucagcguuu

SEQ ID NO: 1127135 - RNA, 19 nt, Artificial Sequence
  Description of Artificial Sequence: Synthetic oligonucleotide
  Antisense strand to SEQ ID NO: 1127134
aaacgcugacacaaccucc

SEQ ID NO: 1127136 - RNA, 19 nt, Artificial Sequence
  Description of Artificial Sequence: Synthetic oligonucleotide
  Sense strand starting at position 2179 of SEQ ID NO: 916058
gguugugucagcguuucca

SEQ ID NO: 1127137 - RNA, 19 nt, Artificial Sequence
  Description of Artificial Sequence: Synthetic oligonucleotide
  Antisense strand to SEQ ID NO: 1127136
uggaaacgcugacacaacc

SEQ ID NO: 1127138 - RNA, 19 nt, Artificial Sequence
  Description of Artificial Sequence: Synthetic oligonucleotide
  Sense strand starting at position 2182 of SEQ ID NO: 916058
ugugucagcguuuccauga

SEQ ID NO: 1127139 - RNA, 19 nt, Artificial Sequence
  Description of Artificial Sequence: Synthetic oligonucleotide
  Antisense strand to SEQ ID NO: 1127138
ucauggaaacgcugacaca

SEQ ID NO: 1127140 - RNA, 19 nt, Artificial Sequence
  Description of Artificial Sequence: Synthetic oligonucleotide
  Sense strand starting at position 2477 of SEQ ID NO: 916058
guuaaagagggcugacuua

SEQ ID NO: 1127141 - RNA, 19 nt, Artificial Sequence
  Description of Artificial Sequence: Synthetic oligonucleotide
  Antisense strand to SEQ ID NO: 1127140
uaagucagcccucuuuaac

SEQ ID NO: 1127142 - RNA, 19 nt, Artificial Sequence
  Description of Artificial Sequence: Synthetic oligonucleotide
  Sense strand starting at position 2491 of SEQ ID NO: 916058
acuuaaagucaggguuaag

SEQ ID NO: 1127143 - RNA, 19 nt, Artificial Sequence
  Description of Artificial Sequence: Synthetic oligonucleotide
  Antisense strand to SEQ ID NO: 1127142
cuuaacccugacuuuaagu

SEQ ID NO: 1127144 - RNA, 19 nt, Artificial Sequence
  Description of Artificial Sequence: Synthetic oligonucleotide
  Sense strand starting at position 2612 of SEQ ID NO: 916058
agggaucuguggguugcaa

SEQ ID NO: 1127145 - RNA, 19 nt, Artificial Sequence
  Description of Artificial Sequence: Synthetic oligonucleotide
  Antisense strand to SEQ ID NO: 1127144
uugcaacccacagaucccu

SEQ ID NO: 1127146 - RNA, 19 nt, Artificial Sequence
  Description of Artificial Sequence: Synthetic oligonucleotide
  Sense strand starting at position 2649 of SEQ ID NO: 916058
gguagagcauccuccaaau

SEQ ID NO: 1127147 - RNA, 19 nt, Artificial Sequence
  Description of Artificial Sequence: Synthetic oligonucleotide
  Antisense strand to SEQ ID NO: 1127146
auuuggaggaugcucuacc

SEQ ID NO: 1127148 - RNA, 19 nt, Artificial Sequence
  Description of Artificial Sequence: Synthetic oligonucleotide
  Sense strand starting at position 2803 of SEQ ID NO: 916058
ugcuuucuuguauugugua

SEQ ID NO: 1127149 - RNA, 19 nt, Artificial Sequence
  Description of Artificial Sequence: Synthetic oligonucleotide
  Antisense strand to SEQ ID NO: 1127148
uacacaauacaagaaagca

SEQ ID NO: 1127150 - RNA, 19 nt, Artificial Sequence
  Description of Artificial Sequence: Synthetic oligonucleotide
  Sense strand starting at position 2808 of SEQ ID NO: 916058
ucuuguauuguguagaaug

SEQ ID NO: 1127151 - RNA, 19 nt, Artificial Sequence
  Description of Artificial Sequence: Synthetic oligonucleotide
  Antisense strand to SEQ ID NO: 1127150
cauucuacacaauacaaga

SEQ ID NO: 1127152 - RNA, 19 nt, Artificial Sequence
  Description of Artificial Sequence: Synthetic oligonucleotide
  Sense strand starting at position 2942 of SEQ ID NO: 916058
accuuugugccuuaucaag

SEQ ID NO: 1127153 - RNA, 19 nt, Artificial Sequence
  Description of Artificial Sequence: Synthetic oligonucleotide
  Antisense strand to SEQ ID NO: 1127152
cuugauaaggcacaaaggu

SEQ ID NO: 1127154 - RNA, 19 nt, Artificial Sequence
  Description of Artificial Sequence: Synthetic oligonucleotide
  Sense strand starting at position 3042 of SEQ ID NO: 916058
auugaaucugaauguaaug

SEQ ID NO: 1127155 - RNA, 19 nt, Artificial Sequence
  Description of Artificial Sequence: Synthetic oligonucleotide
  Antisense strand to SEQ ID NO: 1127154
cauuacauucagauucaau

SEQ ID NO: 1127156 - RNA, 19 nt, Artificial Sequence
  Description of Artificial Sequence: Synthetic oligonucleotide
  Sense strand starting at position 3152 of SEQ ID NO: 916058
agaguucuccuccagcagu

SEQ ID NO: 1127157 - RNA, 19 nt, Artificial Sequence
  Description of Artificial Sequence: Synthetic oligonucleotide
  Antisense strand to SEQ ID NO: 1127156
acugcuggaggagaacucu

SEQ ID NO: 1127158 - RNA, 19 nt, Artificial Sequence
  Description of Artificial Sequence: Synthetic oligonucleotide
  Sense strand starting at position 3202 of SEQ ID NO: 916058
ccuugccuuugauuacaga

SEQ ID NO: 1127159 - RNA, 19 nt, Artificial Sequence
  Description of Artificial Sequence: Synthetic oligonucleotide
  Antisense strand to SEQ ID NO: 1127158
ucuguaaucaaaggcaagg

SEQ ID NO: 1127160 - RNA, 19 nt, Artificial Sequence
  Description of Artificial Sequence: Synthetic oligonucleotide
  Sense strand starting at position 3203 of SEQ ID NO: 916058
cuugccuuugauuacagaa

SEQ ID NO: 1127161 - RNA, 19 nt, Artificial Sequence
  Description of Artificial Sequence: Synthetic oligonucleotide
  Antisense strand to SEQ ID NO: 1127160
uucuguaaucaaaggcaag

SEQ ID NO: 1127162 - RNA, 19 nt, Artificial Sequence
  Description of Artificial Sequence: Synthetic oligonucleotide
  Sense strand starting at position 3259 of SEQ ID NO: 916058
cuguauuaauuuggacuua

SEQ ID NO: 1127163 - RNA, 19 nt, Artificial Sequence
  Description of Artificial Sequence: Synthetic oligonucleotide
  Antisense strand to SEQ ID NO: 1127162
uaaguccaaauuaauacag

SEQ ID NO: 1127164 - RNA, 19 nt, Artificial Sequence
  Description of Artificial Sequence: Synthetic oligonucleotide
  Sense strand starting at position 3270 of SEQ ID NO: 916058
uggacuuaccugugaauaa

SEQ ID NO: 1127165 - RNA, 19 nt, Artificial Sequence
  Description of Artificial Sequence: Synthetic oligonucleotide
  Antisense strand to SEQ ID NO: 1127164
uuauucacagguaagucca

SEQ ID NO: 1127166 - RNA, 19 nt, Artificial Sequence
  Description of Artificial Sequence: Synthetic oligonucleotide
  Sense strand starting at position 3282 of SEQ ID NO: 916058
ugaauaaguugcuugcuca

SEQ ID NO: 1127167 - RNA, 19 nt, Artificial Sequence
  Description of Artificial Sequence: Synthetic oligonucleotide
  Antisense strand to SEQ ID NO: 1127166
ugagcaagcaacuuauuca

SEQ ID NO: 1127168 - RNA, 19 nt, Artificial Sequence
  Description of Artificial Sequence: Synthetic oligonucleotide
  Sense strand starting at position 3286 of SEQ ID NO: 916058
uaaguugcuugcucaagga

SEQ ID NO: 1127169 - RNA, 19 nt, Artificial Sequence
  Description of Artificial Sequence: Synthetic oligonucleotide
  Antisense strand to SEQ ID NO: 1127168
uccuugagcaagcaacuua

SEQ ID NO: 1127170 - RNA, 19 nt, Artificial Sequence
  Description of Artificial Sequence: Synthetic oligonucleotide
  Sense strand starting at position 3329 of SEQ ID NO: 916058
agagucguucuccagugau

SEQ ID NO: 1127171 - RNA, 19 nt, Artificial Sequence
  Description of Artificial Sequence: Synthetic oligonucleotide
  Antisense strand to SEQ ID NO: 1127170
aucacuggagaacgacucu

SEQ ID NO: 1127172 - RNA, 19 nt, Artificial Sequence
  Description of Artificial Sequence: Synthetic oligonucleotide
  Sense strand starting at position 3473 of SEQ ID NO: 916058
agccuuugccuggaauaua

SEQ ID NO: 1127173 - RNA, 19 nt, Artificial Sequence
  Description of Artificial Sequence: Synthetic oligonucleotide
  Antisense strand to SEQ ID NO: 1127172
uauauuccaggcaaaggcu

SEQ ID NO: 1127174 - RNA, 19 nt, Artificial Sequence
  Description of Artificial Sequence: Synthetic oligonucleotide
  Sense strand starting at position 3536 of SEQ ID NO: 916058
gggauuuacucccagguca

SEQ ID NO: 1127175 - RNA, 19 nt, Artificial Sequence
  Description of Artificial Sequence: Synthetic oligonucleotide
  Antisense strand to SEQ ID NO: 1127174
ugaccugggaguaaauccc

SEQ ID NO: 1127176 - RNA, 19 nt, Artificial Sequence
  Description of Artificial Sequence: Synthetic oligonucleotide
  Sense strand starting at position 3559 of SEQ ID NO: 916058
agugaccucucaccucaua

SEQ ID NO: 1127177 - RNA, 19 nt, Artificial Sequence
  Description of Artificial Sequence: Synthetic oligonucleotide
  Antisense strand to SEQ ID NO: 1127176
uaugaggugagaggucacu

SEQ ID NO: 1127178 - RNA, 19 nt, Artificial Sequence
  Description of Artificial Sequence: Synthetic oligonucleotide
  Sense strand starting at position 3664 of SEQ ID NO: 916058
uccaauucccugugaguca

SEQ ID NO: 1127179 - RNA, 19 nt, Artificial Sequence
  Description of Artificial Sequence: Synthetic oligonucleotide
  Antisense strand to SEQ ID NO: 1127178
ugacucacagggaauugga

SEQ ID NO: 1127180 - RNA, 19 nt, Artificial Sequence
  Description of Artificial Sequence: Synthetic oligonucleotide
  Sense strand starting at position 3721 of SEQ ID NO: 916058
ggugaaucaugcccaacau

SEQ ID NO: 1127181 - RNA, 19 nt, Artificial Sequence
  Description of Artificial Sequence: Synthetic oligonucleotide
  Antisense strand to SEQ ID NO: 1127180
auguugggcaugauucacc

SEQ ID NO: 1127182 - RNA, 19 nt, Artificial Sequence
  Description of Artificial Sequence: Synthetic oligonucleotide
  Sense strand starting at position 3722 of SEQ ID NO: 916058
gugaaucaugcccaacauc

SEQ ID NO: 1127183 - RNA, 19 nt, Artificial Sequence
  Description of Artificial Sequence: Synthetic oligonucleotide
  Antisense strand to SEQ ID NO: 1127182
gauguugggcaugauucac

SEQ ID NO: 1127184 - RNA, 19 nt, Artificial Sequence
  Description of Artificial Sequence: Synthetic oligonucleotide
  Sense strand starting at position 3783 of SEQ ID NO: 916058
gaggauuaaggcugugaca

SEQ ID NO: 1127185 - RNA, 19 nt, Artificial Sequence
  Description of Artificial Sequence: Synthetic oligonucleotide
  Antisense strand to SEQ ID NO: 1127184
ugucacagccuuaauccuc

SEQ ID NO: 1127186 - RNA, 19 nt, Artificial Sequence
  Description of Artificial Sequence: Synthetic oligonucleotide
  Sense strand starting at position 3785 of SEQ ID NO: 916058
ggauuaaggcugugacaca

SEQ ID NO: 1127187 - RNA, 19 nt, Artificial Sequence
  Description of Artificial Sequence: Synthetic oligonucleotide
  Antisense strand to SEQ ID NO: 1127186
ugugucacagccuuaaucc

SEQ ID NO: 1127188 - RNA, 19 nt, Artificial Sequence
  Description of Artificial Sequence: Synthetic oligonucleotide
  Sense strand starting at position 3792 of SEQ ID NO: 916058
ggcugugacacauaagcua

SEQ ID NO: 1127189 - RNA, 19 nt, Artificial Sequence
  Description of Artificial Sequence: Synthetic oligonucleotide
  Antisense strand to SEQ ID NO: 1127188
uagcuuaugugucacagcc

SEQ ID NO: 1127190 - RNA, 19 nt, Artificial Sequence
  Description of Artificial Sequence: Synthetic oligonucleotide
  Sense strand starting at position 46 of SEQ ID NO: 916059
uuaguacagaaguguaaag

SEQ ID NO: 1127191 - RNA, 19 nt, Artificial Sequence
  Description of Artificial Sequence: Synthetic oligonucleotide
  Antisense strand to SEQ ID NO: 1127190
cuuuacacuucuguacuaa

SEQ ID NO: 1127192 - RNA, 19 nt, Artificial Sequence
  Description of Artificial Sequence: Synthetic oligonucleotide
  Sense strand starting at position 53 of SEQ ID NO: 916059
agaaguguaaagugugaga

SEQ ID NO: 1127193 - RNA, 19 nt, Artificial Sequence
  Description of Artificial Sequence: Synthetic oligonucleotide
  Antisense strand to SEQ ID NO: 1127192
ucucacacuuuacacuucu

SEQ ID NO: 1127194 - RNA, 19 nt, Artificial Sequence
  Description of Artificial Sequence: Synthetic oligonucleotide
  Sense strand starting at position 55 of SEQ ID NO: 916059
aaguguaaagugugagaaa

SEQ ID NO: 1127195 - RNA, 19 nt, Artificial Sequence
  Description of Artificial Sequence: Synthetic oligonucleotide
  Antisense strand to SEQ ID NO: 1127194
uuucucacacuuuacacuu

SEQ ID NO: 1127196 - RNA, 19 nt, Artificial Sequence
  Description of Artificial Sequence: Synthetic oligonucleotide
  Sense strand starting at position 234 of SEQ ID NO: 916059
cuugaagucagguguucua

SEQ ID NO: 1127197 - RNA, 19 nt, Artificial Sequence
  Description of Artificial Sequence: Synthetic oligonucleotide
  Antisense strand to SEQ ID NO: 1127196
uagaacaccugacuucaag

SEQ ID NO: 1127198 - RNA, 19 nt, Artificial Sequence
  Description of Artificial Sequence: Synthetic oligonucleotide
  Sense strand starting at position 237 of SEQ ID NO: 916059
gaagucagguguucuauau

SEQ ID NO: 1127199 - RNA, 19 nt, Artificial Sequence
  Description of Artificial Sequence: Synthetic oligonucleotide
  Antisense strand to SEQ ID NO: 1127198
auauagaacaccugacuuc

SEQ ID NO: 1127200 - RNA, 19 nt, Artificial Sequence
  Description of Artificial Sequence: Synthetic oligonucleotide
  Sense strand starting at position 846 of SEQ ID NO: 916059
ggauuccgcgcuccauauu

SEQ ID NO: 1127201 - RNA, 19 nt, Artificial Sequence
  Description of Artificial Sequence: Synthetic oligonucleotide
  Antisense strand to SEQ ID NO: 1127200
aauauggagcgcggaaucc

SEQ ID NO: 1127202 - RNA, 19 nt, Artificial Sequence
  Description of Artificial Sequence: Synthetic oligonucleotide
  Sense strand starting at position 946 of SEQ ID NO: 916059
gagagauccugaucucccu

SEQ ID NO: 1127203 - RNA, 19 nt, Artificial Sequence
  Description of Artificial Sequence: Synthetic oligonucleotide
  Antisense strand to SEQ ID NO: 1127202
agggagaucaggaucucuc

SEQ ID NO: 1127204 - RNA, 19 nt, Artificial Sequence
  Description of Artificial Sequence: Synthetic oligonucleotide
  Sense strand starting at position 1011 of SEQ ID NO: 916059
uuaggaagcucagucuaau

SEQ ID NO: 1127205 - RNA, 19 nt, Artificial Sequence
  Description of Artificial Sequence: Synthetic oligonucleotide
  Antisense strand to SEQ ID NO: 1127204
auuagacugagcuuccuaa

SEQ ID NO: 1127206 - RNA, 19 nt, Artificial Sequence
  Description of Artificial Sequence: Synthetic oligonucleotide
  Sense strand starting at position 1014 of SEQ ID NO: 916059
ggaagcucagucuaaucau

SEQ ID NO: 1127207 - RNA, 19 nt, Artificial Sequence
  Description of Artificial Sequence: Synthetic oligonucleotide
  Antisense strand to SEQ ID NO: 1127206
augauuagacugagcuucc

SEQ ID NO: 1127208 - RNA, 19 nt, Artificial Sequence
  Description of Artificial Sequence: Synthetic oligonucleotide
  Sense strand starting at position 1017 of SEQ ID NO: 916059
agcucagucuaaucaugga

SEQ ID NO: 1127209 - RNA, 19 nt, Artificial Sequence
  Description of Artificial Sequence: Synthetic oligonucleotide
  Antisense strand to SEQ ID NO: 1127208
uccaugauuagacugagcu

SEQ ID NO: 1127210 - RNA, 19 nt, Artificial Sequence
  Description of Artificial Sequence: Synthetic oligonucleotide
  Sense strand starting at position 1021 of SEQ ID NO: 916059
cagucuaaucauggagauu

SEQ ID NO: 1127211 - RNA, 19 nt, Artificial Sequence
  Description of Artificial Sequence: Synthetic oligonucleotide
  Antisense strand to SEQ ID NO: 1127210
aaucuccaugauuagacug

SEQ ID NO: 1127212 - RNA, 19 nt, Artificial Sequence
  Description of Artificial Sequence: Synthetic oligonucleotide
  Sense strand starting at position 1204 of SEQ ID NO: 916059
aggugcgaauaguuauuaa

SEQ ID NO: 1127213 - RNA, 19 nt, Artificial Sequence
  Description of Artificial Sequence: Synthetic oligonucleotide
  Antisense strand to SEQ ID NO: 1127212
uuaauaacuauucgcaccu

SEQ ID NO: 1127214 - RNA, 19 nt, Artificial Sequence
  Description of Artificial Sequence: Synthetic oligonucleotide
  Sense strand starting at position 1207 of SEQ ID NO: 916059
ugcgaauaguuauuaaaug

SEQ ID NO: 1127215 - RNA, 19 nt, Artificial Sequence
  Description of Artificial Sequence: Synthetic oligonucleotide
  Antisense strand to SEQ ID NO: 1127214
cauuuaauaacuauucgca

SEQ ID NO: 1127216 - RNA, 19 nt, Artificial Sequence
  Description of Artificial Sequence: Synthetic oligonucleotide
  Sense strand starting at position 1245 of SEQ ID NO: 916059
auauauagcuuguuguaag

SEQ ID NO: 1127217 - RNA, 19 nt, Artificial Sequence
  Description of Artificial Sequence: Synthetic oligonucleotide
  Antisense strand to SEQ ID NO: 1127216
cuuacaacaagcuauauau

SEQ ID NO: 1127218 - RNA, 19 nt, Artificial Sequence
  Description of Artificial Sequence: Synthetic oligonucleotide
  Sense strand starting at position 1435 of SEQ ID NO: 916059
gaaagacauccguggcaaa

SEQ ID NO: 1127219 - RNA, 19 nt, Artificial Sequence
  Description of Artificial Sequence: Synthetic oligonucleotide
  Antisense strand to SEQ ID NO: 1127218
uuugccacggaugucuuuc

SEQ ID NO: 1127220 - RNA, 19 nt, Artificial Sequence
  Description of Artificial Sequence: Synthetic oligonucleotide
  Sense strand starting at position 1573 of SEQ ID NO: 916059
ggguaugaauacgcugaaa

SEQ ID NO: 1127221 - RNA, 19 nt, Artificial Sequence
  Description of Artificial Sequence: Synthetic oligonucleotide
  Antisense strand to SEQ ID NO: 1127220
uuucagcguauucauaccc

SEQ ID NO: 1127222 - RNA, 19 nt, Artificial Sequence
  Description of Artificial Sequence: Synthetic oligonucleotide
  Sense strand starting at position 1575 of SEQ ID NO: 916059
guaugaauacgcugaaaca

SEQ ID NO: 1127223 - RNA, 19 nt, Artificial Sequence
  Description of Artificial Sequence: Synthetic oligonucleotide
  Antisense strand to SEQ ID NO: 1127222
uguuucagcguauucauac

SEQ ID NO: 1127224 - RNA, 19 nt, Artificial Sequence
  Description of Artificial Sequence: Synthetic oligonucleotide
  Sense strand starting at position 1584 of SEQ ID NO: 916059
cgcugaaacagagagguua

SEQ ID NO: 1127225 - RNA, 19 nt, Artificial Sequence
  Description of Artificial Sequence: Synthetic oligonucleotide
  Antisense strand to SEQ ID NO: 1127224
uaaccucucuguuucagcg

SEQ ID NO: 1127226 - RNA, 19 nt, Artificial Sequence
  Description of Artificial Sequence: Synthetic oligonucleotide
  Sense strand starting at position 1597 of SEQ ID NO: 916059
agguuaaguaaauggcuaa

SEQ ID NO: 1127227 - RNA, 19 nt, Artificial Sequence
  Description of Artificial Sequence: Synthetic oligonucleotide
  Antisense strand to SEQ ID NO: 1127226
uuagccauuuacuuaaccu

SEQ ID NO: 1127228 - RNA, 19 nt, Artificial Sequence
  Description of Artificial Sequence: Synthetic oligonucleotide
  Sense strand starting at position 1600 of SEQ ID NO: 916059
uuaaguaaauggcuaaguu

SEQ ID NO: 1127229 - RNA, 19 nt, Artificial Sequence
  Description of Artificial Sequence: Synthetic oligonucleotide
  Antisense strand to SEQ ID NO: 1127228
aacuuagccauuuacuuaa

SEQ ID NO: 1127230 - RNA, 19 nt, Artificial Sequence
  Description of Artificial Sequence: Synthetic oligonucleotide
  Sense strand starting at position 1642 of SEQ ID NO: 916059
cgacuacacugggcagaau

SEQ ID NO: 1127231 - RNA, 19 nt, Artificial Sequence
  Description of Artificial Sequence: Synthetic oligonucleotide
  Antisense strand to SEQ ID NO: 1127230
auucugcccaguguagucg

SEQ ID NO: 1127232 - RNA, 19 nt, Artificial Sequence
  Description of Artificial Sequence: Synthetic oligonucleotide
  Sense strand starting at position 1664 of SEQ ID NO: 916059
gcaguuagugcugacagga

SEQ ID NO: 1127233 - RNA, 19 nt, Artificial Sequence
  Description of Artificial Sequence: Synthetic oligonucleotide
  Antisense strand to SEQ ID NO: 1127232
uccugucagcacuaacugc

SEQ ID NO: 1127234 - RNA, 19 nt, Artificial Sequence
  Description of Artificial Sequence: Synthetic oligonucleotide
  Sense strand starting at position 2066 of SEQ ID NO: 916059
gcgucuccgcuccuaugau

SEQ ID NO: 1127235 - RNA, 19 nt, Artificial Sequence
  Description of Artificial Sequence: Synthetic oligonucleotide
  Antisense strand to SEQ ID NO: 1127234
aucauaggagcggagacgc

SEQ ID NO: 1127236 - RNA, 19 nt, Artificial Sequence
  Description of Artificial Sequence: Synthetic oligonucleotide
  Sense strand starting at position 2215 of SEQ ID NO: 916059
agggcaggucuuggaaguu

SEQ ID NO: 1127237 - RNA, 19 nt, Artificial Sequence
  Description of Artificial Sequence: Synthetic oligonucleotide
  Antisense strand to SEQ ID NO: 1127236
aacuuccaagaccugcccu

SEQ ID NO: 1127238 - RNA, 19 nt, Artificial Sequence
  Description of Artificial Sequence: Synthetic oligonucleotide
  Sense strand starting at position 2380 of SEQ ID NO: 916059
cucucauguggcuaaggua

SEQ ID NO: 1127239 - RNA, 19 nt, Artificial Sequence
  Description of Artificial Sequence: Synthetic oligonucleotide
  Antisense strand to SEQ ID NO: 1127238
uaccuuagccacaugagag

SEQ ID NO: 1127240 - RNA, 19 nt, Artificial Sequence
  Description of Artificial Sequence: Synthetic oligonucleotide
  Sense strand starting at position 2522 of SEQ ID NO: 916059
uggugacagucauugagac

SEQ ID NO: 1127241 - RNA, 19 nt, Artificial Sequence
  Description of Artificial Sequence: Synthetic oligonucleotide
  Antisense strand to SEQ ID NO: 1127240
gucucaaugacugucacca

SEQ ID NO: 1127242 - RNA, 19 nt, Artificial Sequence
  Description of Artificial Sequence: Synthetic oligonucleotide
  Sense strand starting at position 2523 of SEQ ID NO: 916059
ggugacagucauugagacu

SEQ ID NO: 1127243 - RNA, 19 nt, Artificial Sequence
  Description of Artificial Sequence: Synthetic oligonucleotide
  Antisense strand to SEQ ID NO: 1127242
agucucaaugacugucacc

SEQ ID NO: 1127244 - RNA, 19 nt, Artificial Sequence
  Description of Artificial Sequence: Synthetic oligonucleotide
  Sense strand starting at position 2524 of SEQ ID NO: 916059
gugacagucauugagacug

SEQ ID NO: 1127245 - RNA, 19 nt, Artificial Sequence
  Description of Artificial Sequence: Synthetic oligonucleotide
  Antisense strand to SEQ ID NO: 1127244
cagucucaaugacugucac

SEQ ID NO: 1127246 - RNA, 19 nt, Artificial Sequence
  Description of Artificial Sequence: Synthetic oligonucleotide
  Sense strand starting at position 2529 of SEQ ID NO: 916059
agucauugagacugucuga

SEQ ID NO: 1127247 - RNA, 19 nt, Artificial Sequence
  Description of Artificial Sequence: Synthetic oligonucleotide
  Antisense strand to SEQ ID NO: 1127246
ucagacagucucaaugacu

SEQ ID NO: 1127248 - RNA, 19 nt, Artificial Sequence
  Description of Artificial Sequence: Synthetic oligonucleotide
  Sense strand starting at position 2532 of SEQ ID NO: 916059
cauugagacugucugaaag

SEQ ID NO: 1127249 - RNA, 19 nt, Artificial Sequence
  Description of Artificial Sequence: Synthetic oligonucleotide
  Antisense strand to SEQ ID NO: 1127248
cuuucagacagucucaaug

SEQ ID NO: 1127250 - RNA, 19 nt, Artificial Sequence
  Description of Artificial Sequence: Synthetic oligonucleotide
  Sense strand starting at position 2619 of SEQ ID NO: 916059
ccaacaaaugugugaaagu

SEQ ID NO: 1127251 - RNA, 19 nt, Artificial Sequence
  Description of Artificial Sequence: Synthetic oligonucleotide
  Antisense strand to SEQ ID NO: 1127250
acuuucacacauuuguugg

SEQ ID NO: 1127252 - RNA, 19 nt, Artificial Sequence
  Description of Artificial Sequence: Synthetic oligonucleotide
  Sense strand starting at position 2626 of SEQ ID NO: 916059
augugugaaaguugucaac

SEQ ID NO: 1127253 - RNA, 19 nt, Artificial Sequence
  Description of Artificial Sequence: Synthetic oligonucleotide
  Antisense strand to SEQ ID NO: 1127252
guugacaacuuucacacau

SEQ ID NO: 1127254 - RNA, 19 nt, Artificial Sequence
  Description of Artificial Sequence: Synthetic oligonucleotide
  Sense strand starting at position 2785 of SEQ ID NO: 916059
cguguaaauggauacaauc

SEQ ID NO: 1127255 - RNA, 19 nt, Artificial Sequence
  Description of Artificial Sequence: Synthetic oligonucleotide
  Antisense strand to SEQ ID NO: 1127254
gauuguauccauuuacacg

SEQ ID NO: 1127256 - RNA, 19 nt, Artificial Sequence
  Description of Artificial Sequence: Synthetic oligonucleotide
  Sense strand starting at position 2854 of SEQ ID NO: 916059
uugugcauucuaugacuau

SEQ ID NO: 1127257 - RNA, 19 nt, Artificial Sequence
  Description of Artificial Sequence: Synthetic oligonucleotide
  Antisense strand to SEQ ID NO: 1127256
auagucauagaaugcacaa

SEQ ID NO: 1127258 - RNA, 19 nt, Artificial Sequence
  Description of Artificial Sequence: Synthetic oligonucleotide
  Sense strand starting at position 2866 of SEQ ID NO: 916059
ugacuauugcuagguguag

SEQ ID NO: 1127259 - RNA, 19 nt, Artificial Sequence
  Description of Artificial Sequence: Synthetic oligonucleotide
  Antisense strand to SEQ ID NO: 1127258
cuacaccuagcaauaguca

SEQ ID NO: 1127260 - RNA, 19 nt, Artificial Sequence
  Description of Artificial Sequence: Synthetic oligonucleotide
  Sense strand starting at position 3064 of SEQ ID NO: 916059
ugcccaauuguuuguauuu

SEQ ID NO: 1127261 - RNA, 19 nt, Artificial Sequence
  Description of Artificial Sequence: Synthetic oligonucleotide
  Antisense strand to SEQ ID NO: 1127260
aaauacaaacaauugggca

SEQ ID NO: 1127262 - RNA, 19 nt, Artificial Sequence
  Description of Artificial Sequence: Synthetic oligonucleotide
  Sense strand starting at position 3280 of SEQ ID NO: 916059
auaaauguccaucagcagu

SEQ ID NO: 1127263 - RNA, 19 nt, Artificial Sequence
  Description of Artificial Sequence: Synthetic oligonucleotide
  Antisense strand to SEQ ID NO: 1127262
acugcugauggacauuuau

SEQ ID NO: 1127264 - RNA, 19 nt, Artificial Sequence
  Description of Artificial Sequence: Synthetic oligonucleotide
  Sense strand starting at position 3481 of SEQ ID NO: 916059
uuguuuaaggagggaugua

SEQ ID NO: 1127265 - RNA, 19 nt, Artificial Sequence
  Description of Artificial Sequence: Synthetic oligonucleotide
  Antisense strand to SEQ ID NO: 1127264
uacaucccuccuuaaacaa

SEQ ID NO: 1127266 - RNA, 19 nt, Artificial Sequence
  Description of Artificial Sequence: Synthetic oligonucleotide
  Sense strand starting at position 3507 of SEQ ID NO: 916059
gaugcaaaucauugcaguu

SEQ ID NO: 1127267 - RNA, 19 nt, Artificial Sequence
  Description of Artificial Sequence: Synthetic oligonucleotide
  Antisense strand to SEQ ID NO: 1127266
aacugcaaugauuugcauc

SEQ ID NO: 1127268 - RNA, 19 nt, Artificial Sequence
  Description of Artificial Sequence: Synthetic oligonucleotide
  Sense strand starting at position 3926 of SEQ ID NO: 916059
auggauagcuacuauuuau

SEQ ID NO: 1127269 - RNA, 19 nt, Artificial Sequence
  Description of Artificial Sequence: Synthetic oligonucleotide
  Antisense strand to SEQ ID NO: 1127268
auaaauaguagcuauccau

SEQ ID NO: 1127270 - RNA, 19 nt, Artificial Sequence
  Description of Artificial Sequence: Synthetic oligonucleotide
  Sense strand starting at position 212 of SEQ ID NO: 916060
gagaguuggguccauccau

SEQ ID NO: 1127271 - RNA, 19 nt, Artificial Sequence
  Description of Artificial Sequence: Synthetic oligonucleotide
  Antisense strand to SEQ ID NO: 1127270
auggauggacccaacucuc

SEQ ID NO: 1127272 - RNA, 19 nt, Artificial Sequence
  Description of Artificial Sequence: Synthetic oligonucleotide
  Sense strand starting at position 265 of SEQ ID NO: 916060
agggcaguggccuagacau

SEQ ID NO: 1127273 - RNA, 19 nt, Artificial Sequence
  Description of Artificial Sequence: Synthetic oligonucleotide
  Antisense strand to SEQ ID NO: 1127272
augucuaggccacugcccu

SEQ ID NO: 1127274 - RNA, 19 nt, Artificial Sequence
  Description of Artificial Sequence: Synthetic oligonucleotide
  Sense strand starting at position 333 of SEQ ID NO: 916060
cugucuaaaccucaauguu

SEQ ID NO: 1127275 - RNA, 19 nt, Artificial Sequence
  Description of Artificial Sequence: Synthetic oligonucleotide
  Antisense strand to SEQ ID NO: 1127274
aacauugagguuuagacag

SEQ ID NO: 1127276 - RNA, 19 nt, Artificial Sequence
  Description of Artificial Sequence: Synthetic oligonucleotide
  Sense strand starting at position 410 of SEQ ID NO: 916060
uuagauaauaugugaguga

SEQ ID NO: 1127277 - RNA, 19 nt, Artificial Sequence
  Description of Artificial Sequence: Synthetic oligonucleotide
  Antisense strand to SEQ ID NO: 1127276
ucacucacauauuaucuaa

SEQ ID NO: 1127278 - RNA, 19 nt, Artificial Sequence
  Description of Artificial Sequence: Synthetic oligonucleotide
  Sense strand starting at position 413 of SEQ ID NO: 916060
gauaauaugugagugagua

SEQ ID NO: 1127279 - RNA, 19 nt, Artificial Sequence
  Description of Artificial Sequence: Synthetic oligonucleotide
  Antisense strand to SEQ ID NO: 1127278
uacucacucacauauuauc

SEQ ID NO: 1127280 - RNA, 19 nt, Artificial Sequence
  Description of Artificial Sequence: Synthetic oligonucleotide
  Sense strand starting at position 414 of SEQ ID NO: 916060
auaauaugugagugaguaa

SEQ ID NO: 1127281 - RNA, 19 nt, Artificial Sequence
  Description of Artificial Sequence: Synthetic oligonucleotide
  Antisense strand to SEQ ID NO: 1127280
uuacucacucacauauuau

SEQ ID NO: 1127282 - RNA, 19 nt, Artificial Sequence
  Description of Artificial Sequence: Synthetic oligonucleotide
  Sense strand starting at position 415 of SEQ ID NO: 916060
uaauaugugagugaguaag

SEQ ID NO: 1127283 - RNA, 19 nt, Artificial Sequence
  Description of Artificial Sequence: Synthetic oligonucleotide
  Antisense strand to SEQ ID NO: 1127282
cuuacucacucacauauua

SEQ ID NO: 1127284 - RNA, 19 nt, Artificial Sequence
  Description of Artificial Sequence: Synthetic oligonucleotide
  Sense strand starting at position 447 of SEQ ID NO: 916060
auauaaauguggcuagaag

SEQ ID NO: 1127285 - RNA, 19 nt, Artificial Sequence
  Description of Artificial Sequence: Synthetic oligonucleotide
  Antisense strand to SEQ ID NO: 1127284
cuucuagccacauuuauau

SEQ ID NO: 1127286 - RNA, 19 nt, Artificial Sequence
  Description of Artificial Sequence: Synthetic oligonucleotide
  Sense strand starting at position 448 of SEQ ID NO: 916060
uauaaauguggcuagaagu

SEQ ID NO: 1127287 - RNA, 19 nt, Artificial Sequence
  Description of Artificial Sequence: Synthetic oligonucleotide
  Antisense strand to SEQ ID NO: 1127286
acuucuagccacauuuaua

SEQ ID NO: 1127288 - RNA, 19 nt, Artificial Sequence
  Description of Artificial Sequence: Synthetic oligonucleotide
  Sense strand starting at position 454 of SEQ ID NO: 916060
uguggcuagaaguauuauu

SEQ ID NO: 1127289 - RNA, 19 nt, Artificial Sequence
  Description of Artificial Sequence: Synthetic oligonucleotide
  Antisense strand to SEQ ID NO: 1127288
aauaauacuucuagccaca

SEQ ID NO: 1127290 - RNA, 19 nt, Artificial Sequence
  Description of Artificial Sequence: Synthetic oligonucleotide
  Sense strand starting at position 472 of SEQ ID NO: 916060
ucaccaguaugaucuagua

SEQ ID NO: 1127291 - RNA, 19 nt, Artificial Sequence
  Description of Artificial Sequence: Synthetic oligonucleotide
  Antisense strand to SEQ ID NO: 1127290
uacuagaucauacugguga

SEQ ID NO: 1127292 - RNA, 19 nt, Artificial Sequence
  Description of Artificial Sequence: Synthetic oligonucleotide
  Sense strand starting at position 828 of SEQ ID NO: 916060
gaaguaggacuacgucaaa

SEQ ID NO: 1127293 - RNA, 19 nt, Artificial Sequence
  Description of Artificial Sequence: Synthetic oligonucleotide
  Antisense strand to SEQ ID NO: 1127292
uuugacguaguccuacuuc

SEQ ID NO: 1127294 - RNA, 19 nt, Artificial Sequence
  Description of Artificial Sequence: Synthetic oligonucleotide
  Sense strand starting at position 910 of SEQ ID NO: 916060
uggaccugcaaaugaguaa

SEQ ID NO: 1127295 - RNA, 19 nt, Artificial Sequence
  Description of Artificial Sequence: Synthetic oligonucleotide
  Antisense strand to SEQ ID NO: 1127294
uuacucauuugcaggucca

SEQ ID NO: 1127296 - RNA, 19 nt, Artificial Sequence
  Description of Artificial Sequence: Synthetic oligonucleotide
  Sense strand starting at position 935 of SEQ ID NO: 916060
cagcuccgggucuauuaaa

SEQ ID NO: 1127297 - RNA, 19 nt, Artificial Sequence
  Description of Artificial Sequence: Synthetic oligonucleotide
  Antisense strand to SEQ ID NO: 1127296
uuuaauagacccggagcug

SEQ ID NO: 1127298 - RNA, 19 nt, Artificial Sequence
  Description of Artificial Sequence: Synthetic oligonucleotide
  Sense strand starting at position 1898 of SEQ ID NO: 916060
uuuguuuggccgagggcau

SEQ ID NO: 1127299 - RNA, 19 nt, Artificial Sequence
  Description of Artificial Sequence: Synthetic oligonucleotide
  Antisense strand to SEQ ID NO: 1127298
augcccucggccaaacaaa

SEQ ID NO: 1127300 - RNA, 19 nt, Artificial Sequence
  Description of Artificial Sequence: Synthetic oligonucleotide
  Sense strand starting at position 2809 of SEQ ID NO: 916060
aagauucucgacuguggua

SEQ ID NO: 1127301 - RNA, 19 nt, Artificial Sequence
  Description of Artificial Sequence: Synthetic oligonucleotide
  Antisense strand to SEQ ID NO: 1127300
uaccacagucgagaaucuu

SEQ ID NO: 1127302 - RNA, 19 nt, Artificial Sequence
  Description of Artificial Sequence: Synthetic oligonucleotide
  Sense strand starting at position 3085 of SEQ ID NO: 916060
ugguuagcgacucacauau

SEQ ID NO: 1127303 - RNA, 19 nt, Artificial Sequence
  Description of Artificial Sequence: Synthetic oligonucleotide
  Antisense strand to SEQ ID NO: 1127302
auaugugagucgcuaacca

SEQ ID NO: 1127304 - RNA, 19 nt, Artificial Sequence
  Description of Artificial Sequence: Synthetic oligonucleotide
  Sense strand starting at position 3094 of SEQ ID NO: 916060
acucacauauguucucgaa

SEQ ID NO: 1127305 - RNA, 19 nt, Artificial Sequence
  Description of Artificial Sequence: Synthetic oligonucleotide
  Antisense strand to SEQ ID NO: 1127304
uucgagaacauaugugagu

SEQ ID NO: 1127306 - RNA, 19 nt, Artificial Sequence
  Description of Artificial Sequence: Synthetic oligonucleotide
  Sense strand starting at position 3096 of SEQ ID NO: 916060
ucacauauguucucgaaau

SEQ ID NO: 1127307 - RNA, 19 nt, Artificial Sequence
  Description of Artificial Sequence: Synthetic oligonucleotide
  Antisense strand to SEQ ID NO: 1127306
auuucgagaacauauguga

SEQ ID NO: 1127308 - RNA, 19 nt, Artificial Sequence
  Description of Artificial Sequence: Synthetic oligonucleotide
  Sense strand starting at position 3098 of SEQ ID NO: 916060
acauauguucucgaaaucu

SEQ ID NO: 1127309 - RNA, 19 nt, Artificial Sequence
  Description of Artificial Sequence: Synthetic oligonucleotide
  Antisense strand to SEQ ID NO: 1127308
agauuucgagaacauaugu

SEQ ID NO: 1127310 - RNA, 19 nt, Artificial Sequence
  Description of Artificial Sequence: Synthetic oligonucleotide
  Sense strand starting at position 3123 of SEQ ID NO: 916060
agcccugugagguagaaau

SEQ ID NO: 1127311 - RNA, 19 nt, Artificial Sequence
  Description of Artificial Sequence: Synthetic oligonucleotide
  Antisense strand to SEQ ID NO: 1127310
auuucuaccucacagggcu

SEQ ID NO: 1127312 - RNA, 19 nt, Artificial Sequence
  Description of Artificial Sequence: Synthetic oligonucleotide
  Sense strand starting at position 3164 of SEQ ID NO: 916060
ggaaauugagacugagcga

SEQ ID NO: 1127313 - RNA, 19 nt, Artificial Sequence
  Description of Artificial Sequence: Synthetic oligonucleotide
  Antisense strand to SEQ ID NO: 1127312
ucgcucagucucaauuucc

SEQ ID NO: 1127314 - RNA, 19 nt, Artificial Sequence
  Description of Artificial Sequence: Synthetic oligonucleotide
  Sense strand starting at position 3204 of SEQ ID NO: 916060
ggucacauauagucaucau

SEQ ID NO: 1127315 - RNA, 19 nt, Artificial Sequence
  Description of Artificial Sequence: Synthetic oligonucleotide
  Antisense strand to SEQ ID NO: 1127314
augaugacuauaugugacc

SEQ ID NO: 1127316 - RNA, 19 nt, Artificial Sequence
  Description of Artificial Sequence: Synthetic oligonucleotide
  Sense strand starting at position 3208 of SEQ ID NO: 916060
acauauagucaucauucga

SEQ ID NO: 1127317 - RNA, 19 nt, Artificial Sequence
  Description of Artificial Sequence: Synthetic oligonucleotide
  Antisense strand to SEQ ID NO: 1127316
ucgaaugaugacuauaugu

SEQ ID NO: 1127318 - RNA, 19 nt, Artificial Sequence
  Description of Artificial Sequence: Synthetic oligonucleotide
  Sense strand starting at position 3383 of SEQ ID NO: 916060
ccaguuucuggugagugau

SEQ ID NO: 1127319 - RNA, 19 nt, Artificial Sequence
  Description of Artificial Sequence: Synthetic oligonucleotide
  Antisense strand to SEQ ID NO: 1127318
aucacucaccagaaacugg

SEQ ID NO: 1127320 - RNA, 19 nt, Artificial Sequence
  Description of Artificial Sequence: Synthetic oligonucleotide
  Sense strand starting at position 3470 of SEQ ID NO: 916060
ccucccaguucuguaaaca

SEQ ID NO: 1127321 - RNA, 19 nt, Artificial Sequence
  Description of Artificial Sequence: Synthetic oligonucleotide
  Antisense strand to SEQ ID NO: 1127320
uguuuacagaacugggagg

SEQ ID NO: 1127322 - RNA, 19 nt, Artificial Sequence
  Description of Artificial Sequence: Synthetic oligonucleotide
  Sense strand starting at position 3471 of SEQ ID NO: 916060
cucccaguucuguaaacaa

SEQ ID NO: 1127323 - RNA, 19 nt, Artificial Sequence
  Description of Artificial Sequence: Synthetic oligonucleotide
  Antisense strand to SEQ ID NO: 1127322
uuguuuacagaacugggag

SEQ ID NO: 1127324 - RNA, 19 nt, Artificial Sequence
  Description of Artificial Sequence: Synthetic oligonucleotide
  Sense strand starting at position 3531 of SEQ ID NO: 916060
augccaccucuuugaugau

SEQ ID NO: 1127325 - RNA, 19 nt, Artificial Sequence
  Description of Artificial Sequence: Synthetic oligonucleotide
  Antisense strand to SEQ ID NO: 1127324
aucaucaaagagguggcau

SEQ ID NO: 1127326 - RNA, 19 nt, Artificial Sequence
  Description of Artificial Sequence: Synthetic oligonucleotide
  Sense strand starting at position 3543 of SEQ ID NO: 916060
ugaugaugcuuucccuaua

SEQ ID NO: 1127327 - RNA, 19 nt, Artificial Sequence
  Description of Artificial Sequence: Synthetic oligonucleotide
  Antisense strand to SEQ ID NO: 1127326
uauagggaaagcaucauca

SEQ ID NO: 1127328 - RNA, 19 nt, Artificial Sequence
  Description of Artificial Sequence: Synthetic oligonucleotide
  Sense strand starting at position 3571 of SEQ ID NO: 916060
gauaccucucaugggacuu

SEQ ID NO: 1127329 - RNA, 19 nt, Artificial Sequence
  Description of Artificial Sequence: Synthetic oligonucleotide
  Antisense strand to SEQ ID NO: 1127328
aagucccaugagagguauc

SEQ ID NO: 1127330 - RNA, 19 nt, Artificial Sequence
  Description of Artificial Sequence: Synthetic oligonucleotide
  Sense strand starting at position 3602 of SEQ ID NO: 916060
caacgagaggcauauaugu

SEQ ID NO: 1127331 - RNA, 19 nt, Artificial Sequence
  Description of Artificial Sequence: Synthetic oligonucleotide
  Antisense strand to SEQ ID NO: 1127330
acauauaugccucucguug

SEQ ID NO: 1127332 - RNA, 19 nt, Artificial Sequence
  Description of Artificial Sequence: Synthetic oligonucleotide
  Sense strand starting at position 3604 of SEQ ID NO: 916060
acgagaggcauauauguua

SEQ ID NO: 1127333 - RNA, 19 nt, Artificial Sequence
  Description of Artificial Sequence: Synthetic oligonucleotide
  Antisense strand to SEQ ID NO: 1127332
uaacauauaugccucucgu

SEQ ID NO: 1127334 - RNA, 19 nt, Artificial Sequence
  Description of Artificial Sequence: Synthetic oligonucleotide
  Sense strand starting at position 3607 of SEQ ID NO: 916060
agaggcauauauguuaguu

SEQ ID NO: 1127335 - RNA, 19 nt, Artificial Sequence
  Description of Artificial Sequence: Synthetic oligonucleotide
  Antisense strand to SEQ ID NO: 1127334
aacuaacauauaugccucu

SEQ ID NO: 1127336 - RNA, 19 nt, Artificial Sequence
  Description of Artificial Sequence: Synthetic oligonucleotide
  Sense strand starting at position 3748 of SEQ ID NO: 916060
gccuccagugaaugaauga

SEQ ID NO: 1127337 - RNA, 19 nt, Artificial Sequence
  Description of Artificial Sequence: Synthetic oligonucleotide
  Antisense strand to SEQ ID NO: 1127336
ucauucauucacuggaggc

SEQ ID NO: 1127338 - RNA, 19 nt, Artificial Sequence
  Description of Artificial Sequence: Synthetic oligonucleotide
  Sense strand starting at position 3795 of SEQ ID NO: 916060
ugcacuacacuuggagaua

SEQ ID NO: 1127339 - RNA, 19 nt, Artificial Sequence
  Description of Artificial Sequence: Synthetic oligonucleotide
  Antisense strand to SEQ ID NO: 1127338
uaucuccaaguguagugca

SEQ ID NO: 1127340 - RNA, 19 nt, Artificial Sequence
  Description of Artificial Sequence: Synthetic oligonucleotide
  Sense strand starting at position 3824 of SEQ ID NO: 916060
ccuguugagggcuaacuua

SEQ ID NO: 1127341 - RNA, 19 nt, Artificial Sequence
  Description of Artificial Sequence: Synthetic oligonucleotide
  Antisense strand to SEQ ID NO: 1127340
uaaguuagcccucaacagg

SEQ ID NO: 1127342 - RNA, 19 nt, Artificial Sequence
  Description of Artificial Sequence: Synthetic oligonucleotide
  Sense strand starting at position 3832 of SEQ ID NO: 916060
gggcuaacuuagguaaauu

SEQ ID NO: 1127343 - RNA, 19 nt, Artificial Sequence
  Description of Artificial Sequence: Synthetic oligonucleotide
  Antisense strand to SEQ ID NO: 1127342
aauuuaccuaaguuagccc

SEQ ID NO: 1127344 - RNA, 19 nt, Artificial Sequence
  Description of Artificial Sequence: Synthetic oligonucleotide
  Sense strand starting at position 3833 of SEQ ID NO: 916060
ggcuaacuuagguaaauug

SEQ ID NO: 1127345 - RNA, 19 nt, Artificial Sequence
  Description of Artificial Sequence: Synthetic oligonucleotide
  Antisense strand to SEQ ID NO: 1127344
caauuuaccuaaguuagcc

SEQ ID NO: 1127346 - RNA, 19 nt, Artificial Sequence
  Description of Artificial Sequence: Synthetic oligonucleotide
  Sense strand starting at position 3864 of SEQ ID NO: 916060
uaaagagauuuggaaagca

SEQ ID NO: 1127347 - RNA, 19 nt, Artificial Sequence
  Description of Artificial Sequence: Synthetic oligonucleotide
  Antisense strand to SEQ ID NO: 1127346
ugcuuuccaaaucucuuua

SEQ ID NO: 1127348 - RNA, 19 nt, Artificial Sequence
  Description of Artificial Sequence: Synthetic oligonucleotide
  Sense strand starting at position 3932 of SEQ ID NO: 916060
cagugccuugaagaaugau

SEQ ID NO: 1127349 - RNA, 19 nt, Artificial Sequence
  Description of Artificial Sequence: Synthetic oligonucleotide
  Antisense strand to SEQ ID NO: 1127348
aucauucuucaaggcacug

SEQ ID NO: 1127350 - RNA, 19 nt, Artificial Sequence
  Description of Artificial Sequence: Synthetic oligonucleotide
  Sense strand starting at position 1261 of SEQ ID NO: 916061
ggccaaaucucuccagacu

SEQ ID NO: 1127351 - RNA, 19 nt, Artificial Sequence
  Description of Artificial Sequence: Synthetic oligonucleotide
  Antisense strand to SEQ ID NO: 1127350
agucuggagagauuuggcc

SEQ ID NO: 1127352 - RNA, 19 nt, Artificial Sequence
  Description of Artificial Sequence: Synthetic oligonucleotide
  Sense strand starting at position 1284 of SEQ ID NO: 916061
agaacucuguagccaaaca

SEQ ID NO: 1127353 - RNA, 19 nt, Artificial Sequence
  Description of Artificial Sequence: Synthetic oligonucleotide
  Antisense strand to SEQ ID NO: 1127352
uguuuggcuacagaguucu

SEQ ID NO: 1127354 - RNA, 19 nt, Artificial Sequence
  Description of Artificial Sequence: Synthetic oligonucleotide
  Sense strand starting at position 1468 of SEQ ID NO: 916061
gcgugauacggguagagau

SEQ ID NO: 1127355 - RNA, 19 nt, Artificial Sequence
  Description of Artificial Sequence: Synthetic oligonucleotide
  Antisense strand to SEQ ID NO: 1127354
aucucuacccguaucacgc

SEQ ID NO: 1127356 - RNA, 19 nt, Artificial Sequence
  Description of Artificial Sequence: Synthetic oligonucleotide
  Sense strand starting at position 1711 of SEQ ID NO: 916061
aauggagauuccuucggaa

SEQ ID NO: 1127357 - RNA, 19 nt, Artificial Sequence
  Description of Artificial Sequence: Synthetic oligonucleotide
  Antisense strand to SEQ ID NO: 1127356
uuccgaaggaaucuccauu

SEQ ID NO: 1127358 - RNA, 19 nt, Artificial Sequence
  Description of Artificial Sequence: Synthetic oligonucleotide
  Sense strand starting at position 1714 of SEQ ID NO: 916061
ggagauuccuucggaauuu

SEQ ID NO: 1127359 - RNA, 19 nt, Artificial Sequence
  Description of Artificial Sequence: Synthetic oligonucleotide
  Antisense strand to SEQ ID NO: 1127358
aaauuccgaaggaaucucc

SEQ ID NO: 1127360 - RNA, 19 nt, Artificial Sequence
  Description of Artificial Sequence: Synthetic oligonucleotide
  Sense strand starting at position 1715 of SEQ ID NO: 916061
gagauuccuucggaauuuc

SEQ ID NO: 1127361 - RNA, 19 nt, Artificial Sequence
  Description of Artificial Sequence: Synthetic oligonucleotide
  Antisense strand to SEQ ID NO: 1127360
gaaauuccgaaggaaucuc

SEQ ID NO: 1127362 - RNA, 19 nt, Artificial Sequence
  Description of Artificial Sequence: Synthetic oligonucleotide
  Sense strand starting at position 1723 of SEQ ID NO: 916061
uucggaauuucucaaauug

SEQ ID NO: 1127363 - RNA, 19 nt, Artificial Sequence
  Description of Artificial Sequence: Synthetic oligonucleotide
  Antisense strand to SEQ ID NO: 1127362
caauuugagaaauuccgaa

SEQ ID NO: 1127364 - RNA, 19 nt, Artificial Sequence
  Description of Artificial Sequence: Synthetic oligonucleotide
  Sense strand starting at position 1824 of SEQ ID NO: 916061
gugucugaacuggaacagu

SEQ ID NO: 1127365 - RNA, 19 nt, Artificial Sequence
  Description of Artificial Sequence: Synthetic oligonucleotide
  Antisense strand to SEQ ID NO: 1127364
acuguuccaguucagacac

SEQ ID NO: 1127366 - RNA, 19 nt, Artificial Sequence
  Description of Artificial Sequence: Synthetic oligonucleotide
  Sense strand starting at position 1877 of SEQ ID NO: 916061
ugaacuugccaauggaaau

SEQ ID NO: 1127367 - RNA, 19 nt, Artificial Sequence
  Description of Artificial Sequence: Synthetic oligonucleotide
  Antisense strand to SEQ ID NO: 1127366
auuuccauuggcaaguuca

SEQ ID NO: 1127368 - RNA, 19 nt, Artificial Sequence
  Description of Artificial Sequence: Synthetic oligonucleotide
  Sense strand starting at position 2004 of SEQ ID NO: 916061
ggcaaucagaaaugugguu

SEQ ID NO: 1127369 - RNA, 19 nt, Artificial Sequence
  Description of Artificial Sequence: Synthetic oligonucleotide
  Antisense strand to SEQ ID NO: 1127368
aaccacauuucugauugcc

SEQ ID NO: 1127370 - RNA, 19 nt, Artificial Sequence
  Description of Artificial Sequence: Synthetic oligonucleotide
  Sense strand starting at position 2101 of SEQ ID NO: 916061
ugcggaaauucucccaacu

SEQ ID NO: 1127371 - RNA, 19 nt, Artificial Sequence
  Description of Artificial Sequence: Synthetic oligonucleotide
  Antisense strand to SEQ ID NO: 1127370
aguugggagaauuuccgca

SEQ ID NO: 1127372 - RNA, 19 nt, Artificial Sequence
  Description of Artificial Sequence: Synthetic oligonucleotide
  Sense strand starting at position 2136 of SEQ ID NO: 916061
agagcaaugucuuccugau

SEQ ID NO: 1127373 - RNA, 19 nt, Artificial Sequence
  Description of Artificial Sequence: Synthetic oligonucleotide
  Antisense strand to SEQ ID NO: 1127372
aucaggaagacauugcucu

SEQ ID NO: 1127374 - RNA, 19 nt, Artificial Sequence
  Description of Artificial Sequence: Synthetic oligonucleotide
  Sense strand starting at position 2138 of SEQ ID NO: 916061
agcaaugucuuccugauga

SEQ ID NO: 1127375 - RNA, 19 nt, Artificial Sequence
  Description of Artificial Sequence: Synthetic oligonucleotide
  Antisense strand to SEQ ID NO: 1127374
ucaucaggaagacauugcu

SEQ ID NO: 1127376 - RNA, 19 nt, Artificial Sequence
  Description of Artificial Sequence: Synthetic oligonucleotide
  Sense strand starting at position 2359 of SEQ ID NO: 916061
uagcuacgugcaggaaaua

SEQ ID NO: 1127377 - RNA, 19 nt, Artificial Sequence
  Description of Artificial Sequence: Synthetic oligonucleotide
  Antisense strand to SEQ ID NO: 1127376
uauuuccugcacguagcua

SEQ ID NO: 1127378 - RNA, 19 nt, Artificial Sequence
  Description of Artificial Sequence: Synthetic oligonucleotide
  Sense strand starting at position 2372 of SEQ ID NO: 916061
gaaauaauguagcuaugug

SEQ ID NO: 1127379 - RNA, 19 nt, Artificial Sequence
  Description of Artificial Sequence: Synthetic oligonucleotide
  Antisense strand to SEQ ID NO: 1127378
cacauagcuacauuauuuc

SEQ ID NO: 1127380 - RNA, 19 nt, Artificial Sequence
  Description of Artificial Sequence: Synthetic oligonucleotide
  Sense strand starting at position 2379 of SEQ ID NO: 916061
uguagcuaugugugggaaa

SEQ ID NO: 1127381 - RNA, 19 nt, Artificial Sequence
  Description of Artificial Sequence: Synthetic oligonucleotide
  Antisense strand to SEQ ID NO: 1127380
uuucccacacauagcuaca

SEQ ID NO: 1127382 - RNA, 19 nt, Artificial Sequence
  Description of Artificial Sequence: Synthetic oligonucleotide
  Sense strand starting at position 2438 of SEQ ID NO: 916061
guaaguauugcucaucaau

SEQ ID NO: 1127383 - RNA, 19 nt, Artificial Sequence
  Description of Artificial Sequence: Synthetic oligonucleotide
  Antisense strand to SEQ ID NO: 1127382
auugaugagcaauacuuac

SEQ ID NO: 1127384 - RNA, 19 nt, Artificial Sequence
  Description of Artificial Sequence: Synthetic oligonucleotide
  Sense strand starting at position 2463 of SEQ ID NO: 916061
auuugcugucucugcaauu

SEQ ID NO: 1127385 - RNA, 19 nt, Artificial Sequence
  Description of Artificial Sequence: Synthetic oligonucleotide
  Antisense strand to SEQ ID NO: 1127384
aauugcagagacagcaaau

SEQ ID NO: 1127386 - RNA, 19 nt, Artificial Sequence
  Description of Artificial Sequence: Synthetic oligonucleotide
  Sense strand starting at position 2479 of SEQ ID NO: 916061
auuaucuguggucgauuga

SEQ ID NO: 1127387 - RNA, 19 nt, Artificial Sequence
  Description of Artificial Sequence: Synthetic oligonucleotide
  Antisense strand to SEQ ID NO: 1127386
ucaaucgaccacagauaau

SEQ ID NO: 1127388 - RNA, 19 nt, Artificial Sequence
  Description of Artificial Sequence: Synthetic oligonucleotide
  Sense strand starting at position 2480 of SEQ ID NO: 916061
uuaucuguggucgauugaa

SEQ ID NO: 1127389 - RNA, 19 nt, Artificial Sequence
  Description of Artificial Sequence: Synthetic oligonucleotide
  Antisense strand to SEQ ID NO: 1127388
uucaaucgaccacagauaa

SEQ ID NO: 1127390 - RNA, 19 nt, Artificial Sequence
  Description of Artificial Sequence: Synthetic oligonucleotide
  Sense strand starting at position 2512 of SEQ ID NO: 916061
uggaaaucuugugucuuaa

SEQ ID NO: 1127391 - RNA, 19 nt, Artificial Sequence
  Description of Artificial Sequence: Synthetic oligonucleotide
  Antisense strand to SEQ ID NO: 1127390
uuaagacacaagauuucca

SEQ ID NO: 1127392 - RNA, 19 nt, Artificial Sequence
  Description of Artificial Sequence: Synthetic oligonucleotide
  Sense strand starting at position 2532 of SEQ ID NO: 916061
uuguuaauauggccagcau

SEQ ID NO: 1127393 - RNA, 19 nt, Artificial Sequence
  Description of Artificial Sequence: Synthetic oligonucleotide
  Antisense strand to SEQ ID NO: 1127392
augcuggccauauuaacaa

SEQ ID NO: 1127394 - RNA, 19 nt, Artificial Sequence
  Description of Artificial Sequence: Synthetic oligonucleotide
  Sense strand starting at position 2533 of SEQ ID NO: 916061
uguuaauauggccagcaua

SEQ ID NO: 1127395 - RNA, 19 nt, Artificial Sequence
  Description of Artificial Sequence: Synthetic oligonucleotide
  Antisense strand to SEQ ID NO: 1127394
uaugcuggccauauuaaca

SEQ ID NO: 1127396 - RNA, 19 nt, Artificial Sequence
  Description of Artificial Sequence: Synthetic oligonucleotide
  Sense strand starting at position 2565 of SEQ ID NO: 916061
uggaguggauuggcugaaa

SEQ ID NO: 1127397 - RNA, 19 nt, Artificial Sequence
  Description of Artificial Sequence: Synthetic oligonucleotide
  Antisense strand to SEQ ID NO: 1127396
uuucagccaauccacucca

SEQ ID NO: 1127398 - RNA, 19 nt, Artificial Sequence
  Description of Artificial Sequence: Synthetic oligonucleotide
  Sense strand starting at position 2679 of SEQ ID NO: 916061
uucuacauaccuugucagu

SEQ ID NO: 1127399 - RNA, 19 nt, Artificial Sequence
  Description of Artificial Sequence: Synthetic oligonucleotide
  Antisense strand to SEQ ID NO: 1127398
acugacaagguauguagaa

SEQ ID NO: 1127400 - RNA, 19 nt, Artificial Sequence
  Description of Artificial Sequence: Synthetic oligonucleotide
  Sense strand starting at position 2681 of SEQ ID NO: 916061
cuacauaccuugucaguca

SEQ ID NO: 1127401 - RNA, 19 nt, Artificial Sequence
  Description of Artificial Sequence: Synthetic oligonucleotide
  Antisense strand to SEQ ID NO: 1127400
ugacugacaagguauguag

SEQ ID NO: 1127402 - RNA, 19 nt, Artificial Sequence
  Description of Artificial Sequence: Synthetic oligonucleotide
  Sense strand starting at position 2748 of SEQ ID NO: 916061
uucggugcccgguuaauau

SEQ ID NO: 1127403 - RNA, 19 nt, Artificial Sequence
  Description of Artificial Sequence: Synthetic oligonucleotide
  Antisense strand to SEQ ID NO: 1127402
auauuaaccgggcaccgaa

SEQ ID NO: 1127404 - RNA, 19 nt, Artificial Sequence
  Description of Artificial Sequence: Synthetic oligonucleotide
  Sense strand starting at position 2815 of SEQ ID NO: 916061
ggacuaauugccugcuacu

SEQ ID NO: 1127405 - RNA, 19 nt, Artificial Sequence
  Description of Artificial Sequence: Synthetic oligonucleotide
  Antisense strand to SEQ ID NO: 1127404
aguagcaggcaauuagucc

SEQ ID NO: 1127406 - RNA, 19 nt, Artificial Sequence
  Description of Artificial Sequence: Synthetic oligonucleotide
  Sense strand starting at position 2879 of SEQ ID NO: 916061
cuacuaagguuucuggaaa

SEQ ID NO: 1127407 - RNA, 19 nt, Artificial Sequence
  Description of Artificial Sequence: Synthetic oligonucleotide
  Antisense strand to SEQ ID NO: 1127406
uuuccagaaaccuuaguag

SEQ ID NO: 1127408 - RNA, 19 nt, Artificial Sequence
  Description of Artificial Sequence: Synthetic oligonucleotide
  Sense strand starting at position 2894 of SEQ ID NO: 916061
gaaaguaacuuugcuagua

SEQ ID NO: 1127409 - RNA, 19 nt, Artificial Sequence
  Description of Artificial Sequence: Synthetic oligonucleotide
  Antisense strand to SEQ ID NO: 1127408
uacuagcaaaguuacuuuc

SEQ ID NO: 1127410 - RNA, 19 nt, Artificial Sequence
  Description of Artificial Sequence: Synthetic oligonucleotide
  Sense strand starting at position 2922 of SEQ ID NO: 916061
ucauaaugccuucgauggu

SEQ ID NO: 1127411 - RNA, 19 nt, Artificial Sequence
  Description of Artificial Sequence: Synthetic oligonucleotide
  Antisense strand to SEQ ID NO: 1127410
accaucgaaggcauuauga

SEQ ID NO: 1127412 - RNA, 19 nt, Artificial Sequence
  Description of Artificial Sequence: Synthetic oligonucleotide
  Sense strand starting at position 2928 of SEQ ID NO: 916061
ugccuucgaugguuauuua

SEQ ID NO: 1127413 - RNA, 19 nt, Artificial Sequence
  Description of Artificial Sequence: Synthetic oligonucleotide
  Antisense strand to SEQ ID NO: 1127412
uaaauaaccaucgaaggca

SEQ ID NO: 1127414 - RNA, 19 nt, Artificial Sequence
  Description of Artificial Sequence: Synthetic oligonucleotide
  Sense strand starting at position 2931 of SEQ ID NO: 916061
cuucgaugguuauuuaugu

SEQ ID NO: 1127415 - RNA, 19 nt, Artificial Sequence
  Description of Artificial Sequence: Synthetic oligonucleotide
  Antisense strand to SEQ ID NO: 1127414
acauaaauaaccaucgaag

SEQ ID NO: 1127416 - RNA, 19 nt, Artificial Sequence
  Description of Artificial Sequence: Synthetic oligonucleotide
  Sense strand starting at position 3148 of SEQ ID NO: 916061
uaggucuaguugucacuuu

SEQ ID NO: 1127417 - RNA, 19 nt, Artificial Sequence
  Description of Artificial Sequence: Synthetic oligonucleotide
  Antisense strand to SEQ ID NO: 1127416
aaagugacaacuagaccua

SEQ ID NO: 1127418 - RNA, 19 nt, Artificial Sequence
  Description of Artificial Sequence: Synthetic oligonucleotide
  Sense strand starting at position 3329 of SEQ ID NO: 916061
ugggcuuugccagaccaca

SEQ ID NO: 1127419 - RNA, 19 nt, Artificial Sequence
  Description of Artificial Sequence: Synthetic oligonucleotide
  Antisense strand to SEQ ID NO: 1127418
uguggucuggcaaagccca

SEQ ID NO: 1127420 - RNA, 19 nt, Artificial Sequence
  Description of Artificial Sequence: Synthetic oligonucleotide
  Sense strand starting at position 3391 of SEQ ID NO: 916061
augugacaaugauacagau

SEQ ID NO: 1127421 - RNA, 19 nt, Artificial Sequence
  Description of Artificial Sequence: Synthetic oligonucleotide
  Antisense strand to SEQ ID NO: 1127420
aucuguaucauugucacau

SEQ ID NO: 1127422 - RNA, 19 nt, Artificial Sequence
  Description of Artificial Sequence: Synthetic oligonucleotide
  Sense strand starting at position 3542 of SEQ ID NO: 916061
ucuaaagagucagaggaaa

SEQ ID NO: 1127423 - RNA, 19 nt, Artificial Sequence
  Description of Artificial Sequence: Synthetic oligonucleotide
  Antisense strand to SEQ ID NO: 1127422
uuuccucugacucuuuaga

SEQ ID NO: 1127424 - RNA, 19 nt, Artificial Sequence
  Description of Artificial Sequence: Synthetic oligonucleotide
  Sense strand starting at position 3828 of SEQ ID NO: 916061
ugaaucuugugguuggaaa

SEQ ID NO: 1127425 - RNA, 19 nt, Artificial Sequence
  Description of Artificial Sequence: Synthetic oligonucleotide
  Antisense strand to SEQ ID NO: 1127424
uuuccaaccacaagauuca

SEQ ID NO: 1127426 - RNA, 19 nt, Artificial Sequence
  Description of Artificial Sequence: Synthetic oligonucleotide
  Sense strand starting at position 3829 of SEQ ID NO: 916061
gaaucuugugguuggaaag

SEQ ID NO: 1127427 - RNA, 19 nt, Artificial Sequence
  Description of Artificial Sequence: Synthetic oligonucleotide
  Antisense strand to SEQ ID NO: 1127426
cuuuccaaccacaagauuc

SEQ ID NO: 1127428 - RNA, 19 nt, Artificial Sequence
  Description of Artificial Sequence: Synthetic oligonucleotide
  Sense strand starting at position 3830 of SEQ ID NO: 916061
aaucuugugguuggaaaga

SEQ ID NO: 1127429 - RNA, 19 nt, Artificial Sequence
  Description of Artificial Sequence: Synthetic oligonucleotide
  Antisense strand to SEQ ID NO: 1127428
ucuuuccaaccacaagauu

SEQ ID NO: 1127430 - RNA, 19 nt, Artificial Sequence
  Description of Artificial Sequence: Synthetic oligonucleotide
  Sense strand starting at position 333 of SEQ ID NO: 916062
agauucuaagcucgauaau

SEQ ID NO: 1127431 - RNA, 19 nt, Artificial Sequence
  Description of Artificial Sequence: Synthetic oligonucleotide
  Antisense strand to SEQ ID NO: 1127430
auuaucgagcuuagaaucu

SEQ ID NO: 1127432 - RNA, 19 nt, Artificial Sequence
  Description of Artificial Sequence: Synthetic oligonucleotide
  Sense strand starting at position 334 of SEQ ID NO: 916062
gauucuaagcucgauaaug

SEQ ID NO: 1127433 - RNA, 19 nt, Artificial Sequence
  Description of Artificial Sequence: Synthetic oligonucleotide
  Antisense strand to SEQ ID NO: 1127432
cauuaucgagcuuagaauc

SEQ ID NO: 1127434 - RNA, 19 nt, Artificial Sequence
  Description of Artificial Sequence: Synthetic oligonucleotide
  Sense strand starting at position 336 of SEQ ID NO: 916062
uucuaagcucgauaaugag

SEQ ID NO: 1127435 - RNA, 19 nt, Artificial Sequence
  Description of Artificial Sequence: Synthetic oligonucleotide
  Antisense strand to SEQ ID NO: 1127434
cucauuaucgagcuuagaa

SEQ ID NO: 1127436 - RNA, 19 nt, Artificial Sequence
  Description of Artificial Sequence: Synthetic oligonucleotide
  Sense strand starting at position 361 of SEQ ID NO: 916062
agaugagauuaagaacaug

SEQ ID NO: 1127437 - RNA, 19 nt, Artificial Sequence
  Description of Artificial Sequence: Synthetic oligonucleotide
  Antisense strand to SEQ ID NO: 1127436
cauguucuuaaucucaucu

SEQ ID NO: 1127438 - RNA, 19 nt, Artificial Sequence
  Description of Artificial Sequence: Synthetic oligonucleotide
  Sense strand starting at position 488 of SEQ ID NO: 916062
agggcaauuguugguaaua

SEQ ID NO: 1127439 - RNA, 19 nt, Artificial Sequence
  Description of Artificial Sequence: Synthetic oligonucleotide
  Antisense strand to SEQ ID NO: 1127438
uauuaccaacaauugcccu

SEQ ID NO: 1127440 - RNA, 19 nt, Artificial Sequence
  Description of Artificial Sequence: Synthetic oligonucleotide
  Sense strand starting at position 499 of SEQ ID NO: 916062
ugguaauauuaggcucaug

SEQ ID NO: 1127441 - RNA, 19 nt, Artificial Sequence
  Description of Artificial Sequence: Synthetic oligonucleotide
  Antisense strand to SEQ ID NO: 1127440
caugagccuaauauuacca

SEQ ID NO: 1127442 - RNA, 19 nt, Artificial Sequence
  Description of Artificial Sequence: Synthetic oligonucleotide
  Sense strand starting at position 728 of SEQ ID NO: 916062
auagcaaugcuagaauauu

SEQ ID NO: 1127443 - RNA, 19 nt, Artificial Sequence
  Description of Artificial Sequence: Synthetic oligonucleotide
  Antisense strand to SEQ ID NO: 1127442
aauauucuagcauugcuau

SEQ ID NO: 1127444 - RNA, 19 nt, Artificial Sequence
  Description of Artificial Sequence: Synthetic oligonucleotide
  Sense strand starting at position 866 of SEQ ID NO: 916062
acuaucacuguuuaaguua

SEQ ID NO: 1127445 - RNA, 19 nt, Artificial Sequence
  Description of Artificial Sequence: Synthetic oligonucleotide
  Antisense strand to SEQ ID NO: 1127444
uaacuuaaacagugauagu

SEQ ID NO: 1127446 - RNA, 19 nt, Artificial Sequence
  Description of Artificial Sequence: Synthetic oligonucleotide
  Sense strand starting at position 1259 of SEQ ID NO: 916062
ggugauuuaugcuuaguuu

SEQ ID NO: 1127447 - RNA, 19 nt, Artificial Sequence
  Description of Artificial Sequence: Synthetic oligonucleotide
  Antisense strand to SEQ ID NO: 1127446
aaacuaagcauaaaucacc

SEQ ID NO: 1127448 - RNA, 19 nt, Artificial Sequence
  Description of Artificial Sequence: Synthetic oligonucleotide
  Sense strand starting at position 1262 of SEQ ID NO: 916062
gauuuaugcuuaguuuggu

SEQ ID NO: 1127449 - RNA, 19 nt, Artificial Sequence
  Description of Artificial Sequence: Synthetic oligonucleotide
  Antisense strand to SEQ ID NO: 1127448
accaaacuaagcauaaauc

SEQ ID NO: 1127450 - RNA, 19 nt, Artificial Sequence
  Description of Artificial Sequence: Synthetic oligonucleotide
  Sense strand starting at position 1263 of SEQ ID NO: 916062
auuuaugcuuaguuuggua

SEQ ID NO: 1127451 - RNA, 19 nt, Artificial Sequence
  Description of Artificial Sequence: Synthetic oligonucleotide
  Antisense strand to SEQ ID NO: 1127450
uaccaaacuaagcauaaau

SEQ ID NO: 1127452 - RNA, 19 nt, Artificial Sequence
  Description of Artificial Sequence: Synthetic oligonucleotide
  Sense strand starting at position 1275 of SEQ ID NO: 916062
uuugguagauagucaaaug

SEQ ID NO: 1127453 - RNA, 19 nt, Artificial Sequence
  Description of Artificial Sequence: Synthetic oligonucleotide
  Antisense strand to SEQ ID NO: 1127452
cauuugacuaucuaccaaa

SEQ ID NO: 1127454 - RNA, 19 nt, Artificial Sequence
  Description of Artificial Sequence: Synthetic oligonucleotide
  Sense strand starting at position 1628 of SEQ ID NO: 916062
guugaauaguaacuauauc

SEQ ID NO: 1127455 - RNA, 19 nt, Artificial Sequence
  Description of Artificial Sequence: Synthetic oligonucleotide
  Antisense strand to SEQ ID NO: 1127454
gauauaguuacuauucaac

SEQ ID NO: 1127456 - RNA, 19 nt, Artificial Sequence
  Description of Artificial Sequence: Synthetic oligonucleotide
  Sense strand starting at position 2122 of SEQ ID NO: 916062
uugaaauuguguuuggaua

SEQ ID NO: 1127457 - RNA, 19 nt, Artificial Sequence
  Description of Artificial Sequence: Synthetic oligonucleotide
  Antisense strand to SEQ ID NO: 1127456
uauccaaacacaauuucaa

SEQ ID NO: 1127458 - RNA, 19 nt, Artificial Sequence
  Description of Artificial Sequence: Synthetic oligonucleotide
  Sense strand starting at position 2123 of SEQ ID NO: 916062
ugaaauuguguuuggauaa

SEQ ID NO: 1127459 - RNA, 19 nt, Artificial Sequence
  Description of Artificial Sequence: Synthetic oligonucleotide
  Antisense strand to SEQ ID NO: 1127458
uuauccaaacacaauuuca

SEQ ID NO: 1127460 - RNA, 19 nt, Artificial Sequence
  Description of Artificial Sequence: Synthetic oligonucleotide
  Sense strand starting at position 2135 of SEQ ID NO: 916062
uggauaacaucaucagugu

SEQ ID NO: 1127461 - RNA, 19 nt, Artificial Sequence
  Description of Artificial Sequence: Synthetic oligonucleotide
  Antisense strand to SEQ ID NO: 1127460
acacugaugauguuaucca

SEQ ID NO: 1127462 - RNA, 19 nt, Artificial Sequence
  Description of Artificial Sequence: Synthetic oligonucleotide
  Sense strand starting at position 2138 of SEQ ID NO: 916062
auaacaucaucagugucau

SEQ ID NO: 1127463 - RNA, 19 nt, Artificial Sequence
  Description of Artificial Sequence: Synthetic oligonucleotide
  Antisense strand to SEQ ID NO: 1127462
augacacugaugauguuau

SEQ ID NO: 1127464 - RNA, 19 nt, Artificial Sequence
  Description of Artificial Sequence: Synthetic oligonucleotide
  Sense strand starting at position 2146 of SEQ ID NO: 916062
aucagugucaugcaagaga

SEQ ID NO: 1127465 - RNA, 19 nt, Artificial Sequence
  Description of Artificial Sequence: Synthetic oligonucleotide
  Antisense strand to SEQ ID NO: 1127464
ucucuugcaugacacugau

SEQ ID NO: 1127466 - RNA, 19 nt, Artificial Sequence
  Description of Artificial Sequence: Synthetic oligonucleotide
  Sense strand starting at position 2149 of SEQ ID NO: 916062
agugucaugcaagagaaca

SEQ ID NO: 1127467 - RNA, 19 nt, Artificial Sequence
  Description of Artificial Sequence: Synthetic oligonucleotide
  Antisense strand to SEQ ID NO: 1127466
uguucucuugcaugacacu

SEQ ID NO: 1127468 - RNA, 19 nt, Artificial Sequence
  Description of Artificial Sequence: Synthetic oligonucleotide
  Sense strand starting at position 2190 of SEQ ID NO: 916062
gcagacauaguguaggauu

SEQ ID NO: 1127469 - RNA, 19 nt, Artificial Sequence
  Description of Artificial Sequence: Synthetic oligonucleotide
  Antisense strand to SEQ ID NO: 1127468
aauccuacacuaugucugc

SEQ ID NO: 1127470 - RNA, 19 nt, Artificial Sequence
  Description of Artificial Sequence: Synthetic oligonucleotide
  Sense strand starting at position 2334 of SEQ ID NO: 916062
gguucucuucacugggaga

SEQ ID NO: 1127471 - RNA, 19 nt, Artificial Sequence
  Description of Artificial Sequence: Synthetic oligonucleotide
  Antisense strand to SEQ ID NO: 1127470
ucucccagugaagagaacc

SEQ ID NO: 1127472 - RNA, 19 nt, Artificial Sequence
  Description of Artificial Sequence: Synthetic oligonucleotide
  Sense strand starting at position 2366 of SEQ ID NO: 916062
gagcacucccaaggagaau

SEQ ID NO: 1127473 - RNA, 19 nt, Artificial Sequence
  Description of Artificial Sequence: Synthetic oligonucleotide
  Antisense strand to SEQ ID NO: 1127472
auucuccuugggagugcuc

SEQ ID NO: 1127474 - RNA, 19 nt, Artificial Sequence
  Description of Artificial Sequence: Synthetic oligonucleotide
  Sense strand starting at position 2381 of SEQ ID NO: 916062
gaaugagacaguuaguguc

SEQ ID NO: 1127475 - RNA, 19 nt, Artificial Sequence
  Description of Artificial Sequence: Synthetic oligonucleotide
  Antisense strand to SEQ ID NO: 1127474
gacacuaacugucucauuc

SEQ ID NO: 1127476 - RNA, 19 nt, Artificial Sequence
  Description of Artificial Sequence: Synthetic oligonucleotide
  Sense strand starting at position 2383 of SEQ ID NO: 916062
augagacaguuagugucau

SEQ ID NO: 1127477 - RNA, 19 nt, Artificial Sequence
  Description of Artificial Sequence: Synthetic oligonucleotide
  Antisense strand to SEQ ID NO: 1127476
augacacuaacugucucau

SEQ ID NO: 1127478 - RNA, 19 nt, Artificial Sequence
  Description of Artificial Sequence: Synthetic oligonucleotide
  Sense strand starting at position 2394 of SEQ ID NO: 916062
agugucauuccguugccau

SEQ ID NO: 1127479 - RNA, 19 nt, Artificial Sequence
  Description of Artificial Sequence: Synthetic oligonucleotide
  Antisense strand to SEQ ID NO: 1127478
auggcaacggaaugacacu

SEQ ID NO: 1127480 - RNA, 19 nt, Artificial Sequence
  Description of Artificial Sequence: Synthetic oligonucleotide
  Sense strand starting at position 2413 of SEQ ID NO: 916062
guuacauagcuauagguuu

SEQ ID NO: 1127481 - RNA, 19 nt, Artificial Sequence
  Description of Artificial Sequence: Synthetic oligonucleotide
  Antisense strand to SEQ ID NO: 1127480
aaaccuauagcuauguaac

SEQ ID NO: 1127482 - RNA, 19 nt, Artificial Sequence
  Description of Artificial Sequence: Synthetic oligonucleotide
  Sense strand starting at position 2566 of SEQ ID NO: 916062
agcgccaaccuauauauua

SEQ ID NO: 1127483 - RNA, 19 nt, Artificial Sequence
  Description of Artificial Sequence: Synthetic oligonucleotide
  Antisense strand to SEQ ID NO: 1127482
uaauauauagguuggcgcu

SEQ ID NO: 1127484 - RNA, 19 nt, Artificial Sequence
  Description of Artificial Sequence: Synthetic oligonucleotide
  Sense strand starting at position 2586 of SEQ ID NO: 916062
gggaucugaugcccagaaa

SEQ ID NO: 1127485 - RNA, 19 nt, Artificial Sequence
  Description of Artificial Sequence: Synthetic oligonucleotide
  Antisense strand to SEQ ID NO: 1127484
uuucugggcaucagauccc

SEQ ID NO: 1127486 - RNA, 19 nt, Artificial Sequence
  Description of Artificial Sequence: Synthetic oligonucleotide
  Sense strand starting at position 2645 of SEQ ID NO: 916062
uacugagggcucuggaaac

SEQ ID NO: 1127487 - RNA, 19 nt, Artificial Sequence
  Description of Artificial Sequence: Synthetic oligonucleotide
  Antisense strand to SEQ ID NO: 1127486
guuuccagagcccucagua

SEQ ID NO: 1127488 - RNA, 19 nt, Artificial Sequence
  Description of Artificial Sequence: Synthetic oligonucleotide
  Sense strand starting at position 2764 of SEQ ID NO: 916062
ggaaaugagucuccaaagu

SEQ ID NO: 1127489 - RNA, 19 nt, Artificial Sequence
  Description of Artificial Sequence: Synthetic oligonucleotide
  Antisense strand to SEQ ID NO: 1127488
acuuuggagacucauuucc

SEQ ID NO: 1127490 - RNA, 19 nt, Artificial Sequence
  Description of Artificial Sequence: Synthetic oligonucleotide
  Sense strand starting at position 2836 of SEQ ID NO: 916062
cuucuugaucaagaaugca

SEQ ID NO: 1127491 - RNA, 19 nt, Artificial Sequence
  Description of Artificial Sequence: Synthetic oligonucleotide
  Antisense strand to SEQ ID NO: 1127490
ugcauucuugaucaagaag

SEQ ID NO: 1127492 - RNA, 19 nt, Artificial Sequence
  Description of Artificial Sequence: Synthetic oligonucleotide
  Sense strand starting at position 2839 of SEQ ID NO: 916062
cuugaucaagaaugcaagu

SEQ ID NO: 1127493 - RNA, 19 nt, Artificial Sequence
  Description of Artificial Sequence: Synthetic oligonucleotide
  Antisense strand to SEQ ID NO: 1127492
acuugcauucuugaucaag

SEQ ID NO: 1127494 - RNA, 19 nt, Artificial Sequence
  Description of Artificial Sequence: Synthetic oligonucleotide
  Sense strand starting at position 2936 of SEQ ID NO: 916062
uugacauugccacauguaa

SEQ ID NO: 1127495 - RNA, 19 nt, Artificial Sequence
  Description of Artificial Sequence: Synthetic oligonucleotide
  Antisense strand to SEQ ID NO: 1127494
uuacauguggcaaugucaa

SEQ ID NO: 1127496 - RNA, 19 nt, Artificial Sequence
  Description of Artificial Sequence: Synthetic oligonucleotide
  Sense strand starting at position 3405 of SEQ ID NO: 916062
cuaaguacuuuacuaaugu

SEQ ID NO: 1127497 - RNA, 19 nt, Artificial Sequence
  Description of Artificial Sequence: Synthetic oligonucleotide
  Antisense strand to SEQ ID NO: 1127496
acauuaguaaaguacuuag

SEQ ID NO: 1127498 - RNA, 19 nt, Artificial Sequence
  Description of Artificial Sequence: Synthetic oligonucleotide
  Sense strand starting at position 3507 of SEQ ID NO: 916062
uuaaguuuguauccaacau

SEQ ID NO: 1127499 - RNA, 19 nt, Artificial Sequence
  Description of Artificial Sequence: Synthetic oligonucleotide
  Antisense strand to SEQ ID NO: 1127498
auguuggauacaaacuuaa

SEQ ID NO: 1127500 - RNA, 19 nt, Artificial Sequence
  Description of Artificial Sequence: Synthetic oligonucleotide
  Sense strand starting at position 3511 of SEQ ID NO: 916062
guuuguauccaacaucaca

SEQ ID NO: 1127501 - RNA, 19 nt, Artificial Sequence
  Description of Artificial Sequence: Synthetic oligonucleotide
  Antisense strand to SEQ ID NO: 1127500
ugugauguuggauacaaac

SEQ ID NO: 1127502 - RNA, 19 nt, Artificial Sequence
  Description of Artificial Sequence: Synthetic oligonucleotide
  Sense strand starting at position 3690 of SEQ ID NO: 916062
uuguuugugaaaggaugga

SEQ ID NO: 1127503 - RNA, 19 nt, Artificial Sequence
  Description of Artificial Sequence: Synthetic oligonucleotide
  Antisense strand to SEQ ID NO: 1127502
uccauccuuucacaaacaa

SEQ ID NO: 1127504 - RNA, 19 nt, Artificial Sequence
  Description of Artificial Sequence: Synthetic oligonucleotide
  Sense strand starting at position 3915 of SEQ ID NO: 916062
uugguuuagagccagcuaa

SEQ ID NO: 1127505 - RNA, 19 nt, Artificial Sequence
  Description of Artificial Sequence: Synthetic oligonucleotide
  Antisense strand to SEQ ID NO: 1127504
uuagcuggcucuaaaccaa

SEQ ID NO: 1127506 - RNA, 19 nt, Artificial Sequence
  Description of Artificial Sequence: Synthetic oligonucleotide
  Sense strand starting at position 3950 of SEQ ID NO: 916062
agaauaagcugagcucuga

SEQ ID NO: 1127507 - RNA, 19 nt, Artificial Sequence
  Description of Artificial Sequence: Synthetic oligonucleotide
  Antisense strand to SEQ ID NO: 1127506
ucagagcucagcuuauucu

SEQ ID NO: 1127508 - RNA, 19 nt, Artificial Sequence
  Description of Artificial Sequence: Synthetic oligonucleotide
  Sense strand starting at position 3954 of SEQ ID NO: 916062
uaagcugagcucugagaug

SEQ ID NO: 1127509 - RNA, 19 nt, Artificial Sequence
  Description of Artificial Sequence: Synthetic oligonucleotide
  Antisense strand to SEQ ID NO: 1127508
caucucagagcucagcuua

SEQ ID NO: 1127510 - RNA, 19 nt, Artificial Sequence
  Description of Artificial Sequence: Synthetic oligonucleotide
  Sense strand starting at position 337 of SEQ ID NO: 916063
cuggaugaugcugacagua

SEQ ID NO: 1127511 - RNA, 19 nt, Artificial Sequence
  Description of Artificial Sequence: Synthetic oligonucleotide
  Antisense strand to SEQ ID NO: 1127510
uacugucagcaucauccag

SEQ ID NO: 1127512 - RNA, 19 nt, Artificial Sequence
  Description of Artificial Sequence: Synthetic oligonucleotide
  Sense strand starting at position 532 of SEQ ID NO: 916063
gaaugugcagucuaaccua

SEQ ID NO: 1127513 - RNA, 19 nt, Artificial Sequence
  Description of Artificial Sequence: Synthetic oligonucleotide
  Antisense strand to SEQ ID NO: 1127512
uagguuagacugcacauuc

SEQ ID NO: 1127514 - RNA, 19 nt, Artificial Sequence
  Description of Artificial Sequence: Synthetic oligonucleotide
  Sense strand starting at position 574 of SEQ ID NO: 916063
gccguuagcauccuaguca

SEQ ID NO: 1127515 - RNA, 19 nt, Artificial Sequence
  Description of Artificial Sequence: Synthetic oligonucleotide
  Antisense strand to SEQ ID NO: 1127514
ugacuaggaugcuaacggc

SEQ ID NO: 1127516 - RNA, 19 nt, Artificial Sequence
  Description of Artificial Sequence: Synthetic oligonucleotide
  Sense strand starting at position 682 of SEQ ID NO: 916063
uuagauacagcaugacaga

SEQ ID NO: 1127517 - RNA, 19 nt, Artificial Sequence
  Description of Artificial Sequence: Synthetic oligonucleotide
  Antisense strand to SEQ ID NO: 1127516
ucugucaugcuguaucuaa

SEQ ID NO: 1127518 - RNA, 19 nt, Artificial Sequence
  Description of Artificial Sequence: Synthetic oligonucleotide
  Sense strand starting at position 703 of SEQ ID NO: 916063
cuagguacacugugauaug

SEQ ID NO: 1127519 - RNA, 19 nt, Artificial Sequence
  Description of Artificial Sequence: Synthetic oligonucleotide
  Antisense strand to SEQ ID NO: 1127518
cauaucacaguguaccuag

SEQ ID NO: 1127520 - RNA, 19 nt, Artificial Sequence
  Description of Artificial Sequence: Synthetic oligonucleotide
  Sense strand starting at position 945 of SEQ ID NO: 916063
gaaccuggauaguuaacau

SEQ ID NO: 1127521 - RNA, 19 nt, Artificial Sequence
  Description of Artificial Sequence: Synthetic oligonucleotide
  Antisense strand to SEQ ID NO: 1127520
auguuaacuauccagguuc

SEQ ID NO: 1127522 - RNA, 19 nt, Artificial Sequence
  Description of Artificial Sequence: Synthetic oligonucleotide
  Sense strand starting at position 1002 of SEQ ID NO: 916063
gagucuugaccauggagac

SEQ ID NO: 1127523 - RNA, 19 nt, Artificial Sequence
  Description of Artificial Sequence: Synthetic oligonucleotide
  Antisense strand to SEQ ID NO: 1127522
gucuccauggucaagacuc

SEQ ID NO: 1127524 - RNA, 19 nt, Artificial Sequence
  Description of Artificial Sequence: Synthetic oligonucleotide
  Sense strand starting at position 1003 of SEQ ID NO: 916063
agucuugaccauggagacu

SEQ ID NO: 1127525 - RNA, 19 nt, Artificial Sequence
  Description of Artificial Sequence: Synthetic oligonucleotide
  Antisense strand to SEQ ID NO: 1127524
agucuccauggucaagacu

SEQ ID NO: 1127526 - RNA, 19 nt, Artificial Sequence
  Description of Artificial Sequence: Synthetic oligonucleotide
  Sense strand starting at position 1009 of SEQ ID NO: 916063
gaccauggagacugcuauu

SEQ ID NO: 1127527 - RNA, 19 nt, Artificial Sequence
  Description of Artificial Sequence: Synthetic oligonucleotide
  Antisense strand to SEQ ID NO: 1127526
aauagcagucuccaugguc

SEQ ID NO: 1127528 - RNA, 19 nt, Artificial Sequence
  Description of Artificial Sequence: Synthetic oligonucleotide
  Sense strand starting at position 1092 of SEQ ID NO: 916063
aguugugugagcuugcuua

SEQ ID NO: 1127529 - RNA, 19 nt, Artificial Sequence
  Description of Artificial Sequence: Synthetic oligonucleotide
  Antisense strand to SEQ ID NO: 1127528
uaagcaagcucacacaacu

SEQ ID NO: 1127530 - RNA, 19 nt, Artificial Sequence
  Description of Artificial Sequence: Synthetic oligonucleotide
  Sense strand starting at position 1170 of SEQ ID NO: 916063
auucgaauauuauugugga

SEQ ID NO: 1127531 - RNA, 19 nt, Artificial Sequence
  Description of Artificial Sequence: Synthetic oligonucleotide
  Antisense strand to SEQ ID NO: 1127530
uccacaauaauauucgaau

SEQ ID NO: 1127532 - RNA, 19 nt, Artificial Sequence
  Description of Artificial Sequence: Synthetic oligonucleotide
  Sense strand starting at position 1428 of SEQ ID NO: 916063
ccuccaaucugguuucuga

SEQ ID NO: 1127533 - RNA, 19 nt, Artificial Sequence
  Description of Artificial Sequence: Synthetic oligonucleotide
  Antisense strand to SEQ ID NO: 1127532
ucagaaaccagauuggagg

SEQ ID NO: 1127534 - RNA, 19 nt, Artificial Sequence
  Description of Artificial Sequence: Synthetic oligonucleotide
  Sense strand starting at position 1693 of SEQ ID NO: 916063
cuuuaacgccaguauuaaa

SEQ ID NO: 1127535 - RNA, 19 nt, Artificial Sequence
  Description of Artificial Sequence: Synthetic oligonucleotide
  Antisense strand to SEQ ID NO: 1127534
uuuaauacuggcguuaaag

SEQ ID NO: 1127536 - RNA, 19 nt, Artificial Sequence
  Description of Artificial Sequence: Synthetic oligonucleotide
  Sense strand starting at position 2028 of SEQ ID NO: 916063
uuuguuucucuacagagaa

SEQ ID NO: 1127537 - RNA, 19 nt, Artificial Sequence
  Description of Artificial Sequence: Synthetic oligonucleotide
  Antisense strand to SEQ ID NO: 1127536
uucucuguagagaaacaaa

SEQ ID NO: 1127538 - RNA, 19 nt, Artificial Sequence
  Description of Artificial Sequence: Synthetic oligonucleotide
  Sense strand starting at position 2182 of SEQ ID NO: 916063
agggaauucccaugauccu

SEQ ID NO: 1127539 - RNA, 19 nt, Artificial Sequence
  Description of Artificial Sequence: Synthetic oligonucleotide
  Antisense strand to SEQ ID NO: 1127538
aggaucaugggaauucccu

SEQ ID NO: 1127540 - RNA, 19 nt, Artificial Sequence
  Description of Artificial Sequence: Synthetic oligonucleotide
  Sense strand starting at position 2204 of SEQ ID NO: 916063
gguagaggaugcucugaau

SEQ ID NO: 1127541 - RNA, 19 nt, Artificial Sequence
  Description of Artificial Sequence: Synthetic oligonucleotide
  Antisense strand to SEQ ID NO: 1127540
auucagagcauccucuacc

SEQ ID NO: 1127542 - RNA, 19 nt, Artificial Sequence
  Description of Artificial Sequence: Synthetic oligonucleotide
  Sense strand starting at position 2271 of SEQ ID NO: 916063
cuaaucugccuggagacau

SEQ ID NO: 1127543 - RNA, 19 nt, Artificial Sequence
  Description of Artificial Sequence: Synthetic oligonucleotide
  Antisense strand to SEQ ID NO: 1127542
augucuccaggcagauuag

SEQ ID NO: 1127544 - RNA, 19 nt, Artificial Sequence
  Description of Artificial Sequence: Synthetic oligonucleotide
  Sense strand starting at position 2279 of SEQ ID NO: 916063
ccuggagacauugguucua

SEQ ID NO: 1127545 - RNA, 19 nt, Artificial Sequence
  Description of Artificial Sequence: Synthetic oligonucleotide
  Antisense strand to SEQ ID NO: 1127544
uagaaccaaugucuccagg

SEQ ID NO: 1127546 - RNA, 19 nt, Artificial Sequence
  Description of Artificial Sequence: Synthetic oligonucleotide
  Sense strand starting at position 2281 of SEQ ID NO: 916063
uggagacauugguucuagu

SEQ ID NO: 1127547 - RNA, 19 nt, Artificial Sequence
  Description of Artificial Sequence: Synthetic oligonucleotide
  Antisense strand to SEQ ID NO: 1127546
acuagaaccaaugucucca

SEQ ID NO: 1127548 - RNA, 19 nt, Artificial Sequence
  Description of Artificial Sequence: Synthetic oligonucleotide
  Sense strand starting at position 2489 of SEQ ID NO: 916063
gguaauggagcauggagaa

SEQ ID NO: 1127549 - RNA, 19 nt, Artificial Sequence
  Description of Artificial Sequence: Synthetic oligonucleotide
  Antisense strand to SEQ ID NO: 1127548
uucuccaugcuccauuacc

SEQ ID NO: 1127550 - RNA, 19 nt, Artificial Sequence
  Description of Artificial Sequence: Synthetic oligonucleotide
  Sense strand starting at position 2507 of SEQ ID NO: 916063
agaaacugauagcuacuua

SEQ ID NO: 1127551 - RNA, 19 nt, Artificial Sequence
  Description of Artificial Sequence: Synthetic oligonucleotide
  Antisense strand to SEQ ID NO: 1127550
uaaguagcuaucaguuucu

SEQ ID NO: 1127552 - RNA, 19 nt, Artificial Sequence
  Description of Artificial Sequence: Synthetic oligonucleotide
  Sense strand starting at position 2528 of SEQ ID NO: 916063
uacuuaacgugaguaugaa

SEQ ID NO: 1127553 - RNA, 19 nt, Artificial Sequence
  Description of Artificial Sequence: Synthetic oligonucleotide
  Antisense strand to SEQ ID NO: 1127552
uucauacucacguuaagua

SEQ ID NO: 1127554 - RNA, 19 nt, Artificial Sequence
  Description of Artificial Sequence: Synthetic oligonucleotide
  Sense strand starting at position 2529 of SEQ ID NO: 916063
acuuaacgugaguaugaau

SEQ ID NO: 1127555 - RNA, 19 nt, Artificial Sequence
  Description of Artificial Sequence: Synthetic oligonucleotide
  Antisense strand to SEQ ID NO: 1127554
auucauacucacguuaagu

SEQ ID NO: 1127556 - RNA, 19 nt, Artificial Sequence
  Description of Artificial Sequence: Synthetic oligonucleotide
  Sense strand starting at position 2666 of SEQ ID NO: 916063
uuaauacaucugugguaau

SEQ ID NO: 1127557 - RNA, 19 nt, Artificial Sequence
  Description of Artificial Sequence: Synthetic oligonucleotide
  Antisense strand to SEQ ID NO: 1127556
auuaccacagauguauuaa

SEQ ID NO: 1127558 - RNA, 19 nt, Artificial Sequence
  Description of Artificial Sequence: Synthetic oligonucleotide
  Sense strand starting at position 2695 of SEQ ID NO: 916063
agcaauauguaguuaauac

SEQ ID NO: 1127559 - RNA, 19 nt, Artificial Sequence
  Description of Artificial Sequence: Synthetic oligonucleotide
  Antisense strand to SEQ ID NO: 1127558
guauuaacuacauauugcu

SEQ ID NO: 1127560 - RNA, 19 nt, Artificial Sequence
  Description of Artificial Sequence: Synthetic oligonucleotide
  Sense strand starting at position 2738 of SEQ ID NO: 916063
gagcgcuauauaugaggga

SEQ ID NO: 1127561 - RNA, 19 nt, Artificial Sequence
  Description of Artificial Sequence: Synthetic oligonucleotide
  Antisense strand to SEQ ID NO: 1127560
ucccucauauauagcgcuc

SEQ ID NO: 1127562 - RNA, 19 nt, Artificial Sequence
  Description of Artificial Sequence: Synthetic oligonucleotide
  Sense strand starting at position 2742 of SEQ ID NO: 916063
gcuauauaugagggacgaa

SEQ ID NO: 1127563 - RNA, 19 nt, Artificial Sequence
  Description of Artificial Sequence: Synthetic oligonucleotide
  Antisense strand to SEQ ID NO: 1127562
uucgucccucauauauagc

SEQ ID NO: 1127564 - RNA, 19 nt, Artificial Sequence
  Description of Artificial Sequence: Synthetic oligonucleotide
  Sense strand starting at position 2765 of SEQ ID NO: 916063
aggaaucuccucuaaagcu

SEQ ID NO: 1127565 - RNA, 19 nt, Artificial Sequence
  Description of Artificial Sequence: Synthetic oligonucleotide
  Antisense strand to SEQ ID NO: 1127564
agcuuuagaggagauuccu

SEQ ID NO: 1127566 - RNA, 19 nt, Artificial Sequence
  Description of Artificial Sequence: Synthetic oligonucleotide
  Sense strand starting at position 2828 of SEQ ID NO: 916063
aaggauuggguaugaguuu

SEQ ID NO: 1127567 - RNA, 19 nt, Artificial Sequence
  Description of Artificial Sequence: Synthetic oligonucleotide
  Antisense strand to SEQ ID NO: 1127566
aaacucauacccaauccuu

SEQ ID NO: 1127568 - RNA, 19 nt, Artificial Sequence
  Description of Artificial Sequence: Synthetic oligonucleotide
  Sense strand starting at position 2891 of SEQ ID NO: 916063
cauaucuguguggagauua

SEQ ID NO: 1127569 - RNA, 19 nt, Artificial Sequence
  Description of Artificial Sequence: Synthetic oligonucleotide
  Antisense strand to SEQ ID NO: 1127568
uaaucuccacacagauaug

SEQ ID NO: 1127570 - RNA, 19 nt, Artificial Sequence
  Description of Artificial Sequence: Synthetic oligonucleotide
  Sense strand starting at position 2896 of SEQ ID NO: 916063
cuguguggagauuaucuua

SEQ ID NO: 1127571 - RNA, 19 nt, Artificial Sequence
  Description of Artificial Sequence: Synthetic oligonucleotide
  Antisense strand to SEQ ID NO: 1127570
uaagauaaucuccacacag

SEQ ID NO: 1127572 - RNA, 19 nt, Artificial Sequence
  Description of Artificial Sequence: Synthetic oligonucleotide
  Sense strand starting at position 2903 of SEQ ID NO: 916063
gagauuaucuuagucaaag

SEQ ID NO: 1127573 - RNA, 19 nt, Artificial Sequence
  Description of Artificial Sequence: Synthetic oligonucleotide
  Antisense strand to SEQ ID NO: 1127572
cuuugacuaagauaaucuc

SEQ ID NO: 1127574 - RNA, 19 nt, Artificial Sequence
  Description of Artificial Sequence: Synthetic oligonucleotide
  Sense strand starting at position 2904 of SEQ ID NO: 916063
agauuaucuuagucaaagg

SEQ ID NO: 1127575 - RNA, 19 nt, Artificial Sequence
  Description of Artificial Sequence: Synthetic oligonucleotide
  Antisense strand to SEQ ID NO: 1127574
ccuuugacuaagauaaucu

SEQ ID NO: 1127576 - RNA, 19 nt, Artificial Sequence
  Description of Artificial Sequence: Synthetic oligonucleotide
  Sense strand starting at position 3004 of SEQ ID NO: 916063
ugugcaugaucucuaaaca

SEQ ID NO: 1127577 - RNA, 19 nt, Artificial Sequence
  Description of Artificial Sequence: Synthetic oligonucleotide
  Antisense strand to SEQ ID NO: 1127576
uguuuagagaucaugcaca

SEQ ID NO: 1127578 - RNA, 19 nt, Artificial Sequence
  Description of Artificial Sequence: Synthetic oligonucleotide
  Sense strand starting at position 3005 of SEQ ID NO: 916063
gugcaugaucucuaaacac

SEQ ID NO: 1127579 - RNA, 19 nt, Artificial Sequence
  Description of Artificial Sequence: Synthetic oligonucleotide
  Antisense strand to SEQ ID NO: 1127578
guguuuagagaucaugcac

SEQ ID NO: 1127580 - RNA, 19 nt, Artificial Sequence
  Description of Artificial Sequence: Synthetic oligonucleotide
  Sense strand starting at position 3203 of SEQ ID NO: 916063
ggcagagaccauugacaug

SEQ ID NO: 1127581 - RNA, 19 nt, Artificial Sequence
  Description of Artificial Sequence: Synthetic oligonucleotide
  Antisense strand to SEQ ID NO: 1127580
caugucaauggucucugcc

SEQ ID NO: 1127582 - RNA, 19 nt, Artificial Sequence
  Description of Artificial Sequence: Synthetic oligonucleotide
  Sense strand starting at position 3681 of SEQ ID NO: 916063
acaggaaaguucccugagu

SEQ ID NO: 1127583 - RNA, 19 nt, Artificial Sequence
  Description of Artificial Sequence: Synthetic oligonucleotide
  Antisense strand to SEQ ID NO: 1127582
acucagggaacuuuccugu

SEQ ID NO: 1127584 - RNA, 19 nt, Artificial Sequence
  Description of Artificial Sequence: Synthetic oligonucleotide
  Sense strand starting at position 3682 of SEQ ID NO: 916063
caggaaaguucccugaguc

SEQ ID NO: 1127585 - RNA, 19 nt, Artificial Sequence
  Description of Artificial Sequence: Synthetic oligonucleotide
  Antisense strand to SEQ ID NO: 1127584
gacucagggaacuuuccug

SEQ ID NO: 1127586 - RNA, 19 nt, Artificial Sequence
  Description of Artificial Sequence: Synthetic oligonucleotide
  Sense strand starting at position 3843 of SEQ ID NO: 916063
augaaaugaugcuuagcuu

SEQ ID NO: 1127587 - RNA, 19 nt, Artificial Sequence
  Description of Artificial Sequence: Synthetic oligonucleotide
  Antisense strand to SEQ ID NO: 1127586
aagcuaagcaucauuucau

SEQ ID NO: 1127588 - RNA, 19 nt, Artificial Sequence
  Description of Artificial Sequence: Synthetic oligonucleotide
  Sense strand starting at position 3969 of SEQ ID NO: 916063
ucauuauuaguguaugauc

SEQ ID NO: 1127589 - RNA, 19 nt, Artificial Sequence
  Description of Artificial Sequence: Synthetic oligonucleotide
  Antisense strand to SEQ ID NO: 1127588
gaucauacacuaauaauga

SEQ ID NO: 1127590 - RNA, 19 nt, Artificial Sequence
  Description of Artificial Sequence: Synthetic oligonucleotide
  Sense strand starting at position 127 of SEQ ID NO: 916064
cgucaauuguuauugacaa

SEQ ID NO: 1127591 - RNA, 19 nt, Artificial Sequence
  Description of Artificial Sequence: Synthetic oligonucleotide
  Antisense strand to SEQ ID NO: 1127590
uugucaauaacaauugacg

SEQ ID NO: 1127592 - RNA, 19 nt, Artificial Sequence
  Description of Artificial Sequence: Synthetic oligonucleotide
  Sense strand starting at position 222 of SEQ ID NO: 916064
gguaucacaucauuauguu

SEQ ID NO: 1127593 - RNA, 19 nt, Artificial Sequence
  Description of Artificial Sequence: Synthetic oligonucleotide
  Antisense strand to SEQ ID NO: 1127592
aacauaaugaugugauacc

SEQ ID NO: 1127594 - RNA, 19 nt, Artificial Sequence
  Description of Artificial Sequence: Synthetic oligonucleotide
  Sense strand starting at position 294 of SEQ ID NO: 916064
uuuaucagcgaagguauau

SEQ ID NO: 1127595 - RNA, 19 nt, Artificial Sequence
  Description of Artificial Sequence: Synthetic oligonucleotide
  Antisense strand to SEQ ID NO: 1127594
auauaccuucgcugauaaa

SEQ ID NO: 1127596 - RNA, 19 nt, Artificial Sequence
  Description of Artificial Sequence: Synthetic oligonucleotide
  Sense strand starting at position 336 of SEQ ID NO: 916064
auuauacuucuaugauggu

SEQ ID NO: 1127597 - RNA, 19 nt, Artificial Sequence
  Description of Artificial Sequence: Synthetic oligonucleotide
  Antisense strand to SEQ ID NO: 1127596
accaucauagaaguauaau

SEQ ID NO: 1127598 - RNA, 19 nt, Artificial Sequence
  Description of Artificial Sequence: Synthetic oligonucleotide
  Sense strand starting at position 359 of SEQ ID NO: 916064
cccuaaauguuuguauuac

SEQ ID NO: 1127599 - RNA, 19 nt, Artificial Sequence
  Description of Artificial Sequence: Synthetic oligonucleotide
  Antisense strand to SEQ ID NO: 1127598
guaauacaaacauuuaggg

SEQ ID NO: 1127600 - RNA, 19 nt, Artificial Sequence
  Description of Artificial Sequence: Synthetic oligonucleotide
  Sense strand starting at position 401 of SEQ ID NO: 916064
ucauauauguugccuaaga

SEQ ID NO: 1127601 - RNA, 19 nt, Artificial Sequence
  Description of Artificial Sequence: Synthetic oligonucleotide
  Antisense strand to SEQ ID NO: 1127600
ucuuaggcaacauauauga

SEQ ID NO: 1127602 - RNA, 19 nt, Artificial Sequence
  Description of Artificial Sequence: Synthetic oligonucleotide
  Sense strand starting at position 403 of SEQ ID NO: 916064
auauauguugccuaagaua

SEQ ID NO: 1127603 - RNA, 19 nt, Artificial Sequence
  Description of Artificial Sequence: Synthetic oligonucleotide
  Antisense strand to SEQ ID NO: 1127602
uaucuuaggcaacauauau

SEQ ID NO: 1127604 - RNA, 19 nt, Artificial Sequence
  Description of Artificial Sequence: Synthetic oligonucleotide
  Sense strand starting at position 604 of SEQ ID NO: 916064
aucucuaguccuugacaga

SEQ ID NO: 1127605 - RNA, 19 nt, Artificial Sequence
  Description of Artificial Sequence: Synthetic oligonucleotide
  Antisense strand to SEQ ID NO: 1127604
ucugucaaggacuagagau

SEQ ID NO: 1127606 - RNA, 19 nt, Artificial Sequence
  Description of Artificial Sequence: Synthetic oligonucleotide
  Sense strand starting at position 605 of SEQ ID NO: 916064
ucucuaguccuugacagag

SEQ ID NO: 1127607 - RNA, 19 nt, Artificial Sequence
  Description of Artificial Sequence: Synthetic oligonucleotide
  Antisense strand to SEQ ID NO: 1127606
cucugucaaggacuagaga

SEQ ID NO: 1127608 - RNA, 19 nt, Artificial Sequence
  Description of Artificial Sequence: Synthetic oligonucleotide
  Sense strand starting at position 617 of SEQ ID NO: 916064
gacagaguuccuggcucca

SEQ ID NO: 1127609 - RNA, 19 nt, Artificial Sequence
  Description of Artificial Sequence: Synthetic oligonucleotide
  Antisense strand to SEQ ID NO: 1127608
uggagccaggaacucuguc

SEQ ID NO: 1127610 - RNA, 19 nt, Artificial Sequence
  Description of Artificial Sequence: Synthetic oligonucleotide
  Sense strand starting at position 690 of SEQ ID NO: 916064
aauggacucuucguaaguu

SEQ ID NO: 1127611 - RNA, 19 nt, Artificial Sequence
  Description of Artificial Sequence: Synthetic oligonucleotide
  Antisense strand to SEQ ID NO: 1127610
aacuuacgaagaguccauu

SEQ ID NO: 1127612 - RNA, 19 nt, Artificial Sequence
  Description of Artificial Sequence: Synthetic oligonucleotide
  Sense strand starting at position 829 of SEQ ID NO: 916064
cagcuuacuggguaguuua

SEQ ID NO: 1127613 - RNA, 19 nt, Artificial Sequence
  Description of Artificial Sequence: Synthetic oligonucleotide
  Antisense strand to SEQ ID NO: 1127612
uaaacuacccaguaagcug

SEQ ID NO: 1127614 - RNA, 19 nt, Artificial Sequence
  Description of Artificial Sequence: Synthetic oligonucleotide
  Sense strand starting at position 1042 of SEQ ID NO: 916064
augauauaaucagaaggga

SEQ ID NO: 1127615 - RNA, 19 nt, Artificial Sequence
  Description of Artificial Sequence: Synthetic oligonucleotide
  Antisense strand to SEQ ID NO: 1127614
ucccuucugauuauaucau

SEQ ID NO: 1127616 - RNA, 19 nt, Artificial Sequence
  Description of Artificial Sequence: Synthetic oligonucleotide
  Sense strand starting at position 1161 of SEQ ID NO: 916064
ugugucagucuauaucaga

SEQ ID NO: 1127617 - RNA, 19 nt, Artificial Sequence
  Description of Artificial Sequence: Synthetic oligonucleotide
  Antisense strand to SEQ ID NO: 1127616
ucugauauagacugacaca

SEQ ID NO: 1127618 - RNA, 19 nt, Artificial Sequence
  Description of Artificial Sequence: Synthetic oligonucleotide
  Sense strand starting at position 1381 of SEQ ID NO: 916064
ugaugcuaccaggauacuu

SEQ ID NO: 1127619 - RNA, 19 nt, Artificial Sequence
  Description of Artificial Sequence: Synthetic oligonucleotide
  Antisense strand to SEQ ID NO: 1127618
aaguauccugguagcauca

SEQ ID NO: 1127620 - RNA, 19 nt, Artificial Sequence
  Description of Artificial Sequence: Synthetic oligonucleotide
  Sense strand starting at position 1433 of SEQ ID NO: 916064
uggcauaccugguuuagga

SEQ ID NO: 1127621 - RNA, 19 nt, Artificial Sequence
  Description of Artificial Sequence: Synthetic oligonucleotide
  Antisense strand to SEQ ID NO: 1127620
uccuaaaccagguaugcca

SEQ ID NO: 1127622 - RNA, 19 nt, Artificial Sequence
  Description of Artificial Sequence: Synthetic oligonucleotide
  Sense strand starting at position 1459 of SEQ ID NO: 916064
ccuaguccuguguauauua

SEQ ID NO: 1127623 - RNA, 19 nt, Artificial Sequence
  Description of Artificial Sequence: Synthetic oligonucleotide
  Antisense strand to SEQ ID NO: 1127622
uaauauacacaggacuagg

SEQ ID NO: 1127624 - RNA, 19 nt, Artificial Sequence
  Description of Artificial Sequence: Synthetic oligonucleotide
  Sense strand starting at position 1528 of SEQ ID NO: 916064
ggcugaguggcccaggaaa

SEQ ID NO: 1127625 - RNA, 19 nt, Artificial Sequence
  Description of Artificial Sequence: Synthetic oligonucleotide
  Antisense strand to SEQ ID NO: 1127624
uuuccugggccacucagcc

SEQ ID NO: 1127626 - RNA, 19 nt, Artificial Sequence
  Description of Artificial Sequence: Synthetic oligonucleotide
  Sense strand starting at position 1554 of SEQ ID NO: 916064
cuucucuaagugugggaau

SEQ ID NO: 1127627 - RNA, 19 nt, Artificial Sequence
  Description of Artificial Sequence: Synthetic oligonucleotide
  Antisense strand to SEQ ID NO: 1127626
auucccacacuuagagaag

SEQ ID NO: 1127628 - RNA, 19 nt, Artificial Sequence
  Description of Artificial Sequence: Synthetic oligonucleotide
  Sense strand starting at position 1556 of SEQ ID NO: 916064
ucucuaagugugggaauua

SEQ ID NO: 1127629 - RNA, 19 nt, Artificial Sequence
  Description of Artificial Sequence: Synthetic oligonucleotide
  Antisense strand to SEQ ID NO: 1127628
uaauucccacacuuagaga

SEQ ID NO: 1127630 - RNA, 19 nt, Artificial Sequence
  Description of Artificial Sequence: Synthetic oligonucleotide
  Sense strand starting at position 1612 of SEQ ID NO: 916064
augucacagggcgaguaau

SEQ ID NO: 1127631 - RNA, 19 nt, Artificial Sequence
  Description of Artificial Sequence: Synthetic oligonucleotide
  Antisense strand to SEQ ID NO: 1127630
auuacucgcccugugacau

SEQ ID NO: 1127632 - RNA, 19 nt, Artificial Sequence
  Description of Artificial Sequence: Synthetic oligonucleotide
  Sense strand starting at position 1618 of SEQ ID NO: 916064
cagggcgaguaauuggaaa

SEQ ID NO: 1127633 - RNA, 19 nt, Artificial Sequence
  Description of Artificial Sequence: Synthetic oligonucleotide
  Antisense strand to SEQ ID NO: 1127632
uuuccaauuacucgcccug

SEQ ID NO: 1127634 - RNA, 19 nt, Artificial Sequence
  Description of Artificial Sequence: Synthetic oligonucleotide
  Sense strand starting at position 1620 of SEQ ID NO: 916064
gggcgaguaauuggaaaua

SEQ ID NO: 1127635 - RNA, 19 nt, Artificial Sequence
  Description of Artificial Sequence: Synthetic oligonucleotide
  Antisense strand to SEQ ID NO: 1127634
uauuuccaauuacucgccc

SEQ ID NO: 1127636 - RNA, 19 nt, Artificial Sequence
  Description of Artificial Sequence: Synthetic oligonucleotide
  Sense strand starting at position 1664 of SEQ ID NO: 916064
cuccauuucuaggagggau

SEQ ID NO: 1127637 - RNA, 19 nt, Artificial Sequence
  Description of Artificial Sequence: Synthetic oligonucleotide
  Antisense strand to SEQ ID NO: 1127636
aucccuccuagaaauggag

SEQ ID NO: 1127638 - RNA, 19 nt, Artificial Sequence
  Description of Artificial Sequence: Synthetic oligonucleotide
  Sense strand starting at position 1772 of SEQ ID NO: 916064
guggcagagccuugagaau

SEQ ID NO: 1127639 - RNA, 19 nt, Artificial Sequence
  Description of Artificial Sequence: Synthetic oligonucleotide
  Antisense strand to SEQ ID NO: 1127638
auucucaaggcucugccac

SEQ ID NO: 1127640 - RNA, 19 nt, Artificial Sequence
  Description of Artificial Sequence: Synthetic oligonucleotide
  Sense strand starting at position 1861 of SEQ ID NO: 916064
gauuccuacagcggugaga

SEQ ID NO: 1127641 - RNA, 19 nt, Artificial Sequence
  Description of Artificial Sequence: Synthetic oligonucleotide
  Antisense strand to SEQ ID NO: 1127640
ucucaccgcuguaggaauc

SEQ ID NO: 1127642 - RNA, 19 nt, Artificial Sequence
  Description of Artificial Sequence: Synthetic oligonucleotide
  Sense strand starting at position 1879 of SEQ ID NO: 916064
agugaaauguggucggauu

SEQ ID NO: 1127643 - RNA, 19 nt, Artificial Sequence
  Description of Artificial Sequence: Synthetic oligonucleotide
  Antisense strand to SEQ ID NO: 1127642
aauccgaccacauuucacu

SEQ ID NO: 1127644 - RNA, 19 nt, Artificial Sequence
  Description of Artificial Sequence: Synthetic oligonucleotide
  Sense strand starting at position 1985 of SEQ ID NO: 916064
gaaagucucugacugcaau

SEQ ID NO: 1127645 - RNA, 19 nt, Artificial Sequence
  Description of Artificial Sequence: Synthetic oligonucleotide
  Antisense strand to SEQ ID NO: 1127644
auugcagucagagacuuuc

SEQ ID NO: 1127646 - RNA, 19 nt, Artificial Sequence
  Description of Artificial Sequence: Synthetic oligonucleotide
  Sense strand starting at position 1996 of SEQ ID NO: 916064
acugcaauuccugacugga

SEQ ID NO: 1127647 - RNA, 19 nt, Artificial Sequence
  Description of Artificial Sequence: Synthetic oligonucleotide
  Antisense strand to SEQ ID NO: 1127646
uccagucaggaauugcagu

SEQ ID NO: 1127648 - RNA, 19 nt, Artificial Sequence
  Description of Artificial Sequence: Synthetic oligonucleotide
  Sense strand starting at position 1998 of SEQ ID NO: 916064
ugcaauuccugacuggaca

SEQ ID NO: 1127649 - RNA, 19 nt, Artificial Sequence
  Description of Artificial Sequence: Synthetic oligonucleotide
  Antisense strand to SEQ ID NO: 1127648
uguccagucaggaauugca

SEQ ID NO: 1127650 - RNA, 19 nt, Artificial Sequence
  Description of Artificial Sequence: Synthetic oligonucleotide
  Sense strand starting at position 2040 of SEQ ID NO: 916064
uuguacucugaaugccaaa

SEQ ID NO: 1127651 - RNA, 19 nt, Artificial Sequence
  Description of Artificial Sequence: Synthetic oligonucleotide
  Antisense strand to SEQ ID NO: 1127650
uuuggcauucagaguacaa

SEQ ID NO: 1127652 - RNA, 19 nt, Artificial Sequence
  Description of Artificial Sequence: Synthetic oligonucleotide
  Sense strand starting at position 2300 of SEQ ID NO: 916064
gggagucacuuaguuuaac

SEQ ID NO: 1127653 - RNA, 19 nt, Artificial Sequence
  Description of Artificial Sequence: Synthetic oligonucleotide
  Antisense strand to SEQ ID NO: 1127652
guuaaacuaagugacuccc

SEQ ID NO: 1127654 - RNA, 19 nt, Artificial Sequence
  Description of Artificial Sequence: Synthetic oligonucleotide
  Sense strand starting at position 2440 of SEQ ID NO: 916064
gguacauuaugaucacgag

SEQ ID NO: 1127655 - RNA, 19 nt, Artificial Sequence
  Description of Artificial Sequence: Synthetic oligonucleotide
  Antisense strand to SEQ ID NO: 1127654
cucgugaucauaauguacc

SEQ ID NO: 1127656 - RNA, 19 nt, Artificial Sequence
  Description of Artificial Sequence: Synthetic oligonucleotide
  Sense strand starting at position 2446 of SEQ ID NO: 916064
uuaugaucacgaggaauua

SEQ ID NO: 1127657 - RNA, 19 nt, Artificial Sequence
  Description of Artificial Sequence: Synthetic oligonucleotide
  Antisense strand to SEQ ID NO: 1127656
uaauuccucgugaucauaa

SEQ ID NO: 1127658 - RNA, 19 nt, Artificial Sequence
  Description of Artificial Sequence: Synthetic oligonucleotide
  Sense strand starting at position 3006 of SEQ ID NO: 916064
gugccuuugggaggacaau

SEQ ID NO: 1127659 - RNA, 19 nt, Artificial Sequence
  Description of Artificial Sequence: Synthetic oligonucleotide
  Antisense strand to SEQ ID NO: 1127658
auuguccucccaaaggcac

SEQ ID NO: 1127660 - RNA, 19 nt, Artificial Sequence
  Description of Artificial Sequence: Synthetic oligonucleotide
  Sense strand starting at position 3007 of SEQ ID NO: 916064
ugccuuugggaggacaauu

SEQ ID NO: 1127661 - RNA, 19 nt, Artificial Sequence
  Description of Artificial Sequence: Synthetic oligonucleotide
  Antisense strand to SEQ ID NO: 1127660
aauuguccucccaaaggca

SEQ ID NO: 1127662 - RNA, 19 nt, Artificial Sequence
  Description of Artificial Sequence: Synthetic oligonucleotide
  Sense strand starting at position 3176 of SEQ ID NO: 916064
gcuaaauauaaaggagugu

SEQ ID NO: 1127663 - RNA, 19 nt, Artificial Sequence
  Description of Artificial Sequence: Synthetic oligonucleotide
  Antisense strand to SEQ ID NO: 1127662
acacuccuuuauauuuagc

SEQ ID NO: 1127664 - RNA, 19 nt, Artificial Sequence
  Description of Artificial Sequence: Synthetic oligonucleotide
  Sense strand starting at position 3266 of SEQ ID NO: 916064
guguuucaagcuguuuguu

SEQ ID NO: 1127665 - RNA, 19 nt, Artificial Sequence
  Description of Artificial Sequence: Synthetic oligonucleotide
  Antisense strand to SEQ ID NO: 1127664
aacaaacagcuugaaacac

SEQ ID NO: 1127666 - RNA, 19 nt, Artificial Sequence
  Description of Artificial Sequence: Synthetic oligonucleotide
  Sense strand starting at position 3352 of SEQ ID NO: 916064
caguguuagcaugacucua

SEQ ID NO: 1127667 - RNA, 19 nt, Artificial Sequence
  Description of Artificial Sequence: Synthetic oligonucleotide
  Antisense strand to SEQ ID NO: 1127666
uagagucaugcuaacacug

SEQ ID NO: 1127668 - RNA, 19 nt, Artificial Sequence
  Description of Artificial Sequence: Synthetic oligonucleotide
  Sense strand starting at position 3820 of SEQ ID NO: 916064
caccaugagcuaggugaaa

SEQ ID NO: 1127669 - RNA, 19 nt, Artificial Sequence
  Description of Artificial Sequence: Synthetic oligonucleotide
  Antisense strand to SEQ ID NO: 1127668
uuucaccuagcucauggug

SEQ ID NO: 1127670 - RNA, 19 nt, Artificial Sequence
  Description of Artificial Sequence: Synthetic oligonucleotide
  Sense strand starting at position 35 of SEQ ID NO: 916065
aaaggucugucauugaauu

SEQ ID NO: 1127671 - RNA, 19 nt, Artificial Sequence
  Description of Artificial Sequence: Synthetic oligonucleotide
  Antisense strand to SEQ ID NO: 1127670
aauucaaugacagaccuuu

SEQ ID NO: 1127672 - RNA, 19 nt, Artificial Sequence
  Description of Artificial Sequence: Synthetic oligonucleotide
  Sense strand starting at position 168 of SEQ ID NO: 916065
acgccugaggguuaauaag

SEQ ID NO: 1127673 - RNA, 19 nt, Artificial Sequence
  Description of Artificial Sequence: Synthetic oligonucleotide
  Antisense strand to SEQ ID NO: 1127672
cuuauuaacccucaggcgu

SEQ ID NO: 1127674 - RNA, 19 nt, Artificial Sequence
  Description of Artificial Sequence: Synthetic oligonucleotide
  Sense strand starting at position 174 of SEQ ID NO: 916065
gaggguuaauaagugaacu

SEQ ID NO: 1127675 - RNA, 19 nt, Artificial Sequence
  Description of Artificial Sequence: Synthetic oligonucleotide
  Antisense strand to SEQ ID NO: 1127674
aguucacuuauuaacccuc

SEQ ID NO: 1127676 - RNA, 19 nt, Artificial Sequence
  Description of Artificial Sequence: Synthetic oligonucleotide
  Sense strand starting at position 176 of SEQ ID NO: 916065
ggguuaauaagugaacugu

SEQ ID NO: 1127677 - RNA, 19 nt, Artificial Sequence
  Description of Artificial Sequence: Synthetic oligonucleotide
  Antisense strand to SEQ ID NO: 1127676
acaguucacuuauuaaccc

SEQ ID NO: 1127678 - RNA, 19 nt, Artificial Sequence
  Description of Artificial Sequence: Synthetic oligonucleotide
  Sense strand starting at position 184 of SEQ ID NO: 916065
aagugaacuguuugaagga

SEQ ID NO: 1127679 - RNA, 19 nt, Artificial Sequence
  Description of Artificial Sequence: Synthetic oligonucleotide
  Antisense strand to SEQ ID NO: 1127678
uccuucaaacaguucacuu

SEQ ID NO: 1127680 - RNA, 19 nt, Artificial Sequence
  Description of Artificial Sequence: Synthetic oligonucleotide
  Sense strand starting at position 280 of SEQ ID NO: 916065
agcugaguuauagagguga

SEQ ID NO: 1127681 - RNA, 19 nt, Artificial Sequence
  Description of Artificial Sequence: Synthetic oligonucleotide
  Antisense strand to SEQ ID NO: 1127680
ucaccucuauaacucagcu

SEQ ID NO: 1127682 - RNA, 19 nt, Artificial Sequence
  Description of Artificial Sequence: Synthetic oligonucleotide
  Sense strand starting at position 282 of SEQ ID NO: 916065
cugaguuauagaggugaau

SEQ ID NO: 1127683 - RNA, 19 nt, Artificial Sequence
  Description of Artificial Sequence: Synthetic oligonucleotide
  Antisense strand to SEQ ID NO: 1127682
auucaccucuauaacucag

SEQ ID NO: 1127684 - RNA, 19 nt, Artificial Sequence
  Description of Artificial Sequence: Synthetic oligonucleotide
  Sense strand starting at position 284 of SEQ ID NO: 916065
gaguuauagaggugaauga

SEQ ID NO: 1127685 - RNA, 19 nt, Artificial Sequence
  Description of Artificial Sequence: Synthetic oligonucleotide
  Antisense strand to SEQ ID NO: 1127684
ucauucaccucuauaacuc

SEQ ID NO: 1127686 - RNA, 19 nt, Artificial Sequence
  Description of Artificial Sequence: Synthetic oligonucleotide
  Sense strand starting at position 291 of SEQ ID NO: 916065
agaggugaaugaccucuua

SEQ ID NO: 1127687 - RNA, 19 nt, Artificial Sequence
  Description of Artificial Sequence: Synthetic oligonucleotide
  Antisense strand to SEQ ID NO: 1127686
uaagaggucauucaccucu

SEQ ID NO: 1127688 - RNA, 19 nt, Artificial Sequence
  Description of Artificial Sequence: Synthetic oligonucleotide
  Sense strand starting at position 360 of SEQ ID NO: 916065
acugauuucuuguuaugcu

SEQ ID NO: 1127689 - RNA, 19 nt, Artificial Sequence
  Description of Artificial Sequence: Synthetic oligonucleotide
  Antisense strand to SEQ ID NO: 1127688
agcauaacaagaaaucagu

SEQ ID NO: 1127690 - RNA, 19 nt, Artificial Sequence
  Description of Artificial Sequence: Synthetic oligonucleotide
  Sense strand starting at position 505 of SEQ ID NO: 916065
auuggagggccaugagaau

SEQ ID NO: 1127691 - RNA, 19 nt, Artificial Sequence
  Description of Artificial Sequence: Synthetic oligonucleotide
  Antisense strand to SEQ ID NO: 1127690
auucucauggcccuccaau

SEQ ID NO: 1127692 - RNA, 19 nt, Artificial Sequence
  Description of Artificial Sequence: Synthetic oligonucleotide
  Sense strand starting at position 663 of SEQ ID NO: 916065
gguucuuaggaaugcaaga

SEQ ID NO: 1127693 - RNA, 19 nt, Artificial Sequence
  Description of Artificial Sequence: Synthetic oligonucleotide
  Antisense strand to SEQ ID NO: 1127692
ucuugcauuccuaagaacc

SEQ ID NO: 1127694 - RNA, 19 nt, Artificial Sequence
  Description of Artificial Sequence: Synthetic oligonucleotide
  Sense strand starting at position 849 of SEQ ID NO: 916065
ggcaacuaucuguaggaca

SEQ ID NO: 1127695 - RNA, 19 nt, Artificial Sequence
  Description of Artificial Sequence: Synthetic oligonucleotide
  Antisense strand to SEQ ID NO: 1127694
uguccuacagauaguugcc

SEQ ID NO: 1127696 - RNA, 19 nt, Artificial Sequence
  Description of Artificial Sequence: Synthetic oligonucleotide
  Sense strand starting at position 860 of SEQ ID NO: 916065
guaggacaacuguagaagu

SEQ ID NO: 1127697 - RNA, 19 nt, Artificial Sequence
  Description of Artificial Sequence: Synthetic oligonucleotide
  Antisense strand to SEQ ID NO: 1127696
acuucuacaguuguccuac

SEQ ID NO: 1127698 - RNA, 19 nt, Artificial Sequence
  Description of Artificial Sequence: Synthetic oligonucleotide
  Sense strand starting at position 902 of SEQ ID NO: 916065
uugagaagcuuagugggau

SEQ ID NO: 1127699 - RNA, 19 nt, Artificial Sequence
  Description of Artificial Sequence: Synthetic oligonucleotide
  Antisense strand to SEQ ID NO: 1127698
aucccacuaagcuucucaa

SEQ ID NO: 1127700 - RNA, 19 nt, Artificial Sequence
  Description of Artificial Sequence: Synthetic oligonucleotide
  Sense strand starting at position 916 of SEQ ID NO: 916065
gggauaugccaugacccuu

SEQ ID NO: 1127701 - RNA, 19 nt, Artificial Sequence
  Description of Artificial Sequence: Synthetic oligonucleotide
  Antisense strand to SEQ ID NO: 1127700
aagggucauggcauauccc

SEQ ID NO: 1127702 - RNA, 19 nt, Artificial Sequence
  Description of Artificial Sequence: Synthetic oligonucleotide
  Sense strand starting at position 1505 of SEQ ID NO: 916065
guauuaaacgcucagaauc

SEQ ID NO: 1127703 - RNA, 19 nt, Artificial Sequence
  Description of Artificial Sequence: Synthetic oligonucleotide
  Antisense strand to SEQ ID NO: 1127702
gauucugagcguuuaauac

SEQ ID NO: 1127704 - RNA, 19 nt, Artificial Sequence
  Description of Artificial Sequence: Synthetic oligonucleotide
  Sense strand starting at position 1552 of SEQ ID NO: 916065
ggauguuuguaaucuaaau

SEQ ID NO: 1127705 - RNA, 19 nt, Artificial Sequence
  Description of Artificial Sequence: Synthetic oligonucleotide
  Antisense strand to SEQ ID NO: 1127704
auuuagauuacaaacaucc

SEQ ID NO: 1127706 - RNA, 19 nt, Artificial Sequence
  Description of Artificial Sequence: Synthetic oligonucleotide
  Sense strand starting at position 1565 of SEQ ID NO: 916065
cuaaauaggucuguaugag

SEQ ID NO: 1127707 - RNA, 19 nt, Artificial Sequence
  Description of Artificial Sequence: Synthetic oligonucleotide
  Antisense strand to SEQ ID NO: 1127706
cucauacagaccuauuuag

SEQ ID NO: 1127708 - RNA, 19 nt, Artificial Sequence
  Description of Artificial Sequence: Synthetic oligonucleotide
  Sense strand starting at position 1574 of SEQ ID NO: 916065
ucuguaugagcuuaugaaa

SEQ ID NO: 1127709 - RNA, 19 nt, Artificial Sequence
  Description of Artificial Sequence: Synthetic oligonucleotide
  Antisense strand to SEQ ID NO: 1127708
uuucauaagcucauacaga

SEQ ID NO: 1127710 - RNA, 19 nt, Artificial Sequence
  Description of Artificial Sequence: Synthetic oligonucleotide
  Sense strand starting at position 1598 of SEQ ID NO: 916065
acucaaaugcuuuagagca

SEQ ID NO: 1127711 - RNA, 19 nt, Artificial Sequence
  Description of Artificial Sequence: Synthetic oligonucleotide
  Antisense strand to SEQ ID NO: 1127710
ugcucuaaagcauuugagu

SEQ ID NO: 1127712 - RNA, 19 nt, Artificial Sequence
  Description of Artificial Sequence: Synthetic oligonucleotide
  Sense strand starting at position 1606 of SEQ ID NO: 916065
gcuuuagagcauuaacauc

SEQ ID NO: 1127713 - RNA, 19 nt, Artificial Sequence
  Description of Artificial Sequence: Synthetic oligonucleotide
  Antisense strand to SEQ ID NO: 1127712
gauguuaaugcucuaaagc

SEQ ID NO: 1127714 - RNA, 19 nt, Artificial Sequence
  Description of Artificial Sequence: Synthetic oligonucleotide
  Sense strand starting at position 1727 of SEQ ID NO: 916065
gcauucuuaccggagauga

SEQ ID NO: 1127715 - RNA, 19 nt, Artificial Sequence
  Description of Artificial Sequence: Synthetic oligonucleotide
  Antisense strand to SEQ ID NO: 1127714
ucaucuccgguaagaaugc

SEQ ID NO: 1127716 - RNA, 19 nt, Artificial Sequence
  Description of Artificial Sequence: Synthetic oligonucleotide
  Sense strand starting at position 1909 of SEQ ID NO: 916065
aggguagaaccaugugaga

SEQ ID NO: 1127717 - RNA, 19 nt, Artificial Sequence
  Description of Artificial Sequence: Synthetic oligonucleotide
  Antisense strand to SEQ ID NO: 1127716
ucucacaugguucuacccu

SEQ ID NO: 1127718 - RNA, 19 nt, Artificial Sequence
  Description of Artificial Sequence: Synthetic oligonucleotide
  Sense strand starting at position 1911 of SEQ ID NO: 916065
gguagaaccaugugagaug

SEQ ID NO: 1127719 - RNA, 19 nt, Artificial Sequence
  Description of Artificial Sequence: Synthetic oligonucleotide
  Antisense strand to SEQ ID NO: 1127718
caucucacaugguucuacc

SEQ ID NO: 1127720 - RNA, 19 nt, Artificial Sequence
  Description of Artificial Sequence: Synthetic oligonucleotide
  Sense strand starting at position 2211 of SEQ ID NO: 916065
gauauagcucaccagcaga

SEQ ID NO: 1127721 - RNA, 19 nt, Artificial Sequence
  Description of Artificial Sequence: Synthetic oligonucleotide
  Antisense strand to SEQ ID NO: 1127720
ucugcuggugagcuauauc

SEQ ID NO: 1127722 - RNA, 19 nt, Artificial Sequence
  Description of Artificial Sequence: Synthetic oligonucleotide
  Sense strand starting at position 2258 of SEQ ID NO: 916065
aguguaauauaauuggauc

SEQ ID NO: 1127723 - RNA, 19 nt, Artificial Sequence
  Description of Artificial Sequence: Synthetic oligonucleotide
  Antisense strand to SEQ ID NO: 1127722
gauccaauuauauuacacu

SEQ ID NO: 1127724 - RNA, 19 nt, Artificial Sequence
  Description of Artificial Sequence: Synthetic oligonucleotide
  Sense strand starting at position 2309 of SEQ ID NO: 916065
uguguuggaagagaucauu

SEQ ID NO: 1127725 - RNA, 19 nt, Artificial Sequence
  Description of Artificial Sequence: Synthetic oligonucleotide
  Antisense strand to SEQ ID NO: 1127724
aaugaucucuuccaacaca

SEQ ID NO: 1127726 - RNA, 19 nt, Artificial Sequence
  Description of Artificial Sequence: Synthetic oligonucleotide
  Sense strand starting at position 2511 of SEQ ID NO: 916065
uaaagugaguuuccuggaa

SEQ ID NO: 1127727 - RNA, 19 nt, Artificial Sequence
  Description of Artificial Sequence: Synthetic oligonucleotide
  Antisense strand to SEQ ID NO: 1127726
uuccaggaaacucacuuua

SEQ ID NO: 1127728 - RNA, 19 nt, Artificial Sequence
  Description of Artificial Sequence: Synthetic oligonucleotide
  Sense strand starting at position 2515 of SEQ ID NO: 916065
gugaguuuccuggaaugga

SEQ ID NO: 1127729 - RNA, 19 nt, Artificial Sequence
  Description of Artificial Sequence: Synthetic oligonucleotide
  Antisense strand to SEQ ID NO: 1127728
uccauuccaggaaacucac

SEQ ID NO: 1127730 - RNA, 19 nt, Artificial Sequence
  Description of Artificial Sequence: Synthetic oligonucleotide
  Sense strand starting at position 2574 of SEQ ID NO: 916065
cugugcuuagaugaauauu

SEQ ID NO: 1127731 - RNA, 19 nt, Artificial Sequence
  Description of Artificial Sequence: Synthetic oligonucleotide
  Antisense strand to SEQ ID NO: 1127730
aauauucaucuaagcacag

SEQ ID NO: 1127732 - RNA, 19 nt, Artificial Sequence
  Description of Artificial Sequence: Synthetic oligonucleotide
  Sense strand starting at position 2633 of SEQ ID NO: 916065
auauguauugcacacacuu

SEQ ID NO: 1127733 - RNA, 19 nt, Artificial Sequence
  Description of Artificial Sequence: Synthetic oligonucleotide
  Antisense strand to SEQ ID NO: 1127732
aagugugugcaauacauau

SEQ ID NO: 1127734 - RNA, 19 nt, Artificial Sequence
  Description of Artificial Sequence: Synthetic oligonucleotide
  Sense strand starting at position 2690 of SEQ ID NO: 916065
acugaaaguaguuguaaga

SEQ ID NO: 1127735 - RNA, 19 nt, Artificial Sequence
  Description of Artificial Sequence: Synthetic oligonucleotide
  Antisense strand to SEQ ID NO: 1127734
ucuuacaacuacuuucagu

SEQ ID NO: 1127736 - RNA, 19 nt, Artificial Sequence
  Description of Artificial Sequence: Synthetic oligonucleotide
  Sense strand starting at position 2819 of SEQ ID NO: 916065
guuaaaucaccaugacuag

SEQ ID NO: 1127737 - RNA, 19 nt, Artificial Sequence
  Description of Artificial Sequence: Synthetic oligonucleotide
  Antisense strand to SEQ ID NO: 1127736
cuagucauggugauuuaac

SEQ ID NO: 1127738 - RNA, 19 nt, Artificial Sequence
  Description of Artificial Sequence: Synthetic oligonucleotide
  Sense strand starting at position 2917 of SEQ ID NO: 916065
ucaauauagugauuaugug

SEQ ID NO: 1127739 - RNA, 19 nt, Artificial Sequence
  Description of Artificial Sequence: Synthetic oligonucleotide
  Antisense strand to SEQ ID NO: 1127738
cacauaaucacuauauuga

SEQ ID NO: 1127740 - RNA, 19 nt, Artificial Sequence
  Description of Artificial Sequence: Synthetic oligonucleotide
  Sense strand starting at position 2975 of SEQ ID NO: 916065
uggcauagcccguagauuu

SEQ ID NO: 1127741 - RNA, 19 nt, Artificial Sequence
  Description of Artificial Sequence: Synthetic oligonucleotide
  Antisense strand to SEQ ID NO: 1127740
aaaucuacgggcuaugcca

SEQ ID NO: 1127742 - RNA, 19 nt, Artificial Sequence
  Description of Artificial Sequence: Synthetic oligonucleotide
  Sense strand starting at position 3282 of SEQ ID NO: 916065
uuuguugcuguguuucuua

SEQ ID NO: 1127743 - RNA, 19 nt, Artificial Sequence
  Description of Artificial Sequence: Synthetic oligonucleotide
  Antisense strand to SEQ ID NO: 1127742
uaagaaacacagcaacaaa

SEQ ID NO: 1127744 - RNA, 19 nt, Artificial Sequence
  Description of Artificial Sequence: Synthetic oligonucleotide
  Sense strand starting at position 3329 of SEQ ID NO: 916065
aucauaagcuggguaaauu

SEQ ID NO: 1127745 - RNA, 19 nt, Artificial Sequence
  Description of Artificial Sequence: Synthetic oligonucleotide
  Antisense strand to SEQ ID NO: 1127744
aauuuacccagcuuaugau

SEQ ID NO: 1127746 - RNA, 19 nt, Artificial Sequence
  Description of Artificial Sequence: Synthetic oligonucleotide
  Sense strand starting at position 3968 of SEQ ID NO: 916065
aggaaugugccaggauuag

SEQ ID NO: 1127747 - RNA, 19 nt, Artificial Sequence
  Description of Artificial Sequence: Synthetic oligonucleotide
  Antisense strand to SEQ ID NO: 1127746
cuaauccuggcacauuccu

SEQ ID NO: 1127748 - RNA, 19 nt, Artificial Sequence
  Description of Artificial Sequence: Synthetic oligonucleotide
  Sense strand starting at position 3980 of SEQ ID NO: 916065
ggauuaguucuugauccuu

SEQ ID NO: 1127749 - RNA, 19 nt, Artificial Sequence
  Description of Artificial Sequence: Synthetic oligonucleotide
  Antisense strand to SEQ ID NO: 1127748
aaggaucaagaacuaaucc

SEQ ID NO: 1127750 - RNA, 19 nt, Artificial Sequence
  Description of Artificial Sequence: Synthetic oligonucleotide
  Sense strand starting at position 218 of SEQ ID NO: 916066
ucuauugugccagaugcau

SEQ ID NO: 1127751 - RNA, 19 nt, Artificial Sequence
  Description of Artificial Sequence: Synthetic oligonucleotide
  Antisense strand to SEQ ID NO: 1127750
augcaucuggcacaauaga

SEQ ID NO: 1127752 - RNA, 19 nt, Artificial Sequence
  Description of Artificial Sequence: Synthetic oligonucleotide
  Sense strand starting at position 280 of SEQ ID NO: 916066
guuugagguauuuggcuuu

SEQ ID NO: 1127753 - RNA, 19 nt, Artificial Sequence
  Description of Artificial Sequence: Synthetic oligonucleotide
  Antisense strand to SEQ ID NO: 1127752
aaagccaaauaccucaaac

SEQ ID NO: 1127754 - RNA, 19 nt, Artificial Sequence
  Description of Artificial Sequence: Synthetic oligonucleotide
  Sense strand starting at position 376 of SEQ ID NO: 916066
agauucuuguuaucuagaa

SEQ ID NO: 1127755 - RNA, 19 nt, Artificial Sequence
  Description of Artificial Sequence: Synthetic oligonucleotide
  Antisense strand to SEQ ID NO: 1127754
uucuagauaacaagaaucu

SEQ ID NO: 1127756 - RNA, 19 nt, Artificial Sequence
  Description of Artificial Sequence: Synthetic oligonucleotide
  Sense strand starting at position 377 of SEQ ID NO: 916066
gauucuuguuaucuagaag

SEQ ID NO: 1127757 - RNA, 19 nt, Artificial Sequence
  Description of Artificial Sequence: Synthetic oligonucleotide
  Antisense strand to SEQ ID NO: 1127756
cuucuagauaacaagaauc

SEQ ID NO: 1127758 - RNA, 19 nt, Artificial Sequence
  Description of Artificial Sequence: Synthetic oligonucleotide
  Sense strand starting at position 380 of SEQ ID NO: 916066
ucuuguuaucuagaaggug

SEQ ID NO: 1127759 - RNA, 19 nt, Artificial Sequence
  Description of Artificial Sequence: Synthetic oligonucleotide
  Antisense strand to SEQ ID NO: 1127758
caccuucuagauaacaaga

SEQ ID NO: 1127760 - RNA, 19 nt, Artificial Sequence
  Description of Artificial Sequence: Synthetic oligonucleotide
  Sense strand starting at position 533 of SEQ ID NO: 916066
uccucaaaguguucuuuau

SEQ ID NO: 1127761 - RNA, 19 nt, Artificial Sequence
  Description of Artificial Sequence: Synthetic oligonucleotide
  Antisense strand to SEQ ID NO: 1127760
auaaagaacacuuugagga

SEQ ID NO: 1127762 - RNA, 19 nt, Artificial Sequence
  Description of Artificial Sequence: Synthetic oligonucleotide
  Sense strand starting at position 673 of SEQ ID NO: 916066
cagacuagauguucuaaug

SEQ ID NO: 1127763 - RNA, 19 nt, Artificial Sequence
  Description of Artificial Sequence: Synthetic oligonucleotide
  Antisense strand to SEQ ID NO: 1127762
cauuagaacaucuagucug

SEQ ID NO: 1127764 - RNA, 19 nt, Artificial Sequence
  Description of Artificial Sequence: Synthetic oligonucleotide
  Sense strand starting at position 758 of SEQ ID NO: 916066
cucguuaugcaaugagaua

SEQ ID NO: 1127765 - RNA, 19 nt, Artificial Sequence
  Description of Artificial Sequence: Synthetic oligonucleotide
  Antisense strand to SEQ ID NO: 1127764
uaucucauugcauaacgag

SEQ ID NO: 1127766 - RNA, 19 nt, Artificial Sequence
  Description of Artificial Sequence: Synthetic oligonucleotide
  Sense strand starting at position 759 of SEQ ID NO: 916066
ucguuaugcaaugagauaa

SEQ ID NO: 1127767 - RNA, 19 nt, Artificial Sequence
  Description of Artificial Sequence: Synthetic oligonucleotide
  Antisense strand to SEQ ID NO: 1127766
uuaucucauugcauaacga

SEQ ID NO: 1127768 - RNA, 19 nt, Artificial Sequence
  Description of Artificial Sequence: Synthetic oligonucleotide
  Sense strand starting at position 943 of SEQ ID NO: 916066
agaucaagaguucguaacu

SEQ ID NO: 1127769 - RNA, 19 nt, Artificial Sequence
  Description of Artificial Sequence: Synthetic oligonucleotide
  Antisense strand to SEQ ID NO: 1127768
aguuacgaacucuugaucu

SEQ ID NO: 1127770 - RNA, 19 nt, Artificial Sequence
  Description of Artificial Sequence: Synthetic oligonucleotide
  Sense strand starting at position 944 of SEQ ID NO: 916066
gaucaagaguucguaacua

SEQ ID NO: 1127771 - RNA, 19 nt, Artificial Sequence
  Description of Artificial Sequence: Synthetic oligonucleotide
  Antisense strand to SEQ ID NO: 1127770
uaguuacgaacucuugauc

SEQ ID NO: 1127772 - RNA, 19 nt, Artificial Sequence
  Description of Artificial Sequence: Synthetic oligonucleotide
  Sense strand starting at position 948 of SEQ ID NO: 916066
aagaguucguaacuaugac

SEQ ID NO: 1127773 - RNA, 19 nt, Artificial Sequence
  Description of Artificial Sequence: Synthetic oligonucleotide
  Antisense strand to SEQ ID NO: 1127772
gucauaguuacgaacucuu

SEQ ID NO: 1127774 - RNA, 19 nt, Artificial Sequence
  Description of Artificial Sequence: Synthetic oligonucleotide
  Sense strand starting at position 955 of SEQ ID NO: 916066
cguaacuaugaccaauagu

SEQ ID NO: 1127775 - RNA, 19 nt, Artificial Sequence
  Description of Artificial Sequence: Synthetic oligonucleotide
  Antisense strand to SEQ ID NO: 1127774
acuauuggucauaguuacg

SEQ ID NO: 1127776 - RNA, 19 nt, Artificial Sequence
  Description of Artificial Sequence: Synthetic oligonucleotide
  Sense strand starting at position 1102 of SEQ ID NO: 916066
cuagaaaugcuguagcuag

SEQ ID NO: 1127777 - RNA, 19 nt, Artificial Sequence
  Description of Artificial Sequence: Synthetic oligonucleotide
  Antisense strand to SEQ ID NO: 1127776
cuagcuacagcauuucuag

SEQ ID NO: 1127778 - RNA, 19 nt, Artificial Sequence
  Description of Artificial Sequence: Synthetic oligonucleotide
  Sense strand starting at position 1117 of SEQ ID NO: 916066
cuagaaaucguaugguaga

SEQ ID NO: 1127779 - RNA, 19 nt, Artificial Sequence
  Description of Artificial Sequence: Synthetic oligonucleotide
  Antisense strand to SEQ ID NO: 1127778
ucuaccauacgauuucuag

SEQ ID NO: 1127780 - RNA, 19 nt, Artificial Sequence
  Description of Artificial Sequence: Synthetic oligonucleotide
  Sense strand starting at position 1181 of SEQ ID NO: 916066
gaguaucaggcuuacuuau

SEQ ID NO: 1127781 - RNA, 19 nt, Artificial Sequence
  Description of Artificial Sequence: Synthetic oligonucleotide
  Antisense strand to SEQ ID NO: 1127780
auaaguaagccugauacuc

SEQ ID NO: 1127782 - RNA, 19 nt, Artificial Sequence
  Description of Artificial Sequence: Synthetic oligonucleotide
  Sense strand starting at position 1183 of SEQ ID NO: 916066
guaucaggcuuacuuauua

SEQ ID NO: 1127783 - RNA, 19 nt, Artificial Sequence
  Description of Artificial Sequence: Synthetic oligonucleotide
  Antisense strand to SEQ ID NO: 1127782
uaauaaguaagccugauac

SEQ ID NO: 1127784 - RNA, 19 nt, Artificial Sequence
  Description of Artificial Sequence: Synthetic oligonucleotide
  Sense strand starting at position 1214 of SEQ ID NO: 916066
ucccaauugcccugggaau

SEQ ID NO: 1127785 - RNA, 19 nt, Artificial Sequence
  Description of Artificial Sequence: Synthetic oligonucleotide
  Antisense strand to SEQ ID NO: 1127784
auucccagggcaauuggga

SEQ ID NO: 1127786 - RNA, 19 nt, Artificial Sequence
  Description of Artificial Sequence: Synthetic oligonucleotide
  Sense strand starting at position 1215 of SEQ ID NO: 916066
cccaauugcccugggaauu

SEQ ID NO: 1127787 - RNA, 19 nt, Artificial Sequence
  Description of Artificial Sequence: Synthetic oligonucleotide
  Antisense strand to SEQ ID NO: 1127786
aauucccagggcaauuggg

SEQ ID NO: 1127788 - RNA, 19 nt, Artificial Sequence
  Description of Artificial Sequence: Synthetic oligonucleotide
  Sense strand starting at position 1237 of SEQ ID NO: 916066
aucaguaaacucugauagu

SEQ ID NO: 1127789 - RNA, 19 nt, Artificial Sequence
  Description of Artificial Sequence: Synthetic oligonucleotide
  Antisense strand to SEQ ID NO: 1127788
acuaucagaguuuacugau

SEQ ID NO: 1127790 - RNA, 19 nt, Artificial Sequence
  Description of Artificial Sequence: Synthetic oligonucleotide
  Sense strand starting at position 1552 of SEQ ID NO: 916066
agccuccuuccagagugaa

SEQ ID NO: 1127791 - RNA, 19 nt, Artificial Sequence
  Description of Artificial Sequence: Synthetic oligonucleotide
  Antisense strand to SEQ ID NO: 1127790
uucacucuggaaggaggcu

SEQ ID NO: 1127792 - RNA, 19 nt, Artificial Sequence
  Description of Artificial Sequence: Synthetic oligonucleotide
  Sense strand starting at position 1750 of SEQ ID NO: 916066
uccacaauucuccggaagu

SEQ ID NO: 1127793 - RNA, 19 nt, Artificial Sequence
  Description of Artificial Sequence: Synthetic oligonucleotide
  Antisense strand to SEQ ID NO: 1127792
acuuccggagaauugugga

SEQ ID NO: 1127794 - RNA, 19 nt, Artificial Sequence
  Description of Artificial Sequence: Synthetic oligonucleotide
  Sense strand starting at position 1780 of SEQ ID NO: 916066
ccucacuuacuuuaguaga

SEQ ID NO: 1127795 - RNA, 19 nt, Artificial Sequence
  Description of Artificial Sequence: Synthetic oligonucleotide
  Antisense strand to SEQ ID NO: 1127794
ucuacuaaaguaagugagg

SEQ ID NO: 1127796 - RNA, 19 nt, Artificial Sequence
  Description of Artificial Sequence: Synthetic oligonucleotide
  Sense strand starting at position 1890 of SEQ ID NO: 916066
uuaccuauccgauguauga

SEQ ID NO: 1127797 - RNA, 19 nt, Artificial Sequence
  Description of Artificial Sequence: Synthetic oligonucleotide
  Antisense strand to SEQ ID NO: 1127796
ucauacaucggauagguaa

SEQ ID NO: 1127798 - RNA, 19 nt, Artificial Sequence
  Description of Artificial Sequence: Synthetic oligonucleotide
  Sense strand starting at position 1927 of SEQ ID NO: 916066
cccgcagcucuggauuaau

SEQ ID NO: 1127799 - RNA, 19 nt, Artificial Sequence
  Description of Artificial Sequence: Synthetic oligonucleotide
  Antisense strand to SEQ ID NO: 1127798
auuaauccagagcugcggg

SEQ ID NO: 1127800 - RNA, 19 nt, Artificial Sequence
  Description of Artificial Sequence: Synthetic oligonucleotide
  Sense strand starting at position 1930 of SEQ ID NO: 916066
gcagcucuggauuaaucau

SEQ ID NO: 1127801 - RNA, 19 nt, Artificial Sequence
  Description of Artificial Sequence: Synthetic oligonucleotide
  Antisense strand to SEQ ID NO: 1127800
augauuaauccagagcugc

SEQ ID NO: 1127802 - RNA, 19 nt, Artificial Sequence
  Description of Artificial Sequence: Synthetic oligonucleotide
  Sense strand starting at position 2104 of SEQ ID NO: 916066
gcagacuuguuaguuuaag

SEQ ID NO: 1127803 - RNA, 19 nt, Artificial Sequence
  Description of Artificial Sequence: Synthetic oligonucleotide
  Antisense strand to SEQ ID NO: 1127802
cuuaaacuaacaagucugc

SEQ ID NO: 1127804 - RNA, 19 nt, Artificial Sequence
  Description of Artificial Sequence: Synthetic oligonucleotide
  Sense strand starting at position 2232 of SEQ ID NO: 916066
uuguguaaucacuaucuuu

SEQ ID NO: 1127805 - RNA, 19 nt, Artificial Sequence
  Description of Artificial Sequence: Synthetic oligonucleotide
  Antisense strand to SEQ ID NO: 1127804
aaagauagugauuacacaa

SEQ ID NO: 1127806 - RNA, 19 nt, Artificial Sequence
  Description of Artificial Sequence: Synthetic oligonucleotide
  Sense strand starting at position 2649 of SEQ ID NO: 916066
gugucuugucucuugcuua

SEQ ID NO: 1127807 - RNA, 19 nt, Artificial Sequence
  Description of Artificial Sequence: Synthetic oligonucleotide
  Antisense strand to SEQ ID NO: 1127806
uaagcaagagacaagacac

SEQ ID NO: 1127808 - RNA, 19 nt, Artificial Sequence
  Description of Artificial Sequence: Synthetic oligonucleotide
  Sense strand starting at position 2652 of SEQ ID NO: 916066
ucuugucucuugcuuauuu

SEQ ID NO: 1127809 - RNA, 19 nt, Artificial Sequence
  Description of Artificial Sequence: Synthetic oligonucleotide
  Antisense strand to SEQ ID NO: 1127808
aaauaagcaagagacaaga

SEQ ID NO: 1127810 - RNA, 19 nt, Artificial Sequence
  Description of Artificial Sequence: Synthetic oligonucleotide
  Sense strand starting at position 2700 of SEQ ID NO: 916066
guuguugugcagguaagua

SEQ ID NO: 1127811 - RNA, 19 nt, Artificial Sequence
  Description of Artificial Sequence: Synthetic oligonucleotide
  Antisense strand to SEQ ID NO: 1127810
uacuuaccugcacaacaac

SEQ ID NO: 1127812 - RNA, 19 nt, Artificial Sequence
  Description of Artificial Sequence: Synthetic oligonucleotide
  Sense strand starting at position 2776 of SEQ ID NO: 916066
cucuuugaucacuaguuga

SEQ ID NO: 1127813 - RNA, 19 nt, Artificial Sequence
  Description of Artificial Sequence: Synthetic oligonucleotide
  Antisense strand to SEQ ID NO: 1127812
ucaacuagugaucaaagag

SEQ ID NO: 1127814 - RNA, 19 nt, Artificial Sequence
  Description of Artificial Sequence: Synthetic oligonucleotide
  Sense strand starting at position 2814 of SEQ ID NO: 916066
ugggacuguuauguaugaa

SEQ ID NO: 1127815 - RNA, 19 nt, Artificial Sequence
  Description of Artificial Sequence: Synthetic oligonucleotide
  Antisense strand to SEQ ID NO: 1127814
uucauacauaacaguccca

SEQ ID NO: 1127816 - RNA, 19 nt, Artificial Sequence
  Description of Artificial Sequence: Synthetic oligonucleotide
  Sense strand starting at position 2817 of SEQ ID NO: 916066
gacuguuauguaugaaacu

SEQ ID NO: 1127817 - RNA, 19 nt, Artificial Sequence
  Description of Artificial Sequence: Synthetic oligonucleotide
  Antisense strand to SEQ ID NO: 1127816
aguuucauacauaacaguc

SEQ ID NO: 1127818 - RNA, 19 nt, Artificial Sequence
  Description of Artificial Sequence: Synthetic oligonucleotide
  Sense strand starting at position 2891 of SEQ ID NO: 916066
auugaauugcugcaucaua

SEQ ID NO: 1127819 - RNA, 19 nt, Artificial Sequence
  Description of Artificial Sequence: Synthetic oligonucleotide
  Antisense strand to SEQ ID NO: 1127818
uaugaugcagcaauucaau

SEQ ID NO: 1127820 - RNA, 19 nt, Artificial Sequence
  Description of Artificial Sequence: Synthetic oligonucleotide
  Sense strand starting at position 3537 of SEQ ID NO: 916066
uuaguaacucccuggucua

SEQ ID NO: 1127821 - RNA, 19 nt, Artificial Sequence
  Description of Artificial Sequence: Synthetic oligonucleotide
  Antisense strand to SEQ ID NO: 1127820
uagaccagggaguuacuaa

SEQ ID NO: 1127822 - RNA, 19 nt, Artificial Sequence
  Description of Artificial Sequence: Synthetic oligonucleotide
  Sense strand starting at position 3540 of SEQ ID NO: 916066
guaacucccuggucuauuu

SEQ ID NO: 1127823 - RNA, 19 nt, Artificial Sequence
  Description of Artificial Sequence: Synthetic oligonucleotide
  Antisense strand to SEQ ID NO: 1127822
aaauagaccagggaguuac

SEQ ID NO: 1127824 - RNA, 19 nt, Artificial Sequence
  Description of Artificial Sequence: Synthetic oligonucleotide
  Sense strand starting at position 3657 of SEQ ID NO: 916066
cugguuuccagaugacaag

SEQ ID NO: 1127825 - RNA, 19 nt, Artificial Sequence
  Description of Artificial Sequence: Synthetic oligonucleotide
  Antisense strand to SEQ ID NO: 1127824
cuugucaucuggaaaccag

SEQ ID NO: 1127826 - RNA, 19 nt, Artificial Sequence
  Description of Artificial Sequence: Synthetic oligonucleotide
  Sense strand starting at position 3658 of SEQ ID NO: 916066
ugguuuccagaugacaagu

SEQ ID NO: 1127827 - RNA, 19 nt, Artificial Sequence
  Description of Artificial Sequence: Synthetic oligonucleotide
  Antisense strand to SEQ ID NO: 1127826
acuugucaucuggaaacca

SEQ ID NO: 1127828 - RNA, 19 nt, Artificial Sequence
  Description of Artificial Sequence: Synthetic oligonucleotide
  Sense strand starting at position 3829 of SEQ ID NO: 916066
uccgcaauuugaucagugu

SEQ ID NO: 1127829 - RNA, 19 nt, Artificial Sequence
  Description of Artificial Sequence: Synthetic oligonucleotide
  Antisense strand to SEQ ID NO: 1127828
acacugaucaaauugcgga

SEQ ID NO: 1127830 - RNA, 19 nt, Artificial Sequence
  Description of Artificial Sequence: Synthetic oligonucleotide
  Sense strand starting at position 476 of SEQ ID NO: 916067
aucuaacuuuaggcagaau

SEQ ID NO: 1127831 - RNA, 19 nt, Artificial Sequence
  Description of Artificial Sequence: Synthetic oligonucleotide
  Antisense strand to SEQ ID NO: 1127830
auucugccuaaaguuagau

SEQ ID NO: 1127832 - RNA, 19 nt, Artificial Sequence
  Description of Artificial Sequence: Synthetic oligonucleotide
  Sense strand starting at position 523 of SEQ ID NO: 916067
ggauaaagugugcauucua

SEQ ID NO: 1127833 - RNA, 19 nt, Artificial Sequence
  Description of Artificial Sequence: Synthetic oligonucleotide
  Antisense strand to SEQ ID NO: 1127832
uagaaugcacacuuuaucc

SEQ ID NO: 1127834 - RNA, 19 nt, Artificial Sequence
  Description of Artificial Sequence: Synthetic oligonucleotide
  Sense strand starting at position 594 of SEQ ID NO: 916067
uuuaguuaaacgggaaaug

SEQ ID NO: 1127835 - RNA, 19 nt, Artificial Sequence
  Description of Artificial Sequence: Synthetic oligonucleotide
  Antisense strand to SEQ ID NO: 1127834
cauuucccguuuaacuaaa

SEQ ID NO: 1127836 - RNA, 19 nt, Artificial Sequence
  Description of Artificial Sequence: Synthetic oligonucleotide
  Sense strand starting at position 603 of SEQ ID NO: 916067
acgggaaaugcuuaaagcu

SEQ ID NO: 1127837 - RNA, 19 nt, Artificial Sequence
  Description of Artificial Sequence: Synthetic oligonucleotide
  Antisense strand to SEQ ID NO: 1127836
agcuuuaagcauuucccgu

SEQ ID NO: 1127838 - RNA, 19 nt, Artificial Sequence
  Description of Artificial Sequence: Synthetic oligonucleotide
  Sense strand starting at position 654 of SEQ ID NO: 916067
cguuguauugaaugcauuu

SEQ ID NO: 1127839 - RNA, 19 nt, Artificial Sequence
  Description of Artificial Sequence: Synthetic oligonucleotide
  Antisense strand to SEQ ID NO: 1127838
aaaugcauucaauacaacg

SEQ ID NO: 1127840 - RNA, 19 nt, Artificial Sequence
  Description of Artificial Sequence: Synthetic oligonucleotide
  Sense strand starting at position 836 of SEQ ID NO: 916067
uucuuaggguugguaaaga

SEQ ID NO: 1127841 - RNA, 19 nt, Artificial Sequence
  Description of Artificial Sequence: Synthetic oligonucleotide
  Antisense strand to SEQ ID NO: 1127840
ucuuuaccaacccuaagaa

SEQ ID NO: 1127842 - RNA, 19 nt, Artificial Sequence
  Description of Artificial Sequence: Synthetic oligonucleotide
  Sense strand starting at position 852 of SEQ ID NO: 916067
agacaucuccauggauauc

SEQ ID NO: 1127843 - RNA, 19 nt, Artificial Sequence
  Description of Artificial Sequence: Synthetic oligonucleotide
  Antisense strand to SEQ ID NO: 1127842
gauauccauggagaugucu

SEQ ID NO: 1127844 - RNA, 19 nt, Artificial Sequence
  Description of Artificial Sequence: Synthetic oligonucleotide
  Sense strand starting at position 877 of SEQ ID NO: 916067
cuagcaauuccuuaguaag

SEQ ID NO: 1127845 - RNA, 19 nt, Artificial Sequence
  Description of Artificial Sequence: Synthetic oligonucleotide
  Antisense strand to SEQ ID NO: 1127844
cuuacuaaggaauugcuag

SEQ ID NO: 1127846 - RNA, 19 nt, Artificial Sequence
  Description of Artificial Sequence: Synthetic oligonucleotide
  Sense strand starting at position 879 of SEQ ID NO: 916067
agcaauuccuuaguaagag

SEQ ID NO: 1127847 - RNA, 19 nt, Artificial Sequence
  Description of Artificial Sequence: Synthetic oligonucleotide
  Antisense strand to SEQ ID NO: 1127846
cucuuacuaaggaauugcu

SEQ ID NO: 1127848 - RNA, 19 nt, Artificial Sequence
  Description of Artificial Sequence: Synthetic oligonucleotide
  Sense strand starting at position 983 of SEQ ID NO: 916067
uuagaacuauuggcuaaau

SEQ ID NO: 1127849 - RNA, 19 nt, Artificial Sequence
  Description of Artificial Sequence: Synthetic oligonucleotide
  Antisense strand to SEQ ID NO: 1127848
auuuagccaauaguucuaa

SEQ ID NO: 1127850 - RNA, 19 nt, Artificial Sequence
  Description of Artificial Sequence: Synthetic oligonucleotide
  Sense strand starting at position 1021 of SEQ ID NO: 916067
uucugagaacuguaugagu

SEQ ID NO: 1127851 - RNA, 19 nt, Artificial Sequence
  Description of Artificial Sequence: Synthetic oligonucleotide
  Antisense strand to SEQ ID NO: 1127850
acucauacaguucucagaa

SEQ ID NO: 1127852 - RNA, 19 nt, Artificial Sequence
  Description of Artificial Sequence: Synthetic oligonucleotide
  Sense strand starting at position 1023 of SEQ ID NO: 916067
cugagaacuguaugaguau

SEQ ID NO: 1127853 - RNA, 19 nt, Artificial Sequence
  Description of Artificial Sequence: Synthetic oligonucleotide
  Antisense strand to SEQ ID NO: 1127852
auacucauacaguucucag

SEQ ID NO: 1127854 - RNA, 19 nt, Artificial Sequence
  Description of Artificial Sequence: Synthetic oligonucleotide
  Sense strand starting at position 1172 of SEQ ID NO: 916067
cugaauuuauuaggacaaa

SEQ ID NO: 1127855 - RNA, 19 nt, Artificial Sequence
  Description of Artificial Sequence: Synthetic oligonucleotide
  Antisense strand to SEQ ID NO: 1127854
uuuguccuaauaaauucag

SEQ ID NO: 1127856 - RNA, 19 nt, Artificial Sequence
  Description of Artificial Sequence: Synthetic oligonucleotide
  Sense strand starting at position 1271 of SEQ ID NO: 916067
ucucgaaggcuuuaacauu

SEQ ID NO: 1127857 - RNA, 19 nt, Artificial Sequence
  Description of Artificial Sequence: Synthetic oligonucleotide
  Antisense strand to SEQ ID NO: 1127856
aauguuaaagccuucgaga

SEQ ID NO: 1127858 - RNA, 19 nt, Artificial Sequence
  Description of Artificial Sequence: Synthetic oligonucleotide
  Sense strand starting at position 1386 of SEQ ID NO: 916067
cuuugugucaugucuugca

SEQ ID NO: 1127859 - RNA, 19 nt, Artificial Sequence
  Description of Artificial Sequence: Synthetic oligonucleotide
  Antisense strand to SEQ ID NO: 1127858
ugcaagacaugacacaaag

SEQ ID NO: 1127860 - RNA, 19 nt, Artificial Sequence
  Description of Artificial Sequence: Synthetic oligonucleotide
  Sense strand starting at position 1393 of SEQ ID NO: 916067
ucaugucuugcagaaacuc

SEQ ID NO: 1127861 - RNA, 19 nt, Artificial Sequence
  Description of Artificial Sequence: Synthetic oligonucleotide
  Antisense strand to SEQ ID NO: 1127860
gaguuucugcaagacauga

SEQ ID NO: 1127862 - RNA, 19 nt, Artificial Sequence
  Description of Artificial Sequence: Synthetic oligonucleotide
  Sense strand starting at position 1544 of SEQ ID NO: 916067
guaaccaugugacuaucua

SEQ ID NO: 1127863 - RNA, 19 nt, Artificial Sequence
  Description of Artificial Sequence: Synthetic oligonucleotide
  Antisense strand to SEQ ID NO: 1127862
uagauagucacaugguuac

SEQ ID NO: 1127864 - RNA, 19 nt, Artificial Sequence
  Description of Artificial Sequence: Synthetic oligonucleotide
  Sense strand starting at position 1548 of SEQ ID NO: 916067
ccaugugacuaucuauuag

SEQ ID NO: 1127865 - RNA, 19 nt, Artificial Sequence
  Description of Artificial Sequence: Synthetic oligonucleotide
  Antisense strand to SEQ ID NO: 1127864
cuaauagauagucacaugg

SEQ ID NO: 1127866 - RNA, 19 nt, Artificial Sequence
  Description of Artificial Sequence: Synthetic oligonucleotide
  Sense strand starting at position 1689 of SEQ ID NO: 916067
cugggauucucaucugaac

SEQ ID NO: 1127867 - RNA, 19 nt, Artificial Sequence
  Description of Artificial Sequence: Synthetic oligonucleotide
  Antisense strand to SEQ ID NO: 1127866
guucagaugagaaucccag

SEQ ID NO: 1127868 - RNA, 19 nt, Artificial Sequence
  Description of Artificial Sequence: Synthetic oligonucleotide
  Sense strand starting at position 1743 of SEQ ID NO: 916067
ugauucauccaggaguggu

SEQ ID NO: 1127869 - RNA, 19 nt, Artificial Sequence
  Description of Artificial Sequence: Synthetic oligonucleotide
  Antisense strand to SEQ ID NO: 1127868
accacuccuggaugaauca

SEQ ID NO: 1127870 - RNA, 19 nt, Artificial Sequence
  Description of Artificial Sequence: Synthetic oligonucleotide
  Sense strand starting at position 1796 of SEQ ID NO: 916067
ggcugauacuaauuaauuc

SEQ ID NO: 1127871 - RNA, 19 nt, Artificial Sequence
  Description of Artificial Sequence: Synthetic oligonucleotide
  Antisense strand to SEQ ID NO: 1127870
gaauuaauuaguaucagcc

SEQ ID NO: 1127872 - RNA, 19 nt, Artificial Sequence
  Description of Artificial Sequence: Synthetic oligonucleotide
  Sense strand starting at position 1904 of SEQ ID NO: 916067
uuaaacuuuggcuacugaa

SEQ ID NO: 1127873 - RNA, 19 nt, Artificial Sequence
  Description of Artificial Sequence: Synthetic oligonucleotide
  Antisense strand to SEQ ID NO: 1127872
uucaguagccaaaguuuaa

SEQ ID NO: 1127874 - RNA, 19 nt, Artificial Sequence
  Description of Artificial Sequence: Synthetic oligonucleotide
  Sense strand starting at position 2057 of SEQ ID NO: 916067
gaacguuaucaucagcaua

SEQ ID NO: 1127875 - RNA, 19 nt, Artificial Sequence
  Description of Artificial Sequence: Synthetic oligonucleotide
  Antisense strand to SEQ ID NO: 1127874
uaugcugaugauaacguuc

SEQ ID NO: 1127876 - RNA, 19 nt, Artificial Sequence
  Description of Artificial Sequence: Synthetic oligonucleotide
  Sense strand starting at position 2060 of SEQ ID NO: 916067
cguuaucaucagcauacaa

SEQ ID NO: 1127877 - RNA, 19 nt, Artificial Sequence
  Description of Artificial Sequence: Synthetic oligonucleotide
  Antisense strand to SEQ ID NO: 1127876
uuguaugcugaugauaacg

SEQ ID NO: 1127878 - RNA, 19 nt, Artificial Sequence
  Description of Artificial Sequence: Synthetic oligonucleotide
  Sense strand starting at position 2078 of SEQ ID NO: 916067
agaugacaccauuaugcuu

SEQ ID NO: 1127879 - RNA, 19 nt, Artificial Sequence
  Description of Artificial Sequence: Synthetic oligonucleotide
  Antisense strand to SEQ ID NO: 1127878
aagcauaauggugucaucu

SEQ ID NO: 1127880 - RNA, 19 nt, Artificial Sequence
  Description of Artificial Sequence: Synthetic oligonucleotide
  Sense strand starting at position 2533 of SEQ ID NO: 916067
ucaaguaugguugagugaa

SEQ ID NO: 1127881 - RNA, 19 nt, Artificial Sequence
  Description of Artificial Sequence: Synthetic oligonucleotide
  Antisense strand to SEQ ID NO: 1127880
uucacucaaccauacuuga

SEQ ID NO: 1127882 - RNA, 19 nt, Artificial Sequence
  Description of Artificial Sequence: Synthetic oligonucleotide
  Sense strand starting at position 2535 of SEQ ID NO: 916067
aaguaugguugagugaaau

SEQ ID NO: 1127883 - RNA, 19 nt, Artificial Sequence
  Description of Artificial Sequence: Synthetic oligonucleotide
  Antisense strand to SEQ ID NO: 1127882
auuucacucaaccauacuu

SEQ ID NO: 1127884 - RNA, 19 nt, Artificial Sequence
  Description of Artificial Sequence: Synthetic oligonucleotide
  Sense strand starting at position 2690 of SEQ ID NO: 916067
gucaauaaacaugagcuuu

SEQ ID NO: 1127885 - RNA, 19 nt, Artificial Sequence
  Description of Artificial Sequence: Synthetic oligonucleotide
  Antisense strand to SEQ ID NO: 1127884
aaagcucauguuuauugac

SEQ ID NO: 1127886 - RNA, 19 nt, Artificial Sequence
  Description of Artificial Sequence: Synthetic oligonucleotide
  Sense strand starting at position 2724 of SEQ ID NO: 916067
uccuguuaagcagaaugau

SEQ ID NO: 1127887 - RNA, 19 nt, Artificial Sequence
  Description of Artificial Sequence: Synthetic oligonucleotide
  Antisense strand to SEQ ID NO: 1127886
aucauucugcuuaacagga

SEQ ID NO: 1127888 - RNA, 19 nt, Artificial Sequence
  Description of Artificial Sequence: Synthetic oligonucleotide
  Sense strand starting at position 2727 of SEQ ID NO: 916067
uguuaagcagaaugauaca

SEQ ID NO: 1127889 - RNA, 19 nt, Artificial Sequence
  Description of Artificial Sequence: Synthetic oligonucleotide
  Antisense strand to SEQ ID NO: 1127888
uguaucauucugcuuaaca

SEQ ID NO: 1127890 - RNA, 19 nt, Artificial Sequence
  Description of Artificial Sequence: Synthetic oligonucleotide
  Sense strand starting at position 2737 of SEQ ID NO: 916067
aaugauacaguuggcaauu

SEQ ID NO: 1127891 - RNA, 19 nt, Artificial Sequence
  Description of Artificial Sequence: Synthetic oligonucleotide
  Antisense strand to SEQ ID NO: 1127890
aauugccaacuguaucauu

SEQ ID NO: 1127892 - RNA, 19 nt, Artificial Sequence
  Description of Artificial Sequence: Synthetic oligonucleotide
  Sense strand starting at position 2906 of SEQ ID NO: 916067
ccauuaugacauugagcuu

SEQ ID NO: 1127893 - RNA, 19 nt, Artificial Sequence
  Description of Artificial Sequence: Synthetic oligonucleotide
  Antisense strand to SEQ ID NO: 1127892
aagcucaaugucauaaugg

SEQ ID NO: 1127894 - RNA, 19 nt, Artificial Sequence
  Description of Artificial Sequence: Synthetic oligonucleotide
  Sense strand starting at position 3021 of SEQ ID NO: 916067
ugaaacugcuagguuacau

SEQ ID NO: 1127895 - RNA, 19 nt, Artificial Sequence
  Description of Artificial Sequence: Synthetic oligonucleotide
  Antisense strand to SEQ ID NO: 1127894
auguaaccuagcaguuuca

SEQ ID NO: 1127896 - RNA, 19 nt, Artificial Sequence
  Description of Artificial Sequence: Synthetic oligonucleotide
  Sense strand starting at position 3102 of SEQ ID NO: 916067
ugaauauuggaugguucua

SEQ ID NO: 1127897 - RNA, 19 nt, Artificial Sequence
  Description of Artificial Sequence: Synthetic oligonucleotide
  Antisense strand to SEQ ID NO: 1127896
uagaaccauccaauauuca

SEQ ID NO: 1127898 - RNA, 19 nt, Artificial Sequence
  Description of Artificial Sequence: Synthetic oligonucleotide
  Sense strand starting at position 3104 of SEQ ID NO: 916067
aauauuggaugguucuauu

SEQ ID NO: 1127899 - RNA, 19 nt, Artificial Sequence
  Description of Artificial Sequence: Synthetic oligonucleotide
  Antisense strand to SEQ ID NO: 1127898
aauagaaccauccaauauu

SEQ ID NO: 1127900 - RNA, 19 nt, Artificial Sequence
  Description of Artificial Sequence: Synthetic oligonucleotide
  Sense strand starting at position 3114 of SEQ ID NO: 916067
gguucuauuugcuccacau

SEQ ID NO: 1127901 - RNA, 19 nt, Artificial Sequence
  Description of Artificial Sequence: Synthetic oligonucleotide
  Antisense strand to SEQ ID NO: 1127900
auguggagcaaauagaacc

SEQ ID NO: 1127902 - RNA, 19 nt, Artificial Sequence
  Description of Artificial Sequence: Synthetic oligonucleotide
  Sense strand starting at position 3321 of SEQ ID NO: 916067
uuauuuguuuccuuauggu

SEQ ID NO: 1127903 - RNA, 19 nt, Artificial Sequence
  Description of Artificial Sequence: Synthetic oligonucleotide
  Antisense strand to SEQ ID NO: 1127902
accauaaggaaacaaauaa

SEQ ID NO: 1127904 - RNA, 19 nt, Artificial Sequence
  Description of Artificial Sequence: Synthetic oligonucleotide
  Sense strand starting at position 3671 of SEQ ID NO: 916067
cuuaguuauuggucauaag

SEQ ID NO: 1127905 - RNA, 19 nt, Artificial Sequence
  Description of Artificial Sequence: Synthetic oligonucleotide
  Antisense strand to SEQ ID NO: 1127904
cuuaugaccaauaacuaag

SEQ ID NO: 1127906 - RNA, 19 nt, Artificial Sequence
  Description of Artificial Sequence: Synthetic oligonucleotide
  Sense strand starting at position 3787 of SEQ ID NO: 916067
gaguguacacaaugggauu

SEQ ID NO: 1127907 - RNA, 19 nt, Artificial Sequence
  Description of Artificial Sequence: Synthetic oligonucleotide
  Antisense strand to SEQ ID NO: 1127906
aaucccauuguguacacuc

SEQ ID NO: 1127908 - RNA, 19 nt, Artificial Sequence
  Description of Artificial Sequence: Synthetic oligonucleotide
  Sense strand starting at position 3806 of SEQ ID NO: 916067
ggauucugagggugcuaga

SEQ ID NO: 1127909 - RNA, 19 nt, Artificial Sequence
  Description of Artificial Sequence: Synthetic oligonucleotide
  Antisense strand to SEQ ID NO: 1127908
ucuagcacccucagaaucc

SEQ ID NO: 1127910 - RNA, 19 nt, Artificial Sequence
  Description of Artificial Sequence: Synthetic oligonucleotide
  Sense strand starting at position 5 of SEQ ID NO: 916068
agagguauggucugaggaa

SEQ ID NO: 1127911 - RNA, 19 nt, Artificial Sequence
  Description of Artificial Sequence: Synthetic oligonucleotide
  Antisense strand to SEQ ID NO: 1127910
uuccucagaccauaccucu

SEQ ID NO: 1127912 - RNA, 19 nt, Artificial Sequence
  Description of Artificial Sequence: Synthetic oligonucleotide
  Sense strand starting at position 42 of SEQ ID NO: 916068
ucucaaauagagugugaaa

SEQ ID NO: 1127913 - RNA, 19 nt, Artificial Sequence
  Description of Artificial Sequence: Synthetic oligonucleotide
  Antisense strand to SEQ ID NO: 1127912
uuucacacucuauuugaga

SEQ ID NO: 1127914 - RNA, 19 nt, Artificial Sequence
  Description of Artificial Sequence: Synthetic oligonucleotide
  Sense strand starting at position 579 of SEQ ID NO: 916068
gccacaugagcuuaaagau

SEQ ID NO: 1127915 - RNA, 19 nt, Artificial Sequence
  Description of Artificial Sequence: Synthetic oligonucleotide
  Antisense strand to SEQ ID NO: 1127914
aucuuuaagcucauguggc

SEQ ID NO: 1127916 - RNA, 19 nt, Artificial Sequence
  Description of Artificial Sequence: Synthetic oligonucleotide
  Sense strand starting at position 601 of SEQ ID NO: 916068
gcuauaauugcagaaguau

SEQ ID NO: 1127917 - RNA, 19 nt, Artificial Sequence
  Description of Artificial Sequence: Synthetic oligonucleotide
  Antisense strand to SEQ ID NO: 1127916
auacuucugcaauuauagc

SEQ ID NO: 1127918 - RNA, 19 nt, Artificial Sequence
  Description of Artificial Sequence: Synthetic oligonucleotide
  Sense strand starting at position 646 of SEQ ID NO: 916068
cgcauuucuagcuggagga

SEQ ID NO: 1127919 - RNA, 19 nt, Artificial Sequence
  Description of Artificial Sequence: Synthetic oligonucleotide
  Antisense strand to SEQ ID NO: 1127918
uccuccagcuagaaaugcg

SEQ ID NO: 1127920 - RNA, 19 nt, Artificial Sequence
  Description of Artificial Sequence: Synthetic oligonucleotide
  Sense strand starting at position 688 of SEQ ID NO: 916068
ccugaaaguacgggucaga

SEQ ID NO: 1127921 - RNA, 19 nt, Artificial Sequence
  Description of Artificial Sequence: Synthetic oligonucleotide
  Antisense strand to SEQ ID NO: 1127920
ucugacccguacuuucagg

SEQ ID NO: 1127922 - RNA, 19 nt, Artificial Sequence
  Description of Artificial Sequence: Synthetic oligonucleotide
  Sense strand starting at position 881 of SEQ ID NO: 916068
ugaugcacaugucugaaua

SEQ ID NO: 1127923 - RNA, 19 nt, Artificial Sequence
  Description of Artificial Sequence: Synthetic oligonucleotide
  Antisense strand to SEQ ID NO: 1127922
uauucagacaugugcauca

SEQ ID NO: 1127924 - RNA, 19 nt, Artificial Sequence
  Description of Artificial Sequence: Synthetic oligonucleotide
  Sense strand starting at position 882 of SEQ ID NO: 916068
gaugcacaugucugaauag

SEQ ID NO: 1127925 - RNA, 19 nt, Artificial Sequence
  Description of Artificial Sequence: Synthetic oligonucleotide
  Antisense strand to SEQ ID NO: 1127924
cuauucagacaugugcauc

SEQ ID NO: 1127926 - RNA, 19 nt, Artificial Sequence
  Description of Artificial Sequence: Synthetic oligonucleotide
  Sense strand starting at position 958 of SEQ ID NO: 916068
ucaucucaccagggugauu

SEQ ID NO: 1127927 - RNA, 19 nt, Artificial Sequence
  Description of Artificial Sequence: Synthetic oligonucleotide
  Antisense strand to SEQ ID NO: 1127926
aaucacccuggugagauga

SEQ ID NO: 1127928 - RNA, 19 nt, Artificial Sequence
  Description of Artificial Sequence: Synthetic oligonucleotide
  Sense strand starting at position 1153 of SEQ ID NO: 916068
guuggaacuauccgacaaa

SEQ ID NO: 1127929 - RNA, 19 nt, Artificial Sequence
  Description of Artificial Sequence: Synthetic oligonucleotide
  Antisense strand to SEQ ID NO: 1127928
uuugucggauaguuccaac

SEQ ID NO: 1127930 - RNA, 19 nt, Artificial Sequence
  Description of Artificial Sequence: Synthetic oligonucleotide
  Sense strand starting at position 1509 of SEQ ID NO: 916068
guaaauguccuuuacauac

SEQ ID NO: 1127931 - RNA, 19 nt, Artificial Sequence
  Description of Artificial Sequence: Synthetic oligonucleotide
  Antisense strand to SEQ ID NO: 1127930
guauguaaaggacauuuac

SEQ ID NO: 1127932 - RNA, 19 nt, Artificial Sequence
  Description of Artificial Sequence: Synthetic oligonucleotide
  Sense strand starting at position 1550 of SEQ ID NO: 916068
aagagcuuccaugauaggu

SEQ ID NO: 1127933 - RNA, 19 nt, Artificial Sequence
  Description of Artificial Sequence: Synthetic oligonucleotide
  Antisense strand to SEQ ID NO: 1127932
accuaucauggaagcucuu

SEQ ID NO: 1127934 - RNA, 19 nt, Artificial Sequence
  Description of Artificial Sequence: Synthetic oligonucleotide
  Sense strand starting at position 1579 of SEQ ID NO: 916068
uguaauaaugaugguaucu

SEQ ID NO: 1127935 - RNA, 19 nt, Artificial Sequence
  Description of Artificial Sequence: Synthetic oligonucleotide
  Antisense strand to SEQ ID NO: 1127934
agauaccaucauuauuaca

SEQ ID NO: 1127936 - RNA, 19 nt, Artificial Sequence
  Description of Artificial Sequence: Synthetic oligonucleotide
  Sense strand starting at position 1584 of SEQ ID NO: 916068
uaaugaugguaucuuguau

SEQ ID NO: 1127937 - RNA, 19 nt, Artificial Sequence
  Description of Artificial Sequence: Synthetic oligonucleotide
  Antisense strand to SEQ ID NO: 1127936
auacaagauaccaucauua

SEQ ID NO: 1127938 - RNA, 19 nt, Artificial Sequence
  Description of Artificial Sequence: Synthetic oligonucleotide
  Sense strand starting at position 1596 of SEQ ID NO: 916068
cuuguaucugaguaacacu

SEQ ID NO: 1127939 - RNA, 19 nt, Artificial Sequence
  Description of Artificial Sequence: Synthetic oligonucleotide
  Antisense strand to SEQ ID NO: 1127938
aguguuacucagauacaag

SEQ ID NO: 1127940 - RNA, 19 nt, Artificial Sequence
  Description of Artificial Sequence: Synthetic oligonucleotide
  Sense strand starting at position 1604 of SEQ ID NO: 916068
ugaguaacacuuuagaguu

SEQ ID NO: 1127941 - RNA, 19 nt, Artificial Sequence
  Description of Artificial Sequence: Synthetic oligonucleotide
  Antisense strand to SEQ ID NO: 1127940
aacucuaaaguguuacuca

SEQ ID NO: 1127942 - RNA, 19 nt, Artificial Sequence
  Description of Artificial Sequence: Synthetic oligonucleotide
  Sense strand starting at position 1611 of SEQ ID NO: 916068
cacuuuagaguuuguauag

SEQ ID NO: 1127943 - RNA, 19 nt, Artificial Sequence
  Description of Artificial Sequence: Synthetic oligonucleotide
  Antisense strand to SEQ ID NO: 1127942
cuauacaaacucuaaagug

SEQ ID NO: 1127944 - RNA, 19 nt, Artificial Sequence
  Description of Artificial Sequence: Synthetic oligonucleotide
  Sense strand starting at position 1612 of SEQ ID NO: 916068
acuuuagaguuuguauaga

SEQ ID NO: 1127945 - RNA, 19 nt, Artificial Sequence
  Description of Artificial Sequence: Synthetic oligonucleotide
  Antisense strand to SEQ ID NO: 1127944
ucuauacaaacucuaaagu

SEQ ID NO: 1127946 - RNA, 19 nt, Artificial Sequence
  Description of Artificial Sequence: Synthetic oligonucleotide
  Sense strand starting at position 1722 of SEQ ID NO: 916068
aguuguuagaacugggaau

SEQ ID NO: 1127947 - RNA, 19 nt, Artificial Sequence
  Description of Artificial Sequence: Synthetic oligonucleotide
  Antisense strand to SEQ ID NO: 1127946
auucccaguucuaacaacu

SEQ ID NO: 1127948 - RNA, 19 nt, Artificial Sequence
  Description of Artificial Sequence: Synthetic oligonucleotide
  Sense strand starting at position 1723 of SEQ ID NO: 916068
guuguuagaacugggaaua

SEQ ID NO: 1127949 - RNA, 19 nt, Artificial Sequence
  Description of Artificial Sequence: Synthetic oligonucleotide
  Antisense strand to SEQ ID NO: 1127948
uauucccaguucuaacaac

SEQ ID NO: 1127950 - RNA, 19 nt, Artificial Sequence
  Description of Artificial Sequence: Synthetic oligonucleotide
  Sense strand starting at position 1724 of SEQ ID NO: 916068
uuguuagaacugggaauau

SEQ ID NO: 1127951 - RNA, 19 nt, Artificial Sequence
  Description of Artificial Sequence: Synthetic oligonucleotide
  Antisense strand to SEQ ID NO: 1127950
auauucccaguucuaacaa

SEQ ID NO: 1127952 - RNA, 19 nt, Artificial Sequence
  Description of Artificial Sequence: Synthetic oligonucleotide
  Sense strand starting at position 1984 of SEQ ID NO: 916068
aguuucuaugagugaucua

SEQ ID NO: 1127953 - RNA, 19 nt, Artificial Sequence
  Description of Artificial Sequence: Synthetic oligonucleotide
  Antisense strand to SEQ ID NO: 1127952
uagaucacucauagaaacu

SEQ ID NO: 1127954 - RNA, 19 nt, Artificial Sequence
  Description of Artificial Sequence: Synthetic oligonucleotide
  Sense strand starting at position 1987 of SEQ ID NO: 916068
uucuaugagugaucuaaac

SEQ ID NO: 1127955 - RNA, 19 nt, Artificial Sequence
  Description of Artificial Sequence: Synthetic oligonucleotide
  Antisense strand to SEQ ID NO: 1127954
guuuagaucacucauagaa

SEQ ID NO: 1127956 - RNA, 19 nt, Artificial Sequence
  Description of Artificial Sequence: Synthetic oligonucleotide
  Sense strand starting at position 2108 of SEQ ID NO: 916068
augucaagccuuuaaguua

SEQ ID NO: 1127957 - RNA, 19 nt, Artificial Sequence
  Description of Artificial Sequence: Synthetic oligonucleotide
  Antisense strand to SEQ ID NO: 1127956
uaacuuaaaggcuugacau

SEQ ID NO: 1127958 - RNA, 19 nt, Artificial Sequence
  Description of Artificial Sequence: Synthetic oligonucleotide
  Sense strand starting at position 2385 of SEQ ID NO: 916068
aaugaauguuagguaagua

SEQ ID NO: 1127959 - RNA, 19 nt, Artificial Sequence
  Description of Artificial Sequence: Synthetic oligonucleotide
  Antisense strand to SEQ ID NO: 1127958
uacuuaccuaacauucauu

SEQ ID NO: 1127960 - RNA, 19 nt, Artificial Sequence
  Description of Artificial Sequence: Synthetic oligonucleotide
  Sense strand starting at position 2389 of SEQ ID NO: 916068
aauguuagguaaguaaaga

SEQ ID NO: 1127961 - RNA, 19 nt, Artificial Sequence
  Description of Artificial Sequence: Synthetic oligonucleotide
  Antisense strand to SEQ ID NO: 1127960
ucuuuacuuaccuaacauu

SEQ ID NO: 1127962 - RNA, 19 nt, Artificial Sequence
  Description of Artificial Sequence: Synthetic oligonucleotide
  Sense strand starting at position 2508 of SEQ ID NO: 916068
gcugcuauggcugcuacaa

SEQ ID NO: 1127963 - RNA, 19 nt, Artificial Sequence
  Description of Artificial Sequence: Synthetic oligonucleotide
  Antisense strand to SEQ ID NO: 1127962
uuguagcagccauagcagc

SEQ ID NO: 1127964 - RNA, 19 nt, Artificial Sequence
  Description of Artificial Sequence: Synthetic oligonucleotide
  Sense strand starting at position 2612 of SEQ ID NO: 916068
aagagcuucuugucagaug

SEQ ID NO: 1127965 - RNA, 19 nt, Artificial Sequence
  Description of Artificial Sequence: Synthetic oligonucleotide
  Antisense strand to SEQ ID NO: 1127964
caucugacaagaagcucuu

SEQ ID NO: 1127966 - RNA, 19 nt, Artificial Sequence
  Description of Artificial Sequence: Synthetic oligonucleotide
  Sense strand starting at position 2628 of SEQ ID NO: 916068
auguguugauuucuuguau

SEQ ID NO: 1127967 - RNA, 19 nt, Artificial Sequence
  Description of Artificial Sequence: Synthetic oligonucleotide
  Antisense strand to SEQ ID NO: 1127966
auacaagaaaucaacacau

SEQ ID NO: 1127968 - RNA, 19 nt, Artificial Sequence
  Description of Artificial Sequence: Synthetic oligonucleotide
  Sense strand starting at position 2629 of SEQ ID NO: 916068
uguguugauuucuuguaua

SEQ ID NO: 1127969 - RNA, 19 nt, Artificial Sequence
  Description of Artificial Sequence: Synthetic oligonucleotide
  Antisense strand to SEQ ID NO: 1127968
uauacaagaaaucaacaca

SEQ ID NO: 1127970 - RNA, 19 nt, Artificial Sequence
  Description of Artificial Sequence: Synthetic oligonucleotide
  Sense strand starting at position 2746 of SEQ ID NO: 916068
guaacaagugccuagauga

SEQ ID NO: 1127971 - RNA, 19 nt, Artificial Sequence
  Description of Artificial Sequence: Synthetic oligonucleotide
  Antisense strand to SEQ ID NO: 1127970
ucaucuaggcacuuguuac

SEQ ID NO: 1127972 - RNA, 19 nt, Artificial Sequence
  Description of Artificial Sequence: Synthetic oligonucleotide
  Sense strand starting at position 3151 of SEQ ID NO: 916068
acaacaugugauugccaaa

SEQ ID NO: 1127973 - RNA, 19 nt, Artificial Sequence
  Description of Artificial Sequence: Synthetic oligonucleotide
  Antisense strand to SEQ ID NO: 1127972
uuuggcaaucacauguugu

SEQ ID NO: 1127974 - RNA, 19 nt, Artificial Sequence
  Description of Artificial Sequence: Synthetic oligonucleotide
  Sense strand starting at position 3366 of SEQ ID NO: 916068
ccagaaucucagcaucuga

SEQ ID NO: 1127975 - RNA, 19 nt, Artificial Sequence
  Description of Artificial Sequence: Synthetic oligonucleotide
  Antisense strand to SEQ ID NO: 1127974
ucagaugcugagauucugg

SEQ ID NO: 1127976 - RNA, 19 nt, Artificial Sequence
  Description of Artificial Sequence: Synthetic oligonucleotide
  Sense strand starting at position 3421 of SEQ ID NO: 916068
cuggaaugcugacucacuu

SEQ ID NO: 1127977 - RNA, 19 nt, Artificial Sequence
  Description of Artificial Sequence: Synthetic oligonucleotide
  Antisense strand to SEQ ID NO: 1127976
aagugagucagcauuccag

SEQ ID NO: 1127978 - RNA, 19 nt, Artificial Sequence
  Description of Artificial Sequence: Synthetic oligonucleotide
  Sense strand starting at position 3474 of SEQ ID NO: 916068
uccaguugccuugaacacu

SEQ ID NO: 1127979 - RNA, 19 nt, Artificial Sequence
  Description of Artificial Sequence: Synthetic oligonucleotide
  Antisense strand to SEQ ID NO: 1127978
aguguucaaggcaacugga

SEQ ID NO: 1127980 - RNA, 19 nt, Artificial Sequence
  Description of Artificial Sequence: Synthetic oligonucleotide
  Sense strand starting at position 3746 of SEQ ID NO: 916068
uggaccuuccagugaaacu

SEQ ID NO: 1127981 - RNA, 19 nt, Artificial Sequence
  Description of Artificial Sequence: Synthetic oligonucleotide
  Antisense strand to SEQ ID NO: 1127980
aguuucacuggaaggucca

SEQ ID NO: 1127982 - RNA, 19 nt, Artificial Sequence
  Description of Artificial Sequence: Synthetic oligonucleotide
  Sense strand starting at position 3796 of SEQ ID NO: 916068
gacaacaugccagguuauu

SEQ ID NO: 1127983 - RNA, 19 nt, Artificial Sequence
  Description of Artificial Sequence: Synthetic oligonucleotide
  Antisense strand to SEQ ID NO: 1127982
aauaaccuggcauguuguc

SEQ ID NO: 1127984 - RNA, 19 nt, Artificial Sequence
  Description of Artificial Sequence: Synthetic oligonucleotide
  Sense strand starting at position 3809 of SEQ ID NO: 916068
guuauuacugcuuacuaug

SEQ ID NO: 1127985 - RNA, 19 nt, Artificial Sequence
  Description of Artificial Sequence: Synthetic oligonucleotide
  Antisense strand to SEQ ID NO: 1127984
cauaguaagcaguaauaac

SEQ ID NO: 1127986 - RNA, 19 nt, Artificial Sequence
  Description of Artificial Sequence: Synthetic oligonucleotide
  Sense strand starting at position 3861 of SEQ ID NO: 916068
guucuuauuuaauuggcau

SEQ ID NO: 1127987 - RNA, 19 nt, Artificial Sequence
  Description of Artificial Sequence: Synthetic oligonucleotide
  Antisense strand to SEQ ID NO: 1127986
augccaauuaaauaagaac

SEQ ID NO: 1127988 - RNA, 19 nt, Artificial Sequence
  Description of Artificial Sequence: Synthetic oligonucleotide
  Sense strand starting at position 3874 of SEQ ID NO: 916068
uggcauaacuaacuaauga

SEQ ID NO: 1127989 - RNA, 19 nt, Artificial Sequence
  Description of Artificial Sequence: Synthetic oligonucleotide
  Antisense strand to SEQ ID NO: 1127988
ucauuaguuaguuaugcca

SEQ ID NO: 1127990 - RNA, 19 nt, Artificial Sequence
  Description of Artificial Sequence: Synthetic oligonucleotide
  Sense strand starting at position 100 of SEQ ID NO: 916069
caguaauaaguuuggucuu

SEQ ID NO: 1127991 - RNA, 19 nt, Artificial Sequence
  Description of Artificial Sequence: Synthetic oligonucleotide
  Antisense strand to SEQ ID NO: 1127990
aagaccaaacuuauuacug

SEQ ID NO: 1127992 - RNA, 19 nt, Artificial Sequence
  Description of Artificial Sequence: Synthetic oligonucleotide
  Sense strand starting at position 102 of SEQ ID NO: 916069
guaauaaguuuggucuuua

SEQ ID NO: 1127993 - RNA, 19 nt, Artificial Sequence
  Description of Artificial Sequence: Synthetic oligonucleotide
  Antisense strand to SEQ ID NO: 1127992
uaaagaccaaacuuauuac

SEQ ID NO: 1127994 - RNA, 19 nt, Artificial Sequence
  Description of Artificial Sequence: Synthetic oligonucleotide
  Sense strand starting at position 169 of SEQ ID NO: 916069
acaguuacuaacgguauga

SEQ ID NO: 1127995 - RNA, 19 nt, Artificial Sequence
  Description of Artificial Sequence: Synthetic oligonucleotide
  Antisense strand to SEQ ID NO: 1127994
ucauaccguuaguaacugu

SEQ ID NO: 1127996 - RNA, 19 nt, Artificial Sequence
  Description of Artificial Sequence: Synthetic oligonucleotide
  Sense strand starting at position 171 of SEQ ID NO: 916069
aguuacuaacgguaugaca

SEQ ID NO: 1127997 - RNA, 19 nt, Artificial Sequence
  Description of Artificial Sequence: Synthetic oligonucleotide
  Antisense strand to SEQ ID NO: 1127996
ugucauaccguuaguaacu

SEQ ID NO: 1127998 - RNA, 19 nt, Artificial Sequence
  Description of Artificial Sequence: Synthetic oligonucleotide
  Sense strand starting at position 173 of SEQ ID NO: 916069
uuacuaacgguaugacauu

SEQ ID NO: 1127999 - RNA, 19 nt, Artificial Sequence
  Description of Artificial Sequence: Synthetic oligonucleotide
  Antisense strand to SEQ ID NO: 1127998
aaugucauaccguuaguaa

SEQ ID NO: 1128000 - RNA, 19 nt, Artificial Sequence
  Description of Artificial Sequence: Synthetic oligonucleotide
  Sense strand starting at position 279 of SEQ ID NO: 916069
aauugaggauaacuguuau

SEQ ID NO: 1128001 - RNA, 19 nt, Artificial Sequence
  Description of Artificial Sequence: Synthetic oligonucleotide
  Antisense strand to SEQ ID NO: 1128000
auaacaguuauccucaauu

SEQ ID NO: 1128002 - RNA, 19 nt, Artificial Sequence
  Description of Artificial Sequence: Synthetic oligonucleotide
  Sense strand starting at position 486 of SEQ ID NO: 916069
uccuuauuaugguugcaua

SEQ ID NO: 1128003 - RNA, 19 nt, Artificial Sequence
  Description of Artificial Sequence: Synthetic oligonucleotide
  Antisense strand to SEQ ID NO: 1128002
uaugcaaccauaauaagga

SEQ ID NO: 1128004 - RNA, 19 nt, Artificial Sequence
  Description of Artificial Sequence: Synthetic oligonucleotide
  Sense strand starting at position 618 of SEQ ID NO: 916069
accaucucaugguuaggaa

SEQ ID NO: 1128005 - RNA, 19 nt, Artificial Sequence
  Description of Artificial Sequence: Synthetic oligonucleotide
  Antisense strand to SEQ ID NO: 1128004
uuccuaaccaugagauggu

SEQ ID NO: 1128006 - RNA, 19 nt, Artificial Sequence
  Description of Artificial Sequence: Synthetic oligonucleotide
  Sense strand starting at position 633 of SEQ ID NO: 916069
ggaaucacuuucuucgagu

SEQ ID NO: 1128007 - RNA, 19 nt, Artificial Sequence
  Description of Artificial Sequence: Synthetic oligonucleotide
  Antisense strand to SEQ ID NO: 1128006
acucgaagaaagugauucc

SEQ ID NO: 1128008 - RNA, 19 nt, Artificial Sequence
  Description of Artificial Sequence: Synthetic oligonucleotide
  Sense strand starting at position 634 of SEQ ID NO: 916069
gaaucacuuucuucgaguu

SEQ ID NO: 1128009 - RNA, 19 nt, Artificial Sequence
  Description of Artificial Sequence: Synthetic oligonucleotide
  Antisense strand to SEQ ID NO: 1128008
aacucgaagaaagugauuc

SEQ ID NO: 1128010 - RNA, 19 nt, Artificial Sequence
  Description of Artificial Sequence: Synthetic oligonucleotide
  Sense strand starting at position 744 of SEQ ID NO: 916069
uuguauguggaaggauauu

SEQ ID NO: 1128011 - RNA, 19 nt, Artificial Sequence
  Description of Artificial Sequence: Synthetic oligonucleotide
  Antisense strand to SEQ ID NO: 1128010
aauauccuuccacauacaa

SEQ ID NO: 1128012 - RNA, 19 nt, Artificial Sequence
  Description of Artificial Sequence: Synthetic oligonucleotide
  Sense strand starting at position 823 of SEQ ID NO: 916069
guguaccucugguuaauuu

SEQ ID NO: 1128013 - RNA, 19 nt, Artificial Sequence
  Description of Artificial Sequence: Synthetic oligonucleotide
  Antisense strand to SEQ ID NO: 1128012
aaauuaaccagagguacac

SEQ ID NO: 1128014 - RNA, 19 nt, Artificial Sequence
  Description of Artificial Sequence: Synthetic oligonucleotide
  Sense strand starting at position 945 of SEQ ID NO: 916069
uagaaagcguaacuauagu

SEQ ID NO: 1128015 - RNA, 19 nt, Artificial Sequence
  Description of Artificial Sequence: Synthetic oligonucleotide
  Antisense strand to SEQ ID NO: 1128014
acuauaguuacgcuuucua

SEQ ID NO: 1128016 - RNA, 19 nt, Artificial Sequence
  Description of Artificial Sequence: Synthetic oligonucleotide
  Sense strand starting at position 982 of SEQ ID NO: 916069
aguuucuuguacucuauau

SEQ ID NO: 1128017 - RNA, 19 nt, Artificial Sequence
  Description of Artificial Sequence: Synthetic oligonucleotide
  Antisense strand to SEQ ID NO: 1128016
auauagaguacaagaaacu

SEQ ID NO: 1128018 - RNA, 19 nt, Artificial Sequence
  Description of Artificial Sequence: Synthetic oligonucleotide
  Sense strand starting at position 1017 of SEQ ID NO: 916069
uuugcucuauacuugagau

SEQ ID NO: 1128019 - RNA, 19 nt, Artificial Sequence
  Description of Artificial Sequence: Synthetic oligonucleotide
  Antisense strand to SEQ ID NO: 1128018
aucucaaguauagagcaaa

SEQ ID NO: 1128020 - RNA, 19 nt, Artificial Sequence
  Description of Artificial Sequence: Synthetic oligonucleotide
  Sense strand starting at position 1019 of SEQ ID NO: 916069
ugcucuauacuugagauau

SEQ ID NO: 1128021 - RNA, 19 nt, Artificial Sequence
  Description of Artificial Sequence: Synthetic oligonucleotide
  Antisense strand to SEQ ID NO: 1128020
auaucucaaguauagagca

SEQ ID NO: 1128022 - RNA, 19 nt, Artificial Sequence
  Description of Artificial Sequence: Synthetic oligonucleotide
  Sense strand starting at position 1086 of SEQ ID NO: 916069
gucugucucagagaugcaa

SEQ ID NO: 1128023 - RNA, 19 nt, Artificial Sequence
  Description of Artificial Sequence: Synthetic oligonucleotide
  Antisense strand to SEQ ID NO: 1128022
uugcaucucugagacagac

SEQ ID NO: 1128024 - RNA, 19 nt, Artificial Sequence
  Description of Artificial Sequence: Synthetic oligonucleotide
  Sense strand starting at position 1148 of SEQ ID NO: 916069
uuaagagacuuucuuugua

SEQ ID NO: 1128025 - RNA, 19 nt, Artificial Sequence
  Description of Artificial Sequence: Synthetic oligonucleotide
  Antisense strand to SEQ ID NO: 1128024
uacaaagaaagucucuuaa

SEQ ID NO: 1128026 - RNA, 19 nt, Artificial Sequence
  Description of Artificial Sequence: Synthetic oligonucleotide
  Sense strand starting at position 1150 of SEQ ID NO: 916069
aagagacuuucuuuguaga

SEQ ID NO: 1128027 - RNA, 19 nt, Artificial Sequence
  Description of Artificial Sequence: Synthetic oligonucleotide
  Antisense strand to SEQ ID NO: 1128026
ucuacaaagaaagucucuu

SEQ ID NO: 1128028 - RNA, 19 nt, Artificial Sequence
  Description of Artificial Sequence: Synthetic oligonucleotide
  Sense strand starting at position 1151 of SEQ ID NO: 916069
agagacuuucuuuguagac

SEQ ID NO: 1128029 - RNA, 19 nt, Artificial Sequence
  Description of Artificial Sequence: Synthetic oligonucleotide
  Antisense strand to SEQ ID NO: 1128028
gucuacaaagaaagucucu

SEQ ID NO: 1128030 - RNA, 19 nt, Artificial Sequence
  Description of Artificial Sequence: Synthetic oligonucleotide
  Sense strand starting at position 1152 of SEQ ID NO: 916069
gagacuuucuuuguagacu

SEQ ID NO: 1128031 - RNA, 19 nt, Artificial Sequence
  Description of Artificial Sequence: Synthetic oligonucleotide
  Antisense strand to SEQ ID NO: 1128030
agucuacaaagaaagucuc

SEQ ID NO: 1128032 - RNA, 19 nt, Artificial Sequence
  Description of Artificial Sequence: Synthetic oligonucleotide
  Sense strand starting at position 1312 of SEQ ID NO: 916069
cuggauugaugguuucaga

SEQ ID NO: 1128033 - RNA, 19 nt, Artificial Sequence
  Description of Artificial Sequence: Synthetic oligonucleotide
  Antisense strand to SEQ ID NO: 1128032
ucugaaaccaucaauccag

SEQ ID NO: 1128034 - RNA, 19 nt, Artificial Sequence
  Description of Artificial Sequence: Synthetic oligonucleotide
  Sense strand starting at position 1550 of SEQ ID NO: 916069
uuguguuucccagacauac

SEQ ID NO: 1128035 - RNA, 19 nt, Artificial Sequence
  Description of Artificial Sequence: Synthetic oligonucleotide
  Antisense strand to SEQ ID NO: 1128034
guaugucugggaaacacaa

SEQ ID NO: 1128036 - RNA, 19 nt, Artificial Sequence
  Description of Artificial Sequence: Synthetic oligonucleotide
  Sense strand starting at position 2087 of SEQ ID NO: 916069
cacuuagagucuuucugga

SEQ ID NO: 1128037 - RNA, 19 nt, Artificial Sequence
  Description of Artificial Sequence: Synthetic oligonucleotide
  Antisense strand to SEQ ID NO: 1128036
uccagaaagacucuaagug

SEQ ID NO: 1128038 - RNA, 19 nt, Artificial Sequence
  Description of Artificial Sequence: Synthetic oligonucleotide
  Sense strand starting at position 2089 of SEQ ID NO: 916069
cuuagagucuuucuggaga

SEQ ID NO: 1128039 - RNA, 19 nt, Artificial Sequence
  Description of Artificial Sequence: Synthetic oligonucleotide
  Antisense strand to SEQ ID NO: 1128038
ucuccagaaagacucuaag

SEQ ID NO: 1128040 - RNA, 19 nt, Artificial Sequence
  Description of Artificial Sequence: Synthetic oligonucleotide
  Sense strand starting at position 2237 of SEQ ID NO: 916069
uuguuaguaccacauucua

SEQ ID NO: 1128041 - RNA, 19 nt, Artificial Sequence
  Description of Artificial Sequence: Synthetic oligonucleotide
  Antisense strand to SEQ ID NO: 1128040
uagaaugugguacuaacaa

SEQ ID NO: 1128042 - RNA, 19 nt, Artificial Sequence
  Description of Artificial Sequence: Synthetic oligonucleotide
  Sense strand starting at position 2253 of SEQ ID NO: 916069
cuaagaguaucauugacac

SEQ ID NO: 1128043 - RNA, 19 nt, Artificial Sequence
  Description of Artificial Sequence: Synthetic oligonucleotide
  Antisense strand to SEQ ID NO: 1128042
gugucaaugauacucuuag

SEQ ID NO: 1128044 - RNA, 19 nt, Artificial Sequence
  Description of Artificial Sequence: Synthetic oligonucleotide
  Sense strand starting at position 2305 of SEQ ID NO: 916069
auuaguuuccuguagcaug

SEQ ID NO: 1128045 - RNA, 19 nt, Artificial Sequence
  Description of Artificial Sequence: Synthetic oligonucleotide
  Antisense strand to SEQ ID NO: 1128044
caugcuacaggaaacuaau

SEQ ID NO: 1128046 - RNA, 19 nt, Artificial Sequence
  Description of Artificial Sequence: Synthetic oligonucleotide
  Sense strand starting at position 2427 of SEQ ID NO: 916069
uugcuagaaucuccagaaa

SEQ ID NO: 1128047 - RNA, 19 nt, Artificial Sequence
  Description of Artificial Sequence: Synthetic oligonucleotide
  Antisense strand to SEQ ID NO: 1128046
uuucuggagauucuagcaa

SEQ ID NO: 1128048 - RNA, 19 nt, Artificial Sequence
  Description of Artificial Sequence: Synthetic oligonucleotide
  Sense strand starting at position 2670 of SEQ ID NO: 916069
uguggaaucucuccauaga

SEQ ID NO: 1128049 - RNA, 19 nt, Artificial Sequence
  Description of Artificial Sequence: Synthetic oligonucleotide
  Antisense strand to SEQ ID NO: 1128048
ucuauggagagauuccaca

SEQ ID NO: 1128050 - RNA, 19 nt, Artificial Sequence
  Description of Artificial Sequence: Synthetic oligonucleotide
  Sense strand starting at position 2721 of SEQ ID NO: 916069
cucaacucuccgcaaauga

SEQ ID NO: 1128051 - RNA, 19 nt, Artificial Sequence
  Description of Artificial Sequence: Synthetic oligonucleotide
  Antisense strand to SEQ ID NO: 1128050
ucauuugcggagaguugag

SEQ ID NO: 1128052 - RNA, 19 nt, Artificial Sequence
  Description of Artificial Sequence: Synthetic oligonucleotide
  Sense strand starting at position 3002 of SEQ ID NO: 916069
uuugaucaaucuccuggau

SEQ ID NO: 1128053 - RNA, 19 nt, Artificial Sequence
  Description of Artificial Sequence: Synthetic oligonucleotide
  Antisense strand to SEQ ID NO: 1128052
auccaggagauugaucaaa

SEQ ID NO: 1128054 - RNA, 19 nt, Artificial Sequence
  Description of Artificial Sequence: Synthetic oligonucleotide
  Sense strand starting at position 3005 of SEQ ID NO: 916069
gaucaaucuccuggauguc

SEQ ID NO: 1128055 - RNA, 19 nt, Artificial Sequence
  Description of Artificial Sequence: Synthetic oligonucleotide
  Antisense strand to SEQ ID NO: 1128054
gacauccaggagauugauc

SEQ ID NO: 1128056 - RNA, 19 nt, Artificial Sequence
  Description of Artificial Sequence: Synthetic oligonucleotide
  Sense strand starting at position 3223 of SEQ ID NO: 916069
ggccauuccucugcaggaa

SEQ ID NO: 1128057 - RNA, 19 nt, Artificial Sequence
  Description of Artificial Sequence: Synthetic oligonucleotide
  Antisense strand to SEQ ID NO: 1128056
uuccugcagaggaauggcc

SEQ ID NO: 1128058 - RNA, 19 nt, Artificial Sequence
  Description of Artificial Sequence: Synthetic oligonucleotide
  Sense strand starting at position 3224 of SEQ ID NO: 916069
gccauuccucugcaggaaa

SEQ ID NO: 1128059 - RNA, 19 nt, Artificial Sequence
  Description of Artificial Sequence: Synthetic oligonucleotide
  Antisense strand to SEQ ID NO: 1128058
uuuccugcagaggaauggc

SEQ ID NO: 1128060 - RNA, 19 nt, Artificial Sequence
  Description of Artificial Sequence: Synthetic oligonucleotide
  Sense strand starting at position 3418 of SEQ ID NO: 916069
ccugcuaaguuucugaaac

SEQ ID NO: 1128061 - RNA, 19 nt, Artificial Sequence
  Description of Artificial Sequence: Synthetic oligonucleotide
  Antisense strand to SEQ ID NO: 1128060
guuucagaaacuuagcagg

SEQ ID NO: 1128062 - RNA, 19 nt, Artificial Sequence
  Description of Artificial Sequence: Synthetic oligonucleotide
  Sense strand starting at position 3546 of SEQ ID NO: 916069
ggaucugaguucccucacu

SEQ ID NO: 1128063 - RNA, 19 nt, Artificial Sequence
  Description of Artificial Sequence: Synthetic oligonucleotide
  Antisense strand to SEQ ID NO: 1128062
agugagggaacucagaucc

SEQ ID NO: 1128064 - RNA, 19 nt, Artificial Sequence
  Description of Artificial Sequence: Synthetic oligonucleotide
  Sense strand starting at position 3594 of SEQ ID NO: 916069
uaucaugcuuggucucuga

SEQ ID NO: 1128065 - RNA, 19 nt, Artificial Sequence
  Description of Artificial Sequence: Synthetic oligonucleotide
  Antisense strand to SEQ ID NO: 1128064
ucagagaccaagcaugaua

SEQ ID NO: 1128066 - RNA, 19 nt, Artificial Sequence
  Description of Artificial Sequence: Synthetic oligonucleotide
  Sense strand starting at position 3597 of SEQ ID NO: 916069
caugcuuggucucugaaac

SEQ ID NO: 1128067 - RNA, 19 nt, Artificial Sequence
  Description of Artificial Sequence: Synthetic oligonucleotide
  Antisense strand to SEQ ID NO: 1128066
guuucagagaccaagcaug

SEQ ID NO: 1128068 - RNA, 19 nt, Artificial Sequence
  Description of Artificial Sequence: Synthetic oligonucleotide
  Sense strand starting at position 3759 of SEQ ID NO: 916069
gaguacucugcucagccau

SEQ ID NO: 1128069 - RNA, 19 nt, Artificial Sequence
  Description of Artificial Sequence: Synthetic oligonucleotide
  Antisense strand to SEQ ID NO: 1128068
auggcugagcagaguacuc

SEQ ID NO: 1128070 - RNA, 19 nt, Artificial Sequence
  Description of Artificial Sequence: Synthetic oligonucleotide
  Sense strand starting at position 584 of SEQ ID NO: 916070
gccacugcugaguaaucuu

SEQ ID NO: 1128071 - RNA, 19 nt, Artificial Sequence
  Description of Artificial Sequence: Synthetic oligonucleotide
  Antisense strand to SEQ ID NO: 1128070
aagauuacucagcaguggc

SEQ ID NO: 1128072 - RNA, 19 nt, Artificial Sequence
  Description of Artificial Sequence: Synthetic oligonucleotide
  Sense strand starting at position 623 of SEQ ID NO: 916070
agccuaugcuacucaaaug

SEQ ID NO: 1128073 - RNA, 19 nt, Artificial Sequence
  Description of Artificial Sequence: Synthetic oligonucleotide
  Antisense strand to SEQ ID NO: 1128072
cauuugaguagcauaggcu

SEQ ID NO: 1128074 - RNA, 19 nt, Artificial Sequence
  Description of Artificial Sequence: Synthetic oligonucleotide
  Sense strand starting at position 638 of SEQ ID NO: 916070
aauggagauguuugguuga

SEQ ID NO: 1128075 - RNA, 19 nt, Artificial Sequence
  Description of Artificial Sequence: Synthetic oligonucleotide
  Antisense strand to SEQ ID NO: 1128074
ucaaccaaacaucuccauu

SEQ ID NO: 1128076 - RNA, 19 nt, Artificial Sequence
  Description of Artificial Sequence: Synthetic oligonucleotide
  Sense strand starting at position 640 of SEQ ID NO: 916070
uggagauguuugguugaag

SEQ ID NO: 1128077 - RNA, 19 nt, Artificial Sequence
  Description of Artificial Sequence: Synthetic oligonucleotide
  Antisense strand to SEQ ID NO: 1128076
cuucaaccaaacaucucca

SEQ ID NO: 1128078 - RNA, 19 nt, Artificial Sequence
  Description of Artificial Sequence: Synthetic oligonucleotide
  Sense strand starting at position 641 of SEQ ID NO: 916070
ggagauguuugguugaagg

SEQ ID NO: 1128079 - RNA, 19 nt, Artificial Sequence
  Description of Artificial Sequence: Synthetic oligonucleotide
  Antisense strand to SEQ ID NO: 1128078
ccuucaaccaaacaucucc

SEQ ID NO: 1128080 - RNA, 19 nt, Artificial Sequence
  Description of Artificial Sequence: Synthetic oligonucleotide
  Sense strand starting at position 652 of SEQ ID NO: 916070
guugaaggaugguuacaac

SEQ ID NO: 1128081 - RNA, 19 nt, Artificial Sequence
  Description of Artificial Sequence: Synthetic oligonucleotide
  Antisense strand to SEQ ID NO: 1128080
guuguaaccauccuucaac

SEQ ID NO: 1128082 - RNA, 19 nt, Artificial Sequence
  Description of Artificial Sequence: Synthetic oligonucleotide
  Sense strand starting at position 700 of SEQ ID NO: 916070
gaaccuagguauuccagaa

SEQ ID NO: 1128083 - RNA, 19 nt, Artificial Sequence
  Description of Artificial Sequence: Synthetic oligonucleotide
  Antisense strand to SEQ ID NO: 1128082
uucuggaauaccuagguuc

SEQ ID NO: 1128084 - RNA, 19 nt, Artificial Sequence
  Description of Artificial Sequence: Synthetic oligonucleotide
  Sense strand starting at position 712 of SEQ ID NO: 916070
uccagaaucuucccagagu

SEQ ID NO: 1128085 - RNA, 19 nt, Artificial Sequence
  Description of Artificial Sequence: Synthetic oligonucleotide
  Antisense strand to SEQ ID NO: 1128084
acucugggaagauucugga

SEQ ID NO: 1128086 - RNA, 19 nt, Artificial Sequence
  Description of Artificial Sequence: Synthetic oligonucleotide
  Sense strand starting at position 737 of SEQ ID NO: 916070
gagauuuaauuguagagua

SEQ ID NO: 1128087 - RNA, 19 nt, Artificial Sequence
  Description of Artificial Sequence: Synthetic oligonucleotide
  Antisense strand to SEQ ID NO: 1128086
uacucuacaauuaaaucuc

SEQ ID NO: 1128088 - RNA, 19 nt, Artificial Sequence
  Description of Artificial Sequence: Synthetic oligonucleotide
  Sense strand starting at position 1076 of SEQ ID NO: 916070
gcagccauccuuugagaua

SEQ ID NO: 1128089 - RNA, 19 nt, Artificial Sequence
  Description of Artificial Sequence: Synthetic oligonucleotide
  Antisense strand to SEQ ID NO: 1128088
uaucucaaaggauggcugc

SEQ ID NO: 1128090 - RNA, 19 nt, Artificial Sequence
  Description of Artificial Sequence: Synthetic oligonucleotide
  Sense strand starting at position 1112 of SEQ ID NO: 916070
augagauccuuucuaagcu

SEQ ID NO: 1128091 - RNA, 19 nt, Artificial Sequence
  Description of Artificial Sequence: Synthetic oligonucleotide
  Antisense strand to SEQ ID NO: 1128090
agcuuagaaaggaucucau

SEQ ID NO: 1128092 - RNA, 19 nt, Artificial Sequence
  Description of Artificial Sequence: Synthetic oligonucleotide
  Sense strand starting at position 1130 of SEQ ID NO: 916070
uguauacuugcugaaacaa

SEQ ID NO: 1128093 - RNA, 19 nt, Artificial Sequence
  Description of Artificial Sequence: Synthetic oligonucleotide
  Antisense strand to SEQ ID NO: 1128092
uuguuucagcaaguauaca

SEQ ID NO: 1128094 - RNA, 19 nt, Artificial Sequence
  Description of Artificial Sequence: Synthetic oligonucleotide
  Sense strand starting at position 1239 of SEQ ID NO: 916070
uuccucugucuuggauuaa

SEQ ID NO: 1128095 - RNA, 19 nt, Artificial Sequence
  Description of Artificial Sequence: Synthetic oligonucleotide
  Antisense strand to SEQ ID NO: 1128094
uuaauccaagacagaggaa

SEQ ID NO: 1128096 - RNA, 19 nt, Artificial Sequence
  Description of Artificial Sequence: Synthetic oligonucleotide
  Sense strand starting at position 1271 of SEQ ID NO: 916070
aggguauuccuuugaguau

SEQ ID NO: 1128097 - RNA, 19 nt, Artificial Sequence
  Description of Artificial Sequence: Synthetic oligonucleotide
  Antisense strand to SEQ ID NO: 1128096
auacucaaaggaauacccu

SEQ ID NO: 1128098 - RNA, 19 nt, Artificial Sequence
  Description of Artificial Sequence: Synthetic oligonucleotide
  Sense strand starting at position 1422 of SEQ ID NO: 916070
gugacaucccagcagaaug

SEQ ID NO: 1128099 - RNA, 19 nt, Artificial Sequence
  Description of Artificial Sequence: Synthetic oligonucleotide
  Antisense strand to SEQ ID NO: 1128098
cauucugcugggaugucac

SEQ ID NO: 1128100 - RNA, 19 nt, Artificial Sequence
  Description of Artificial Sequence: Synthetic oligonucleotide
  Sense strand starting at position 1432 of SEQ ID NO: 916070
agcagaaugcuuugaguau

SEQ ID NO: 1128101 - RNA, 19 nt, Artificial Sequence
  Description of Artificial Sequence: Synthetic oligonucleotide
  Antisense strand to SEQ ID NO: 1128100
auacucaaagcauucugcu

SEQ ID NO: 1128102 - RNA, 19 nt, Artificial Sequence
  Description of Artificial Sequence: Synthetic oligonucleotide
  Sense strand starting at position 1441 of SEQ ID NO: 916070
cuuugaguaugaccagagu

SEQ ID NO: 1128103 - RNA, 19 nt, Artificial Sequence
  Description of Artificial Sequence: Synthetic oligonucleotide
  Antisense strand to SEQ ID NO: 1128102
acucuggucauacucaaag

SEQ ID NO: 1128104 - RNA, 19 nt, Artificial Sequence
  Description of Artificial Sequence: Synthetic oligonucleotide
  Sense strand starting at position 1447 of SEQ ID NO: 916070
guaugaccagaguauugca

SEQ ID NO: 1128105 - RNA, 19 nt, Artificial Sequence
  Description of Artificial Sequence: Synthetic oligonucleotide
  Antisense strand to SEQ ID NO: 1128104
ugcaauacucuggucauac

SEQ ID NO: 1128106 - RNA, 19 nt, Artificial Sequence
  Description of Artificial Sequence: Synthetic oligonucleotide
  Sense strand starting at position 1714 of SEQ ID NO: 916070
gaggcaggaucugcuguaa

SEQ ID NO: 1128107 - RNA, 19 nt, Artificial Sequence
  Description of Artificial Sequence: Synthetic oligonucleotide
  Antisense strand to SEQ ID NO: 1128106
uuacagcagauccugccuc

SEQ ID NO: 1128108 - RNA, 19 nt, Artificial Sequence
  Description of Artificial Sequence: Synthetic oligonucleotide
  Sense strand starting at position 1718 of SEQ ID NO: 916070
caggaucugcuguaacaag

SEQ ID NO: 1128109 - RNA, 19 nt, Artificial Sequence
  Description of Artificial Sequence: Synthetic oligonucleotide
  Antisense strand to SEQ ID NO: 1128108
cuuguuacagcagauccug

SEQ ID NO: 1128110 - RNA, 19 nt, Artificial Sequence
  Description of Artificial Sequence: Synthetic oligonucleotide
  Sense strand starting at position 1772 of SEQ ID NO: 916070
gggauuggcuucuuuaaag

SEQ ID NO: 1128111 - RNA, 19 nt, Artificial Sequence
  Description of Artificial Sequence: Synthetic oligonucleotide
  Antisense strand to SEQ ID NO: 1128110
cuuuaaagaagccaauccc

SEQ ID NO: 1128112 - RNA, 19 nt, Artificial Sequence
  Description of Artificial Sequence: Synthetic oligonucleotide
  Sense strand starting at position 1947 of SEQ ID NO: 916070
uggcacacgucuguaauuu

SEQ ID NO: 1128113 - RNA, 19 nt, Artificial Sequence
  Description of Artificial Sequence: Synthetic oligonucleotide
  Antisense strand to SEQ ID NO: 1128112
aaauuacagacgugugcca

SEQ ID NO: 1128114 - RNA, 19 nt, Artificial Sequence
  Description of Artificial Sequence: Synthetic oligonucleotide
  Sense strand starting at position 1948 of SEQ ID NO: 916070
ggcacacgucuguaauuuc

SEQ ID NO: 1128115 - RNA, 19 nt, Artificial Sequence
  Description of Artificial Sequence: Synthetic oligonucleotide
  Antisense strand to SEQ ID NO: 1128114
gaaauuacagacgugugcc

SEQ ID NO: 1128116 - RNA, 19 nt, Artificial Sequence
  Description of Artificial Sequence: Synthetic oligonucleotide
  Sense strand starting at position 2183 of SEQ ID NO: 916070
gaaacuggcugagugagaa

SEQ ID NO: 1128117 - RNA, 19 nt, Artificial Sequence
  Description of Artificial Sequence: Synthetic oligonucleotide
  Antisense strand to SEQ ID NO: 1128116
uucucacucagccaguuuc

SEQ ID NO: 1128118 - RNA, 19 nt, Artificial Sequence
  Description of Artificial Sequence: Synthetic oligonucleotide
  Sense strand starting at position 2227 of SEQ ID NO: 916070
uggagucuuucucugguca

SEQ ID NO: 1128119 - RNA, 19 nt, Artificial Sequence
  Description of Artificial Sequence: Synthetic oligonucleotide
  Antisense strand to SEQ ID NO: 1128118
ugaccagagaaagacucca

SEQ ID NO: 1128120 - RNA, 19 nt, Artificial Sequence
  Description of Artificial Sequence: Synthetic oligonucleotide
  Sense strand starting at position 2696 of SEQ ID NO: 916070
gggucucgcuauguuauuu

SEQ ID NO: 1128121 - RNA, 19 nt, Artificial Sequence
  Description of Artificial Sequence: Synthetic oligonucleotide
  Antisense strand to SEQ ID NO: 1128120
aaauaacauagcgagaccc

SEQ ID NO: 1128122 - RNA, 19 nt, Artificial Sequence
  Description of Artificial Sequence: Synthetic oligonucleotide
  Sense strand starting at position 2704 of SEQ ID NO: 916070
cuauguuauuucccaggcu

SEQ ID NO: 1128123 - RNA, 19 nt, Artificial Sequence
  Description of Artificial Sequence: Synthetic oligonucleotide
  Antisense strand to SEQ ID NO: 1128122
agccugggaaauaacauag

SEQ ID NO: 1128124 - RNA, 19 nt, Artificial Sequence
  Description of Artificial Sequence: Synthetic oligonucleotide
  Sense strand starting at position 2707 of SEQ ID NO: 916070
uguuauuucccaggcugau

SEQ ID NO: 1128125 - RNA, 19 nt, Artificial Sequence
  Description of Artificial Sequence: Synthetic oligonucleotide
  Antisense strand to SEQ ID NO: 1128124
aucagccugggaaauaaca

SEQ ID NO: 1128126 - RNA, 19 nt, Artificial Sequence
  Description of Artificial Sequence: Synthetic oligonucleotide
  Sense strand starting at position 2925 of SEQ ID NO: 916070
cauaguucccgagagucag

SEQ ID NO: 1128127 - RNA, 19 nt, Artificial Sequence
  Description of Artificial Sequence: Synthetic oligonucleotide
  Antisense strand to SEQ ID NO: 1128126
cugacucucgggaacuaug

SEQ ID NO: 1128128 - RNA, 19 nt, Artificial Sequence
  Description of Artificial Sequence: Synthetic oligonucleotide
  Sense strand starting at position 2931 of SEQ ID NO: 916070
ucccgagagucagcaauuu

SEQ ID NO: 1128129 - RNA, 19 nt, Artificial Sequence
  Description of Artificial Sequence: Synthetic oligonucleotide
  Antisense strand to SEQ ID NO: 1128128
aaauugcugacucucggga

SEQ ID NO: 1128130 - RNA, 19 nt, Artificial Sequence
  Description of Artificial Sequence: Synthetic oligonucleotide
  Sense strand starting at position 2965 of SEQ ID NO: 916070
gggugauucugguuuggau

SEQ ID NO: 1128131 - RNA, 19 nt, Artificial Sequence
  Description of Artificial Sequence: Synthetic oligonucleotide
  Antisense strand to SEQ ID NO: 1128130
auccaaaccagaaucaccc

SEQ ID NO: 1128132 - RNA, 19 nt, Artificial Sequence
  Description of Artificial Sequence: Synthetic oligonucleotide
  Sense strand starting at position 3009 of SEQ ID NO: 916070
ugagcucacucugcaauaa

SEQ ID NO: 1128133 - RNA, 19 nt, Artificial Sequence
  Description of Artificial Sequence: Synthetic oligonucleotide
  Antisense strand to SEQ ID NO: 1128132
uuauugcagagugagcuca

SEQ ID NO: 1128134 - RNA, 19 nt, Artificial Sequence
  Description of Artificial Sequence: Synthetic oligonucleotide
  Sense strand starting at position 3063 of SEQ ID NO: 916070
ucucuuuggucauccucua

SEQ ID NO: 1128135 - RNA, 19 nt, Artificial Sequence
  Description of Artificial Sequence: Synthetic oligonucleotide
  Antisense strand to SEQ ID NO: 1128134
uagaggaugaccaaagaga

SEQ ID NO: 1128136 - RNA, 19 nt, Artificial Sequence
  Description of Artificial Sequence: Synthetic oligonucleotide
  Sense strand starting at position 3081 of SEQ ID NO: 916070
agcggauuagccuggauuu

SEQ ID NO: 1128137 - RNA, 19 nt, Artificial Sequence
  Description of Artificial Sequence: Synthetic oligonucleotide
  Antisense strand to SEQ ID NO: 1128136
aaauccaggcuaauccgcu

SEQ ID NO: 1128138 - RNA, 19 nt, Artificial Sequence
  Description of Artificial Sequence: Synthetic oligonucleotide
  Sense strand starting at position 3082 of SEQ ID NO: 916070
gcggauuagccuggauuua

SEQ ID NO: 1128139 - RNA, 19 nt, Artificial Sequence
  Description of Artificial Sequence: Synthetic oligonucleotide
  Antisense strand to SEQ ID NO: 1128138
uaaauccaggcuaauccgc

SEQ ID NO: 1128140 - RNA, 19 nt, Artificial Sequence
  Description of Artificial Sequence: Synthetic oligonucleotide
  Sense strand starting at position 3115 of SEQ ID NO: 916070
ggaggauuccaguaguagc

SEQ ID NO: 1128141 - RNA, 19 nt, Artificial Sequence
  Description of Artificial Sequence: Synthetic oligonucleotide
  Antisense strand to SEQ ID NO: 1128140
gcuacuacuggaauccucc

SEQ ID NO: 1128142 - RNA, 19 nt, Artificial Sequence
  Description of Artificial Sequence: Synthetic oligonucleotide
  Sense strand starting at position 3170 of SEQ ID NO: 916070
accugugugccaggaaauc

SEQ ID NO: 1128143 - RNA, 19 nt, Artificial Sequence
  Description of Artificial Sequence: Synthetic oligonucleotide
  Antisense strand to SEQ ID NO: 1128142
gauuuccuggcacacaggu

SEQ ID NO: 1128144 - RNA, 19 nt, Artificial Sequence
  Description of Artificial Sequence: Synthetic oligonucleotide
  Sense strand starting at position 3448 of SEQ ID NO: 916070
ucaccugagccuuagagau

SEQ ID NO: 1128145 - RNA, 19 nt, Artificial Sequence
  Description of Artificial Sequence: Synthetic oligonucleotide
  Antisense strand to SEQ ID NO: 1128144
aucucuaaggcucagguga

SEQ ID NO: 1128146 - RNA, 19 nt, Artificial Sequence
  Description of Artificial Sequence: Synthetic oligonucleotide
  Sense strand starting at position 3725 of SEQ ID NO: 916070
accugaagucaggagcuua

SEQ ID NO: 1128147 - RNA, 19 nt, Artificial Sequence
  Description of Artificial Sequence: Synthetic oligonucleotide
  Antisense strand to SEQ ID NO: 1128146
uaagcuccugacuucaggu

SEQ ID NO: 1128148 - RNA, 19 nt, Artificial Sequence
  Description of Artificial Sequence: Synthetic oligonucleotide
  Sense strand starting at position 3811 of SEQ ID NO: 916070
ggcacuagccuguaauccu

SEQ ID NO: 1128149 - RNA, 19 nt, Artificial Sequence
  Description of Artificial Sequence: Synthetic oligonucleotide
  Antisense strand to SEQ ID NO: 1128148
aggauuacaggcuagugcc

SEQ ID NO: 1128150 - RNA, 19 nt, Artificial Sequence
  Description of Artificial Sequence: Synthetic oligonucleotide
  Sense strand starting at position 55 of SEQ ID NO: 916071
ucaagaauguagcucugaa

SEQ ID NO: 1128151 - RNA, 19 nt, Artificial Sequence
  Description of Artificial Sequence: Synthetic oligonucleotide
  Antisense strand to SEQ ID NO: 1128150
uucagagcuacauucuuga

SEQ ID NO: 1128152 - RNA, 19 nt, Artificial Sequence
  Description of Artificial Sequence: Synthetic oligonucleotide
  Sense strand starting at position 79 of SEQ ID NO: 916071
agugcaagacccugaagau

SEQ ID NO: 1128153 - RNA, 19 nt, Artificial Sequence
  Description of Artificial Sequence: Synthetic oligonucleotide
  Antisense strand to SEQ ID NO: 1128152
aucuucagggucuugcacu

SEQ ID NO: 1128154 - RNA, 19 nt, Artificial Sequence
  Description of Artificial Sequence: Synthetic oligonucleotide
  Sense strand starting at position 616 of SEQ ID NO: 916071
guuagagucaaggaacgua

SEQ ID NO: 1128155 - RNA, 19 nt, Artificial Sequence
  Description of Artificial Sequence: Synthetic oligonucleotide
  Antisense strand to SEQ ID NO: 1128154
uacguuccuugacucuaac

SEQ ID NO: 1128156 - RNA, 19 nt, Artificial Sequence
  Description of Artificial Sequence: Synthetic oligonucleotide
  Sense strand starting at position 628 of SEQ ID NO: 916071
gaacguaugaaaggaaagu

SEQ ID NO: 1128157 - RNA, 19 nt, Artificial Sequence
  Description of Artificial Sequence: Synthetic oligonucleotide
  Antisense strand to SEQ ID NO: 1128156
acuuuccuuucauacguuc

SEQ ID NO: 1128158 - RNA, 19 nt, Artificial Sequence
  Description of Artificial Sequence: Synthetic oligonucleotide
  Sense strand starting at position 639 of SEQ ID NO: 916071
aggaaagucuucucauaau

SEQ ID NO: 1128159 - RNA, 19 nt, Artificial Sequence
  Description of Artificial Sequence: Synthetic oligonucleotide
  Antisense strand to SEQ ID NO: 1128158
auuaugagaagacuuuccu

SEQ ID NO: 1128160 - RNA, 19 nt, Artificial Sequence
  Description of Artificial Sequence: Synthetic oligonucleotide
  Sense strand starting at position 809 of SEQ ID NO: 916071
aagauugugguauaacuuu

SEQ ID NO: 1128161 - RNA, 19 nt, Artificial Sequence
  Description of Artificial Sequence: Synthetic oligonucleotide
  Antisense strand to SEQ ID NO: 1128160
aaaguuauaccacaaucuu

SEQ ID NO: 1128162 - RNA, 19 nt, Artificial Sequence
  Description of Artificial Sequence: Synthetic oligonucleotide
  Sense strand starting at position 889 of SEQ ID NO: 916071
uaagcacucuuagugagaa

SEQ ID NO: 1128163 - RNA, 19 nt, Artificial Sequence
  Description of Artificial Sequence: Synthetic oligonucleotide
  Antisense strand to SEQ ID NO: 1128162
uucucacuaagagugcuua

SEQ ID NO: 1128164 - RNA, 19 nt, Artificial Sequence
  Description of Artificial Sequence: Synthetic oligonucleotide
  Sense strand starting at position 958 of SEQ ID NO: 916071
ucaauuuaguggcauuuau

SEQ ID NO: 1128165 - RNA, 19 nt, Artificial Sequence
  Description of Artificial Sequence: Synthetic oligonucleotide
  Antisense strand to SEQ ID NO: 1128164
auaaaugccacuaaauuga

SEQ ID NO: 1128166 - RNA, 19 nt, Artificial Sequence
  Description of Artificial Sequence: Synthetic oligonucleotide
  Sense strand starting at position 1015 of SEQ ID NO: 916071
auuacaggugucuauucua

SEQ ID NO: 1128167 - RNA, 19 nt, Artificial Sequence
  Description of Artificial Sequence: Synthetic oligonucleotide
  Antisense strand to SEQ ID NO: 1128166
uagaauagacaccuguaau

SEQ ID NO: 1128168 - RNA, 19 nt, Artificial Sequence
  Description of Artificial Sequence: Synthetic oligonucleotide
  Sense strand starting at position 1018 of SEQ ID NO: 916071
acaggugucuauucuauag

SEQ ID NO: 1128169 - RNA, 19 nt, Artificial Sequence
  Description of Artificial Sequence: Synthetic oligonucleotide
  Antisense strand to SEQ ID NO: 1128168
cuauagaauagacaccugu

SEQ ID NO: 1128170 - RNA, 19 nt, Artificial Sequence
  Description of Artificial Sequence: Synthetic oligonucleotide
  Sense strand starting at position 1022 of SEQ ID NO: 916071
gugucuauucuauagaaau

SEQ ID NO: 1128171 - RNA, 19 nt, Artificial Sequence
  Description of Artificial Sequence: Synthetic oligonucleotide
  Antisense strand to SEQ ID NO: 1128170
auuucuauagaauagacac

SEQ ID NO: 1128172 - RNA, 19 nt, Artificial Sequence
  Description of Artificial Sequence: Synthetic oligonucleotide
  Sense strand starting at position 1035 of SEQ ID NO: 916071
agaaauaauugagcuuguu

SEQ ID NO: 1128173 - RNA, 19 nt, Artificial Sequence
  Description of Artificial Sequence: Synthetic oligonucleotide
  Antisense strand to SEQ ID NO: 1128172
aacaagcucaauuauuucu

SEQ ID NO: 1128174 - RNA, 19 nt, Artificial Sequence
  Description of Artificial Sequence: Synthetic oligonucleotide
  Sense strand starting at position 1196 of SEQ ID NO: 916071
gcauguaaucaguauauau

SEQ ID NO: 1128175 - RNA, 19 nt, Artificial Sequence
  Description of Artificial Sequence: Synthetic oligonucleotide
  Antisense strand to SEQ ID NO: 1128174
auauauacugauuacaugc

SEQ ID NO: 1128176 - RNA, 19 nt, Artificial Sequence
  Description of Artificial Sequence: Synthetic oligonucleotide
  Sense strand starting at position 1263 of SEQ ID NO: 916071
auaggaucacacugugauu

SEQ ID NO: 1128177 - RNA, 19 nt, Artificial Sequence
  Description of Artificial Sequence: Synthetic oligonucleotide
  Antisense strand to SEQ ID NO: 1128176
aaucacagugugauccuau

SEQ ID NO: 1128178 - RNA, 19 nt, Artificial Sequence
  Description of Artificial Sequence: Synthetic oligonucleotide
  Sense strand starting at position 1401 of SEQ ID NO: 916071
acuggugucacuuaaguca

SEQ ID NO: 1128179 - RNA, 19 nt, Artificial Sequence
  Description of Artificial Sequence: Synthetic oligonucleotide
  Antisense strand to SEQ ID NO: 1128178
ugacuuaagugacaccagu

SEQ ID NO: 1128180 - RNA, 19 nt, Artificial Sequence
  Description of Artificial Sequence: Synthetic oligonucleotide
  Sense strand starting at position 1765 of SEQ ID NO: 916071
gagagaaaguacucacguu

SEQ ID NO: 1128181 - RNA, 19 nt, Artificial Sequence
  Description of Artificial Sequence: Synthetic oligonucleotide
  Antisense strand to SEQ ID NO: 1128180
aacgugaguacuuucucuc

SEQ ID NO: 1128182 - RNA, 19 nt, Artificial Sequence
  Description of Artificial Sequence: Synthetic oligonucleotide
  Sense strand starting at position 1766 of SEQ ID NO: 916071
agagaaaguacucacguuu

SEQ ID NO: 1128183 - RNA, 19 nt, Artificial Sequence
  Description of Artificial Sequence: Synthetic oligonucleotide
  Antisense strand to SEQ ID NO: 1128182
aaacgugaguacuuucucu

SEQ ID NO: 1128184 - RNA, 19 nt, Artificial Sequence
  Description of Artificial Sequence: Synthetic oligonucleotide
  Sense strand starting at position 2016 of SEQ ID NO: 916071
ugauacauuccgggagaug

SEQ ID NO: 1128185 - RNA, 19 nt, Artificial Sequence
  Description of Artificial Sequence: Synthetic oligonucleotide
  Antisense strand to SEQ ID NO: 1128184
caucucccggaauguauca

SEQ ID NO: 1128186 - RNA, 19 nt, Artificial Sequence
  Description of Artificial Sequence: Synthetic oligonucleotide
  Sense strand starting at position 2112 of SEQ ID NO: 916071
aucacuagaucagugugaa

SEQ ID NO: 1128187 - RNA, 19 nt, Artificial Sequence
  Description of Artificial Sequence: Synthetic oligonucleotide
  Antisense strand to SEQ ID NO: 1128186
uucacacugaucuagugau

SEQ ID NO: 1128188 - RNA, 19 nt, Artificial Sequence
  Description of Artificial Sequence: Synthetic oligonucleotide
  Sense strand starting at position 2113 of SEQ ID NO: 916071
ucacuagaucagugugaaa

SEQ ID NO: 1128189 - RNA, 19 nt, Artificial Sequence
  Description of Artificial Sequence: Synthetic oligonucleotide
  Antisense strand to SEQ ID NO: 1128188
uuucacacugaucuaguga

SEQ ID NO: 1128190 - RNA, 19 nt, Artificial Sequence
  Description of Artificial Sequence: Synthetic oligonucleotide
  Sense strand starting at position 2115 of SEQ ID NO: 916071
acuagaucagugugaaaug

SEQ ID NO: 1128191 - RNA, 19 nt, Artificial Sequence
  Description of Artificial Sequence: Synthetic oligonucleotide
  Antisense strand to SEQ ID NO: 1128190
cauuucacacugaucuagu

SEQ ID NO: 1128192 - RNA, 19 nt, Artificial Sequence
  Description of Artificial Sequence: Synthetic oligonucleotide
  Sense strand starting at position 2122 of SEQ ID NO: 916071
cagugugaaauguggaauu

SEQ ID NO: 1128193 - RNA, 19 nt, Artificial Sequence
  Description of Artificial Sequence: Synthetic oligonucleotide
  Antisense strand to SEQ ID NO: 1128192
aauuccacauuucacacug

SEQ ID NO: 1128194 - RNA, 19 nt, Artificial Sequence
  Description of Artificial Sequence: Synthetic oligonucleotide
  Sense strand starting at position 2475 of SEQ ID NO: 916071
agaacuuucuaggugagca

SEQ ID NO: 1128195 - RNA, 19 nt, Artificial Sequence
  Description of Artificial Sequence: Synthetic oligonucleotide
  Antisense strand to SEQ ID NO: 1128194
ugcucaccuagaaaguucu

SEQ ID NO: 1128196 - RNA, 19 nt, Artificial Sequence
  Description of Artificial Sequence: Synthetic oligonucleotide
  Sense strand starting at position 2526 of SEQ ID NO: 916071
auguaagauucugugauaa

SEQ ID NO: 1128197 - RNA, 19 nt, Artificial Sequence
  Description of Artificial Sequence: Synthetic oligonucleotide
  Antisense strand to SEQ ID NO: 1128196
uuaucacagaaucuuacau

SEQ ID NO: 1128198 - RNA, 19 nt, Artificial Sequence
  Description of Artificial Sequence: Synthetic oligonucleotide
  Sense strand starting at position 2576 of SEQ ID NO: 916071
agcacuguuagggagugaa

SEQ ID NO: 1128199 - RNA, 19 nt, Artificial Sequence
  Description of Artificial Sequence: Synthetic oligonucleotide
  Antisense strand to SEQ ID NO: 1128198
uucacucccuaacagugcu

SEQ ID NO: 1128200 - RNA, 19 nt, Artificial Sequence
  Description of Artificial Sequence: Synthetic oligonucleotide
  Sense strand starting at position 2579 of SEQ ID NO: 916071
acuguuagggagugaaugu

SEQ ID NO: 1128201 - RNA, 19 nt, Artificial Sequence
  Description of Artificial Sequence: Synthetic oligonucleotide
  Antisense strand to SEQ ID NO: 1128200
acauucacucccuaacagu

SEQ ID NO: 1128202 - RNA, 19 nt, Artificial Sequence
  Description of Artificial Sequence: Synthetic oligonucleotide
  Sense strand starting at position 2670 of SEQ ID NO: 916071
ggagguaauuagguuuaau

SEQ ID NO: 1128203 - RNA, 19 nt, Artificial Sequence
  Description of Artificial Sequence: Synthetic oligonucleotide
  Antisense strand to SEQ ID NO: 1128202
auuaaaccuaauuaccucc

SEQ ID NO: 1128204 - RNA, 19 nt, Artificial Sequence
  Description of Artificial Sequence: Synthetic oligonucleotide
  Sense strand starting at position 2717 of SEQ ID NO: 916071
auggaauuauaagaagaga

SEQ ID NO: 1128205 - RNA, 19 nt, Artificial Sequence
  Description of Artificial Sequence: Synthetic oligonucleotide
  Antisense strand to SEQ ID NO: 1128204
ucucuucuuauaauuccau

SEQ ID NO: 1128206 - RNA, 19 nt, Artificial Sequence
  Description of Artificial Sequence: Synthetic oligonucleotide
  Sense strand starting at position 2737 of SEQ ID NO: 916071
ccggcuaacgagcuguuua

SEQ ID NO: 1128207 - RNA, 19 nt, Artificial Sequence
  Description of Artificial Sequence: Synthetic oligonucleotide
  Antisense strand to SEQ ID NO: 1128206
uaaacagcucguuagccgg

SEQ ID NO: 1128208 - RNA, 19 nt, Artificial Sequence
  Description of Artificial Sequence: Synthetic oligonucleotide
  Sense strand starting at position 2797 of SEQ ID NO: 916071
ugcucuucucauuggagaa

SEQ ID NO: 1128209 - RNA, 19 nt, Artificial Sequence
  Description of Artificial Sequence: Synthetic oligonucleotide
  Antisense strand to SEQ ID NO: 1128208
uucuccaaugagaagagca

SEQ ID NO: 1128210 - RNA, 19 nt, Artificial Sequence
  Description of Artificial Sequence: Synthetic oligonucleotide
  Sense strand starting at position 2798 of SEQ ID NO: 916071
gcucuucucauuggagaag

SEQ ID NO: 1128211 - RNA, 19 nt, Artificial Sequence
  Description of Artificial Sequence: Synthetic oligonucleotide
  Antisense strand to SEQ ID NO: 1128210
cuucuccaaugagaagagc

SEQ ID NO: 1128212 - RNA, 19 nt, Artificial Sequence
  Description of Artificial Sequence: Synthetic oligonucleotide
  Sense strand starting at position 2903 of SEQ ID NO: 916071
gaauaugaugguugugacu

SEQ ID NO: 1128213 - RNA, 19 nt, Artificial Sequence
  Description of Artificial Sequence: Synthetic oligonucleotide
  Antisense strand to SEQ ID NO: 1128212
agucacaaccaucauauuc

SEQ ID NO: 1128214 - RNA, 19 nt, Artificial Sequence
  Description of Artificial Sequence: Synthetic oligonucleotide
  Sense strand starting at position 2909 of SEQ ID NO: 916071
gaugguugugacuauugag

SEQ ID NO: 1128215 - RNA, 19 nt, Artificial Sequence
  Description of Artificial Sequence: Synthetic oligonucleotide
  Antisense strand to SEQ ID NO: 1128214
cucaauagucacaaccauc

SEQ ID NO: 1128216 - RNA, 19 nt, Artificial Sequence
  Description of Artificial Sequence: Synthetic oligonucleotide
  Sense strand starting at position 2924 of SEQ ID NO: 916071
ugagaugcauaucuacaga

SEQ ID NO: 1128217 - RNA, 19 nt, Artificial Sequence
  Description of Artificial Sequence: Synthetic oligonucleotide
  Antisense strand to SEQ ID NO: 1128216
ucuguagauaugcaucuca

SEQ ID NO: 1128218 - RNA, 19 nt, Artificial Sequence
  Description of Artificial Sequence: Synthetic oligonucleotide
  Sense strand starting at position 2949 of SEQ ID NO: 916071
guaacugagagaugcuaua

SEQ ID NO: 1128219 - RNA, 19 nt, Artificial Sequence
  Description of Artificial Sequence: Synthetic oligonucleotide
  Antisense strand to SEQ ID NO: 1128218
uauagcaucucucaguuac

SEQ ID NO: 1128220 - RNA, 19 nt, Artificial Sequence
  Description of Artificial Sequence: Synthetic oligonucleotide
  Sense strand starting at position 3065 of SEQ ID NO: 916071
gguguauaugcggugucaa

SEQ ID NO: 1128221 - RNA, 19 nt, Artificial Sequence
  Description of Artificial Sequence: Synthetic oligonucleotide
  Antisense strand to SEQ ID NO: 1128220
uugacaccgcauauacacc

SEQ ID NO: 1128222 - RNA, 19 nt, Artificial Sequence
  Description of Artificial Sequence: Synthetic oligonucleotide
  Sense strand starting at position 3441 of SEQ ID NO: 916071
ugaagaggucuaggucaaa

SEQ ID NO: 1128223 - RNA, 19 nt, Artificial Sequence
  Description of Artificial Sequence: Synthetic oligonucleotide
  Antisense strand to SEQ ID NO: 1128222
uuugaccuagaccucuuca

SEQ ID NO: 1128224 - RNA, 19 nt, Artificial Sequence
  Description of Artificial Sequence: Synthetic oligonucleotide
  Sense strand starting at position 3444 of SEQ ID NO: 916071
agaggucuaggucaaaugu

SEQ ID NO: 1128225 - RNA, 19 nt, Artificial Sequence
  Description of Artificial Sequence: Synthetic oligonucleotide
  Antisense strand to SEQ ID NO: 1128224
acauuugaccuagaccucu

SEQ ID NO: 1128226 - RNA, 19 nt, Artificial Sequence
  Description of Artificial Sequence: Synthetic oligonucleotide
  Sense strand starting at position 3485 of SEQ ID NO: 916071
aguucuuaaggccaugaca

SEQ ID NO: 1128227 - RNA, 19 nt, Artificial Sequence
  Description of Artificial Sequence: Synthetic oligonucleotide
  Antisense strand to SEQ ID NO: 1128226
ugucauggccuuaagaacu

SEQ ID NO: 1128228 - RNA, 19 nt, Artificial Sequence
  Description of Artificial Sequence: Synthetic oligonucleotide
  Sense strand starting at position 3709 of SEQ ID NO: 916071
uggugucuugugcuuguau

SEQ ID NO: 1128229 - RNA, 19 nt, Artificial Sequence
  Description of Artificial Sequence: Synthetic oligonucleotide
  Antisense strand to SEQ ID NO: 1128228
auacaagcacaagacacca

SEQ ID NO: 1128230 - RNA, 19 nt, Artificial Sequence
  Description of Artificial Sequence: Synthetic oligonucleotide
  Sense strand starting at position 271 of SEQ ID NO: 916072
gcaggagagcucugugaaa

SEQ ID NO: 1128231 - RNA, 19 nt, Artificial Sequence
  Description of Artificial Sequence: Synthetic oligonucleotide
  Antisense strand to SEQ ID NO: 1128230
uuucacagagcucuccugc

SEQ ID NO: 1128232 - RNA, 19 nt, Artificial Sequence
  Description of Artificial Sequence: Synthetic oligonucleotide
  Sense strand starting at position 273 of SEQ ID NO: 916072
aggagagcucugugaaauu

SEQ ID NO: 1128233 - RNA, 19 nt, Artificial Sequence
  Description of Artificial Sequence: Synthetic oligonucleotide
  Antisense strand to SEQ ID NO: 1128232
aauuucacagagcucuccu

SEQ ID NO: 1128234 - RNA, 19 nt, Artificial Sequence
  Description of Artificial Sequence: Synthetic oligonucleotide
  Sense strand starting at position 314 of SEQ ID NO: 916072
ucaucacagguuugaaaga

SEQ ID NO: 1128235 - RNA, 19 nt, Artificial Sequence
  Description of Artificial Sequence: Synthetic oligonucleotide
  Antisense strand to SEQ ID NO: 1128234
ucuuucaaaccugugauga

SEQ ID NO: 1128236 - RNA, 19 nt, Artificial Sequence
  Description of Artificial Sequence: Synthetic oligonucleotide
  Sense strand starting at position 319 of SEQ ID NO: 916072
acagguuugaaagaugcga

SEQ ID NO: 1128237 - RNA, 19 nt, Artificial Sequence
  Description of Artificial Sequence: Synthetic oligonucleotide
  Antisense strand to SEQ ID NO: 1128236
ucgcaucuuucaaaccugu

SEQ ID NO: 1128238 - RNA, 19 nt, Artificial Sequence
  Description of Artificial Sequence: Synthetic oligonucleotide
  Sense strand starting at position 323 of SEQ ID NO: 916072
guuugaaagaugcgaaaug

SEQ ID NO: 1128239 - RNA, 19 nt, Artificial Sequence
  Description of Artificial Sequence: Synthetic oligonucleotide
  Antisense strand to SEQ ID NO: 1128238
cauuucgcaucuuucaaac

SEQ ID NO: 1128240 - RNA, 19 nt, Artificial Sequence
  Description of Artificial Sequence: Synthetic oligonucleotide
  Sense strand starting at position 685 of SEQ ID NO: 916072
guaagucacaggugauuaa

SEQ ID NO: 1128241 - RNA, 19 nt, Artificial Sequence
  Description of Artificial Sequence: Synthetic oligonucleotide
  Antisense strand to SEQ ID NO: 1128240
uuaaucaccugugacuuac

SEQ ID NO: 1128242 - RNA, 19 nt, Artificial Sequence
  Description of Artificial Sequence: Synthetic oligonucleotide
  Sense strand starting at position 729 of SEQ ID NO: 916072
ugagguuucugguuugaga

SEQ ID NO: 1128243 - RNA, 19 nt, Artificial Sequence
  Description of Artificial Sequence: Synthetic oligonucleotide
  Antisense strand to SEQ ID NO: 1128242
ucucaaaccagaaaccuca

SEQ ID NO: 1128244 - RNA, 19 nt, Artificial Sequence
  Description of Artificial Sequence: Synthetic oligonucleotide
  Sense strand starting at position 731 of SEQ ID NO: 916072
agguuucugguuugagaaa

SEQ ID NO: 1128245 - RNA, 19 nt, Artificial Sequence
  Description of Artificial Sequence: Synthetic oligonucleotide
  Antisense strand to SEQ ID NO: 1128244
uuucucaaaccagaaaccu

SEQ ID NO: 1128246 - RNA, 19 nt, Artificial Sequence
  Description of Artificial Sequence: Synthetic oligonucleotide
  Sense strand starting at position 953 of SEQ ID NO: 916072
auaagaacauuugggaaga

SEQ ID NO: 1128247 - RNA, 19 nt, Artificial Sequence
  Description of Artificial Sequence: Synthetic oligonucleotide
  Antisense strand to SEQ ID NO: 1128246
ucuucccaaauguucuuau

SEQ ID NO: 1128248 - RNA, 19 nt, Artificial Sequence
  Description of Artificial Sequence: Synthetic oligonucleotide
  Sense strand starting at position 1087 of SEQ ID NO: 916072
auuguuuguacugaguaau

SEQ ID NO: 1128249 - RNA, 19 nt, Artificial Sequence
  Description of Artificial Sequence: Synthetic oligonucleotide
  Antisense strand to SEQ ID NO: 1128248
auuacucaguacaaacaau

SEQ ID NO: 1128250 - RNA, 19 nt, Artificial Sequence
  Description of Artificial Sequence: Synthetic oligonucleotide
  Sense strand starting at position 1093 of SEQ ID NO: 916072
uguacugaguaauucccaa

SEQ ID NO: 1128251 - RNA, 19 nt, Artificial Sequence
  Description of Artificial Sequence: Synthetic oligonucleotide
  Antisense strand to SEQ ID NO: 1128250
uugggaauuacucaguaca

SEQ ID NO: 1128252 - RNA, 19 nt, Artificial Sequence
  Description of Artificial Sequence: Synthetic oligonucleotide
  Sense strand starting at position 1128 of SEQ ID NO: 916072
gaaucacuuggaggguuua

SEQ ID NO: 1128253 - RNA, 19 nt, Artificial Sequence
  Description of Artificial Sequence: Synthetic oligonucleotide
  Antisense strand to SEQ ID NO: 1128252
uaaacccuccaagugauuc

SEQ ID NO: 1128254 - RNA, 19 nt, Artificial Sequence
  Description of Artificial Sequence: Synthetic oligonucleotide
  Sense strand starting at position 1181 of SEQ ID NO: 916072
uuagcaacucaguagaguu

SEQ ID NO: 1128255 - RNA, 19 nt, Artificial Sequence
  Description of Artificial Sequence: Synthetic oligonucleotide
  Antisense strand to SEQ ID NO: 1128254
aacucuacugaguugcuaa

SEQ ID NO: 1128256 - RNA, 19 nt, Artificial Sequence
  Description of Artificial Sequence: Synthetic oligonucleotide
  Sense strand starting at position 1189 of SEQ ID NO: 916072
ucaguagaguuuguaugga

SEQ ID NO: 1128257 - RNA, 19 nt, Artificial Sequence
  Description of Artificial Sequence: Synthetic oligonucleotide
  Antisense strand to SEQ ID NO: 1128256
uccauacaaacucuacuga

SEQ ID NO: 1128258 - RNA, 19 nt, Artificial Sequence
  Description of Artificial Sequence: Synthetic oligonucleotide
  Sense strand starting at position 1273 of SEQ ID NO: 916072
guaagacucugacucauga

SEQ ID NO: 1128259 - RNA, 19 nt, Artificial Sequence
  Description of Artificial Sequence: Synthetic oligonucleotide
  Antisense strand to SEQ ID NO: 1128258
ucaugagucagagucuuac

SEQ ID NO: 1128260 - RNA, 19 nt, Artificial Sequence
  Description of Artificial Sequence: Synthetic oligonucleotide
  Sense strand starting at position 1316 of SEQ ID NO: 916072
cuaagucucucaguuaaau

SEQ ID NO: 1128261 - RNA, 19 nt, Artificial Sequence
  Description of Artificial Sequence: Synthetic oligonucleotide
  Antisense strand to SEQ ID NO: 1128260
auuuaacugagagacuuag

SEQ ID NO: 1128262 - RNA, 19 nt, Artificial Sequence
  Description of Artificial Sequence: Synthetic oligonucleotide
  Sense strand starting at position 1475 of SEQ ID NO: 916072
uguuaacagucaucuaaua

SEQ ID NO: 1128263 - RNA, 19 nt, Artificial Sequence
  Description of Artificial Sequence: Synthetic oligonucleotide
  Antisense strand to SEQ ID NO: 1128262
uauuagaugacuguuaaca

SEQ ID NO: 1128264 - RNA, 19 nt, Artificial Sequence
  Description of Artificial Sequence: Synthetic oligonucleotide
  Sense strand starting at position 1628 of SEQ ID NO: 916072
ggcuuucugguauaagaaa

SEQ ID NO: 1128265 - RNA, 19 nt, Artificial Sequence
  Description of Artificial Sequence: Synthetic oligonucleotide
  Antisense strand to SEQ ID NO: 1128264
uuucuuauaccagaaagcc

SEQ ID NO: 1128266 - RNA, 19 nt, Artificial Sequence
  Description of Artificial Sequence: Synthetic oligonucleotide
  Sense strand starting at position 1813 of SEQ ID NO: 916072
ucagaugauuuagaugaau

SEQ ID NO: 1128267 - RNA, 19 nt, Artificial Sequence
  Description of Artificial Sequence: Synthetic oligonucleotide
  Antisense strand to SEQ ID NO: 1128266
auucaucuaaaucaucuga

SEQ ID NO: 1128268 - RNA, 19 nt, Artificial Sequence
  Description of Artificial Sequence: Synthetic oligonucleotide
  Sense strand starting at position 1894 of SEQ ID NO: 916072
uuucuuucuccucaggagu

SEQ ID NO: 1128269 - RNA, 19 nt, Artificial Sequence
  Description of Artificial Sequence: Synthetic oligonucleotide
  Antisense strand to SEQ ID NO: 1128268
acuccugaggagaaagaaa

SEQ ID NO: 1128270 - RNA, 19 nt, Artificial Sequence
  Description of Artificial Sequence: Synthetic oligonucleotide
  Sense strand starting at position 1979 of SEQ ID NO: 916072
agcuccgauagauguagaa

SEQ ID NO: 1128271 - RNA, 19 nt, Artificial Sequence
  Description of Artificial Sequence: Synthetic oligonucleotide
  Antisense strand to SEQ ID NO: 1128270
uucuacaucuaucggagcu

SEQ ID NO: 1128272 - RNA, 19 nt, Artificial Sequence
  Description of Artificial Sequence: Synthetic oligonucleotide
  Sense strand starting at position 2311 of SEQ ID NO: 916072
ccacacauuugguaacuga

SEQ ID NO: 1128273 - RNA, 19 nt, Artificial Sequence
  Description of Artificial Sequence: Synthetic oligonucleotide
  Antisense strand to SEQ ID NO: 1128272
ucaguuaccaaaugugugg

SEQ ID NO: 1128274 - RNA, 19 nt, Artificial Sequence
  Description of Artificial Sequence: Synthetic oligonucleotide
  Sense strand starting at position 2361 of SEQ ID NO: 916072
gggcauauaguguauguau

SEQ ID NO: 1128275 - RNA, 19 nt, Artificial Sequence
  Description of Artificial Sequence: Synthetic oligonucleotide
  Antisense strand to SEQ ID NO: 1128274
auacauacacuauaugccc

SEQ ID NO: 1128276 - RNA, 19 nt, Artificial Sequence
  Description of Artificial Sequence: Synthetic oligonucleotide
  Sense strand starting at position 2363 of SEQ ID NO: 916072
gcauauaguguauguauuu

SEQ ID NO: 1128277 - RNA, 19 nt, Artificial Sequence
  Description of Artificial Sequence: Synthetic oligonucleotide
  Antisense strand to SEQ ID NO: 1128276
aaauacauacacuauaugc

SEQ ID NO: 1128278 - RNA, 19 nt, Artificial Sequence
  Description of Artificial Sequence: Synthetic oligonucleotide
  Sense strand starting at position 2748 of SEQ ID NO: 916072
uuugcagcucuugaauauu

SEQ ID NO: 1128279 - RNA, 19 nt, Artificial Sequence
  Description of Artificial Sequence: Synthetic oligonucleotide
  Antisense strand to SEQ ID NO: 1128278
aauauucaagagcugcaaa

SEQ ID NO: 1128280 - RNA, 19 nt, Artificial Sequence
  Description of Artificial Sequence: Synthetic oligonucleotide
  Sense strand starting at position 2754 of SEQ ID NO: 916072
gcucuugaauauucuaaug

SEQ ID NO: 1128281 - RNA, 19 nt, Artificial Sequence
  Description of Artificial Sequence: Synthetic oligonucleotide
  Antisense strand to SEQ ID NO: 1128280
cauuagaauauucaagagc

SEQ ID NO: 1128282 - RNA, 19 nt, Artificial Sequence
  Description of Artificial Sequence: Synthetic oligonucleotide
  Sense strand starting at position 2775 of SEQ ID NO: 916072
guggauuuaugucccucuu

SEQ ID NO: 1128283 - RNA, 19 nt, Artificial Sequence
  Description of Artificial Sequence: Synthetic oligonucleotide
  Antisense strand to SEQ ID NO: 1128282
aagagggacauaaauccac

SEQ ID NO: 1128284 - RNA, 19 nt, Artificial Sequence
  Description of Artificial Sequence: Synthetic oligonucleotide
  Sense strand starting at position 2858 of SEQ ID NO: 916072
gccucaugugauuagacca

SEQ ID NO: 1128285 - RNA, 19 nt, Artificial Sequence
  Description of Artificial Sequence: Synthetic oligonucleotide
  Antisense strand to SEQ ID NO: 1128284
uggucuaaucacaugaggc

SEQ ID NO: 1128286 - RNA, 19 nt, Artificial Sequence
  Description of Artificial Sequence: Synthetic oligonucleotide
  Sense strand starting at position 3378 of SEQ ID NO: 916072
gcuucucuggaagaauagu

SEQ ID NO: 1128287 - RNA, 19 nt, Artificial Sequence
  Description of Artificial Sequence: Synthetic oligonucleotide
  Antisense strand to SEQ ID NO: 1128286
acuauucuuccagagaagc

SEQ ID NO: 1128288 - RNA, 19 nt, Artificial Sequence
  Description of Artificial Sequence: Synthetic oligonucleotide
  Sense strand starting at position 3448 of SEQ ID NO: 916072
ggucucaguuuauuuaagu

SEQ ID NO: 1128289 - RNA, 19 nt, Artificial Sequence
  Description of Artificial Sequence: Synthetic oligonucleotide
  Antisense strand to SEQ ID NO: 1128288
acuuaaauaaacugagacc

SEQ ID NO: 1128290 - RNA, 19 nt, Artificial Sequence
  Description of Artificial Sequence: Synthetic oligonucleotide
  Sense strand starting at position 3449 of SEQ ID NO: 916072
gucucaguuuauuuaaguu

SEQ ID NO: 1128291 - RNA, 19 nt, Artificial Sequence
  Description of Artificial Sequence: Synthetic oligonucleotide
  Antisense strand to SEQ ID NO: 1128290
aacuuaaauaaacugagac

SEQ ID NO: 1128292 - RNA, 19 nt, Artificial Sequence
  Description of Artificial Sequence: Synthetic oligonucleotide
  Sense strand starting at position 3478 of SEQ ID NO: 916072
gaggcauaaguaugaugua

SEQ ID NO: 1128293 - RNA, 19 nt, Artificial Sequence
  Description of Artificial Sequence: Synthetic oligonucleotide
  Antisense strand to SEQ ID NO: 1128292
uacaucauacuuaugccuc

SEQ ID NO: 1128294 - RNA, 19 nt, Artificial Sequence
  Description of Artificial Sequence: Synthetic oligonucleotide
  Sense strand starting at position 3487 of SEQ ID NO: 916072
guaugauguacaugacuug

SEQ ID NO: 1128295 - RNA, 19 nt, Artificial Sequence
  Description of Artificial Sequence: Synthetic oligonucleotide
  Antisense strand to SEQ ID NO: 1128294
caagucauguacaucauac

SEQ ID NO: 1128296 - RNA, 19 nt, Artificial Sequence
  Description of Artificial Sequence: Synthetic oligonucleotide
  Sense strand starting at position 3490 of SEQ ID NO: 916072
ugauguacaugacuuggua

SEQ ID NO: 1128297 - RNA, 19 nt, Artificial Sequence
  Description of Artificial Sequence: Synthetic oligonucleotide
  Antisense strand to SEQ ID NO: 1128296
uaccaagucauguacauca

SEQ ID NO: 1128298 - RNA, 19 nt, Artificial Sequence
  Description of Artificial Sequence: Synthetic oligonucleotide
  Sense strand starting at position 3493 of SEQ ID NO: 916072
uguacaugacuugguaaau

SEQ ID NO: 1128299 - RNA, 19 nt, Artificial Sequence
  Description of Artificial Sequence: Synthetic oligonucleotide
  Antisense strand to SEQ ID NO: 1128298
auuuaccaagucauguaca

SEQ ID NO: 1128300 - RNA, 19 nt, Artificial Sequence
  Description of Artificial Sequence: Synthetic oligonucleotide
  Sense strand starting at position 3494 of SEQ ID NO: 916072
guacaugacuugguaaauc

SEQ ID NO: 1128301 - RNA, 19 nt, Artificial Sequence
  Description of Artificial Sequence: Synthetic oligonucleotide
  Antisense strand to SEQ ID NO: 1128300
gauuuaccaagucauguac

SEQ ID NO: 1128302 - RNA, 19 nt, Artificial Sequence
  Description of Artificial Sequence: Synthetic oligonucleotide
  Sense strand starting at position 3696 of SEQ ID NO: 916072
guguauucucagcaaauag

SEQ ID NO: 1128303 - RNA, 19 nt, Artificial Sequence
  Description of Artificial Sequence: Synthetic oligonucleotide
  Antisense strand to SEQ ID NO: 1128302
cuauuugcugagaauacac

SEQ ID NO: 1128304 - RNA, 19 nt, Artificial Sequence
  Description of Artificial Sequence: Synthetic oligonucleotide
  Sense strand starting at position 3740 of SEQ ID NO: 916072
cuaucuaguggaugagcua

SEQ ID NO: 1128305 - RNA, 19 nt, Artificial Sequence
  Description of Artificial Sequence: Synthetic oligonucleotide
  Antisense strand to SEQ ID NO: 1128304
uagcucauccacuagauag

SEQ ID NO: 1128306 - RNA, 19 nt, Artificial Sequence
  Description of Artificial Sequence: Synthetic oligonucleotide
  Sense strand starting at position 3743 of SEQ ID NO: 916072
ucuaguggaugagcuauau

SEQ ID NO: 1128307 - RNA, 19 nt, Artificial Sequence
  Description of Artificial Sequence: Synthetic oligonucleotide
  Antisense strand to SEQ ID NO: 1128306
auauagcucauccacuaga

SEQ ID NO: 1128308 - RNA, 19 nt, Artificial Sequence
  Description of Artificial Sequence: Synthetic oligonucleotide
  Sense strand starting at position 3749 of SEQ ID NO: 916072
ggaugagcuauaugaauua

SEQ ID NO: 1128309 - RNA, 19 nt, Artificial Sequence
  Description of Artificial Sequence: Synthetic oligonucleotide
  Antisense strand to SEQ ID NO: 1128308
uaauucauauagcucaucc

SEQ ID NO: 1128310 - RNA, 19 nt, Artificial Sequence
  Description of Artificial Sequence: Synthetic oligonucleotide
  Sense strand starting at position 400 of SEQ ID NO: 916073
ucucauaucucuguauuga

SEQ ID NO: 1128311 - RNA, 19 nt, Artificial Sequence
  Description of Artificial Sequence: Synthetic oligonucleotide
  Antisense strand to SEQ ID NO: 1128310
ucaauacagagauaugaga

SEQ ID NO: 1128312 - RNA, 19 nt, Artificial Sequence
  Description of Artificial Sequence: Synthetic oligonucleotide
  Sense strand starting at position 401 of SEQ ID NO: 916073
cucauaucucuguauugau

SEQ ID NO: 1128313 - RNA, 19 nt, Artificial Sequence
  Description of Artificial Sequence: Synthetic oligonucleotide
  Antisense strand to SEQ ID NO: 1128312
aucaauacagagauaugag

SEQ ID NO: 1128314 - RNA, 19 nt, Artificial Sequence
  Description of Artificial Sequence: Synthetic oligonucleotide
  Sense strand starting at position 683 of SEQ ID NO: 916073
cugacucauaugugggagu

SEQ ID NO: 1128315 - RNA, 19 nt, Artificial Sequence
  Description of Artificial Sequence: Synthetic oligonucleotide
  Antisense strand to SEQ ID NO: 1128314
acucccacauaugagucag

SEQ ID NO: 1128316 - RNA, 19 nt, Artificial Sequence
  Description of Artificial Sequence: Synthetic oligonucleotide
  Sense strand starting at position 685 of SEQ ID NO: 916073
gacucauaugugggaguua

SEQ ID NO: 1128317 - RNA, 19 nt, Artificial Sequence
  Description of Artificial Sequence: Synthetic oligonucleotide
  Antisense strand to SEQ ID NO: 1128316
uaacucccacauaugaguc

SEQ ID NO: 1128318 - RNA, 19 nt, Artificial Sequence
  Description of Artificial Sequence: Synthetic oligonucleotide
  Sense strand starting at position 856 of SEQ ID NO: 916073
ggauaacuguaguuaacuu

SEQ ID NO: 1128319 - RNA, 19 nt, Artificial Sequence
  Description of Artificial Sequence: Synthetic oligonucleotide
  Antisense strand to SEQ ID NO: 1128318
aaguuaacuacaguuaucc

SEQ ID NO: 1128320 - RNA, 19 nt, Artificial Sequence
  Description of Artificial Sequence: Synthetic oligonucleotide
  Sense strand starting at position 1276 of SEQ ID NO: 916073
agacuuuaccauuacgcau

SEQ ID NO: 1128321 - RNA, 19 nt, Artificial Sequence
  Description of Artificial Sequence: Synthetic oligonucleotide
  Antisense strand to SEQ ID NO: 1128320
augcguaaugguaaagucu

SEQ ID NO: 1128322 - RNA, 19 nt, Artificial Sequence
  Description of Artificial Sequence: Synthetic oligonucleotide
  Sense strand starting at position 1570 of SEQ ID NO: 916073
aucaguuauuucccuguuu

SEQ ID NO: 1128323 - RNA, 19 nt, Artificial Sequence
  Description of Artificial Sequence: Synthetic oligonucleotide
  Antisense strand to SEQ ID NO: 1128322
aaacagggaaauaacugau

SEQ ID NO: 1128324 - RNA, 19 nt, Artificial Sequence
  Description of Artificial Sequence: Synthetic oligonucleotide
  Sense strand starting at position 1571 of SEQ ID NO: 916073
ucaguuauuucccuguuua

SEQ ID NO: 1128325 - RNA, 19 nt, Artificial Sequence
  Description of Artificial Sequence: Synthetic oligonucleotide
  Antisense strand to SEQ ID NO: 1128324
uaaacagggaaauaacuga

SEQ ID NO: 1128326 - RNA, 19 nt, Artificial Sequence
  Description of Artificial Sequence: Synthetic oligonucleotide
  Sense strand starting at position 1726 of SEQ ID NO: 916073
uuccuuugagucuacuaua

SEQ ID NO: 1128327 - RNA, 19 nt, Artificial Sequence
  Description of Artificial Sequence: Synthetic oligonucleotide
  Antisense strand to SEQ ID NO: 1128326
uauaguagacucaaaggaa

SEQ ID NO: 1128328 - RNA, 19 nt, Artificial Sequence
  Description of Artificial Sequence: Synthetic oligonucleotide
  Sense strand starting at position 1783 of SEQ ID NO: 916073
acuucuucucuccagguga

SEQ ID NO: 1128329 - RNA, 19 nt, Artificial Sequence
  Description of Artificial Sequence: Synthetic oligonucleotide
  Antisense strand to SEQ ID NO: 1128328
ucaccuggagagaagaagu

SEQ ID NO: 1128330 - RNA, 19 nt, Artificial Sequence
  Description of Artificial Sequence: Synthetic oligonucleotide
  Sense strand starting at position 1841 of SEQ ID NO: 916073
aggaaauacucaccuguac

SEQ ID NO: 1128331 - RNA, 19 nt, Artificial Sequence
  Description of Artificial Sequence: Synthetic oligonucleotide
  Antisense strand to SEQ ID NO: 1128330
guacaggugaguauuuccu

SEQ ID NO: 1128332 - RNA, 19 nt, Artificial Sequence
  Description of Artificial Sequence: Synthetic oligonucleotide
  Sense strand starting at position 2073 of SEQ ID NO: 916073
aguuuccagugauuucgau

SEQ ID NO: 1128333 - RNA, 19 nt, Artificial Sequence
  Description of Artificial Sequence: Synthetic oligonucleotide
  Antisense strand to SEQ ID NO: 1128332
aucgaaaucacuggaaacu

SEQ ID NO: 1128334 - RNA, 19 nt, Artificial Sequence
  Description of Artificial Sequence: Synthetic oligonucleotide
  Sense strand starting at position 2267 of SEQ ID NO: 916073
uuuagagaacuugguuaaa

SEQ ID NO: 1128335 - RNA, 19 nt, Artificial Sequence
  Description of Artificial Sequence: Synthetic oligonucleotide
  Antisense strand to SEQ ID NO: 1128334
uuuaaccaaguucucuaaa

SEQ ID NO: 1128336 - RNA, 19 nt, Artificial Sequence
  Description of Artificial Sequence: Synthetic oligonucleotide
  Sense strand starting at position 2269 of SEQ ID NO: 916073
uagagaacuugguuaaauu

SEQ ID NO: 1128337 - RNA, 19 nt, Artificial Sequence
  Description of Artificial Sequence: Synthetic oligonucleotide
  Antisense strand to SEQ ID NO: 1128336
aauuuaaccaaguucucua

SEQ ID NO: 1128338 - RNA, 19 nt, Artificial Sequence
  Description of Artificial Sequence: Synthetic oligonucleotide
  Sense strand starting at position 2339 of SEQ ID NO: 916073
aauccauguguugaacagu

SEQ ID NO: 1128339 - RNA, 19 nt, Artificial Sequence
  Description of Artificial Sequence: Synthetic oligonucleotide
  Antisense strand to SEQ ID NO: 1128338
acuguucaacacauggauu

SEQ ID NO: 1128340 - RNA, 19 nt, Artificial Sequence
  Description of Artificial Sequence: Synthetic oligonucleotide
  Sense strand starting at position 2378 of SEQ ID NO: 916073
guuugauuggauggauaug

SEQ ID NO: 1128341 - RNA, 19 nt, Artificial Sequence
  Description of Artificial Sequence: Synthetic oligonucleotide
  Antisense strand to SEQ ID NO: 1128340
cauauccauccaaucaaac

SEQ ID NO: 1128342 - RNA, 19 nt, Artificial Sequence
  Description of Artificial Sequence: Synthetic oligonucleotide
  Sense strand starting at position 2383 of SEQ ID NO: 916073
auuggauggauaugguuua

SEQ ID NO: 1128343 - RNA, 19 nt, Artificial Sequence
  Description of Artificial Sequence: Synthetic oligonucleotide
  Antisense strand to SEQ ID NO: 1128342
uaaaccauauccauccaau

SEQ ID NO: 1128344 - RNA, 19 nt, Artificial Sequence
  Description of Artificial Sequence: Synthetic oligonucleotide
  Sense strand starting at position 2434 of SEQ ID NO: 916073
ccaugaacauuguuaagga

SEQ ID NO: 1128345 - RNA, 19 nt, Artificial Sequence
  Description of Artificial Sequence: Synthetic oligonucleotide
  Antisense strand to SEQ ID NO: 1128344
uccuuaacaauguucaugg

SEQ ID NO: 1128346 - RNA, 19 nt, Artificial Sequence
  Description of Artificial Sequence: Synthetic oligonucleotide
  Sense strand starting at position 2442 of SEQ ID NO: 916073
auuguuaaggaaugugacu

SEQ ID NO: 1128347 - RNA, 19 nt, Artificial Sequence
  Description of Artificial Sequence: Synthetic oligonucleotide
  Antisense strand to SEQ ID NO: 1128346
agucacauuccuuaacaau

SEQ ID NO: 1128348 - RNA, 19 nt, Artificial Sequence
  Description of Artificial Sequence: Synthetic oligonucleotide
  Sense strand starting at position 2447 of SEQ ID NO: 916073
uaaggaaugugacugcaaa

SEQ ID NO: 1128349 - RNA, 19 nt, Artificial Sequence
  Description of Artificial Sequence: Synthetic oligonucleotide
  Antisense strand to SEQ ID NO: 1128348
uuugcagucacauuccuua

SEQ ID NO: 1128350 - RNA, 19 nt, Artificial Sequence
  Description of Artificial Sequence: Synthetic oligonucleotide
  Sense strand starting at position 2478 of SEQ ID NO: 916073
gaaaucagucugcaaaggu

SEQ ID NO: 1128351 - RNA, 19 nt, Artificial Sequence
  Description of Artificial Sequence: Synthetic oligonucleotide
  Antisense strand to SEQ ID NO: 1128350
accuuugcagacugauuuc

SEQ ID NO: 1128352 - RNA, 19 nt, Artificial Sequence
  Description of Artificial Sequence: Synthetic oligonucleotide
  Sense strand starting at position 2485 of SEQ ID NO: 916073
gucugcaaaggugaugaaa

SEQ ID NO: 1128353 - RNA, 19 nt, Artificial Sequence
  Description of Artificial Sequence: Synthetic oligonucleotide
  Antisense strand to SEQ ID NO: 1128352
uuucaucaccuuugcagac

SEQ ID NO: 1128354 - RNA, 19 nt, Artificial Sequence
  Description of Artificial Sequence: Synthetic oligonucleotide
  Sense strand starting at position 2521 of SEQ ID NO: 916073
gacuaauauugggcagaug

SEQ ID NO: 1128355 - RNA, 19 nt, Artificial Sequence
  Description of Artificial Sequence: Synthetic oligonucleotide
  Antisense strand to SEQ ID NO: 1128354
caucugcccaauauuaguc

SEQ ID NO: 1128356 - RNA, 19 nt, Artificial Sequence
  Description of Artificial Sequence: Synthetic oligonucleotide
  Sense strand starting at position 2522 of SEQ ID NO: 916073
acuaauauugggcagaugu

SEQ ID NO: 1128357 - RNA, 19 nt, Artificial Sequence
  Description of Artificial Sequence: Synthetic oligonucleotide
  Antisense strand to SEQ ID NO: 1128356
acaucugcccaauauuagu

SEQ ID NO: 1128358 - RNA, 19 nt, Artificial Sequence
  Description of Artificial Sequence: Synthetic oligonucleotide
  Sense strand starting at position 2524 of SEQ ID NO: 916073
uaauauugggcagauguca

SEQ ID NO: 1128359 - RNA, 19 nt, Artificial Sequence
  Description of Artificial Sequence: Synthetic oligonucleotide
  Antisense strand to SEQ ID NO: 1128358
ugacaucugcccaauauua

SEQ ID NO: 1128360 - RNA, 19 nt, Artificial Sequence
  Description of Artificial Sequence: Synthetic oligonucleotide
  Sense strand starting at position 2551 of SEQ ID NO: 916073
uuguaaucucccugauuag

SEQ ID NO: 1128361 - RNA, 19 nt, Artificial Sequence
  Description of Artificial Sequence: Synthetic oligonucleotide
  Antisense strand to SEQ ID NO: 1128360
cuaaucagggagauuacaa

SEQ ID NO: 1128362 - RNA, 19 nt, Artificial Sequence
  Description of Artificial Sequence: Synthetic oligonucleotide
  Sense strand starting at position 2576 of SEQ ID NO: 916073
gggagccugaagugauaua

SEQ ID NO: 1128363 - RNA, 19 nt, Artificial Sequence
  Description of Artificial Sequence: Synthetic oligonucleotide
  Antisense strand to SEQ ID NO: 1128362
uauaucacuucaggcuccc

SEQ ID NO: 1128364 - RNA, 19 nt, Artificial Sequence
  Description of Artificial Sequence: Synthetic oligonucleotide
  Sense strand starting at position 2661 of SEQ ID NO: 916073
cauagauucuuaguagaga

SEQ ID NO: 1128365 - RNA, 19 nt, Artificial Sequence
  Description of Artificial Sequence: Synthetic oligonucleotide
  Antisense strand to SEQ ID NO: 1128364
ucucuacuaagaaucuaug

SEQ ID NO: 1128366 - RNA, 19 nt, Artificial Sequence
  Description of Artificial Sequence: Synthetic oligonucleotide
  Sense strand starting at position 2674 of SEQ ID NO: 916073
uagagacacuguccugaaa

SEQ ID NO: 1128367 - RNA, 19 nt, Artificial Sequence
  Description of Artificial Sequence: Synthetic oligonucleotide
  Antisense strand to SEQ ID NO: 1128366
uuucaggacagugucucua

SEQ ID NO: 1128368 - RNA, 19 nt, Artificial Sequence
  Description of Artificial Sequence: Synthetic oligonucleotide
  Sense strand starting at position 2838 of SEQ ID NO: 916073
gccauaaaucuauggagug

SEQ ID NO: 1128369 - RNA, 19 nt, Artificial Sequence
  Description of Artificial Sequence: Synthetic oligonucleotide
  Antisense strand to SEQ ID NO: 1128368
cacuccauagauuuauggc

SEQ ID NO: 1128370 - RNA, 19 nt, Artificial Sequence
  Description of Artificial Sequence: Synthetic oligonucleotide
  Sense strand starting at position 2892 of SEQ ID NO: 916073
gaaugugagugccuugaaa

SEQ ID NO: 1128371 - RNA, 19 nt, Artificial Sequence
  Description of Artificial Sequence: Synthetic oligonucleotide
  Antisense strand to SEQ ID NO: 1128370
uuucaaggcacucacauuc

SEQ ID NO: 1128372 - RNA, 19 nt, Artificial Sequence
  Description of Artificial Sequence: Synthetic oligonucleotide
  Sense strand starting at position 2994 of SEQ ID NO: 916073
agccauuugcuauguaggu

SEQ ID NO: 1128373 - RNA, 19 nt, Artificial Sequence
  Description of Artificial Sequence: Synthetic oligonucleotide
  Antisense strand to SEQ ID NO: 1128372
accuacauagcaaauggcu

SEQ ID NO: 1128374 - RNA, 19 nt, Artificial Sequence
  Description of Artificial Sequence: Synthetic oligonucleotide
  Sense strand starting at position 2995 of SEQ ID NO: 916073
gccauuugcuauguagguu

SEQ ID NO: 1128375 - RNA, 19 nt, Artificial Sequence
  Description of Artificial Sequence: Synthetic oligonucleotide
  Antisense strand to SEQ ID NO: 1128374
aaccuacauagcaaauggc

SEQ ID NO: 1128376 - RNA, 19 nt, Artificial Sequence
  Description of Artificial Sequence: Synthetic oligonucleotide
  Sense strand starting at position 3054 of SEQ ID NO: 916073
auuacuaaucaaugugguu

SEQ ID NO: 1128377 - RNA, 19 nt, Artificial Sequence
  Description of Artificial Sequence: Synthetic oligonucleotide
  Antisense strand to SEQ ID NO: 1128376
aaccacauugauuaguaau

SEQ ID NO: 1128378 - RNA, 19 nt, Artificial Sequence
  Description of Artificial Sequence: Synthetic oligonucleotide
  Sense strand starting at position 3084 of SEQ ID NO: 916073
augauaauuuacugaugag

SEQ ID NO: 1128379 - RNA, 19 nt, Artificial Sequence
  Description of Artificial Sequence: Synthetic oligonucleotide
  Antisense strand to SEQ ID NO: 1128378
cucaucaguaaauuaucau

SEQ ID NO: 1128380 - RNA, 19 nt, Artificial Sequence
  Description of Artificial Sequence: Synthetic oligonucleotide
  Sense strand starting at position 3091 of SEQ ID NO: 916073
uuuacugaugaguaacuuu

SEQ ID NO: 1128381 - RNA, 19 nt, Artificial Sequence
  Description of Artificial Sequence: Synthetic oligonucleotide
  Antisense strand to SEQ ID NO: 1128380
aaaguuacucaucaguaaa

SEQ ID NO: 1128382 - RNA, 19 nt, Artificial Sequence
  Description of Artificial Sequence: Synthetic oligonucleotide
  Sense strand starting at position 3187 of SEQ ID NO: 916073
ugguuacaugaguaagguu

SEQ ID NO: 1128383 - RNA, 19 nt, Artificial Sequence
  Description of Artificial Sequence: Synthetic oligonucleotide
  Antisense strand to SEQ ID NO: 1128382
aaccuuacucauguaacca

SEQ ID NO: 1128384 - RNA, 19 nt, Artificial Sequence
  Description of Artificial Sequence: Synthetic oligonucleotide
  Sense strand starting at position 3497 of SEQ ID NO: 916073
ugguccauuguauaucuau

SEQ ID NO: 1128385 - RNA, 19 nt, Artificial Sequence
  Description of Artificial Sequence: Synthetic oligonucleotide
  Antisense strand to SEQ ID NO: 1128384
auagauauacaauggacca

SEQ ID NO: 1128386 - RNA, 19 nt, Artificial Sequence
  Description of Artificial Sequence: Synthetic oligonucleotide
  Sense strand starting at position 3720 of SEQ ID NO: 916073
cuuccuuuaggaugauagu

SEQ ID NO: 1128387 - RNA, 19 nt, Artificial Sequence
  Description of Artificial Sequence: Synthetic oligonucleotide
  Antisense strand to SEQ ID NO: 1128386
acuaucauccuaaaggaag

SEQ ID NO: 1128388 - RNA, 19 nt, Artificial Sequence
  Description of Artificial Sequence: Synthetic oligonucleotide
  Sense strand starting at position 3946 of SEQ ID NO: 916073
ggaagaauguucuccuaca

SEQ ID NO: 1128389 - RNA, 19 nt, Artificial Sequence
  Description of Artificial Sequence: Synthetic oligonucleotide
  Antisense strand to SEQ ID NO: 1128388
uguaggagaacauucuucc

SEQ ID NO: 1128390 - RNA, 19 nt, Artificial Sequence
  Description of Artificial Sequence: Synthetic oligonucleotide
  Sense strand starting at position 26 of SEQ ID NO: 916074
uuaaucacugccuagguua

SEQ ID NO: 1128391 - RNA, 19 nt, Artificial Sequence
  Description of Artificial Sequence: Synthetic oligonucleotide
  Antisense strand to SEQ ID NO: 1128390
uaaccuaggcagugauuaa

SEQ ID NO: 1128392 - RNA, 19 nt, Artificial Sequence
  Description of Artificial Sequence: Synthetic oligonucleotide
  Sense strand starting at position 110 of SEQ ID NO: 916074
auuguaauuucggcacauu

SEQ ID NO: 1128393 - RNA, 19 nt, Artificial Sequence
  Description of Artificial Sequence: Synthetic oligonucleotide
  Antisense strand to SEQ ID NO: 1128392
aaugugccgaaauuacaau

SEQ ID NO: 1128394 - RNA, 19 nt, Artificial Sequence
  Description of Artificial Sequence: Synthetic oligonucleotide
  Sense strand starting at position 122 of SEQ ID NO: 916074
gcacauuggcuugauaacu

SEQ ID NO: 1128395 - RNA, 19 nt, Artificial Sequence
  Description of Artificial Sequence: Synthetic oligonucleotide
  Antisense strand to SEQ ID NO: 1128394
aguuaucaagccaaugugc

SEQ ID NO: 1128396 - RNA, 19 nt, Artificial Sequence
  Description of Artificial Sequence: Synthetic oligonucleotide
  Sense strand starting at position 172 of SEQ ID NO: 916074
ucuacaggucuugacauua

SEQ ID NO: 1128397 - RNA, 19 nt, Artificial Sequence
  Description of Artificial Sequence: Synthetic oligonucleotide
  Antisense strand to SEQ ID NO: 1128396
uaaugucaagaccuguaga

SEQ ID NO: 1128398 - RNA, 19 nt, Artificial Sequence
  Description of Artificial Sequence: Synthetic oligonucleotide
  Sense strand starting at position 188 of SEQ ID NO: 916074
uuaguaggaucccugaaau

SEQ ID NO: 1128399 - RNA, 19 nt, Artificial Sequence
  Description of Artificial Sequence: Synthetic oligonucleotide
  Antisense strand to SEQ ID NO: 1128398
auuucagggauccuacuaa

SEQ ID NO: 1128400 - RNA, 19 nt, Artificial Sequence
  Description of Artificial Sequence: Synthetic oligonucleotide
  Sense strand starting at position 241 of SEQ ID NO: 916074
gggagauagcacugauuac

SEQ ID NO: 1128401 - RNA, 19 nt, Artificial Sequence
  Description of Artificial Sequence: Synthetic oligonucleotide
  Antisense strand to SEQ ID NO: 1128400
guaaucagugcuaucuccc

SEQ ID NO: 1128402 - RNA, 19 nt, Artificial Sequence
  Description of Artificial Sequence: Synthetic oligonucleotide
  Sense strand starting at position 366 of SEQ ID NO: 916074
aggauuauugcgggaauua

SEQ ID NO: 1128403 - RNA, 19 nt, Artificial Sequence
  Description of Artificial Sequence: Synthetic oligonucleotide
  Antisense strand to SEQ ID NO: 1128402
uaauucccgcaauaauccu

SEQ ID NO: 1128404 - RNA, 19 nt, Artificial Sequence
  Description of Artificial Sequence: Synthetic oligonucleotide
  Sense strand starting at position 376 of SEQ ID NO: 916074
cgggaauuaaacgagcuaa

SEQ ID NO: 1128405 - RNA, 19 nt, Artificial Sequence
  Description of Artificial Sequence: Synthetic oligonucleotide
  Antisense strand to SEQ ID NO: 1128404
uuagcucguuuaauucccg

SEQ ID NO: 1128406 - RNA, 19 nt, Artificial Sequence
  Description of Artificial Sequence: Synthetic oligonucleotide
  Sense strand starting at position 403 of SEQ ID NO: 916074
aaagcaccuuguuuagaga

SEQ ID NO: 1128407 - RNA, 19 nt, Artificial Sequence
  Description of Artificial Sequence: Synthetic oligonucleotide
  Antisense strand to SEQ ID NO: 1128406
ucucuaaacaaggugcuuu

SEQ ID NO: 1128408 - RNA, 19 nt, Artificial Sequence
  Description of Artificial Sequence: Synthetic oligonucleotide
  Sense strand starting at position 532 of SEQ ID NO: 916074
ucaauagguugcccaagaa

SEQ ID NO: 1128409 - RNA, 19 nt, Artificial Sequence
  Description of Artificial Sequence: Synthetic oligonucleotide
  Antisense strand to SEQ ID NO: 1128408
uucuugggcaaccuauuga

SEQ ID NO: 1128410 - RNA, 19 nt, Artificial Sequence
  Description of Artificial Sequence: Synthetic oligonucleotide
  Sense strand starting at position 552 of SEQ ID NO: 916074
agaauuacaucagugcuga

SEQ ID NO: 1128411 - RNA, 19 nt, Artificial Sequence
  Description of Artificial Sequence: Synthetic oligonucleotide
  Antisense strand to SEQ ID NO: 1128410
ucagcacugauguaauucu

SEQ ID NO: 1128412 - RNA, 19 nt, Artificial Sequence
  Description of Artificial Sequence: Synthetic oligonucleotide
  Sense strand starting at position 553 of SEQ ID NO: 916074
gaauuacaucagugcugag

SEQ ID NO: 1128413 - RNA, 19 nt, Artificial Sequence
  Description of Artificial Sequence: Synthetic oligonucleotide
  Antisense strand to SEQ ID NO: 1128412
cucagcacugauguaauuc

SEQ ID NO: 1128414 - RNA, 19 nt, Artificial Sequence
  Description of Artificial Sequence: Synthetic oligonucleotide
  Sense strand starting at position 578 of SEQ ID NO: 916074
auauuugugcagugugaau

SEQ ID NO: 1128415 - RNA, 19 nt, Artificial Sequence
  Description of Artificial Sequence: Synthetic oligonucleotide
  Antisense strand to SEQ ID NO: 1128414
auucacacugcacaaauau

SEQ ID NO: 1128416 - RNA, 19 nt, Artificial Sequence
  Description of Artificial Sequence: Synthetic oligonucleotide
  Sense strand starting at position 690 of SEQ ID NO: 916074
uugccauaaccagaaugua

SEQ ID NO: 1128417 - RNA, 19 nt, Artificial Sequence
  Description of Artificial Sequence: Synthetic oligonucleotide
  Antisense strand to SEQ ID NO: 1128416
uacauucugguuauggcaa

SEQ ID NO: 1128418 - RNA, 19 nt, Artificial Sequence
  Description of Artificial Sequence: Synthetic oligonucleotide
  Sense strand starting at position 918 of SEQ ID NO: 916074
cugguauaccaauaauugu

SEQ ID NO: 1128419 - RNA, 19 nt, Artificial Sequence
  Description of Artificial Sequence: Synthetic oligonucleotide
  Antisense strand to SEQ ID NO: 1128418
acaauuauugguauaccag

SEQ ID NO: 1128420 - RNA, 19 nt, Artificial Sequence
  Description of Artificial Sequence: Synthetic oligonucleotide
  Sense strand starting at position 1191 of SEQ ID NO: 916074
acuaauaauuggucacuga

SEQ ID NO: 1128421 - RNA, 19 nt, Artificial Sequence
  Description of Artificial Sequence: Synthetic oligonucleotide
  Antisense strand to SEQ ID NO: 1128420
ucagugaccaauuauuagu

SEQ ID NO: 1128422 - RNA, 19 nt, Artificial Sequence
  Description of Artificial Sequence: Synthetic oligonucleotide
  Sense strand starting at position 1227 of SEQ ID NO: 916074
agguuuagggugcauucaa

SEQ ID NO: 1128423 - RNA, 19 nt, Artificial Sequence
  Description of Artificial Sequence: Synthetic oligonucleotide
  Antisense strand to SEQ ID NO: 1128422
uugaaugcacccuaaaccu

SEQ ID NO: 1128424 - RNA, 19 nt, Artificial Sequence
  Description of Artificial Sequence: Synthetic oligonucleotide
  Sense strand starting at position 1748 of SEQ ID NO: 916074
agagucgaaguguaauuga

SEQ ID NO: 1128425 - RNA, 19 nt, Artificial Sequence
  Description of Artificial Sequence: Synthetic oligonucleotide
  Antisense strand to SEQ ID NO: 1128424
ucaauuacacuucgacucu

SEQ ID NO: 1128426 - RNA, 19 nt, Artificial Sequence
  Description of Artificial Sequence: Synthetic oligonucleotide
  Sense strand starting at position 1753 of SEQ ID NO: 916074
cgaaguguaauugaguaua

SEQ ID NO: 1128427 - RNA, 19 nt, Artificial Sequence
  Description of Artificial Sequence: Synthetic oligonucleotide
  Antisense strand to SEQ ID NO: 1128426
uauacucaauuacacuucg

SEQ ID NO: 1128428 - RNA, 19 nt, Artificial Sequence
  Description of Artificial Sequence: Synthetic oligonucleotide
  Sense strand starting at position 1758 of SEQ ID NO: 916074
uguaauugaguauauccau

SEQ ID NO: 1128429 - RNA, 19 nt, Artificial Sequence
  Description of Artificial Sequence: Synthetic oligonucleotide
  Antisense strand to SEQ ID NO: 1128428
auggauauacucaauuaca

SEQ ID NO: 1128430 - RNA, 19 nt, Artificial Sequence
  Description of Artificial Sequence: Synthetic oligonucleotide
  Sense strand starting at position 1807 of SEQ ID NO: 916074
auuccauuguucuugagag

SEQ ID NO: 1128431 - RNA, 19 nt, Artificial Sequence
  Description of Artificial Sequence: Synthetic oligonucleotide
  Antisense strand to SEQ ID NO: 1128430
cucucaagaacaauggaau

SEQ ID NO: 1128432 - RNA, 19 nt, Artificial Sequence
  Description of Artificial Sequence: Synthetic oligonucleotide
  Sense strand starting at position 1860 of SEQ ID NO: 916074
cuuucugcuccugagauga

SEQ ID NO: 1128433 - RNA, 19 nt, Artificial Sequence
  Description of Artificial Sequence: Synthetic oligonucleotide
  Antisense strand to SEQ ID NO: 1128432
ucaucucaggagcagaaag

SEQ ID NO: 1128434 - RNA, 19 nt, Artificial Sequence
  Description of Artificial Sequence: Synthetic oligonucleotide
  Sense strand starting at position 1871 of SEQ ID NO: 916074
ugagaugacugucugugga

SEQ ID NO: 1128435 - RNA, 19 nt, Artificial Sequence
  Description of Artificial Sequence: Synthetic oligonucleotide
  Antisense strand to SEQ ID NO: 1128434
uccacagacagucaucuca

SEQ ID NO: 1128436 - RNA, 19 nt, Artificial Sequence
  Description of Artificial Sequence: Synthetic oligonucleotide
  Sense strand starting at position 1873 of SEQ ID NO: 916074
agaugacugucuguggaca

SEQ ID NO: 1128437 - RNA, 19 nt, Artificial Sequence
  Description of Artificial Sequence: Synthetic oligonucleotide
  Antisense strand to SEQ ID NO: 1128436
uguccacagacagucaucu

SEQ ID NO: 1128438 - RNA, 19 nt, Artificial Sequence
  Description of Artificial Sequence: Synthetic oligonucleotide
  Sense strand starting at position 1874 of SEQ ID NO: 916074
gaugacugucuguggacaa

SEQ ID NO: 1128439 - RNA, 19 nt, Artificial Sequence
  Description of Artificial Sequence: Synthetic oligonucleotide
  Antisense strand to SEQ ID NO: 1128438
uuguccacagacagucauc

SEQ ID NO: 1128440 - RNA, 19 nt, Artificial Sequence
  Description of Artificial Sequence: Synthetic oligonucleotide
  Sense strand starting at position 1895 of SEQ ID NO: 916074
gagaaucucugagucaaau

SEQ ID NO: 1128441 - RNA, 19 nt, Artificial Sequence
  Description of Artificial Sequence: Synthetic oligonucleotide
  Antisense strand to SEQ ID NO: 1128440
auuugacucagagauucuc

SEQ ID NO: 1128442 - RNA, 19 nt, Artificial Sequence
  Description of Artificial Sequence: Synthetic oligonucleotide
  Sense strand starting at position 1924 of SEQ ID NO: 916074
agguacuuaccggaguuua

SEQ ID NO: 1128443 - RNA, 19 nt, Artificial Sequence
  Description of Artificial Sequence: Synthetic oligonucleotide
  Antisense strand to SEQ ID NO: 1128442
uaaacuccgguaaguaccu

SEQ ID NO: 1128444 - RNA, 19 nt, Artificial Sequence
  Description of Artificial Sequence: Synthetic oligonucleotide
  Sense strand starting at position 2293 of SEQ ID NO: 916074
uugguaggagcuuacaaua

SEQ ID NO: 1128445 - RNA, 19 nt, Artificial Sequence
  Description of Artificial Sequence: Synthetic oligonucleotide
  Antisense strand to SEQ ID NO: 1128444
uauuguaagcuccuaccaa

SEQ ID NO: 1128446 - RNA, 19 nt, Artificial Sequence
  Description of Artificial Sequence: Synthetic oligonucleotide
  Sense strand starting at position 2331 of SEQ ID NO: 916074
ugaagaaacucauugcuua

SEQ ID NO: 1128447 - RNA, 19 nt, Artificial Sequence
  Description of Artificial Sequence: Synthetic oligonucleotide
  Antisense strand to SEQ ID NO: 1128446
uaagcaaugaguuucuuca

SEQ ID NO: 1128448 - RNA, 19 nt, Artificial Sequence
  Description of Artificial Sequence: Synthetic oligonucleotide
  Sense strand starting at position 2532 of SEQ ID NO: 916074
uuuccaagucuauauagua

SEQ ID NO: 1128449 - RNA, 19 nt, Artificial Sequence
  Description of Artificial Sequence: Synthetic oligonucleotide
  Antisense strand to SEQ ID NO: 1128448
uacuauauagacuuggaaa

SEQ ID NO: 1128450 - RNA, 19 nt, Artificial Sequence
  Description of Artificial Sequence: Synthetic oligonucleotide
  Sense strand starting at position 2755 of SEQ ID NO: 916074
agguguugggacugaaaua

SEQ ID NO: 1128451 - RNA, 19 nt, Artificial Sequence
  Description of Artificial Sequence: Synthetic oligonucleotide
  Antisense strand to SEQ ID NO: 1128450
uauuucagucccaacaccu

SEQ ID NO: 1128452 - RNA, 19 nt, Artificial Sequence
  Description of Artificial Sequence: Synthetic oligonucleotide
  Sense strand starting at position 2852 of SEQ ID NO: 916074
ccuaacauugcuggaaacu

SEQ ID NO: 1128453 - RNA, 19 nt, Artificial Sequence
  Description of Artificial Sequence: Synthetic oligonucleotide
  Antisense strand to SEQ ID NO: 1128452
aguuuccagcaauguuagg

SEQ ID NO: 1128454 - RNA, 19 nt, Artificial Sequence
  Description of Artificial Sequence: Synthetic oligonucleotide
  Sense strand starting at position 2930 of SEQ ID NO: 916074
aguguugucaaggaucaac

SEQ ID NO: 1128455 - RNA, 19 nt, Artificial Sequence
  Description of Artificial Sequence: Synthetic oligonucleotide
  Antisense strand to SEQ ID NO: 1128454
guugauccuugacaacacu

SEQ ID NO: 1128456 - RNA, 19 nt, Artificial Sequence
  Description of Artificial Sequence: Synthetic oligonucleotide
  Sense strand starting at position 2962 of SEQ ID NO: 916074
aguuaauguggugaggaca

SEQ ID NO: 1128457 - RNA, 19 nt, Artificial Sequence
  Description of Artificial Sequence: Synthetic oligonucleotide
  Antisense strand to SEQ ID NO: 1128456
uguccucaccacauuaacu

SEQ ID NO: 1128458 - RNA, 19 nt, Artificial Sequence
  Description of Artificial Sequence: Synthetic oligonucleotide
  Sense strand starting at position 3098 of SEQ ID NO: 916074
agugguguuaaggaaaguu

SEQ ID NO: 1128459 - RNA, 19 nt, Artificial Sequence
  Description of Artificial Sequence: Synthetic oligonucleotide
  Antisense strand to SEQ ID NO: 1128458
aacuuuccuuaacaccacu

SEQ ID NO: 1128460 - RNA, 19 nt, Artificial Sequence
  Description of Artificial Sequence: Synthetic oligonucleotide
  Sense strand starting at position 3112 of SEQ ID NO: 916074
aaguuaaugugacuagacu

SEQ ID NO: 1128461 - RNA, 19 nt, Artificial Sequence
  Description of Artificial Sequence: Synthetic oligonucleotide
  Antisense strand to SEQ ID NO: 1128460
agucuagucacauuaacuu

SEQ ID NO: 1128462 - RNA, 19 nt, Artificial Sequence
  Description of Artificial Sequence: Synthetic oligonucleotide
  Sense strand starting at position 3121 of SEQ ID NO: 916074
ugacuagacucucuggauu

SEQ ID NO: 1128463 - RNA, 19 nt, Artificial Sequence
  Description of Artificial Sequence: Synthetic oligonucleotide
  Antisense strand to SEQ ID NO: 1128462
aauccagagagucuaguca

SEQ ID NO: 1128464 - RNA, 19 nt, Artificial Sequence
  Description of Artificial Sequence: Synthetic oligonucleotide
  Sense strand starting at position 3166 of SEQ ID NO: 916074
agagaaacuuugccuaucu

SEQ ID NO: 1128465 - RNA, 19 nt, Artificial Sequence
  Description of Artificial Sequence: Synthetic oligonucleotide
  Antisense strand to SEQ ID NO: 1128464
agauaggcaaaguuucucu

SEQ ID NO: 1128466 - RNA, 19 nt, Artificial Sequence
  Description of Artificial Sequence: Synthetic oligonucleotide
  Sense strand starting at position 3334 of SEQ ID NO: 916074
gugguagauuugcuucuca

SEQ ID NO: 1128467 - RNA, 19 nt, Artificial Sequence
  Description of Artificial Sequence: Synthetic oligonucleotide
  Antisense strand to SEQ ID NO: 1128466
ugagaagcaaaucuaccac

SEQ ID NO: 1128468 - RNA, 19 nt, Artificial Sequence
  Description of Artificial Sequence: Synthetic oligonucleotide
  Sense strand starting at position 3691 of SEQ ID NO: 916074
cuggccuaacuguaagauu

SEQ ID NO: 1128469 - RNA, 19 nt, Artificial Sequence
  Description of Artificial Sequence: Synthetic oligonucleotide
  Antisense strand to SEQ ID NO: 1128468
aaucuuacaguuaggccag

SEQ ID NO: 1128470 - RNA, 19 nt, Artificial Sequence
  Description of Artificial Sequence: Synthetic oligonucleotide
  Sense strand starting at position 337 of SEQ ID NO: 916075
uugagcauagauuauguua

SEQ ID NO: 1128471 - RNA, 19 nt, Artificial Sequence
  Description of Artificial Sequence: Synthetic oligonucleotide
  Antisense strand to SEQ ID NO: 1128470
uaacauaaucuaugcucaa

SEQ ID NO: 1128472 - RNA, 19 nt, Artificial Sequence
  Description of Artificial Sequence: Synthetic oligonucleotide
  Sense strand starting at position 358 of SEQ ID NO: 916075
ggaucuuugggauguugau

SEQ ID NO: 1128473 - RNA, 19 nt, Artificial Sequence
  Description of Artificial Sequence: Synthetic oligonucleotide
  Antisense strand to SEQ ID NO: 1128472
aucaacaucccaaagaucc

SEQ ID NO: 1128474 - RNA, 19 nt, Artificial Sequence
  Description of Artificial Sequence: Synthetic oligonucleotide
  Sense strand starting at position 418 of SEQ ID NO: 916075
aguucuuguccugcgucua

SEQ ID NO: 1128475 - RNA, 19 nt, Artificial Sequence
  Description of Artificial Sequence: Synthetic oligonucleotide
  Antisense strand to SEQ ID NO: 1128474
uagacgcaggacaagaacu

SEQ ID NO: 1128476 - RNA, 19 nt, Artificial Sequence
  Description of Artificial Sequence: Synthetic oligonucleotide
  Sense strand starting at position 430 of SEQ ID NO: 916075
gcgucuaugguugcuagau

SEQ ID NO: 1128477 - RNA, 19 nt, Artificial Sequence
  Description of Artificial Sequence: Synthetic oligonucleotide
  Antisense strand to SEQ ID NO: 1128476
aucuagcaaccauagacgc

SEQ ID NO: 1128478 - RNA, 19 nt, Artificial Sequence
  Description of Artificial Sequence: Synthetic oligonucleotide
  Sense strand starting at position 652 of SEQ ID NO: 916075
ccuccuaagguaugacauu

SEQ ID NO: 1128479 - RNA, 19 nt, Artificial Sequence
  Description of Artificial Sequence: Synthetic oligonucleotide
  Antisense strand to SEQ ID NO: 1128478
aaugucauaccuuaggagg

SEQ ID NO: 1128480 - RNA, 19 nt, Artificial Sequence
  Description of Artificial Sequence: Synthetic oligonucleotide
  Sense strand starting at position 658 of SEQ ID NO: 916075
aagguaugacauugagcau

SEQ ID NO: 1128481 - RNA, 19 nt, Artificial Sequence
  Description of Artificial Sequence: Synthetic oligonucleotide
  Antisense strand to SEQ ID NO: 1128480
augcucaaugucauaccuu

SEQ ID NO: 1128482 - RNA, 19 nt, Artificial Sequence
  Description of Artificial Sequence: Synthetic oligonucleotide
  Sense strand starting at position 750 of SEQ ID NO: 916075
uucuacuuggaauguuauu

SEQ ID NO: 1128483 - RNA, 19 nt, Artificial Sequence
  Description of Artificial Sequence: Synthetic oligonucleotide
  Antisense strand to SEQ ID NO: 1128482
aauaacauuccaaguagaa

SEQ ID NO: 1128484 - RNA, 19 nt, Artificial Sequence
  Description of Artificial Sequence: Synthetic oligonucleotide
  Sense strand starting at position 775 of SEQ ID NO: 916075
auuuguuugucuccuguaa

SEQ ID NO: 1128485 - RNA, 19 nt, Artificial Sequence
  Description of Artificial Sequence: Synthetic oligonucleotide
  Antisense strand to SEQ ID NO: 1128484
uuacaggagacaaacaaau

SEQ ID NO: 1128486 - RNA, 19 nt, Artificial Sequence
  Description of Artificial Sequence: Synthetic oligonucleotide
  Sense strand starting at position 864 of SEQ ID NO: 916075
auaguaauuugugcguaac

SEQ ID NO: 1128487 - RNA, 19 nt, Artificial Sequence
  Description of Artificial Sequence: Synthetic oligonucleotide
  Antisense strand to SEQ ID NO: 1128486
guuacgcacaaauuacuau

SEQ ID NO: 1128488 - RNA, 19 nt, Artificial Sequence
  Description of Artificial Sequence: Synthetic oligonucleotide
  Sense strand starting at position 865 of SEQ ID NO: 916075
uaguaauuugugcguaacu

SEQ ID NO: 1128489 - RNA, 19 nt, Artificial Sequence
  Description of Artificial Sequence: Synthetic oligonucleotide
  Antisense strand to SEQ ID NO: 1128488
aguuacgcacaaauuacua

SEQ ID NO: 1128490 - RNA, 19 nt, Artificial Sequence
  Description of Artificial Sequence: Synthetic oligonucleotide
  Sense strand starting at position 866 of SEQ ID NO: 916075
aguaauuugugcguaacuu

SEQ ID NO: 1128491 - RNA, 19 nt, Artificial Sequence
  Description of Artificial Sequence: Synthetic oligonucleotide
  Antisense strand to SEQ ID NO: 1128490
aaguuacgcacaaauuacu

SEQ ID NO: 1128492 - RNA, 19 nt, Artificial Sequence
  Description of Artificial Sequence: Synthetic oligonucleotide
  Sense strand starting at position 867 of SEQ ID NO: 916075
guaauuugugcguaacuuu

SEQ ID NO: 1128493 - RNA, 19 nt, Artificial Sequence
  Description of Artificial Sequence: Synthetic oligonucleotide
  Antisense strand to SEQ ID NO: 1128492
aaaguuacgcacaaauuac

SEQ ID NO: 1128494 - RNA, 19 nt, Artificial Sequence
  Description of Artificial Sequence: Synthetic oligonucleotide
  Sense strand starting at position 1159 of SEQ ID NO: 916075
gacaaugagucagcagagu

SEQ ID NO: 1128495 - RNA, 19 nt, Artificial Sequence
  Description of Artificial Sequence: Synthetic oligonucleotide
  Antisense strand to SEQ ID NO: 1128494
acucugcugacucauuguc

SEQ ID NO: 1128496 - RNA, 19 nt, Artificial Sequence
  Description of Artificial Sequence: Synthetic oligonucleotide
  Sense strand starting at position 1336 of SEQ ID NO: 916075
gagggaucaguaggagcaa

SEQ ID NO: 1128497 - RNA, 19 nt, Artificial Sequence
  Description of Artificial Sequence: Synthetic oligonucleotide
  Antisense strand to SEQ ID NO: 1128496
uugcuccuacugaucccuc

SEQ ID NO: 1128498 - RNA, 19 nt, Artificial Sequence
  Description of Artificial Sequence: Synthetic oligonucleotide
  Sense strand starting at position 1385 of SEQ ID NO: 916075
ugucuacugccugcaguau

SEQ ID NO: 1128499 - RNA, 19 nt, Artificial Sequence
  Description of Artificial Sequence: Synthetic oligonucleotide
  Antisense strand to SEQ ID NO: 1128498
auacugcaggcaguagaca

SEQ ID NO: 1128500 - RNA, 19 nt, Artificial Sequence
  Description of Artificial Sequence: Synthetic oligonucleotide
  Sense strand starting at position 1397 of SEQ ID NO: 916075
gcaguaucaggccauugaa

SEQ ID NO: 1128501 - RNA, 19 nt, Artificial Sequence
  Description of Artificial Sequence: Synthetic oligonucleotide
  Antisense strand to SEQ ID NO: 1128500
uucaauggccugauacugc

SEQ ID NO: 1128502 - RNA, 19 nt, Artificial Sequence
  Description of Artificial Sequence: Synthetic oligonucleotide
  Sense strand starting at position 1400 of SEQ ID NO: 916075
guaucaggccauugaaaua

SEQ ID NO: 1128503 - RNA, 19 nt, Artificial Sequence
  Description of Artificial Sequence: Synthetic oligonucleotide
  Antisense strand to SEQ ID NO: 1128502
uauuucaauggccugauac

SEQ ID NO: 1128504 - RNA, 19 nt, Artificial Sequence
  Description of Artificial Sequence: Synthetic oligonucleotide
  Sense strand starting at position 1477 of SEQ ID NO: 916075
uccaucucugcagaugaua

SEQ ID NO: 1128505 - RNA, 19 nt, Artificial Sequence
  Description of Artificial Sequence: Synthetic oligonucleotide
  Antisense strand to SEQ ID NO: 1128504
uaucaucugcagagaugga

SEQ ID NO: 1128506 - RNA, 19 nt, Artificial Sequence
  Description of Artificial Sequence: Synthetic oligonucleotide
  Sense strand starting at position 1654 of SEQ ID NO: 916075
ucagcaucaucuguaauga

SEQ ID NO: 1128507 - RNA, 19 nt, Artificial Sequence
  Description of Artificial Sequence: Synthetic oligonucleotide
  Antisense strand to SEQ ID NO: 1128506
ucauuacagaugaugcuga

SEQ ID NO: 1128508 - RNA, 19 nt, Artificial Sequence
  Description of Artificial Sequence: Synthetic oligonucleotide
  Sense strand starting at position 2107 of SEQ ID NO: 916075
cccgguaaacuugacaguu

SEQ ID NO: 1128509 - RNA, 19 nt, Artificial Sequence
  Description of Artificial Sequence: Synthetic oligonucleotide
  Antisense strand to SEQ ID NO: 1128508
aacugucaaguuuaccggg

SEQ ID NO: 1128510 - RNA, 19 nt, Artificial Sequence
  Description of Artificial Sequence: Synthetic oligonucleotide
  Sense strand starting at position 2116 of SEQ ID NO: 916075
cuugacaguuucuuauaga

SEQ ID NO: 1128511 - RNA, 19 nt, Artificial Sequence
  Description of Artificial Sequence: Synthetic oligonucleotide
  Antisense strand to SEQ ID NO: 1128510
ucuauaagaaacugucaag

SEQ ID NO: 1128512 - RNA, 19 nt, Artificial Sequence
  Description of Artificial Sequence: Synthetic oligonucleotide
  Sense strand starting at position 2370 of SEQ ID NO: 916075
augguuucuguagauauua

SEQ ID NO: 1128513 - RNA, 19 nt, Artificial Sequence
  Description of Artificial Sequence: Synthetic oligonucleotide
  Antisense strand to SEQ ID NO: 1128512
uaauaucuacagaaaccau

SEQ ID NO: 1128514 - RNA, 19 nt, Artificial Sequence
  Description of Artificial Sequence: Synthetic oligonucleotide
  Sense strand starting at position 2378 of SEQ ID NO: 916075
uguagauauuagguuaacu

SEQ ID NO: 1128515 - RNA, 19 nt, Artificial Sequence
  Description of Artificial Sequence: Synthetic oligonucleotide
  Antisense strand to SEQ ID NO: 1128514
aguuaaccuaauaucuaca

SEQ ID NO: 1128516 - RNA, 19 nt, Artificial Sequence
  Description of Artificial Sequence: Synthetic oligonucleotide
  Sense strand starting at position 2825 of SEQ ID NO: 916075
aauggaguaucauucgaca

SEQ ID NO: 1128517 - RNA, 19 nt, Artificial Sequence
  Description of Artificial Sequence: Synthetic oligonucleotide
  Antisense strand to SEQ ID NO: 1128516
ugucgaaugauacuccauu

SEQ ID NO: 1128518 - RNA, 19 nt, Artificial Sequence
  Description of Artificial Sequence: Synthetic oligonucleotide
  Sense strand starting at position 2827 of SEQ ID NO: 916075
uggaguaucauucgacaac

SEQ ID NO: 1128519 - RNA, 19 nt, Artificial Sequence
  Description of Artificial Sequence: Synthetic oligonucleotide
  Antisense strand to SEQ ID NO: 1128518
guugucgaaugauacucca

SEQ ID NO: 1128520 - RNA, 19 nt, Artificial Sequence
  Description of Artificial Sequence: Synthetic oligonucleotide
  Sense strand starting at position 2988 of SEQ ID NO: 916075
aucaguugugaccaaugau

SEQ ID NO: 1128521 - RNA, 19 nt, Artificial Sequence
  Description of Artificial Sequence: Synthetic oligonucleotide
  Antisense strand to SEQ ID NO: 1128520
aucauuggucacaacugau

SEQ ID NO: 1128522 - RNA, 19 nt, Artificial Sequence
  Description of Artificial Sequence: Synthetic oligonucleotide
  Sense strand starting at position 3016 of SEQ ID NO: 916075
gaggaagauugauaggaag

SEQ ID NO: 1128523 - RNA, 19 nt, Artificial Sequence
  Description of Artificial Sequence: Synthetic oligonucleotide
  Antisense strand to SEQ ID NO: 1128522
cuuccuaucaaucuuccuc

SEQ ID NO: 1128524 - RNA, 19 nt, Artificial Sequence
  Description of Artificial Sequence: Synthetic oligonucleotide
  Sense strand starting at position 3038 of SEQ ID NO: 916075
gaagauugcugaguaggua

SEQ ID NO: 1128525 - RNA, 19 nt, Artificial Sequence
  Description of Artificial Sequence: Synthetic oligonucleotide
  Antisense strand to SEQ ID NO: 1128524
uaccuacucagcaaucuuc

SEQ ID NO: 1128526 - RNA, 19 nt, Artificial Sequence
  Description of Artificial Sequence: Synthetic oligonucleotide
  Sense strand starting at position 3146 of SEQ ID NO: 916075
ggccuauugaauggguuga

SEQ ID NO: 1128527 - RNA, 19 nt, Artificial Sequence
  Description of Artificial Sequence: Synthetic oligonucleotide
  Antisense strand to SEQ ID NO: 1128526
ucaacccauucaauaggcc

SEQ ID NO: 1128528 - RNA, 19 nt, Artificial Sequence
  Description of Artificial Sequence: Synthetic oligonucleotide
  Sense strand starting at position 3168 of SEQ ID NO: 916075
agaccuuccugauugauac

SEQ ID NO: 1128529 - RNA, 19 nt, Artificial Sequence
  Description of Artificial Sequence: Synthetic oligonucleotide
  Antisense strand to SEQ ID NO: 1128528
guaucaaucaggaaggucu

SEQ ID NO: 1128530 - RNA, 19 nt, Artificial Sequence
  Description of Artificial Sequence: Synthetic oligonucleotide
  Sense strand starting at position 3265 of SEQ ID NO: 916075
aaaggugucaaguggaagu

SEQ ID NO: 1128531 - RNA, 19 nt, Artificial Sequence
  Description of Artificial Sequence: Synthetic oligonucleotide
  Antisense strand to SEQ ID NO: 1128530
acuuccacuugacaccuuu

SEQ ID NO: 1128532 - RNA, 19 nt, Artificial Sequence
  Description of Artificial Sequence: Synthetic oligonucleotide
  Sense strand starting at position 3267 of SEQ ID NO: 916075
aggugucaaguggaaguaa

SEQ ID NO: 1128533 - RNA, 19 nt, Artificial Sequence
  Description of Artificial Sequence: Synthetic oligonucleotide
  Antisense strand to SEQ ID NO: 1128532
uuacuuccacuugacaccu

SEQ ID NO: 1128534 - RNA, 19 nt, Artificial Sequence
  Description of Artificial Sequence: Synthetic oligonucleotide
  Sense strand starting at position 3346 of SEQ ID NO: 916075
gagguucuuguggaaaguu

SEQ ID NO: 1128535 - RNA, 19 nt, Artificial Sequence
  Description of Artificial Sequence: Synthetic oligonucleotide
  Antisense strand to SEQ ID NO: 1128534
aacuuuccacaagaaccuc

SEQ ID NO: 1128536 - RNA, 19 nt, Artificial Sequence
  Description of Artificial Sequence: Synthetic oligonucleotide
  Sense strand starting at position 3501 of SEQ ID NO: 916075
ggcuauugugaacauggga

SEQ ID NO: 1128537 - RNA, 19 nt, Artificial Sequence
  Description of Artificial Sequence: Synthetic oligonucleotide
  Antisense strand to SEQ ID NO: 1128536
ucccauguucacaauagcc

SEQ ID NO: 1128538 - RNA, 19 nt, Artificial Sequence
  Description of Artificial Sequence: Synthetic oligonucleotide
  Sense strand starting at position 3524 of SEQ ID NO: 916075
augagauauuuguaagacu

SEQ ID NO: 1128539 - RNA, 19 nt, Artificial Sequence
  Description of Artificial Sequence: Synthetic oligonucleotide
  Antisense strand to SEQ ID NO: 1128538
agucuuacaaauaucucau

SEQ ID NO: 1128540 - RNA, 19 nt, Artificial Sequence
  Description of Artificial Sequence: Synthetic oligonucleotide
  Sense strand starting at position 3527 of SEQ ID NO: 916075
agauauuuguaagacuaac

SEQ ID NO: 1128541 - RNA, 19 nt, Artificial Sequence
  Description of Artificial Sequence: Synthetic oligonucleotide
  Antisense strand to SEQ ID NO: 1128540
guuagucuuacaaauaucu

SEQ ID NO: 1128542 - RNA, 19 nt, Artificial Sequence
  Description of Artificial Sequence: Synthetic oligonucleotide
  Sense strand starting at position 3554 of SEQ ID NO: 916075
ugcauuaaaugguccauau

SEQ ID NO: 1128543 - RNA, 19 nt, Artificial Sequence
  Description of Artificial Sequence: Synthetic oligonucleotide
  Antisense strand to SEQ ID NO: 1128542
auauggaccauuuaaugca

SEQ ID NO: 1128544 - RNA, 19 nt, Artificial Sequence
  Description of Artificial Sequence: Synthetic oligonucleotide
  Sense strand starting at position 3632 of SEQ ID NO: 916075
aagcccuguccugaaaggu

SEQ ID NO: 1128545 - RNA, 19 nt, Artificial Sequence
  Description of Artificial Sequence: Synthetic oligonucleotide
  Antisense strand to SEQ ID NO: 1128544
accuuucaggacagggcuu

SEQ ID NO: 1128546 - RNA, 19 nt, Artificial Sequence
  Description of Artificial Sequence: Synthetic oligonucleotide
  Sense strand starting at position 3704 of SEQ ID NO: 916075
gcaagacagcaaggauaaa

SEQ ID NO: 1128547 - RNA, 19 nt, Artificial Sequence
  Description of Artificial Sequence: Synthetic oligonucleotide
  Antisense strand to SEQ ID NO: 1128546
uuuauccuugcugucuugc

SEQ ID NO: 1128548 - RNA, 19 nt, Artificial Sequence
  Description of Artificial Sequence: Synthetic oligonucleotide
  Sense strand starting at position 3979 of SEQ ID NO: 916075
auaugaaaccuaggcuuua

SEQ ID NO: 1128549 - RNA, 19 nt, Artificial Sequence
  Description of Artificial Sequence: Synthetic oligonucleotide
  Antisense strand to SEQ ID NO: 1128548
uaaagccuagguuucauau

SEQ ID NO: 1128550 - RNA, 19 nt, Artificial Sequence
  Description of Artificial Sequence: Synthetic oligonucleotide
  Sense strand starting at position 149 of SEQ ID NO: 916076
ggccaauagccagagcaaa

SEQ ID NO: 1128551 - RNA, 19 nt, Artificial Sequence
  Description of Artificial Sequence: Synthetic oligonucleotide
  Antisense strand to SEQ ID NO: 1128550
uuugcucuggcuauuggcc

SEQ ID NO: 1128552 - RNA, 19 nt, Artificial Sequence
  Description of Artificial Sequence: Synthetic oligonucleotide
  Sense strand starting at position 170 of SEQ ID NO: 916076
cagugaaagguaugagguu

SEQ ID NO: 1128553 - RNA, 19 nt, Artificial Sequence
  Description of Artificial Sequence: Synthetic oligonucleotide
  Antisense strand to SEQ ID NO: 1128552
aaccucauaccuuucacug

SEQ ID NO: 1128554 - RNA, 19 nt, Artificial Sequence
  Description of Artificial Sequence: Synthetic oligonucleotide
  Sense strand starting at position 212 of SEQ ID NO: 916076
uaggacucuguauguaaga

SEQ ID NO: 1128555 - RNA, 19 nt, Artificial Sequence
  Description of Artificial Sequence: Synthetic oligonucleotide
  Antisense strand to SEQ ID NO: 1128554
ucuuacauacagaguccua

SEQ ID NO: 1128556 - RNA, 19 nt, Artificial Sequence
  Description of Artificial Sequence: Synthetic oligonucleotide
  Sense strand starting at position 345 of SEQ ID NO: 916076
uuugacuucuggucauaag

SEQ ID NO: 1128557 - RNA, 19 nt, Artificial Sequence
  Description of Artificial Sequence: Synthetic oligonucleotide
  Antisense strand to SEQ ID NO: 1128556
cuuaugaccagaagucaaa

SEQ ID NO: 1128558 - RNA, 19 nt, Artificial Sequence
  Description of Artificial Sequence: Synthetic oligonucleotide
  Sense strand starting at position 354 of SEQ ID NO: 916076
uggucauaagcaugacuau

SEQ ID NO: 1128559 - RNA, 19 nt, Artificial Sequence
  Description of Artificial Sequence: Synthetic oligonucleotide
  Antisense strand to SEQ ID NO: 1128558
auagucaugcuuaugacca

SEQ ID NO: 1128560 - RNA, 19 nt, Artificial Sequence
  Description of Artificial Sequence: Synthetic oligonucleotide
  Sense strand starting at position 355 of SEQ ID NO: 916076
ggucauaagcaugacuaua

SEQ ID NO: 1128561 - RNA, 19 nt, Artificial Sequence
  Description of Artificial Sequence: Synthetic oligonucleotide
  Antisense strand to SEQ ID NO: 1128560
uauagucaugcuuaugacc

SEQ ID NO: 1128562 - RNA, 19 nt, Artificial Sequence
  Description of Artificial Sequence: Synthetic oligonucleotide
  Sense strand starting at position 366 of SEQ ID NO: 916076
ugacuauagguagguaauu

SEQ ID NO: 1128563 - RNA, 19 nt, Artificial Sequence
  Description of Artificial Sequence: Synthetic oligonucleotide
  Antisense strand to SEQ ID NO: 1128562
aauuaccuaccuauaguca

SEQ ID NO: 1128564 - RNA, 19 nt, Artificial Sequence
  Description of Artificial Sequence: Synthetic oligonucleotide
  Sense strand starting at position 417 of SEQ ID NO: 916076
gcauucuaagauugaacua

SEQ ID NO: 1128565 - RNA, 19 nt, Artificial Sequence
  Description of Artificial Sequence: Synthetic oligonucleotide
  Antisense strand to SEQ ID NO: 1128564
uaguucaaucuuagaaugc

SEQ ID NO: 1128566 - RNA, 19 nt, Artificial Sequence
  Description of Artificial Sequence: Synthetic oligonucleotide
  Sense strand starting at position 523 of SEQ ID NO: 916076
gcaauuaaacccuggaaug

SEQ ID NO: 1128567 - RNA, 19 nt, Artificial Sequence
  Description of Artificial Sequence: Synthetic oligonucleotide
  Antisense strand to SEQ ID NO: 1128566
cauuccaggguuuaauugc

SEQ ID NO: 1128568 - RNA, 19 nt, Artificial Sequence
  Description of Artificial Sequence: Synthetic oligonucleotide
  Sense strand starting at position 701 of SEQ ID NO: 916076
gugccuaagcuggaagaaa

SEQ ID NO: 1128569 - RNA, 19 nt, Artificial Sequence
  Description of Artificial Sequence: Synthetic oligonucleotide
  Antisense strand to SEQ ID NO: 1128568
uuucuuccagcuuaggcac

SEQ ID NO: 1128570 - RNA, 19 nt, Artificial Sequence
  Description of Artificial Sequence: Synthetic oligonucleotide
  Sense strand starting at position 966 of SEQ ID NO: 916076
auucuuacccuagagcaga

SEQ ID NO: 1128571 - RNA, 19 nt, Artificial Sequence
  Description of Artificial Sequence: Synthetic oligonucleotide
  Antisense strand to SEQ ID NO: 1128570
ucugcucuaggguaagaau

SEQ ID NO: 1128572 - RNA, 19 nt, Artificial Sequence
  Description of Artificial Sequence: Synthetic oligonucleotide
  Sense strand starting at position 1081 of SEQ ID NO: 916076
ugaugaaggcaccauguua

SEQ ID NO: 1128573 - RNA, 19 nt, Artificial Sequence
  Description of Artificial Sequence: Synthetic oligonucleotide
  Antisense strand to SEQ ID NO: 1128572
uaacauggugccuucauca

SEQ ID NO: 1128574 - RNA, 19 nt, Artificial Sequence
  Description of Artificial Sequence: Synthetic oligonucleotide
  Sense strand starting at position 1253 of SEQ ID NO: 916076
aguaaauugccacagguau

SEQ ID NO: 1128575 - RNA, 19 nt, Artificial Sequence
  Description of Artificial Sequence: Synthetic oligonucleotide
  Antisense strand to SEQ ID NO: 1128574
auaccuguggcaauuuacu

SEQ ID NO: 1128576 - RNA, 19 nt, Artificial Sequence
  Description of Artificial Sequence: Synthetic oligonucleotide
  Sense strand starting at position 1315 of SEQ ID NO: 916076
agauuugauugagagugag

SEQ ID NO: 1128577 - RNA, 19 nt, Artificial Sequence
  Description of Artificial Sequence: Synthetic oligonucleotide
  Antisense strand to SEQ ID NO: 1128576
cucacucucaaucaaaucu

SEQ ID NO: 1128578 - RNA, 19 nt, Artificial Sequence
  Description of Artificial Sequence: Synthetic oligonucleotide
  Sense strand starting at position 1318 of SEQ ID NO: 916076
uuugauugagagugagcaa

SEQ ID NO: 1128579 - RNA, 19 nt, Artificial Sequence
  Description of Artificial Sequence: Synthetic oligonucleotide
  Antisense strand to SEQ ID NO: 1128578
uugcucacucucaaucaaa

SEQ ID NO: 1128580 - RNA, 19 nt, Artificial Sequence
  Description of Artificial Sequence: Synthetic oligonucleotide
  Sense strand starting at position 1646 of SEQ ID NO: 916076
uuaccagaucucugaagug

SEQ ID NO: 1128581 - RNA, 19 nt, Artificial Sequence
  Description of Artificial Sequence: Synthetic oligonucleotide
  Antisense strand to SEQ ID NO: 1128580
cacuucagagaucugguaa

SEQ ID NO: 1128582 - RNA, 19 nt, Artificial Sequence
  Description of Artificial Sequence: Synthetic oligonucleotide
  Sense strand starting at position 1661 of SEQ ID NO: 916076
aguggaaacgcgaguucua

SEQ ID NO: 1128583 - RNA, 19 nt, Artificial Sequence
  Description of Artificial Sequence: Synthetic oligonucleotide
  Antisense strand to SEQ ID NO: 1128582
uagaacucgcguuuccacu

SEQ ID NO: 1128584 - RNA, 19 nt, Artificial Sequence
  Description of Artificial Sequence: Synthetic oligonucleotide
  Sense strand starting at position 1815 of SEQ ID NO: 916076
aguaaauugagauggcaaa

SEQ ID NO: 1128585 - RNA, 19 nt, Artificial Sequence
  Description of Artificial Sequence: Synthetic oligonucleotide
  Antisense strand to SEQ ID NO: 1128584
uuugccaucucaauuuacu

SEQ ID NO: 1128586 - RNA, 19 nt, Artificial Sequence
  Description of Artificial Sequence: Synthetic oligonucleotide
  Sense strand starting at position 1816 of SEQ ID NO: 916076
guaaauugagauggcaaau

SEQ ID NO: 1128587 - RNA, 19 nt, Artificial Sequence
  Description of Artificial Sequence: Synthetic oligonucleotide
  Antisense strand to SEQ ID NO: 1128586
auuugccaucucaauuuac

SEQ ID NO: 1128588 - RNA, 19 nt, Artificial Sequence
  Description of Artificial Sequence: Synthetic oligonucleotide
  Sense strand starting at position 1827 of SEQ ID NO: 916076
uggcaaauuuccuucugcu

SEQ ID NO: 1128589 - RNA, 19 nt, Artificial Sequence
  Description of Artificial Sequence: Synthetic oligonucleotide
  Antisense strand to SEQ ID NO: 1128588
agcagaaggaaauuugcca

SEQ ID NO: 1128590 - RNA, 19 nt, Artificial Sequence
  Description of Artificial Sequence: Synthetic oligonucleotide
  Sense strand starting at position 1859 of SEQ ID NO: 916076
guggacuuccuccaugaau

SEQ ID NO: 1128591 - RNA, 19 nt, Artificial Sequence
  Description of Artificial Sequence: Synthetic oligonucleotide
  Antisense strand to SEQ ID NO: 1128590
auucauggaggaaguccac

SEQ ID NO: 1128592 - RNA, 19 nt, Artificial Sequence
  Description of Artificial Sequence: Synthetic oligonucleotide
  Sense strand starting at position 1861 of SEQ ID NO: 916076
ggacuuccuccaugaauaa

SEQ ID NO: 1128593 - RNA, 19 nt, Artificial Sequence
  Description of Artificial Sequence: Synthetic oligonucleotide
  Antisense strand to SEQ ID NO: 1128592
uuauucauggaggaagucc

SEQ ID NO: 1128594 - RNA, 19 nt, Artificial Sequence
  Description of Artificial Sequence: Synthetic oligonucleotide
  Sense strand starting at position 1903 of SEQ ID NO: 916076
cuuacuaaucaagguagca

SEQ ID NO: 1128595 - RNA, 19 nt, Artificial Sequence
  Description of Artificial Sequence: Synthetic oligonucleotide
  Antisense strand to SEQ ID NO: 1128594
ugcuaccuugauuaguaag

SEQ ID NO: 1128596 - RNA, 19 nt, Artificial Sequence
  Description of Artificial Sequence: Synthetic oligonucleotide
  Sense strand starting at position 1929 of SEQ ID NO: 916076
cgaauacuuguaugacaug

SEQ ID NO: 1128597 - RNA, 19 nt, Artificial Sequence
  Description of Artificial Sequence: Synthetic oligonucleotide
  Antisense strand to SEQ ID NO: 1128596
caugucauacaaguauucg

SEQ ID NO: 1128598 - RNA, 19 nt, Artificial Sequence
  Description of Artificial Sequence: Synthetic oligonucleotide
  Sense strand starting at position 2266 of SEQ ID NO: 916076
ucugaaagcuauuugcuuu

SEQ ID NO: 1128599 - RNA, 19 nt, Artificial Sequence
  Description of Artificial Sequence: Synthetic oligonucleotide
  Antisense strand to SEQ ID NO: 1128598
aaagcaaauagcuuucaga

SEQ ID NO: 1128600 - RNA, 19 nt, Artificial Sequence
  Description of Artificial Sequence: Synthetic oligonucleotide
  Sense strand starting at position 2446 of SEQ ID NO: 916076
ucagaaauuuacuaucgaa

SEQ ID NO: 1128601 - RNA, 19 nt, Artificial Sequence
  Description of Artificial Sequence: Synthetic oligonucleotide
  Antisense strand to SEQ ID NO: 1128600
uucgauaguaaauuucuga

SEQ ID NO: 1128602 - RNA, 19 nt, Artificial Sequence
  Description of Artificial Sequence: Synthetic oligonucleotide
  Sense strand starting at position 2573 of SEQ ID NO: 916076
ggguccuauuaguugauga

SEQ ID NO: 1128603 - RNA, 19 nt, Artificial Sequence
  Description of Artificial Sequence: Synthetic oligonucleotide
  Antisense strand to SEQ ID NO: 1128602
ucaucaacuaauaggaccc

SEQ ID NO: 1128604 - RNA, 19 nt, Artificial Sequence
  Description of Artificial Sequence: Synthetic oligonucleotide
  Sense strand starting at position 2574 of SEQ ID NO: 916076
gguccuauuaguugaugaa

SEQ ID NO: 1128605 - RNA, 19 nt, Artificial Sequence
  Description of Artificial Sequence: Synthetic oligonucleotide
  Antisense strand to SEQ ID NO: 1128604
uucaucaacuaauaggacc

SEQ ID NO: 1128606 - RNA, 19 nt, Artificial Sequence
  Description of Artificial Sequence: Synthetic oligonucleotide
  Sense strand starting at position 2575 of SEQ ID NO: 916076
guccuauuaguugaugaaa

SEQ ID NO: 1128607 - RNA, 19 nt, Artificial Sequence
  Description of Artificial Sequence: Synthetic oligonucleotide
  Antisense strand to SEQ ID NO: 1128606
uuucaucaacuaauaggac

SEQ ID NO: 1128608 - RNA, 19 nt, Artificial Sequence
  Description of Artificial Sequence: Synthetic oligonucleotide
  Sense strand starting at position 2622 of SEQ ID NO: 916076
aguagauggagaugugauc

SEQ ID NO: 1128609 - RNA, 19 nt, Artificial Sequence
  Description of Artificial Sequence: Synthetic oligonucleotide
  Antisense strand to SEQ ID NO: 1128608
gaucacaucuccaucuacu

SEQ ID NO: 1128610 - RNA, 19 nt, Artificial Sequence
  Description of Artificial Sequence: Synthetic oligonucleotide
  Sense strand starting at position 2718 of SEQ ID NO: 916076
cugugaaaccgucauagga

SEQ ID NO: 1128611 - RNA, 19 nt, Artificial Sequence
  Description of Artificial Sequence: Synthetic oligonucleotide
  Antisense strand to SEQ ID NO: 1128610
uccuaugacgguuucacag

SEQ ID NO: 1128612 - RNA, 19 nt, Artificial Sequence
  Description of Artificial Sequence: Synthetic oligonucleotide
  Sense strand starting at position 2773 of SEQ ID NO: 916076
uuagcuuaugacuaguaga

SEQ ID NO: 1128613 - RNA, 19 nt, Artificial Sequence
  Description of Artificial Sequence: Synthetic oligonucleotide
  Antisense strand to SEQ ID NO: 1128612
ucuacuagucauaagcuaa

SEQ ID NO: 1128614 - RNA, 19 nt, Artificial Sequence
  Description of Artificial Sequence: Synthetic oligonucleotide
  Sense strand starting at position 2841 of SEQ ID NO: 916076
aagugcauucugcagaauu

SEQ ID NO: 1128615 - RNA, 19 nt, Artificial Sequence
  Description of Artificial Sequence: Synthetic oligonucleotide
  Antisense strand to SEQ ID NO: 1128614
aauucugcagaaugcacuu

SEQ ID NO: 1128616 - RNA, 19 nt, Artificial Sequence
  Description of Artificial Sequence: Synthetic oligonucleotide
  Sense strand starting at position 2843 of SEQ ID NO: 916076
gugcauucugcagaauuaa

SEQ ID NO: 1128617 - RNA, 19 nt, Artificial Sequence
  Description of Artificial Sequence: Synthetic oligonucleotide
  Antisense strand to SEQ ID NO: 1128616
uuaauucugcagaaugcac

SEQ ID NO: 1128618 - RNA, 19 nt, Artificial Sequence
  Description of Artificial Sequence: Synthetic oligonucleotide
  Sense strand starting at position 3020 of SEQ ID NO: 916076
cucuuaagacugcaugaca

SEQ ID NO: 1128619 - RNA, 19 nt, Artificial Sequence
  Description of Artificial Sequence: Synthetic oligonucleotide
  Antisense strand to SEQ ID NO: 1128618
ugucaugcagucuuaagag

SEQ ID NO: 1128620 - RNA, 19 nt, Artificial Sequence
  Description of Artificial Sequence: Synthetic oligonucleotide
  Sense strand starting at position 3069 of SEQ ID NO: 916076
uuuguaugugacuagacaa

SEQ ID NO: 1128621 - RNA, 19 nt, Artificial Sequence
  Description of Artificial Sequence: Synthetic oligonucleotide
  Antisense strand to SEQ ID NO: 1128620
uugucuagucacauacaaa

SEQ ID NO: 1128622 - RNA, 19 nt, Artificial Sequence
  Description of Artificial Sequence: Synthetic oligonucleotide
  Sense strand starting at position 3424 of SEQ ID NO: 916076
agugauaacugaguucuaa

SEQ ID NO: 1128623 - RNA, 19 nt, Artificial Sequence
  Description of Artificial Sequence: Synthetic oligonucleotide
  Antisense strand to SEQ ID NO: 1128622
uuagaacucaguuaucacu

SEQ ID NO: 1128624 - RNA, 19 nt, Artificial Sequence
  Description of Artificial Sequence: Synthetic oligonucleotide
  Sense strand starting at position 3557 of SEQ ID NO: 916076
uguguugaauuaccaaauc

SEQ ID NO: 1128625 - RNA, 19 nt, Artificial Sequence
  Description of Artificial Sequence: Synthetic oligonucleotide
  Antisense strand to SEQ ID NO: 1128624
gauuugguaauucaacaca

SEQ ID NO: 1128626 - RNA, 19 nt, Artificial Sequence
  Description of Artificial Sequence: Synthetic oligonucleotide
  Sense strand starting at position 3597 of SEQ ID NO: 916076
auaauuaggcuauaacagu

SEQ ID NO: 1128627 - RNA, 19 nt, Artificial Sequence
  Description of Artificial Sequence: Synthetic oligonucleotide
  Antisense strand to SEQ ID NO: 1128626
acuguuauagccuaauuau

SEQ ID NO: 1128628 - RNA, 19 nt, Artificial Sequence
  Description of Artificial Sequence: Synthetic oligonucleotide
  Sense strand starting at position 3784 of SEQ ID NO: 916076
agugaaaucccauaucugc

SEQ ID NO: 1128629 - RNA, 19 nt, Artificial Sequence
  Description of Artificial Sequence: Synthetic oligonucleotide
  Antisense strand to SEQ ID NO: 1128628
gcagauaugggauuucacu

SEQ ID NO: 1128630 - RNA, 19 nt, Artificial Sequence
  Description of Artificial Sequence: Synthetic oligonucleotide
  Sense strand starting at position 349 of SEQ ID NO: 916077
gauugaggcucccucucau

SEQ ID NO: 1128631 - RNA, 19 nt, Artificial Sequence
  Description of Artificial Sequence: Synthetic oligonucleotide
  Antisense strand to SEQ ID NO: 1128630
augagagggagccucaauc

SEQ ID NO: 1128632 - RNA, 19 nt, Artificial Sequence
  Description of Artificial Sequence: Synthetic oligonucleotide
  Sense strand starting at position 356 of SEQ ID NO: 916077
gcucccucucauugauuga

SEQ ID NO: 1128633 - RNA, 19 nt, Artificial Sequence
  Description of Artificial Sequence: Synthetic oligonucleotide
  Antisense strand to SEQ ID NO: 1128632
ucaaucaaugagagggagc

SEQ ID NO: 1128634 - RNA, 19 nt, Artificial Sequence
  Description of Artificial Sequence: Synthetic oligonucleotide
  Sense strand starting at position 360 of SEQ ID NO: 916077
ccucucauugauugauuga

SEQ ID NO: 1128635 - RNA, 19 nt, Artificial Sequence
  Description of Artificial Sequence: Synthetic oligonucleotide
  Antisense strand to SEQ ID NO: 1128634
ucaaucaaucaaugagagg

SEQ ID NO: 1128636 - RNA, 19 nt, Artificial Sequence
  Description of Artificial Sequence: Synthetic oligonucleotide
  Sense strand starting at position 523 of SEQ ID NO: 916077
gcuguauaacccuggucaa

SEQ ID NO: 1128637 - RNA, 19 nt, Artificial Sequence
  Description of Artificial Sequence: Synthetic oligonucleotide
  Antisense strand to SEQ ID NO: 1128636
uugaccaggguuauacagc

SEQ ID NO: 1128638 - RNA, 19 nt, Artificial Sequence
  Description of Artificial Sequence: Synthetic oligonucleotide
  Sense strand starting at position 524 of SEQ ID NO: 916077
cuguauaacccuggucaag

SEQ ID NO: 1128639 - RNA, 19 nt, Artificial Sequence
  Description of Artificial Sequence: Synthetic oligonucleotide
  Antisense strand to SEQ ID NO: 1128638
cuugaccaggguuauacag

SEQ ID NO: 1128640 - RNA, 19 nt, Artificial Sequence
  Description of Artificial Sequence: Synthetic oligonucleotide
  Sense strand starting at position 526 of SEQ ID NO: 916077
guauaacccuggucaaguu

SEQ ID NO: 1128641 - RNA, 19 nt, Artificial Sequence
  Description of Artificial Sequence: Synthetic oligonucleotide
  Antisense strand to SEQ ID NO: 1128640
aacuugaccaggguuauac

SEQ ID NO: 1128642 - RNA, 19 nt, Artificial Sequence
  Description of Artificial Sequence: Synthetic oligonucleotide
  Sense strand starting at position 598 of SEQ ID NO: 916077
cuggguuaggguugauuaa

SEQ ID NO: 1128643 - RNA, 19 nt, Artificial Sequence
  Description of Artificial Sequence: Synthetic oligonucleotide
  Antisense strand to SEQ ID NO: 1128642
uuaaucaacccuaacccag

SEQ ID NO: 1128644 - RNA, 19 nt, Artificial Sequence
  Description of Artificial Sequence: Synthetic oligonucleotide
  Sense strand starting at position 742 of SEQ ID NO: 916077
cuugcuaaagguuaucauu

SEQ ID NO: 1128645 - RNA, 19 nt, Artificial Sequence
  Description of Artificial Sequence: Synthetic oligonucleotide
  Antisense strand to SEQ ID NO: 1128644
aaugauaaccuuuagcaag

SEQ ID NO: 1128646 - RNA, 19 nt, Artificial Sequence
  Description of Artificial Sequence: Synthetic oligonucleotide
  Sense strand starting at position 744 of SEQ ID NO: 916077
ugcuaaagguuaucauuaa

SEQ ID NO: 1128647 - RNA, 19 nt, Artificial Sequence
  Description of Artificial Sequence: Synthetic oligonucleotide
  Antisense strand to SEQ ID NO: 1128646
uuaaugauaaccuuuagca

SEQ ID NO: 1128648 - RNA, 19 nt, Artificial Sequence
  Description of Artificial Sequence: Synthetic oligonucleotide
  Sense strand starting at position 783 of SEQ ID NO: 916077
cauuccugacucugggaua

SEQ ID NO: 1128649 - RNA, 19 nt, Artificial Sequence
  Description of Artificial Sequence: Synthetic oligonucleotide
  Antisense strand to SEQ ID NO: 1128648
uaucccagagucaggaaug

SEQ ID NO: 1128650 - RNA, 19 nt, Artificial Sequence
  Description of Artificial Sequence: Synthetic oligonucleotide
  Sense strand starting at position 794 of SEQ ID NO: 916077
cugggauacucuccugauu

SEQ ID NO: 1128651 - RNA, 19 nt, Artificial Sequence
  Description of Artificial Sequence: Synthetic oligonucleotide
  Antisense strand to SEQ ID NO: 1128650
aaucaggagaguaucccag

SEQ ID NO: 1128652 - RNA, 19 nt, Artificial Sequence
  Description of Artificial Sequence: Synthetic oligonucleotide
  Sense strand starting at position 797 of SEQ ID NO: 916077
ggauacucuccugauucgu

SEQ ID NO: 1128653 - RNA, 19 nt, Artificial Sequence
  Description of Artificial Sequence: Synthetic oligonucleotide
  Antisense strand to SEQ ID NO: 1128652
acgaaucaggagaguaucc

SEQ ID NO: 1128654 - RNA, 19 nt, Artificial Sequence
  Description of Artificial Sequence: Synthetic oligonucleotide
  Sense strand starting at position 802 of SEQ ID NO: 916077
cucuccugauucguggaua

SEQ ID NO: 1128655 - RNA, 19 nt, Artificial Sequence
  Description of Artificial Sequence: Synthetic oligonucleotide
  Antisense strand to SEQ ID NO: 1128654
uauccacgaaucaggagag

SEQ ID NO: 1128656 - RNA, 19 nt, Artificial Sequence
  Description of Artificial Sequence: Synthetic oligonucleotide
  Sense strand starting at position 805 of SEQ ID NO: 916077
uccugauucguggauacca

SEQ ID NO: 1128657 - RNA, 19 nt, Artificial Sequence
  Description of Artificial Sequence: Synthetic oligonucleotide
  Antisense strand to SEQ ID NO: 1128656
ugguauccacgaaucagga

SEQ ID NO: 1128658 - RNA, 19 nt, Artificial Sequence
  Description of Artificial Sequence: Synthetic oligonucleotide
  Sense strand starting at position 816 of SEQ ID NO: 916077
ggauaccaucgcuaacagu

SEQ ID NO: 1128659 - RNA, 19 nt, Artificial Sequence
  Description of Artificial Sequence: Synthetic oligonucleotide
  Antisense strand to SEQ ID NO: 1128658
acuguuagcgaugguaucc

SEQ ID NO: 1128660 - RNA, 19 nt, Artificial Sequence
  Description of Artificial Sequence: Synthetic oligonucleotide
  Sense strand starting at position 1268 of SEQ ID NO: 916077
gaacaagugucaucugccu

SEQ ID NO: 1128661 - RNA, 19 nt, Artificial Sequence
  Description of Artificial Sequence: Synthetic oligonucleotide
  Antisense strand to SEQ ID NO: 1128660
aggcagaugacacuuguuc

SEQ ID NO: 1128662 - RNA, 19 nt, Artificial Sequence
  Description of Artificial Sequence: Synthetic oligonucleotide
  Sense strand starting at position 1307 of SEQ ID NO: 916077
cgguagaagguucggauua

SEQ ID NO: 1128663 - RNA, 19 nt, Artificial Sequence
  Description of Artificial Sequence: Synthetic oligonucleotide
  Antisense strand to SEQ ID NO: 1128662
uaauccgaaccuucuaccg

SEQ ID NO: 1128664 - RNA, 19 nt, Artificial Sequence
  Description of Artificial Sequence: Synthetic oligonucleotide
  Sense strand starting at position 2370 of SEQ ID NO: 916077
ucgucauuucugcaaagug

SEQ ID NO: 1128665 - RNA, 19 nt, Artificial Sequence
  Description of Artificial Sequence: Synthetic oligonucleotide
  Antisense strand to SEQ ID NO: 1128664
cacuuugcagaaaugacga

SEQ ID NO: 1128666 - RNA, 19 nt, Artificial Sequence
  Description of Artificial Sequence: Synthetic oligonucleotide
  Sense strand starting at position 2378 of SEQ ID NO: 916077
ucugcaaaguguucccaga

SEQ ID NO: 1128667 - RNA, 19 nt, Artificial Sequence
  Description of Artificial Sequence: Synthetic oligonucleotide
  Antisense strand to SEQ ID NO: 1128666
ucugggaacacuuugcaga

SEQ ID NO: 1128668 - RNA, 19 nt, Artificial Sequence
  Description of Artificial Sequence: Synthetic oligonucleotide
  Sense strand starting at position 2380 of SEQ ID NO: 916077
ugcaaaguguucccagaau

SEQ ID NO: 1128669 - RNA, 19 nt, Artificial Sequence
  Description of Artificial Sequence: Synthetic oligonucleotide
  Antisense strand to SEQ ID NO: 1128668
auucugggaacacuuugca

SEQ ID NO: 1128670 - RNA, 19 nt, Artificial Sequence
  Description of Artificial Sequence: Synthetic oligonucleotide
  Sense strand starting at position 2602 of SEQ ID NO: 916077
ugaggcgucccuggagaaa

SEQ ID NO: 1128671 - RNA, 19 nt, Artificial Sequence
  Description of Artificial Sequence: Synthetic oligonucleotide
  Antisense strand to SEQ ID NO: 1128670
uuucuccagggacgccuca

SEQ ID NO: 1128672 - RNA, 19 nt, Artificial Sequence
  Description of Artificial Sequence: Synthetic oligonucleotide
  Sense strand starting at position 2641 of SEQ ID NO: 916077
gcagguuaagcuugggaag

SEQ ID NO: 1128673 - RNA, 19 nt, Artificial Sequence
  Description of Artificial Sequence: Synthetic oligonucleotide
  Antisense strand to SEQ ID NO: 1128672
cuucccaagcuuaaccugc

SEQ ID NO: 1128674 - RNA, 19 nt, Artificial Sequence
  Description of Artificial Sequence: Synthetic oligonucleotide
  Sense strand starting at position 2642 of SEQ ID NO: 916077
cagguuaagcuugggaaga

SEQ ID NO: 1128675 - RNA, 19 nt, Artificial Sequence
  Description of Artificial Sequence: Synthetic oligonucleotide
  Antisense strand to SEQ ID NO: 1128674
ucuucccaagcuuaaccug

SEQ ID NO: 1128676 - RNA, 19 nt, Artificial Sequence
  Description of Artificial Sequence: Synthetic oligonucleotide
  Sense strand starting at position 2727 of SEQ ID NO: 916077
ggguuugcuccguucguuu

SEQ ID NO: 1128677 - RNA, 19 nt, Artificial Sequence
  Description of Artificial Sequence: Synthetic oligonucleotide
  Antisense strand to SEQ ID NO: 1128676
aaacgaacggagcaaaccc

SEQ ID NO: 1128678 - RNA, 19 nt, Artificial Sequence
  Description of Artificial Sequence: Synthetic oligonucleotide
  Sense strand starting at position 2732 of SEQ ID NO: 916077
ugcuccguucguuugagaa

SEQ ID NO: 1128679 - RNA, 19 nt, Artificial Sequence
  Description of Artificial Sequence: Synthetic oligonucleotide
  Antisense strand to SEQ ID NO: 1128678
uucucaaacgaacggagca

SEQ ID NO: 1128680 - RNA, 19 nt, Artificial Sequence
  Description of Artificial Sequence: Synthetic oligonucleotide
  Sense strand starting at position 2780 of SEQ ID NO: 916077
gacggaagcccugguuagu

SEQ ID NO: 1128681 - RNA, 19 nt, Artificial Sequence
  Description of Artificial Sequence: Synthetic oligonucleotide
  Antisense strand to SEQ ID NO: 1128680
acuaaccagggcuuccguc

SEQ ID NO: 1128682 - RNA, 19 nt, Artificial Sequence
  Description of Artificial Sequence: Synthetic oligonucleotide
  Sense strand starting at position 3019 of SEQ ID NO: 916077
ccuccuugccaguagaaga

SEQ ID NO: 1128683 - RNA, 19 nt, Artificial Sequence
  Description of Artificial Sequence: Synthetic oligonucleotide
  Antisense strand to SEQ ID NO: 1128682
ucuucuacuggcaaggagg

SEQ ID NO: 1128684 - RNA, 19 nt, Artificial Sequence
  Description of Artificial Sequence: Synthetic oligonucleotide
  Sense strand starting at position 3036 of SEQ ID NO: 916077
gagaauaaucggcggguga

SEQ ID NO: 1128685 - RNA, 19 nt, Artificial Sequence
  Description of Artificial Sequence: Synthetic oligonucleotide
  Antisense strand to SEQ ID NO: 1128684
ucacccgccgauuauucuc

SEQ ID NO: 1128686 - RNA, 19 nt, Artificial Sequence
  Description of Artificial Sequence: Synthetic oligonucleotide
  Sense strand starting at position 3108 of SEQ ID NO: 916077
agggaacugcucugguaau

SEQ ID NO: 1128687 - RNA, 19 nt, Artificial Sequence
  Description of Artificial Sequence: Synthetic oligonucleotide
  Antisense strand to SEQ ID NO: 1128686
auuaccagagcaguucccu

SEQ ID NO: 1128688 - RNA, 19 nt, Artificial Sequence
  Description of Artificial Sequence: Synthetic oligonucleotide
  Sense strand starting at position 3133 of SEQ ID NO: 916077
aguucugaacuauguaaau

SEQ ID NO: 1128689 - RNA, 19 nt, Artificial Sequence
  Description of Artificial Sequence: Synthetic oligonucleotide
  Antisense strand to SEQ ID NO: 1128688
auuuacauaguucagaacu

SEQ ID NO: 1128690 - RNA, 19 nt, Artificial Sequence
  Description of Artificial Sequence: Synthetic oligonucleotide
  Sense strand starting at position 3182 of SEQ ID NO: 916077
ucugaaaucccucgaaaug

SEQ ID NO: 1128691 - RNA, 19 nt, Artificial Sequence
  Description of Artificial Sequence: Synthetic oligonucleotide
  Antisense strand to SEQ ID NO: 1128690
cauuucgagggauuucaga

SEQ ID NO: 1128692 - RNA, 19 nt, Artificial Sequence
  Description of Artificial Sequence: Synthetic oligonucleotide
  Sense strand starting at position 3448 of SEQ ID NO: 916077
cugagccugucuuuauuaa

SEQ ID NO: 1128693 - RNA, 19 nt, Artificial Sequence
  Description of Artificial Sequence: Synthetic oligonucleotide
  Antisense strand to SEQ ID NO: 1128692
uuaauaaagacaggcucag

SEQ ID NO: 1128694 - RNA, 19 nt, Artificial Sequence
  Description of Artificial Sequence: Synthetic oligonucleotide
  Sense strand starting at position 3449 of SEQ ID NO: 916077
ugagccugucuuuauuaaa

SEQ ID NO: 1128695 - RNA, 19 nt, Artificial Sequence
  Description of Artificial Sequence: Synthetic oligonucleotide
  Antisense strand to SEQ ID NO: 1128694
uuuaauaaagacaggcuca

SEQ ID NO: 1128696 - RNA, 19 nt, Artificial Sequence
  Description of Artificial Sequence: Synthetic oligonucleotide
  Sense strand starting at position 3699 of SEQ ID NO: 916077
gguugcugugaccagaguu

SEQ ID NO: 1128697 - RNA, 19 nt, Artificial Sequence
  Description of Artificial Sequence: Synthetic oligonucleotide
  Antisense strand to SEQ ID NO: 1128696
aacucuggucacagcaacc

SEQ ID NO: 1128698 - RNA, 19 nt, Artificial Sequence
  Description of Artificial Sequence: Synthetic oligonucleotide
  Sense strand starting at position 3825 of SEQ ID NO: 916077
guguguauauuugcuuguu

SEQ ID NO: 1128699 - RNA, 19 nt, Artificial Sequence
  Description of Artificial Sequence: Synthetic oligonucleotide
  Antisense strand to SEQ ID NO: 1128698
aacaagcaaauauacacac

SEQ ID NO: 1128700 - RNA, 19 nt, Artificial Sequence
  Description of Artificial Sequence: Synthetic oligonucleotide
  Sense strand starting at position 3827 of SEQ ID NO: 916077
guguauauuugcuuguucu

SEQ ID NO: 1128701 - RNA, 19 nt, Artificial Sequence
  Description of Artificial Sequence: Synthetic oligonucleotide
  Antisense strand to SEQ ID NO: 1128700
agaacaagcaaauauacac

SEQ ID NO: 1128702 - RNA, 19 nt, Artificial Sequence
  Description of Artificial Sequence: Synthetic oligonucleotide
  Sense strand starting at position 3841 of SEQ ID NO: 916077
guucucauggguuauucua

SEQ ID NO: 1128703 - RNA, 19 nt, Artificial Sequence
  Description of Artificial Sequence: Synthetic oligonucleotide
  Antisense strand to SEQ ID NO: 1128702
uagaauaacccaugagaac

SEQ ID NO: 1128704 - RNA, 19 nt, Artificial Sequence
  Description of Artificial Sequence: Synthetic oligonucleotide
  Sense strand starting at position 3848 of SEQ ID NO: 916077
uggguuauucuaugucauu

SEQ ID NO: 1128705 - RNA, 19 nt, Artificial Sequence
  Description of Artificial Sequence: Synthetic oligonucleotide
  Antisense strand to SEQ ID NO: 1128704
aaugacauagaauaaccca

SEQ ID NO: 1128706 - RNA, 19 nt, Artificial Sequence
  Description of Artificial Sequence: Synthetic oligonucleotide
  Sense strand starting at position 3849 of SEQ ID NO: 916077
ggguuauucuaugucauug

SEQ ID NO: 1128707 - RNA, 19 nt, Artificial Sequence
  Description of Artificial Sequence: Synthetic oligonucleotide
  Antisense strand to SEQ ID NO: 1128706
caaugacauagaauaaccc

SEQ ID NO: 1128708 - RNA, 19 nt, Artificial Sequence
  Description of Artificial Sequence: Synthetic oligonucleotide
  Sense strand starting at position 3854 of SEQ ID NO: 916077
auucuaugucauugucaug

SEQ ID NO: 1128709 - RNA, 19 nt, Artificial Sequence
  Description of Artificial Sequence: Synthetic oligonucleotide
  Antisense strand to SEQ ID NO: 1128708
caugacaaugacauagaau

SEQ ID NO: 1128710 - RNA, 19 nt, Artificial Sequence
  Description of Artificial Sequence: Synthetic oligonucleotide
  Sense strand starting at position 2029 of SEQ ID NO: 916078
uggucacacuuguuauacu

SEQ ID NO: 1128711 - RNA, 19 nt, Artificial Sequence
  Description of Artificial Sequence: Synthetic oligonucleotide
  Antisense strand to SEQ ID NO: 1128710
aguauaacaagugugacca

SEQ ID NO: 1128712 - RNA, 19 nt, Artificial Sequence
  Description of Artificial Sequence: Synthetic oligonucleotide
  Sense strand starting at position 2119 of SEQ ID NO: 916078
uuaugaaauugagcccuau

SEQ ID NO: 1128713 - RNA, 19 nt, Artificial Sequence
  Description of Artificial Sequence: Synthetic oligonucleotide
  Antisense strand to SEQ ID NO: 1128712
auagggcucaauuucauaa

SEQ ID NO: 1128714 - RNA, 19 nt, Artificial Sequence
  Description of Artificial Sequence: Synthetic oligonucleotide
  Sense strand starting at position 2123 of SEQ ID NO: 916078
gaaauugagcccuauggcu

SEQ ID NO: 1128715 - RNA, 19 nt, Artificial Sequence
  Description of Artificial Sequence: Synthetic oligonucleotide
  Antisense strand to SEQ ID NO: 1128714
agccauagggcucaauuuc

SEQ ID NO: 1128716 - RNA, 19 nt, Artificial Sequence
  Description of Artificial Sequence: Synthetic oligonucleotide
  Sense strand starting at position 2166 of SEQ ID NO: 916078
guuagauagcaugacguua

SEQ ID NO: 1128717 - RNA, 19 nt, Artificial Sequence
  Description of Artificial Sequence: Synthetic oligonucleotide
  Antisense strand to SEQ ID NO: 1128716
uaacgucaugcuaucuaac

SEQ ID NO: 1128718 - RNA, 19 nt, Artificial Sequence
  Description of Artificial Sequence: Synthetic oligonucleotide
  Sense strand starting at position 2171 of SEQ ID NO: 916078
auagcaugacguuauaauu

SEQ ID NO: 1128719 - RNA, 19 nt, Artificial Sequence
  Description of Artificial Sequence: Synthetic oligonucleotide
  Antisense strand to SEQ ID NO: 1128718
aauuauaacgucaugcuau

SEQ ID NO: 1128720 - RNA, 19 nt, Artificial Sequence
  Description of Artificial Sequence: Synthetic oligonucleotide
  Sense strand starting at position 2222 of SEQ ID NO: 916078
auguuauuauaccugaguu

SEQ ID NO: 1128721 - RNA, 19 nt, Artificial Sequence
  Description of Artificial Sequence: Synthetic oligonucleotide
  Antisense strand to SEQ ID NO: 1128720
aacucagguauaauaacau

SEQ ID NO: 1128722 - RNA, 19 nt, Artificial Sequence
  Description of Artificial Sequence: Synthetic oligonucleotide
  Sense strand starting at position 2224 of SEQ ID NO: 916078
guuauuauaccugaguuag

SEQ ID NO: 1128723 - RNA, 19 nt, Artificial Sequence
  Description of Artificial Sequence: Synthetic oligonucleotide
  Antisense strand to SEQ ID NO: 1128722
cuaacucagguauaauaac

SEQ ID NO: 1128724 - RNA, 19 nt, Artificial Sequence
  Description of Artificial Sequence: Synthetic oligonucleotide
  Sense strand starting at position 2238 of SEQ ID NO: 916078
guuagacugccugaguuaa

SEQ ID NO: 1128725 - RNA, 19 nt, Artificial Sequence
  Description of Artificial Sequence: Synthetic oligonucleotide
  Antisense strand to SEQ ID NO: 1128724
uuaacucaggcagucuaac

SEQ ID NO: 1128726 - RNA, 19 nt, Artificial Sequence
  Description of Artificial Sequence: Synthetic oligonucleotide
  Sense strand starting at position 2240 of SEQ ID NO: 916078
uagacugccugaguuaaua

SEQ ID NO: 1128727 - RNA, 19 nt, Artificial Sequence
  Description of Artificial Sequence: Synthetic oligonucleotide
  Antisense strand to SEQ ID NO: 1128726
uauuaacucaggcagucua

SEQ ID NO: 1128728 - RNA, 19 nt, Artificial Sequence
  Description of Artificial Sequence: Synthetic oligonucleotide
  Sense strand starting at position 2276 of SEQ ID NO: 916078
gucuuaacuuggguuagau

SEQ ID NO: 1128729 - RNA, 19 nt, Artificial Sequence
  Description of Artificial Sequence: Synthetic oligonucleotide
  Antisense strand to SEQ ID NO: 1128728
aucuaacccaaguuaagac

SEQ ID NO: 1128730 - RNA, 19 nt, Artificial Sequence
  Description of Artificial Sequence: Synthetic oligonucleotide
  Sense strand starting at position 2280 of SEQ ID NO: 916078
uaacuuggguuagauauuu

SEQ ID NO: 1128731 - RNA, 19 nt, Artificial Sequence
  Description of Artificial Sequence: Synthetic oligonucleotide
  Antisense strand to SEQ ID NO: 1128730
aaauaucuaacccaaguua

SEQ ID NO: 1128732 - RNA, 19 nt, Artificial Sequence
  Description of Artificial Sequence: Synthetic oligonucleotide
  Sense strand starting at position 2314 of SEQ ID NO: 916078
aguuucuccucuuuaaggu

SEQ ID NO: 1128733 - RNA, 19 nt, Artificial Sequence
  Description of Artificial Sequence: Synthetic oligonucleotide
  Antisense strand to SEQ ID NO: 1128732
accuuaaagaggagaaacu

SEQ ID NO: 1128734 - RNA, 19 nt, Artificial Sequence
  Description of Artificial Sequence: Synthetic oligonucleotide
  Sense strand starting at position 2315 of SEQ ID NO: 916078
guuucuccucuuuaaggua

SEQ ID NO: 1128735 - RNA, 19 nt, Artificial Sequence
  Description of Artificial Sequence: Synthetic oligonucleotide
  Antisense strand to SEQ ID NO: 1128734
uaccuuaaagaggagaaac

SEQ ID NO: 1128736 - RNA, 19 nt, Artificial Sequence
  Description of Artificial Sequence: Synthetic oligonucleotide
  Sense strand starting at position 2425 of SEQ ID NO: 916078
uggugucagcuauaucaua

SEQ ID NO: 1128737 - RNA, 19 nt, Artificial Sequence
  Description of Artificial Sequence: Synthetic oligonucleotide
  Antisense strand to SEQ ID NO: 1128736
uaugauauagcugacacca

SEQ ID NO: 1128738 - RNA, 19 nt, Artificial Sequence
  Description of Artificial Sequence: Synthetic oligonucleotide
  Sense strand starting at position 2465 of SEQ ID NO: 916078
gggcuaugggauuaucuau

SEQ ID NO: 1128739 - RNA, 19 nt, Artificial Sequence
  Description of Artificial Sequence: Synthetic oligonucleotide
  Antisense strand to SEQ ID NO: 1128738
auagauaaucccauagccc

SEQ ID NO: 1128740 - RNA, 19 nt, Artificial Sequence
  Description of Artificial Sequence: Synthetic oligonucleotide
  Sense strand starting at position 2513 of SEQ ID NO: 916078
ccagcaguuuccuuacaug

SEQ ID NO: 1128741 - RNA, 19 nt, Artificial Sequence
  Description of Artificial Sequence: Synthetic oligonucleotide
  Antisense strand to SEQ ID NO: 1128740
cauguaaggaaacugcugg

SEQ ID NO: 1128742 - RNA, 19 nt, Artificial Sequence
  Description of Artificial Sequence: Synthetic oligonucleotide
  Sense strand starting at position 2551 of SEQ ID NO: 916078
gccagcucugucuuaggca

SEQ ID NO: 1128743 - RNA, 19 nt, Artificial Sequence
  Description of Artificial Sequence: Synthetic oligonucleotide
  Antisense strand to SEQ ID NO: 1128742
ugccuaagacagagcuggc

SEQ ID NO: 1128744 - RNA, 19 nt, Artificial Sequence
  Description of Artificial Sequence: Synthetic oligonucleotide
  Sense strand starting at position 2761 of SEQ ID NO: 916078
agugauguuacuuagucuu

SEQ ID NO: 1128745 - RNA, 19 nt, Artificial Sequence
  Description of Artificial Sequence: Synthetic oligonucleotide
  Antisense strand to SEQ ID NO: 1128744
aagacuaaguaacaucacu

SEQ ID NO: 1128746 - RNA, 19 nt, Artificial Sequence
  Description of Artificial Sequence: Synthetic oligonucleotide
  Sense strand starting at position 2942 of SEQ ID NO: 916078
cuacacaaucacuguguua

SEQ ID NO: 1128747 - RNA, 19 nt, Artificial Sequence
  Description of Artificial Sequence: Synthetic oligonucleotide
  Antisense strand to SEQ ID NO: 1128746
uaacacagugauuguguag

SEQ ID NO: 1128748 - RNA, 19 nt, Artificial Sequence
  Description of Artificial Sequence: Synthetic oligonucleotide
  Sense strand starting at position 2944 of SEQ ID NO: 916078
acacaaucacuguguuauc

SEQ ID NO: 1128749 - RNA, 19 nt, Artificial Sequence
  Description of Artificial Sequence: Synthetic oligonucleotide
  Antisense strand to SEQ ID NO: 1128748
gauaacacagugauugugu

SEQ ID NO: 1128750 - RNA, 19 nt, Artificial Sequence
  Description of Artificial Sequence: Synthetic oligonucleotide
  Sense strand starting at position 2955 of SEQ ID NO: 916078
guguuaucauucuugauuu

SEQ ID NO: 1128751 - RNA, 19 nt, Artificial Sequence
  Description of Artificial Sequence: Synthetic oligonucleotide
  Antisense strand to SEQ ID NO: 1128750
aaaucaagaaugauaacac

SEQ ID NO: 1128752 - RNA, 19 nt, Artificial Sequence
  Description of Artificial Sequence: Synthetic oligonucleotide
  Sense strand starting at position 3042 of SEQ ID NO: 916078
uuaccugaguccuuaagag

SEQ ID NO: 1128753 - RNA, 19 nt, Artificial Sequence
  Description of Artificial Sequence: Synthetic oligonucleotide
  Antisense strand to SEQ ID NO: 1128752
cucuuaaggacucagguaa

SEQ ID NO: 1128754 - RNA, 19 nt, Artificial Sequence
  Description of Artificial Sequence: Synthetic oligonucleotide
  Sense strand starting at position 3066 of SEQ ID NO: 916078
gacuguauacccgaauguu

SEQ ID NO: 1128755 - RNA, 19 nt, Artificial Sequence
  Description of Artificial Sequence: Synthetic oligonucleotide
  Antisense strand to SEQ ID NO: 1128754
aacauucggguauacaguc

SEQ ID NO: 1128756 - RNA, 19 nt, Artificial Sequence
  Description of Artificial Sequence: Synthetic oligonucleotide
  Sense strand starting at position 3074 of SEQ ID NO: 916078
acccgaauguuucccauaa

SEQ ID NO: 1128757 - RNA, 19 nt, Artificial Sequence
  Description of Artificial Sequence: Synthetic oligonucleotide
  Antisense strand to SEQ ID NO: 1128756
uuaugggaaacauucgggu

SEQ ID NO: 1128758 - RNA, 19 nt, Artificial Sequence
  Description of Artificial Sequence: Synthetic oligonucleotide
  Sense strand starting at position 3075 of SEQ ID NO: 916078
cccgaauguuucccauaau

SEQ ID NO: 1128759 - RNA, 19 nt, Artificial Sequence
  Description of Artificial Sequence: Synthetic oligonucleotide
  Antisense strand to SEQ ID NO: 1128758
auuaugggaaacauucggg

SEQ ID NO: 1128760 - RNA, 19 nt, Artificial Sequence
  Description of Artificial Sequence: Synthetic oligonucleotide
  Sense strand starting at position 3118 of SEQ ID NO: 916078
uguuaaggaacagguaaua

SEQ ID NO: 1128761 - RNA, 19 nt, Artificial Sequence
  Description of Artificial Sequence: Synthetic oligonucleotide
  Antisense strand to SEQ ID NO: 1128760
uauuaccuguuccuuaaca

SEQ ID NO: 1128762 - RNA, 19 nt, Artificial Sequence
  Description of Artificial Sequence: Synthetic oligonucleotide
  Sense strand starting at position 3231 of SEQ ID NO: 916078
ggaagaguauuugaccacu

SEQ ID NO: 1128763 - RNA, 19 nt, Artificial Sequence
  Description of Artificial Sequence: Synthetic oligonucleotide
  Antisense strand to SEQ ID NO: 1128762
aguggucaaauacucuucc

SEQ ID NO: 1128764 - RNA, 19 nt, Artificial Sequence
  Description of Artificial Sequence: Synthetic oligonucleotide
  Sense strand starting at position 3260 of SEQ ID NO: 916078
agaauuaugaugcauggca

SEQ ID NO: 1128765 - RNA, 19 nt, Artificial Sequence
  Description of Artificial Sequence: Synthetic oligonucleotide
  Antisense strand to SEQ ID NO: 1128764
ugccaugcaucauaauucu

SEQ ID NO: 1128766 - RNA, 19 nt, Artificial Sequence
  Description of Artificial Sequence: Synthetic oligonucleotide
  Sense strand starting at position 3355 of SEQ ID NO: 916078
ccagacuuguacuuccuau

SEQ ID NO: 1128767 - RNA, 19 nt, Artificial Sequence
  Description of Artificial Sequence: Synthetic oligonucleotide
  Antisense strand to SEQ ID NO: 1128766
auaggaaguacaagucugg

SEQ ID NO: 1128768 - RNA, 19 nt, Artificial Sequence
  Description of Artificial Sequence: Synthetic oligonucleotide
  Sense strand starting at position 3401 of SEQ ID NO: 916078
gguagaaaugaagguuagu

SEQ ID NO: 1128769 - RNA, 19 nt, Artificial Sequence
  Description of Artificial Sequence: Synthetic oligonucleotide
  Antisense strand to SEQ ID NO: 1128768
acuaaccuucauuucuacc

SEQ ID NO: 1128770 - RNA, 19 nt, Artificial Sequence
  Description of Artificial Sequence: Synthetic oligonucleotide
  Sense strand starting at position 3404 of SEQ ID NO: 916078
agaaaugaagguuaguguu

SEQ ID NO: 1128771 - RNA, 19 nt, Artificial Sequence
  Description of Artificial Sequence: Synthetic oligonucleotide
  Antisense strand to SEQ ID NO: 1128770
aacacuaaccuucauuucu

SEQ ID NO: 1128772 - RNA, 19 nt, Artificial Sequence
  Description of Artificial Sequence: Synthetic oligonucleotide
  Sense strand starting at position 3410 of SEQ ID NO: 916078
gaagguuaguguucgaaag

SEQ ID NO: 1128773 - RNA, 19 nt, Artificial Sequence
  Description of Artificial Sequence: Synthetic oligonucleotide
  Antisense strand to SEQ ID NO: 1128772
cuuucgaacacuaaccuuc

SEQ ID NO: 1128774 - RNA, 19 nt, Artificial Sequence
  Description of Artificial Sequence: Synthetic oligonucleotide
  Sense strand starting at position 3461 of SEQ ID NO: 916078
ccauaaaugucaucuguca

SEQ ID NO: 1128775 - RNA, 19 nt, Artificial Sequence
  Description of Artificial Sequence: Synthetic oligonucleotide
  Antisense strand to SEQ ID NO: 1128774
ugacagaugacauuuaugg

SEQ ID NO: 1128776 - RNA, 19 nt, Artificial Sequence
  Description of Artificial Sequence: Synthetic oligonucleotide
  Sense strand starting at position 3512 of SEQ ID NO: 916078
agaggucuugugggagguu

SEQ ID NO: 1128777 - RNA, 19 nt, Artificial Sequence
  Description of Artificial Sequence: Synthetic oligonucleotide
  Antisense strand to SEQ ID NO: 1128776
aaccucccacaagaccucu

SEQ ID NO: 1128778 - RNA, 19 nt, Artificial Sequence
  Description of Artificial Sequence: Synthetic oligonucleotide
  Sense strand starting at position 3548 of SEQ ID NO: 916078
uguugagcucuugauaucu

SEQ ID NO: 1128779 - RNA, 19 nt, Artificial Sequence
  Description of Artificial Sequence: Synthetic oligonucleotide
  Antisense strand to SEQ ID NO: 1128778
agauaucaagagcucaaca

SEQ ID NO: 1128780 - RNA, 19 nt, Artificial Sequence
  Description of Artificial Sequence: Synthetic oligonucleotide
  Sense strand starting at position 3553 of SEQ ID NO: 916078
agcucuugauaucuauaag

SEQ ID NO: 1128781 - RNA, 19 nt, Artificial Sequence
  Description of Artificial Sequence: Synthetic oligonucleotide
  Antisense strand to SEQ ID NO: 1128780
cuuauagauaucaagagcu

SEQ ID NO: 1128782 - RNA, 19 nt, Artificial Sequence
  Description of Artificial Sequence: Synthetic oligonucleotide
  Sense strand starting at position 3556 of SEQ ID NO: 916078
ucuugauaucuauaagcug

SEQ ID NO: 1128783 - RNA, 19 nt, Artificial Sequence
  Description of Artificial Sequence: Synthetic oligonucleotide
  Antisense strand to SEQ ID NO: 1128782
cagcuuauagauaucaaga

SEQ ID NO: 1128784 - RNA, 19 nt, Artificial Sequence
  Description of Artificial Sequence: Synthetic oligonucleotide
  Sense strand starting at position 3780 of SEQ ID NO: 916078
gugcguauacagucaugca

SEQ ID NO: 1128785 - RNA, 19 nt, Artificial Sequence
  Description of Artificial Sequence: Synthetic oligonucleotide
  Antisense strand to SEQ ID NO: 1128784
ugcaugacuguauacgcac

SEQ ID NO: 1128786 - RNA, 19 nt, Artificial Sequence
  Description of Artificial Sequence: Synthetic oligonucleotide
  Sense strand starting at position 3818 of SEQ ID NO: 916078
ucuacaaaggauugcauau

SEQ ID NO: 1128787 - RNA, 19 nt, Artificial Sequence
  Description of Artificial Sequence: Synthetic oligonucleotide
  Antisense strand to SEQ ID NO: 1128786
auaugcaauccuuuguaga

SEQ ID NO: 1128788 - RNA, 19 nt, Artificial Sequence
  Description of Artificial Sequence: Synthetic oligonucleotide
  Sense strand starting at position 3886 of SEQ ID NO: 916078
acauuuagauaugguagau

SEQ ID NO: 1128789 - RNA, 19 nt, Artificial Sequence
  Description of Artificial Sequence: Synthetic oligonucleotide
  Antisense strand to SEQ ID NO: 1128788
aucuaccauaucuaaaugu

SEQ ID NO: 1128790 - RNA, 19 nt, Artificial Sequence
  Description of Artificial Sequence: Synthetic oligonucleotide
  Sense strand starting at position 353 of SEQ ID NO: 916079
ugcaaacuauguuuagaag

SEQ ID NO: 1128791 - RNA, 19 nt, Artificial Sequence
  Description of Artificial Sequence: Synthetic oligonucleotide
  Antisense strand to SEQ ID NO: 1128790
cuucuaaacauaguuugca

SEQ ID NO: 1128792 - RNA, 19 nt, Artificial Sequence
  Description of Artificial Sequence: Synthetic oligonucleotide
  Sense strand starting at position 368 of SEQ ID NO: 916079
gaagcaugucugggaaaug

SEQ ID NO: 1128793 - RNA, 19 nt, Artificial Sequence
  Description of Artificial Sequence: Synthetic oligonucleotide
  Antisense strand to SEQ ID NO: 1128792
cauuucccagacaugcuuc

SEQ ID NO: 1128794 - RNA, 19 nt, Artificial Sequence
  Description of Artificial Sequence: Synthetic oligonucleotide
  Sense strand starting at position 414 of SEQ ID NO: 916079
uaggcuuugcaugaaugga

SEQ ID NO: 1128795 - RNA, 19 nt, Artificial Sequence
  Description of Artificial Sequence: Synthetic oligonucleotide
  Antisense strand to SEQ ID NO: 1128794
uccauucaugcaaagccua

SEQ ID NO: 1128796 - RNA, 19 nt, Artificial Sequence
  Description of Artificial Sequence: Synthetic oligonucleotide
  Sense strand starting at position 439 of SEQ ID NO: 916079
gaguaauucuauguagagc

SEQ ID NO: 1128797 - RNA, 19 nt, Artificial Sequence
  Description of Artificial Sequence: Synthetic oligonucleotide
  Antisense strand to SEQ ID NO: 1128796
gcucuacauagaauuacuc

SEQ ID NO: 1128798 - RNA, 19 nt, Artificial Sequence
  Description of Artificial Sequence: Synthetic oligonucleotide
  Sense strand starting at position 464 of SEQ ID NO: 916079
ucuuacuugcagugagaga

SEQ ID NO: 1128799 - RNA, 19 nt, Artificial Sequence
  Description of Artificial Sequence: Synthetic oligonucleotide
  Antisense strand to SEQ ID NO: 1128798
ucucucacugcaaguaaga

SEQ ID NO: 1128800 - RNA, 19 nt, Artificial Sequence
  Description of Artificial Sequence: Synthetic oligonucleotide
  Sense strand starting at position 465 of SEQ ID NO: 916079
cuuacuugcagugagagaa

SEQ ID NO: 1128801 - RNA, 19 nt, Artificial Sequence
  Description of Artificial Sequence: Synthetic oligonucleotide
  Antisense strand to SEQ ID NO: 1128800
uucucucacugcaaguaag

SEQ ID NO: 1128802 - RNA, 19 nt, Artificial Sequence
  Description of Artificial Sequence: Synthetic oligonucleotide
  Sense strand starting at position 539 of SEQ ID NO: 916079
ggaggauuggcucagucau

SEQ ID NO: 1128803 - RNA, 19 nt, Artificial Sequence
  Description of Artificial Sequence: Synthetic oligonucleotide
  Antisense strand to SEQ ID NO: 1128802
augacugagccaauccucc

SEQ ID NO: 1128804 - RNA, 19 nt, Artificial Sequence
  Description of Artificial Sequence: Synthetic oligonucleotide
  Sense strand starting at position 541 of SEQ ID NO: 916079
aggauuggcucagucaucu

SEQ ID NO: 1128805 - RNA, 19 nt, Artificial Sequence
  Description of Artificial Sequence: Synthetic oligonucleotide
  Antisense strand to SEQ ID NO: 1128804
agaugacugagccaauccu

SEQ ID NO: 1128806 - RNA, 19 nt, Artificial Sequence
  Description of Artificial Sequence: Synthetic oligonucleotide
  Sense strand starting at position 559 of SEQ ID NO: 916079
uuggcugaggcucaugaaa

SEQ ID NO: 1128807 - RNA, 19 nt, Artificial Sequence
  Description of Artificial Sequence: Synthetic oligonucleotide
  Antisense strand to SEQ ID NO: 1128806
uuucaugagccucagccaa

SEQ ID NO: 1128808 - RNA, 19 nt, Artificial Sequence
  Description of Artificial Sequence: Synthetic oligonucleotide
  Sense strand starting at position 646 of SEQ ID NO: 916079
cagaaaucauugggauuug

SEQ ID NO: 1128809 - RNA, 19 nt, Artificial Sequence
  Description of Artificial Sequence: Synthetic oligonucleotide
  Antisense strand to SEQ ID NO: 1128808
caaaucccaaugauuucug

SEQ ID NO: 1128810 - RNA, 19 nt, Artificial Sequence
  Description of Artificial Sequence: Synthetic oligonucleotide
  Sense strand starting at position 680 of SEQ ID NO: 916079
uugggacuauuccauuuga

SEQ ID NO: 1128811 - RNA, 19 nt, Artificial Sequence
  Description of Artificial Sequence: Synthetic oligonucleotide
  Antisense strand to SEQ ID NO: 1128810
ucaaauggaauagucccaa

SEQ ID NO: 1128812 - RNA, 19 nt, Artificial Sequence
  Description of Artificial Sequence: Synthetic oligonucleotide
  Sense strand starting at position 701 of SEQ ID NO: 916079
ugagaagguaccugacauu

SEQ ID NO: 1128813 - RNA, 19 nt, Artificial Sequence
  Description of Artificial Sequence: Synthetic oligonucleotide
  Antisense strand to SEQ ID NO: 1128812
aaugucagguaccuucuca

SEQ ID NO: 1128814 - RNA, 19 nt, Artificial Sequence
  Description of Artificial Sequence: Synthetic oligonucleotide
  Sense strand starting at position 784 of SEQ ID NO: 916079
aguauuguugcucugcuca

SEQ ID NO: 1128815 - RNA, 19 nt, Artificial Sequence
  Description of Artificial Sequence: Synthetic oligonucleotide
  Antisense strand to SEQ ID NO: 1128814
ugagcagagcaacaauacu

SEQ ID NO: 1128816 - RNA, 19 nt, Artificial Sequence
  Description of Artificial Sequence: Synthetic oligonucleotide
  Sense strand starting at position 931 of SEQ ID NO: 916079
cucuaugccguggagagaa

SEQ ID NO: 1128817 - RNA, 19 nt, Artificial Sequence
  Description of Artificial Sequence: Synthetic oligonucleotide
  Antisense strand to SEQ ID NO: 1128816
uucucuccacggcauagag

SEQ ID NO: 1128818 - RNA, 19 nt, Artificial Sequence
  Description of Artificial Sequence: Synthetic oligonucleotide
  Sense strand starting at position 951 of SEQ ID NO: 916079
uugguuaauuggccaugga

SEQ ID NO: 1128819 - RNA, 19 nt, Artificial Sequence
  Description of Artificial Sequence: Synthetic oligonucleotide
  Antisense strand to SEQ ID NO: 1128818
uccauggccaauuaaccaa

SEQ ID NO: 1128820 - RNA, 19 nt, Artificial Sequence
  Description of Artificial Sequence: Synthetic oligonucleotide
  Sense strand starting at position 952 of SEQ ID NO: 916079
ugguuaauuggccauggaa

SEQ ID NO: 1128821 - RNA, 19 nt, Artificial Sequence
  Description of Artificial Sequence: Synthetic oligonucleotide
  Antisense strand to SEQ ID NO: 1128820
uuccauggccaauuaacca

SEQ ID NO: 1128822 - RNA, 19 nt, Artificial Sequence
  Description of Artificial Sequence: Synthetic oligonucleotide
  Sense strand starting at position 976 of SEQ ID NO: 916079
ucauuaagauguucccaug

SEQ ID NO: 1128823 - RNA, 19 nt, Artificial Sequence
  Description of Artificial Sequence: Synthetic oligonucleotide
  Antisense strand to SEQ ID NO: 1128822
caugggaacaucuuaauga

SEQ ID NO: 1128824 - RNA, 19 nt, Artificial Sequence
  Description of Artificial Sequence: Synthetic oligonucleotide
  Sense strand starting at position 1045 of SEQ ID NO: 916079
auuccauuguuggugauga

SEQ ID NO: 1128825 - RNA, 19 nt, Artificial Sequence
  Description of Artificial Sequence: Synthetic oligonucleotide
  Antisense strand to SEQ ID NO: 1128824
ucaucaccaacaauggaau

SEQ ID NO: 1128826 - RNA, 19 nt, Artificial Sequence
  Description of Artificial Sequence: Synthetic oligonucleotide
  Sense strand starting at position 1047 of SEQ ID NO: 916079
uccauuguuggugaugaca

SEQ ID NO: 1128827 - RNA, 19 nt, Artificial Sequence
  Description of Artificial Sequence: Synthetic oligonucleotide
  Antisense strand to SEQ ID NO: 1128826
ugucaucaccaacaaugga

SEQ ID NO: 1128828 - RNA, 19 nt, Artificial Sequence
  Description of Artificial Sequence: Synthetic oligonucleotide
  Sense strand starting at position 1380 of SEQ ID NO: 916079
agaguaaggaauugucuuu

SEQ ID NO: 1128829 - RNA, 19 nt, Artificial Sequence
  Description of Artificial Sequence: Synthetic oligonucleotide
  Antisense strand to SEQ ID NO: 1128828
aaagacaauuccuuacucu

SEQ ID NO: 1128830 - RNA, 19 nt, Artificial Sequence
  Description of Artificial Sequence: Synthetic oligonucleotide
  Sense strand starting at position 1385 of SEQ ID NO: 916079
aaggaauugucuuuguuug

SEQ ID NO: 1128831 - RNA, 19 nt, Artificial Sequence
  Description of Artificial Sequence: Synthetic oligonucleotide
  Antisense strand to SEQ ID NO: 1128830
caaacaaagacaauuccuu

SEQ ID NO: 1128832 - RNA, 19 nt, Artificial Sequence
  Description of Artificial Sequence: Synthetic oligonucleotide
  Sense strand starting at position 1784 of SEQ ID NO: 916079
ugccaauaccagcagaaau

SEQ ID NO: 1128833 - RNA, 19 nt, Artificial Sequence
  Description of Artificial Sequence: Synthetic oligonucleotide
  Antisense strand to SEQ ID NO: 1128832
auuucugcugguauuggca

SEQ ID NO: 1128834 - RNA, 19 nt, Artificial Sequence
  Description of Artificial Sequence: Synthetic oligonucleotide
  Sense strand starting at position 1864 of SEQ ID NO: 916079
gcagacucuuaacuagaac

SEQ ID NO: 1128835 - RNA, 19 nt, Artificial Sequence
  Description of Artificial Sequence: Synthetic oligonucleotide
  Antisense strand to SEQ ID NO: 1128834
guucuaguuaagagucugc

SEQ ID NO: 1128836 - RNA, 19 nt, Artificial Sequence
  Description of Artificial Sequence: Synthetic oligonucleotide
  Sense strand starting at position 2010 of SEQ ID NO: 916079
guaggaugacaguaguguu

SEQ ID NO: 1128837 - RNA, 19 nt, Artificial Sequence
  Description of Artificial Sequence: Synthetic oligonucleotide
  Antisense strand to SEQ ID NO: 1128836
aacacuacugucauccuac

SEQ ID NO: 1128838 - RNA, 19 nt, Artificial Sequence
  Description of Artificial Sequence: Synthetic oligonucleotide
  Sense strand starting at position 2017 of SEQ ID NO: 916079
gacaguaguguuuacuuua

SEQ ID NO: 1128839 - RNA, 19 nt, Artificial Sequence
  Description of Artificial Sequence: Synthetic oligonucleotide
  Antisense strand to SEQ ID NO: 1128838
uaaaguaaacacuacuguc

SEQ ID NO: 1128840 - RNA, 19 nt, Artificial Sequence
  Description of Artificial Sequence: Synthetic oligonucleotide
  Sense strand starting at position 2039 of SEQ ID NO: 916079
gcuuacugugagcauuaaa

SEQ ID NO: 1128841 - RNA, 19 nt, Artificial Sequence
  Description of Artificial Sequence: Synthetic oligonucleotide
  Antisense strand to SEQ ID NO: 1128840
uuuaaugcucacaguaagc

SEQ ID NO: 1128842 - RNA, 19 nt, Artificial Sequence
  Description of Artificial Sequence: Synthetic oligonucleotide
  Sense strand starting at position 2042 of SEQ ID NO: 916079
uacugugagcauuaaauga

SEQ ID NO: 1128843 - RNA, 19 nt, Artificial Sequence
  Description of Artificial Sequence: Synthetic oligonucleotide
  Antisense strand to SEQ ID NO: 1128842
ucauuuaaugcucacagua

SEQ ID NO: 1128844 - RNA, 19 nt, Artificial Sequence
  Description of Artificial Sequence: Synthetic oligonucleotide
  Sense strand starting at position 2049 of SEQ ID NO: 916079
agcauuaaaugaguuacua

SEQ ID NO: 1128845 - RNA, 19 nt, Artificial Sequence
  Description of Artificial Sequence: Synthetic oligonucleotide
  Antisense strand to SEQ ID NO: 1128844
uaguaacucauuuaaugcu

SEQ ID NO: 1128846 - RNA, 19 nt, Artificial Sequence
  Description of Artificial Sequence: Synthetic oligonucleotide
  Sense strand starting at position 2175 of SEQ ID NO: 916079
aagcauaggcccuggaaua

SEQ ID NO: 1128847 - RNA, 19 nt, Artificial Sequence
  Description of Artificial Sequence: Synthetic oligonucleotide
  Antisense strand to SEQ ID NO: 1128846
uauuccagggccuaugcuu

SEQ ID NO: 1128848 - RNA, 19 nt, Artificial Sequence
  Description of Artificial Sequence: Synthetic oligonucleotide
  Sense strand starting at position 2176 of SEQ ID NO: 916079
agcauaggcccuggaauau

SEQ ID NO: 1128849 - RNA, 19 nt, Artificial Sequence
  Description of Artificial Sequence: Synthetic oligonucleotide
  Antisense strand to SEQ ID NO: 1128848
auauuccagggccuaugcu

SEQ ID NO: 1128850 - RNA, 19 nt, Artificial Sequence
  Description of Artificial Sequence: Synthetic oligonucleotide
  Sense strand starting at position 2245 of SEQ ID NO: 916079
ugccuagaucaauaucuag

SEQ ID NO: 1128851 - RNA, 19 nt, Artificial Sequence
  Description of Artificial Sequence: Synthetic oligonucleotide
  Antisense strand to SEQ ID NO: 1128850
cuagauauugaucuaggca

SEQ ID NO: 1128852 - RNA, 19 nt, Artificial Sequence
  Description of Artificial Sequence: Synthetic oligonucleotide
  Sense strand starting at position 2325 of SEQ ID NO: 916079
agaguucugcaugaguaca

SEQ ID NO: 1128853 - RNA, 19 nt, Artificial Sequence
  Description of Artificial Sequence: Synthetic oligonucleotide
  Antisense strand to SEQ ID NO: 1128852
uguacucaugcagaacucu

SEQ ID NO: 1128854 - RNA, 19 nt, Artificial Sequence
  Description of Artificial Sequence: Synthetic oligonucleotide
  Sense strand starting at position 2327 of SEQ ID NO: 916079
aguucugcaugaguacaaa

SEQ ID NO: 1128855 - RNA, 19 nt, Artificial Sequence
  Description of Artificial Sequence: Synthetic oligonucleotide
  Antisense strand to SEQ ID NO: 1128854
uuuguacucaugcagaacu

SEQ ID NO: 1128856 - RNA, 19 nt, Artificial Sequence
  Description of Artificial Sequence: Synthetic oligonucleotide
  Sense strand starting at position 2339 of SEQ ID NO: 916079
guacaaaucugggcaaagu

SEQ ID NO: 1128857 - RNA, 19 nt, Artificial Sequence
  Description of Artificial Sequence: Synthetic oligonucleotide
  Antisense strand to SEQ ID NO: 1128856
acuuugcccagauuuguac

SEQ ID NO: 1128858 - RNA, 19 nt, Artificial Sequence
  Description of Artificial Sequence: Synthetic oligonucleotide
  Sense strand starting at position 2355 of SEQ ID NO: 916079
agugaccuccaaggaaauu

SEQ ID NO: 1128859 - RNA, 19 nt, Artificial Sequence
  Description of Artificial Sequence: Synthetic oligonucleotide
  Antisense strand to SEQ ID NO: 1128858
aauuuccuuggaggucacu

SEQ ID NO: 1128860 - RNA, 19 nt, Artificial Sequence
  Description of Artificial Sequence: Synthetic oligonucleotide
  Sense strand starting at position 2406 of SEQ ID NO: 916079
acugauaaauuggugugau

SEQ ID NO: 1128861 - RNA, 19 nt, Artificial Sequence
  Description of Artificial Sequence: Synthetic oligonucleotide
  Antisense strand to SEQ ID NO: 1128860
aucacaccaauuuaucagu

SEQ ID NO: 1128862 - RNA, 19 nt, Artificial Sequence
  Description of Artificial Sequence: Synthetic oligonucleotide
  Sense strand starting at position 2409 of SEQ ID NO: 916079
gauaaauuggugugauaca

SEQ ID NO: 1128863 - RNA, 19 nt, Artificial Sequence
  Description of Artificial Sequence: Synthetic oligonucleotide
  Antisense strand to SEQ ID NO: 1128862
uguaucacaccaauuuauc

SEQ ID NO: 1128864 - RNA, 19 nt, Artificial Sequence
  Description of Artificial Sequence: Synthetic oligonucleotide
  Sense strand starting at position 2414 of SEQ ID NO: 916079
auuggugugauacaaugua

SEQ ID NO: 1128865 - RNA, 19 nt, Artificial Sequence
  Description of Artificial Sequence: Synthetic oligonucleotide
  Antisense strand to SEQ ID NO: 1128864
uacauuguaucacaccaau

SEQ ID NO: 1128866 - RNA, 19 nt, Artificial Sequence
  Description of Artificial Sequence: Synthetic oligonucleotide
  Sense strand starting at position 2764 of SEQ ID NO: 916079
cagaccaugucuguuagau

SEQ ID NO: 1128867 - RNA, 19 nt, Artificial Sequence
  Description of Artificial Sequence: Synthetic oligonucleotide
  Antisense strand to SEQ ID NO: 1128866
aucuaacagacauggucug

SEQ ID NO: 1128868 - RNA, 19 nt, Artificial Sequence
  Description of Artificial Sequence: Synthetic oligonucleotide
  Sense strand starting at position 2842 of SEQ ID NO: 916079
uccagucaucuccacaugu

SEQ ID NO: 1128869 - RNA, 19 nt, Artificial Sequence
  Description of Artificial Sequence: Synthetic oligonucleotide
  Antisense strand to SEQ ID NO: 1128868
acauguggagaugacugga

SEQ ID NO: 1128870 - RNA, 19 nt, Artificial Sequence
  Description of Artificial Sequence: Synthetic oligonucleotide
  Sense strand starting at position 9 of SEQ ID NO: 916080
ccgucauccuaagggauua

SEQ ID NO: 1128871 - RNA, 19 nt, Artificial Sequence
  Description of Artificial Sequence: Synthetic oligonucleotide
  Antisense strand to SEQ ID NO: 1128870
uaaucccuuaggaugacgg

SEQ ID NO: 1128872 - RNA, 19 nt, Artificial Sequence
  Description of Artificial Sequence: Synthetic oligonucleotide
  Sense strand starting at position 10 of SEQ ID NO: 916080
cgucauccuaagggauuau

SEQ ID NO: 1128873 - RNA, 19 nt, Artificial Sequence
  Description of Artificial Sequence: Synthetic oligonucleotide
  Antisense strand to SEQ ID NO: 1128872
auaaucccuuaggaugacg

SEQ ID NO: 1128874 - RNA, 19 nt, Artificial Sequence
  Description of Artificial Sequence: Synthetic oligonucleotide
  Sense strand starting at position 22 of SEQ ID NO: 916080
ggauuaucgggcuggccua

SEQ ID NO: 1128875 - RNA, 19 nt, Artificial Sequence
  Description of Artificial Sequence: Synthetic oligonucleotide
  Antisense strand to SEQ ID NO: 1128874
uaggccagcccgauaaucc

SEQ ID NO: 1128876 - RNA, 19 nt, Artificial Sequence
  Description of Artificial Sequence: Synthetic oligonucleotide
  Sense strand starting at position 29 of SEQ ID NO: 916080
cgggcuggccuagaaacau

SEQ ID NO: 1128877 - RNA, 19 nt, Artificial Sequence
  Description of Artificial Sequence: Synthetic oligonucleotide
  Antisense strand to SEQ ID NO: 1128876
auguuucuaggccagcccg

SEQ ID NO: 1128878 - RNA, 19 nt, Artificial Sequence
  Description of Artificial Sequence: Synthetic oligonucleotide
  Sense strand starting at position 231 of SEQ ID NO: 916080
ggaugcgggacucaucaga

SEQ ID NO: 1128879 - RNA, 19 nt, Artificial Sequence
  Description of Artificial Sequence: Synthetic oligonucleotide
  Antisense strand to SEQ ID NO: 1128878
ucugaugagucccgcaucc

SEQ ID NO: 1128880 - RNA, 19 nt, Artificial Sequence
  Description of Artificial Sequence: Synthetic oligonucleotide
  Sense strand starting at position 445 of SEQ ID NO: 916080
aguaucucacggugagcaa

SEQ ID NO: 1128881 - RNA, 19 nt, Artificial Sequence
  Description of Artificial Sequence: Synthetic oligonucleotide
  Antisense strand to SEQ ID NO: 1128880
uugcucaccgugagauacu

SEQ ID NO: 1128882 - RNA, 19 nt, Artificial Sequence
  Description of Artificial Sequence: Synthetic oligonucleotide
  Sense strand starting at position 522 of SEQ ID NO: 916080
aggcuuucuuacugaugac

SEQ ID NO: 1128883 - RNA, 19 nt, Artificial Sequence
  Description of Artificial Sequence: Synthetic oligonucleotide
  Antisense strand to SEQ ID NO: 1128882
gucaucaguaagaaagccu

SEQ ID NO: 1128884 - RNA, 19 nt, Artificial Sequence
  Description of Artificial Sequence: Synthetic oligonucleotide
  Sense strand starting at position 1180 of SEQ ID NO: 916080
aaacauacgugcuccgaau

SEQ ID NO: 1128885 - RNA, 19 nt, Artificial Sequence
  Description of Artificial Sequence: Synthetic oligonucleotide
  Antisense strand to SEQ ID NO: 1128884
auucggagcacguauguuu

SEQ ID NO: 1128886 - RNA, 19 nt, Artificial Sequence
  Description of Artificial Sequence: Synthetic oligonucleotide
  Sense strand starting at position 1246 of SEQ ID NO: 916080
agcagauggaucugccaca

SEQ ID NO: 1128887 - RNA, 19 nt, Artificial Sequence
  Description of Artificial Sequence: Synthetic oligonucleotide
  Antisense strand to SEQ ID NO: 1128886
uguggcagauccaucugcu

SEQ ID NO: 1128888 - RNA, 19 nt, Artificial Sequence
  Description of Artificial Sequence: Synthetic oligonucleotide
  Sense strand starting at position 1351 of SEQ ID NO: 916080
gccaccagcguguagaaau

SEQ ID NO: 1128889 - RNA, 19 nt, Artificial Sequence
  Description of Artificial Sequence: Synthetic oligonucleotide
  Antisense strand to SEQ ID NO: 1128888
auuucuacacgcugguggc

SEQ ID NO: 1128890 - RNA, 19 nt, Artificial Sequence
  Description of Artificial Sequence: Synthetic oligonucleotide
  Sense strand starting at position 2412 of SEQ ID NO: 916080
ucagucugagccugagaaa

SEQ ID NO: 1128891 - RNA, 19 nt, Artificial Sequence
  Description of Artificial Sequence: Synthetic oligonucleotide
  Antisense strand to SEQ ID NO: 1128890
uuucucaggcucagacuga

SEQ ID NO: 1128892 - RNA, 19 nt, Artificial Sequence
  Description of Artificial Sequence: Synthetic oligonucleotide
  Sense strand starting at position 2413 of SEQ ID NO: 916080
cagucugagccugagaaau

SEQ ID NO: 1128893 - RNA, 19 nt, Artificial Sequence
  Description of Artificial Sequence: Synthetic oligonucleotide
  Antisense strand to SEQ ID NO: 1128892
auuucucaggcucagacug

SEQ ID NO: 1128894 - RNA, 19 nt, Artificial Sequence
  Description of Artificial Sequence: Synthetic oligonucleotide
  Sense strand starting at position 2425 of SEQ ID NO: 916080
gagaaauccuggcauuugu

SEQ ID NO: 1128895 - RNA, 19 nt, Artificial Sequence
  Description of Artificial Sequence: Synthetic oligonucleotide
  Antisense strand to SEQ ID NO: 1128894
acaaaugccaggauuucuc

SEQ ID NO: 1128896 - RNA, 19 nt, Artificial Sequence
  Description of Artificial Sequence: Synthetic oligonucleotide
  Sense strand starting at position 2742 of SEQ ID NO: 916080
gaaagcaugggcuguccua

SEQ ID NO: 1128897 - RNA, 19 nt, Artificial Sequence
  Description of Artificial Sequence: Synthetic oligonucleotide
  Antisense strand to SEQ ID NO: 1128896
uaggacagcccaugcuuuc

SEQ ID NO: 1128898 - RNA, 19 nt, Artificial Sequence
  Description of Artificial Sequence: Synthetic oligonucleotide
  Sense strand starting at position 2775 of SEQ ID NO: 916080
ggguuacggucucaucgau

SEQ ID NO: 1128899 - RNA, 19 nt, Artificial Sequence
  Description of Artificial Sequence: Synthetic oligonucleotide
  Antisense strand to SEQ ID NO: 1128898
aucgaugagaccguaaccc

SEQ ID NO: 1128900 - RNA, 19 nt, Artificial Sequence
  Description of Artificial Sequence: Synthetic oligonucleotide
  Sense strand starting at position 2781 of SEQ ID NO: 916080
cggucucaucgaugacuca

SEQ ID NO: 1128901 - RNA, 19 nt, Artificial Sequence
  Description of Artificial Sequence: Synthetic oligonucleotide
  Antisense strand to SEQ ID NO: 1128900
ugagucaucgaugagaccg

SEQ ID NO: 1128902 - RNA, 19 nt, Artificial Sequence
  Description of Artificial Sequence: Synthetic oligonucleotide
  Sense strand starting at position 2874 of SEQ ID NO: 916080
ggcugucuguuccggacuu

SEQ ID NO: 1128903 - RNA, 19 nt, Artificial Sequence
  Description of Artificial Sequence: Synthetic oligonucleotide
  Antisense strand to SEQ ID NO: 1128902
aaguccggaacagacagcc

SEQ ID NO: 1128904 - RNA, 19 nt, Artificial Sequence
  Description of Artificial Sequence: Synthetic oligonucleotide
  Sense strand starting at position 2875 of SEQ ID NO: 916080
gcugucuguuccggacuuu

SEQ ID NO: 1128905 - RNA, 19 nt, Artificial Sequence
  Description of Artificial Sequence: Synthetic oligonucleotide
  Antisense strand to SEQ ID NO: 1128904
aaaguccggaacagacagc

SEQ ID NO: 1128906 - RNA, 19 nt, Artificial Sequence
  Description of Artificial Sequence: Synthetic oligonucleotide
  Sense strand starting at position 2932 of SEQ ID NO: 916080
gcucuuuaggaccaagagu

SEQ ID NO: 1128907 - RNA, 19 nt, Artificial Sequence
  Description of Artificial Sequence: Synthetic oligonucleotide
  Antisense strand to SEQ ID NO: 1128906
acucuugguccuaaagagc

SEQ ID NO: 1128908 - RNA, 19 nt, Artificial Sequence
  Description of Artificial Sequence: Synthetic oligonucleotide
  Sense strand starting at position 3084 of SEQ ID NO: 916080
gucccaggaucucaggaua

SEQ ID NO: 1128909 - RNA, 19 nt, Artificial Sequence
  Description of Artificial Sequence: Synthetic oligonucleotide
  Antisense strand to SEQ ID NO: 1128908
uauccugagauccugggac

SEQ ID NO: 1128910 - RNA, 19 nt, Artificial Sequence
  Description of Artificial Sequence: Synthetic oligonucleotide
  Sense strand starting at position 3095 of SEQ ID NO: 916080
ucaggauauuguuggaacu

SEQ ID NO: 1128911 - RNA, 19 nt, Artificial Sequence
  Description of Artificial Sequence: Synthetic oligonucleotide
  Antisense strand to SEQ ID NO: 1128910
aguuccaacaauauccuga

SEQ ID NO: 1128912 - RNA, 19 nt, Artificial Sequence
  Description of Artificial Sequence: Synthetic oligonucleotide
  Sense strand starting at position 3097 of SEQ ID NO: 916080
aggauauuguuggaacuca

SEQ ID NO: 1128913 - RNA, 19 nt, Artificial Sequence
  Description of Artificial Sequence: Synthetic oligonucleotide
  Antisense strand to SEQ ID NO: 1128912
ugaguuccaacaauauccu

SEQ ID NO: 1128914 - RNA, 19 nt, Artificial Sequence
  Description of Artificial Sequence: Synthetic oligonucleotide
  Sense strand starting at position 3143 of SEQ ID NO: 916080
ucaggugucucccaggaaa

SEQ ID NO: 1128915 - RNA, 19 nt, Artificial Sequence
  Description of Artificial Sequence: Synthetic oligonucleotide
  Antisense strand to SEQ ID NO: 1128914
uuuccugggagacaccuga

SEQ ID NO: 1128916 - RNA, 19 nt, Artificial Sequence
  Description of Artificial Sequence: Synthetic oligonucleotide
  Sense strand starting at position 3145 of SEQ ID NO: 916080
aggugucucccaggaaaga

SEQ ID NO: 1128917 - RNA, 19 nt, Artificial Sequence
  Description of Artificial Sequence: Synthetic oligonucleotide
  Antisense strand to SEQ ID NO: 1128916
ucuuuccugggagacaccu

SEQ ID NO: 1128918 - RNA, 19 nt, Artificial Sequence
  Description of Artificial Sequence: Synthetic oligonucleotide
  Sense strand starting at position 3188 of SEQ ID NO: 916080
ucccaagccugccagaaau

SEQ ID NO: 1128919 - RNA, 19 nt, Artificial Sequence
  Description of Artificial Sequence: Synthetic oligonucleotide
  Antisense strand to SEQ ID NO: 1128918
auuucuggcaggcuuggga

SEQ ID NO: 1128920 - RNA, 19 nt, Artificial Sequence
  Description of Artificial Sequence: Synthetic oligonucleotide
  Sense strand starting at position 3190 of SEQ ID NO: 916080
ccaagccugccagaaauga

SEQ ID NO: 1128921 - RNA, 19 nt, Artificial Sequence
  Description of Artificial Sequence: Synthetic oligonucleotide
  Antisense strand to SEQ ID NO: 1128920
ucauuucuggcaggcuugg

SEQ ID NO: 1128922 - RNA, 19 nt, Artificial Sequence
  Description of Artificial Sequence: Synthetic oligonucleotide
  Sense strand starting at position 3275 of SEQ ID NO: 916080
cagguuccuuccucaggaa

SEQ ID NO: 1128923 - RNA, 19 nt, Artificial Sequence
  Description of Artificial Sequence: Synthetic oligonucleotide
  Antisense strand to SEQ ID NO: 1128922
uuccugaggaaggaaccug

SEQ ID NO: 1128924 - RNA, 19 nt, Artificial Sequence
  Description of Artificial Sequence: Synthetic oligonucleotide
  Sense strand starting at position 3278 of SEQ ID NO: 916080
guuccuuccucaggaagga

SEQ ID NO: 1128925 - RNA, 19 nt, Artificial Sequence
  Description of Artificial Sequence: Synthetic oligonucleotide
  Antisense strand to SEQ ID NO: 1128924
uccuuccugaggaaggaac

SEQ ID NO: 1128926 - RNA, 19 nt, Artificial Sequence
  Description of Artificial Sequence: Synthetic oligonucleotide
  Sense strand starting at position 3409 of SEQ ID NO: 916080
gaagaagucugguagggac

SEQ ID NO: 1128927 - RNA, 19 nt, Artificial Sequence
  Description of Artificial Sequence: Synthetic oligonucleotide
  Antisense strand to SEQ ID NO: 1128926
gucccuaccagacuucuuc

SEQ ID NO: 1128928 - RNA, 19 nt, Artificial Sequence
  Description of Artificial Sequence: Synthetic oligonucleotide
  Sense strand starting at position 3422 of SEQ ID NO: 916080
agggacucuuauugcaaca

SEQ ID NO: 1128929 - RNA, 19 nt, Artificial Sequence
  Description of Artificial Sequence: Synthetic oligonucleotide
  Antisense strand to SEQ ID NO: 1128928
uguugcaauaagagucccu

SEQ ID NO: 1128930 - RNA, 19 nt, Artificial Sequence
  Description of Artificial Sequence: Synthetic oligonucleotide
  Sense strand starting at position 3621 of SEQ ID NO: 916080
uaccgcuuugucucgcaga

SEQ ID NO: 1128931 - RNA, 19 nt, Artificial Sequence
  Description of Artificial Sequence: Synthetic oligonucleotide
  Antisense strand to SEQ ID NO: 1128930
ucugcgagacaaagcggua

SEQ ID NO: 1128932 - RNA, 19 nt, Artificial Sequence
  Description of Artificial Sequence: Synthetic oligonucleotide
  Sense strand starting at position 3622 of SEQ ID NO: 916080
accgcuuugucucgcagaa

SEQ ID NO: 1128933 - RNA, 19 nt, Artificial Sequence
  Description of Artificial Sequence: Synthetic oligonucleotide
  Antisense strand to SEQ ID NO: 1128932
uucugcgagacaaagcggu

SEQ ID NO: 1128934 - RNA, 19 nt, Artificial Sequence
  Description of Artificial Sequence: Synthetic oligonucleotide
  Sense strand starting at position 3623 of SEQ ID NO: 916080
ccgcuuugucucgcagaag

SEQ ID NO: 1128935 - RNA, 19 nt, Artificial Sequence
  Description of Artificial Sequence: Synthetic oligonucleotide
  Antisense strand to SEQ ID NO: 1128934
cuucugcgagacaaagcgg

SEQ ID NO: 1128936 - RNA, 19 nt, Artificial Sequence
  Description of Artificial Sequence: Synthetic oligonucleotide
  Sense strand starting at position 3624 of SEQ ID NO: 916080
cgcuuugucucgcagaaga

SEQ ID NO: 1128937 - RNA, 19 nt, Artificial Sequence
  Description of Artificial Sequence: Synthetic oligonucleotide
  Antisense strand to SEQ ID NO: 1128936
ucuucugcgagacaaagcg

SEQ ID NO: 1128938 - RNA, 19 nt, Artificial Sequence
  Description of Artificial Sequence: Synthetic oligonucleotide
  Sense strand starting at position 3626 of SEQ ID NO: 916080
cuuugucucgcagaagaac

SEQ ID NO: 1128939 - RNA, 19 nt, Artificial Sequence
  Description of Artificial Sequence: Synthetic oligonucleotide
  Antisense strand to SEQ ID NO: 1128938
guucuucugcgagacaaag

SEQ ID NO: 1128940 - RNA, 19 nt, Artificial Sequence
  Description of Artificial Sequence: Synthetic oligonucleotide
  Sense strand starting at position 56 of SEQ ID NO: 916081
guagguaggcaguaaguau

SEQ ID NO: 1128941 - RNA, 19 nt, Artificial Sequence
  Description of Artificial Sequence: Synthetic oligonucleotide
  Antisense strand to SEQ ID NO: 1128940
auacuuacugccuaccuac

SEQ ID NO: 1128942 - RNA, 19 nt, Artificial Sequence
  Description of Artificial Sequence: Synthetic oligonucleotide
  Sense strand starting at position 104 of SEQ ID NO: 916081
ugaaucugacuguaccuua

SEQ ID NO: 1128943 - RNA, 19 nt, Artificial Sequence
  Description of Artificial Sequence: Synthetic oligonucleotide
  Antisense strand to SEQ ID NO: 1128942
uaagguacagucagauuca

SEQ ID NO: 1128944 - RNA, 19 nt, Artificial Sequence
  Description of Artificial Sequence: Synthetic oligonucleotide
  Sense strand starting at position 154 of SEQ ID NO: 916081
ugaacaggguuuccugaua

SEQ ID NO: 1128945 - RNA, 19 nt, Artificial Sequence
  Description of Artificial Sequence: Synthetic oligonucleotide
  Antisense strand to SEQ ID NO: 1128944
uaucaggaaacccuguuca

SEQ ID NO: 1128946 - RNA, 19 nt, Artificial Sequence
  Description of Artificial Sequence: Synthetic oligonucleotide
  Sense strand starting at position 215 of SEQ ID NO: 916081
uccauuuacugugaauaug

SEQ ID NO: 1128947 - RNA, 19 nt, Artificial Sequence
  Description of Artificial Sequence: Synthetic oligonucleotide
  Antisense strand to SEQ ID NO: 1128946
cauauucacaguaaaugga

SEQ ID NO: 1128948 - RNA, 19 nt, Artificial Sequence
  Description of Artificial Sequence: Synthetic oligonucleotide
  Sense strand starting at position 399 of SEQ ID NO: 916081
uugguauucccuuggacau

SEQ ID NO: 1128949 - RNA, 19 nt, Artificial Sequence
  Description of Artificial Sequence: Synthetic oligonucleotide
  Antisense strand to SEQ ID NO: 1128948
auguccaagggaauaccaa

SEQ ID NO: 1128950 - RNA, 19 nt, Artificial Sequence
  Description of Artificial Sequence: Synthetic oligonucleotide
  Sense strand starting at position 400 of SEQ ID NO: 916081
ugguauucccuuggacaug

SEQ ID NO: 1128951 - RNA, 19 nt, Artificial Sequence
  Description of Artificial Sequence: Synthetic oligonucleotide
  Antisense strand to SEQ ID NO: 1128950
cauguccaagggaauacca

SEQ ID NO: 1128952 - RNA, 19 nt, Artificial Sequence
  Description of Artificial Sequence: Synthetic oligonucleotide
  Sense strand starting at position 624 of SEQ ID NO: 916081
uuugaacaagacugguuaa

SEQ ID NO: 1128953 - RNA, 19 nt, Artificial Sequence
  Description of Artificial Sequence: Synthetic oligonucleotide
  Antisense strand to SEQ ID NO: 1128952
uuaaccagucuuguucaaa

SEQ ID NO: 1128954 - RNA, 19 nt, Artificial Sequence
  Description of Artificial Sequence: Synthetic oligonucleotide
  Sense strand starting at position 662 of SEQ ID NO: 916081
auauuaauauggguaagca

SEQ ID NO: 1128955 - RNA, 19 nt, Artificial Sequence
  Description of Artificial Sequence: Synthetic oligonucleotide
  Antisense strand to SEQ ID NO: 1128954
ugcuuacccauauuaauau

SEQ ID NO: 1128956 - RNA, 19 nt, Artificial Sequence
  Description of Artificial Sequence: Synthetic oligonucleotide
  Sense strand starting at position 792 of SEQ ID NO: 916081
uguaguuagguugaagcua

SEQ ID NO: 1128957 - RNA, 19 nt, Artificial Sequence
  Description of Artificial Sequence: Synthetic oligonucleotide
  Antisense strand to SEQ ID NO: 1128956
uagcuucaaccuaacuaca

SEQ ID NO: 1128958 - RNA, 19 nt, Artificial Sequence
  Description of Artificial Sequence: Synthetic oligonucleotide
  Sense strand starting at position 797 of SEQ ID NO: 916081
uuagguugaagcuauaugu

SEQ ID NO: 1128959 - RNA, 19 nt, Artificial Sequence
  Description of Artificial Sequence: Synthetic oligonucleotide
  Antisense strand to SEQ ID NO: 1128958
acauauagcuucaaccuaa

SEQ ID NO: 1128960 - RNA, 19 nt, Artificial Sequence
  Description of Artificial Sequence: Synthetic oligonucleotide
  Sense strand starting at position 804 of SEQ ID NO: 916081
gaagcuauauguguaaauu

SEQ ID NO: 1128961 - RNA, 19 nt, Artificial Sequence
  Description of Artificial Sequence: Synthetic oligonucleotide
  Antisense strand to SEQ ID NO: 1128960
aauuuacacauauagcuuc

SEQ ID NO: 1128962 - RNA, 19 nt, Artificial Sequence
  Description of Artificial Sequence: Synthetic oligonucleotide
  Sense strand starting at position 822 of SEQ ID NO: 916081
ucauucuuggcacagaauu

SEQ ID NO: 1128963 - RNA, 19 nt, Artificial Sequence
  Description of Artificial Sequence: Synthetic oligonucleotide
  Antisense strand to SEQ ID NO: 1128962
aauucugugccaagaauga

SEQ ID NO: 1128964 - RNA, 19 nt, Artificial Sequence
  Description of Artificial Sequence: Synthetic oligonucleotide
  Sense strand starting at position 858 of SEQ ID NO: 916081
ugaauaacaucagcuugua

SEQ ID NO: 1128965 - RNA, 19 nt, Artificial Sequence
  Description of Artificial Sequence: Synthetic oligonucleotide
  Antisense strand to SEQ ID NO: 1128964
uacaagcugauguuauuca

SEQ ID NO: 1128966 - RNA, 19 nt, Artificial Sequence
  Description of Artificial Sequence: Synthetic oligonucleotide
  Sense strand starting at position 890 of SEQ ID NO: 916081
uuggcaauguaucuaaauu

SEQ ID NO: 1128967 - RNA, 19 nt, Artificial Sequence
  Description of Artificial Sequence: Synthetic oligonucleotide
  Antisense strand to SEQ ID NO: 1128966
aauuuagauacauugccaa

SEQ ID NO: 1128968 - RNA, 19 nt, Artificial Sequence
  Description of Artificial Sequence: Synthetic oligonucleotide
  Sense strand starting at position 939 of SEQ ID NO: 916081
cgagguuccaaagguauga

SEQ ID NO: 1128969 - RNA, 19 nt, Artificial Sequence
  Description of Artificial Sequence: Synthetic oligonucleotide
  Antisense strand to SEQ ID NO: 1128968
ucauaccuuuggaaccucg

SEQ ID NO: 1128970 - RNA, 19 nt, Artificial Sequence
  Description of Artificial Sequence: Synthetic oligonucleotide
  Sense strand starting at position 943 of SEQ ID NO: 916081
guuccaaagguaugauuaa

SEQ ID NO: 1128971 - RNA, 19 nt, Artificial Sequence
  Description of Artificial Sequence: Synthetic oligonucleotide
  Antisense strand to SEQ ID NO: 1128970
uuaaucauaccuuuggaac

SEQ ID NO: 1128972 - RNA, 19 nt, Artificial Sequence
  Description of Artificial Sequence: Synthetic oligonucleotide
  Sense strand starting at position 1028 of SEQ ID NO: 916081
uuuauaaauguagggaguu

SEQ ID NO: 1128973 - RNA, 19 nt, Artificial Sequence
  Description of Artificial Sequence: Synthetic oligonucleotide
  Antisense strand to SEQ ID NO: 1128972
aacucccuacauuuauaaa

SEQ ID NO: 1128974 - RNA, 19 nt, Artificial Sequence
  Description of Artificial Sequence: Synthetic oligonucleotide
  Sense strand starting at position 1057 of SEQ ID NO: 916081
ugcugacucacaggaagau

SEQ ID NO: 1128975 - RNA, 19 nt, Artificial Sequence
  Description of Artificial Sequence: Synthetic oligonucleotide
  Antisense strand to SEQ ID NO: 1128974
aucuuccugugagucagca

SEQ ID NO: 1128976 - RNA, 19 nt, Artificial Sequence
  Description of Artificial Sequence: Synthetic oligonucleotide
  Sense strand starting at position 1067 of SEQ ID NO: 916081
caggaagauagcuggagua

SEQ ID NO: 1128977 - RNA, 19 nt, Artificial Sequence
  Description of Artificial Sequence: Synthetic oligonucleotide
  Antisense strand to SEQ ID NO: 1128976
uacuccagcuaucuuccug

SEQ ID NO: 1128978 - RNA, 19 nt, Artificial Sequence
  Description of Artificial Sequence: Synthetic oligonucleotide
  Sense strand starting at position 1111 of SEQ ID NO: 916081
ccaagcugagcuugaaauu

SEQ ID NO: 1128979 - RNA, 19 nt, Artificial Sequence
  Description of Artificial Sequence: Synthetic oligonucleotide
  Antisense strand to SEQ ID NO: 1128978
aauuucaagcucagcuugg

SEQ ID NO: 1128980 - RNA, 19 nt, Artificial Sequence
  Description of Artificial Sequence: Synthetic oligonucleotide
  Sense strand starting at position 1360 of SEQ ID NO: 916081
gaugauucucaagggcgga

SEQ ID NO: 1128981 - RNA, 19 nt, Artificial Sequence
  Description of Artificial Sequence: Synthetic oligonucleotide
  Antisense strand to SEQ ID NO: 1128980
uccgcccuugagaaucauc

SEQ ID NO: 1128982 - RNA, 19 nt, Artificial Sequence
  Description of Artificial Sequence: Synthetic oligonucleotide
  Sense strand starting at position 1383 of SEQ ID NO: 916081
ggaacugucccagguuaug

SEQ ID NO: 1128983 - RNA, 19 nt, Artificial Sequence
  Description of Artificial Sequence: Synthetic oligonucleotide
  Antisense strand to SEQ ID NO: 1128982
cauaaccugggacaguucc

SEQ ID NO: 1128984 - RNA, 19 nt, Artificial Sequence
  Description of Artificial Sequence: Synthetic oligonucleotide
  Sense strand starting at position 2014 of SEQ ID NO: 916081
gugcucgcugggaauugua

SEQ ID NO: 1128985 - RNA, 19 nt, Artificial Sequence
  Description of Artificial Sequence: Synthetic oligonucleotide
  Antisense strand to SEQ ID NO: 1128984
uacaauucccagcgagcac

SEQ ID NO: 1128986 - RNA, 19 nt, Artificial Sequence
  Description of Artificial Sequence: Synthetic oligonucleotide
  Sense strand starting at position 2236 of SEQ ID NO: 916081
guggguuucccguugcaua

SEQ ID NO: 1128987 - RNA, 19 nt, Artificial Sequence
  Description of Artificial Sequence: Synthetic oligonucleotide
  Antisense strand to SEQ ID NO: 1128986
uaugcaacgggaaacccac

SEQ ID NO: 1128988 - RNA, 19 nt, Artificial Sequence
  Description of Artificial Sequence: Synthetic oligonucleotide
  Sense strand starting at position 2431 of SEQ ID NO: 916081
cgcacuuugaucgacauca

SEQ ID NO: 1128989 - RNA, 19 nt, Artificial Sequence
  Description of Artificial Sequence: Synthetic oligonucleotide
  Antisense strand to SEQ ID NO: 1128988
ugaugucgaucaaagugcg

SEQ ID NO: 1128990 - RNA, 19 nt, Artificial Sequence
  Description of Artificial Sequence: Synthetic oligonucleotide
  Sense strand starting at position 2452 of SEQ ID NO: 916081
auucccuagcagcagaaau

SEQ ID NO: 1128991 - RNA, 19 nt, Artificial Sequence
  Description of Artificial Sequence: Synthetic oligonucleotide
  Antisense strand to SEQ ID NO: 1128990
auuucugcugcuagggaau

SEQ ID NO: 1128992 - RNA, 19 nt, Artificial Sequence
  Description of Artificial Sequence: Synthetic oligonucleotide
  Sense strand starting at position 2462 of SEQ ID NO: 916081
agcagaaauuuggaaguca

SEQ ID NO: 1128993 - RNA, 19 nt, Artificial Sequence
  Description of Artificial Sequence: Synthetic oligonucleotide
  Antisense strand to SEQ ID NO: 1128992
ugacuuccaaauuucugcu

SEQ ID NO: 1128994 - RNA, 19 nt, Artificial Sequence
  Description of Artificial Sequence: Synthetic oligonucleotide
  Sense strand starting at position 2587 of SEQ ID NO: 916081
gaggguuucccucacauuc

SEQ ID NO: 1128995 - RNA, 19 nt, Artificial Sequence
  Description of Artificial Sequence: Synthetic oligonucleotide
  Antisense strand to SEQ ID NO: 1128994
gaaugugagggaaacccuc

SEQ ID NO: 1128996 - RNA, 19 nt, Artificial Sequence
  Description of Artificial Sequence: Synthetic oligonucleotide
  Sense strand starting at position 2706 of SEQ ID NO: 916081
gaguccuuuccagagaguc

SEQ ID NO: 1128997 - RNA, 19 nt, Artificial Sequence
  Description of Artificial Sequence: Synthetic oligonucleotide
  Antisense strand to SEQ ID NO: 1128996
gacucucuggaaaggacuc

SEQ ID NO: 1128998 - RNA, 19 nt, Artificial Sequence
  Description of Artificial Sequence: Synthetic oligonucleotide
  Sense strand starting at position 2759 of SEQ ID NO: 916081
ugcuaaggaccuuguuaac

SEQ ID NO: 1128999 - RNA, 19 nt, Artificial Sequence
  Description of Artificial Sequence: Synthetic oligonucleotide
  Antisense strand to SEQ ID NO: 1128998
guuaacaagguccuuagca

SEQ ID NO: 1129000 - RNA, 19 nt, Artificial Sequence
  Description of Artificial Sequence: Synthetic oligonucleotide
  Sense strand starting at position 2828 of SEQ ID NO: 916081
ucugaaaugggcuggaaga

SEQ ID NO: 1129001 - RNA, 19 nt, Artificial Sequence
  Description of Artificial Sequence: Synthetic oligonucleotide
  Antisense strand to SEQ ID NO: 1129000
ucuuccagcccauuucaga

SEQ ID NO: 1129002 - RNA, 19 nt, Artificial Sequence
  Description of Artificial Sequence: Synthetic oligonucleotide
  Sense strand starting at position 2848 of SEQ ID NO: 916081
ugauguucucccugaggaa

SEQ ID NO: 1129003 - RNA, 19 nt, Artificial Sequence
  Description of Artificial Sequence: Synthetic oligonucleotide
  Antisense strand to SEQ ID NO: 1129002
uuccucagggagaacauca

SEQ ID NO: 1129004 - RNA, 19 nt, Artificial Sequence
  Description of Artificial Sequence: Synthetic oligonucleotide
  Sense strand starting at position 3341 of SEQ ID NO: 916081
agccuauauuuggaaguag

SEQ ID NO: 1129005 - RNA, 19 nt, Artificial Sequence
  Description of Artificial Sequence: Synthetic oligonucleotide
  Antisense strand to SEQ ID NO: 1129004
cuacuuccaaauauaggcu

SEQ ID NO: 1129006 - RNA, 19 nt, Artificial Sequence
  Description of Artificial Sequence: Synthetic oligonucleotide
  Sense strand starting at position 3488 of SEQ ID NO: 916081
agaagaagucuuugauguu

SEQ ID NO: 1129007 - RNA, 19 nt, Artificial Sequence
  Description of Artificial Sequence: Synthetic oligonucleotide
  Antisense strand to SEQ ID NO: 1129006
aacaucaaagacuucuucu

SEQ ID NO: 1129008 - RNA, 19 nt, Artificial Sequence
  Description of Artificial Sequence: Synthetic oligonucleotide
  Sense strand starting at position 3522 of SEQ ID NO: 916081
gguacuggauacuuuacau

SEQ ID NO: 1129009 - RNA, 19 nt, Artificial Sequence
  Description of Artificial Sequence: Synthetic oligonucleotide
  Antisense strand to SEQ ID NO: 1129008
auguaaaguauccaguacc

SEQ ID NO: 1129010 - RNA, 19 nt, Artificial Sequence
  Description of Artificial Sequence: Synthetic oligonucleotide
  Sense strand starting at position 3539 of SEQ ID NO: 916081
aucucuuagucugugaauu

SEQ ID NO: 1129011 - RNA, 19 nt, Artificial Sequence
  Description of Artificial Sequence: Synthetic oligonucleotide
  Antisense strand to SEQ ID NO: 1129010
aauucacagacuaagagau

SEQ ID NO: 1129012 - RNA, 19 nt, Artificial Sequence
  Description of Artificial Sequence: Synthetic oligonucleotide
  Sense strand starting at position 3580 of SEQ ID NO: 916081
gggacuggugcuggaagaa

SEQ ID NO: 1129013 - RNA, 19 nt, Artificial Sequence
  Description of Artificial Sequence: Synthetic oligonucleotide
  Antisense strand to SEQ ID NO: 1129012
uucuuccagcaccaguccc

SEQ ID NO: 1129014 - RNA, 19 nt, Artificial Sequence
  Description of Artificial Sequence: Synthetic oligonucleotide
  Sense strand starting at position 3643 of SEQ ID NO: 916081
caaugccaugcuugggaaa

SEQ ID NO: 1129015 - RNA, 19 nt, Artificial Sequence
  Description of Artificial Sequence: Synthetic oligonucleotide
  Antisense strand to SEQ ID NO: 1129014
uuucccaagcauggcauug

SEQ ID NO: 1129016 - RNA, 19 nt, Artificial Sequence
  Description of Artificial Sequence: Synthetic oligonucleotide
  Sense strand starting at position 3783 of SEQ ID NO: 916081
uugguagucaugugaggac

SEQ ID NO: 1129017 - RNA, 19 nt, Artificial Sequence
  Description of Artificial Sequence: Synthetic oligonucleotide
  Antisense strand to SEQ ID NO: 1129016
guccucacaugacuaccaa

SEQ ID NO: 1129018 - RNA, 19 nt, Artificial Sequence
  Description of Artificial Sequence: Synthetic oligonucleotide
  Sense strand starting at position 3898 of SEQ ID NO: 916081
acagacaccugaguaguuu

SEQ ID NO: 1129019 - RNA, 19 nt, Artificial Sequence
  Description of Artificial Sequence: Synthetic oligonucleotide
  Antisense strand to SEQ ID NO: 1129018
aaacuacucaggugucugu

SEQ ID NO: 1129020 - RNA, 19 nt, Artificial Sequence
  Description of Artificial Sequence: Synthetic oligonucleotide
  Sense strand starting at position 205 of SEQ ID NO: 916082
caagaugacuggucauuag

SEQ ID NO: 1129021 - RNA, 19 nt, Artificial Sequence
  Description of Artificial Sequence: Synthetic oligonucleotide
  Antisense strand to SEQ ID NO: 1129020
cuaaugaccagucaucuug

SEQ ID NO: 1129022 - RNA, 19 nt, Artificial Sequence
  Description of Artificial Sequence: Synthetic oligonucleotide
  Sense strand starting at position 208 of SEQ ID NO: 916082
gaugacuggucauuagaac

SEQ ID NO: 1129023 - RNA, 19 nt, Artificial Sequence
  Description of Artificial Sequence: Synthetic oligonucleotide
  Antisense strand to SEQ ID NO: 1129022
guucuaaugaccagucauc

SEQ ID NO: 1129024 - RNA, 19 nt, Artificial Sequence
  Description of Artificial Sequence: Synthetic oligonucleotide
  Sense strand starting at position 219 of SEQ ID NO: 916082
auuagaacacgguguggua

SEQ ID NO: 1129025 - RNA, 19 nt, Artificial Sequence
  Description of Artificial Sequence: Synthetic oligonucleotide
  Antisense strand to SEQ ID NO: 1129024
uaccacaccguguucuaau

SEQ ID NO: 1129026 - RNA, 19 nt, Artificial Sequence
  Description of Artificial Sequence: Synthetic oligonucleotide
  Sense strand starting at position 233 of SEQ ID NO: 916082
ugguaggagccgugauaag

SEQ ID NO: 1129027 - RNA, 19 nt, Artificial Sequence
  Description of Artificial Sequence: Synthetic oligonucleotide
  Antisense strand to SEQ ID NO: 1129026
cuuaucacggcuccuacca

SEQ ID NO: 1129028 - RNA, 19 nt, Artificial Sequence
  Description of Artificial Sequence: Synthetic oligonucleotide
  Sense strand starting at position 340 of SEQ ID NO: 916082
gcaugacuugcccaaaguu

SEQ ID NO: 1129029 - RNA, 19 nt, Artificial Sequence
  Description of Artificial Sequence: Synthetic oligonucleotide
  Antisense strand to SEQ ID NO: 1129028
aacuuugggcaagucaugc

SEQ ID NO: 1129030 - RNA, 19 nt, Artificial Sequence
  Description of Artificial Sequence: Synthetic oligonucleotide
  Sense strand starting at position 359 of SEQ ID NO: 916082
aagguuaucuguucccuga

SEQ ID NO: 1129031 - RNA, 19 nt, Artificial Sequence
  Description of Artificial Sequence: Synthetic oligonucleotide
  Antisense strand to SEQ ID NO: 1129030
ucagggaacagauaaccuu

SEQ ID NO: 1129032 - RNA, 19 nt, Artificial Sequence
  Description of Artificial Sequence: Synthetic oligonucleotide
  Sense strand starting at position 361 of SEQ ID NO: 916082
gguuaucuguucccugaag

SEQ ID NO: 1129033 - RNA, 19 nt, Artificial Sequence
  Description of Artificial Sequence: Synthetic oligonucleotide
  Antisense strand to SEQ ID NO: 1129032
cuucagggaacagauaacc

SEQ ID NO: 1129034 - RNA, 19 nt, Artificial Sequence
  Description of Artificial Sequence: Synthetic oligonucleotide
  Sense strand starting at position 363 of SEQ ID NO: 916082
uuaucuguucccugaaguu

SEQ ID NO: 1129035 - RNA, 19 nt, Artificial Sequence
  Description of Artificial Sequence: Synthetic oligonucleotide
  Antisense strand to SEQ ID NO: 1129034
aacuucagggaacagauaa

SEQ ID NO: 1129036 - RNA, 19 nt, Artificial Sequence
  Description of Artificial Sequence: Synthetic oligonucleotide
  Sense strand starting at position 455 of SEQ ID NO: 916082
ucaucauuugagugccacu

SEQ ID NO: 1129037 - RNA, 19 nt, Artificial Sequence
  Description of Artificial Sequence: Synthetic oligonucleotide
  Antisense strand to SEQ ID NO: 1129036
aguggcacucaaaugauga

SEQ ID NO: 1129038 - RNA, 19 nt, Artificial Sequence
  Description of Artificial Sequence: Synthetic oligonucleotide
  Sense strand starting at position 466 of SEQ ID NO: 916082
gugccacugguuuagguua

SEQ ID NO: 1129039 - RNA, 19 nt, Artificial Sequence
  Description of Artificial Sequence: Synthetic oligonucleotide
  Antisense strand to SEQ ID NO: 1129038
uaaccuaaaccaguggcac

SEQ ID NO: 1129040 - RNA, 19 nt, Artificial Sequence
  Description of Artificial Sequence: Synthetic oligonucleotide
  Sense strand starting at position 618 of SEQ ID NO: 916082
cacagagaagauuggucuu

SEQ ID NO: 1129041 - RNA, 19 nt, Artificial Sequence
  Description of Artificial Sequence: Synthetic oligonucleotide
  Antisense strand to SEQ ID NO: 1129040
aagaccaaucuucucugug

SEQ ID NO: 1129042 - RNA, 19 nt, Artificial Sequence
  Description of Artificial Sequence: Synthetic oligonucleotide
  Sense strand starting at position 730 of SEQ ID NO: 916082
agaccagugaucuggcauc

SEQ ID NO: 1129043 - RNA, 19 nt, Artificial Sequence
  Description of Artificial Sequence: Synthetic oligonucleotide
  Antisense strand to SEQ ID NO: 1129042
gaugccagaucacuggucu

SEQ ID NO: 1129044 - RNA, 19 nt, Artificial Sequence
  Description of Artificial Sequence: Synthetic oligonucleotide
  Sense strand starting at position 765 of SEQ ID NO: 916082
cugagugauugggcuuaua

SEQ ID NO: 1129045 - RNA, 19 nt, Artificial Sequence
  Description of Artificial Sequence: Synthetic oligonucleotide
  Antisense strand to SEQ ID NO: 1129044
uauaagcccaaucacucag

SEQ ID NO: 1129046 - RNA, 19 nt, Artificial Sequence
  Description of Artificial Sequence: Synthetic oligonucleotide
  Sense strand starting at position 768 of SEQ ID NO: 916082
agugauugggcuuauauca

SEQ ID NO: 1129047 - RNA, 19 nt, Artificial Sequence
  Description of Artificial Sequence: Synthetic oligonucleotide
  Antisense strand to SEQ ID NO: 1129046
ugauauaagcccaaucacu

SEQ ID NO: 1129048 - RNA, 19 nt, Artificial Sequence
  Description of Artificial Sequence: Synthetic oligonucleotide
  Sense strand starting at position 777 of SEQ ID NO: 916082
gcuuauaucaaguaguagu

SEQ ID NO: 1129049 - RNA, 19 nt, Artificial Sequence
  Description of Artificial Sequence: Synthetic oligonucleotide
  Antisense strand to SEQ ID NO: 1129048
acuacuacuugauauaagc

SEQ ID NO: 1129050 - RNA, 19 nt, Artificial Sequence
  Description of Artificial Sequence: Synthetic oligonucleotide
  Sense strand starting at position 1003 of SEQ ID NO: 916082
acaggagagucagacuaga

SEQ ID NO: 1129051 - RNA, 19 nt, Artificial Sequence
  Description of Artificial Sequence: Synthetic oligonucleotide
  Antisense strand to SEQ ID NO: 1129050
ucuagucugacucuccugu

SEQ ID NO: 1129052 - RNA, 19 nt, Artificial Sequence
  Description of Artificial Sequence: Synthetic oligonucleotide
  Sense strand starting at position 1088 of SEQ ID NO: 916082
ucuagauauuauucucgac

SEQ ID NO: 1129053 - RNA, 19 nt, Artificial Sequence
  Description of Artificial Sequence: Synthetic oligonucleotide
  Antisense strand to SEQ ID NO: 1129052
gucgagaauaauaucuaga

SEQ ID NO: 1129054 - RNA, 19 nt, Artificial Sequence
  Description of Artificial Sequence: Synthetic oligonucleotide
  Sense strand starting at position 1146 of SEQ ID NO: 916082
guggguuuaguaugugaga

SEQ ID NO: 1129055 - RNA, 19 nt, Artificial Sequence
  Description of Artificial Sequence: Synthetic oligonucleotide
  Antisense strand to SEQ ID NO: 1129054
ucucacauacuaaacccac

SEQ ID NO: 1129056 - RNA, 19 nt, Artificial Sequence
  Description of Artificial Sequence: Synthetic oligonucleotide
  Sense strand starting at position 1147 of SEQ ID NO: 916082
uggguuuaguaugugagaa

SEQ ID NO: 1129057 - RNA, 19 nt, Artificial Sequence
  Description of Artificial Sequence: Synthetic oligonucleotide
  Antisense strand to SEQ ID NO: 1129056
uucucacauacuaaaccca

SEQ ID NO: 1129058 - RNA, 19 nt, Artificial Sequence
  Description of Artificial Sequence: Synthetic oligonucleotide
  Sense strand starting at position 1148 of SEQ ID NO: 916082
ggguuuaguaugugagaau

SEQ ID NO: 1129059 - RNA, 19 nt, Artificial Sequence
  Description of Artificial Sequence: Synthetic oligonucleotide
  Antisense strand to SEQ ID NO: 1129058
auucucacauacuaaaccc

SEQ ID NO: 1129060 - RNA, 19 nt, Artificial Sequence
  Description of Artificial Sequence: Synthetic oligonucleotide
  Sense strand starting at position 1162 of SEQ ID NO: 916082
agaauacugugcccuggua

SEQ ID NO: 1129061 - RNA, 19 nt, Artificial Sequence
  Description of Artificial Sequence: Synthetic oligonucleotide
  Antisense strand to SEQ ID NO: 1129060
uaccagggcacaguauucu

SEQ ID NO: 1129062 - RNA, 19 nt, Artificial Sequence
  Description of Artificial Sequence: Synthetic oligonucleotide
  Sense strand starting at position 1436 of SEQ ID NO: 916082
gaauauaggugauauggaa

SEQ ID NO: 1129063 - RNA, 19 nt, Artificial Sequence
  Description of Artificial Sequence: Synthetic oligonucleotide
  Antisense strand to SEQ ID NO: 1129062
uuccauaucaccuauauuc

SEQ ID NO: 1129064 - RNA, 19 nt, Artificial Sequence
  Description of Artificial Sequence: Synthetic oligonucleotide
  Sense strand starting at position 1462 of SEQ ID NO: 916082
cacaaucugugguuaagca

SEQ ID NO: 1129065 - RNA, 19 nt, Artificial Sequence
  Description of Artificial Sequence: Synthetic oligonucleotide
  Antisense strand to SEQ ID NO: 1129064
ugcuuaaccacagauugug

SEQ ID NO: 1129066 - RNA, 19 nt, Artificial Sequence
  Description of Artificial Sequence: Synthetic oligonucleotide
  Sense strand starting at position 1524 of SEQ ID NO: 916082
uguguauccuugcuauuuc

SEQ ID NO: 1129067 - RNA, 19 nt, Artificial Sequence
  Description of Artificial Sequence: Synthetic oligonucleotide
  Antisense strand to SEQ ID NO: 1129066
gaaauagcaaggauacaca

SEQ ID NO: 1129068 - RNA, 19 nt, Artificial Sequence
  Description of Artificial Sequence: Synthetic oligonucleotide
  Sense strand starting at position 1689 of SEQ ID NO: 916082
aaggcaagugugugaugau

SEQ ID NO: 1129069 - RNA, 19 nt, Artificial Sequence
  Description of Artificial Sequence: Synthetic oligonucleotide
  Antisense strand to SEQ ID NO: 1129068
aucaucacacacuugccuu

SEQ ID NO: 1129070 - RNA, 19 nt, Artificial Sequence
  Description of Artificial Sequence: Synthetic oligonucleotide
  Sense strand starting at position 1731 of SEQ ID NO: 916082
gaaggucuuccugaggguu

SEQ ID NO: 1129071 - RNA, 19 nt, Artificial Sequence
  Description of Artificial Sequence: Synthetic oligonucleotide
  Antisense strand to SEQ ID NO: 1129070
aacccucaggaagaccuuc

SEQ ID NO: 1129072 - RNA, 19 nt, Artificial Sequence
  Description of Artificial Sequence: Synthetic oligonucleotide
  Sense strand starting at position 2555 of SEQ ID NO: 916082
ccgagaacuccuugcacca

SEQ ID NO: 1129073 - RNA, 19 nt, Artificial Sequence
  Description of Artificial Sequence: Synthetic oligonucleotide
  Antisense strand to SEQ ID NO: 1129072
uggugcaaggaguucucgg

SEQ ID NO: 1129074 - RNA, 19 nt, Artificial Sequence
  Description of Artificial Sequence: Synthetic oligonucleotide
  Sense strand starting at position 2644 of SEQ ID NO: 916082
cuguguggucaccaucauu

SEQ ID NO: 1129075 - RNA, 19 nt, Artificial Sequence
  Description of Artificial Sequence: Synthetic oligonucleotide
  Antisense strand to SEQ ID NO: 1129074
aaugauggugaccacacag

SEQ ID NO: 1129076 - RNA, 19 nt, Artificial Sequence
  Description of Artificial Sequence: Synthetic oligonucleotide
  Sense strand starting at position 2647 of SEQ ID NO: 916082
uguggucaccaucauuagu

SEQ ID NO: 1129077 - RNA, 19 nt, Artificial Sequence
  Description of Artificial Sequence: Synthetic oligonucleotide
  Antisense strand to SEQ ID NO: 1129076
acuaaugauggugaccaca

SEQ ID NO: 1129078 - RNA, 19 nt, Artificial Sequence
  Description of Artificial Sequence: Synthetic oligonucleotide
  Sense strand starting at position 2652 of SEQ ID NO: 916082
ucaccaucauuaguggaau

SEQ ID NO: 1129079 - RNA, 19 nt, Artificial Sequence
  Description of Artificial Sequence: Synthetic oligonucleotide
  Antisense strand to SEQ ID NO: 1129078
auuccacuaaugaugguga

SEQ ID NO: 1129080 - RNA, 19 nt, Artificial Sequence
  Description of Artificial Sequence: Synthetic oligonucleotide
  Sense strand starting at position 2931 of SEQ ID NO: 916082
aagugcuuccauggaguaa

SEQ ID NO: 1129081 - RNA, 19 nt, Artificial Sequence
  Description of Artificial Sequence: Synthetic oligonucleotide
  Antisense strand to SEQ ID NO: 1129080
uuacuccauggaagcacuu

SEQ ID NO: 1129082 - RNA, 19 nt, Artificial Sequence
  Description of Artificial Sequence: Synthetic oligonucleotide
  Sense strand starting at position 2932 of SEQ ID NO: 916082
agugcuuccauggaguaag

SEQ ID NO: 1129083 - RNA, 19 nt, Artificial Sequence
  Description of Artificial Sequence: Synthetic oligonucleotide
  Antisense strand to SEQ ID NO: 1129082
cuuacuccauggaagcacu

SEQ ID NO: 1129084 - RNA, 19 nt, Artificial Sequence
  Description of Artificial Sequence: Synthetic oligonucleotide
  Sense strand starting at position 3076 of SEQ ID NO: 916082
ggaucugagucugucugau

SEQ ID NO: 1129085 - RNA, 19 nt, Artificial Sequence
  Description of Artificial Sequence: Synthetic oligonucleotide
  Antisense strand to SEQ ID NO: 1129084
aucagacagacucagaucc

SEQ ID NO: 1129086 - RNA, 19 nt, Artificial Sequence
  Description of Artificial Sequence: Synthetic oligonucleotide
  Sense strand starting at position 3082 of SEQ ID NO: 916082
gagucugucugauuccaaa

SEQ ID NO: 1129087 - RNA, 19 nt, Artificial Sequence
  Description of Artificial Sequence: Synthetic oligonucleotide
  Antisense strand to SEQ ID NO: 1129086
uuuggaaucagacagacuc

SEQ ID NO: 1129088 - RNA, 19 nt, Artificial Sequence
  Description of Artificial Sequence: Synthetic oligonucleotide
  Sense strand starting at position 3328 of SEQ ID NO: 916082
ggaggacuauguccucauc

SEQ ID NO: 1129089 - RNA, 19 nt, Artificial Sequence
  Description of Artificial Sequence: Synthetic oligonucleotide
  Antisense strand to SEQ ID NO: 1129088
gaugaggacauaguccucc

SEQ ID NO: 1129090 - RNA, 19 nt, Artificial Sequence
  Description of Artificial Sequence: Synthetic oligonucleotide
  Sense strand starting at position 3330 of SEQ ID NO: 916082
aggacuauguccucaucgu

SEQ ID NO: 1129091 - RNA, 19 nt, Artificial Sequence
  Description of Artificial Sequence: Synthetic oligonucleotide
  Antisense strand to SEQ ID NO: 1129090
acgaugaggacauaguccu

SEQ ID NO: 1129092 - RNA, 19 nt, Artificial Sequence
  Description of Artificial Sequence: Synthetic oligonucleotide
  Sense strand starting at position 3468 of SEQ ID NO: 916082
cagagagauugagucucuu

SEQ ID NO: 1129093 - RNA, 19 nt, Artificial Sequence
  Description of Artificial Sequence: Synthetic oligonucleotide
  Antisense strand to SEQ ID NO: 1129092
aagagacucaaucucucug

SEQ ID NO: 1129094 - RNA, 19 nt, Artificial Sequence
  Description of Artificial Sequence: Synthetic oligonucleotide
  Sense strand starting at position 3501 of SEQ ID NO: 916082
aggucucuauagucagaag

SEQ ID NO: 1129095 - RNA, 19 nt, Artificial Sequence
  Description of Artificial Sequence: Synthetic oligonucleotide
  Antisense strand to SEQ ID NO: 1129094
cuucugacuauagagaccu

SEQ ID NO: 1129096 - RNA, 19 nt, Artificial Sequence
  Description of Artificial Sequence: Synthetic oligonucleotide
  Sense strand starting at position 3502 of SEQ ID NO: 916082
ggucucuauagucagaagu

SEQ ID NO: 1129097 - RNA, 19 nt, Artificial Sequence
  Description of Artificial Sequence: Synthetic oligonucleotide
  Antisense strand to SEQ ID NO: 1129096
acuucugacuauagagacc

SEQ ID NO: 1129098 - RNA, 19 nt, Artificial Sequence
  Description of Artificial Sequence: Synthetic oligonucleotide
  Sense strand starting at position 3564 of SEQ ID NO: 916082
ugggcuuaucuagggaaca

SEQ ID NO: 1129099 - RNA, 19 nt, Artificial Sequence
  Description of Artificial Sequence: Synthetic oligonucleotide
  Antisense strand to SEQ ID NO: 1129098
uguucccuagauaagccca

SEQ ID NO: 1129100 - RNA, 19 nt, Artificial Sequence
  Description of Artificial Sequence: Synthetic oligonucleotide
  Sense strand starting at position 62 of SEQ ID NO: 916083
uguggucccugaucccaua

SEQ ID NO: 1129101 - RNA, 19 nt, Artificial Sequence
  Description of Artificial Sequence: Synthetic oligonucleotide
  Antisense strand to SEQ ID NO: 1129100
uaugggaucagggaccaca

SEQ ID NO: 1129102 - RNA, 19 nt, Artificial Sequence
  Description of Artificial Sequence: Synthetic oligonucleotide
  Sense strand starting at position 296 of SEQ ID NO: 916083
augccuuaugcagagcaaa

SEQ ID NO: 1129103 - RNA, 19 nt, Artificial Sequence
  Description of Artificial Sequence: Synthetic oligonucleotide
  Antisense strand to SEQ ID NO: 1129102
uuugcucugcauaaggcau

SEQ ID NO: 1129104 - RNA, 19 nt, Artificial Sequence
  Description of Artificial Sequence: Synthetic oligonucleotide
  Sense strand starting at position 349 of SEQ ID NO: 916083
aggcaagaguccucaucuc

SEQ ID NO: 1129105 - RNA, 19 nt, Artificial Sequence
  Description of Artificial Sequence: Synthetic oligonucleotide
  Antisense strand to SEQ ID NO: 1129104
gagaugaggacucuugccu

SEQ ID NO: 1129106 - RNA, 19 nt, Artificial Sequence
  Description of Artificial Sequence: Synthetic oligonucleotide
  Sense strand starting at position 532 of SEQ ID NO: 916083
agcagagaucuuugaaacc

SEQ ID NO: 1129107 - RNA, 19 nt, Artificial Sequence
  Description of Artificial Sequence: Synthetic oligonucleotide
  Antisense strand to SEQ ID NO: 1129106
gguuucaaagaucucugcu

SEQ ID NO: 1129108 - RNA, 19 nt, Artificial Sequence
  Description of Artificial Sequence: Synthetic oligonucleotide
  Sense strand starting at position 568 of SEQ ID NO: 916083
ugagaaccaucccugucaa

SEQ ID NO: 1129109 - RNA, 19 nt, Artificial Sequence
  Description of Artificial Sequence: Synthetic oligonucleotide
  Antisense strand to SEQ ID NO: 1129108
uugacagggaugguucuca

SEQ ID NO: 1129110 - RNA, 19 nt, Artificial Sequence
  Description of Artificial Sequence: Synthetic oligonucleotide
  Sense strand starting at position 658 of SEQ ID NO: 916083
aggugaguaaacugaaagu

SEQ ID NO: 1129111 - RNA, 19 nt, Artificial Sequence
  Description of Artificial Sequence: Synthetic oligonucleotide
  Antisense strand to SEQ ID NO: 1129110
acuuucaguuuacucaccu

SEQ ID NO: 1129112 - RNA, 19 nt, Artificial Sequence
  Description of Artificial Sequence: Synthetic oligonucleotide
  Sense strand starting at position 757 of SEQ ID NO: 916083
augugugaugguuaagggu

SEQ ID NO: 1129113 - RNA, 19 nt, Artificial Sequence
  Description of Artificial Sequence: Synthetic oligonucleotide
  Antisense strand to SEQ ID NO: 1129112
acccuuaaccaucacacau

SEQ ID NO: 1129114 - RNA, 19 nt, Artificial Sequence
  Description of Artificial Sequence: Synthetic oligonucleotide
  Sense strand starting at position 1002 of SEQ ID NO: 916083
guauguucucaguauauua

SEQ ID NO: 1129115 - RNA, 19 nt, Artificial Sequence
  Description of Artificial Sequence: Synthetic oligonucleotide
  Antisense strand to SEQ ID NO: 1129114
uaauauacugagaacauac

SEQ ID NO: 1129116 - RNA, 19 nt, Artificial Sequence
  Description of Artificial Sequence: Synthetic oligonucleotide
  Sense strand starting at position 1010 of SEQ ID NO: 916083
ucaguauauuauccauugu

SEQ ID NO: 1129117 - RNA, 19 nt, Artificial Sequence
  Description of Artificial Sequence: Synthetic oligonucleotide
  Antisense strand to SEQ ID NO: 1129116
acaauggauaauauacuga

SEQ ID NO: 1129118 - RNA, 19 nt, Artificial Sequence
  Description of Artificial Sequence: Synthetic oligonucleotide
  Sense strand starting at position 1042 of SEQ ID NO: 916083
guuguuguugaguauaauu

SEQ ID NO: 1129119 - RNA, 19 nt, Artificial Sequence
  Description of Artificial Sequence: Synthetic oligonucleotide
  Antisense strand to SEQ ID NO: 1129118
aauuauacucaacaacaac

SEQ ID NO: 1129120 - RNA, 19 nt, Artificial Sequence
  Description of Artificial Sequence: Synthetic oligonucleotide
  Sense strand starting at position 1078 of SEQ ID NO: 916083
augacuuggccucacacau

SEQ ID NO: 1129121 - RNA, 19 nt, Artificial Sequence
  Description of Artificial Sequence: Synthetic oligonucleotide
  Antisense strand to SEQ ID NO: 1129120
augugugaggccaagucau

SEQ ID NO: 1129122 - RNA, 19 nt, Artificial Sequence
  Description of Artificial Sequence: Synthetic oligonucleotide
  Sense strand starting at position 1095 of SEQ ID NO: 916083
auaaauguggcaugauugu

SEQ ID NO: 1129123 - RNA, 19 nt, Artificial Sequence
  Description of Artificial Sequence: Synthetic oligonucleotide
  Antisense strand to SEQ ID NO: 1129122
acaaucaugccacauuuau

SEQ ID NO: 1129124 - RNA, 19 nt, Artificial Sequence
  Description of Artificial Sequence: Synthetic oligonucleotide
  Sense strand starting at position 1105 of SEQ ID NO: 916083
caugauuguaagggaguau

SEQ ID NO: 1129125 - RNA, 19 nt, Artificial Sequence
  Description of Artificial Sequence: Synthetic oligonucleotide
  Antisense strand to SEQ ID NO: 1129124
auacucccuuacaaucaug

SEQ ID NO: 1129126 - RNA, 19 nt, Artificial Sequence
  Description of Artificial Sequence: Synthetic oligonucleotide
  Sense strand starting at position 1109 of SEQ ID NO: 916083
auuguaagggaguaugguu

SEQ ID NO: 1129127 - RNA, 19 nt, Artificial Sequence
  Description of Artificial Sequence: Synthetic oligonucleotide
  Antisense strand to SEQ ID NO: 1129126
aaccauacucccuuacaau

SEQ ID NO: 1129128 - RNA, 19 nt, Artificial Sequence
  Description of Artificial Sequence: Synthetic oligonucleotide
  Sense strand starting at position 1257 of SEQ ID NO: 916083
ggugucaggcugggagaua

SEQ ID NO: 1129129 - RNA, 19 nt, Artificial Sequence
  Description of Artificial Sequence: Synthetic oligonucleotide
  Antisense strand to SEQ ID NO: 1129128
uaucucccagccugacacc

SEQ ID NO: 1129130 - RNA, 19 nt, Artificial Sequence
  Description of Artificial Sequence: Synthetic oligonucleotide
  Sense strand starting at position 1371 of SEQ ID NO: 916083
gggaccugucggcauagua

SEQ ID NO: 1129131 - RNA, 19 nt, Artificial Sequence
  Description of Artificial Sequence: Synthetic oligonucleotide
  Antisense strand to SEQ ID NO: 1129130
uacuaugccgacagguccc

SEQ ID NO: 1129132 - RNA, 19 nt, Artificial Sequence
  Description of Artificial Sequence: Synthetic oligonucleotide
  Sense strand starting at position 1540 of SEQ ID NO: 916083
ugugaacugaguugggauu

SEQ ID NO: 1129133 - RNA, 19 nt, Artificial Sequence
  Description of Artificial Sequence: Synthetic oligonucleotide
  Antisense strand to SEQ ID NO: 1129132
aaucccaacucaguucaca

SEQ ID NO: 1129134 - RNA, 19 nt, Artificial Sequence
  Description of Artificial Sequence: Synthetic oligonucleotide
  Sense strand starting at position 1542 of SEQ ID NO: 916083
ugaacugaguugggauuua

SEQ ID NO: 1129135 - RNA, 19 nt, Artificial Sequence
  Description of Artificial Sequence: Synthetic oligonucleotide
  Antisense strand to SEQ ID NO: 1129134
uaaaucccaacucaguuca

SEQ ID NO: 1129136 - RNA, 19 nt, Artificial Sequence
  Description of Artificial Sequence: Synthetic oligonucleotide
  Sense strand starting at position 1559 of SEQ ID NO: 916083
uaaagcugugaugguggaa

SEQ ID NO: 1129137 - RNA, 19 nt, Artificial Sequence
  Description of Artificial Sequence: Synthetic oligonucleotide
  Antisense strand to SEQ ID NO: 1129136
uuccaccaucacagcuuua

SEQ ID NO: 1129138 - RNA, 19 nt, Artificial Sequence
  Description of Artificial Sequence: Synthetic oligonucleotide
  Sense strand starting at position 1562 of SEQ ID NO: 916083
agcugugaugguggaaacu

SEQ ID NO: 1129139 - RNA, 19 nt, Artificial Sequence
  Description of Artificial Sequence: Synthetic oligonucleotide
  Antisense strand to SEQ ID NO: 1129138
aguuuccaccaucacagcu

SEQ ID NO: 1129140 - RNA, 19 nt, Artificial Sequence
  Description of Artificial Sequence: Synthetic oligonucleotide
  Sense strand starting at position 1601 of SEQ ID NO: 916083
gguagaguuucagccagaa

SEQ ID NO: 1129141 - RNA, 19 nt, Artificial Sequence
  Description of Artificial Sequence: Synthetic oligonucleotide
  Antisense strand to SEQ ID NO: 1129140
uucuggcugaaacucuacc

SEQ ID NO: 1129142 - RNA, 19 nt, Artificial Sequence
  Description of Artificial Sequence: Synthetic oligonucleotide
  Sense strand starting at position 1703 of SEQ ID NO: 916083
ggagguaugcgccagguaa

SEQ ID NO: 1129143 - RNA, 19 nt, Artificial Sequence
  Description of Artificial Sequence: Synthetic oligonucleotide
  Antisense strand to SEQ ID NO: 1129142
uuaccuggcgcauaccucc

SEQ ID NO: 1129144 - RNA, 19 nt, Artificial Sequence
  Description of Artificial Sequence: Synthetic oligonucleotide
  Sense strand starting at position 1794 of SEQ ID NO: 916083
cagcccucagacugugaau

SEQ ID NO: 1129145 - RNA, 19 nt, Artificial Sequence
  Description of Artificial Sequence: Synthetic oligonucleotide
  Antisense strand to SEQ ID NO: 1129144
auucacagucugagggcug

SEQ ID NO: 1129146 - RNA, 19 nt, Artificial Sequence
  Description of Artificial Sequence: Synthetic oligonucleotide
  Sense strand starting at position 2118 of SEQ ID NO: 916083
uucguucuacaagaggaau

SEQ ID NO: 1129147 - RNA, 19 nt, Artificial Sequence
  Description of Artificial Sequence: Synthetic oligonucleotide
  Antisense strand to SEQ ID NO: 1129146
auuccucuuguagaacgaa

SEQ ID NO: 1129148 - RNA, 19 nt, Artificial Sequence
  Description of Artificial Sequence: Synthetic oligonucleotide
  Sense strand starting at position 2204 of SEQ ID NO: 916083
cuuguaaaccugugaaauu

SEQ ID NO: 1129149 - RNA, 19 nt, Artificial Sequence
  Description of Artificial Sequence: Synthetic oligonucleotide
  Antisense strand to SEQ ID NO: 1129148
aauuucacagguuuacaag

SEQ ID NO: 1129150 - RNA, 19 nt, Artificial Sequence
  Description of Artificial Sequence: Synthetic oligonucleotide
  Sense strand starting at position 2205 of SEQ ID NO: 916083
uuguaaaccugugaaauuu

SEQ ID NO: 1129151 - RNA, 19 nt, Artificial Sequence
  Description of Artificial Sequence: Synthetic oligonucleotide
  Antisense strand to SEQ ID NO: 1129150
aaauuucacagguuuacaa

SEQ ID NO: 1129152 - RNA, 19 nt, Artificial Sequence
  Description of Artificial Sequence: Synthetic oligonucleotide
  Sense strand starting at position 2254 of SEQ ID NO: 916083
gguauugugguggauguuu

SEQ ID NO: 1129153 - RNA, 19 nt, Artificial Sequence
  Description of Artificial Sequence: Synthetic oligonucleotide
  Antisense strand to SEQ ID NO: 1129152
aaacauccaccacaauacc

SEQ ID NO: 1129154 - RNA, 19 nt, Artificial Sequence
  Description of Artificial Sequence: Synthetic oligonucleotide
  Sense strand starting at position 2318 of SEQ ID NO: 916083
gccagcugcagggaauauu

SEQ ID NO: 1129155 - RNA, 19 nt, Artificial Sequence
  Description of Artificial Sequence: Synthetic oligonucleotide
  Antisense strand to SEQ ID NO: 1129154
aauauucccugcagcuggc

SEQ ID NO: 1129156 - RNA, 19 nt, Artificial Sequence
  Description of Artificial Sequence: Synthetic oligonucleotide
  Sense strand starting at position 2508 of SEQ ID NO: 916083
ucccauucuccugagagca

SEQ ID NO: 1129157 - RNA, 19 nt, Artificial Sequence
  Description of Artificial Sequence: Synthetic oligonucleotide
  Antisense strand to SEQ ID NO: 1129156
ugcucucaggagaauggga

SEQ ID NO: 1129158 - RNA, 19 nt, Artificial Sequence
  Description of Artificial Sequence: Synthetic oligonucleotide
  Sense strand starting at position 3013 of SEQ ID NO: 916083
ggguucuuagaauguacuu

SEQ ID NO: 1129159 - RNA, 19 nt, Artificial Sequence
  Description of Artificial Sequence: Synthetic oligonucleotide
  Antisense strand to SEQ ID NO: 1129158
aaguacauucuaagaaccc

SEQ ID NO: 1129160 - RNA, 19 nt, Artificial Sequence
  Description of Artificial Sequence: Synthetic oligonucleotide
  Sense strand starting at position 3018 of SEQ ID NO: 916083
cuuagaauguacuuugacu

SEQ ID NO: 1129161 - RNA, 19 nt, Artificial Sequence
  Description of Artificial Sequence: Synthetic oligonucleotide
  Antisense strand to SEQ ID NO: 1129160
agucaaaguacauucuaag

SEQ ID NO: 1129162 - RNA, 19 nt, Artificial Sequence
  Description of Artificial Sequence: Synthetic oligonucleotide
  Sense strand starting at position 3291 of SEQ ID NO: 916083
ggugcuguccuccaaguaa

SEQ ID NO: 1129163 - RNA, 19 nt, Artificial Sequence
  Description of Artificial Sequence: Synthetic oligonucleotide
  Antisense strand to SEQ ID NO: 1129162
uuacuuggaggacagcacc

SEQ ID NO: 1129164 - RNA, 19 nt, Artificial Sequence
  Description of Artificial Sequence: Synthetic oligonucleotide
  Sense strand starting at position 3303 of SEQ ID NO: 916083
caaguaaugggugaguugu

SEQ ID NO: 1129165 - RNA, 19 nt, Artificial Sequence
  Description of Artificial Sequence: Synthetic oligonucleotide
  Antisense strand to SEQ ID NO: 1129164
acaacucacccauuacuug

SEQ ID NO: 1129166 - RNA, 19 nt, Artificial Sequence
  Description of Artificial Sequence: Synthetic oligonucleotide
  Sense strand starting at position 3309 of SEQ ID NO: 916083
augggugaguugucuauua

SEQ ID NO: 1129167 - RNA, 19 nt, Artificial Sequence
  Description of Artificial Sequence: Synthetic oligonucleotide
  Antisense strand to SEQ ID NO: 1129166
uaauagacaacucacccau

SEQ ID NO: 1129168 - RNA, 19 nt, Artificial Sequence
  Description of Artificial Sequence: Synthetic oligonucleotide
  Sense strand starting at position 3311 of SEQ ID NO: 916083
gggugaguugucuauuagu

SEQ ID NO: 1129169 - RNA, 19 nt, Artificial Sequence
  Description of Artificial Sequence: Synthetic oligonucleotide
  Antisense strand to SEQ ID NO: 1129168
acuaauagacaacucaccc

SEQ ID NO: 1129170 - RNA, 19 nt, Artificial Sequence
  Description of Artificial Sequence: Synthetic oligonucleotide
  Sense strand starting at position 3413 of SEQ ID NO: 916083
uggguaaucagguauaugu

SEQ ID NO: 1129171 - RNA, 19 nt, Artificial Sequence
  Description of Artificial Sequence: Synthetic oligonucleotide
  Antisense strand to SEQ ID NO: 1129170
acauauaccugauuaccca

SEQ ID NO: 1129172 - RNA, 19 nt, Artificial Sequence
  Description of Artificial Sequence: Synthetic oligonucleotide
  Sense strand starting at position 3415 of SEQ ID NO: 916083
gguaaucagguauauguua

SEQ ID NO: 1129173 - RNA, 19 nt, Artificial Sequence
  Description of Artificial Sequence: Synthetic oligonucleotide
  Antisense strand to SEQ ID NO: 1129172
uaacauauaccugauuacc

SEQ ID NO: 1129174 - RNA, 19 nt, Artificial Sequence
  Description of Artificial Sequence: Synthetic oligonucleotide
  Sense strand starting at position 3726 of SEQ ID NO: 916083
cugaguuuccaccaucaca

SEQ ID NO: 1129175 - RNA, 19 nt, Artificial Sequence
  Description of Artificial Sequence: Synthetic oligonucleotide
  Antisense strand to SEQ ID NO: 1129174
ugugaugguggaaacucag

SEQ ID NO: 1129176 - RNA, 19 nt, Artificial Sequence
  Description of Artificial Sequence: Synthetic oligonucleotide
  Sense strand starting at position 3914 of SEQ ID NO: 916083
aguugauacuaugccaaca

SEQ ID NO: 1129177 - RNA, 19 nt, Artificial Sequence
  Description of Artificial Sequence: Synthetic oligonucleotide
  Antisense strand to SEQ ID NO: 1129176
uguuggcauaguaucaacu

SEQ ID NO: 1129178 - RNA, 19 nt, Artificial Sequence
  Description of Artificial Sequence: Synthetic oligonucleotide
  Sense strand starting at position 3955 of SEQ ID NO: 916083
cucuguuaguucccacaag

SEQ ID NO: 1129179 - RNA, 19 nt, Artificial Sequence
  Description of Artificial Sequence: Synthetic oligonucleotide
  Antisense strand to SEQ ID NO: 1129178
cuugugggaacuaacagag

SEQ ID NO: 1129180 - RNA, 19 nt, Artificial Sequence
  Description of Artificial Sequence: Synthetic oligonucleotide
  Sense strand starting at position 420 of SEQ ID NO: 916084
caaggauucgaaggaaguu

SEQ ID NO: 1129181 - RNA, 19 nt, Artificial Sequence
  Description of Artificial Sequence: Synthetic oligonucleotide
  Antisense strand to SEQ ID NO: 1129180
aacuuccuucgaauccuug

SEQ ID NO: 1129182 - RNA, 19 nt, Artificial Sequence
  Description of Artificial Sequence: Synthetic oligonucleotide
  Sense strand starting at position 432 of SEQ ID NO: 916084
ggaaguugauguuuagguu

SEQ ID NO: 1129183 - RNA, 19 nt, Artificial Sequence
  Description of Artificial Sequence: Synthetic oligonucleotide
  Antisense strand to SEQ ID NO: 1129182
aaccuaaacaucaacuucc

SEQ ID NO: 1129184 - RNA, 19 nt, Artificial Sequence
  Description of Artificial Sequence: Synthetic oligonucleotide
  Sense strand starting at position 491 of SEQ ID NO: 916084
guaguaauaccguaccuac

SEQ ID NO: 1129185 - RNA, 19 nt, Artificial Sequence
  Description of Artificial Sequence: Synthetic oligonucleotide
  Antisense strand to SEQ ID NO: 1129184
guagguacgguauuacuac

SEQ ID NO: 1129186 - RNA, 19 nt, Artificial Sequence
  Description of Artificial Sequence: Synthetic oligonucleotide
  Sense strand starting at position 2319 of SEQ ID NO: 916084
cggucgugucgugugaacu

SEQ ID NO: 1129187 - RNA, 19 nt, Artificial Sequence
  Description of Artificial Sequence: Synthetic oligonucleotide
  Antisense strand to SEQ ID NO: 1129186
aguucacacgacacgaccg

SEQ ID NO: 1129188 - RNA, 19 nt, Artificial Sequence
  Description of Artificial Sequence: Synthetic oligonucleotide
  Sense strand starting at position 2331 of SEQ ID NO: 916084
gugaacuugcucuagccaa

SEQ ID NO: 1129189 - RNA, 19 nt, Artificial Sequence
  Description of Artificial Sequence: Synthetic oligonucleotide
  Antisense strand to SEQ ID NO: 1129188
uuggcuagagcaaguucac

SEQ ID NO: 1129190 - RNA, 19 nt, Artificial Sequence
  Description of Artificial Sequence: Synthetic oligonucleotide
  Sense strand starting at position 2346 of SEQ ID NO: 916084
ccaaauuagguuuauagca

SEQ ID NO: 1129191 - RNA, 19 nt, Artificial Sequence
  Description of Artificial Sequence: Synthetic oligonucleotide
  Antisense strand to SEQ ID NO: 1129190
ugcuauaaaccuaauuugg

SEQ ID NO: 1129192 - RNA, 19 nt, Artificial Sequence
  Description of Artificial Sequence: Synthetic oligonucleotide
  Sense strand starting at position 2477 of SEQ ID NO: 916084
aguaucugcuuuccagaaa

SEQ ID NO: 1129193 - RNA, 19 nt, Artificial Sequence
  Description of Artificial Sequence: Synthetic oligonucleotide
  Antisense strand to SEQ ID NO: 1129192
uuucuggaaagcagauacu

SEQ ID NO: 1129194 - RNA, 19 nt, Artificial Sequence
  Description of Artificial Sequence: Synthetic oligonucleotide
  Sense strand starting at position 2545 of SEQ ID NO: 916084
cgccuuuauuuccuuguau

SEQ ID NO: 1129195 - RNA, 19 nt, Artificial Sequence
  Description of Artificial Sequence: Synthetic oligonucleotide
  Antisense strand to SEQ ID NO: 1129194
auacaaggaaauaaaggcg

SEQ ID NO: 1129196 - RNA, 19 nt, Artificial Sequence
  Description of Artificial Sequence: Synthetic oligonucleotide
  Sense strand starting at position 2546 of SEQ ID NO: 916084
gccuuuauuuccuuguaua

SEQ ID NO: 1129197 - RNA, 19 nt, Artificial Sequence
  Description of Artificial Sequence: Synthetic oligonucleotide
  Antisense strand to SEQ ID NO: 1129196
uauacaaggaaauaaaggc

SEQ ID NO: 1129198 - RNA, 19 nt, Artificial Sequence
  Description of Artificial Sequence: Synthetic oligonucleotide
  Sense strand starting at position 2554 of SEQ ID NO: 916084
uuccuuguauaucuguaaa

SEQ ID NO: 1129199 - RNA, 19 nt, Artificial Sequence
  Description of Artificial Sequence: Synthetic oligonucleotide
  Antisense strand to SEQ ID NO: 1129198
uuuacagauauacaaggaa

SEQ ID NO: 1129200 - RNA, 19 nt, Artificial Sequence
  Description of Artificial Sequence: Synthetic oligonucleotide
  Sense strand starting at position 2556 of SEQ ID NO: 916084
ccuuguauaucuguaaacu

SEQ ID NO: 1129201 - RNA, 19 nt, Artificial Sequence
  Description of Artificial Sequence: Synthetic oligonucleotide
  Antisense strand to SEQ ID NO: 1129200
aguuuacagauauacaagg

SEQ ID NO: 1129202 - RNA, 19 nt, Artificial Sequence
  Description of Artificial Sequence: Synthetic oligonucleotide
  Sense strand starting at position 2557 of SEQ ID NO: 916084
cuuguauaucuguaaacuc

SEQ ID NO: 1129203 - RNA, 19 nt, Artificial Sequence
  Description of Artificial Sequence: Synthetic oligonucleotide
  Antisense strand to SEQ ID NO: 1129202
gaguuuacagauauacaag

SEQ ID NO: 1129204 - RNA, 19 nt, Artificial Sequence
  Description of Artificial Sequence: Synthetic oligonucleotide
  Sense strand starting at position 2679 of SEQ ID NO: 916084
uugaguaaaguacaguuaa

SEQ ID NO: 1129205 - RNA, 19 nt, Artificial Sequence
  Description of Artificial Sequence: Synthetic oligonucleotide
  Antisense strand to SEQ ID NO: 1129204
uuaacuguacuuuacucaa

SEQ ID NO: 1129206 - RNA, 19 nt, Artificial Sequence
  Description of Artificial Sequence: Synthetic oligonucleotide
  Sense strand starting at position 2789 of SEQ ID NO: 916084
uuuaucauugaaggucaaa

SEQ ID NO: 1129207 - RNA, 19 nt, Artificial Sequence
  Description of Artificial Sequence: Synthetic oligonucleotide
  Antisense strand to SEQ ID NO: 1129206
uuugaccuucaaugauaaa

SEQ ID NO: 1129208 - RNA, 19 nt, Artificial Sequence
  Description of Artificial Sequence: Synthetic oligonucleotide
  Sense strand starting at position 2881 of SEQ ID NO: 916084
uuugacauaucagcagaca

SEQ ID NO: 1129209 - RNA, 19 nt, Artificial Sequence
  Description of Artificial Sequence: Synthetic oligonucleotide
  Antisense strand to SEQ ID NO: 1129208
ugucugcugauaugucaaa

SEQ ID NO: 1129210 - RNA, 19 nt, Artificial Sequence
  Description of Artificial Sequence: Synthetic oligonucleotide
  Sense strand starting at position 2892 of SEQ ID NO: 916084
agcagacauugugugaauu

SEQ ID NO: 1129211 - RNA, 19 nt, Artificial Sequence
  Description of Artificial Sequence: Synthetic oligonucleotide
  Antisense strand to SEQ ID NO: 1129210
aauucacacaaugucugcu

SEQ ID NO: 1129212 - RNA, 19 nt, Artificial Sequence
  Description of Artificial Sequence: Synthetic oligonucleotide
  Sense strand starting at position 2927 of SEQ ID NO: 916084
gguacugguguagguagaa

SEQ ID NO: 1129213 - RNA, 19 nt, Artificial Sequence
  Description of Artificial Sequence: Synthetic oligonucleotide
  Antisense strand to SEQ ID NO: 1129212
uucuaccuacaccaguacc

SEQ ID NO: 1129214 - RNA, 19 nt, Artificial Sequence
  Description of Artificial Sequence: Synthetic oligonucleotide
  Sense strand starting at position 3166 of SEQ ID NO: 916084
augacuuccagagggugua

SEQ ID NO: 1129215 - RNA, 19 nt, Artificial Sequence
  Description of Artificial Sequence: Synthetic oligonucleotide
  Antisense strand to SEQ ID NO: 1129214
uacacccucuggaagucau

SEQ ID NO: 1129216 - RNA, 19 nt, Artificial Sequence
  Description of Artificial Sequence: Synthetic oligonucleotide
  Sense strand starting at position 3182 of SEQ ID NO: 916084
guaagucugauaugagagu

SEQ ID NO: 1129217 - RNA, 19 nt, Artificial Sequence
  Description of Artificial Sequence: Synthetic oligonucleotide
  Antisense strand to SEQ ID NO: 1129216
acucucauaucagacuuac

SEQ ID NO: 1129218 - RNA, 19 nt, Artificial Sequence
  Description of Artificial Sequence: Synthetic oligonucleotide
  Sense strand starting at position 3251 of SEQ ID NO: 916084
auaauaaauguguggguua

SEQ ID NO: 1129219 - RNA, 19 nt, Artificial Sequence
  Description of Artificial Sequence: Synthetic oligonucleotide
  Antisense strand to SEQ ID NO: 1129218
uaacccacacauuuauuau

SEQ ID NO: 1129220 - RNA, 19 nt, Artificial Sequence
  Description of Artificial Sequence: Synthetic oligonucleotide
  Sense strand starting at position 3254 of SEQ ID NO: 916084
auaaauguguggguuagga

SEQ ID NO: 1129221 - RNA, 19 nt, Artificial Sequence
  Description of Artificial Sequence: Synthetic oligonucleotide
  Antisense strand to SEQ ID NO: 1129220
uccuaacccacacauuuau

SEQ ID NO: 1129222 - RNA, 19 nt, Artificial Sequence
  Description of Artificial Sequence: Synthetic oligonucleotide
  Sense strand starting at position 3256 of SEQ ID NO: 916084
aaauguguggguuaggagu

SEQ ID NO: 1129223 - RNA, 19 nt, Artificial Sequence
  Description of Artificial Sequence: Synthetic oligonucleotide
  Antisense strand to SEQ ID NO: 1129222
acuccuaacccacacauuu

SEQ ID NO: 1129224 - RNA, 19 nt, Artificial Sequence
  Description of Artificial Sequence: Synthetic oligonucleotide
  Sense strand starting at position 3346 of SEQ ID NO: 916084
cuauuuguuuaggaugaau

SEQ ID NO: 1129225 - RNA, 19 nt, Artificial Sequence
  Description of Artificial Sequence: Synthetic oligonucleotide
  Antisense strand to SEQ ID NO: 1129224
auucauccuaaacaaauag

SEQ ID NO: 1129226 - RNA, 19 nt, Artificial Sequence
  Description of Artificial Sequence: Synthetic oligonucleotide
  Sense strand starting at position 3384 of SEQ ID NO: 916084
agaacaagccuuuaauugu

SEQ ID NO: 1129227 - RNA, 19 nt, Artificial Sequence
  Description of Artificial Sequence: Synthetic oligonucleotide
  Antisense strand to SEQ ID NO: 1129226
acaauuaaaggcuuguucu

SEQ ID NO: 1129228 - RNA, 19 nt, Artificial Sequence
  Description of Artificial Sequence: Synthetic oligonucleotide
  Sense strand starting at position 3401 of SEQ ID NO: 916084
guccuauuauuugugccaa

SEQ ID NO: 1129229 - RNA, 19 nt, Artificial Sequence
  Description of Artificial Sequence: Synthetic oligonucleotide
  Antisense strand to SEQ ID NO: 1129228
uuggcacaaauaauaggac

SEQ ID NO: 1129230 - RNA, 19 nt, Artificial Sequence
  Description of Artificial Sequence: Synthetic oligonucleotide
  Sense strand starting at position 3537 of SEQ ID NO: 916084
uuaccaauagaugguauau

SEQ ID NO: 1129231 - RNA, 19 nt, Artificial Sequence
  Description of Artificial Sequence: Synthetic oligonucleotide
  Antisense strand to SEQ ID NO: 1129230
auauaccaucuauugguaa

SEQ ID NO: 1129232 - RNA, 19 nt, Artificial Sequence
  Description of Artificial Sequence: Synthetic oligonucleotide
  Sense strand starting at position 3539 of SEQ ID NO: 916084
accaauagaugguauauuu

SEQ ID NO: 1129233 - RNA, 19 nt, Artificial Sequence
  Description of Artificial Sequence: Synthetic oligonucleotide
  Antisense strand to SEQ ID NO: 1129232
aaauauaccaucuauuggu

SEQ ID NO: 1129234 - RNA, 19 nt, Artificial Sequence
  Description of Artificial Sequence: Synthetic oligonucleotide
  Sense strand starting at position 3596 of SEQ ID NO: 916084
ugguaauguugauuaaguu

SEQ ID NO: 1129235 - RNA, 19 nt, Artificial Sequence
  Description of Artificial Sequence: Synthetic oligonucleotide
  Antisense strand to SEQ ID NO: 1129234
aacuuaaucaacauuacca

SEQ ID NO: 1129236 - RNA, 19 nt, Artificial Sequence
  Description of Artificial Sequence: Synthetic oligonucleotide
  Sense strand starting at position 3597 of SEQ ID NO: 916084
gguaauguugauuaaguuu

SEQ ID NO: 1129237 - RNA, 19 nt, Artificial Sequence
  Description of Artificial Sequence: Synthetic oligonucleotide
  Antisense strand to SEQ ID NO: 1129236
aaacuuaaucaacauuacc

SEQ ID NO: 1129238 - RNA, 19 nt, Artificial Sequence
  Description of Artificial Sequence: Synthetic oligonucleotide
  Sense strand starting at position 3605 of SEQ ID NO: 916084
ugauuaaguuugcccauuu

SEQ ID NO: 1129239 - RNA, 19 nt, Artificial Sequence
  Description of Artificial Sequence: Synthetic oligonucleotide
  Antisense strand to SEQ ID NO: 1129238
aaaugggcaaacuuaauca

SEQ ID NO: 1129240 - RNA, 19 nt, Artificial Sequence
  Description of Artificial Sequence: Synthetic oligonucleotide
  Sense strand starting at position 3729 of SEQ ID NO: 916084
auguuaaauucucuguaca

SEQ ID NO: 1129241 - RNA, 19 nt, Artificial Sequence
  Description of Artificial Sequence: Synthetic oligonucleotide
  Antisense strand to SEQ ID NO: 1129240
uguacagagaauuuaacau

SEQ ID NO: 1129242 - RNA, 19 nt, Artificial Sequence
  Description of Artificial Sequence: Synthetic oligonucleotide
  Sense strand starting at position 3731 of SEQ ID NO: 916084
guuaaauucucuguacacu

SEQ ID NO: 1129243 - RNA, 19 nt, Artificial Sequence
  Description of Artificial Sequence: Synthetic oligonucleotide
  Antisense strand to SEQ ID NO: 1129242
aguguacagagaauuuaac

SEQ ID NO: 1129244 - RNA, 19 nt, Artificial Sequence
  Description of Artificial Sequence: Synthetic oligonucleotide
  Sense strand starting at position 3798 of SEQ ID NO: 916084
gaagaaugaguuuguguau

SEQ ID NO: 1129245 - RNA, 19 nt, Artificial Sequence
  Description of Artificial Sequence: Synthetic oligonucleotide
  Antisense strand to SEQ ID NO: 1129244
auacacaaacucauucuuc

SEQ ID NO: 1129246 - RNA, 19 nt, Artificial Sequence
  Description of Artificial Sequence: Synthetic oligonucleotide
  Sense strand starting at position 3799 of SEQ ID NO: 916084
aagaaugaguuuguguaua

SEQ ID NO: 1129247 - RNA, 19 nt, Artificial Sequence
  Description of Artificial Sequence: Synthetic oligonucleotide
  Antisense strand to SEQ ID NO: 1129246
uauacacaaacucauucuu

SEQ ID NO: 1129248 - RNA, 19 nt, Artificial Sequence
  Description of Artificial Sequence: Synthetic oligonucleotide
  Sense strand starting at position 3801 of SEQ ID NO: 916084
gaaugaguuuguguauaac

SEQ ID NO: 1129249 - RNA, 19 nt, Artificial Sequence
  Description of Artificial Sequence: Synthetic oligonucleotide
  Antisense strand to SEQ ID NO: 1129248
guuauacacaaacucauuc

SEQ ID NO: 1129250 - RNA, 19 nt, Artificial Sequence
  Description of Artificial Sequence: Synthetic oligonucleotide
  Sense strand starting at position 3804 of SEQ ID NO: 916084
ugaguuuguguauaacuug

SEQ ID NO: 1129251 - RNA, 19 nt, Artificial Sequence
  Description of Artificial Sequence: Synthetic oligonucleotide
  Antisense strand to SEQ ID NO: 1129250
caaguuauacacaaacuca

SEQ ID NO: 1129252 - RNA, 19 nt, Artificial Sequence
  Description of Artificial Sequence: Synthetic oligonucleotide
  Sense strand starting at position 3876 of SEQ ID NO: 916084
ugccauggcaagggauaaa

SEQ ID NO: 1129253 - RNA, 19 nt, Artificial Sequence
  Description of Artificial Sequence: Synthetic oligonucleotide
  Antisense strand to SEQ ID NO: 1129252
uuuaucccuugccauggca

SEQ ID NO: 1129254 - RNA, 19 nt, Artificial Sequence
  Description of Artificial Sequence: Synthetic oligonucleotide
  Sense strand starting at position 3896 of SEQ ID NO: 916084
aggacaggcuucucuaaug

SEQ ID NO: 1129255 - RNA, 19 nt, Artificial Sequence
  Description of Artificial Sequence: Synthetic oligonucleotide
  Antisense strand to SEQ ID NO: 1129254
cauuagagaagccuguccu

SEQ ID NO: 1129256 - RNA, 19 nt, Artificial Sequence
  Description of Artificial Sequence: Synthetic oligonucleotide
  Sense strand starting at position 3906 of SEQ ID NO: 916084
ucucuaaugugucugaaac

SEQ ID NO: 1129257 - RNA, 19 nt, Artificial Sequence
  Description of Artificial Sequence: Synthetic oligonucleotide
  Antisense strand to SEQ ID NO: 1129256
guuucagacacauuagaga

SEQ ID NO: 1129258 - RNA, 19 nt, Artificial Sequence
  Description of Artificial Sequence: Synthetic oligonucleotide
  Sense strand starting at position 3907 of SEQ ID NO: 916084
cucuaaugugucugaaaca

SEQ ID NO: 1129259 - RNA, 19 nt, Artificial Sequence
  Description of Artificial Sequence: Synthetic oligonucleotide
  Antisense strand to SEQ ID NO: 1129258
uguuucagacacauuagag

SEQ ID NO: 1129260 - RNA, 19 nt, Artificial Sequence
  Description of Artificial Sequence: Synthetic oligonucleotide
  Sense strand starting at position 121 of SEQ ID NO: 916085
aauuguauaggcuguauuu

SEQ ID NO: 1129261 - RNA, 19 nt, Artificial Sequence
  Description of Artificial Sequence: Synthetic oligonucleotide
  Antisense strand to SEQ ID NO: 1129260
aaauacagccuauacaauu

SEQ ID NO: 1129262 - RNA, 19 nt, Artificial Sequence
  Description of Artificial Sequence: Synthetic oligonucleotide
  Sense strand starting at position 133 of SEQ ID NO: 916085
uguauuuguugcuugguua

SEQ ID NO: 1129263 - RNA, 19 nt, Artificial Sequence
  Description of Artificial Sequence: Synthetic oligonucleotide
  Antisense strand to SEQ ID NO: 1129262
uaaccaagcaacaaauaca

SEQ ID NO: 1129264 - RNA, 19 nt, Artificial Sequence
  Description of Artificial Sequence: Synthetic oligonucleotide
  Sense strand starting at position 134 of SEQ ID NO: 916085
guauuuguugcuugguuaa

SEQ ID NO: 1129265 - RNA, 19 nt, Artificial Sequence
  Description of Artificial Sequence: Synthetic oligonucleotide
  Antisense strand to SEQ ID NO: 1129264
uuaaccaagcaacaaauac

SEQ ID NO: 1129266 - RNA, 19 nt, Artificial Sequence
  Description of Artificial Sequence: Synthetic oligonucleotide
  Sense strand starting at position 185 of SEQ ID NO: 916085
gguuacagauaucucuaca

SEQ ID NO: 1129267 - RNA, 19 nt, Artificial Sequence
  Description of Artificial Sequence: Synthetic oligonucleotide
  Antisense strand to SEQ ID NO: 1129266
uguagagauaucuguaacc

SEQ ID NO: 1129268 - RNA, 19 nt, Artificial Sequence
  Description of Artificial Sequence: Synthetic oligonucleotide
  Sense strand starting at position 390 of SEQ ID NO: 916085
caguaaggaucuuacaaag

SEQ ID NO: 1129269 - RNA, 19 nt, Artificial Sequence
  Description of Artificial Sequence: Synthetic oligonucleotide
  Antisense strand to SEQ ID NO: 1129268
cuuuguaagauccuuacug

SEQ ID NO: 1129270 - RNA, 19 nt, Artificial Sequence
  Description of Artificial Sequence: Synthetic oligonucleotide
  Sense strand starting at position 423 of SEQ ID NO: 916085
aguagaguggaacauguuu

SEQ ID NO: 1129271 - RNA, 19 nt, Artificial Sequence
  Description of Artificial Sequence: Synthetic oligonucleotide
  Antisense strand to SEQ ID NO: 1129270
aaacauguuccacucuacu

SEQ ID NO: 1129272 - RNA, 19 nt, Artificial Sequence
  Description of Artificial Sequence: Synthetic oligonucleotide
  Sense strand starting at position 532 of SEQ ID NO: 916085
auuaucuugguccauuaua

SEQ ID NO: 1129273 - RNA, 19 nt, Artificial Sequence
  Description of Artificial Sequence: Synthetic oligonucleotide
  Antisense strand to SEQ ID NO: 1129272
uauaauggaccaagauaau

SEQ ID NO: 1129274 - RNA, 19 nt, Artificial Sequence
  Description of Artificial Sequence: Synthetic oligonucleotide
  Sense strand starting at position 661 of SEQ ID NO: 916085
uucauugacguuuggaaag

SEQ ID NO: 1129275 - RNA, 19 nt, Artificial Sequence
  Description of Artificial Sequence: Synthetic oligonucleotide
  Antisense strand to SEQ ID NO: 1129274
cuuuccaaacgucaaugaa

SEQ ID NO: 1129276 - RNA, 19 nt, Artificial Sequence
  Description of Artificial Sequence: Synthetic oligonucleotide
  Sense strand starting at position 1070 of SEQ ID NO: 916085
cagucuuccggauguugaa

SEQ ID NO: 1129277 - RNA, 19 nt, Artificial Sequence
  Description of Artificial Sequence: Synthetic oligonucleotide
  Antisense strand to SEQ ID NO: 1129276
uucaacauccggaagacug

SEQ ID NO: 1129278 - RNA, 19 nt, Artificial Sequence
  Description of Artificial Sequence: Synthetic oligonucleotide
  Sense strand starting at position 1101 of SEQ ID NO: 916085
cuccaaggauucgaaggaa

SEQ ID NO: 1129279 - RNA, 19 nt, Artificial Sequence
  Description of Artificial Sequence: Synthetic oligonucleotide
  Antisense strand to SEQ ID NO: 1129278
uuccuucgaauccuuggag

SEQ ID NO: 1129280 - RNA, 19 nt, Artificial Sequence
  Description of Artificial Sequence: Synthetic oligonucleotide
  Sense strand starting at position 1104 of SEQ ID NO: 916085
caaggauucgaaggaaguu

SEQ ID NO: 1129281 - RNA, 19 nt, Artificial Sequence
  Description of Artificial Sequence: Synthetic oligonucleotide
  Antisense strand to SEQ ID NO: 1129280
aacuuccuucgaauccuug

SEQ ID NO: 1129282 - RNA, 19 nt, Artificial Sequence
  Description of Artificial Sequence: Synthetic oligonucleotide
  Sense strand starting at position 1116 of SEQ ID NO: 916085
ggaaguugauguuuagguu

SEQ ID NO: 1129283 - RNA, 19 nt, Artificial Sequence
  Description of Artificial Sequence: Synthetic oligonucleotide
  Antisense strand to SEQ ID NO: 1129282
aaccuaaacaucaacuucc

SEQ ID NO: 1129284 - RNA, 19 nt, Artificial Sequence
  Description of Artificial Sequence: Synthetic oligonucleotide
  Sense strand starting at position 1175 of SEQ ID NO: 916085
guaguaauaccguaccuac

SEQ ID NO: 1129285 - RNA, 19 nt, Artificial Sequence
  Description of Artificial Sequence: Synthetic oligonucleotide
  Antisense strand to SEQ ID NO: 1129284
guagguacgguauuacuac

SEQ ID NO: 1129286 - RNA, 19 nt, Artificial Sequence
  Description of Artificial Sequence: Synthetic oligonucleotide
  Sense strand starting at position 2875 of SEQ ID NO: 916085
ccgucaccuccugaguagu

SEQ ID NO: 1129287 - RNA, 19 nt, Artificial Sequence
  Description of Artificial Sequence: Synthetic oligonucleotide
  Antisense strand to SEQ ID NO: 1129286
acuacucaggaggugacgg

SEQ ID NO: 1129288 - RNA, 19 nt, Artificial Sequence
  Description of Artificial Sequence: Synthetic oligonucleotide
  Sense strand starting at position 2877 of SEQ ID NO: 916085
gucaccuccugaguaguga

SEQ ID NO: 1129289 - RNA, 19 nt, Artificial Sequence
  Description of Artificial Sequence: Synthetic oligonucleotide
  Antisense strand to SEQ ID NO: 1129288
ucacuacucaggaggugac

SEQ ID NO: 1129290 - RNA, 19 nt, Artificial Sequence
  Description of Artificial Sequence: Synthetic oligonucleotide
  Sense strand starting at position 2917 of SEQ ID NO: 916085
ugguguguuuacucaccau

SEQ ID NO: 1129291 - RNA, 19 nt, Artificial Sequence
  Description of Artificial Sequence: Synthetic oligonucleotide
  Antisense strand to SEQ ID NO: 1129290
auggugaguaaacacacca

SEQ ID NO: 1129292 - RNA, 19 nt, Artificial Sequence
  Description of Artificial Sequence: Synthetic oligonucleotide
  Sense strand starting at position 3003 of SEQ ID NO: 916085
cggucgugucgugugaacu

SEQ ID NO: 1129293 - RNA, 19 nt, Artificial Sequence
  Description of Artificial Sequence: Synthetic oligonucleotide
  Antisense strand to SEQ ID NO: 1129292
aguucacacgacacgaccg

SEQ ID NO: 1129294 - RNA, 19 nt, Artificial Sequence
  Description of Artificial Sequence: Synthetic oligonucleotide
  Sense strand starting at position 3015 of SEQ ID NO: 916085
gugaacuugcucuagccaa

SEQ ID NO: 1129295 - RNA, 19 nt, Artificial Sequence
  Description of Artificial Sequence: Synthetic oligonucleotide
  Antisense strand to SEQ ID NO: 1129294
uuggcuagagcaaguucac

SEQ ID NO: 1129296 - RNA, 19 nt, Artificial Sequence
  Description of Artificial Sequence: Synthetic oligonucleotide
  Sense strand starting at position 3030 of SEQ ID NO: 916085
ccaaauuagguuuauagca

SEQ ID NO: 1129297 - RNA, 19 nt, Artificial Sequence
  Description of Artificial Sequence: Synthetic oligonucleotide
  Antisense strand to SEQ ID NO: 1129296
ugcuauaaaccuaauuugg

SEQ ID NO: 1129298 - RNA, 19 nt, Artificial Sequence
  Description of Artificial Sequence: Synthetic oligonucleotide
  Sense strand starting at position 3158 of SEQ ID NO: 916085
ugaaguaucugcuuuccag

SEQ ID NO: 1129299 - RNA, 19 nt, Artificial Sequence
  Description of Artificial Sequence: Synthetic oligonucleotide
  Antisense strand to SEQ ID NO: 1129298
cuggaaagcagauacuuca

SEQ ID NO: 1129300 - RNA, 19 nt, Artificial Sequence
  Description of Artificial Sequence: Synthetic oligonucleotide
  Sense strand starting at position 3161 of SEQ ID NO: 916085
aguaucugcuuuccagaaa

SEQ ID NO: 1129301 - RNA, 19 nt, Artificial Sequence
  Description of Artificial Sequence: Synthetic oligonucleotide
  Antisense strand to SEQ ID NO: 1129300
uuucuggaaagcagauacu

SEQ ID NO: 1129302 - RNA, 19 nt, Artificial Sequence
  Description of Artificial Sequence: Synthetic oligonucleotide
  Sense strand starting at position 3218 of SEQ ID NO: 916085
uugcaauaauucgccuuua

SEQ ID NO: 1129303 - RNA, 19 nt, Artificial Sequence
  Description of Artificial Sequence: Synthetic oligonucleotide
  Antisense strand to SEQ ID NO: 1129302
uaaaggcgaauuauugcaa

SEQ ID NO: 1129304 - RNA, 19 nt, Artificial Sequence
  Description of Artificial Sequence: Synthetic oligonucleotide
  Sense strand starting at position 3219 of SEQ ID NO: 916085
ugcaauaauucgccuuuau

SEQ ID NO: 1129305 - RNA, 19 nt, Artificial Sequence
  Description of Artificial Sequence: Synthetic oligonucleotide
  Antisense strand to SEQ ID NO: 1129304
auaaaggcgaauuauugca

SEQ ID NO: 1129306 - RNA, 19 nt, Artificial Sequence
  Description of Artificial Sequence: Synthetic oligonucleotide
  Sense strand starting at position 3229 of SEQ ID NO: 916085
cgccuuuauuuccuuguau

SEQ ID NO: 1129307 - RNA, 19 nt, Artificial Sequence
  Description of Artificial Sequence: Synthetic oligonucleotide
  Antisense strand to SEQ ID NO: 1129306
auacaaggaaauaaaggcg

SEQ ID NO: 1129308 - RNA, 19 nt, Artificial Sequence
  Description of Artificial Sequence: Synthetic oligonucleotide
  Sense strand starting at position 3230 of SEQ ID NO: 916085
gccuuuauuuccuuguaua

SEQ ID NO: 1129309 - RNA, 19 nt, Artificial Sequence
  Description of Artificial Sequence: Synthetic oligonucleotide
  Antisense strand to SEQ ID NO: 1129308
uauacaaggaaauaaaggc

SEQ ID NO: 1129310 - RNA, 19 nt, Artificial Sequence
  Description of Artificial Sequence: Synthetic oligonucleotide
  Sense strand starting at position 3238 of SEQ ID NO: 916085
uuccuuguauaucuguaaa

SEQ ID NO: 1129311 - RNA, 19 nt, Artificial Sequence
  Description of Artificial Sequence: Synthetic oligonucleotide
  Antisense strand to SEQ ID NO: 1129310
uuuacagauauacaaggaa

SEQ ID NO: 1129312 - RNA, 19 nt, Artificial Sequence
  Description of Artificial Sequence: Synthetic oligonucleotide
  Sense strand starting at position 3240 of SEQ ID NO: 916085
ccuuguauaucuguaaacu

SEQ ID NO: 1129313 - RNA, 19 nt, Artificial Sequence
  Description of Artificial Sequence: Synthetic oligonucleotide
  Antisense strand to SEQ ID NO: 1129312
aguuuacagauauacaagg

SEQ ID NO: 1129314 - RNA, 19 nt, Artificial Sequence
  Description of Artificial Sequence: Synthetic oligonucleotide
  Sense strand starting at position 3241 of SEQ ID NO: 916085
cuuguauaucuguaaacuc

SEQ ID NO: 1129315 - RNA, 19 nt, Artificial Sequence
  Description of Artificial Sequence: Synthetic oligonucleotide
  Antisense strand to SEQ ID NO: 1129314
gaguuuacagauauacaag

SEQ ID NO: 1129316 - RNA, 19 nt, Artificial Sequence
  Description of Artificial Sequence: Synthetic oligonucleotide
  Sense strand starting at position 3363 of SEQ ID NO: 916085
uugaguaaaguacaguuaa

SEQ ID NO: 1129317 - RNA, 19 nt, Artificial Sequence
  Description of Artificial Sequence: Synthetic oligonucleotide
  Antisense strand to SEQ ID NO: 1129316
uuaacuguacuuuacucaa

SEQ ID NO: 1129318 - RNA, 19 nt, Artificial Sequence
  Description of Artificial Sequence: Synthetic oligonucleotide
  Sense strand starting at position 3473 of SEQ ID NO: 916085
uuuaucauugaaggucaaa

SEQ ID NO: 1129319 - RNA, 19 nt, Artificial Sequence
  Description of Artificial Sequence: Synthetic oligonucleotide
  Antisense strand to SEQ ID NO: 1129318
uuugaccuucaaugauaaa

SEQ ID NO: 1129320 - RNA, 19 nt, Artificial Sequence
  Description of Artificial Sequence: Synthetic oligonucleotide
  Sense strand starting at position 3565 of SEQ ID NO: 916085
uuugacauaucagcagaca

SEQ ID NO: 1129321 - RNA, 19 nt, Artificial Sequence
  Description of Artificial Sequence: Synthetic oligonucleotide
  Antisense strand to SEQ ID NO: 1129320
ugucugcugauaugucaaa

SEQ ID NO: 1129322 - RNA, 19 nt, Artificial Sequence
  Description of Artificial Sequence: Synthetic oligonucleotide
  Sense strand starting at position 3576 of SEQ ID NO: 916085
agcagacauugugugaauu

SEQ ID NO: 1129323 - RNA, 19 nt, Artificial Sequence
  Description of Artificial Sequence: Synthetic oligonucleotide
  Antisense strand to SEQ ID NO: 1129322
aauucacacaaugucugcu

SEQ ID NO: 1129324 - RNA, 19 nt, Artificial Sequence
  Description of Artificial Sequence: Synthetic oligonucleotide
  Sense strand starting at position 3578 of SEQ ID NO: 916085
cagacauugugugaauuua

SEQ ID NO: 1129325 - RNA, 19 nt, Artificial Sequence
  Description of Artificial Sequence: Synthetic oligonucleotide
  Antisense strand to SEQ ID NO: 1129324
uaaauucacacaaugucug

SEQ ID NO: 1129326 - RNA, 19 nt, Artificial Sequence
  Description of Artificial Sequence: Synthetic oligonucleotide
  Sense strand starting at position 3611 of SEQ ID NO: 916085
gguacugguguagguagaa

SEQ ID NO: 1129327 - RNA, 19 nt, Artificial Sequence
  Description of Artificial Sequence: Synthetic oligonucleotide
  Antisense strand to SEQ ID NO: 1129326
uucuaccuacaccaguacc

SEQ ID NO: 1129328 - RNA, 19 nt, Artificial Sequence
  Description of Artificial Sequence: Synthetic oligonucleotide
  Sense strand starting at position 3716 of SEQ ID NO: 916085
auacuagugucuuuccuuu

SEQ ID NO: 1129329 - RNA, 19 nt, Artificial Sequence
  Description of Artificial Sequence: Synthetic oligonucleotide
  Antisense strand to SEQ ID NO: 1129328
aaaggaaagacacuaguau

SEQ ID NO: 1129330 - RNA, 19 nt, Artificial Sequence
  Description of Artificial Sequence: Synthetic oligonucleotide
  Sense strand starting at position 3850 of SEQ ID NO: 916085
augacuuccagagggugua

SEQ ID NO: 1129331 - RNA, 19 nt, Artificial Sequence
  Description of Artificial Sequence: Synthetic oligonucleotide
  Antisense strand to SEQ ID NO: 1129330
uacacccucuggaagucau

SEQ ID NO: 1129332 - RNA, 19 nt, Artificial Sequence
  Description of Artificial Sequence: Synthetic oligonucleotide
  Sense strand starting at position 3866 of SEQ ID NO: 916085
guaagucugauaugagagu

SEQ ID NO: 1129333 - RNA, 19 nt, Artificial Sequence
  Description of Artificial Sequence: Synthetic oligonucleotide
  Antisense strand to SEQ ID NO: 1129332
acucucauaucagacuuac

SEQ ID NO: 1129334 - RNA, 19 nt, Artificial Sequence
  Description of Artificial Sequence: Synthetic oligonucleotide
  Sense strand starting at position 3935 of SEQ ID NO: 916085
auaauaaauguguggguua

SEQ ID NO: 1129335 - RNA, 19 nt, Artificial Sequence
  Description of Artificial Sequence: Synthetic oligonucleotide
  Antisense strand to SEQ ID NO: 1129334
uaacccacacauuuauuau

SEQ ID NO: 1129336 - RNA, 19 nt, Artificial Sequence
  Description of Artificial Sequence: Synthetic oligonucleotide
  Sense strand starting at position 3938 of SEQ ID NO: 916085
auaaauguguggguuagga

SEQ ID NO: 1129337 - RNA, 19 nt, Artificial Sequence
  Description of Artificial Sequence: Synthetic oligonucleotide
  Antisense strand to SEQ ID NO: 1129336
uccuaacccacacauuuau

SEQ ID NO: 1129338 - RNA, 19 nt, Artificial Sequence
  Description of Artificial Sequence: Synthetic oligonucleotide
  Sense strand starting at position 3940 of SEQ ID NO: 916085
aaauguguggguuaggagu

SEQ ID NO: 1129339 - RNA, 19 nt, Artificial Sequence
  Description of Artificial Sequence: Synthetic oligonucleotide
  Antisense strand to SEQ ID NO: 1129338
acuccuaacccacacauuu

SEQ ID NO: 1129340 - RNA, 19 nt, Artificial Sequence
  Description of Artificial Sequence: Synthetic oligonucleotide
  Sense strand starting at position 384 of SEQ ID NO: 916086
caaggauucgaaggaaguu

SEQ ID NO: 1129341 - RNA, 19 nt, Artificial Sequence
  Description of Artificial Sequence: Synthetic oligonucleotide
  Antisense strand to SEQ ID NO: 1129340
aacuuccuucgaauccuug

SEQ ID NO: 1129342 - RNA, 19 nt, Artificial Sequence
  Description of Artificial Sequence: Synthetic oligonucleotide
  Sense strand starting at position 396 of SEQ ID NO: 916086
ggaaguugauguuuagguu

SEQ ID NO: 1129343 - RNA, 19 nt, Artificial Sequence
  Description of Artificial Sequence: Synthetic oligonucleotide
  Antisense strand to SEQ ID NO: 1129342
aaccuaaacaucaacuucc

SEQ ID NO: 1129344 - RNA, 19 nt, Artificial Sequence
  Description of Artificial Sequence: Synthetic oligonucleotide
  Sense strand starting at position 455 of SEQ ID NO: 916086
guaguaauaccguaccuac

SEQ ID NO: 1129345 - RNA, 19 nt, Artificial Sequence
  Description of Artificial Sequence: Synthetic oligonucleotide
  Antisense strand to SEQ ID NO: 1129344
guagguacgguauuacuac

SEQ ID NO: 1129346 - RNA, 19 nt, Artificial Sequence
  Description of Artificial Sequence: Synthetic oligonucleotide
  Sense strand starting at position 2283 of SEQ ID NO: 916086
cggucgugucgugugaacu

SEQ ID NO: 1129347 - RNA, 19 nt, Artificial Sequence
  Description of Artificial Sequence: Synthetic oligonucleotide
  Antisense strand to SEQ ID NO: 1129346
aguucacacgacacgaccg

SEQ ID NO: 1129348 - RNA, 19 nt, Artificial Sequence
  Description of Artificial Sequence: Synthetic oligonucleotide
  Sense strand starting at position 2295 of SEQ ID NO: 916086
gugaacuugcucuagccaa

SEQ ID NO: 1129349 - RNA, 19 nt, Artificial Sequence
  Description of Artificial Sequence: Synthetic oligonucleotide
  Antisense strand to SEQ ID NO: 1129348
uuggcuagagcaaguucac

SEQ ID NO: 1129350 - RNA, 19 nt, Artificial Sequence
  Description of Artificial Sequence: Synthetic oligonucleotide
  Sense strand starting at position 2310 of SEQ ID NO: 916086
ccaaauuagguuuauagca

SEQ ID NO: 1129351 - RNA, 19 nt, Artificial Sequence
  Description of Artificial Sequence: Synthetic oligonucleotide
  Antisense strand to SEQ ID NO: 1129350
ugcuauaaaccuaauuugg

SEQ ID NO: 1129352 - RNA, 19 nt, Artificial Sequence
  Description of Artificial Sequence: Synthetic oligonucleotide
  Sense strand starting at position 2441 of SEQ ID NO: 916086
aguaucugcuuuccagaaa

SEQ ID NO: 1129353 - RNA, 19 nt, Artificial Sequence
  Description of Artificial Sequence: Synthetic oligonucleotide
  Antisense strand to SEQ ID NO: 1129352
uuucuggaaagcagauacu

SEQ ID NO: 1129354 - RNA, 19 nt, Artificial Sequence
  Description of Artificial Sequence: Synthetic oligonucleotide
  Sense strand starting at position 2509 of SEQ ID NO: 916086
cgccuuuauuuccuuguau

SEQ ID NO: 1129355 - RNA, 19 nt, Artificial Sequence
  Description of Artificial Sequence: Synthetic oligonucleotide
  Antisense strand to SEQ ID NO: 1129354
auacaaggaaauaaaggcg

SEQ ID NO: 1129356 - RNA, 19 nt, Artificial Sequence
  Description of Artificial Sequence: Synthetic oligonucleotide
  Sense strand starting at position 2510 of SEQ ID NO: 916086
gccuuuauuuccuuguaua

SEQ ID NO: 1129357 - RNA, 19 nt, Artificial Sequence
  Description of Artificial Sequence: Synthetic oligonucleotide
  Antisense strand to SEQ ID NO: 1129356
uauacaaggaaauaaaggc

SEQ ID NO: 1129358 - RNA, 19 nt, Artificial Sequence
  Description of Artificial Sequence: Synthetic oligonucleotide
  Sense strand starting at position 2518 of SEQ ID NO: 916086
uuccuuguauaucuguaaa

SEQ ID NO: 1129359 - RNA, 19 nt, Artificial Sequence
  Description of Artificial Sequence: Synthetic oligonucleotide
  Antisense strand to SEQ ID NO: 1129358
uuuacagauauacaaggaa

SEQ ID NO: 1129360 - RNA, 19 nt, Artificial Sequence
  Description of Artificial Sequence: Synthetic oligonucleotide
  Sense strand starting at position 2520 of SEQ ID NO: 916086
ccuuguauaucuguaaacu

SEQ ID NO: 1129361 - RNA, 19 nt, Artificial Sequence
  Description of Artificial Sequence: Synthetic oligonucleotide
  Antisense strand to SEQ ID NO: 1129360
aguuuacagauauacaagg

SEQ ID NO: 1129362 - RNA, 19 nt, Artificial Sequence
  Description of Artificial Sequence: Synthetic oligonucleotide
  Sense strand starting at position 2521 of SEQ ID NO: 916086
cuuguauaucuguaaacuc

SEQ ID NO: 1129363 - RNA, 19 nt, Artificial Sequence
  Description of Artificial Sequence: Synthetic oligonucleotide
  Antisense strand to SEQ ID NO: 1129362
gaguuuacagauauacaag

SEQ ID NO: 1129364 - RNA, 19 nt, Artificial Sequence
  Description of Artificial Sequence: Synthetic oligonucleotide
  Sense strand starting at position 2643 of SEQ ID NO: 916086
uugaguaaaguacaguuaa

SEQ ID NO: 1129365 - RNA, 19 nt, Artificial Sequence
  Description of Artificial Sequence: Synthetic oligonucleotide
  Antisense strand to SEQ ID NO: 1129364
uuaacuguacuuuacucaa

SEQ ID NO: 1129366 - RNA, 19 nt, Artificial Sequence
  Description of Artificial Sequence: Synthetic oligonucleotide
  Sense strand starting at position 2753 of SEQ ID NO: 916086
uuuaucauugaaggucaaa

SEQ ID NO: 1129367 - RNA, 19 nt, Artificial Sequence
  Description of Artificial Sequence: Synthetic oligonucleotide
  Antisense strand to SEQ ID NO: 1129366
uuugaccuucaaugauaaa

SEQ ID NO: 1129368 - RNA, 19 nt, Artificial Sequence
  Description of Artificial Sequence: Synthetic oligonucleotide
  Sense strand starting at position 2845 of SEQ ID NO: 916086
uuugacauaucagcagaca

SEQ ID NO: 1129369 - RNA, 19 nt, Artificial Sequence
  Description of Artificial Sequence: Synthetic oligonucleotide
  Antisense strand to SEQ ID NO: 1129368
ugucugcugauaugucaaa

SEQ ID NO: 1129370 - RNA, 19 nt, Artificial Sequence
  Description of Artificial Sequence: Synthetic oligonucleotide
  Sense strand starting at position 2856 of SEQ ID NO: 916086
agcagacauugugugaauu

SEQ ID NO: 1129371 - RNA, 19 nt, Artificial Sequence
  Description of Artificial Sequence: Synthetic oligonucleotide
  Antisense strand to SEQ ID NO: 1129370
aauucacacaaugucugcu

SEQ ID NO: 1129372 - RNA, 19 nt, Artificial Sequence
  Description of Artificial Sequence: Synthetic oligonucleotide
  Sense strand starting at position 3130 of SEQ ID NO: 916086
augacuuccagagggugua

SEQ ID NO: 1129373 - RNA, 19 nt, Artificial Sequence
  Description of Artificial Sequence: Synthetic oligonucleotide
  Antisense strand to SEQ ID NO: 1129372
uacacccucuggaagucau

SEQ ID NO: 1129374 - RNA, 19 nt, Artificial Sequence
  Description of Artificial Sequence: Synthetic oligonucleotide
  Sense strand starting at position 3146 of SEQ ID NO: 916086
guaagucugauaugagagu

SEQ ID NO: 1129375 - RNA, 19 nt, Artificial Sequence
  Description of Artificial Sequence: Synthetic oligonucleotide
  Antisense strand to SEQ ID NO: 1129374
acucucauaucagacuuac

SEQ ID NO: 1129376 - RNA, 19 nt, Artificial Sequence
  Description of Artificial Sequence: Synthetic oligonucleotide
  Sense strand starting at position 3215 of SEQ ID NO: 916086
auaauaaauguguggguua

SEQ ID NO: 1129377 - RNA, 19 nt, Artificial Sequence
  Description of Artificial Sequence: Synthetic oligonucleotide
  Antisense strand to SEQ ID NO: 1129376
uaacccacacauuuauuau

SEQ ID NO: 1129378 - RNA, 19 nt, Artificial Sequence
  Description of Artificial Sequence: Synthetic oligonucleotide
  Sense strand starting at position 3218 of SEQ ID NO: 916086
auaaauguguggguuagga

SEQ ID NO: 1129379 - RNA, 19 nt, Artificial Sequence
  Description of Artificial Sequence: Synthetic oligonucleotide
  Antisense strand to SEQ ID NO: 1129378
uccuaacccacacauuuau

SEQ ID NO: 1129380 - RNA, 19 nt, Artificial Sequence
  Description of Artificial Sequence: Synthetic oligonucleotide
  Sense strand starting at position 3220 of SEQ ID NO: 916086
aaauguguggguuaggagu

SEQ ID NO: 1129381 - RNA, 19 nt, Artificial Sequence
  Description of Artificial Sequence: Synthetic oligonucleotide
  Antisense strand to SEQ ID NO: 1129380
acuccuaacccacacauuu

SEQ ID NO: 1129382 - RNA, 19 nt, Artificial Sequence
  Description of Artificial Sequence: Synthetic oligonucleotide
  Sense strand starting at position 3310 of SEQ ID NO: 916086
cuauuuguuuaggaugaau

SEQ ID NO: 1129383 - RNA, 19 nt, Artificial Sequence
  Description of Artificial Sequence: Synthetic oligonucleotide
  Antisense strand to SEQ ID NO: 1129382
auucauccuaaacaaauag

SEQ ID NO: 1129384 - RNA, 19 nt, Artificial Sequence
  Description of Artificial Sequence: Synthetic oligonucleotide
  Sense strand starting at position 3348 of SEQ ID NO: 916086
agaacaagccuuuaauugu

SEQ ID NO: 1129385 - RNA, 19 nt, Artificial Sequence
  Description of Artificial Sequence: Synthetic oligonucleotide
  Antisense strand to SEQ ID NO: 1129384
acaauuaaaggcuuguucu

SEQ ID NO: 1129386 - RNA, 19 nt, Artificial Sequence
  Description of Artificial Sequence: Synthetic oligonucleotide
  Sense strand starting at position 3365 of SEQ ID NO: 916086
guccuauuauuugugccaa

SEQ ID NO: 1129387 - RNA, 19 nt, Artificial Sequence
  Description of Artificial Sequence: Synthetic oligonucleotide
  Antisense strand to SEQ ID NO: 1129386
uuggcacaaauaauaggac

SEQ ID NO: 1129388 - RNA, 19 nt, Artificial Sequence
  Description of Artificial Sequence: Synthetic oligonucleotide
  Sense strand starting at position 3501 of SEQ ID NO: 916086
uuaccaauagaugguauau

SEQ ID NO: 1129389 - RNA, 19 nt, Artificial Sequence
  Description of Artificial Sequence: Synthetic oligonucleotide
  Antisense strand to SEQ ID NO: 1129388
auauaccaucuauugguaa

SEQ ID NO: 1129390 - RNA, 19 nt, Artificial Sequence
  Description of Artificial Sequence: Synthetic oligonucleotide
  Sense strand starting at position 3503 of SEQ ID NO: 916086
accaauagaugguauauuu

SEQ ID NO: 1129391 - RNA, 19 nt, Artificial Sequence
  Description of Artificial Sequence: Synthetic oligonucleotide
  Antisense strand to SEQ ID NO: 1129390
aaauauaccaucuauuggu

SEQ ID NO: 1129392 - RNA, 19 nt, Artificial Sequence
  Description of Artificial Sequence: Synthetic oligonucleotide
  Sense strand starting at position 3560 of SEQ ID NO: 916086
ugguaauguugauuaaguu

SEQ ID NO: 1129393 - RNA, 19 nt, Artificial Sequence
  Description of Artificial Sequence: Synthetic oligonucleotide
  Antisense strand to SEQ ID NO: 1129392
aacuuaaucaacauuacca

SEQ ID NO: 1129394 - RNA, 19 nt, Artificial Sequence
  Description of Artificial Sequence: Synthetic oligonucleotide
  Sense strand starting at position 3561 of SEQ ID NO: 916086
gguaauguugauuaaguuu

SEQ ID NO: 1129395 - RNA, 19 nt, Artificial Sequence
  Description of Artificial Sequence: Synthetic oligonucleotide
  Antisense strand to SEQ ID NO: 1129394
aaacuuaaucaacauuacc

SEQ ID NO: 1129396 - RNA, 19 nt, Artificial Sequence
  Description of Artificial Sequence: Synthetic oligonucleotide
  Sense strand starting at position 3569 of SEQ ID NO: 916086
ugauuaaguuugcccauuu

SEQ ID NO: 1129397 - RNA, 19 nt, Artificial Sequence
  Description of Artificial Sequence: Synthetic oligonucleotide
  Antisense strand to SEQ ID NO: 1129396
aaaugggcaaacuuaauca

SEQ ID NO: 1129398 - RNA, 19 nt, Artificial Sequence
  Description of Artificial Sequence: Synthetic oligonucleotide
  Sense strand starting at position 3693 of SEQ ID NO: 916086
auguuaaauucucuguaca

SEQ ID NO: 1129399 - RNA, 19 nt, Artificial Sequence
  Description of Artificial Sequence: Synthetic oligonucleotide
  Antisense strand to SEQ ID NO: 1129398
uguacagagaauuuaacau

SEQ ID NO: 1129400 - RNA, 19 nt, Artificial Sequence
  Description of Artificial Sequence: Synthetic oligonucleotide
  Sense strand starting at position 3695 of SEQ ID NO: 916086
guuaaauucucuguacacu

SEQ ID NO: 1129401 - RNA, 19 nt, Artificial Sequence
  Description of Artificial Sequence: Synthetic oligonucleotide
  Antisense strand to SEQ ID NO: 1129400
aguguacagagaauuuaac

SEQ ID NO: 1129402 - RNA, 19 nt, Artificial Sequence
  Description of Artificial Sequence: Synthetic oligonucleotide
  Sense strand starting at position 3762 of SEQ ID NO: 916086
gaagaaugaguuuguguau

SEQ ID NO: 1129403 - RNA, 19 nt, Artificial Sequence
  Description of Artificial Sequence: Synthetic oligonucleotide
  Antisense strand to SEQ ID NO: 1129402
auacacaaacucauucuuc

SEQ ID NO: 1129404 - RNA, 19 nt, Artificial Sequence
  Description of Artificial Sequence: Synthetic oligonucleotide
  Sense strand starting at position 3763 of SEQ ID NO: 916086
aagaaugaguuuguguaua

SEQ ID NO: 1129405 - RNA, 19 nt, Artificial Sequence
  Description of Artificial Sequence: Synthetic oligonucleotide
  Antisense strand to SEQ ID NO: 1129404
uauacacaaacucauucuu

SEQ ID NO: 1129406 - RNA, 19 nt, Artificial Sequence
  Description of Artificial Sequence: Synthetic oligonucleotide
  Sense strand starting at position 3765 of SEQ ID NO: 916086
gaaugaguuuguguauaac

SEQ ID NO: 1129407 - RNA, 19 nt, Artificial Sequence
  Description of Artificial Sequence: Synthetic oligonucleotide
  Antisense strand to SEQ ID NO: 1129406
guuauacacaaacucauuc

SEQ ID NO: 1129408 - RNA, 19 nt, Artificial Sequence
  Description of Artificial Sequence: Synthetic oligonucleotide
  Sense strand starting at position 3768 of SEQ ID NO: 916086
ugaguuuguguauaacuug

SEQ ID NO: 1129409 - RNA, 19 nt, Artificial Sequence
  Description of Artificial Sequence: Synthetic oligonucleotide
  Antisense strand to SEQ ID NO: 1129408
caaguuauacacaaacuca

SEQ ID NO: 1129410 - RNA, 19 nt, Artificial Sequence
  Description of Artificial Sequence: Synthetic oligonucleotide
  Sense strand starting at position 3840 of SEQ ID NO: 916086
ugccauggcaagggauaaa

SEQ ID NO: 1129411 - RNA, 19 nt, Artificial Sequence
  Description of Artificial Sequence: Synthetic oligonucleotide
  Antisense strand to SEQ ID NO: 1129410
uuuaucccuugccauggca

SEQ ID NO: 1129412 - RNA, 19 nt, Artificial Sequence
  Description of Artificial Sequence: Synthetic oligonucleotide
  Sense strand starting at position 3860 of SEQ ID NO: 916086
aggacaggcuucucuaaug

SEQ ID NO: 1129413 - RNA, 19 nt, Artificial Sequence
  Description of Artificial Sequence: Synthetic oligonucleotide
  Antisense strand to SEQ ID NO: 1129412
cauuagagaagccuguccu

SEQ ID NO: 1129414 - RNA, 19 nt, Artificial Sequence
  Description of Artificial Sequence: Synthetic oligonucleotide
  Sense strand starting at position 3870 of SEQ ID NO: 916086
ucucuaaugugucugaaac

SEQ ID NO: 1129415 - RNA, 19 nt, Artificial Sequence
  Description of Artificial Sequence: Synthetic oligonucleotide
  Antisense strand to SEQ ID NO: 1129414
guuucagacacauuagaga

SEQ ID NO: 1129416 - RNA, 19 nt, Artificial Sequence
  Description of Artificial Sequence: Synthetic oligonucleotide
  Sense strand starting at position 3871 of SEQ ID NO: 916086
cucuaaugugucugaaaca

SEQ ID NO: 1129417 - RNA, 19 nt, Artificial Sequence
  Description of Artificial Sequence: Synthetic oligonucleotide
  Antisense strand to SEQ ID NO: 1129416
uguuucagacacauuagag

SEQ ID NO: 1129418 - RNA, 19 nt, Artificial Sequence
  Description of Artificial Sequence: Synthetic oligonucleotide
  Sense strand starting at position 3968 of SEQ ID NO: 916086
ucacuuauuugcucaggca

SEQ ID NO: 1129419 - RNA, 19 nt, Artificial Sequence
  Description of Artificial Sequence: Synthetic oligonucleotide
  Antisense strand to SEQ ID NO: 1129418
ugccugagcaaauaaguga

SEQ ID NO: 1129420 - RNA, 19 nt, Artificial Sequence
  Description of Artificial Sequence: Synthetic oligonucleotide
  Sense strand starting at position 37 of SEQ ID NO: 916087
aggcuagcacuguaaucuu

SEQ ID NO: 1129421 - RNA, 19 nt, Artificial Sequence
  Description of Artificial Sequence: Synthetic oligonucleotide
  Antisense strand to SEQ ID NO: 1129420
aagauuacagugcuagccu

SEQ ID NO: 1129422 - RNA, 19 nt, Artificial Sequence
  Description of Artificial Sequence: Synthetic oligonucleotide
  Sense strand starting at position 81 of SEQ ID NO: 916087
agauacaccuuuguguaca

SEQ ID NO: 1129423 - RNA, 19 nt, Artificial Sequence
  Description of Artificial Sequence: Synthetic oligonucleotide
  Antisense strand to SEQ ID NO: 1129422
uguacacaaagguguaucu

SEQ ID NO: 1129424 - RNA, 19 nt, Artificial Sequence
  Description of Artificial Sequence: Synthetic oligonucleotide
  Sense strand starting at position 121 of SEQ ID NO: 916087
auuuccuaauuaugaggau

SEQ ID NO: 1129425 - RNA, 19 nt, Artificial Sequence
  Description of Artificial Sequence: Synthetic oligonucleotide
  Antisense strand to SEQ ID NO: 1129424
auccucauaauuaggaaau

SEQ ID NO: 1129426 - RNA, 19 nt, Artificial Sequence
  Description of Artificial Sequence: Synthetic oligonucleotide
  Sense strand starting at position 275 of SEQ ID NO: 916087
aggacucccuguuugcuaa

SEQ ID NO: 1129427 - RNA, 19 nt, Artificial Sequence
  Description of Artificial Sequence: Synthetic oligonucleotide
  Antisense strand to SEQ ID NO: 1129426
uuagcaaacagggaguccu

SEQ ID NO: 1129428 - RNA, 19 nt, Artificial Sequence
  Description of Artificial Sequence: Synthetic oligonucleotide
  Sense strand starting at position 521 of SEQ ID NO: 916087
ggcugccaucuggauugau

SEQ ID NO: 1129429 - RNA, 19 nt, Artificial Sequence
  Description of Artificial Sequence: Synthetic oligonucleotide
  Antisense strand to SEQ ID NO: 1129428
aucaauccagauggcagcc

SEQ ID NO: 1129430 - RNA, 19 nt, Artificial Sequence
  Description of Artificial Sequence: Synthetic oligonucleotide
  Sense strand starting at position 529 of SEQ ID NO: 916087
ucuggauugauccggaaag

SEQ ID NO: 1129431 - RNA, 19 nt, Artificial Sequence
  Description of Artificial Sequence: Synthetic oligonucleotide
  Antisense strand to SEQ ID NO: 1129430
cuuuccggaucaauccaga

SEQ ID NO: 1129432 - RNA, 19 nt, Artificial Sequence
  Description of Artificial Sequence: Synthetic oligonucleotide
  Sense strand starting at position 551 of SEQ ID NO: 916087
ccaucugaauggucuucuu

SEQ ID NO: 1129433 - RNA, 19 nt, Artificial Sequence
  Description of Artificial Sequence: Synthetic oligonucleotide
  Antisense strand to SEQ ID NO: 1129432
aagaagaccauucagaugg

SEQ ID NO: 1129434 - RNA, 19 nt, Artificial Sequence
  Description of Artificial Sequence: Synthetic oligonucleotide
  Sense strand starting at position 899 of SEQ ID NO: 916087
cuggguuugagugggaaua

SEQ ID NO: 1129435 - RNA, 19 nt, Artificial Sequence
  Description of Artificial Sequence: Synthetic oligonucleotide
  Antisense strand to SEQ ID NO: 1129434
uauucccacucaaacccag

SEQ ID NO: 1129436 - RNA, 19 nt, Artificial Sequence
  Description of Artificial Sequence: Synthetic oligonucleotide
  Sense strand starting at position 900 of SEQ ID NO: 916087
uggguuugagugggaauaa

SEQ ID NO: 1129437 - RNA, 19 nt, Artificial Sequence
  Description of Artificial Sequence: Synthetic oligonucleotide
  Antisense strand to SEQ ID NO: 1129436
uuauucccacucaaaccca

SEQ ID NO: 1129438 - RNA, 19 nt, Artificial Sequence
  Description of Artificial Sequence: Synthetic oligonucleotide
  Sense strand starting at position 1006 of SEQ ID NO: 916087
cucuacuuuccaggaaaug

SEQ ID NO: 1129439 - RNA, 19 nt, Artificial Sequence
  Description of Artificial Sequence: Synthetic oligonucleotide
  Antisense strand to SEQ ID NO: 1129438
cauuuccuggaaaguagag

SEQ ID NO: 1129440 - RNA, 19 nt, Artificial Sequence
  Description of Artificial Sequence: Synthetic oligonucleotide
  Sense strand starting at position 1122 of SEQ ID NO: 916087
cccagacucuacguggaua

SEQ ID NO: 1129441 - RNA, 19 nt, Artificial Sequence
  Description of Artificial Sequence: Synthetic oligonucleotide
  Antisense strand to SEQ ID NO: 1129440
uauccacguagagucuggg

SEQ ID NO: 1129442 - RNA, 19 nt, Artificial Sequence
  Description of Artificial Sequence: Synthetic oligonucleotide
  Sense strand starting at position 1210 of SEQ ID NO: 916087
ggagguaaguuggcgauua

SEQ ID NO: 1129443 - RNA, 19 nt, Artificial Sequence
  Description of Artificial Sequence: Synthetic oligonucleotide
  Antisense strand to SEQ ID NO: 1129442
uaaucgccaacuuaccucc

SEQ ID NO: 1129444 - RNA, 19 nt, Artificial Sequence
  Description of Artificial Sequence: Synthetic oligonucleotide
  Sense strand starting at position 1220 of SEQ ID NO: 916087
uggcgauuacgugaggacu

SEQ ID NO: 1129445 - RNA, 19 nt, Artificial Sequence
  Description of Artificial Sequence: Synthetic oligonucleotide
  Antisense strand to SEQ ID NO: 1129444
aguccucacguaaucgcca

SEQ ID NO: 1129446 - RNA, 19 nt, Artificial Sequence
  Description of Artificial Sequence: Synthetic oligonucleotide
  Sense strand starting at position 1223 of SEQ ID NO: 916087
cgauuacgugaggacuaca

SEQ ID NO: 1129447 - RNA, 19 nt, Artificial Sequence
  Description of Artificial Sequence: Synthetic oligonucleotide
  Antisense strand to SEQ ID NO: 1129446
uguaguccucacguaaucg

SEQ ID NO: 1129448 - RNA, 19 nt, Artificial Sequence
  Description of Artificial Sequence: Synthetic oligonucleotide
  Sense strand starting at position 1320 of SEQ ID NO: 916087
ggauccugcaccgaagauu

SEQ ID NO: 1129449 - RNA, 19 nt, Artificial Sequence
  Description of Artificial Sequence: Synthetic oligonucleotide
  Antisense strand to SEQ ID NO: 1129448
aaucuucggugcaggaucc

SEQ ID NO: 1129450 - RNA, 19 nt, Artificial Sequence
  Description of Artificial Sequence: Synthetic oligonucleotide
  Sense strand starting at position 1364 of SEQ ID NO: 916087
agugauuacccguacggac

SEQ ID NO: 1129451 - RNA, 19 nt, Artificial Sequence
  Description of Artificial Sequence: Synthetic oligonucleotide
  Antisense strand to SEQ ID NO: 1129450
guccguacggguaaucacu

SEQ ID NO: 1129452 - RNA, 19 nt, Artificial Sequence
  Description of Artificial Sequence: Synthetic oligonucleotide
  Sense strand starting at position 2040 of SEQ ID NO: 916087
ggacccaucuuugugagca

SEQ ID NO: 1129453 - RNA, 19 nt, Artificial Sequence
  Description of Artificial Sequence: Synthetic oligonucleotide
  Antisense strand to SEQ ID NO: 1129452
ugcucacaaagaugggucc

SEQ ID NO: 1129454 - RNA, 19 nt, Artificial Sequence
  Description of Artificial Sequence: Synthetic oligonucleotide
  Sense strand starting at position 2044 of SEQ ID NO: 916087
ccaucuuugugagcaacua

SEQ ID NO: 1129455 - RNA, 19 nt, Artificial Sequence
  Description of Artificial Sequence: Synthetic oligonucleotide
  Antisense strand to SEQ ID NO: 1129454
uaguugcucacaaagaugg

SEQ ID NO: 1129456 - RNA, 19 nt, Artificial Sequence
  Description of Artificial Sequence: Synthetic oligonucleotide
  Sense strand starting at position 2088 of SEQ ID NO: 916087
guaguuugucggcuuacac

SEQ ID NO: 1129457 - RNA, 19 nt, Artificial Sequence
  Description of Artificial Sequence: Synthetic oligonucleotide
  Antisense strand to SEQ ID NO: 1129456
guguaagccgacaaacuac

SEQ ID NO: 1129458 - RNA, 19 nt, Artificial Sequence
  Description of Artificial Sequence: Synthetic oligonucleotide
  Sense strand starting at position 2576 of SEQ ID NO: 916087
acuagcaguucucuaauga

SEQ ID NO: 1129459 - RNA, 19 nt, Artificial Sequence
  Description of Artificial Sequence: Synthetic oligonucleotide
  Antisense strand to SEQ ID NO: 1129458
ucauuagagaacugcuagu

SEQ ID NO: 1129460 - RNA, 19 nt, Artificial Sequence
  Description of Artificial Sequence: Synthetic oligonucleotide
  Sense strand starting at position 2577 of SEQ ID NO: 916087
cuagcaguucucuaaugag

SEQ ID NO: 1129461 - RNA, 19 nt, Artificial Sequence
  Description of Artificial Sequence: Synthetic oligonucleotide
  Antisense strand to SEQ ID NO: 1129460
cucauuagagaacugcuag

SEQ ID NO: 1129462 - RNA, 19 nt, Artificial Sequence
  Description of Artificial Sequence: Synthetic oligonucleotide
  Sense strand starting at position 2592 of SEQ ID NO: 916087
ugagauaaauaacaaacga

SEQ ID NO: 1129463 - RNA, 19 nt, Artificial Sequence
  Description of Artificial Sequence: Synthetic oligonucleotide
  Antisense strand to SEQ ID NO: 1129462
ucguuuguuauuuaucuca

SEQ ID NO: 1129464 - RNA, 19 nt, Artificial Sequence
  Description of Artificial Sequence: Synthetic oligonucleotide
  Sense strand starting at position 2745 of SEQ ID NO: 916087
aagcuuuguccaggaucca

SEQ ID NO: 1129465 - RNA, 19 nt, Artificial Sequence
  Description of Artificial Sequence: Synthetic oligonucleotide
  Antisense strand to SEQ ID NO: 1129464
uggauccuggacaaagcuu

SEQ ID NO: 1129466 - RNA, 19 nt, Artificial Sequence
  Description of Artificial Sequence: Synthetic oligonucleotide
  Sense strand starting at position 2746 of SEQ ID NO: 916087
agcuuuguccaggauccaa

SEQ ID NO: 1129467 - RNA, 19 nt, Artificial Sequence
  Description of Artificial Sequence: Synthetic oligonucleotide
  Antisense strand to SEQ ID NO: 1129466
uuggauccuggacaaagcu

SEQ ID NO: 1129468 - RNA, 19 nt, Artificial Sequence
  Description of Artificial Sequence: Synthetic oligonucleotide
  Sense strand starting at position 2864 of SEQ ID NO: 916087
gugcuaagucuugaacuac

SEQ ID NO: 1129469 - RNA, 19 nt, Artificial Sequence
  Description of Artificial Sequence: Synthetic oligonucleotide
  Antisense strand to SEQ ID NO: 1129468
guaguucaagacuuagcac

SEQ ID NO: 1129470 - RNA, 19 nt, Artificial Sequence
  Description of Artificial Sequence: Synthetic oligonucleotide
  Sense strand starting at position 2930 of SEQ ID NO: 916087
ggaacuuacaguuaugguu

SEQ ID NO: 1129471 - RNA, 19 nt, Artificial Sequence
  Description of Artificial Sequence: Synthetic oligonucleotide
  Antisense strand to SEQ ID NO: 1129470
aaccauaacuguaaguucc

SEQ ID NO: 1129472 - RNA, 19 nt, Artificial Sequence
  Description of Artificial Sequence: Synthetic oligonucleotide
  Sense strand starting at position 2953 of SEQ ID NO: 916087
gagcuucucugccuggaua

SEQ ID NO: 1129473 - RNA, 19 nt, Artificial Sequence
  Description of Artificial Sequence: Synthetic oligonucleotide
  Antisense strand to SEQ ID NO: 1129472
uauccaggcagagaagcuc

SEQ ID NO: 1129474 - RNA, 19 nt, Artificial Sequence
  Description of Artificial Sequence: Synthetic oligonucleotide
  Sense strand starting at position 2956 of SEQ ID NO: 916087
cuucucugccuggauauua

SEQ ID NO: 1129475 - RNA, 19 nt, Artificial Sequence
  Description of Artificial Sequence: Synthetic oligonucleotide
  Antisense strand to SEQ ID NO: 1129474
uaauauccaggcagagaag

SEQ ID NO: 1129476 - RNA, 19 nt, Artificial Sequence
  Description of Artificial Sequence: Synthetic oligonucleotide
  Sense strand starting at position 2967 of SEQ ID NO: 916087
ggauauuagucacccagga

SEQ ID NO: 1129477 - RNA, 19 nt, Artificial Sequence
  Description of Artificial Sequence: Synthetic oligonucleotide
  Antisense strand to SEQ ID NO: 1129476
uccugggugacuaauaucc

SEQ ID NO: 1129478 - RNA, 19 nt, Artificial Sequence
  Description of Artificial Sequence: Synthetic oligonucleotide
  Sense strand starting at position 2971 of SEQ ID NO: 916087
auuagucacccaggauauu

SEQ ID NO: 1129479 - RNA, 19 nt, Artificial Sequence
  Description of Artificial Sequence: Synthetic oligonucleotide
  Antisense strand to SEQ ID NO: 1129478
aauauccugggugacuaau

SEQ ID NO: 1129480 - RNA, 19 nt, Artificial Sequence
  Description of Artificial Sequence: Synthetic oligonucleotide
  Sense strand starting at position 3004 of SEQ ID NO: 916087
cuuuccaucugggucaauu

SEQ ID NO: 1129481 - RNA, 19 nt, Artificial Sequence
  Description of Artificial Sequence: Synthetic oligonucleotide
  Antisense strand to SEQ ID NO: 1129480
aauugacccagauggaaag

SEQ ID NO: 1129482 - RNA, 19 nt, Artificial Sequence
  Description of Artificial Sequence: Synthetic oligonucleotide
  Sense strand starting at position 3067 of SEQ ID NO: 916087
gaaugaaucuggcuccuag

SEQ ID NO: 1129483 - RNA, 19 nt, Artificial Sequence
  Description of Artificial Sequence: Synthetic oligonucleotide
  Antisense strand to SEQ ID NO: 1129482
cuaggagccagauucauuc

SEQ ID NO: 1129484 - RNA, 19 nt, Artificial Sequence
  Description of Artificial Sequence: Synthetic oligonucleotide
  Sense strand starting at position 3356 of SEQ ID NO: 916087
ucauacuuccuaugaagga

SEQ ID NO: 1129485 - RNA, 19 nt, Artificial Sequence
  Description of Artificial Sequence: Synthetic oligonucleotide
  Antisense strand to SEQ ID NO: 1129484
uccuucauaggaaguauga

SEQ ID NO: 1129486 - RNA, 19 nt, Artificial Sequence
  Description of Artificial Sequence: Synthetic oligonucleotide
  Sense strand starting at position 3397 of SEQ ID NO: 916087
auggaccuucccugaacau

SEQ ID NO: 1129487 - RNA, 19 nt, Artificial Sequence
  Description of Artificial Sequence: Synthetic oligonucleotide
  Antisense strand to SEQ ID NO: 1129486
auguucagggaagguccau

SEQ ID NO: 1129488 - RNA, 19 nt, Artificial Sequence
  Description of Artificial Sequence: Synthetic oligonucleotide
  Sense strand starting at position 3427 of SEQ ID NO: 916087
gcaagaggaaguuauaguu

SEQ ID NO: 1129489 - RNA, 19 nt, Artificial Sequence
  Description of Artificial Sequence: Synthetic oligonucleotide
  Antisense strand to SEQ ID NO: 1129488
aacuauaacuuccucuugc

SEQ ID NO: 1129490 - RNA, 19 nt, Artificial Sequence
  Description of Artificial Sequence: Synthetic oligonucleotide
  Sense strand starting at position 3437 of SEQ ID NO: 916087
guuauaguuaauggagagu

SEQ ID NO: 1129491 - RNA, 19 nt, Artificial Sequence
  Description of Artificial Sequence: Synthetic oligonucleotide
  Antisense strand to SEQ ID NO: 1129490
acucuccauuaacuauaac

SEQ ID NO: 1129492 - RNA, 19 nt, Artificial Sequence
  Description of Artificial Sequence: Synthetic oligonucleotide
  Sense strand starting at position 3489 of SEQ ID NO: 916087
gaugaagugcuuuguaaac

SEQ ID NO: 1129493 - RNA, 19 nt, Artificial Sequence
  Description of Artificial Sequence: Synthetic oligonucleotide
  Antisense strand to SEQ ID NO: 1129492
guuuacaaagcacuucauc

SEQ ID NO: 1129494 - RNA, 19 nt, Artificial Sequence
  Description of Artificial Sequence: Synthetic oligonucleotide
  Sense strand starting at position 3513 of SEQ ID NO: 916087
agugcuauucuccauaugu

SEQ ID NO: 1129495 - RNA, 19 nt, Artificial Sequence
  Description of Artificial Sequence: Synthetic oligonucleotide
  Antisense strand to SEQ ID NO: 1129494
acauauggagaauagcacu

SEQ ID NO: 1129496 - RNA, 19 nt, Artificial Sequence
  Description of Artificial Sequence: Synthetic oligonucleotide
  Sense strand starting at position 3885 of SEQ ID NO: 916087
ggucuuacucuugggacuu

SEQ ID NO: 1129497 - RNA, 19 nt, Artificial Sequence
  Description of Artificial Sequence: Synthetic oligonucleotide
  Antisense strand to SEQ ID NO: 1129496
aagucccaagaguaagacc

SEQ ID NO: 1129498 - RNA, 19 nt, Artificial Sequence
  Description of Artificial Sequence: Synthetic oligonucleotide
  Sense strand starting at position 3962 of SEQ ID NO: 916087
ccuugagcaccuuguggaa

SEQ ID NO: 1129499 - RNA, 19 nt, Artificial Sequence
  Description of Artificial Sequence: Synthetic oligonucleotide
  Antisense strand to SEQ ID NO: 1129498
uuccacaaggugcucaagg

SEQ ID NO: 1129500 - RNA, 19 nt, Artificial Sequence
  Description of Artificial Sequence: Synthetic oligonucleotide
  Sense strand starting at position 43 of SEQ ID NO: 916088
auggaaagguugucaucag

SEQ ID NO: 1129501 - RNA, 19 nt, Artificial Sequence
  Description of Artificial Sequence: Synthetic oligonucleotide
  Antisense strand to SEQ ID NO: 1129500
cugaugacaaccuuuccau

SEQ ID NO: 1129502 - RNA, 19 nt, Artificial Sequence
  Description of Artificial Sequence: Synthetic oligonucleotide
  Sense strand starting at position 171 of SEQ ID NO: 916088
auaucagguccacauguaa

SEQ ID NO: 1129503 - RNA, 19 nt, Artificial Sequence
  Description of Artificial Sequence: Synthetic oligonucleotide
  Antisense strand to SEQ ID NO: 1129502
uuacauguggaccugauau

SEQ ID NO: 1129504 - RNA, 19 nt, Artificial Sequence
  Description of Artificial Sequence: Synthetic oligonucleotide
  Sense strand starting at position 241 of SEQ ID NO: 916088
uccuuaguccuggaaagug

SEQ ID NO: 1129505 - RNA, 19 nt, Artificial Sequence
  Description of Artificial Sequence: Synthetic oligonucleotide
  Antisense strand to SEQ ID NO: 1129504
cacuuuccaggacuaagga

SEQ ID NO: 1129506 - RNA, 19 nt, Artificial Sequence
  Description of Artificial Sequence: Synthetic oligonucleotide
  Sense strand starting at position 336 of SEQ ID NO: 916088
aaccauuaugccgagucua

SEQ ID NO: 1129507 - RNA, 19 nt, Artificial Sequence
  Description of Artificial Sequence: Synthetic oligonucleotide
  Antisense strand to SEQ ID NO: 1129506
uagacucggcauaaugguu

SEQ ID NO: 1129508 - RNA, 19 nt, Artificial Sequence
  Description of Artificial Sequence: Synthetic oligonucleotide
  Sense strand starting at position 341 of SEQ ID NO: 916088
uuaugccgagucuaauaaa

SEQ ID NO: 1129509 - RNA, 19 nt, Artificial Sequence
  Description of Artificial Sequence: Synthetic oligonucleotide
  Antisense strand to SEQ ID NO: 1129508
uuuauuagacucggcauaa

SEQ ID NO: 1129510 - RNA, 19 nt, Artificial Sequence
  Description of Artificial Sequence: Synthetic oligonucleotide
  Sense strand starting at position 367 of SEQ ID NO: 916088
agauacggcauguauuaau

SEQ ID NO: 1129511 - RNA, 19 nt, Artificial Sequence
  Description of Artificial Sequence: Synthetic oligonucleotide
  Antisense strand to SEQ ID NO: 1129510
auuaauacaugccguaucu

SEQ ID NO: 1129512 - RNA, 19 nt, Artificial Sequence
  Description of Artificial Sequence: Synthetic oligonucleotide
  Sense strand starting at position 385 of SEQ ID NO: 916088
uuugauuugcguuacacuu

SEQ ID NO: 1129513 - RNA, 19 nt, Artificial Sequence
  Description of Artificial Sequence: Synthetic oligonucleotide
  Antisense strand to SEQ ID NO: 1129512
aaguguaacgcaaaucaaa

SEQ ID NO: 1129514 - RNA, 19 nt, Artificial Sequence
  Description of Artificial Sequence: Synthetic oligonucleotide
  Sense strand starting at position 447 of SEQ ID NO: 916088
cggcgaaauggaugaagau

SEQ ID NO: 1129515 - RNA, 19 nt, Artificial Sequence
  Description of Artificial Sequence: Synthetic oligonucleotide
  Antisense strand to SEQ ID NO: 1129514
aucuucauccauuucgccg

SEQ ID NO: 1129516 - RNA, 19 nt, Artificial Sequence
  Description of Artificial Sequence: Synthetic oligonucleotide
  Sense strand starting at position 548 of SEQ ID NO: 916088
aauauugaucuuuacguga

SEQ ID NO: 1129517 - RNA, 19 nt, Artificial Sequence
  Description of Artificial Sequence: Synthetic oligonucleotide
  Antisense strand to SEQ ID NO: 1129516
ucacguaaagaucaauauu

SEQ ID NO: 1129518 - RNA, 19 nt, Artificial Sequence
  Description of Artificial Sequence: Synthetic oligonucleotide
  Sense strand starting at position 553 of SEQ ID NO: 916088
ugaucuuuacgugaguuac

SEQ ID NO: 1129519 - RNA, 19 nt, Artificial Sequence
  Description of Artificial Sequence: Synthetic oligonucleotide
  Antisense strand to SEQ ID NO: 1129518
guaacucacguaaagauca

SEQ ID NO: 1129520 - RNA, 19 nt, Artificial Sequence
  Description of Artificial Sequence: Synthetic oligonucleotide
  Sense strand starting at position 673 of SEQ ID NO: 916088
cuuccagauugcuugagaa

SEQ ID NO: 1129521 - RNA, 19 nt, Artificial Sequence
  Description of Artificial Sequence: Synthetic oligonucleotide
  Antisense strand to SEQ ID NO: 1129520
uucucaagcaaucuggaag

SEQ ID NO: 1129522 - RNA, 19 nt, Artificial Sequence
  Description of Artificial Sequence: Synthetic oligonucleotide
  Sense strand starting at position 732 of SEQ ID NO: 916088
guaugcaggagcuauauau

SEQ ID NO: 1129523 - RNA, 19 nt, Artificial Sequence
  Description of Artificial Sequence: Synthetic oligonucleotide
  Antisense strand to SEQ ID NO: 1129522
auauauagcuccugcauac

SEQ ID NO: 1129524 - RNA, 19 nt, Artificial Sequence
  Description of Artificial Sequence: Synthetic oligonucleotide
  Sense strand starting at position 1075 of SEQ ID NO: 916088
ucacuugacucccuggaaa

SEQ ID NO: 1129525 - RNA, 19 nt, Artificial Sequence
  Description of Artificial Sequence: Synthetic oligonucleotide
  Antisense strand to SEQ ID NO: 1129524
uuuccagggagucaaguga

SEQ ID NO: 1129526 - RNA, 19 nt, Artificial Sequence
  Description of Artificial Sequence: Synthetic oligonucleotide
  Sense strand starting at position 1077 of SEQ ID NO: 916088
acuugacucccuggaaauc

SEQ ID NO: 1129527 - RNA, 19 nt, Artificial Sequence
  Description of Artificial Sequence: Synthetic oligonucleotide
  Antisense strand to SEQ ID NO: 1129526
gauuuccagggagucaagu

SEQ ID NO: 1129528 - RNA, 19 nt, Artificial Sequence
  Description of Artificial Sequence: Synthetic oligonucleotide
  Sense strand starting at position 1116 of SEQ ID NO: 916088
ucagaaacuaggugugaag

SEQ ID NO: 1129529 - RNA, 19 nt, Artificial Sequence
  Description of Artificial Sequence: Synthetic oligonucleotide
  Antisense strand to SEQ ID NO: 1129528
cuucacaccuaguuucuga

SEQ ID NO: 1129530 - RNA, 19 nt, Artificial Sequence
  Description of Artificial Sequence: Synthetic oligonucleotide
  Sense strand starting at position 1234 of SEQ ID NO: 916088
ucucaacggagacguaauu

SEQ ID NO: 1129531 - RNA, 19 nt, Artificial Sequence
  Description of Artificial Sequence: Synthetic oligonucleotide
  Antisense strand to SEQ ID NO: 1129530
aauuacgucuccguugaga

SEQ ID NO: 1129532 - RNA, 19 nt, Artificial Sequence
  Description of Artificial Sequence: Synthetic oligonucleotide
  Sense strand starting at position 1269 of SEQ ID NO: 916088
ucgaguugcagggauucuu

SEQ ID NO: 1129533 - RNA, 19 nt, Artificial Sequence
  Description of Artificial Sequence: Synthetic oligonucleotide
  Antisense strand to SEQ ID NO: 1129532
aagaaucccugcaacucga

SEQ ID NO: 1129534 - RNA, 19 nt, Artificial Sequence
  Description of Artificial Sequence: Synthetic oligonucleotide
  Sense strand starting at position 1794 of SEQ ID NO: 916088
cauggaaaugcgcauucuu

SEQ ID NO: 1129535 - RNA, 19 nt, Artificial Sequence
  Description of Artificial Sequence: Synthetic oligonucleotide
  Antisense strand to SEQ ID NO: 1129534
aagaaugcgcauuuccaug

SEQ ID NO: 1129536 - RNA, 19 nt, Artificial Sequence
  Description of Artificial Sequence: Synthetic oligonucleotide
  Sense strand starting at position 2359 of SEQ ID NO: 916088
gcgccucauagagaagaau

SEQ ID NO: 1129537 - RNA, 19 nt, Artificial Sequence
  Description of Artificial Sequence: Synthetic oligonucleotide
  Antisense strand to SEQ ID NO: 1129536
auucuucucuaugaggcgc

SEQ ID NO: 1129538 - RNA, 19 nt, Artificial Sequence
  Description of Artificial Sequence: Synthetic oligonucleotide
  Sense strand starting at position 2372 of SEQ ID NO: 916088
aagaaugagcuucgauuag

SEQ ID NO: 1129539 - RNA, 19 nt, Artificial Sequence
  Description of Artificial Sequence: Synthetic oligonucleotide
  Antisense strand to SEQ ID NO: 1129538
cuaaucgaagcucauucuu

SEQ ID NO: 1129540 - RNA, 19 nt, Artificial Sequence
  Description of Artificial Sequence: Synthetic oligonucleotide
  Sense strand starting at position 2549 of SEQ ID NO: 916088
ccuaauauucccugguaga

SEQ ID NO: 1129541 - RNA, 19 nt, Artificial Sequence
  Description of Artificial Sequence: Synthetic oligonucleotide
  Antisense strand to SEQ ID NO: 1129540
ucuaccagggaauauuagg

SEQ ID NO: 1129542 - RNA, 19 nt, Artificial Sequence
  Description of Artificial Sequence: Synthetic oligonucleotide
  Sense strand starting at position 2550 of SEQ ID NO: 916088
cuaauauucccugguagaa

SEQ ID NO: 1129543 - RNA, 19 nt, Artificial Sequence
  Description of Artificial Sequence: Synthetic oligonucleotide
  Antisense strand to SEQ ID NO: 1129542
uucuaccagggaauauuag

SEQ ID NO: 1129544 - RNA, 19 nt, Artificial Sequence
  Description of Artificial Sequence: Synthetic oligonucleotide
  Sense strand starting at position 2581 of SEQ ID NO: 916088
acgggaaagcacugcauaa

SEQ ID NO: 1129545 - RNA, 19 nt, Artificial Sequence
  Description of Artificial Sequence: Synthetic oligonucleotide
  Antisense strand to SEQ ID NO: 1129544
uuaugcagugcuuucccgu

SEQ ID NO: 1129546 - RNA, 19 nt, Artificial Sequence
  Description of Artificial Sequence: Synthetic oligonucleotide
  Sense strand starting at position 2638 of SEQ ID NO: 916088
ggccaaacugcaugagaga

SEQ ID NO: 1129547 - RNA, 19 nt, Artificial Sequence
  Description of Artificial Sequence: Synthetic oligonucleotide
  Antisense strand to SEQ ID NO: 1129546
ucucucaugcaguuuggcc

SEQ ID NO: 1129548 - RNA, 19 nt, Artificial Sequence
  Description of Artificial Sequence: Synthetic oligonucleotide
  Sense strand starting at position 2639 of SEQ ID NO: 916088
gccaaacugcaugagagau

SEQ ID NO: 1129549 - RNA, 19 nt, Artificial Sequence
  Description of Artificial Sequence: Synthetic oligonucleotide
  Antisense strand to SEQ ID NO: 1129548
aucucucaugcaguuuggc

SEQ ID NO: 1129550 - RNA, 19 nt, Artificial Sequence
  Description of Artificial Sequence: Synthetic oligonucleotide
  Sense strand starting at position 2701 of SEQ ID NO: 916088
ucaccauuagacugauuga

SEQ ID NO: 1129551 - RNA, 19 nt, Artificial Sequence
  Description of Artificial Sequence: Synthetic oligonucleotide
  Antisense strand to SEQ ID NO: 1129550
ucaaucagucuaaugguga

SEQ ID NO: 1129552 - RNA, 19 nt, Artificial Sequence
  Description of Artificial Sequence: Synthetic oligonucleotide
  Sense strand starting at position 2763 of SEQ ID NO: 916088
uuucuuuaguacucagaca

SEQ ID NO: 1129553 - RNA, 19 nt, Artificial Sequence
  Description of Artificial Sequence: Synthetic oligonucleotide
  Antisense strand to SEQ ID NO: 1129552
ugucugaguacuaaagaaa

SEQ ID NO: 1129554 - RNA, 19 nt, Artificial Sequence
  Description of Artificial Sequence: Synthetic oligonucleotide
  Sense strand starting at position 2946 of SEQ ID NO: 916088
cuagaacuaccacguguaa

SEQ ID NO: 1129555 - RNA, 19 nt, Artificial Sequence
  Description of Artificial Sequence: Synthetic oligonucleotide
  Antisense strand to SEQ ID NO: 1129554
uuacacgugguaguucuag

SEQ ID NO: 1129556 - RNA, 19 nt, Artificial Sequence
  Description of Artificial Sequence: Synthetic oligonucleotide
  Sense strand starting at position 2979 of SEQ ID NO: 916088
ggugucuuaguauauagua

SEQ ID NO: 1129557 - RNA, 19 nt, Artificial Sequence
  Description of Artificial Sequence: Synthetic oligonucleotide
  Antisense strand to SEQ ID NO: 1129556
uacuauauacuaagacacc

SEQ ID NO: 1129558 - RNA, 19 nt, Artificial Sequence
  Description of Artificial Sequence: Synthetic oligonucleotide
  Sense strand starting at position 3054 of SEQ ID NO: 916088
ugaauuaaguagccaucuu

SEQ ID NO: 1129559 - RNA, 19 nt, Artificial Sequence
  Description of Artificial Sequence: Synthetic oligonucleotide
  Antisense strand to SEQ ID NO: 1129558
aagauggcuacuuaauuca

SEQ ID NO: 1129560 - RNA, 19 nt, Artificial Sequence
  Description of Artificial Sequence: Synthetic oligonucleotide
  Sense strand starting at position 3068 of SEQ ID NO: 916088
aucuuaagugcugagcaua

SEQ ID NO: 1129561 - RNA, 19 nt, Artificial Sequence
  Description of Artificial Sequence: Synthetic oligonucleotide
  Antisense strand to SEQ ID NO: 1129560
uaugcucagcacuuaagau

SEQ ID NO: 1129562 - RNA, 19 nt, Artificial Sequence
  Description of Artificial Sequence: Synthetic oligonucleotide
  Sense strand starting at position 3071 of SEQ ID NO: 916088
uuaagugcugagcauaaga

SEQ ID NO: 1129563 - RNA, 19 nt, Artificial Sequence
  Description of Artificial Sequence: Synthetic oligonucleotide
  Antisense strand to SEQ ID NO: 1129562
ucuuaugcucagcacuuaa

SEQ ID NO: 1129564 - RNA, 19 nt, Artificial Sequence
  Description of Artificial Sequence: Synthetic oligonucleotide
  Sense strand starting at position 3073 of SEQ ID NO: 916088
aagugcugagcauaagaca

SEQ ID NO: 1129565 - RNA, 19 nt, Artificial Sequence
  Description of Artificial Sequence: Synthetic oligonucleotide
  Antisense strand to SEQ ID NO: 1129564
ugucuuaugcucagcacuu

SEQ ID NO: 1129566 - RNA, 19 nt, Artificial Sequence
  Description of Artificial Sequence: Synthetic oligonucleotide
  Sense strand starting at position 3157 of SEQ ID NO: 916088
agaagaugacauugcuauu

SEQ ID NO: 1129567 - RNA, 19 nt, Artificial Sequence
  Description of Artificial Sequence: Synthetic oligonucleotide
  Antisense strand to SEQ ID NO: 1129566
aauagcaaugucaucuucu

SEQ ID NO: 1129568 - RNA, 19 nt, Artificial Sequence
  Description of Artificial Sequence: Synthetic oligonucleotide
  Sense strand starting at position 3185 of SEQ ID NO: 916088
agacucuacuuagugguua

SEQ ID NO: 1129569 - RNA, 19 nt, Artificial Sequence
  Description of Artificial Sequence: Synthetic oligonucleotide
  Antisense strand to SEQ ID NO: 1129568
uaaccacuaaguagagucu

SEQ ID NO: 1129570 - RNA, 19 nt, Artificial Sequence
  Description of Artificial Sequence: Synthetic oligonucleotide
  Sense strand starting at position 3210 of SEQ ID NO: 916088
uuauuacuaucaucaggua

SEQ ID NO: 1129571 - RNA, 19 nt, Artificial Sequence
  Description of Artificial Sequence: Synthetic oligonucleotide
  Antisense strand to SEQ ID NO: 1129570
uaccugaugauaguaauaa

SEQ ID NO: 1129572 - RNA, 19 nt, Artificial Sequence
  Description of Artificial Sequence: Synthetic oligonucleotide
  Sense strand starting at position 3744 of SEQ ID NO: 916088
auauuauuuguguggugac

SEQ ID NO: 1129573 - RNA, 19 nt, Artificial Sequence
  Description of Artificial Sequence: Synthetic oligonucleotide
  Antisense strand to SEQ ID NO: 1129572
gucaccacacaaauaauau

SEQ ID NO: 1129574 - RNA, 19 nt, Artificial Sequence
  Description of Artificial Sequence: Synthetic oligonucleotide
  Sense strand starting at position 3882 of SEQ ID NO: 916088
caguuauuccauuggauug

SEQ ID NO: 1129575 - RNA, 19 nt, Artificial Sequence
  Description of Artificial Sequence: Synthetic oligonucleotide
  Antisense strand to SEQ ID NO: 1129574
caauccaauggaauaacug

SEQ ID NO: 1129576 - RNA, 19 nt, Artificial Sequence
  Description of Artificial Sequence: Synthetic oligonucleotide
  Sense strand starting at position 3889 of SEQ ID NO: 916088
uccauuggauuggccaaau

SEQ ID NO: 1129577 - RNA, 19 nt, Artificial Sequence
  Description of Artificial Sequence: Synthetic oligonucleotide
  Antisense strand to SEQ ID NO: 1129576
auuuggccaauccaaugga

SEQ ID NO: 1129578 - RNA, 19 nt, Artificial Sequence
  Description of Artificial Sequence: Synthetic oligonucleotide
  Sense strand starting at position 3913 of SEQ ID NO: 916088
augaauuacugaguacuuu

SEQ ID NO: 1129579 - RNA, 19 nt, Artificial Sequence
  Description of Artificial Sequence: Synthetic oligonucleotide
  Antisense strand to SEQ ID NO: 1129578
aaaguacucaguaauucau

SEQ ID NO: 1129580 - RNA, 19 nt, Artificial Sequence
  Description of Artificial Sequence: Synthetic oligonucleotide
  Sense strand starting at position 20 of SEQ ID NO: 916089
gucauuaggcaauaaauau

SEQ ID NO: 1129581 - RNA, 19 nt, Artificial Sequence
  Description of Artificial Sequence: Synthetic oligonucleotide
  Antisense strand to SEQ ID NO: 1129580
auauuuauugccuaaugac

SEQ ID NO: 1129582 - RNA, 19 nt, Artificial Sequence
  Description of Artificial Sequence: Synthetic oligonucleotide
  Sense strand starting at position 27 of SEQ ID NO: 916089
ggcaauaaauaucuuuaag

SEQ ID NO: 1129583 - RNA, 19 nt, Artificial Sequence
  Description of Artificial Sequence: Synthetic oligonucleotide
  Antisense strand to SEQ ID NO: 1129582
cuuaaagauauuuauugcc

SEQ ID NO: 1129584 - RNA, 19 nt, Artificial Sequence
  Description of Artificial Sequence: Synthetic oligonucleotide
  Sense strand starting at position 256 of SEQ ID NO: 916089
cuagaucagcuuugaagau

SEQ ID NO: 1129585 - RNA, 19 nt, Artificial Sequence
  Description of Artificial Sequence: Synthetic oligonucleotide
  Antisense strand to SEQ ID NO: 1129584
aucuucaaagcugaucuag

SEQ ID NO: 1129586 - RNA, 19 nt, Artificial Sequence
  Description of Artificial Sequence: Synthetic oligonucleotide
  Sense strand starting at position 295 of SEQ ID NO: 916089
gggaguucugugcacaaca

SEQ ID NO: 1129587 - RNA, 19 nt, Artificial Sequence
  Description of Artificial Sequence: Synthetic oligonucleotide
  Antisense strand to SEQ ID NO: 1129586
uguugugcacagaacuccc

SEQ ID NO: 1129588 - RNA, 19 nt, Artificial Sequence
  Description of Artificial Sequence: Synthetic oligonucleotide
  Sense strand starting at position 479 of SEQ ID NO: 916089
aucuauucuuggucuugau

SEQ ID NO: 1129589 - RNA, 19 nt, Artificial Sequence
  Description of Artificial Sequence: Synthetic oligonucleotide
  Antisense strand to SEQ ID NO: 1129588
aucaagaccaagaauagau

SEQ ID NO: 1129590 - RNA, 19 nt, Artificial Sequence
  Description of Artificial Sequence: Synthetic oligonucleotide
  Sense strand starting at position 739 of SEQ ID NO: 916089
ugucucuugcuuuauauuu

SEQ ID NO: 1129591 - RNA, 19 nt, Artificial Sequence
  Description of Artificial Sequence: Synthetic oligonucleotide
  Antisense strand to SEQ ID NO: 1129590
aaauauaaagcaagagaca

SEQ ID NO: 1129592 - RNA, 19 nt, Artificial Sequence
  Description of Artificial Sequence: Synthetic oligonucleotide
  Sense strand starting at position 849 of SEQ ID NO: 916089
ugacaaauauacucguaua

SEQ ID NO: 1129593 - RNA, 19 nt, Artificial Sequence
  Description of Artificial Sequence: Synthetic oligonucleotide
  Antisense strand to SEQ ID NO: 1129592
uauacgaguauauuuguca

SEQ ID NO: 1129594 - RNA, 19 nt, Artificial Sequence
  Description of Artificial Sequence: Synthetic oligonucleotide
  Sense strand starting at position 925 of SEQ ID NO: 916089
uggguccuauaauuguaua

SEQ ID NO: 1129595 - RNA, 19 nt, Artificial Sequence
  Description of Artificial Sequence: Synthetic oligonucleotide
  Antisense strand to SEQ ID NO: 1129594
uauacaauuauaggaccca

SEQ ID NO: 1129596 - RNA, 19 nt, Artificial Sequence
  Description of Artificial Sequence: Synthetic oligonucleotide
  Sense strand starting at position 992 of SEQ ID NO: 916089
gucacaacacgucaucuau

SEQ ID NO: 1129597 - RNA, 19 nt, Artificial Sequence
  Description of Artificial Sequence: Synthetic oligonucleotide
  Antisense strand to SEQ ID NO: 1129596
auagaugacguguugugac

SEQ ID NO: 1129598 - RNA, 19 nt, Artificial Sequence
  Description of Artificial Sequence: Synthetic oligonucleotide
  Sense strand starting at position 1072 of SEQ ID NO: 916089
guagaagucaaaugguuug

SEQ ID NO: 1129599 - RNA, 19 nt, Artificial Sequence
  Description of Artificial Sequence: Synthetic oligonucleotide
  Antisense strand to SEQ ID NO: 1129598
caaaccauuugacuucuac

SEQ ID NO: 1129600 - RNA, 19 nt, Artificial Sequence
  Description of Artificial Sequence: Synthetic oligonucleotide
  Sense strand starting at position 1079 of SEQ ID NO: 916089
ucaaaugguuuguuugaca

SEQ ID NO: 1129601 - RNA, 19 nt, Artificial Sequence
  Description of Artificial Sequence: Synthetic oligonucleotide
  Antisense strand to SEQ ID NO: 1129600
ugucaaacaaaccauuuga

SEQ ID NO: 1129602 - RNA, 19 nt, Artificial Sequence
  Description of Artificial Sequence: Synthetic oligonucleotide
  Sense strand starting at position 1114 of SEQ ID NO: 916089
aggacaugcuaguccaaau

SEQ ID NO: 1129603 - RNA, 19 nt, Artificial Sequence
  Description of Artificial Sequence: Synthetic oligonucleotide
  Antisense strand to SEQ ID NO: 1129602
auuuggacuagcauguccu

SEQ ID NO: 1129604 - RNA, 19 nt, Artificial Sequence
  Description of Artificial Sequence: Synthetic oligonucleotide
  Sense strand starting at position 1149 of SEQ ID NO: 916089
gcucaauuuguaugcaaca

SEQ ID NO: 1129605 - RNA, 19 nt, Artificial Sequence
  Description of Artificial Sequence: Synthetic oligonucleotide
  Antisense strand to SEQ ID NO: 1129604
uguugcauacaaauugagc

SEQ ID NO: 1129606 - RNA, 19 nt, Artificial Sequence
  Description of Artificial Sequence: Synthetic oligonucleotide
  Sense strand starting at position 1232 of SEQ ID NO: 916089
ggugucuacccacaucuuu

SEQ ID NO: 1129607 - RNA, 19 nt, Artificial Sequence
  Description of Artificial Sequence: Synthetic oligonucleotide
  Antisense strand to SEQ ID NO: 1129606
aaagauguggguagacacc

SEQ ID NO: 1129608 - RNA, 19 nt, Artificial Sequence
  Description of Artificial Sequence: Synthetic oligonucleotide
  Sense strand starting at position 1400 of SEQ ID NO: 916089
acauucgagcucuaguaca

SEQ ID NO: 1129609 - RNA, 19 nt, Artificial Sequence
  Description of Artificial Sequence: Synthetic oligonucleotide
  Antisense strand to SEQ ID NO: 1129608
uguacuagagcucgaaugu

SEQ ID NO: 1129610 - RNA, 19 nt, Artificial Sequence
  Description of Artificial Sequence: Synthetic oligonucleotide
  Sense strand starting at position 1410 of SEQ ID NO: 916089
ucuaguacauucuuggaaa

SEQ ID NO: 1129611 - RNA, 19 nt, Artificial Sequence
  Description of Artificial Sequence: Synthetic oligonucleotide
  Antisense strand to SEQ ID NO: 1129610
uuuccaagaauguacuaga

SEQ ID NO: 1129612 - RNA, 19 nt, Artificial Sequence
  Description of Artificial Sequence: Synthetic oligonucleotide
  Sense strand starting at position 1483 of SEQ ID NO: 916089
gucaccucucguuuaacgu

SEQ ID NO: 1129613 - RNA, 19 nt, Artificial Sequence
  Description of Artificial Sequence: Synthetic oligonucleotide
  Antisense strand to SEQ ID NO: 1129612
acguuaaacgagaggugac

SEQ ID NO: 1129614 - RNA, 19 nt, Artificial Sequence
  Description of Artificial Sequence: Synthetic oligonucleotide
  Sense strand starting at position 1532 of SEQ ID NO: 916089
aauacuaaggucugaguca

SEQ ID NO: 1129615 - RNA, 19 nt, Artificial Sequence
  Description of Artificial Sequence: Synthetic oligonucleotide
  Antisense strand to SEQ ID NO: 1129614
ugacucagaccuuaguauu

SEQ ID NO: 1129616 - RNA, 19 nt, Artificial Sequence
  Description of Artificial Sequence: Synthetic oligonucleotide
  Sense strand starting at position 1631 of SEQ ID NO: 916089
gacuuaccuuauguguuga

SEQ ID NO: 1129617 - RNA, 19 nt, Artificial Sequence
  Description of Artificial Sequence: Synthetic oligonucleotide
  Antisense strand to SEQ ID NO: 1129616
ucaacacauaagguaaguc

SEQ ID NO: 1129618 - RNA, 19 nt, Artificial Sequence
  Description of Artificial Sequence: Synthetic oligonucleotide
  Sense strand starting at position 2093 of SEQ ID NO: 916089
ccuguagucgcuguucuau

SEQ ID NO: 1129619 - RNA, 19 nt, Artificial Sequence
  Description of Artificial Sequence: Synthetic oligonucleotide
  Antisense strand to SEQ ID NO: 1129618
auagaacagcgacuacagg

SEQ ID NO: 1129620 - RNA, 19 nt, Artificial Sequence
  Description of Artificial Sequence: Synthetic oligonucleotide
  Sense strand starting at position 2099 of SEQ ID NO: 916089
gucgcuguucuauccagua

SEQ ID NO: 1129621 - RNA, 19 nt, Artificial Sequence
  Description of Artificial Sequence: Synthetic oligonucleotide
  Antisense strand to SEQ ID NO: 1129620
uacuggauagaacagcgac

SEQ ID NO: 1129622 - RNA, 19 nt, Artificial Sequence
  Description of Artificial Sequence: Synthetic oligonucleotide
  Sense strand starting at position 2112 of SEQ ID NO: 916089
ccaguaaugggcuauugau

SEQ ID NO: 1129623 - RNA, 19 nt, Artificial Sequence
  Description of Artificial Sequence: Synthetic oligonucleotide
  Antisense strand to SEQ ID NO: 1129622
aucaauagcccauuacugg

SEQ ID NO: 1129624 - RNA, 19 nt, Artificial Sequence
  Description of Artificial Sequence: Synthetic oligonucleotide
  Sense strand starting at position 2267 of SEQ ID NO: 916089
uugcauacugcagaauguu

SEQ ID NO: 1129625 - RNA, 19 nt, Artificial Sequence
  Description of Artificial Sequence: Synthetic oligonucleotide
  Antisense strand to SEQ ID NO: 1129624
aacauucugcaguaugcaa

SEQ ID NO: 1129626 - RNA, 19 nt, Artificial Sequence
  Description of Artificial Sequence: Synthetic oligonucleotide
  Sense strand starting at position 2273 of SEQ ID NO: 916089
acugcagaauguuuauacu

SEQ ID NO: 1129627 - RNA, 19 nt, Artificial Sequence
  Description of Artificial Sequence: Synthetic oligonucleotide
  Antisense strand to SEQ ID NO: 1129626
aguauaaacauucugcagu

SEQ ID NO: 1129628 - RNA, 19 nt, Artificial Sequence
  Description of Artificial Sequence: Synthetic oligonucleotide
  Sense strand starting at position 2306 of SEQ ID NO: 916089
gcagaaaugcuacagcauc

SEQ ID NO: 1129629 - RNA, 19 nt, Artificial Sequence
  Description of Artificial Sequence: Synthetic oligonucleotide
  Antisense strand to SEQ ID NO: 1129628
gaugcuguagcauuucugc

SEQ ID NO: 1129630 - RNA, 19 nt, Artificial Sequence
  Description of Artificial Sequence: Synthetic oligonucleotide
  Sense strand starting at position 2836 of SEQ ID NO: 916089
ucguaacaguauuugcaaa

SEQ ID NO: 1129631 - RNA, 19 nt, Artificial Sequence
  Description of Artificial Sequence: Synthetic oligonucleotide
  Antisense strand to SEQ ID NO: 1129630
uuugcaaauacuguuacga

SEQ ID NO: 1129632 - RNA, 19 nt, Artificial Sequence
  Description of Artificial Sequence: Synthetic oligonucleotide
  Sense strand starting at position 2989 of SEQ ID NO: 916089
uuauuaaggucacugagau

SEQ ID NO: 1129633 - RNA, 19 nt, Artificial Sequence
  Description of Artificial Sequence: Synthetic oligonucleotide
  Antisense strand to SEQ ID NO: 1129632
aucucagugaccuuaauaa

SEQ ID NO: 1129634 - RNA, 19 nt, Artificial Sequence
  Description of Artificial Sequence: Synthetic oligonucleotide
  Sense strand starting at position 2990 of SEQ ID NO: 916089
uauuaaggucacugagaug

SEQ ID NO: 1129635 - RNA, 19 nt, Artificial Sequence
  Description of Artificial Sequence: Synthetic oligonucleotide
  Antisense strand to SEQ ID NO: 1129634
caucucagugaccuuaaua

SEQ ID NO: 1129636 - RNA, 19 nt, Artificial Sequence
  Description of Artificial Sequence: Synthetic oligonucleotide
  Sense strand starting at position 3090 of SEQ ID NO: 916089
gucauuccaccugaucauu

SEQ ID NO: 1129637 - RNA, 19 nt, Artificial Sequence
  Description of Artificial Sequence: Synthetic oligonucleotide
  Antisense strand to SEQ ID NO: 1129636
aaugaucagguggaaugac

SEQ ID NO: 1129638 - RNA, 19 nt, Artificial Sequence
  Description of Artificial Sequence: Synthetic oligonucleotide
  Sense strand starting at position 3272 of SEQ ID NO: 916089
gauaucagcccuugaaggu

SEQ ID NO: 1129639 - RNA, 19 nt, Artificial Sequence
  Description of Artificial Sequence: Synthetic oligonucleotide
  Antisense strand to SEQ ID NO: 1129638
accuucaagggcugauauc

SEQ ID NO: 1129640 - RNA, 19 nt, Artificial Sequence
  Description of Artificial Sequence: Synthetic oligonucleotide
  Sense strand starting at position 3273 of SEQ ID NO: 916089
auaucagcccuugaaggua

SEQ ID NO: 1129641 - RNA, 19 nt, Artificial Sequence
  Description of Artificial Sequence: Synthetic oligonucleotide
  Antisense strand to SEQ ID NO: 1129640
uaccuucaagggcugauau

SEQ ID NO: 1129642 - RNA, 19 nt, Artificial Sequence
  Description of Artificial Sequence: Synthetic oligonucleotide
  Sense strand starting at position 3337 of SEQ ID NO: 916089
gugcaugugaaguauaauc

SEQ ID NO: 1129643 - RNA, 19 nt, Artificial Sequence
  Description of Artificial Sequence: Synthetic oligonucleotide
  Antisense strand to SEQ ID NO: 1129642
gauuauacuucacaugcac

SEQ ID NO: 1129644 - RNA, 19 nt, Artificial Sequence
  Description of Artificial Sequence: Synthetic oligonucleotide
  Sense strand starting at position 3346 of SEQ ID NO: 916089
aaguauaaucccugcugag

SEQ ID NO: 1129645 - RNA, 19 nt, Artificial Sequence
  Description of Artificial Sequence: Synthetic oligonucleotide
  Antisense strand to SEQ ID NO: 1129644
cucagcagggauuauacuu

SEQ ID NO: 1129646 - RNA, 19 nt, Artificial Sequence
  Description of Artificial Sequence: Synthetic oligonucleotide
  Sense strand starting at position 3356 of SEQ ID NO: 916089
ccugcugagccauagagaa

SEQ ID NO: 1129647 - RNA, 19 nt, Artificial Sequence
  Description of Artificial Sequence: Synthetic oligonucleotide
  Antisense strand to SEQ ID NO: 1129646
uucucuauggcucagcagg

SEQ ID NO: 1129648 - RNA, 19 nt, Artificial Sequence
  Description of Artificial Sequence: Synthetic oligonucleotide
  Sense strand starting at position 3378 of SEQ ID NO: 916089
aguugcacuugacugauaa

SEQ ID NO: 1129649 - RNA, 19 nt, Artificial Sequence
  Description of Artificial Sequence: Synthetic oligonucleotide
  Antisense strand to SEQ ID NO: 1129648
uuaucagucaagugcaacu

SEQ ID NO: 1129650 - RNA, 19 nt, Artificial Sequence
  Description of Artificial Sequence: Synthetic oligonucleotide
  Sense strand starting at position 3379 of SEQ ID NO: 916089
guugcacuugacugauaaa

SEQ ID NO: 1129651 - RNA, 19 nt, Artificial Sequence
  Description of Artificial Sequence: Synthetic oligonucleotide
  Antisense strand to SEQ ID NO: 1129650
uuuaucagucaagugcaac

SEQ ID NO: 1129652 - RNA, 19 nt, Artificial Sequence
  Description of Artificial Sequence: Synthetic oligonucleotide
  Sense strand starting at position 3422 of SEQ ID NO: 916089
gucugagaaauuggccaua

SEQ ID NO: 1129653 - RNA, 19 nt, Artificial Sequence
  Description of Artificial Sequence: Synthetic oligonucleotide
  Antisense strand to SEQ ID NO: 1129652
uauggccaauuucucagac

SEQ ID NO: 1129654 - RNA, 19 nt, Artificial Sequence
  Description of Artificial Sequence: Synthetic oligonucleotide
  Sense strand starting at position 3424 of SEQ ID NO: 916089
cugagaaauuggccauaca

SEQ ID NO: 1129655 - RNA, 19 nt, Artificial Sequence
  Description of Artificial Sequence: Synthetic oligonucleotide
  Antisense strand to SEQ ID NO: 1129654
uguauggccaauuucucag

SEQ ID NO: 1129656 - RNA, 19 nt, Artificial Sequence
  Description of Artificial Sequence: Synthetic oligonucleotide
  Sense strand starting at position 3519 of SEQ ID NO: 916089
agguauugucaccaagcua

SEQ ID NO: 1129657 - RNA, 19 nt, Artificial Sequence
  Description of Artificial Sequence: Synthetic oligonucleotide
  Antisense strand to SEQ ID NO: 1129656
uagcuuggugacaauaccu

SEQ ID NO: 1129658 - RNA, 19 nt, Artificial Sequence
  Description of Artificial Sequence: Synthetic oligonucleotide
  Sense strand starting at position 3883 of SEQ ID NO: 916089
ugggaagagcauuagcuua

SEQ ID NO: 1129659 - RNA, 19 nt, Artificial Sequence
  Description of Artificial Sequence: Synthetic oligonucleotide
  Antisense strand to SEQ ID NO: 1129658
uaagcuaaugcucuuccca

SEQ ID NO: 1129660 - RNA, 19 nt, Artificial Sequence
  Description of Artificial Sequence: Synthetic oligonucleotide
  Sense strand starting at position 37 of SEQ ID NO: 916090
gcuacaauccucuaauagg

SEQ ID NO: 1129661 - RNA, 19 nt, Artificial Sequence
  Description of Artificial Sequence: Synthetic oligonucleotide
  Antisense strand to SEQ ID NO: 1129660
ccuauuagaggauuguagc

SEQ ID NO: 1129662 - RNA, 19 nt, Artificial Sequence
  Description of Artificial Sequence: Synthetic oligonucleotide
  Sense strand starting at position 164 of SEQ ID NO: 916090
aguuuagagaguuaauagu

SEQ ID NO: 1129663 - RNA, 19 nt, Artificial Sequence
  Description of Artificial Sequence: Synthetic oligonucleotide
  Antisense strand to SEQ ID NO: 1129662
acuauuaacucucuaaacu

SEQ ID NO: 1129664 - RNA, 19 nt, Artificial Sequence
  Description of Artificial Sequence: Synthetic oligonucleotide
  Sense strand starting at position 170 of SEQ ID NO: 916090
gagaguuaauaguuuaaag

SEQ ID NO: 1129665 - RNA, 19 nt, Artificial Sequence
  Description of Artificial Sequence: Synthetic oligonucleotide
  Antisense strand to SEQ ID NO: 1129664
cuuuaaacuauuaacucuc

SEQ ID NO: 1129666 - RNA, 19 nt, Artificial Sequence
  Description of Artificial Sequence: Synthetic oligonucleotide
  Sense strand starting at position 349 of SEQ ID NO: 916090
uuacuuaaauagcugagau

SEQ ID NO: 1129667 - RNA, 19 nt, Artificial Sequence
  Description of Artificial Sequence: Synthetic oligonucleotide
  Antisense strand to SEQ ID NO: 1129666
aucucagcuauuuaaguaa

SEQ ID NO: 1129668 - RNA, 19 nt, Artificial Sequence
  Description of Artificial Sequence: Synthetic oligonucleotide
  Sense strand starting at position 392 of SEQ ID NO: 916090
ggcccuuuacuauaaaggu

SEQ ID NO: 1129669 - RNA, 19 nt, Artificial Sequence
  Description of Artificial Sequence: Synthetic oligonucleotide
  Antisense strand to SEQ ID NO: 1129668
accuuuauaguaaagggcc

SEQ ID NO: 1129670 - RNA, 19 nt, Artificial Sequence
  Description of Artificial Sequence: Synthetic oligonucleotide
  Sense strand starting at position 399 of SEQ ID NO: 916090
uacuauaaagguugaagua

SEQ ID NO: 1129671 - RNA, 19 nt, Artificial Sequence
  Description of Artificial Sequence: Synthetic oligonucleotide
  Antisense strand to SEQ ID NO: 1129670
uacuucaaccuuuauagua

SEQ ID NO: 1129672 - RNA, 19 nt, Artificial Sequence
  Description of Artificial Sequence: Synthetic oligonucleotide
  Sense strand starting at position 477 of SEQ ID NO: 916090
guuugcagucaauagaauu

SEQ ID NO: 1129673 - RNA, 19 nt, Artificial Sequence
  Description of Artificial Sequence: Synthetic oligonucleotide
  Antisense strand to SEQ ID NO: 1129672
aauucuauugacugcaaac

SEQ ID NO: 1129674 - RNA, 19 nt, Artificial Sequence
  Description of Artificial Sequence: Synthetic oligonucleotide
  Sense strand starting at position 484 of SEQ ID NO: 916090
gucaauagaauucguauga

SEQ ID NO: 1129675 - RNA, 19 nt, Artificial Sequence
  Description of Artificial Sequence: Synthetic oligonucleotide
  Antisense strand to SEQ ID NO: 1129674
ucauacgaauucuauugac

SEQ ID NO: 1129676 - RNA, 19 nt, Artificial Sequence
  Description of Artificial Sequence: Synthetic oligonucleotide
  Sense strand starting at position 485 of SEQ ID NO: 916090
ucaauagaauucguaugaa

SEQ ID NO: 1129677 - RNA, 19 nt, Artificial Sequence
  Description of Artificial Sequence: Synthetic oligonucleotide
  Antisense strand to SEQ ID NO: 1129676
uucauacgaauucuauuga

SEQ ID NO: 1129678 - RNA, 19 nt, Artificial Sequence
  Description of Artificial Sequence: Synthetic oligonucleotide
  Sense strand starting at position 801 of SEQ ID NO: 916090
aaugaugcccgucagauua

SEQ ID NO: 1129679 - RNA, 19 nt, Artificial Sequence
  Description of Artificial Sequence: Synthetic oligonucleotide
  Antisense strand to SEQ ID NO: 1129678
uaaucugacgggcaucauu

SEQ ID NO: 1129680 - RNA, 19 nt, Artificial Sequence
  Description of Artificial Sequence: Synthetic oligonucleotide
  Sense strand starting at position 809 of SEQ ID NO: 916090
ccgucagauuaaucauuaa

SEQ ID NO: 1129681 - RNA, 19 nt, Artificial Sequence
  Description of Artificial Sequence: Synthetic oligonucleotide
  Antisense strand to SEQ ID NO: 1129680
uuaaugauuaaucugacgg

SEQ ID NO: 1129682 - RNA, 19 nt, Artificial Sequence
  Description of Artificial Sequence: Synthetic oligonucleotide
  Sense strand starting at position 821 of SEQ ID NO: 916090
ucauuaaagugaucaaugg

SEQ ID NO: 1129683 - RNA, 19 nt, Artificial Sequence
  Description of Artificial Sequence: Synthetic oligonucleotide
  Antisense strand to SEQ ID NO: 1129682
ccauugaucacuuuaauga

SEQ ID NO: 1129684 - RNA, 19 nt, Artificial Sequence
  Description of Artificial Sequence: Synthetic oligonucleotide
  Sense strand starting at position 908 of SEQ ID NO: 916090
uggguuaggucauuaucau

SEQ ID NO: 1129685 - RNA, 19 nt, Artificial Sequence
  Description of Artificial Sequence: Synthetic oligonucleotide
  Antisense strand to SEQ ID NO: 1129684
augauaaugaccuaaccca

SEQ ID NO: 1129686 - RNA, 19 nt, Artificial Sequence
  Description of Artificial Sequence: Synthetic oligonucleotide
  Sense strand starting at position 909 of SEQ ID NO: 916090
ggguuaggucauuaucaug

SEQ ID NO: 1129687 - RNA, 19 nt, Artificial Sequence
  Description of Artificial Sequence: Synthetic oligonucleotide
  Antisense strand to SEQ ID NO: 1129686
caugauaaugaccuaaccc

SEQ ID NO: 1129688 - RNA, 19 nt, Artificial Sequence
  Description of Artificial Sequence: Synthetic oligonucleotide
  Sense strand starting at position 1020 of SEQ ID NO: 916090
auaaguacuaguuggguaa

SEQ ID NO: 1129689 - RNA, 19 nt, Artificial Sequence
  Description of Artificial Sequence: Synthetic oligonucleotide
  Antisense strand to SEQ ID NO: 1129688
uuacccaacuaguacuuau

SEQ ID NO: 1129690 - RNA, 19 nt, Artificial Sequence
  Description of Artificial Sequence: Synthetic oligonucleotide
  Sense strand starting at position 1021 of SEQ ID NO: 916090
uaaguacuaguuggguaau

SEQ ID NO: 1129691 - RNA, 19 nt, Artificial Sequence
  Description of Artificial Sequence: Synthetic oligonucleotide
  Antisense strand to SEQ ID NO: 1129690
auuacccaacuaguacuua

SEQ ID NO: 1129692 - RNA, 19 nt, Artificial Sequence
  Description of Artificial Sequence: Synthetic oligonucleotide
  Sense strand starting at position 1023 of SEQ ID NO: 916090
aguacuaguuggguaauua

SEQ ID NO: 1129693 - RNA, 19 nt, Artificial Sequence
  Description of Artificial Sequence: Synthetic oligonucleotide
  Antisense strand to SEQ ID NO: 1129692
uaauuacccaacuaguacu

SEQ ID NO: 1129694 - RNA, 19 nt, Artificial Sequence
  Description of Artificial Sequence: Synthetic oligonucleotide
  Sense strand starting at position 1027 of SEQ ID NO: 916090
cuaguuggguaauuauauc

SEQ ID NO: 1129695 - RNA, 19 nt, Artificial Sequence
  Description of Artificial Sequence: Synthetic oligonucleotide
  Antisense strand to SEQ ID NO: 1129694
gauauaauuacccaacuag

SEQ ID NO: 1129696 - RNA, 19 nt, Artificial Sequence
  Description of Artificial Sequence: Synthetic oligonucleotide
  Sense strand starting at position 1180 of SEQ ID NO: 916090
gucuuaugucccuacacac

SEQ ID NO: 1129697 - RNA, 19 nt, Artificial Sequence
  Description of Artificial Sequence: Synthetic oligonucleotide
  Antisense strand to SEQ ID NO: 1129696
guguguagggacauaagac

SEQ ID NO: 1129698 - RNA, 19 nt, Artificial Sequence
  Description of Artificial Sequence: Synthetic oligonucleotide
  Sense strand starting at position 1328 of SEQ ID NO: 916090
gugaaucaguuguuaaaca

SEQ ID NO: 1129699 - RNA, 19 nt, Artificial Sequence
  Description of Artificial Sequence: Synthetic oligonucleotide
  Antisense strand to SEQ ID NO: 1129698
uguuuaacaacugauucac

SEQ ID NO: 1129700 - RNA, 19 nt, Artificial Sequence
  Description of Artificial Sequence: Synthetic oligonucleotide
  Sense strand starting at position 1339 of SEQ ID NO: 916090
guuaaacauggccaguauu

SEQ ID NO: 1129701 - RNA, 19 nt, Artificial Sequence
  Description of Artificial Sequence: Synthetic oligonucleotide
  Antisense strand to SEQ ID NO: 1129700
aauacuggccauguuuaac

SEQ ID NO: 1129702 - RNA, 19 nt, Artificial Sequence
  Description of Artificial Sequence: Synthetic oligonucleotide
  Sense strand starting at position 1480 of SEQ ID NO: 916090
cuuauaucaggguggugaa

SEQ ID NO: 1129703 - RNA, 19 nt, Artificial Sequence
  Description of Artificial Sequence: Synthetic oligonucleotide
  Antisense strand to SEQ ID NO: 1129702
uucaccacccugauauaag

SEQ ID NO: 1129704 - RNA, 19 nt, Artificial Sequence
  Description of Artificial Sequence: Synthetic oligonucleotide
  Sense strand starting at position 1481 of SEQ ID NO: 916090
uuauaucaggguggugaaa

SEQ ID NO: 1129705 - RNA, 19 nt, Artificial Sequence
  Description of Artificial Sequence: Synthetic oligonucleotide
  Antisense strand to SEQ ID NO: 1129704
uuucaccacccugauauaa

SEQ ID NO: 1129706 - RNA, 19 nt, Artificial Sequence
  Description of Artificial Sequence: Synthetic oligonucleotide
  Sense strand starting at position 1558 of SEQ ID NO: 916090
guugaaacuggccauggua

SEQ ID NO: 1129707 - RNA, 19 nt, Artificial Sequence
  Description of Artificial Sequence: Synthetic oligonucleotide
  Antisense strand to SEQ ID NO: 1129706
uaccauggccaguuucaac

SEQ ID NO: 1129708 - RNA, 19 nt, Artificial Sequence
  Description of Artificial Sequence: Synthetic oligonucleotide
  Sense strand starting at position 1717 of SEQ ID NO: 916090
uagggucacccuugauaca

SEQ ID NO: 1129709 - RNA, 19 nt, Artificial Sequence
  Description of Artificial Sequence: Synthetic oligonucleotide
  Antisense strand to SEQ ID NO: 1129708
uguaucaagggugacccua

SEQ ID NO: 1129710 - RNA, 19 nt, Artificial Sequence
  Description of Artificial Sequence: Synthetic oligonucleotide
  Sense strand starting at position 2192 of SEQ ID NO: 916090
auuuguaaacaccguguaa

SEQ ID NO: 1129711 - RNA, 19 nt, Artificial Sequence
  Description of Artificial Sequence: Synthetic oligonucleotide
  Antisense strand to SEQ ID NO: 1129710
uuacacgguguuuacaaau

SEQ ID NO: 1129712 - RNA, 19 nt, Artificial Sequence
  Description of Artificial Sequence: Synthetic oligonucleotide
  Sense strand starting at position 2273 of SEQ ID NO: 916090
ucaugagugucacucaauc

SEQ ID NO: 1129713 - RNA, 19 nt, Artificial Sequence
  Description of Artificial Sequence: Synthetic oligonucleotide
  Antisense strand to SEQ ID NO: 1129712
gauugagugacacucauga

SEQ ID NO: 1129714 - RNA, 19 nt, Artificial Sequence
  Description of Artificial Sequence: Synthetic oligonucleotide
  Sense strand starting at position 2287 of SEQ ID NO: 916090
caaucauguguuuagguuu

SEQ ID NO: 1129715 - RNA, 19 nt, Artificial Sequence
  Description of Artificial Sequence: Synthetic oligonucleotide
  Antisense strand to SEQ ID NO: 1129714
aaaccuaaacacaugauug

SEQ ID NO: 1129716 - RNA, 19 nt, Artificial Sequence
  Description of Artificial Sequence: Synthetic oligonucleotide
  Sense strand starting at position 2312 of SEQ ID NO: 916090
cucuguaaccauugaguau

SEQ ID NO: 1129717 - RNA, 19 nt, Artificial Sequence
  Description of Artificial Sequence: Synthetic oligonucleotide
  Antisense strand to SEQ ID NO: 1129716
auacucaaugguuacagag

SEQ ID NO: 1129718 - RNA, 19 nt, Artificial Sequence
  Description of Artificial Sequence: Synthetic oligonucleotide
  Sense strand starting at position 2315 of SEQ ID NO: 916090
uguaaccauugaguauaau

SEQ ID NO: 1129719 - RNA, 19 nt, Artificial Sequence
  Description of Artificial Sequence: Synthetic oligonucleotide
  Antisense strand to SEQ ID NO: 1129718
auuauacucaaugguuaca

SEQ ID NO: 1129720 - RNA, 19 nt, Artificial Sequence
  Description of Artificial Sequence: Synthetic oligonucleotide
  Sense strand starting at position 2381 of SEQ ID NO: 916090
acuuuaauugaagguuaca

SEQ ID NO: 1129721 - RNA, 19 nt, Artificial Sequence
  Description of Artificial Sequence: Synthetic oligonucleotide
  Antisense strand to SEQ ID NO: 1129720
uguaaccuucaauuaaagu

SEQ ID NO: 1129722 - RNA, 19 nt, Artificial Sequence
  Description of Artificial Sequence: Synthetic oligonucleotide
  Sense strand starting at position 2500 of SEQ ID NO: 916090
cuguuaguggcuuaaggaa

SEQ ID NO: 1129723 - RNA, 19 nt, Artificial Sequence
  Description of Artificial Sequence: Synthetic oligonucleotide
  Antisense strand to SEQ ID NO: 1129722
uuccuuaagccacuaacag

SEQ ID NO: 1129724 - RNA, 19 nt, Artificial Sequence
  Description of Artificial Sequence: Synthetic oligonucleotide
  Sense strand starting at position 2810 of SEQ ID NO: 916090
augugauuacacugcuaaa

SEQ ID NO: 1129725 - RNA, 19 nt, Artificial Sequence
  Description of Artificial Sequence: Synthetic oligonucleotide
  Antisense strand to SEQ ID NO: 1129724
uuuagcaguguaaucacau

SEQ ID NO: 1129726 - RNA, 19 nt, Artificial Sequence
  Description of Artificial Sequence: Synthetic oligonucleotide
  Sense strand starting at position 3012 of SEQ ID NO: 916090
aagccagugcaaugacaua

SEQ ID NO: 1129727 - RNA, 19 nt, Artificial Sequence
  Description of Artificial Sequence: Synthetic oligonucleotide
  Antisense strand to SEQ ID NO: 1129726
uaugucauugcacuggcuu

SEQ ID NO: 1129728 - RNA, 19 nt, Artificial Sequence
  Description of Artificial Sequence: Synthetic oligonucleotide
  Sense strand starting at position 3017 of SEQ ID NO: 916090
agugcaaugacauaguugu

SEQ ID NO: 1129729 - RNA, 19 nt, Artificial Sequence
  Description of Artificial Sequence: Synthetic oligonucleotide
  Antisense strand to SEQ ID NO: 1129728
acaacuaugucauugcacu

SEQ ID NO: 1129730 - RNA, 19 nt, Artificial Sequence
  Description of Artificial Sequence: Synthetic oligonucleotide
  Sense strand starting at position 3136 of SEQ ID NO: 916090
ggccuuauacaggaguguu

SEQ ID NO: 1129731 - RNA, 19 nt, Artificial Sequence
  Description of Artificial Sequence: Synthetic oligonucleotide
  Antisense strand to SEQ ID NO: 1129730
aacacuccuguauaaggcc

SEQ ID NO: 1129732 - RNA, 19 nt, Artificial Sequence
  Description of Artificial Sequence: Synthetic oligonucleotide
  Sense strand starting at position 3221 of SEQ ID NO: 916090
aaugauauggccuagggca

SEQ ID NO: 1129733 - RNA, 19 nt, Artificial Sequence
  Description of Artificial Sequence: Synthetic oligonucleotide
  Antisense strand to SEQ ID NO: 1129732
ugcccuaggccauaucauu

SEQ ID NO: 1129734 - RNA, 19 nt, Artificial Sequence
  Description of Artificial Sequence: Synthetic oligonucleotide
  Sense strand starting at position 3234 of SEQ ID NO: 916090
agggcauuagagcacucau

SEQ ID NO: 1129735 - RNA, 19 nt, Artificial Sequence
  Description of Artificial Sequence: Synthetic oligonucleotide
  Antisense strand to SEQ ID NO: 1129734
augagugcucuaaugcccu

SEQ ID NO: 1129736 - RNA, 19 nt, Artificial Sequence
  Description of Artificial Sequence: Synthetic oligonucleotide
  Sense strand starting at position 3736 of SEQ ID NO: 916090
guauaaauauagucgaaca

SEQ ID NO: 1129737 - RNA, 19 nt, Artificial Sequence
  Description of Artificial Sequence: Synthetic oligonucleotide
  Antisense strand to SEQ ID NO: 1129736
uguucgacuauauuuauac

SEQ ID NO: 1129738 - RNA, 19 nt, Artificial Sequence
  Description of Artificial Sequence: Synthetic oligonucleotide
  Sense strand starting at position 3915 of SEQ ID NO: 916090
uuaccuggaccaugguaau

SEQ ID NO: 1129739 - RNA, 19 nt, Artificial Sequence
  Description of Artificial Sequence: Synthetic oligonucleotide
  Antisense strand to SEQ ID NO: 1129738
auuaccaugguccagguaa

SEQ ID NO: 1129740 - RNA, 19 nt, Artificial Sequence
  Description of Artificial Sequence: Synthetic oligonucleotide
  Sense strand starting at position 16 of SEQ ID NO: 916091
gaagguuugggccggagaa

SEQ ID NO: 1129741 - RNA, 19 nt, Artificial Sequence
  Description of Artificial Sequence: Synthetic oligonucleotide
  Antisense strand to SEQ ID NO: 1129740
uucuccggcccaaaccuuc

SEQ ID NO: 1129742 - RNA, 19 nt, Artificial Sequence
  Description of Artificial Sequence: Synthetic oligonucleotide
  Sense strand starting at position 58 of SEQ ID NO: 916091
gaaagaugcggcgaugaga

SEQ ID NO: 1129743 - RNA, 19 nt, Artificial Sequence
  Description of Artificial Sequence: Synthetic oligonucleotide
  Antisense strand to SEQ ID NO: 1129742
ucucaucgccgcaucuuuc

SEQ ID NO: 1129744 - RNA, 19 nt, Artificial Sequence
  Description of Artificial Sequence: Synthetic oligonucleotide
  Sense strand starting at position 78 of SEQ ID NO: 916091
agcucuaccgccuaauuaa

SEQ ID NO: 1129745 - RNA, 19 nt, Artificial Sequence
  Description of Artificial Sequence: Synthetic oligonucleotide
  Antisense strand to SEQ ID NO: 1129744
uuaauuaggcgguagagcu

SEQ ID NO: 1129746 - RNA, 19 nt, Artificial Sequence
  Description of Artificial Sequence: Synthetic oligonucleotide
  Sense strand starting at position 202 of SEQ ID NO: 916091
gggcgugugcuuguaaaug

SEQ ID NO: 1129747 - RNA, 19 nt, Artificial Sequence
  Description of Artificial Sequence: Synthetic oligonucleotide
  Antisense strand to SEQ ID NO: 1129746
cauuuacaagcacacgccc

SEQ ID NO: 1129748 - RNA, 19 nt, Artificial Sequence
  Description of Artificial Sequence: Synthetic oligonucleotide
  Sense strand starting at position 255 of SEQ ID NO: 916091
acguauagucacgcuguau

SEQ ID NO: 1129749 - RNA, 19 nt, Artificial Sequence
  Description of Artificial Sequence: Synthetic oligonucleotide
  Antisense strand to SEQ ID NO: 1129748
auacagcgugacuauacgu

SEQ ID NO: 1129750 - RNA, 19 nt, Artificial Sequence
  Description of Artificial Sequence: Synthetic oligonucleotide
  Sense strand starting at position 256 of SEQ ID NO: 916091
cguauagucacgcuguauu

SEQ ID NO: 1129751 - RNA, 19 nt, Artificial Sequence
  Description of Artificial Sequence: Synthetic oligonucleotide
  Antisense strand to SEQ ID NO: 1129750
aauacagcgugacuauacg

SEQ ID NO: 1129752 - RNA, 19 nt, Artificial Sequence
  Description of Artificial Sequence: Synthetic oligonucleotide
  Sense strand starting at position 430 of SEQ ID NO: 916091
acgcuaucccuggaaacag

SEQ ID NO: 1129753 - RNA, 19 nt, Artificial Sequence
  Description of Artificial Sequence: Synthetic oligonucleotide
  Antisense strand to SEQ ID NO: 1129752
cuguuuccagggauagcgu

SEQ ID NO: 1129754 - RNA, 19 nt, Artificial Sequence
  Description of Artificial Sequence: Synthetic oligonucleotide
  Sense strand starting at position 517 of SEQ ID NO: 916091
ucccucugcgauugauuua

SEQ ID NO: 1129755 - RNA, 19 nt, Artificial Sequence
  Description of Artificial Sequence: Synthetic oligonucleotide
  Antisense strand to SEQ ID NO: 1129754
uaaaucaaucgcagaggga

SEQ ID NO: 1129756 - RNA, 19 nt, Artificial Sequence
  Description of Artificial Sequence: Synthetic oligonucleotide
  Sense strand starting at position 740 of SEQ ID NO: 916091
aacuauaccgguugaaaua

SEQ ID NO: 1129757 - RNA, 19 nt, Artificial Sequence
  Description of Artificial Sequence: Synthetic oligonucleotide
  Antisense strand to SEQ ID NO: 1129756
uauuucaaccgguauaguu

SEQ ID NO: 1129758 - RNA, 19 nt, Artificial Sequence
  Description of Artificial Sequence: Synthetic oligonucleotide
  Sense strand starting at position 1019 of SEQ ID NO: 916091
uucuguacccuuuaucaga

SEQ ID NO: 1129759 - RNA, 19 nt, Artificial Sequence
  Description of Artificial Sequence: Synthetic oligonucleotide
  Antisense strand to SEQ ID NO: 1129758
ucugauaaaggguacagaa

SEQ ID NO: 1129760 - RNA, 19 nt, Artificial Sequence
  Description of Artificial Sequence: Synthetic oligonucleotide
  Sense strand starting at position 1325 of SEQ ID NO: 916091
accuaaguucgaugaguug

SEQ ID NO: 1129761 - RNA, 19 nt, Artificial Sequence
  Description of Artificial Sequence: Synthetic oligonucleotide
  Antisense strand to SEQ ID NO: 1129760
caacucaucgaacuuaggu

SEQ ID NO: 1129762 - RNA, 19 nt, Artificial Sequence
  Description of Artificial Sequence: Synthetic oligonucleotide
  Sense strand starting at position 1328 of SEQ ID NO: 916091
uaaguucgaugaguugaga

SEQ ID NO: 1129763 - RNA, 19 nt, Artificial Sequence
  Description of Artificial Sequence: Synthetic oligonucleotide
  Antisense strand to SEQ ID NO: 1129762
ucucaacucaucgaacuua

SEQ ID NO: 1129764 - RNA, 19 nt, Artificial Sequence
  Description of Artificial Sequence: Synthetic oligonucleotide
  Sense strand starting at position 1331 of SEQ ID NO: 916091
guucgaugaguugagaucu

SEQ ID NO: 1129765 - RNA, 19 nt, Artificial Sequence
  Description of Artificial Sequence: Synthetic oligonucleotide
  Antisense strand to SEQ ID NO: 1129764
agaucucaacucaucgaac

SEQ ID NO: 1129766 - RNA, 19 nt, Artificial Sequence
  Description of Artificial Sequence: Synthetic oligonucleotide
  Sense strand starting at position 1389 of SEQ ID NO: 916091
ugugcaugugcgccuaauu

SEQ ID NO: 1129767 - RNA, 19 nt, Artificial Sequence
  Description of Artificial Sequence: Synthetic oligonucleotide
  Antisense strand to SEQ ID NO: 1129766
aauuaggcgcacaugcaca

SEQ ID NO: 1129768 - RNA, 19 nt, Artificial Sequence
  Description of Artificial Sequence: Synthetic oligonucleotide
  Sense strand starting at position 1390 of SEQ ID NO: 916091
gugcaugugcgccuaauua

SEQ ID NO: 1129769 - RNA, 19 nt, Artificial Sequence
  Description of Artificial Sequence: Synthetic oligonucleotide
  Antisense strand to SEQ ID NO: 1129768
uaauuaggcgcacaugcac

SEQ ID NO: 1129770 - RNA, 19 nt, Artificial Sequence
  Description of Artificial Sequence: Synthetic oligonucleotide
  Sense strand starting at position 1430 of SEQ ID NO: 916091
ccauuuauaucugugcgca

SEQ ID NO: 1129771 - RNA, 19 nt, Artificial Sequence
  Description of Artificial Sequence: Synthetic oligonucleotide
  Antisense strand to SEQ ID NO: 1129770
ugcgcacagauauaaaugg

SEQ ID NO: 1129772 - RNA, 19 nt, Artificial Sequence
  Description of Artificial Sequence: Synthetic oligonucleotide
  Sense strand starting at position 1431 of SEQ ID NO: 916091
cauuuauaucugugcgcaa

SEQ ID NO: 1129773 - RNA, 19 nt, Artificial Sequence
  Description of Artificial Sequence: Synthetic oligonucleotide
  Antisense strand to SEQ ID NO: 1129772
uugcgcacagauauaaaug

SEQ ID NO: 1129774 - RNA, 19 nt, Artificial Sequence
  Description of Artificial Sequence: Synthetic oligonucleotide
  Sense strand starting at position 1432 of SEQ ID NO: 916091
auuuauaucugugcgcaaa

SEQ ID NO: 1129775 - RNA, 19 nt, Artificial Sequence
  Description of Artificial Sequence: Synthetic oligonucleotide
  Antisense strand to SEQ ID NO: 1129774
uuugcgcacagauauaaau

SEQ ID NO: 1129776 - RNA, 19 nt, Artificial Sequence
  Description of Artificial Sequence: Synthetic oligonucleotide
  Sense strand starting at position 1478 of SEQ ID NO: 916091
caguauucuagcgcaacgu

SEQ ID NO: 1129777 - RNA, 19 nt, Artificial Sequence
  Description of Artificial Sequence: Synthetic oligonucleotide
  Antisense strand to SEQ ID NO: 1129776
acguugcgcuagaauacug

SEQ ID NO: 1129778 - RNA, 19 nt, Artificial Sequence
  Description of Artificial Sequence: Synthetic oligonucleotide
  Sense strand starting at position 1547 of SEQ ID NO: 916091
agaguccuugauuggcaga

SEQ ID NO: 1129779 - RNA, 19 nt, Artificial Sequence
  Description of Artificial Sequence: Synthetic oligonucleotide
  Antisense strand to SEQ ID NO: 1129778
ucugccaaucaaggacucu

SEQ ID NO: 1129780 - RNA, 19 nt, Artificial Sequence
  Description of Artificial Sequence: Synthetic oligonucleotide
  Sense strand starting at position 1552 of SEQ ID NO: 916091
ccuugauuggcagaacucu

SEQ ID NO: 1129781 - RNA, 19 nt, Artificial Sequence
  Description of Artificial Sequence: Synthetic oligonucleotide
  Antisense strand to SEQ ID NO: 1129780
agaguucugccaaucaagg

SEQ ID NO: 1129782 - RNA, 19 nt, Artificial Sequence
  Description of Artificial Sequence: Synthetic oligonucleotide
  Sense strand starting at position 1561 of SEQ ID NO: 916091
gcagaacucuucuugguga

SEQ ID NO: 1129783 - RNA, 19 nt, Artificial Sequence
  Description of Artificial Sequence: Synthetic oligonucleotide
  Antisense strand to SEQ ID NO: 1129782
ucaccaagaagaguucugc

SEQ ID NO: 1129784 - RNA, 19 nt, Artificial Sequence
  Description of Artificial Sequence: Synthetic oligonucleotide
  Sense strand starting at position 1563 of SEQ ID NO: 916091
agaacucuucuuggugaac

SEQ ID NO: 1129785 - RNA, 19 nt, Artificial Sequence
  Description of Artificial Sequence: Synthetic oligonucleotide
  Antisense strand to SEQ ID NO: 1129784
guucaccaagaagaguucu

SEQ ID NO: 1129786 - RNA, 19 nt, Artificial Sequence
  Description of Artificial Sequence: Synthetic oligonucleotide
  Sense strand starting at position 1564 of SEQ ID NO: 916091
gaacucuucuuggugaacu

SEQ ID NO: 1129787 - RNA, 19 nt, Artificial Sequence
  Description of Artificial Sequence: Synthetic oligonucleotide
  Antisense strand to SEQ ID NO: 1129786
aguucaccaagaagaguuc

SEQ ID NO: 1129788 - RNA, 19 nt, Artificial Sequence
  Description of Artificial Sequence: Synthetic oligonucleotide
  Sense strand starting at position 1586 of SEQ ID NO: 916091
gcguguccugugccuaagu

SEQ ID NO: 1129789 - RNA, 19 nt, Artificial Sequence
  Description of Artificial Sequence: Synthetic oligonucleotide
  Antisense strand to SEQ ID NO: 1129788
acuuaggcacaggacacgc

SEQ ID NO: 1129790 - RNA, 19 nt, Artificial Sequence
  Description of Artificial Sequence: Synthetic oligonucleotide
  Sense strand starting at position 2300 of SEQ ID NO: 916091
cucggaguucugccggagu

SEQ ID NO: 1129791 - RNA, 19 nt, Artificial Sequence
  Description of Artificial Sequence: Synthetic oligonucleotide
  Antisense strand to SEQ ID NO: 1129790
acuccggcagaacuccgag

SEQ ID NO: 1129792 - RNA, 19 nt, Artificial Sequence
  Description of Artificial Sequence: Synthetic oligonucleotide
  Sense strand starting at position 2487 of SEQ ID NO: 916091
guccuaaaucuuggagaca

SEQ ID NO: 1129793 - RNA, 19 nt, Artificial Sequence
  Description of Artificial Sequence: Synthetic oligonucleotide
  Antisense strand to SEQ ID NO: 1129792
ugucuccaagauuuaggac

SEQ ID NO: 1129794 - RNA, 19 nt, Artificial Sequence
  Description of Artificial Sequence: Synthetic oligonucleotide
  Sense strand starting at position 2639 of SEQ ID NO: 916091
gaaggcuuccucuggagca

SEQ ID NO: 1129795 - RNA, 19 nt, Artificial Sequence
  Description of Artificial Sequence: Synthetic oligonucleotide
  Antisense strand to SEQ ID NO: 1129794
ugcuccagaggaagccuuc

SEQ ID NO: 1129796 - RNA, 19 nt, Artificial Sequence
  Description of Artificial Sequence: Synthetic oligonucleotide
  Sense strand starting at position 2715 of SEQ ID NO: 916091
gaaggagaccugugugaag

SEQ ID NO: 1129797 - RNA, 19 nt, Artificial Sequence
  Description of Artificial Sequence: Synthetic oligonucleotide
  Antisense strand to SEQ ID NO: 1129796
cuucacacaggucuccuuc

SEQ ID NO: 1129798 - RNA, 19 nt, Artificial Sequence
  Description of Artificial Sequence: Synthetic oligonucleotide
  Sense strand starting at position 3409 of SEQ ID NO: 916091
gacacuuguccugguagag

SEQ ID NO: 1129799 - RNA, 19 nt, Artificial Sequence
  Description of Artificial Sequence: Synthetic oligonucleotide
  Antisense strand to SEQ ID NO: 1129798
cucuaccaggacaaguguc

SEQ ID NO: 1129800 - RNA, 19 nt, Artificial Sequence
  Description of Artificial Sequence: Synthetic oligonucleotide
  Sense strand starting at position 3439 of SEQ ID NO: 916091
aagugcucugguuggaaag

SEQ ID NO: 1129801 - RNA, 19 nt, Artificial Sequence
  Description of Artificial Sequence: Synthetic oligonucleotide
  Antisense strand to SEQ ID NO: 1129800
cuuuccaaccagagcacuu

SEQ ID NO: 1129802 - RNA, 19 nt, Artificial Sequence
  Description of Artificial Sequence: Synthetic oligonucleotide
  Sense strand starting at position 3466 of SEQ ID NO: 916091
cucauuguugaaggaaaug

SEQ ID NO: 1129803 - RNA, 19 nt, Artificial Sequence
  Description of Artificial Sequence: Synthetic oligonucleotide
  Antisense strand to SEQ ID NO: 1129802
cauuuccuucaacaaugag

SEQ ID NO: 1129804 - RNA, 19 nt, Artificial Sequence
  Description of Artificial Sequence: Synthetic oligonucleotide
  Sense strand starting at position 3623 of SEQ ID NO: 916091
aggcccaaucucugcuaga

SEQ ID NO: 1129805 - RNA, 19 nt, Artificial Sequence
  Description of Artificial Sequence: Synthetic oligonucleotide
  Antisense strand to SEQ ID NO: 1129804
ucuagcagagauugggccu

SEQ ID NO: 1129806 - RNA, 19 nt, Artificial Sequence
  Description of Artificial Sequence: Synthetic oligonucleotide
  Sense strand starting at position 3624 of SEQ ID NO: 916091
ggcccaaucucugcuagaa

SEQ ID NO: 1129807 - RNA, 19 nt, Artificial Sequence
  Description of Artificial Sequence: Synthetic oligonucleotide
  Antisense strand to SEQ ID NO: 1129806
uucuagcagagauugggcc

SEQ ID NO: 1129808 - RNA, 19 nt, Artificial Sequence
  Description of Artificial Sequence: Synthetic oligonucleotide
  Sense strand starting at position 3640 of SEQ ID NO: 916091
gaagaaagcuggucucuug

SEQ ID NO: 1129809 - RNA, 19 nt, Artificial Sequence
  Description of Artificial Sequence: Synthetic oligonucleotide
  Antisense strand to SEQ ID NO: 1129808
caagagaccagcuuucuuc

SEQ ID NO: 1129810 - RNA, 19 nt, Artificial Sequence
  Description of Artificial Sequence: Synthetic oligonucleotide
  Sense strand starting at position 3772 of SEQ ID NO: 916091
ugagaagccuucucugaua

SEQ ID NO: 1129811 - RNA, 19 nt, Artificial Sequence
  Description of Artificial Sequence: Synthetic oligonucleotide
  Antisense strand to SEQ ID NO: 1129810
uaucagagaaggcuucuca

SEQ ID NO: 1129812 - RNA, 19 nt, Artificial Sequence
  Description of Artificial Sequence: Synthetic oligonucleotide
  Sense strand starting at position 3883 of SEQ ID NO: 916091
ccuuauauccauuggucuu

SEQ ID NO: 1129813 - RNA, 19 nt, Artificial Sequence
  Description of Artificial Sequence: Synthetic oligonucleotide
  Antisense strand to SEQ ID NO: 1129812
aagaccaauggauauaagg

SEQ ID NO: 1129814 - RNA, 19 nt, Artificial Sequence
  Description of Artificial Sequence: Synthetic oligonucleotide
  Sense strand starting at position 3890 of SEQ ID NO: 916091
uccauuggucuuuaucuca

SEQ ID NO: 1129815 - RNA, 19 nt, Artificial Sequence
  Description of Artificial Sequence: Synthetic oligonucleotide
  Antisense strand to SEQ ID NO: 1129814
ugagauaaagaccaaugga

SEQ ID NO: 1129816 - RNA, 19 nt, Artificial Sequence
  Description of Artificial Sequence: Synthetic oligonucleotide
  Sense strand starting at position 3907 of SEQ ID NO: 916091
caucaaugagcuuggaaga

SEQ ID NO: 1129817 - RNA, 19 nt, Artificial Sequence
  Description of Artificial Sequence: Synthetic oligonucleotide
  Antisense strand to SEQ ID NO: 1129816
ucuuccaagcucauugaug

SEQ ID NO: 1129818 - RNA, 19 nt, Artificial Sequence
  Description of Artificial Sequence: Synthetic oligonucleotide
  Sense strand starting at position 3908 of SEQ ID NO: 916091
aucaaugagcuuggaagau

SEQ ID NO: 1129819 - RNA, 19 nt, Artificial Sequence
  Description of Artificial Sequence: Synthetic oligonucleotide
  Antisense strand to SEQ ID NO: 1129818
aucuuccaagcucauugau

SEQ ID NO: 1129820 - RNA, 19 nt, Artificial Sequence
  Description of Artificial Sequence: Synthetic oligonucleotide
  Sense strand starting at position 275 of SEQ ID NO: 916092
aggauucugccauaucggu

SEQ ID NO: 1129821 - RNA, 19 nt, Artificial Sequence
  Description of Artificial Sequence: Synthetic oligonucleotide
  Antisense strand to SEQ ID NO: 1129820
accgauauggcagaauccu

SEQ ID NO: 1129822 - RNA, 19 nt, Artificial Sequence
  Description of Artificial Sequence: Synthetic oligonucleotide
  Sense strand starting at position 396 of SEQ ID NO: 916092
uuugauugauacucuuuag

SEQ ID NO: 1129823 - RNA, 19 nt, Artificial Sequence
  Description of Artificial Sequence: Synthetic oligonucleotide
  Antisense strand to SEQ ID NO: 1129822
cuaaagaguaucaaucaaa

SEQ ID NO: 1129824 - RNA, 19 nt, Artificial Sequence
  Description of Artificial Sequence: Synthetic oligonucleotide
  Sense strand starting at position 507 of SEQ ID NO: 916092
agcucaguuuacccacaua

SEQ ID NO: 1129825 - RNA, 19 nt, Artificial Sequence
  Description of Artificial Sequence: Synthetic oligonucleotide
  Antisense strand to SEQ ID NO: 1129824
uauguggguaaacugagcu

SEQ ID NO: 1129826 - RNA, 19 nt, Artificial Sequence
  Description of Artificial Sequence: Synthetic oligonucleotide
  Sense strand starting at position 548 of SEQ ID NO: 916092
caggcugccuccucugauu

SEQ ID NO: 1129827 - RNA, 19 nt, Artificial Sequence
  Description of Artificial Sequence: Synthetic oligonucleotide
  Antisense strand to SEQ ID NO: 1129826
aaucagaggaggcagccug

SEQ ID NO: 1129828 - RNA, 19 nt, Artificial Sequence
  Description of Artificial Sequence: Synthetic oligonucleotide
  Sense strand starting at position 553 of SEQ ID NO: 916092
ugccuccucugauuguaaa

SEQ ID NO: 1129829 - RNA, 19 nt, Artificial Sequence
  Description of Artificial Sequence: Synthetic oligonucleotide
  Antisense strand to SEQ ID NO: 1129828
uuuacaaucagaggaggca

SEQ ID NO: 1129830 - RNA, 19 nt, Artificial Sequence
  Description of Artificial Sequence: Synthetic oligonucleotide
  Sense strand starting at position 554 of SEQ ID NO: 916092
gccuccucugauuguaaau

SEQ ID NO: 1129831 - RNA, 19 nt, Artificial Sequence
  Description of Artificial Sequence: Synthetic oligonucleotide
  Antisense strand to SEQ ID NO: 1129830
auuuacaaucagaggaggc

SEQ ID NO: 1129832 - RNA, 19 nt, Artificial Sequence
  Description of Artificial Sequence: Synthetic oligonucleotide
  Sense strand starting at position 625 of SEQ ID NO: 916092
ugccaugugucucugggaa

SEQ ID NO: 1129833 - RNA, 19 nt, Artificial Sequence
  Description of Artificial Sequence: Synthetic oligonucleotide
  Antisense strand to SEQ ID NO: 1129832
uucccagagacacauggca

SEQ ID NO: 1129834 - RNA, 19 nt, Artificial Sequence
  Description of Artificial Sequence: Synthetic oligonucleotide
  Sense strand starting at position 1154 of SEQ ID NO: 916092
ugaccugaucaaggugaca

SEQ ID NO: 1129835 - RNA, 19 nt, Artificial Sequence
  Description of Artificial Sequence: Synthetic oligonucleotide
  Antisense strand to SEQ ID NO: 1129834
ugucaccuugaucagguca

SEQ ID NO: 1129836 - RNA, 19 nt, Artificial Sequence
  Description of Artificial Sequence: Synthetic oligonucleotide
  Sense strand starting at position 1156 of SEQ ID NO: 916092
accugaucaaggugacaug

SEQ ID NO: 1129837 - RNA, 19 nt, Artificial Sequence
  Description of Artificial Sequence: Synthetic oligonucleotide
  Antisense strand to SEQ ID NO: 1129836
caugucaccuugaucaggu

SEQ ID NO: 1129838 - RNA, 19 nt, Artificial Sequence
  Description of Artificial Sequence: Synthetic oligonucleotide
  Sense strand starting at position 1159 of SEQ ID NO: 916092
ugaucaaggugacaugaga

SEQ ID NO: 1129839 - RNA, 19 nt, Artificial Sequence
  Description of Artificial Sequence: Synthetic oligonucleotide
  Antisense strand to SEQ ID NO: 1129838
ucucaugucaccuugauca

SEQ ID NO: 1129840 - RNA, 19 nt, Artificial Sequence
  Description of Artificial Sequence: Synthetic oligonucleotide
  Sense strand starting at position 1261 of SEQ ID NO: 916092
aauagugggcuuuacagau

SEQ ID NO: 1129841 - RNA, 19 nt, Artificial Sequence
  Description of Artificial Sequence: Synthetic oligonucleotide
  Antisense strand to SEQ ID NO: 1129840
aucuguaaagcccacuauu

SEQ ID NO: 1129842 - RNA, 19 nt, Artificial Sequence
  Description of Artificial Sequence: Synthetic oligonucleotide
  Sense strand starting at position 1316 of SEQ ID NO: 916092
cugguuacuucugcaaguu

SEQ ID NO: 1129843 - RNA, 19 nt, Artificial Sequence
  Description of Artificial Sequence: Synthetic oligonucleotide
  Antisense strand to SEQ ID NO: 1129842
aacuugcagaaguaaccag

SEQ ID NO: 1129844 - RNA, 19 nt, Artificial Sequence
  Description of Artificial Sequence: Synthetic oligonucleotide
  Sense strand starting at position 1317 of SEQ ID NO: 916092
ugguuacuucugcaaguug

SEQ ID NO: 1129845 - RNA, 19 nt, Artificial Sequence
  Description of Artificial Sequence: Synthetic oligonucleotide
  Antisense strand to SEQ ID NO: 1129844
caacuugcagaaguaacca

SEQ ID NO: 1129846 - RNA, 19 nt, Artificial Sequence
  Description of Artificial Sequence: Synthetic oligonucleotide
  Sense strand starting at position 1325 of SEQ ID NO: 916092
ucugcaaguuggcauuuaa

SEQ ID NO: 1129847 - RNA, 19 nt, Artificial Sequence
  Description of Artificial Sequence: Synthetic oligonucleotide
  Antisense strand to SEQ ID NO: 1129846
uuaaaugccaacuugcaga

SEQ ID NO: 1129848 - RNA, 19 nt, Artificial Sequence
  Description of Artificial Sequence: Synthetic oligonucleotide
  Sense strand starting at position 1365 of SEQ ID NO: 916092
acugaaugguuauuggauc

SEQ ID NO: 1129849 - RNA, 19 nt, Artificial Sequence
  Description of Artificial Sequence: Synthetic oligonucleotide
  Antisense strand to SEQ ID NO: 1129848
gauccaauaaccauucagu

SEQ ID NO: 1129850 - RNA, 19 nt, Artificial Sequence
  Description of Artificial Sequence: Synthetic oligonucleotide
  Sense strand starting at position 1431 of SEQ ID NO: 916092
cgcuucucugagggcuauu

SEQ ID NO: 1129851 - RNA, 19 nt, Artificial Sequence
  Description of Artificial Sequence: Synthetic oligonucleotide
  Antisense strand to SEQ ID NO: 1129850
aauagcccucagagaagcg

SEQ ID NO: 1129852 - RNA, 19 nt, Artificial Sequence
  Description of Artificial Sequence: Synthetic oligonucleotide
  Sense strand starting at position 2345 of SEQ ID NO: 916092
caggcauucuacucuucga

SEQ ID NO: 1129853 - RNA, 19 nt, Artificial Sequence
  Description of Artificial Sequence: Synthetic oligonucleotide
  Antisense strand to SEQ ID NO: 1129852
ucgaagaguagaaugccug

SEQ ID NO: 1129854 - RNA, 19 nt, Artificial Sequence
  Description of Artificial Sequence: Synthetic oligonucleotide
  Sense strand starting at position 2417 of SEQ ID NO: 916092
aaacuuuauuaguggaaga

SEQ ID NO: 1129855 - RNA, 19 nt, Artificial Sequence
  Description of Artificial Sequence: Synthetic oligonucleotide
  Antisense strand to SEQ ID NO: 1129854
ucuuccacuaauaaaguuu

SEQ ID NO: 1129856 - RNA, 19 nt, Artificial Sequence
  Description of Artificial Sequence: Synthetic oligonucleotide
  Sense strand starting at position 2438 of SEQ ID NO: 916092
gccagcuauuaacuacaga

SEQ ID NO: 1129857 - RNA, 19 nt, Artificial Sequence
  Description of Artificial Sequence: Synthetic oligonucleotide
  Antisense strand to SEQ ID NO: 1129856
ucuguaguuaauagcuggc

SEQ ID NO: 1129858 - RNA, 19 nt, Artificial Sequence
  Description of Artificial Sequence: Synthetic oligonucleotide
  Sense strand starting at position 2484 of SEQ ID NO: 916092
ccauucugugucuguucua

SEQ ID NO: 1129859 - RNA, 19 nt, Artificial Sequence
  Description of Artificial Sequence: Synthetic oligonucleotide
  Antisense strand to SEQ ID NO: 1129858
uagaacagacacagaaugg

SEQ ID NO: 1129860 - RNA, 19 nt, Artificial Sequence
  Description of Artificial Sequence: Synthetic oligonucleotide
  Sense strand starting at position 2643 of SEQ ID NO: 916092
gaaguuuagcagcagagau

SEQ ID NO: 1129861 - RNA, 19 nt, Artificial Sequence
  Description of Artificial Sequence: Synthetic oligonucleotide
  Antisense strand to SEQ ID NO: 1129860
aucucugcugcuaaacuuc

SEQ ID NO: 1129862 - RNA, 19 nt, Artificial Sequence
  Description of Artificial Sequence: Synthetic oligonucleotide
  Sense strand starting at position 2656 of SEQ ID NO: 916092
agagaucaccuaggugguu

SEQ ID NO: 1129863 - RNA, 19 nt, Artificial Sequence
  Description of Artificial Sequence: Synthetic oligonucleotide
  Antisense strand to SEQ ID NO: 1129862
aaccaccuaggugaucucu

SEQ ID NO: 1129864 - RNA, 19 nt, Artificial Sequence
  Description of Artificial Sequence: Synthetic oligonucleotide
  Sense strand starting at position 2752 of SEQ ID NO: 916092
gugcuuacuauuggucaga

SEQ ID NO: 1129865 - RNA, 19 nt, Artificial Sequence
  Description of Artificial Sequence: Synthetic oligonucleotide
  Antisense strand to SEQ ID NO: 1129864
ucugaccaauaguaagcac

SEQ ID NO: 1129866 - RNA, 19 nt, Artificial Sequence
  Description of Artificial Sequence: Synthetic oligonucleotide
  Sense strand starting at position 2754 of SEQ ID NO: 916092
gcuuacuauuggucagaca

SEQ ID NO: 1129867 - RNA, 19 nt, Artificial Sequence
  Description of Artificial Sequence: Synthetic oligonucleotide
  Antisense strand to SEQ ID NO: 1129866
ugucugaccaauaguaagc

SEQ ID NO: 1129868 - RNA, 19 nt, Artificial Sequence
  Description of Artificial Sequence: Synthetic oligonucleotide
  Sense strand starting at position 2755 of SEQ ID NO: 916092
cuuacuauuggucagacau

SEQ ID NO: 1129869 - RNA, 19 nt, Artificial Sequence
  Description of Artificial Sequence: Synthetic oligonucleotide
  Antisense strand to SEQ ID NO: 1129868
augucugaccaauaguaag

SEQ ID NO: 1129870 - RNA, 19 nt, Artificial Sequence
  Description of Artificial Sequence: Synthetic oligonucleotide
  Sense strand starting at position 2789 of SEQ ID NO: 916092
uccguugaauccucacaaa

SEQ ID NO: 1129871 - RNA, 19 nt, Artificial Sequence
  Description of Artificial Sequence: Synthetic oligonucleotide
  Antisense strand to SEQ ID NO: 1129870
uuugugaggauucaacgga

SEQ ID NO: 1129872 - RNA, 19 nt, Artificial Sequence
  Description of Artificial Sequence: Synthetic oligonucleotide
  Sense strand starting at position 2971 of SEQ ID NO: 916092
aaggauuuaucuggagcuu

SEQ ID NO: 1129873 - RNA, 19 nt, Artificial Sequence
  Description of Artificial Sequence: Synthetic oligonucleotide
  Antisense strand to SEQ ID NO: 1129872
aagcuccagauaaauccuu

SEQ ID NO: 1129874 - RNA, 19 nt, Artificial Sequence
  Description of Artificial Sequence: Synthetic oligonucleotide
  Sense strand starting at position 3118 of SEQ ID NO: 916092
caucuuggccuuuguguua

SEQ ID NO: 1129875 - RNA, 19 nt, Artificial Sequence
  Description of Artificial Sequence: Synthetic oligonucleotide
  Antisense strand to SEQ ID NO: 1129874
uaacacaaaggccaagaug

SEQ ID NO: 1129876 - RNA, 19 nt, Artificial Sequence
  Description of Artificial Sequence: Synthetic oligonucleotide
  Sense strand starting at position 3130 of SEQ ID NO: 916092
uguguuaagccaugagcau

SEQ ID NO: 1129877 - RNA, 19 nt, Artificial Sequence
  Description of Artificial Sequence: Synthetic oligonucleotide
  Antisense strand to SEQ ID NO: 1129876
augcucauggcuuaacaca

SEQ ID NO: 1129878 - RNA, 19 nt, Artificial Sequence
  Description of Artificial Sequence: Synthetic oligonucleotide
  Sense strand starting at position 3131 of SEQ ID NO: 916092
guguuaagccaugagcauu

SEQ ID NO: 1129879 - RNA, 19 nt, Artificial Sequence
  Description of Artificial Sequence: Synthetic oligonucleotide
  Antisense strand to SEQ ID NO: 1129878
aaugcucauggcuuaacac

SEQ ID NO: 1129880 - RNA, 19 nt, Artificial Sequence
  Description of Artificial Sequence: Synthetic oligonucleotide
  Sense strand starting at position 3137 of SEQ ID NO: 916092
agccaugagcauuacuuaa

SEQ ID NO: 1129881 - RNA, 19 nt, Artificial Sequence
  Description of Artificial Sequence: Synthetic oligonucleotide
  Antisense strand to SEQ ID NO: 1129880
uuaaguaaugcucauggcu

SEQ ID NO: 1129882 - RNA, 19 nt, Artificial Sequence
  Description of Artificial Sequence: Synthetic oligonucleotide
  Sense strand starting at position 3169 of SEQ ID NO: 916092
acgaucuaguaauuguuau

SEQ ID NO: 1129883 - RNA, 19 nt, Artificial Sequence
  Description of Artificial Sequence: Synthetic oligonucleotide
  Antisense strand to SEQ ID NO: 1129882
auaacaauuacuagaucgu

SEQ ID NO: 1129884 - RNA, 19 nt, Artificial Sequence
  Description of Artificial Sequence: Synthetic oligonucleotide
  Sense strand starting at position 3176 of SEQ ID NO: 916092
aguaauuguuaucuccacu

SEQ ID NO: 1129885 - RNA, 19 nt, Artificial Sequence
  Description of Artificial Sequence: Synthetic oligonucleotide
  Antisense strand to SEQ ID NO: 1129884
aguggagauaacaauuacu

SEQ ID NO: 1129886 - RNA, 19 nt, Artificial Sequence
  Description of Artificial Sequence: Synthetic oligonucleotide
  Sense strand starting at position 3233 of SEQ ID NO: 916092
cuuguaaguaauggaaaga

SEQ ID NO: 1129887 - RNA, 19 nt, Artificial Sequence
  Description of Artificial Sequence: Synthetic oligonucleotide
  Antisense strand to SEQ ID NO: 1129886
ucuuuccauuacuuacaag

SEQ ID NO: 1129888 - RNA, 19 nt, Artificial Sequence
  Description of Artificial Sequence: Synthetic oligonucleotide
  Sense strand starting at position 3285 of SEQ ID NO: 916092
uaggacucguagucuguua

SEQ ID NO: 1129889 - RNA, 19 nt, Artificial Sequence
  Description of Artificial Sequence: Synthetic oligonucleotide
  Antisense strand to SEQ ID NO: 1129888
uaacagacuacgaguccua

SEQ ID NO: 1129890 - RNA, 19 nt, Artificial Sequence
  Description of Artificial Sequence: Synthetic oligonucleotide
  Sense strand starting at position 3296 of SEQ ID NO: 916092
gucuguuagggcuaaagga

SEQ ID NO: 1129891 - RNA, 19 nt, Artificial Sequence
  Description of Artificial Sequence: Synthetic oligonucleotide
  Antisense strand to SEQ ID NO: 1129890
uccuuuagcccuaacagac

SEQ ID NO: 1129892 - RNA, 19 nt, Artificial Sequence
  Description of Artificial Sequence: Synthetic oligonucleotide
  Sense strand starting at position 3324 of SEQ ID NO: 916092
gcaguuuaugguccgcaua

SEQ ID NO: 1129893 - RNA, 19 nt, Artificial Sequence
  Description of Artificial Sequence: Synthetic oligonucleotide
  Antisense strand to SEQ ID NO: 1129892
uaugcggaccauaaacugc

SEQ ID NO: 1129894 - RNA, 19 nt, Artificial Sequence
  Description of Artificial Sequence: Synthetic oligonucleotide
  Sense strand starting at position 3325 of SEQ ID NO: 916092
caguuuaugguccgcauau

SEQ ID NO: 1129895 - RNA, 19 nt, Artificial Sequence
  Description of Artificial Sequence: Synthetic oligonucleotide
  Antisense strand to SEQ ID NO: 1129894
auaugcggaccauaaacug

SEQ ID NO: 1129896 - RNA, 19 nt, Artificial Sequence
  Description of Artificial Sequence: Synthetic oligonucleotide
  Sense strand starting at position 3326 of SEQ ID NO: 916092
aguuuaugguccgcauauu

SEQ ID NO: 1129897 - RNA, 19 nt, Artificial Sequence
  Description of Artificial Sequence: Synthetic oligonucleotide
  Antisense strand to SEQ ID NO: 1129896
aauaugcggaccauaaacu

SEQ ID NO: 1129898 - RNA, 19 nt, Artificial Sequence
  Description of Artificial Sequence: Synthetic oligonucleotide
  Sense strand starting at position 3327 of SEQ ID NO: 916092
guuuaugguccgcauauuu

SEQ ID NO: 1129899 - RNA, 19 nt, Artificial Sequence
  Description of Artificial Sequence: Synthetic oligonucleotide
  Antisense strand to SEQ ID NO: 1129898
aaauaugcggaccauaaac

SEQ ID NO: 1129900 - RNA, 19 nt, Artificial Sequence
  Description of Artificial Sequence: Synthetic oligonucleotide
  Sense strand starting at position 97 of SEQ ID NO: 916093
uuugauugauacucuuuag

SEQ ID NO: 1129901 - RNA, 19 nt, Artificial Sequence
  Description of Artificial Sequence: Synthetic oligonucleotide
  Antisense strand to SEQ ID NO: 1129900
cuaaagaguaucaaucaaa

SEQ ID NO: 1129902 - RNA, 19 nt, Artificial Sequence
  Description of Artificial Sequence: Synthetic oligonucleotide
  Sense strand starting at position 208 of SEQ ID NO: 916093
agcucaguuuacccacaua

SEQ ID NO: 1129903 - RNA, 19 nt, Artificial Sequence
  Description of Artificial Sequence: Synthetic oligonucleotide
  Antisense strand to SEQ ID NO: 1129902
uauguggguaaacugagcu

SEQ ID NO: 1129904 - RNA, 19 nt, Artificial Sequence
  Description of Artificial Sequence: Synthetic oligonucleotide
  Sense strand starting at position 249 of SEQ ID NO: 916093
caggcugccuccucugauu

SEQ ID NO: 1129905 - RNA, 19 nt, Artificial Sequence
  Description of Artificial Sequence: Synthetic oligonucleotide
  Antisense strand to SEQ ID NO: 1129904
aaucagaggaggcagccug

SEQ ID NO: 1129906 - RNA, 19 nt, Artificial Sequence
  Description of Artificial Sequence: Synthetic oligonucleotide
  Sense strand starting at position 254 of SEQ ID NO: 916093
ugccuccucugauuguaaa

SEQ ID NO: 1129907 - RNA, 19 nt, Artificial Sequence
  Description of Artificial Sequence: Synthetic oligonucleotide
  Antisense strand to SEQ ID NO: 1129906
uuuacaaucagaggaggca

SEQ ID NO: 1129908 - RNA, 19 nt, Artificial Sequence
  Description of Artificial Sequence: Synthetic oligonucleotide
  Sense strand starting at position 255 of SEQ ID NO: 916093
gccuccucugauuguaaau

SEQ ID NO: 1129909 - RNA, 19 nt, Artificial Sequence
  Description of Artificial Sequence: Synthetic oligonucleotide
  Antisense strand to SEQ ID NO: 1129908
auuuacaaucagaggaggc

SEQ ID NO: 1129910 - RNA, 19 nt, Artificial Sequence
  Description of Artificial Sequence: Synthetic oligonucleotide
  Sense strand starting at position 326 of SEQ ID NO: 916093
ugccaugugucucugggaa

SEQ ID NO: 1129911 - RNA, 19 nt, Artificial Sequence
  Description of Artificial Sequence: Synthetic oligonucleotide
  Antisense strand to SEQ ID NO: 1129910
uucccagagacacauggca

SEQ ID NO: 1129912 - RNA, 19 nt, Artificial Sequence
  Description of Artificial Sequence: Synthetic oligonucleotide
  Sense strand starting at position 855 of SEQ ID NO: 916093
ugaccugaucaaggugaca

SEQ ID NO: 1129913 - RNA, 19 nt, Artificial Sequence
  Description of Artificial Sequence: Synthetic oligonucleotide
  Antisense strand to SEQ ID NO: 1129912
ugucaccuugaucagguca

SEQ ID NO: 1129914 - RNA, 19 nt, Artificial Sequence
  Description of Artificial Sequence: Synthetic oligonucleotide
  Sense strand starting at position 857 of SEQ ID NO: 916093
accugaucaaggugacaug

SEQ ID NO: 1129915 - RNA, 19 nt, Artificial Sequence
  Description of Artificial Sequence: Synthetic oligonucleotide
  Antisense strand to SEQ ID NO: 1129914
caugucaccuugaucaggu

SEQ ID NO: 1129916 - RNA, 19 nt, Artificial Sequence
  Description of Artificial Sequence: Synthetic oligonucleotide
  Sense strand starting at position 860 of SEQ ID NO: 916093
ugaucaaggugacaugaga

SEQ ID NO: 1129917 - RNA, 19 nt, Artificial Sequence
  Description of Artificial Sequence: Synthetic oligonucleotide
  Antisense strand to SEQ ID NO: 1129916
ucucaugucaccuugauca

SEQ ID NO: 1129918 - RNA, 19 nt, Artificial Sequence
  Description of Artificial Sequence: Synthetic oligonucleotide
  Sense strand starting at position 962 of SEQ ID NO: 916093
aauagugggcuuuacagau

SEQ ID NO: 1129919 - RNA, 19 nt, Artificial Sequence
  Description of Artificial Sequence: Synthetic oligonucleotide
  Antisense strand to SEQ ID NO: 1129918
aucuguaaagcccacuauu

SEQ ID NO: 1129920 - RNA, 19 nt, Artificial Sequence
  Description of Artificial Sequence: Synthetic oligonucleotide
  Sense strand starting at position 1017 of SEQ ID NO: 916093
cugguuacuucugcaaguu

SEQ ID NO: 1129921 - RNA, 19 nt, Artificial Sequence
  Description of Artificial Sequence: Synthetic oligonucleotide
  Antisense strand to SEQ ID NO: 1129920
aacuugcagaaguaaccag

SEQ ID NO: 1129922 - RNA, 19 nt, Artificial Sequence
  Description of Artificial Sequence: Synthetic oligonucleotide
  Sense strand starting at position 1018 of SEQ ID NO: 916093
ugguuacuucugcaaguug

SEQ ID NO: 1129923 - RNA, 19 nt, Artificial Sequence
  Description of Artificial Sequence: Synthetic oligonucleotide
  Antisense strand to SEQ ID NO: 1129922
caacuugcagaaguaacca

SEQ ID NO: 1129924 - RNA, 19 nt, Artificial Sequence
  Description of Artificial Sequence: Synthetic oligonucleotide
  Sense strand starting at position 1026 of SEQ ID NO: 916093
ucugcaaguuggcauuuaa

SEQ ID NO: 1129925 - RNA, 19 nt, Artificial Sequence
  Description of Artificial Sequence: Synthetic oligonucleotide
  Antisense strand to SEQ ID NO: 1129924
uuaaaugccaacuugcaga

SEQ ID NO: 1129926 - RNA, 19 nt, Artificial Sequence
  Description of Artificial Sequence: Synthetic oligonucleotide
  Sense strand starting at position 1066 of SEQ ID NO: 916093
acugaaugguuauuggauc

SEQ ID NO: 1129927 - RNA, 19 nt, Artificial Sequence
  Description of Artificial Sequence: Synthetic oligonucleotide
  Antisense strand to SEQ ID NO: 1129926
gauccaauaaccauucagu

SEQ ID NO: 1129928 - RNA, 19 nt, Artificial Sequence
  Description of Artificial Sequence: Synthetic oligonucleotide
  Sense strand starting at position 1132 of SEQ ID NO: 916093
cgcuucucugagggcuauu

SEQ ID NO: 1129929 - RNA, 19 nt, Artificial Sequence
  Description of Artificial Sequence: Synthetic oligonucleotide
  Antisense strand to SEQ ID NO: 1129928
aauagcccucagagaagcg

SEQ ID NO: 1129930 - RNA, 19 nt, Artificial Sequence
  Description of Artificial Sequence: Synthetic oligonucleotide
  Sense strand starting at position 2046 of SEQ ID NO: 916093
caggcauucuacucuucga

SEQ ID NO: 1129931 - RNA, 19 nt, Artificial Sequence
  Description of Artificial Sequence: Synthetic oligonucleotide
  Antisense strand to SEQ ID NO: 1129930
ucgaagaguagaaugccug

SEQ ID NO: 1129932 - RNA, 19 nt, Artificial Sequence
  Description of Artificial Sequence: Synthetic oligonucleotide
  Sense strand starting at position 2118 of SEQ ID NO: 916093
aaacuuuauuaguggaaga

SEQ ID NO: 1129933 - RNA, 19 nt, Artificial Sequence
  Description of Artificial Sequence: Synthetic oligonucleotide
  Antisense strand to SEQ ID NO: 1129932
ucuuccacuaauaaaguuu

SEQ ID NO: 1129934 - RNA, 19 nt, Artificial Sequence
  Description of Artificial Sequence: Synthetic oligonucleotide
  Sense strand starting at position 2139 of SEQ ID NO: 916093
gccagcuauuaacuacaga

SEQ ID NO: 1129935 - RNA, 19 nt, Artificial Sequence
  Description of Artificial Sequence: Synthetic oligonucleotide
  Antisense strand to SEQ ID NO: 1129934
ucuguaguuaauagcuggc

SEQ ID NO: 1129936 - RNA, 19 nt, Artificial Sequence
  Description of Artificial Sequence: Synthetic oligonucleotide
  Sense strand starting at position 2185 of SEQ ID NO: 916093
ccauucugugucuguucua

SEQ ID NO: 1129937 - RNA, 19 nt, Artificial Sequence
  Description of Artificial Sequence: Synthetic oligonucleotide
  Antisense strand to SEQ ID NO: 1129936
uagaacagacacagaaugg

SEQ ID NO: 1129938 - RNA, 19 nt, Artificial Sequence
  Description of Artificial Sequence: Synthetic oligonucleotide
  Sense strand starting at position 2344 of SEQ ID NO: 916093
gaaguuuagcagcagagau

SEQ ID NO: 1129939 - RNA, 19 nt, Artificial Sequence
  Description of Artificial Sequence: Synthetic oligonucleotide
  Antisense strand to SEQ ID NO: 1129938
aucucugcugcuaaacuuc

SEQ ID NO: 1129940 - RNA, 19 nt, Artificial Sequence
  Description of Artificial Sequence: Synthetic oligonucleotide
  Sense strand starting at position 2357 of SEQ ID NO: 916093
agagaucaccuaggugguu

SEQ ID NO: 1129941 - RNA, 19 nt, Artificial Sequence
  Description of Artificial Sequence: Synthetic oligonucleotide
  Antisense strand to SEQ ID NO: 1129940
aaccaccuaggugaucucu

SEQ ID NO: 1129942 - RNA, 19 nt, Artificial Sequence
  Description of Artificial Sequence: Synthetic oligonucleotide
  Sense strand starting at position 2453 of SEQ ID NO: 916093
gugcuuacuauuggucaga

SEQ ID NO: 1129943 - RNA, 19 nt, Artificial Sequence
  Description of Artificial Sequence: Synthetic oligonucleotide
  Antisense strand to SEQ ID NO: 1129942
ucugaccaauaguaagcac

SEQ ID NO: 1129944 - RNA, 19 nt, Artificial Sequence
  Description of Artificial Sequence: Synthetic oligonucleotide
  Sense strand starting at position 2455 of SEQ ID NO: 916093
gcuuacuauuggucagaca

SEQ ID NO: 1129945 - RNA, 19 nt, Artificial Sequence
  Description of Artificial Sequence: Synthetic oligonucleotide
  Antisense strand to SEQ ID NO: 1129944
ugucugaccaauaguaagc

SEQ ID NO: 1129946 - RNA, 19 nt, Artificial Sequence
  Description of Artificial Sequence: Synthetic oligonucleotide
  Sense strand starting at position 2456 of SEQ ID NO: 916093
cuuacuauuggucagacau

SEQ ID NO: 1129947 - RNA, 19 nt, Artificial Sequence
  Description of Artificial Sequence: Synthetic oligonucleotide
  Antisense strand to SEQ ID NO: 1129946
augucugaccaauaguaag

SEQ ID NO: 1129948 - RNA, 19 nt, Artificial Sequence
  Description of Artificial Sequence: Synthetic oligonucleotide
  Sense strand starting at position 2490 of SEQ ID NO: 916093
uccguugaauccucacaaa

SEQ ID NO: 1129949 - RNA, 19 nt, Artificial Sequence
  Description of Artificial Sequence: Synthetic oligonucleotide
  Antisense strand to SEQ ID NO: 1129948
uuugugaggauucaacgga

SEQ ID NO: 1129950 - RNA, 19 nt, Artificial Sequence
  Description of Artificial Sequence: Synthetic oligonucleotide
  Sense strand starting at position 2672 of SEQ ID NO: 916093
aaggauuuaucuggagcuu

SEQ ID NO: 1129951 - RNA, 19 nt, Artificial Sequence
  Description of Artificial Sequence: Synthetic oligonucleotide
  Antisense strand to SEQ ID NO: 1129950
aagcuccagauaaauccuu

SEQ ID NO: 1129952 - RNA, 19 nt, Artificial Sequence
  Description of Artificial Sequence: Synthetic oligonucleotide
  Sense strand starting at position 2819 of SEQ ID NO: 916093
caucuuggccuuuguguua

SEQ ID NO: 1129953 - RNA, 19 nt, Artificial Sequence
  Description of Artificial Sequence: Synthetic oligonucleotide
  Antisense strand to SEQ ID NO: 1129952
uaacacaaaggccaagaug

SEQ ID NO: 1129954 - RNA, 19 nt, Artificial Sequence
  Description of Artificial Sequence: Synthetic oligonucleotide
  Sense strand starting at position 2831 of SEQ ID NO: 916093
uguguuaagccaugagcau

SEQ ID NO: 1129955 - RNA, 19 nt, Artificial Sequence
  Description of Artificial Sequence: Synthetic oligonucleotide
  Antisense strand to SEQ ID NO: 1129954
augcucauggcuuaacaca

SEQ ID NO: 1129956 - RNA, 19 nt, Artificial Sequence
  Description of Artificial Sequence: Synthetic oligonucleotide
  Sense strand starting at position 2832 of SEQ ID NO: 916093
guguuaagccaugagcauu

SEQ ID NO: 1129957 - RNA, 19 nt, Artificial Sequence
  Description of Artificial Sequence: Synthetic oligonucleotide
  Antisense strand to SEQ ID NO: 1129956
aaugcucauggcuuaacac

SEQ ID NO: 1129958 - RNA, 19 nt, Artificial Sequence
  Description of Artificial Sequence: Synthetic oligonucleotide
  Sense strand starting at position 2838 of SEQ ID NO: 916093
agccaugagcauuacuuaa

SEQ ID NO: 1129959 - RNA, 19 nt, Artificial Sequence
  Description of Artificial Sequence: Synthetic oligonucleotide
  Antisense strand to SEQ ID NO: 1129958
uuaaguaaugcucauggcu

SEQ ID NO: 1129960 - RNA, 19 nt, Artificial Sequence
  Description of Artificial Sequence: Synthetic oligonucleotide
  Sense strand starting at position 2870 of SEQ ID NO: 916093
acgaucuaguaauuguuau

SEQ ID NO: 1129961 - RNA, 19 nt, Artificial Sequence
  Description of Artificial Sequence: Synthetic oligonucleotide
  Antisense strand to SEQ ID NO: 1129960
auaacaauuacuagaucgu

SEQ ID NO: 1129962 - RNA, 19 nt, Artificial Sequence
  Description of Artificial Sequence: Synthetic oligonucleotide
  Sense strand starting at position 2877 of SEQ ID NO: 916093
aguaauuguuaucuccacu

SEQ ID NO: 1129963 - RNA, 19 nt, Artificial Sequence
  Description of Artificial Sequence: Synthetic oligonucleotide
  Antisense strand to SEQ ID NO: 1129962
aguggagauaacaauuacu

SEQ ID NO: 1129964 - RNA, 19 nt, Artificial Sequence
  Description of Artificial Sequence: Synthetic oligonucleotide
  Sense strand starting at position 2933 of SEQ ID NO: 916093
acuuguaaguaauggaaag

SEQ ID NO: 1129965 - RNA, 19 nt, Artificial Sequence
  Description of Artificial Sequence: Synthetic oligonucleotide
  Antisense strand to SEQ ID NO: 1129964
cuuuccauuacuuacaagu

SEQ ID NO: 1129966 - RNA, 19 nt, Artificial Sequence
  Description of Artificial Sequence: Synthetic oligonucleotide
  Sense strand starting at position 2934 of SEQ ID NO: 916093
cuuguaaguaauggaaaga

SEQ ID NO: 1129967 - RNA, 19 nt, Artificial Sequence
  Description of Artificial Sequence: Synthetic oligonucleotide
  Antisense strand to SEQ ID NO: 1129966
ucuuuccauuacuuacaag

SEQ ID NO: 1129968 - RNA, 19 nt, Artificial Sequence
  Description of Artificial Sequence: Synthetic oligonucleotide
  Sense strand starting at position 2986 of SEQ ID NO: 916093
uaggacucguagucuguua

SEQ ID NO: 1129969 - RNA, 19 nt, Artificial Sequence
  Description of Artificial Sequence: Synthetic oligonucleotide
  Antisense strand to SEQ ID NO: 1129968
uaacagacuacgaguccua

SEQ ID NO: 1129970 - RNA, 19 nt, Artificial Sequence
  Description of Artificial Sequence: Synthetic oligonucleotide
  Sense strand starting at position 2997 of SEQ ID NO: 916093
gucuguuagggcuaaagga

SEQ ID NO: 1129971 - RNA, 19 nt, Artificial Sequence
  Description of Artificial Sequence: Synthetic oligonucleotide
  Antisense strand to SEQ ID NO: 1129970
uccuuuagcccuaacagac

SEQ ID NO: 1129972 - RNA, 19 nt, Artificial Sequence
  Description of Artificial Sequence: Synthetic oligonucleotide
  Sense strand starting at position 3025 of SEQ ID NO: 916093
gcaguuuaugguccgcaua

SEQ ID NO: 1129973 - RNA, 19 nt, Artificial Sequence
  Description of Artificial Sequence: Synthetic oligonucleotide
  Antisense strand to SEQ ID NO: 1129972
uaugcggaccauaaacugc

SEQ ID NO: 1129974 - RNA, 19 nt, Artificial Sequence
  Description of Artificial Sequence: Synthetic oligonucleotide
  Sense strand starting at position 3026 of SEQ ID NO: 916093
caguuuaugguccgcauau

SEQ ID NO: 1129975 - RNA, 19 nt, Artificial Sequence
  Description of Artificial Sequence: Synthetic oligonucleotide
  Antisense strand to SEQ ID NO: 1129974
auaugcggaccauaaacug

SEQ ID NO: 1129976 - RNA, 19 nt, Artificial Sequence
  Description of Artificial Sequence: Synthetic oligonucleotide
  Sense strand starting at position 3027 of SEQ ID NO: 916093
aguuuaugguccgcauauu

SEQ ID NO: 1129977 - RNA, 19 nt, Artificial Sequence
  Description of Artificial Sequence: Synthetic oligonucleotide
  Antisense strand to SEQ ID NO: 1129976
aauaugcggaccauaaacu

SEQ ID NO: 1129978 - RNA, 19 nt, Artificial Sequence
  Description of Artificial Sequence: Synthetic oligonucleotide
  Sense strand starting at position 3028 of SEQ ID NO: 916093
guuuaugguccgcauauuu

SEQ ID NO: 1129979 - RNA, 19 nt, Artificial Sequence
  Description of Artificial Sequence: Synthetic oligonucleotide
  Antisense strand to SEQ ID NO: 1129978
aaauaugcggaccauaaac

SEQ ID NO: 1129980 - RNA, 19 nt, Artificial Sequence
  Description of Artificial Sequence: Synthetic oligonucleotide
  Sense strand starting at position 136 of SEQ ID NO: 916094
uuguuaacugcuugguaca

SEQ ID NO: 1129981 - RNA, 19 nt, Artificial Sequence
  Description of Artificial Sequence: Synthetic oligonucleotide
  Antisense strand to SEQ ID NO: 1129980
uguaccaagcaguuaacaa

SEQ ID NO: 1129982 - RNA, 19 nt, Artificial Sequence
  Description of Artificial Sequence: Synthetic oligonucleotide
  Sense strand starting at position 138 of SEQ ID NO: 916094
guuaacugcuugguacaga

SEQ ID NO: 1129983 - RNA, 19 nt, Artificial Sequence
  Description of Artificial Sequence: Synthetic oligonucleotide
  Antisense strand to SEQ ID NO: 1129982
ucuguaccaagcaguuaac

SEQ ID NO: 1129984 - RNA, 19 nt, Artificial Sequence
  Description of Artificial Sequence: Synthetic oligonucleotide
  Sense strand starting at position 216 of SEQ ID NO: 916094
ggaauuaacugucuuuaac

SEQ ID NO: 1129985 - RNA, 19 nt, Artificial Sequence
  Description of Artificial Sequence: Synthetic oligonucleotide
  Antisense strand to SEQ ID NO: 1129984
guuaaagacaguuaauucc

SEQ ID NO: 1129986 - RNA, 19 nt, Artificial Sequence
  Description of Artificial Sequence: Synthetic oligonucleotide
  Sense strand starting at position 274 of SEQ ID NO: 916094
ugaggaucugaauguguau

SEQ ID NO: 1129987 - RNA, 19 nt, Artificial Sequence
  Description of Artificial Sequence: Synthetic oligonucleotide
  Antisense strand to SEQ ID NO: 1129986
auacacauucagauccuca

SEQ ID NO: 1129988 - RNA, 19 nt, Artificial Sequence
  Description of Artificial Sequence: Synthetic oligonucleotide
  Sense strand starting at position 289 of SEQ ID NO: 916094
guaugcuuaggagaucuga

SEQ ID NO: 1129989 - RNA, 19 nt, Artificial Sequence
  Description of Artificial Sequence: Synthetic oligonucleotide
  Antisense strand to SEQ ID NO: 1129988
ucagaucuccuaagcauac

SEQ ID NO: 1129990 - RNA, 19 nt, Artificial Sequence
  Description of Artificial Sequence: Synthetic oligonucleotide
  Sense strand starting at position 319 of SEQ ID NO: 916094
agacaagcuucuuuggaaa

SEQ ID NO: 1129991 - RNA, 19 nt, Artificial Sequence
  Description of Artificial Sequence: Synthetic oligonucleotide
  Antisense strand to SEQ ID NO: 1129990
uuuccaaagaagcuugucu

SEQ ID NO: 1129992 - RNA, 19 nt, Artificial Sequence
  Description of Artificial Sequence: Synthetic oligonucleotide
  Sense strand starting at position 363 of SEQ ID NO: 916094
ggaagaaggcugggaguua

SEQ ID NO: 1129993 - RNA, 19 nt, Artificial Sequence
  Description of Artificial Sequence: Synthetic oligonucleotide
  Antisense strand to SEQ ID NO: 1129992
uaacucccagccuucuucc

SEQ ID NO: 1129994 - RNA, 19 nt, Artificial Sequence
  Description of Artificial Sequence: Synthetic oligonucleotide
  Sense strand starting at position 364 of SEQ ID NO: 916094
gaagaaggcugggaguuaa

SEQ ID NO: 1129995 - RNA, 19 nt, Artificial Sequence
  Description of Artificial Sequence: Synthetic oligonucleotide
  Antisense strand to SEQ ID NO: 1129994
uuaacucccagccuucuuc

SEQ ID NO: 1129996 - RNA, 19 nt, Artificial Sequence
  Description of Artificial Sequence: Synthetic oligonucleotide
  Sense strand starting at position 481 of SEQ ID NO: 916094
agagaaauucucuggucca

SEQ ID NO: 1129997 - RNA, 19 nt, Artificial Sequence
  Description of Artificial Sequence: Synthetic oligonucleotide
  Antisense strand to SEQ ID NO: 1129996
uggaccagagaauuucucu

SEQ ID NO: 1129998 - RNA, 19 nt, Artificial Sequence
  Description of Artificial Sequence: Synthetic oligonucleotide
  Sense strand starting at position 484 of SEQ ID NO: 916094
gaaauucucugguccaguu

SEQ ID NO: 1129999 - RNA, 19 nt, Artificial Sequence
  Description of Artificial Sequence: Synthetic oligonucleotide
  Antisense strand to SEQ ID NO: 1129998
aacuggaccagagaauuuc

SEQ ID NO: 1130000 - RNA, 19 nt, Artificial Sequence
  Description of Artificial Sequence: Synthetic oligonucleotide
  Sense strand starting at position 577 of SEQ ID NO: 916094
cccuuuagcgaccacaauu

SEQ ID NO: 1130001 - RNA, 19 nt, Artificial Sequence
  Description of Artificial Sequence: Synthetic oligonucleotide
  Antisense strand to SEQ ID NO: 1130000
aauuguggucgcuaaaggg

SEQ ID NO: 1130002 - RNA, 19 nt, Artificial Sequence
  Description of Artificial Sequence: Synthetic oligonucleotide
  Sense strand starting at position 585 of SEQ ID NO: 916094
cgaccacaauucucaugua

SEQ ID NO: 1130003 - RNA, 19 nt, Artificial Sequence
  Description of Artificial Sequence: Synthetic oligonucleotide
  Antisense strand to SEQ ID NO: 1130002
uacaugagaauuguggucg

SEQ ID NO: 1130004 - RNA, 19 nt, Artificial Sequence
  Description of Artificial Sequence: Synthetic oligonucleotide
  Sense strand starting at position 612 of SEQ ID NO: 916094
gggagaaauuagcauccua

SEQ ID NO: 1130005 - RNA, 19 nt, Artificial Sequence
  Description of Artificial Sequence: Synthetic oligonucleotide
  Antisense strand to SEQ ID NO: 1130004
uaggaugcuaauuucuccc

SEQ ID NO: 1130006 - RNA, 19 nt, Artificial Sequence
  Description of Artificial Sequence: Synthetic oligonucleotide
  Sense strand starting at position 1352 of SEQ ID NO: 916094
augcuaacuuuaucaggua

SEQ ID NO: 1130007 - RNA, 19 nt, Artificial Sequence
  Description of Artificial Sequence: Synthetic oligonucleotide
  Antisense strand to SEQ ID NO: 1130006
uaccugauaaaguuagcau

SEQ ID NO: 1130008 - RNA, 19 nt, Artificial Sequence
  Description of Artificial Sequence: Synthetic oligonucleotide
  Sense strand starting at position 1364 of SEQ ID NO: 916094
ucagguaucccagaacuuu

SEQ ID NO: 1130009 - RNA, 19 nt, Artificial Sequence
  Description of Artificial Sequence: Synthetic oligonucleotide
  Antisense strand to SEQ ID NO: 1130008
aaaguucugggauaccuga

SEQ ID NO: 1130010 - RNA, 19 nt, Artificial Sequence
  Description of Artificial Sequence: Synthetic oligonucleotide
  Sense strand starting at position 1446 of SEQ ID NO: 916094
caguuuccugaaggaaugu

SEQ ID NO: 1130011 - RNA, 19 nt, Artificial Sequence
  Description of Artificial Sequence: Synthetic oligonucleotide
  Antisense strand to SEQ ID NO: 1130010
acauuccuucaggaaacug

SEQ ID NO: 1130012 - RNA, 19 nt, Artificial Sequence
  Description of Artificial Sequence: Synthetic oligonucleotide
  Sense strand starting at position 1508 of SEQ ID NO: 916094
ggaggagucuguaacgaca

SEQ ID NO: 1130013 - RNA, 19 nt, Artificial Sequence
  Description of Artificial Sequence: Synthetic oligonucleotide
  Antisense strand to SEQ ID NO: 1130012
ugucguuacagacuccucc

SEQ ID NO: 1130014 - RNA, 19 nt, Artificial Sequence
  Description of Artificial Sequence: Synthetic oligonucleotide
  Sense strand starting at position 1563 of SEQ ID NO: 916094
uuuggugguuugguaaauu

SEQ ID NO: 1130015 - RNA, 19 nt, Artificial Sequence
  Description of Artificial Sequence: Synthetic oligonucleotide
  Antisense strand to SEQ ID NO: 1130014
aauuuaccaaaccaccaaa

SEQ ID NO: 1130016 - RNA, 19 nt, Artificial Sequence
  Description of Artificial Sequence: Synthetic oligonucleotide
  Sense strand starting at position 1589 of SEQ ID NO: 916094
ggguaucauccacaaugcu

SEQ ID NO: 1130017 - RNA, 19 nt, Artificial Sequence
  Description of Artificial Sequence: Synthetic oligonucleotide
  Antisense strand to SEQ ID NO: 1130016
agcauuguggaugauaccc

SEQ ID NO: 1130018 - RNA, 19 nt, Artificial Sequence
  Description of Artificial Sequence: Synthetic oligonucleotide
  Sense strand starting at position 1722 of SEQ ID NO: 916094
agggcuuccuacucuaaac

SEQ ID NO: 1130019 - RNA, 19 nt, Artificial Sequence
  Description of Artificial Sequence: Synthetic oligonucleotide
  Antisense strand to SEQ ID NO: 1130018
guuuagaguaggaagcccu

SEQ ID NO: 1130020 - RNA, 19 nt, Artificial Sequence
  Description of Artificial Sequence: Synthetic oligonucleotide
  Sense strand starting at position 2024 of SEQ ID NO: 916094
uuggguaaggcuugcuuua

SEQ ID NO: 1130021 - RNA, 19 nt, Artificial Sequence
  Description of Artificial Sequence: Synthetic oligonucleotide
  Antisense strand to SEQ ID NO: 1130020
uaaagcaagccuuacccaa

SEQ ID NO: 1130022 - RNA, 19 nt, Artificial Sequence
  Description of Artificial Sequence: Synthetic oligonucleotide
  Sense strand starting at position 2026 of SEQ ID NO: 916094
ggguaaggcuugcuuuauu

SEQ ID NO: 1130023 - RNA, 19 nt, Artificial Sequence
  Description of Artificial Sequence: Synthetic oligonucleotide
  Antisense strand to SEQ ID NO: 1130022
aauaaagcaagccuuaccc

SEQ ID NO: 1130024 - RNA, 19 nt, Artificial Sequence
  Description of Artificial Sequence: Synthetic oligonucleotide
  Sense strand starting at position 2034 of SEQ ID NO: 916094
cuugcuuuauuggccaauu

SEQ ID NO: 1130025 - RNA, 19 nt, Artificial Sequence
  Description of Artificial Sequence: Synthetic oligonucleotide
  Antisense strand to SEQ ID NO: 1130024
aauuggccaauaaagcaag

SEQ ID NO: 1130026 - RNA, 19 nt, Artificial Sequence
  Description of Artificial Sequence: Synthetic oligonucleotide
  Sense strand starting at position 2035 of SEQ ID NO: 916094
uugcuuuauuggccaauua

SEQ ID NO: 1130027 - RNA, 19 nt, Artificial Sequence
  Description of Artificial Sequence: Synthetic oligonucleotide
  Antisense strand to SEQ ID NO: 1130026
uaauuggccaauaaagcaa

SEQ ID NO: 1130028 - RNA, 19 nt, Artificial Sequence
  Description of Artificial Sequence: Synthetic oligonucleotide
  Sense strand starting at position 2036 of SEQ ID NO: 916094
ugcuuuauuggccaauuau

SEQ ID NO: 1130029 - RNA, 19 nt, Artificial Sequence
  Description of Artificial Sequence: Synthetic oligonucleotide
  Antisense strand to SEQ ID NO: 1130028
auaauuggccaauaaagca

SEQ ID NO: 1130030 - RNA, 19 nt, Artificial Sequence
  Description of Artificial Sequence: Synthetic oligonucleotide
  Sense strand starting at position 2062 of SEQ ID NO: 916094
gcuugcuuaccggaagcaa

SEQ ID NO: 1130031 - RNA, 19 nt, Artificial Sequence
  Description of Artificial Sequence: Synthetic oligonucleotide
  Antisense strand to SEQ ID NO: 1130030
uugcuuccgguaagcaagc

SEQ ID NO: 1130032 - RNA, 19 nt, Artificial Sequence
  Description of Artificial Sequence: Synthetic oligonucleotide
  Sense strand starting at position 2105 of SEQ ID NO: 916094
guuugauugucagcuugaa

SEQ ID NO: 1130033 - RNA, 19 nt, Artificial Sequence
  Description of Artificial Sequence: Synthetic oligonucleotide
  Antisense strand to SEQ ID NO: 1130032
uucaagcugacaaucaaac

SEQ ID NO: 1130034 - RNA, 19 nt, Artificial Sequence
  Description of Artificial Sequence: Synthetic oligonucleotide
  Sense strand starting at position 2109 of SEQ ID NO: 916094
gauugucagcuugaauacu

SEQ ID NO: 1130035 - RNA, 19 nt, Artificial Sequence
  Description of Artificial Sequence: Synthetic oligonucleotide
  Antisense strand to SEQ ID NO: 1130034
aguauucaagcugacaauc

SEQ ID NO: 1130036 - RNA, 19 nt, Artificial Sequence
  Description of Artificial Sequence: Synthetic oligonucleotide
  Sense strand starting at position 2201 of SEQ ID NO: 916094
agaagaagcgauuguuaau

SEQ ID NO: 1130037 - RNA, 19 nt, Artificial Sequence
  Description of Artificial Sequence: Synthetic oligonucleotide
  Antisense strand to SEQ ID NO: 1130036
auuaacaaucgcuucuucu

SEQ ID NO: 1130038 - RNA, 19 nt, Artificial Sequence
  Description of Artificial Sequence: Synthetic oligonucleotide
  Sense strand starting at position 2244 of SEQ ID NO: 916094
cgugauauugucggacuga

SEQ ID NO: 1130039 - RNA, 19 nt, Artificial Sequence
  Description of Artificial Sequence: Synthetic oligonucleotide
  Antisense strand to SEQ ID NO: 1130038
ucaguccgacaauaucacg

SEQ ID NO: 1130040 - RNA, 19 nt, Artificial Sequence
  Description of Artificial Sequence: Synthetic oligonucleotide
  Sense strand starting at position 2302 of SEQ ID NO: 916094
gugucuccuuagccuuuaa

SEQ ID NO: 1130041 - RNA, 19 nt, Artificial Sequence
  Description of Artificial Sequence: Synthetic oligonucleotide
  Antisense strand to SEQ ID NO: 1130040
uuaaaggcuaaggagacac

SEQ ID NO: 1130042 - RNA, 19 nt, Artificial Sequence
  Description of Artificial Sequence: Synthetic oligonucleotide
  Sense strand starting at position 2337 of SEQ ID NO: 916094
ccggaauccugcccuaauc

SEQ ID NO: 1130043 - RNA, 19 nt, Artificial Sequence
  Description of Artificial Sequence: Synthetic oligonucleotide
  Antisense strand to SEQ ID NO: 1130042
gauuagggcaggauuccgg

SEQ ID NO: 1130044 - RNA, 19 nt, Artificial Sequence
  Description of Artificial Sequence: Synthetic oligonucleotide
  Sense strand starting at position 2372 of SEQ ID NO: 916094
gcauuagguccaugaucuc

SEQ ID NO: 1130045 - RNA, 19 nt, Artificial Sequence
  Description of Artificial Sequence: Synthetic oligonucleotide
  Antisense strand to SEQ ID NO: 1130044
gagaucauggaccuaaugc

SEQ ID NO: 1130046 - RNA, 19 nt, Artificial Sequence
  Description of Artificial Sequence: Synthetic oligonucleotide
  Sense strand starting at position 2381 of SEQ ID NO: 916094
ccaugaucucuguggcuag

SEQ ID NO: 1130047 - RNA, 19 nt, Artificial Sequence
  Description of Artificial Sequence: Synthetic oligonucleotide
  Antisense strand to SEQ ID NO: 1130046
cuagccacagagaucaugg

SEQ ID NO: 1130048 - RNA, 19 nt, Artificial Sequence
  Description of Artificial Sequence: Synthetic oligonucleotide
  Sense strand starting at position 2512 of SEQ ID NO: 916094
aggaguugauagucgcaau

SEQ ID NO: 1130049 - RNA, 19 nt, Artificial Sequence
  Description of Artificial Sequence: Synthetic oligonucleotide
  Antisense strand to SEQ ID NO: 1130048
auugcgacuaucaacuccu

SEQ ID NO: 1130050 - RNA, 19 nt, Artificial Sequence
  Description of Artificial Sequence: Synthetic oligonucleotide
  Sense strand starting at position 2513 of SEQ ID NO: 916094
ggaguugauagucgcaaua

SEQ ID NO: 1130051 - RNA, 19 nt, Artificial Sequence
  Description of Artificial Sequence: Synthetic oligonucleotide
  Antisense strand to SEQ ID NO: 1130050
uauugcgacuaucaacucc

SEQ ID NO: 1130052 - RNA, 19 nt, Artificial Sequence
  Description of Artificial Sequence: Synthetic oligonucleotide
  Sense strand starting at position 2604 of SEQ ID NO: 916094
acuugagcucaacgugaaa

SEQ ID NO: 1130053 - RNA, 19 nt, Artificial Sequence
  Description of Artificial Sequence: Synthetic oligonucleotide
  Antisense strand to SEQ ID NO: 1130052
uuucacguugagcucaagu

SEQ ID NO: 1130054 - RNA, 19 nt, Artificial Sequence
  Description of Artificial Sequence: Synthetic oligonucleotide
  Sense strand starting at position 2618 of SEQ ID NO: 916094
ugaaaucggcuuuggagau

SEQ ID NO: 1130055 - RNA, 19 nt, Artificial Sequence
  Description of Artificial Sequence: Synthetic oligonucleotide
  Antisense strand to SEQ ID NO: 1130054
aucuccaaagccgauuuca

SEQ ID NO: 1130056 - RNA, 19 nt, Artificial Sequence
  Description of Artificial Sequence: Synthetic oligonucleotide
  Sense strand starting at position 3272 of SEQ ID NO: 916094
gcgagaucucgucauugca

SEQ ID NO: 1130057 - RNA, 19 nt, Artificial Sequence
  Description of Artificial Sequence: Synthetic oligonucleotide
  Antisense strand to SEQ ID NO: 1130056
ugcaaugacgagaucucgc

SEQ ID NO: 1130058 - RNA, 19 nt, Artificial Sequence
  Description of Artificial Sequence: Synthetic oligonucleotide
  Sense strand starting at position 3589 of SEQ ID NO: 916094
uugguuuccugaucccuga

SEQ ID NO: 1130059 - RNA, 19 nt, Artificial Sequence
  Description of Artificial Sequence: Synthetic oligonucleotide
  Antisense strand to SEQ ID NO: 1130058
ucagggaucaggaaaccaa

SEQ ID NO: 1130060 - RNA, 19 nt, Artificial Sequence
  Description of Artificial Sequence: Synthetic oligonucleotide
  Sense strand starting at position 218 of SEQ ID NO: 916095
uugaguaccuaggagaaga

SEQ ID NO: 1130061 - RNA, 19 nt, Artificial Sequence
  Description of Artificial Sequence: Synthetic oligonucleotide
  Antisense strand to SEQ ID NO: 1130060
ucuucuccuagguacucaa

SEQ ID NO: 1130062 - RNA, 19 nt, Artificial Sequence
  Description of Artificial Sequence: Synthetic oligonucleotide
  Sense strand starting at position 268 of SEQ ID NO: 916095
ucagguuccuccuugcuau

SEQ ID NO: 1130063 - RNA, 19 nt, Artificial Sequence
  Description of Artificial Sequence: Synthetic oligonucleotide
  Antisense strand to SEQ ID NO: 1130062
auagcaaggaggaaccuga

SEQ ID NO: 1130064 - RNA, 19 nt, Artificial Sequence
  Description of Artificial Sequence: Synthetic oligonucleotide
  Sense strand starting at position 342 of SEQ ID NO: 916095
cccaaauaagccuggauga

SEQ ID NO: 1130065 - RNA, 19 nt, Artificial Sequence
  Description of Artificial Sequence: Synthetic oligonucleotide
  Antisense strand to SEQ ID NO: 1130064
ucauccaggcuuauuuggg

SEQ ID NO: 1130066 - RNA, 19 nt, Artificial Sequence
  Description of Artificial Sequence: Synthetic oligonucleotide
  Sense strand starting at position 343 of SEQ ID NO: 916095
ccaaauaagccuggaugaa

SEQ ID NO: 1130067 - RNA, 19 nt, Artificial Sequence
  Description of Artificial Sequence: Synthetic oligonucleotide
  Antisense strand to SEQ ID NO: 1130066
uucauccaggcuuauuugg

SEQ ID NO: 1130068 - RNA, 19 nt, Artificial Sequence
  Description of Artificial Sequence: Synthetic oligonucleotide
  Sense strand starting at position 379 of SEQ ID NO: 916095
acguguaaauccuuaugau

SEQ ID NO: 1130069 - RNA, 19 nt, Artificial Sequence
  Description of Artificial Sequence: Synthetic oligonucleotide
  Antisense strand to SEQ ID NO: 1130068
aucauaaggauuuacacgu

SEQ ID NO: 1130070 - RNA, 19 nt, Artificial Sequence
  Description of Artificial Sequence: Synthetic oligonucleotide
  Sense strand starting at position 380 of SEQ ID NO: 916095
cguguaaauccuuaugaua

SEQ ID NO: 1130071 - RNA, 19 nt, Artificial Sequence
  Description of Artificial Sequence: Synthetic oligonucleotide
  Antisense strand to SEQ ID NO: 1130070
uaucauaaggauuuacacg

SEQ ID NO: 1130072 - RNA, 19 nt, Artificial Sequence
  Description of Artificial Sequence: Synthetic oligonucleotide
  Sense strand starting at position 393 of SEQ ID NO: 916095
augauacuguuaccuuaua

SEQ ID NO: 1130073 - RNA, 19 nt, Artificial Sequence
  Description of Artificial Sequence: Synthetic oligonucleotide
  Antisense strand to SEQ ID NO: 1130072
uauaagguaacaguaucau

SEQ ID NO: 1130074 - RNA, 19 nt, Artificial Sequence
  Description of Artificial Sequence: Synthetic oligonucleotide
  Sense strand starting at position 394 of SEQ ID NO: 916095
ugauacuguuaccuuauau

SEQ ID NO: 1130075 - RNA, 19 nt, Artificial Sequence
  Description of Artificial Sequence: Synthetic oligonucleotide
  Antisense strand to SEQ ID NO: 1130074
auauaagguaacaguauca

SEQ ID NO: 1130076 - RNA, 19 nt, Artificial Sequence
  Description of Artificial Sequence: Synthetic oligonucleotide
  Sense strand starting at position 550 of SEQ ID NO: 916095
uguggccuuagguaaauua

SEQ ID NO: 1130077 - RNA, 19 nt, Artificial Sequence
  Description of Artificial Sequence: Synthetic oligonucleotide
  Antisense strand to SEQ ID NO: 1130076
uaauuuaccuaaggccaca

SEQ ID NO: 1130078 - RNA, 19 nt, Artificial Sequence
  Description of Artificial Sequence: Synthetic oligonucleotide
  Sense strand starting at position 559 of SEQ ID NO: 916095
agguaaauuaccugugucu

SEQ ID NO: 1130079 - RNA, 19 nt, Artificial Sequence
  Description of Artificial Sequence: Synthetic oligonucleotide
  Antisense strand to SEQ ID NO: 1130078
agacacagguaauuuaccu

SEQ ID NO: 1130080 - RNA, 19 nt, Artificial Sequence
  Description of Artificial Sequence: Synthetic oligonucleotide
  Sense strand starting at position 586 of SEQ ID NO: 916095
ucaccugauuuauagguuu

SEQ ID NO: 1130081 - RNA, 19 nt, Artificial Sequence
  Description of Artificial Sequence: Synthetic oligonucleotide
  Antisense strand to SEQ ID NO: 1130080
aaaccuauaaaucagguga

SEQ ID NO: 1130082 - RNA, 19 nt, Artificial Sequence
  Description of Artificial Sequence: Synthetic oligonucleotide
  Sense strand starting at position 592 of SEQ ID NO: 916095
gauuuauagguuuguugug

SEQ ID NO: 1130083 - RNA, 19 nt, Artificial Sequence
  Description of Artificial Sequence: Synthetic oligonucleotide
  Antisense strand to SEQ ID NO: 1130082
cacaacaaaccuauaaauc

SEQ ID NO: 1130084 - RNA, 19 nt, Artificial Sequence
  Description of Artificial Sequence: Synthetic oligonucleotide
  Sense strand starting at position 662 of SEQ ID NO: 916095
uguagcaagugcucgauaa

SEQ ID NO: 1130085 - RNA, 19 nt, Artificial Sequence
  Description of Artificial Sequence: Synthetic oligonucleotide
  Antisense strand to SEQ ID NO: 1130084
uuaucgagcacuugcuaca

SEQ ID NO: 1130086 - RNA, 19 nt, Artificial Sequence
  Description of Artificial Sequence: Synthetic oligonucleotide
  Sense strand starting at position 664 of SEQ ID NO: 916095
uagcaagugcucgauaauu

SEQ ID NO: 1130087 - RNA, 19 nt, Artificial Sequence
  Description of Artificial Sequence: Synthetic oligonucleotide
  Antisense strand to SEQ ID NO: 1130086
aauuaucgagcacuugcua

SEQ ID NO: 1130088 - RNA, 19 nt, Artificial Sequence
  Description of Artificial Sequence: Synthetic oligonucleotide
  Sense strand starting at position 1097 of SEQ ID NO: 916095
cgcccuguugucuuaaagu

SEQ ID NO: 1130089 - RNA, 19 nt, Artificial Sequence
  Description of Artificial Sequence: Synthetic oligonucleotide
  Antisense strand to SEQ ID NO: 1130088
acuuuaagacaacagggcg

SEQ ID NO: 1130090 - RNA, 19 nt, Artificial Sequence
  Description of Artificial Sequence: Synthetic oligonucleotide
  Sense strand starting at position 1119 of SEQ ID NO: 916095
guccaacccuagucucauu

SEQ ID NO: 1130091 - RNA, 19 nt, Artificial Sequence
  Description of Artificial Sequence: Synthetic oligonucleotide
  Antisense strand to SEQ ID NO: 1130090
aaugagacuaggguuggac

SEQ ID NO: 1130092 - RNA, 19 nt, Artificial Sequence
  Description of Artificial Sequence: Synthetic oligonucleotide
  Sense strand starting at position 1202 of SEQ ID NO: 916095
gacugaggaucaguauugu

SEQ ID NO: 1130093 - RNA, 19 nt, Artificial Sequence
  Description of Artificial Sequence: Synthetic oligonucleotide
  Antisense strand to SEQ ID NO: 1130092
acaauacugauccucaguc

SEQ ID NO: 1130094 - RNA, 19 nt, Artificial Sequence
  Description of Artificial Sequence: Synthetic oligonucleotide
  Sense strand starting at position 1244 of SEQ ID NO: 916095
gaugaaucuugcccaccga

SEQ ID NO: 1130095 - RNA, 19 nt, Artificial Sequence
  Description of Artificial Sequence: Synthetic oligonucleotide
  Antisense strand to SEQ ID NO: 1130094
ucggugggcaagauucauc

SEQ ID NO: 1130096 - RNA, 19 nt, Artificial Sequence
  Description of Artificial Sequence: Synthetic oligonucleotide
  Sense strand starting at position 1245 of SEQ ID NO: 916095
augaaucuugcccaccgau

SEQ ID NO: 1130097 - RNA, 19 nt, Artificial Sequence
  Description of Artificial Sequence: Synthetic oligonucleotide
  Antisense strand to SEQ ID NO: 1130096
aucggugggcaagauucau

SEQ ID NO: 1130098 - RNA, 19 nt, Artificial Sequence
  Description of Artificial Sequence: Synthetic oligonucleotide
  Sense strand starting at position 1260 of SEQ ID NO: 916095
cgaugauacccugacauuc

SEQ ID NO: 1130099 - RNA, 19 nt, Artificial Sequence
  Description of Artificial Sequence: Synthetic oligonucleotide
  Antisense strand to SEQ ID NO: 1130098
gaaugucaggguaucaucg

SEQ ID NO: 1130100 - RNA, 19 nt, Artificial Sequence
  Description of Artificial Sequence: Synthetic oligonucleotide
  Sense strand starting at position 1271 of SEQ ID NO: 916095
ugacauucuugccuggaca

SEQ ID NO: 1130101 - RNA, 19 nt, Artificial Sequence
  Description of Artificial Sequence: Synthetic oligonucleotide
  Antisense strand to SEQ ID NO: 1130100
uguccaggcaagaauguca

SEQ ID NO: 1130102 - RNA, 19 nt, Artificial Sequence
  Description of Artificial Sequence: Synthetic oligonucleotide
  Sense strand starting at position 1288 of SEQ ID NO: 916095
caggguuauuuggagggaa

SEQ ID NO: 1130103 - RNA, 19 nt, Artificial Sequence
  Description of Artificial Sequence: Synthetic oligonucleotide
  Antisense strand to SEQ ID NO: 1130102
uucccuccaaauaacccug

SEQ ID NO: 1130104 - RNA, 19 nt, Artificial Sequence
  Description of Artificial Sequence: Synthetic oligonucleotide
  Sense strand starting at position 1523 of SEQ ID NO: 916095
aguucuucguaauccucua

SEQ ID NO: 1130105 - RNA, 19 nt, Artificial Sequence
  Description of Artificial Sequence: Synthetic oligonucleotide
  Antisense strand to SEQ ID NO: 1130104
uagaggauuacgaagaacu

SEQ ID NO: 1130106 - RNA, 19 nt, Artificial Sequence
  Description of Artificial Sequence: Synthetic oligonucleotide
  Sense strand starting at position 1537 of SEQ ID NO: 916095
cucuaucauuuguagguga

SEQ ID NO: 1130107 - RNA, 19 nt, Artificial Sequence
  Description of Artificial Sequence: Synthetic oligonucleotide
  Antisense strand to SEQ ID NO: 1130106
ucaccuacaaaugauagag

SEQ ID NO: 1130108 - RNA, 19 nt, Artificial Sequence
  Description of Artificial Sequence: Synthetic oligonucleotide
  Sense strand starting at position 1732 of SEQ ID NO: 916095
gcgccaguugccuuugacu

SEQ ID NO: 1130109 - RNA, 19 nt, Artificial Sequence
  Description of Artificial Sequence: Synthetic oligonucleotide
  Antisense strand to SEQ ID NO: 1130108
agucaaaggcaacuggcgc

SEQ ID NO: 1130110 - RNA, 19 nt, Artificial Sequence
  Description of Artificial Sequence: Synthetic oligonucleotide
  Sense strand starting at position 2443 of SEQ ID NO: 916095
ccgccugucgggagaugua

SEQ ID NO: 1130111 - RNA, 19 nt, Artificial Sequence
  Description of Artificial Sequence: Synthetic oligonucleotide
  Antisense strand to SEQ ID NO: 1130110
uacaucucccgacaggcgg

SEQ ID NO: 1130112 - RNA, 19 nt, Artificial Sequence
  Description of Artificial Sequence: Synthetic oligonucleotide
  Sense strand starting at position 2588 of SEQ ID NO: 916095
gugucuaccgcagauaucu

SEQ ID NO: 1130113 - RNA, 19 nt, Artificial Sequence
  Description of Artificial Sequence: Synthetic oligonucleotide
  Antisense strand to SEQ ID NO: 1130112
agauaucugcgguagacac

SEQ ID NO: 1130114 - RNA, 19 nt, Artificial Sequence
  Description of Artificial Sequence: Synthetic oligonucleotide
  Sense strand starting at position 2594 of SEQ ID NO: 916095
accgcagauaucuguagau

SEQ ID NO: 1130115 - RNA, 19 nt, Artificial Sequence
  Description of Artificial Sequence: Synthetic oligonucleotide
  Antisense strand to SEQ ID NO: 1130114
aucuacagauaucugcggu

SEQ ID NO: 1130116 - RNA, 19 nt, Artificial Sequence
  Description of Artificial Sequence: Synthetic oligonucleotide
  Sense strand starting at position 2655 of SEQ ID NO: 916095
cauagugaauaggauaaau

SEQ ID NO: 1130117 - RNA, 19 nt, Artificial Sequence
  Description of Artificial Sequence: Synthetic oligonucleotide
  Antisense strand to SEQ ID NO: 1130116
auuuauccuauucacuaug

SEQ ID NO: 1130118 - RNA, 19 nt, Artificial Sequence
  Description of Artificial Sequence: Synthetic oligonucleotide
  Sense strand starting at position 3531 of SEQ ID NO: 916095
cauauucggccuuguuuau

SEQ ID NO: 1130119 - RNA, 19 nt, Artificial Sequence
  Description of Artificial Sequence: Synthetic oligonucleotide
  Antisense strand to SEQ ID NO: 1130118
auaaacaaggccgaauaug

SEQ ID NO: 1130120 - RNA, 19 nt, Artificial Sequence
  Description of Artificial Sequence: Synthetic oligonucleotide
  Sense strand starting at position 3540 of SEQ ID NO: 916095
ccuuguuuauaguuagaag

SEQ ID NO: 1130121 - RNA, 19 nt, Artificial Sequence
  Description of Artificial Sequence: Synthetic oligonucleotide
  Antisense strand to SEQ ID NO: 1130120
cuucuaacuauaaacaagg

SEQ ID NO: 1130122 - RNA, 19 nt, Artificial Sequence
  Description of Artificial Sequence: Synthetic oligonucleotide
  Sense strand starting at position 3589 of SEQ ID NO: 916095
guuagugcuguguucuaca

SEQ ID NO: 1130123 - RNA, 19 nt, Artificial Sequence
  Description of Artificial Sequence: Synthetic oligonucleotide
  Antisense strand to SEQ ID NO: 1130122
uguagaacacagcacuaac

SEQ ID NO: 1130124 - RNA, 19 nt, Artificial Sequence
  Description of Artificial Sequence: Synthetic oligonucleotide
  Sense strand starting at position 3641 of SEQ ID NO: 916095
gggcuaagacugcauaguu

SEQ ID NO: 1130125 - RNA, 19 nt, Artificial Sequence
  Description of Artificial Sequence: Synthetic oligonucleotide
  Antisense strand to SEQ ID NO: 1130124
aacuaugcagucuuagccc

SEQ ID NO: 1130126 - RNA, 19 nt, Artificial Sequence
  Description of Artificial Sequence: Synthetic oligonucleotide
  Sense strand starting at position 3676 of SEQ ID NO: 916095
auagaaagaagucgaggua

SEQ ID NO: 1130127 - RNA, 19 nt, Artificial Sequence
  Description of Artificial Sequence: Synthetic oligonucleotide
  Antisense strand to SEQ ID NO: 1130126
uaccucgacuucuuucuau

SEQ ID NO: 1130128 - RNA, 19 nt, Artificial Sequence
  Description of Artificial Sequence: Synthetic oligonucleotide
  Sense strand starting at position 3701 of SEQ ID NO: 916095
accagauauucuuaggaca

SEQ ID NO: 1130129 - RNA, 19 nt, Artificial Sequence
  Description of Artificial Sequence: Synthetic oligonucleotide
  Antisense strand to SEQ ID NO: 1130128
uguccuaagaauaucuggu

SEQ ID NO: 1130130 - RNA, 19 nt, Artificial Sequence
  Description of Artificial Sequence: Synthetic oligonucleotide
  Sense strand starting at position 3703 of SEQ ID NO: 916095
cagauauucuuaggacaga

SEQ ID NO: 1130131 - RNA, 19 nt, Artificial Sequence
  Description of Artificial Sequence: Synthetic oligonucleotide
  Antisense strand to SEQ ID NO: 1130130
ucuguccuaagaauaucug

SEQ ID NO: 1130132 - RNA, 19 nt, Artificial Sequence
  Description of Artificial Sequence: Synthetic oligonucleotide
  Sense strand starting at position 3704 of SEQ ID NO: 916095
agauauucuuaggacagag

SEQ ID NO: 1130133 - RNA, 19 nt, Artificial Sequence
  Description of Artificial Sequence: Synthetic oligonucleotide
  Antisense strand to SEQ ID NO: 1130132
cucuguccuaagaauaucu

SEQ ID NO: 1130134 - RNA, 19 nt, Artificial Sequence
  Description of Artificial Sequence: Synthetic oligonucleotide
  Sense strand starting at position 3720 of SEQ ID NO: 916095
gagaaccaucuuuguuuga

SEQ ID NO: 1130135 - RNA, 19 nt, Artificial Sequence
  Description of Artificial Sequence: Synthetic oligonucleotide
  Antisense strand to SEQ ID NO: 1130134
ucaaacaaagaugguucuc

SEQ ID NO: 1130136 - RNA, 19 nt, Artificial Sequence
  Description of Artificial Sequence: Synthetic oligonucleotide
  Sense strand starting at position 3721 of SEQ ID NO: 916095
agaaccaucuuuguuugaa

SEQ ID NO: 1130137 - RNA, 19 nt, Artificial Sequence
  Description of Artificial Sequence: Synthetic oligonucleotide
  Antisense strand to SEQ ID NO: 1130136
uucaaacaaagaugguucu

SEQ ID NO: 1130138 - RNA, 19 nt, Artificial Sequence
  Description of Artificial Sequence: Synthetic oligonucleotide
  Sense strand starting at position 3740 of SEQ ID NO: 916095
aagugugcgcuugaugaag

SEQ ID NO: 1130139 - RNA, 19 nt, Artificial Sequence
  Description of Artificial Sequence: Synthetic oligonucleotide
  Antisense strand to SEQ ID NO: 1130138
cuucaucaagcgcacacuu

SEQ ID NO: 1130140 - RNA, 19 nt, Artificial Sequence
  Description of Artificial Sequence: Synthetic oligonucleotide
  Sense strand starting at position 125 of SEQ ID NO: 916096
uguggccuuagguaaauua

SEQ ID NO: 1130141 - RNA, 19 nt, Artificial Sequence
  Description of Artificial Sequence: Synthetic oligonucleotide
  Antisense strand to SEQ ID NO: 1130140
uaauuuaccuaaggccaca

SEQ ID NO: 1130142 - RNA, 19 nt, Artificial Sequence
  Description of Artificial Sequence: Synthetic oligonucleotide
  Sense strand starting at position 134 of SEQ ID NO: 916096
agguaaauuaccugugucu

SEQ ID NO: 1130143 - RNA, 19 nt, Artificial Sequence
  Description of Artificial Sequence: Synthetic oligonucleotide
  Antisense strand to SEQ ID NO: 1130142
agacacagguaauuuaccu

SEQ ID NO: 1130144 - RNA, 19 nt, Artificial Sequence
  Description of Artificial Sequence: Synthetic oligonucleotide
  Sense strand starting at position 161 of SEQ ID NO: 916096
ucaccugauuuauagguuu

SEQ ID NO: 1130145 - RNA, 19 nt, Artificial Sequence
  Description of Artificial Sequence: Synthetic oligonucleotide
  Antisense strand to SEQ ID NO: 1130144
aaaccuauaaaucagguga

SEQ ID NO: 1130146 - RNA, 19 nt, Artificial Sequence
  Description of Artificial Sequence: Synthetic oligonucleotide
  Sense strand starting at position 167 of SEQ ID NO: 916096
gauuuauagguuuguugug

SEQ ID NO: 1130147 - RNA, 19 nt, Artificial Sequence
  Description of Artificial Sequence: Synthetic oligonucleotide
  Antisense strand to SEQ ID NO: 1130146
cacaacaaaccuauaaauc

SEQ ID NO: 1130148 - RNA, 19 nt, Artificial Sequence
  Description of Artificial Sequence: Synthetic oligonucleotide
  Sense strand starting at position 237 of SEQ ID NO: 916096
uguagcaagugcucgauaa

SEQ ID NO: 1130149 - RNA, 19 nt, Artificial Sequence
  Description of Artificial Sequence: Synthetic oligonucleotide
  Antisense strand to SEQ ID NO: 1130148
uuaucgagcacuugcuaca

SEQ ID NO: 1130150 - RNA, 19 nt, Artificial Sequence
  Description of Artificial Sequence: Synthetic oligonucleotide
  Sense strand starting at position 238 of SEQ ID NO: 916096
guagcaagugcucgauaau

SEQ ID NO: 1130151 - RNA, 19 nt, Artificial Sequence
  Description of Artificial Sequence: Synthetic oligonucleotide
  Antisense strand to SEQ ID NO: 1130150
auuaucgagcacuugcuac

SEQ ID NO: 1130152 - RNA, 19 nt, Artificial Sequence
  Description of Artificial Sequence: Synthetic oligonucleotide
  Sense strand starting at position 239 of SEQ ID NO: 916096
uagcaagugcucgauaauu

SEQ ID NO: 1130153 - RNA, 19 nt, Artificial Sequence
  Description of Artificial Sequence: Synthetic oligonucleotide
  Antisense strand to SEQ ID NO: 1130152
aauuaucgagcacuugcua

SEQ ID NO: 1130154 - RNA, 19 nt, Artificial Sequence
  Description of Artificial Sequence: Synthetic oligonucleotide
  Sense strand starting at position 670 of SEQ ID NO: 916096
uacgcccuguugucuuaaa

SEQ ID NO: 1130155 - RNA, 19 nt, Artificial Sequence
  Description of Artificial Sequence: Synthetic oligonucleotide
  Antisense strand to SEQ ID NO: 1130154
uuuaagacaacagggcgua

SEQ ID NO: 1130156 - RNA, 19 nt, Artificial Sequence
  Description of Artificial Sequence: Synthetic oligonucleotide
  Sense strand starting at position 672 of SEQ ID NO: 916096
cgcccuguugucuuaaagu

SEQ ID NO: 1130157 - RNA, 19 nt, Artificial Sequence
  Description of Artificial Sequence: Synthetic oligonucleotide
  Antisense strand to SEQ ID NO: 1130156
acuuuaagacaacagggcg

SEQ ID NO: 1130158 - RNA, 19 nt, Artificial Sequence
  Description of Artificial Sequence: Synthetic oligonucleotide
  Sense strand starting at position 694 of SEQ ID NO: 916096
guccaacccuagucucauu

SEQ ID NO: 1130159 - RNA, 19 nt, Artificial Sequence
  Description of Artificial Sequence: Synthetic oligonucleotide
  Antisense strand to SEQ ID NO: 1130158
aaugagacuaggguuggac

SEQ ID NO: 1130160 - RNA, 19 nt, Artificial Sequence
  Description of Artificial Sequence: Synthetic oligonucleotide
  Sense strand starting at position 743 of SEQ ID NO: 916096
gggagaaauuaaggucgga

SEQ ID NO: 1130161 - RNA, 19 nt, Artificial Sequence
  Description of Artificial Sequence: Synthetic oligonucleotide
  Antisense strand to SEQ ID NO: 1130160
uccgaccuuaauuucuccc

SEQ ID NO: 1130162 - RNA, 19 nt, Artificial Sequence
  Description of Artificial Sequence: Synthetic oligonucleotide
  Sense strand starting at position 748 of SEQ ID NO: 916096
aaauuaaggucggaagagu

SEQ ID NO: 1130163 - RNA, 19 nt, Artificial Sequence
  Description of Artificial Sequence: Synthetic oligonucleotide
  Antisense strand to SEQ ID NO: 1130162
acucuuccgaccuuaauuu

SEQ ID NO: 1130164 - RNA, 19 nt, Artificial Sequence
  Description of Artificial Sequence: Synthetic oligonucleotide
  Sense strand starting at position 777 of SEQ ID NO: 916096
gacugaggaucaguauugu

SEQ ID NO: 1130165 - RNA, 19 nt, Artificial Sequence
  Description of Artificial Sequence: Synthetic oligonucleotide
  Antisense strand to SEQ ID NO: 1130164
acaauacugauccucaguc

SEQ ID NO: 1130166 - RNA, 19 nt, Artificial Sequence
  Description of Artificial Sequence: Synthetic oligonucleotide
  Sense strand starting at position 819 of SEQ ID NO: 916096
gaugaaucuugcccaccga

SEQ ID NO: 1130167 - RNA, 19 nt, Artificial Sequence
  Description of Artificial Sequence: Synthetic oligonucleotide
  Antisense strand to SEQ ID NO: 1130166
ucggugggcaagauucauc

SEQ ID NO: 1130168 - RNA, 19 nt, Artificial Sequence
  Description of Artificial Sequence: Synthetic oligonucleotide
  Sense strand starting at position 820 of SEQ ID NO: 916096
augaaucuugcccaccgau

SEQ ID NO: 1130169 - RNA, 19 nt, Artificial Sequence
  Description of Artificial Sequence: Synthetic oligonucleotide
  Antisense strand to SEQ ID NO: 1130168
aucggugggcaagauucau

SEQ ID NO: 1130170 - RNA, 19 nt, Artificial Sequence
  Description of Artificial Sequence: Synthetic oligonucleotide
  Sense strand starting at position 835 of SEQ ID NO: 916096
cgaugauacccugacauuc

SEQ ID NO: 1130171 - RNA, 19 nt, Artificial Sequence
  Description of Artificial Sequence: Synthetic oligonucleotide
  Antisense strand to SEQ ID NO: 1130170
gaaugucaggguaucaucg

SEQ ID NO: 1130172 - RNA, 19 nt, Artificial Sequence
  Description of Artificial Sequence: Synthetic oligonucleotide
  Sense strand starting at position 846 of SEQ ID NO: 916096
ugacauucuugccuggaca

SEQ ID NO: 1130173 - RNA, 19 nt, Artificial Sequence
  Description of Artificial Sequence: Synthetic oligonucleotide
  Antisense strand to SEQ ID NO: 1130172
uguccaggcaagaauguca

SEQ ID NO: 1130174 - RNA, 19 nt, Artificial Sequence
  Description of Artificial Sequence: Synthetic oligonucleotide
  Sense strand starting at position 863 of SEQ ID NO: 916096
caggguuauuuggagggaa

SEQ ID NO: 1130175 - RNA, 19 nt, Artificial Sequence
  Description of Artificial Sequence: Synthetic oligonucleotide
  Antisense strand to SEQ ID NO: 1130174
uucccuccaaauaacccug

SEQ ID NO: 1130176 - RNA, 19 nt, Artificial Sequence
  Description of Artificial Sequence: Synthetic oligonucleotide
  Sense strand starting at position 1091 of SEQ ID NO: 916096
accguauaguucuucguaa

SEQ ID NO: 1130177 - RNA, 19 nt, Artificial Sequence
  Description of Artificial Sequence: Synthetic oligonucleotide
  Antisense strand to SEQ ID NO: 1130176
uuacgaagaacuauacggu

SEQ ID NO: 1130178 - RNA, 19 nt, Artificial Sequence
  Description of Artificial Sequence: Synthetic oligonucleotide
  Sense strand starting at position 1098 of SEQ ID NO: 916096
aguucuucguaauccucua

SEQ ID NO: 1130179 - RNA, 19 nt, Artificial Sequence
  Description of Artificial Sequence: Synthetic oligonucleotide
  Antisense strand to SEQ ID NO: 1130178
uagaggauuacgaagaacu

SEQ ID NO: 1130180 - RNA, 19 nt, Artificial Sequence
  Description of Artificial Sequence: Synthetic oligonucleotide
  Sense strand starting at position 1112 of SEQ ID NO: 916096
cucuaucauuuguagguga

SEQ ID NO: 1130181 - RNA, 19 nt, Artificial Sequence
  Description of Artificial Sequence: Synthetic oligonucleotide
  Antisense strand to SEQ ID NO: 1130180
ucaccuacaaaugauagag

SEQ ID NO: 1130182 - RNA, 19 nt, Artificial Sequence
  Description of Artificial Sequence: Synthetic oligonucleotide
  Sense strand starting at position 1307 of SEQ ID NO: 916096
gcgccaguugccuuugacu

SEQ ID NO: 1130183 - RNA, 19 nt, Artificial Sequence
  Description of Artificial Sequence: Synthetic oligonucleotide
  Antisense strand to SEQ ID NO: 1130182
agucaaaggcaacuggcgc

SEQ ID NO: 1130184 - RNA, 19 nt, Artificial Sequence
  Description of Artificial Sequence: Synthetic oligonucleotide
  Sense strand starting at position 2018 of SEQ ID NO: 916096
ccgccugucgggagaugua

SEQ ID NO: 1130185 - RNA, 19 nt, Artificial Sequence
  Description of Artificial Sequence: Synthetic oligonucleotide
  Antisense strand to SEQ ID NO: 1130184
uacaucucccgacaggcgg

SEQ ID NO: 1130186 - RNA, 19 nt, Artificial Sequence
  Description of Artificial Sequence: Synthetic oligonucleotide
  Sense strand starting at position 2161 of SEQ ID NO: 916096
gcgugucuaccgcagauau

SEQ ID NO: 1130187 - RNA, 19 nt, Artificial Sequence
  Description of Artificial Sequence: Synthetic oligonucleotide
  Antisense strand to SEQ ID NO: 1130186
auaucugcgguagacacgc

SEQ ID NO: 1130188 - RNA, 19 nt, Artificial Sequence
  Description of Artificial Sequence: Synthetic oligonucleotide
  Sense strand starting at position 2163 of SEQ ID NO: 916096
gugucuaccgcagauaucu

SEQ ID NO: 1130189 - RNA, 19 nt, Artificial Sequence
  Description of Artificial Sequence: Synthetic oligonucleotide
  Antisense strand to SEQ ID NO: 1130188
agauaucugcgguagacac

SEQ ID NO: 1130190 - RNA, 19 nt, Artificial Sequence
  Description of Artificial Sequence: Synthetic oligonucleotide
  Sense strand starting at position 2169 of SEQ ID NO: 916096
accgcagauaucuguagau

SEQ ID NO: 1130191 - RNA, 19 nt, Artificial Sequence
  Description of Artificial Sequence: Synthetic oligonucleotide
  Antisense strand to SEQ ID NO: 1130190
aucuacagauaucugcggu

SEQ ID NO: 1130192 - RNA, 19 nt, Artificial Sequence
  Description of Artificial Sequence: Synthetic oligonucleotide
  Sense strand starting at position 2190 of SEQ ID NO: 916096
ucugaacgucgcuguuaga

SEQ ID NO: 1130193 - RNA, 19 nt, Artificial Sequence
  Description of Artificial Sequence: Synthetic oligonucleotide
  Antisense strand to SEQ ID NO: 1130192
ucuaacagcgacguucaga

SEQ ID NO: 1130194 - RNA, 19 nt, Artificial Sequence
  Description of Artificial Sequence: Synthetic oligonucleotide
  Sense strand starting at position 2230 of SEQ ID NO: 916096
cauagugaauaggauaaau

SEQ ID NO: 1130195 - RNA, 19 nt, Artificial Sequence
  Description of Artificial Sequence: Synthetic oligonucleotide
  Antisense strand to SEQ ID NO: 1130194
auuuauccuauucacuaug

SEQ ID NO: 1130196 - RNA, 19 nt, Artificial Sequence
  Description of Artificial Sequence: Synthetic oligonucleotide
  Sense strand starting at position 3106 of SEQ ID NO: 916096
cauauucggccuuguuuau

SEQ ID NO: 1130197 - RNA, 19 nt, Artificial Sequence
  Description of Artificial Sequence: Synthetic oligonucleotide
  Antisense strand to SEQ ID NO: 1130196
auaaacaaggccgaauaug

SEQ ID NO: 1130198 - RNA, 19 nt, Artificial Sequence
  Description of Artificial Sequence: Synthetic oligonucleotide
  Sense strand starting at position 3115 of SEQ ID NO: 916096
ccuuguuuauaguuagaag

SEQ ID NO: 1130199 - RNA, 19 nt, Artificial Sequence
  Description of Artificial Sequence: Synthetic oligonucleotide
  Antisense strand to SEQ ID NO: 1130198
cuucuaacuauaaacaagg

SEQ ID NO: 1130200 - RNA, 19 nt, Artificial Sequence
  Description of Artificial Sequence: Synthetic oligonucleotide
  Sense strand starting at position 3164 of SEQ ID NO: 916096
guuagugcuguguucuaca

SEQ ID NO: 1130201 - RNA, 19 nt, Artificial Sequence
  Description of Artificial Sequence: Synthetic oligonucleotide
  Antisense strand to SEQ ID NO: 1130200
uguagaacacagcacuaac

SEQ ID NO: 1130202 - RNA, 19 nt, Artificial Sequence
  Description of Artificial Sequence: Synthetic oligonucleotide
  Sense strand starting at position 3216 of SEQ ID NO: 916096
gggcuaagacugcauaguu

SEQ ID NO: 1130203 - RNA, 19 nt, Artificial Sequence
  Description of Artificial Sequence: Synthetic oligonucleotide
  Antisense strand to SEQ ID NO: 1130202
aacuaugcagucuuagccc

SEQ ID NO: 1130204 - RNA, 19 nt, Artificial Sequence
  Description of Artificial Sequence: Synthetic oligonucleotide
  Sense strand starting at position 3251 of SEQ ID NO: 916096
auagaaagaagucgaggua

SEQ ID NO: 1130205 - RNA, 19 nt, Artificial Sequence
  Description of Artificial Sequence: Synthetic oligonucleotide
  Antisense strand to SEQ ID NO: 1130204
uaccucgacuucuuucuau

SEQ ID NO: 1130206 - RNA, 19 nt, Artificial Sequence
  Description of Artificial Sequence: Synthetic oligonucleotide
  Sense strand starting at position 3276 of SEQ ID NO: 916096
accagauauucuuaggaca

SEQ ID NO: 1130207 - RNA, 19 nt, Artificial Sequence
  Description of Artificial Sequence: Synthetic oligonucleotide
  Antisense strand to SEQ ID NO: 1130206
uguccuaagaauaucuggu

SEQ ID NO: 1130208 - RNA, 19 nt, Artificial Sequence
  Description of Artificial Sequence: Synthetic oligonucleotide
  Sense strand starting at position 3278 of SEQ ID NO: 916096
cagauauucuuaggacaga

SEQ ID NO: 1130209 - RNA, 19 nt, Artificial Sequence
  Description of Artificial Sequence: Synthetic oligonucleotide
  Antisense strand to SEQ ID NO: 1130208
ucuguccuaagaauaucug

SEQ ID NO: 1130210 - RNA, 19 nt, Artificial Sequence
  Description of Artificial Sequence: Synthetic oligonucleotide
  Sense strand starting at position 3279 of SEQ ID NO: 916096
agauauucuuaggacagag

SEQ ID NO: 1130211 - RNA, 19 nt, Artificial Sequence
  Description of Artificial Sequence: Synthetic oligonucleotide
  Antisense strand to SEQ ID NO: 1130210
cucuguccuaagaauaucu

SEQ ID NO: 1130212 - RNA, 19 nt, Artificial Sequence
  Description of Artificial Sequence: Synthetic oligonucleotide
  Sense strand starting at position 3295 of SEQ ID NO: 916096
gagaaccaucuuuguuuga

SEQ ID NO: 1130213 - RNA, 19 nt, Artificial Sequence
  Description of Artificial Sequence: Synthetic oligonucleotide
  Antisense strand to SEQ ID NO: 1130212
ucaaacaaagaugguucuc

SEQ ID NO: 1130214 - RNA, 19 nt, Artificial Sequence
  Description of Artificial Sequence: Synthetic oligonucleotide
  Sense strand starting at position 3296 of SEQ ID NO: 916096
agaaccaucuuuguuugaa

SEQ ID NO: 1130215 - RNA, 19 nt, Artificial Sequence
  Description of Artificial Sequence: Synthetic oligonucleotide
  Antisense strand to SEQ ID NO: 1130214
uucaaacaaagaugguucu

SEQ ID NO: 1130216 - RNA, 19 nt, Artificial Sequence
  Description of Artificial Sequence: Synthetic oligonucleotide
  Sense strand starting at position 3315 of SEQ ID NO: 916096
aagugugcgcuugaugaag

SEQ ID NO: 1130217 - RNA, 19 nt, Artificial Sequence
  Description of Artificial Sequence: Synthetic oligonucleotide
  Antisense strand to SEQ ID NO: 1130216
cuucaucaagcgcacacuu

SEQ ID NO: 1130218 - RNA, 19 nt, Artificial Sequence
  Description of Artificial Sequence: Synthetic oligonucleotide
  Sense strand starting at position 3320 of SEQ ID NO: 916096
ugcgcuugaugaagaguga

SEQ ID NO: 1130219 - RNA, 19 nt, Artificial Sequence
  Description of Artificial Sequence: Synthetic oligonucleotide
  Antisense strand to SEQ ID NO: 1130218
ucacucuucaucaagcgca

SEQ ID NO: 1130220 - RNA, 19 nt, Artificial Sequence
  Description of Artificial Sequence: Synthetic oligonucleotide
  Sense strand starting at position 41 of SEQ ID NO: 916097
ccuccuaauuagcugugau

SEQ ID NO: 1130221 - RNA, 19 nt, Artificial Sequence
  Description of Artificial Sequence: Synthetic oligonucleotide
  Antisense strand to SEQ ID NO: 1130220
aucacagcuaauuaggagg

SEQ ID NO: 1130222 - RNA, 19 nt, Artificial Sequence
  Description of Artificial Sequence: Synthetic oligonucleotide
  Sense strand starting at position 44 of SEQ ID NO: 916097
ccuaauuagcugugauuac

SEQ ID NO: 1130223 - RNA, 19 nt, Artificial Sequence
  Description of Artificial Sequence: Synthetic oligonucleotide
  Antisense strand to SEQ ID NO: 1130222
guaaucacagcuaauuagg

SEQ ID NO: 1130224 - RNA, 19 nt, Artificial Sequence
  Description of Artificial Sequence: Synthetic oligonucleotide
  Sense strand starting at position 209 of SEQ ID NO: 916097
cgcaccuggcuguaaauaa

SEQ ID NO: 1130225 - RNA, 19 nt, Artificial Sequence
  Description of Artificial Sequence: Synthetic oligonucleotide
  Antisense strand to SEQ ID NO: 1130224
uuauuuacagccaggugcg

SEQ ID NO: 1130226 - RNA, 19 nt, Artificial Sequence
  Description of Artificial Sequence: Synthetic oligonucleotide
  Sense strand starting at position 266 of SEQ ID NO: 916097
auuuauaacugacaggguu

SEQ ID NO: 1130227 - RNA, 19 nt, Artificial Sequence
  Description of Artificial Sequence: Synthetic oligonucleotide
  Antisense strand to SEQ ID NO: 1130226
aacccugucaguuauaaau

SEQ ID NO: 1130228 - RNA, 19 nt, Artificial Sequence
  Description of Artificial Sequence: Synthetic oligonucleotide
  Sense strand starting at position 337 of SEQ ID NO: 916097
ugauuaaggucauugugua

SEQ ID NO: 1130229 - RNA, 19 nt, Artificial Sequence
  Description of Artificial Sequence: Synthetic oligonucleotide
  Antisense strand to SEQ ID NO: 1130228
uacacaaugaccuuaauca

SEQ ID NO: 1130230 - RNA, 19 nt, Artificial Sequence
  Description of Artificial Sequence: Synthetic oligonucleotide
  Sense strand starting at position 338 of SEQ ID NO: 916097
gauuaaggucauuguguau

SEQ ID NO: 1130231 - RNA, 19 nt, Artificial Sequence
  Description of Artificial Sequence: Synthetic oligonucleotide
  Antisense strand to SEQ ID NO: 1130230
auacacaaugaccuuaauc

SEQ ID NO: 1130232 - RNA, 19 nt, Artificial Sequence
  Description of Artificial Sequence: Synthetic oligonucleotide
  Sense strand starting at position 342 of SEQ ID NO: 916097
aaggucauuguguaugacu

SEQ ID NO: 1130233 - RNA, 19 nt, Artificial Sequence
  Description of Artificial Sequence: Synthetic oligonucleotide
  Antisense strand to SEQ ID NO: 1130232
agucauacacaaugaccuu

SEQ ID NO: 1130234 - RNA, 19 nt, Artificial Sequence
  Description of Artificial Sequence: Synthetic oligonucleotide
  Sense strand starting at position 403 of SEQ ID NO: 916097
gaggacugucuguacugca

SEQ ID NO: 1130235 - RNA, 19 nt, Artificial Sequence
  Description of Artificial Sequence: Synthetic oligonucleotide
  Antisense strand to SEQ ID NO: 1130234
ugcaguacagacaguccuc

SEQ ID NO: 1130236 - RNA, 19 nt, Artificial Sequence
  Description of Artificial Sequence: Synthetic oligonucleotide
  Sense strand starting at position 486 of SEQ ID NO: 916097
gugugaaauguugauuaua

SEQ ID NO: 1130237 - RNA, 19 nt, Artificial Sequence
  Description of Artificial Sequence: Synthetic oligonucleotide
  Antisense strand to SEQ ID NO: 1130236
uauaaucaacauuucacac

SEQ ID NO: 1130238 - RNA, 19 nt, Artificial Sequence
  Description of Artificial Sequence: Synthetic oligonucleotide
  Sense strand starting at position 488 of SEQ ID NO: 916097
gugaaauguugauuauaca

SEQ ID NO: 1130239 - RNA, 19 nt, Artificial Sequence
  Description of Artificial Sequence: Synthetic oligonucleotide
  Antisense strand to SEQ ID NO: 1130238
uguauaaucaacauuucac

SEQ ID NO: 1130240 - RNA, 19 nt, Artificial Sequence
  Description of Artificial Sequence: Synthetic oligonucleotide
  Sense strand starting at position 1130 of SEQ ID NO: 916097
cagauuaaacuggguuuga

SEQ ID NO: 1130241 - RNA, 19 nt, Artificial Sequence
  Description of Artificial Sequence: Synthetic oligonucleotide
  Antisense strand to SEQ ID NO: 1130240
ucaaacccaguuuaaucug

SEQ ID NO: 1130242 - RNA, 19 nt, Artificial Sequence
  Description of Artificial Sequence: Synthetic oligonucleotide
  Sense strand starting at position 1209 of SEQ ID NO: 916097
ucucaauuuccucacgugu

SEQ ID NO: 1130243 - RNA, 19 nt, Artificial Sequence
  Description of Artificial Sequence: Synthetic oligonucleotide
  Antisense strand to SEQ ID NO: 1130242
acacgugaggaaauugaga

SEQ ID NO: 1130244 - RNA, 19 nt, Artificial Sequence
  Description of Artificial Sequence: Synthetic oligonucleotide
  Sense strand starting at position 1215 of SEQ ID NO: 916097
uuuccucacguguaauaug

SEQ ID NO: 1130245 - RNA, 19 nt, Artificial Sequence
  Description of Artificial Sequence: Synthetic oligonucleotide
  Antisense strand to SEQ ID NO: 1130244
cauauuacacgugaggaaa

SEQ ID NO: 1130246 - RNA, 19 nt, Artificial Sequence
  Description of Artificial Sequence: Synthetic oligonucleotide
  Sense strand starting at position 1247 of SEQ ID NO: 916097
ccacuacuggaauguugaa

SEQ ID NO: 1130247 - RNA, 19 nt, Artificial Sequence
  Description of Artificial Sequence: Synthetic oligonucleotide
  Antisense strand to SEQ ID NO: 1130246
uucaacauuccaguagugg

SEQ ID NO: 1130248 - RNA, 19 nt, Artificial Sequence
  Description of Artificial Sequence: Synthetic oligonucleotide
  Sense strand starting at position 1278 of SEQ ID NO: 916097
aaauaaugucuguacguug

SEQ ID NO: 1130249 - RNA, 19 nt, Artificial Sequence
  Description of Artificial Sequence: Synthetic oligonucleotide
  Antisense strand to SEQ ID NO: 1130248
caacguacagacauuauuu

SEQ ID NO: 1130250 - RNA, 19 nt, Artificial Sequence
  Description of Artificial Sequence: Synthetic oligonucleotide
  Sense strand starting at position 1313 of SEQ ID NO: 916097
cgcucaguugaugggauuu

SEQ ID NO: 1130251 - RNA, 19 nt, Artificial Sequence
  Description of Artificial Sequence: Synthetic oligonucleotide
  Antisense strand to SEQ ID NO: 1130250
aaaucccaucaacugagcg

SEQ ID NO: 1130252 - RNA, 19 nt, Artificial Sequence
  Description of Artificial Sequence: Synthetic oligonucleotide
  Sense strand starting at position 1942 of SEQ ID NO: 916097
gcaauagcuccauagagca

SEQ ID NO: 1130253 - RNA, 19 nt, Artificial Sequence
  Description of Artificial Sequence: Synthetic oligonucleotide
  Antisense strand to SEQ ID NO: 1130252
ugcucuauggagcuauugc

SEQ ID NO: 1130254 - RNA, 19 nt, Artificial Sequence
  Description of Artificial Sequence: Synthetic oligonucleotide
  Sense strand starting at position 2065 of SEQ ID NO: 916097
gccgaacgcgcccugaaau

SEQ ID NO: 1130255 - RNA, 19 nt, Artificial Sequence
  Description of Artificial Sequence: Synthetic oligonucleotide
  Antisense strand to SEQ ID NO: 1130254
auuucagggcgcguucggc

SEQ ID NO: 1130256 - RNA, 19 nt, Artificial Sequence
  Description of Artificial Sequence: Synthetic oligonucleotide
  Sense strand starting at position 2091 of SEQ ID NO: 916097
acaguugugccggcauuau

SEQ ID NO: 1130257 - RNA, 19 nt, Artificial Sequence
  Description of Artificial Sequence: Synthetic oligonucleotide
  Antisense strand to SEQ ID NO: 1130256
auaaugccggcacaacugu

SEQ ID NO: 1130258 - RNA, 19 nt, Artificial Sequence
  Description of Artificial Sequence: Synthetic oligonucleotide
  Sense strand starting at position 2100 of SEQ ID NO: 916097
ccggcauuaucucuaggau

SEQ ID NO: 1130259 - RNA, 19 nt, Artificial Sequence
  Description of Artificial Sequence: Synthetic oligonucleotide
  Antisense strand to SEQ ID NO: 1130258
auccuagagauaaugccgg

SEQ ID NO: 1130260 - RNA, 19 nt, Artificial Sequence
  Description of Artificial Sequence: Synthetic oligonucleotide
  Sense strand starting at position 2101 of SEQ ID NO: 916097
cggcauuaucucuaggauc

SEQ ID NO: 1130261 - RNA, 19 nt, Artificial Sequence
  Description of Artificial Sequence: Synthetic oligonucleotide
  Antisense strand to SEQ ID NO: 1130260
gauccuagagauaaugccg

SEQ ID NO: 1130262 - RNA, 19 nt, Artificial Sequence
  Description of Artificial Sequence: Synthetic oligonucleotide
  Sense strand starting at position 2103 of SEQ ID NO: 916097
gcauuaucucuaggaucca

SEQ ID NO: 1130263 - RNA, 19 nt, Artificial Sequence
  Description of Artificial Sequence: Synthetic oligonucleotide
  Antisense strand to SEQ ID NO: 1130262
uggauccuagagauaaugc

SEQ ID NO: 1130264 - RNA, 19 nt, Artificial Sequence
  Description of Artificial Sequence: Synthetic oligonucleotide
  Sense strand starting at position 2118 of SEQ ID NO: 916097
uccaaaggguggucucuaa

SEQ ID NO: 1130265 - RNA, 19 nt, Artificial Sequence
  Description of Artificial Sequence: Synthetic oligonucleotide
  Antisense strand to SEQ ID NO: 1130264
uuagagaccacccuuugga

SEQ ID NO: 1130266 - RNA, 19 nt, Artificial Sequence
  Description of Artificial Sequence: Synthetic oligonucleotide
  Sense strand starting at position 2122 of SEQ ID NO: 916097
aaggguggucucuaaguau

SEQ ID NO: 1130267 - RNA, 19 nt, Artificial Sequence
  Description of Artificial Sequence: Synthetic oligonucleotide
  Antisense strand to SEQ ID NO: 1130266
auacuuagagaccacccuu

SEQ ID NO: 1130268 - RNA, 19 nt, Artificial Sequence
  Description of Artificial Sequence: Synthetic oligonucleotide
  Sense strand starting at position 2126 of SEQ ID NO: 916097
guggucucuaaguaucgga

SEQ ID NO: 1130269 - RNA, 19 nt, Artificial Sequence
  Description of Artificial Sequence: Synthetic oligonucleotide
  Antisense strand to SEQ ID NO: 1130268
uccgauacuuagagaccac

SEQ ID NO: 1130270 - RNA, 19 nt, Artificial Sequence
  Description of Artificial Sequence: Synthetic oligonucleotide
  Sense strand starting at position 2271 of SEQ ID NO: 916097
cucgcaagauauccaggaa

SEQ ID NO: 1130271 - RNA, 19 nt, Artificial Sequence
  Description of Artificial Sequence: Synthetic oligonucleotide
  Antisense strand to SEQ ID NO: 1130270
uuccuggauaucuugcgag

SEQ ID NO: 1130272 - RNA, 19 nt, Artificial Sequence
  Description of Artificial Sequence: Synthetic oligonucleotide
  Sense strand starting at position 2274 of SEQ ID NO: 916097
gcaagauauccaggaacuc

SEQ ID NO: 1130273 - RNA, 19 nt, Artificial Sequence
  Description of Artificial Sequence: Synthetic oligonucleotide
  Antisense strand to SEQ ID NO: 1130272
gaguuccuggauaucuugc

SEQ ID NO: 1130274 - RNA, 19 nt, Artificial Sequence
  Description of Artificial Sequence: Synthetic oligonucleotide
  Sense strand starting at position 2354 of SEQ ID NO: 916097
ggccaauuccugcacacuu

SEQ ID NO: 1130275 - RNA, 19 nt, Artificial Sequence
  Description of Artificial Sequence: Synthetic oligonucleotide
  Antisense strand to SEQ ID NO: 1130274
aagugugcaggaauuggcc

SEQ ID NO: 1130276 - RNA, 19 nt, Artificial Sequence
  Description of Artificial Sequence: Synthetic oligonucleotide
  Sense strand starting at position 2370 of SEQ ID NO: 916097
cuuuguugagcguaagaau

SEQ ID NO: 1130277 - RNA, 19 nt, Artificial Sequence
  Description of Artificial Sequence: Synthetic oligonucleotide
  Antisense strand to SEQ ID NO: 1130276
auucuuacgcucaacaaag

SEQ ID NO: 1130278 - RNA, 19 nt, Artificial Sequence
  Description of Artificial Sequence: Synthetic oligonucleotide
  Sense strand starting at position 2502 of SEQ ID NO: 916097
gcuaaagaugcagaccauu

SEQ ID NO: 1130279 - RNA, 19 nt, Artificial Sequence
  Description of Artificial Sequence: Synthetic oligonucleotide
  Antisense strand to SEQ ID NO: 1130278
aauggucugcaucuuuagc

SEQ ID NO: 1130280 - RNA, 19 nt, Artificial Sequence
  Description of Artificial Sequence: Synthetic oligonucleotide
  Sense strand starting at position 2510 of SEQ ID NO: 916097
ugcagaccauucuugagaa

SEQ ID NO: 1130281 - RNA, 19 nt, Artificial Sequence
  Description of Artificial Sequence: Synthetic oligonucleotide
  Antisense strand to SEQ ID NO: 1130280
uucucaagaauggucugca

SEQ ID NO: 1130282 - RNA, 19 nt, Artificial Sequence
  Description of Artificial Sequence: Synthetic oligonucleotide
  Sense strand starting at position 2563 of SEQ ID NO: 916097
gacagacuucuuuguucug

SEQ ID NO: 1130283 - RNA, 19 nt, Artificial Sequence
  Description of Artificial Sequence: Synthetic oligonucleotide
  Antisense strand to SEQ ID NO: 1130282
cagaacaaagaagucuguc

SEQ ID NO: 1130284 - RNA, 19 nt, Artificial Sequence
  Description of Artificial Sequence: Synthetic oligonucleotide
  Sense strand starting at position 2615 of SEQ ID NO: 916097
gaacgaaagcucugguauc

SEQ ID NO: 1130285 - RNA, 19 nt, Artificial Sequence
  Description of Artificial Sequence: Synthetic oligonucleotide
  Antisense strand to SEQ ID NO: 1130284
gauaccagagcuuucguuc

SEQ ID NO: 1130286 - RNA, 19 nt, Artificial Sequence
  Description of Artificial Sequence: Synthetic oligonucleotide
  Sense strand starting at position 2816 of SEQ ID NO: 916097
cuuggauuacuguauguuu

SEQ ID NO: 1130287 - RNA, 19 nt, Artificial Sequence
  Description of Artificial Sequence: Synthetic oligonucleotide
  Antisense strand to SEQ ID NO: 1130286
aaacauacaguaauccaag

SEQ ID NO: 1130288 - RNA, 19 nt, Artificial Sequence
  Description of Artificial Sequence: Synthetic oligonucleotide
  Sense strand starting at position 2857 of SEQ ID NO: 916097
guauguuuccuguaaauau

SEQ ID NO: 1130289 - RNA, 19 nt, Artificial Sequence
  Description of Artificial Sequence: Synthetic oligonucleotide
  Antisense strand to SEQ ID NO: 1130288
auauuuacaggaaacauac

SEQ ID NO: 1130290 - RNA, 19 nt, Artificial Sequence
  Description of Artificial Sequence: Synthetic oligonucleotide
  Sense strand starting at position 2933 of SEQ ID NO: 916097
gguuuaauauagccugaca

SEQ ID NO: 1130291 - RNA, 19 nt, Artificial Sequence
  Description of Artificial Sequence: Synthetic oligonucleotide
  Antisense strand to SEQ ID NO: 1130290
ugucaggcuauauuaaacc

SEQ ID NO: 1130292 - RNA, 19 nt, Artificial Sequence
  Description of Artificial Sequence: Synthetic oligonucleotide
  Sense strand starting at position 2935 of SEQ ID NO: 916097
uuuaauauagccugacaga

SEQ ID NO: 1130293 - RNA, 19 nt, Artificial Sequence
  Description of Artificial Sequence: Synthetic oligonucleotide
  Antisense strand to SEQ ID NO: 1130292
ucugucaggcuauauuaaa

SEQ ID NO: 1130294 - RNA, 19 nt, Artificial Sequence
  Description of Artificial Sequence: Synthetic oligonucleotide
  Sense strand starting at position 3501 of SEQ ID NO: 916097
aagaauggaucucaggauu

SEQ ID NO: 1130295 - RNA, 19 nt, Artificial Sequence
  Description of Artificial Sequence: Synthetic oligonucleotide
  Antisense strand to SEQ ID NO: 1130294
aauccugagauccauucuu

SEQ ID NO: 1130296 - RNA, 19 nt, Artificial Sequence
  Description of Artificial Sequence: Synthetic oligonucleotide
  Sense strand starting at position 3527 of SEQ ID NO: 916097
guuccuucugcacaucaga

SEQ ID NO: 1130297 - RNA, 19 nt, Artificial Sequence
  Description of Artificial Sequence: Synthetic oligonucleotide
  Antisense strand to SEQ ID NO: 1130296
ucugaugugcagaaggaac

SEQ ID NO: 1130298 - RNA, 19 nt, Artificial Sequence
  Description of Artificial Sequence: Synthetic oligonucleotide
  Sense strand starting at position 3535 of SEQ ID NO: 916097
ugcacaucagauuaaguau

SEQ ID NO: 1130299 - RNA, 19 nt, Artificial Sequence
  Description of Artificial Sequence: Synthetic oligonucleotide
  Antisense strand to SEQ ID NO: 1130298
auacuuaaucugaugugca

SEQ ID NO: 1130300 - RNA, 19 nt, Artificial Sequence
  Description of Artificial Sequence: Synthetic oligonucleotide
  Sense strand starting at position 181 of SEQ ID NO: 916098
gcaacaaaucugggauuga

SEQ ID NO: 1130301 - RNA, 19 nt, Artificial Sequence
  Description of Artificial Sequence: Synthetic oligonucleotide
  Antisense strand to SEQ ID NO: 1130300
ucaaucccagauuuguugc

SEQ ID NO: 1130302 - RNA, 19 nt, Artificial Sequence
  Description of Artificial Sequence: Synthetic oligonucleotide
  Sense strand starting at position 210 of SEQ ID NO: 916098
ggaacuaucccaggucaca

SEQ ID NO: 1130303 - RNA, 19 nt, Artificial Sequence
  Description of Artificial Sequence: Synthetic oligonucleotide
  Antisense strand to SEQ ID NO: 1130302
ugugaccugggauaguucc

SEQ ID NO: 1130304 - RNA, 19 nt, Artificial Sequence
  Description of Artificial Sequence: Synthetic oligonucleotide
  Sense strand starting at position 228 of SEQ ID NO: 916098
acgagaaacccggauguca

SEQ ID NO: 1130305 - RNA, 19 nt, Artificial Sequence
  Description of Artificial Sequence: Synthetic oligonucleotide
  Antisense strand to SEQ ID NO: 1130304
ugacauccggguuucucgu

SEQ ID NO: 1130306 - RNA, 19 nt, Artificial Sequence
  Description of Artificial Sequence: Synthetic oligonucleotide
  Sense strand starting at position 230 of SEQ ID NO: 916098
gagaaacccggaugucauc

SEQ ID NO: 1130307 - RNA, 19 nt, Artificial Sequence
  Description of Artificial Sequence: Synthetic oligonucleotide
  Antisense strand to SEQ ID NO: 1130306
gaugacauccggguuucuc

SEQ ID NO: 1130308 - RNA, 19 nt, Artificial Sequence
  Description of Artificial Sequence: Synthetic oligonucleotide
  Sense strand starting at position 236 of SEQ ID NO: 916098
cccggaugucaucauagca

SEQ ID NO: 1130309 - RNA, 19 nt, Artificial Sequence
  Description of Artificial Sequence: Synthetic oligonucleotide
  Antisense strand to SEQ ID NO: 1130308
ugcuaugaugacauccggg

SEQ ID NO: 1130310 - RNA, 19 nt, Artificial Sequence
  Description of Artificial Sequence: Synthetic oligonucleotide
  Sense strand starting at position 313 of SEQ ID NO: 916098
cgccucaucgugucugcaa

SEQ ID NO: 1130311 - RNA, 19 nt, Artificial Sequence
  Description of Artificial Sequence: Synthetic oligonucleotide
  Antisense strand to SEQ ID NO: 1130310
uugcagacacgaugaggcg

SEQ ID NO: 1130312 - RNA, 19 nt, Artificial Sequence
  Description of Artificial Sequence: Synthetic oligonucleotide
  Sense strand starting at position 412 of SEQ ID NO: 916098
aacagaaugguauggcauu

SEQ ID NO: 1130313 - RNA, 19 nt, Artificial Sequence
  Description of Artificial Sequence: Synthetic oligonucleotide
  Antisense strand to SEQ ID NO: 1130312
aaugccauaccauucuguu

SEQ ID NO: 1130314 - RNA, 19 nt, Artificial Sequence
  Description of Artificial Sequence: Synthetic oligonucleotide
  Sense strand starting at position 558 of SEQ ID NO: 916098
ccagaaacagcucaucagu

SEQ ID NO: 1130315 - RNA, 19 nt, Artificial Sequence
  Description of Artificial Sequence: Synthetic oligonucleotide
  Antisense strand to SEQ ID NO: 1130314
acugaugagcuguuucugg

SEQ ID NO: 1130316 - RNA, 19 nt, Artificial Sequence
  Description of Artificial Sequence: Synthetic oligonucleotide
  Sense strand starting at position 560 of SEQ ID NO: 916098
agaaacagcucaucaguuu

SEQ ID NO: 1130317 - RNA, 19 nt, Artificial Sequence
  Description of Artificial Sequence: Synthetic oligonucleotide
  Antisense strand to SEQ ID NO: 1130316
aaacugaugagcuguuucu

SEQ ID NO: 1130318 - RNA, 19 nt, Artificial Sequence
  Description of Artificial Sequence: Synthetic oligonucleotide
  Sense strand starting at position 696 of SEQ ID NO: 916098
aagugaaauucucugguag

SEQ ID NO: 1130319 - RNA, 19 nt, Artificial Sequence
  Description of Artificial Sequence: Synthetic oligonucleotide
  Antisense strand to SEQ ID NO: 1130318
cuaccagagaauuucacuu

SEQ ID NO: 1130320 - RNA, 19 nt, Artificial Sequence
  Description of Artificial Sequence: Synthetic oligonucleotide
  Sense strand starting at position 697 of SEQ ID NO: 916098
agugaaauucucugguaga

SEQ ID NO: 1130321 - RNA, 19 nt, Artificial Sequence
  Description of Artificial Sequence: Synthetic oligonucleotide
  Antisense strand to SEQ ID NO: 1130320
ucuaccagagaauuucacu

SEQ ID NO: 1130322 - RNA, 19 nt, Artificial Sequence
  Description of Artificial Sequence: Synthetic oligonucleotide
  Sense strand starting at position 943 of SEQ ID NO: 916098
agacguaauaaucagagca

SEQ ID NO: 1130323 - RNA, 19 nt, Artificial Sequence
  Description of Artificial Sequence: Synthetic oligonucleotide
  Antisense strand to SEQ ID NO: 1130322
ugcucugauuauuacgucu

SEQ ID NO: 1130324 - RNA, 19 nt, Artificial Sequence
  Description of Artificial Sequence: Synthetic oligonucleotide
  Sense strand starting at position 988 of SEQ ID NO: 916098
agugguacacagugagaaa

SEQ ID NO: 1130325 - RNA, 19 nt, Artificial Sequence
  Description of Artificial Sequence: Synthetic oligonucleotide
  Antisense strand to SEQ ID NO: 1130324
uuucucacuguguaccacu

SEQ ID NO: 1130326 - RNA, 19 nt, Artificial Sequence
  Description of Artificial Sequence: Synthetic oligonucleotide
  Sense strand starting at position 1078 of SEQ ID NO: 916098
aauggaaagcaaugugauc

SEQ ID NO: 1130327 - RNA, 19 nt, Artificial Sequence
  Description of Artificial Sequence: Synthetic oligonucleotide
  Antisense strand to SEQ ID NO: 1130326
gaucacauugcuuuccauu

SEQ ID NO: 1130328 - RNA, 19 nt, Artificial Sequence
  Description of Artificial Sequence: Synthetic oligonucleotide
  Sense strand starting at position 1080 of SEQ ID NO: 916098
uggaaagcaaugugaucaa

SEQ ID NO: 1130329 - RNA, 19 nt, Artificial Sequence
  Description of Artificial Sequence: Synthetic oligonucleotide
  Antisense strand to SEQ ID NO: 1130328
uugaucacauugcuuucca

SEQ ID NO: 1130330 - RNA, 19 nt, Artificial Sequence
  Description of Artificial Sequence: Synthetic oligonucleotide
  Sense strand starting at position 1089 of SEQ ID NO: 916098
augugaucaaagugauguu

SEQ ID NO: 1130331 - RNA, 19 nt, Artificial Sequence
  Description of Artificial Sequence: Synthetic oligonucleotide
  Antisense strand to SEQ ID NO: 1130330
aacaucacuuugaucacau

SEQ ID NO: 1130332 - RNA, 19 nt, Artificial Sequence
  Description of Artificial Sequence: Synthetic oligonucleotide
  Sense strand starting at position 1090 of SEQ ID NO: 916098
ugugaucaaagugauguuu

SEQ ID NO: 1130333 - RNA, 19 nt, Artificial Sequence
  Description of Artificial Sequence: Synthetic oligonucleotide
  Antisense strand to SEQ ID NO: 1130332
aaacaucacuuugaucaca

SEQ ID NO: 1130334 - RNA, 19 nt, Artificial Sequence
  Description of Artificial Sequence: Synthetic oligonucleotide
  Sense strand starting at position 1101 of SEQ ID NO: 916098
ugauguuuaggaugacagu

SEQ ID NO: 1130335 - RNA, 19 nt, Artificial Sequence
  Description of Artificial Sequence: Synthetic oligonucleotide
  Antisense strand to SEQ ID NO: 1130334
acugucauccuaaacauca

SEQ ID NO: 1130336 - RNA, 19 nt, Artificial Sequence
  Description of Artificial Sequence: Synthetic oligonucleotide
  Sense strand starting at position 1185 of SEQ ID NO: 916098
gaagcuauuugacaguaaa

SEQ ID NO: 1130337 - RNA, 19 nt, Artificial Sequence
  Description of Artificial Sequence: Synthetic oligonucleotide
  Antisense strand to SEQ ID NO: 1130336
uuuacugucaaauagcuuc

SEQ ID NO: 1130338 - RNA, 19 nt, Artificial Sequence
  Description of Artificial Sequence: Synthetic oligonucleotide
  Sense strand starting at position 1226 of SEQ ID NO: 916098
gugauacagcaguaacagu

SEQ ID NO: 1130339 - RNA, 19 nt, Artificial Sequence
  Description of Artificial Sequence: Synthetic oligonucleotide
  Antisense strand to SEQ ID NO: 1130338
acuguuacugcuguaucac

SEQ ID NO: 1130340 - RNA, 19 nt, Artificial Sequence
  Description of Artificial Sequence: Synthetic oligonucleotide
  Sense strand starting at position 1429 of SEQ ID NO: 916098
ucgacuaaaucaucugaua

SEQ ID NO: 1130341 - RNA, 19 nt, Artificial Sequence
  Description of Artificial Sequence: Synthetic oligonucleotide
  Antisense strand to SEQ ID NO: 1130340
uaucagaugauuuagucga

SEQ ID NO: 1130342 - RNA, 19 nt, Artificial Sequence
  Description of Artificial Sequence: Synthetic oligonucleotide
  Sense strand starting at position 1480 of SEQ ID NO: 916098
ggcccucccugauuaagau

SEQ ID NO: 1130343 - RNA, 19 nt, Artificial Sequence
  Description of Artificial Sequence: Synthetic oligonucleotide
  Antisense strand to SEQ ID NO: 1130342
aucuuaaucagggagggcc

SEQ ID NO: 1130344 - RNA, 19 nt, Artificial Sequence
  Description of Artificial Sequence: Synthetic oligonucleotide
  Sense strand starting at position 1481 of SEQ ID NO: 916098
gcccucccugauuaagauu

SEQ ID NO: 1130345 - RNA, 19 nt, Artificial Sequence
  Description of Artificial Sequence: Synthetic oligonucleotide
  Antisense strand to SEQ ID NO: 1130344
aaucuuaaucagggagggc

SEQ ID NO: 1130346 - RNA, 19 nt, Artificial Sequence
  Description of Artificial Sequence: Synthetic oligonucleotide
  Sense strand starting at position 1551 of SEQ ID NO: 916098
guucauguugguuagauag

SEQ ID NO: 1130347 - RNA, 19 nt, Artificial Sequence
  Description of Artificial Sequence: Synthetic oligonucleotide
  Antisense strand to SEQ ID NO: 1130346
cuaucuaaccaacaugaac

SEQ ID NO: 1130348 - RNA, 19 nt, Artificial Sequence
  Description of Artificial Sequence: Synthetic oligonucleotide
  Sense strand starting at position 1616 of SEQ ID NO: 916098
aucgacaacucagcugaaa

SEQ ID NO: 1130349 - RNA, 19 nt, Artificial Sequence
  Description of Artificial Sequence: Synthetic oligonucleotide
  Antisense strand to SEQ ID NO: 1130348
uuucagcugaguugucgau

SEQ ID NO: 1130350 - RNA, 19 nt, Artificial Sequence
  Description of Artificial Sequence: Synthetic oligonucleotide
  Sense strand starting at position 2028 of SEQ ID NO: 916098
ucaagcgugaguuagauaa

SEQ ID NO: 1130351 - RNA, 19 nt, Artificial Sequence
  Description of Artificial Sequence: Synthetic oligonucleotide
  Antisense strand to SEQ ID NO: 1130350
uuaucuaacucacgcuuga

SEQ ID NO: 1130352 - RNA, 19 nt, Artificial Sequence
  Description of Artificial Sequence: Synthetic oligonucleotide
  Sense strand starting at position 2032 of SEQ ID NO: 916098
gcgugaguuagauaagaca

SEQ ID NO: 1130353 - RNA, 19 nt, Artificial Sequence
  Description of Artificial Sequence: Synthetic oligonucleotide
  Antisense strand to SEQ ID NO: 1130352
ugucuuaucuaacucacgc

SEQ ID NO: 1130354 - RNA, 19 nt, Artificial Sequence
  Description of Artificial Sequence: Synthetic oligonucleotide
  Sense strand starting at position 2052 of SEQ ID NO: 916098
cuuccaugagguggugaaa

SEQ ID NO: 1130355 - RNA, 19 nt, Artificial Sequence
  Description of Artificial Sequence: Synthetic oligonucleotide
  Antisense strand to SEQ ID NO: 1130354
uuucaccaccucauggaag

SEQ ID NO: 1130356 - RNA, 19 nt, Artificial Sequence
  Description of Artificial Sequence: Synthetic oligonucleotide
  Sense strand starting at position 2236 of SEQ ID NO: 916098
aaaggauugcaccauguca

SEQ ID NO: 1130357 - RNA, 19 nt, Artificial Sequence
  Description of Artificial Sequence: Synthetic oligonucleotide
  Antisense strand to SEQ ID NO: 1130356
ugacauggugcaauccuuu

SEQ ID NO: 1130358 - RNA, 19 nt, Artificial Sequence
  Description of Artificial Sequence: Synthetic oligonucleotide
  Sense strand starting at position 2238 of SEQ ID NO: 916098
aggauugcaccaugucaga

SEQ ID NO: 1130359 - RNA, 19 nt, Artificial Sequence
  Description of Artificial Sequence: Synthetic oligonucleotide
  Antisense strand to SEQ ID NO: 1130358
ucugacauggugcaauccu

SEQ ID NO: 1130360 - RNA, 19 nt, Artificial Sequence
  Description of Artificial Sequence: Synthetic oligonucleotide
  Sense strand starting at position 2322 of SEQ ID NO: 916098
gacaaaggauaugaagaau

SEQ ID NO: 1130361 - RNA, 19 nt, Artificial Sequence
  Description of Artificial Sequence: Synthetic oligonucleotide
  Antisense strand to SEQ ID NO: 1130360
auucuucauauccuuuguc

SEQ ID NO: 1130362 - RNA, 19 nt, Artificial Sequence
  Description of Artificial Sequence: Synthetic oligonucleotide
  Sense strand starting at position 2508 of SEQ ID NO: 916098
gcacguguaacugacugaa

SEQ ID NO: 1130363 - RNA, 19 nt, Artificial Sequence
  Description of Artificial Sequence: Synthetic oligonucleotide
  Antisense strand to SEQ ID NO: 1130362
uucagucaguuacacgugc

SEQ ID NO: 1130364 - RNA, 19 nt, Artificial Sequence
  Description of Artificial Sequence: Synthetic oligonucleotide
  Sense strand starting at position 2758 of SEQ ID NO: 916098
ccaggagaggccugacuau

SEQ ID NO: 1130365 - RNA, 19 nt, Artificial Sequence
  Description of Artificial Sequence: Synthetic oligonucleotide
  Antisense strand to SEQ ID NO: 1130364
auagucaggccucuccugg

SEQ ID NO: 1130366 - RNA, 19 nt, Artificial Sequence
  Description of Artificial Sequence: Synthetic oligonucleotide
  Sense strand starting at position 2770 of SEQ ID NO: 916098
ugacuaugggccuggauga

SEQ ID NO: 1130367 - RNA, 19 nt, Artificial Sequence
  Description of Artificial Sequence: Synthetic oligonucleotide
  Antisense strand to SEQ ID NO: 1130366
ucauccaggcccauaguca

SEQ ID NO: 1130368 - RNA, 19 nt, Artificial Sequence
  Description of Artificial Sequence: Synthetic oligonucleotide
  Sense strand starting at position 2920 of SEQ ID NO: 916098
cucagugagguccaccauu

SEQ ID NO: 1130369 - RNA, 19 nt, Artificial Sequence
  Description of Artificial Sequence: Synthetic oligonucleotide
  Antisense strand to SEQ ID NO: 1130368
aaugguggaccucacugag

SEQ ID NO: 1130370 - RNA, 19 nt, Artificial Sequence
  Description of Artificial Sequence: Synthetic oligonucleotide
  Sense strand starting at position 3532 of SEQ ID NO: 916098
uggauagaaugauauagaa

SEQ ID NO: 1130371 - RNA, 19 nt, Artificial Sequence
  Description of Artificial Sequence: Synthetic oligonucleotide
  Antisense strand to SEQ ID NO: 1130370
uucuauaucauucuaucca

SEQ ID NO: 1130372 - RNA, 19 nt, Artificial Sequence
  Description of Artificial Sequence: Synthetic oligonucleotide
  Sense strand starting at position 3831 of SEQ ID NO: 916098
gaagcacagcuguacuauu

SEQ ID NO: 1130373 - RNA, 19 nt, Artificial Sequence
  Description of Artificial Sequence: Synthetic oligonucleotide
  Antisense strand to SEQ ID NO: 1130372
aauaguacagcugugcuuc

SEQ ID NO: 1130374 - RNA, 19 nt, Artificial Sequence
  Description of Artificial Sequence: Synthetic oligonucleotide
  Sense strand starting at position 3879 of SEQ ID NO: 916098
gucacuaagucuccauuaa

SEQ ID NO: 1130375 - RNA, 19 nt, Artificial Sequence
  Description of Artificial Sequence: Synthetic oligonucleotide
  Antisense strand to SEQ ID NO: 1130374
uuaauggagacuuagugac

SEQ ID NO: 1130376 - RNA, 19 nt, Artificial Sequence
  Description of Artificial Sequence: Synthetic oligonucleotide
  Sense strand starting at position 3883 of SEQ ID NO: 916098
cuaagucuccauuaagugu

SEQ ID NO: 1130377 - RNA, 19 nt, Artificial Sequence
  Description of Artificial Sequence: Synthetic oligonucleotide
  Antisense strand to SEQ ID NO: 1130376
acacuuaauggagacuuag

SEQ ID NO: 1130378 - RNA, 19 nt, Artificial Sequence
  Description of Artificial Sequence: Synthetic oligonucleotide
  Sense strand starting at position 3931 of SEQ ID NO: 916098
gcauauaaaguugaaguga

SEQ ID NO: 1130379 - RNA, 19 nt, Artificial Sequence
  Description of Artificial Sequence: Synthetic oligonucleotide
  Antisense strand to SEQ ID NO: 1130378
ucacuucaacuuuauaugc

SEQ ID NO: 1130380 - RNA, 19 nt, Artificial Sequence
  Description of Artificial Sequence: Synthetic oligonucleotide
  Sense strand starting at position 237 of SEQ ID NO: 916099
agaagagacucgucgacau

SEQ ID NO: 1130381 - RNA, 19 nt, Artificial Sequence
  Description of Artificial Sequence: Synthetic oligonucleotide
  Antisense strand to SEQ ID NO: 1130380
augucgacgagucucuucu

SEQ ID NO: 1130382 - RNA, 19 nt, Artificial Sequence
  Description of Artificial Sequence: Synthetic oligonucleotide
  Sense strand starting at position 239 of SEQ ID NO: 916099
aagagacucgucgacauac

SEQ ID NO: 1130383 - RNA, 19 nt, Artificial Sequence
  Description of Artificial Sequence: Synthetic oligonucleotide
  Antisense strand to SEQ ID NO: 1130382
guaugucgacgagucucuu

SEQ ID NO: 1130384 - RNA, 19 nt, Artificial Sequence
  Description of Artificial Sequence: Synthetic oligonucleotide
  Sense strand starting at position 303 of SEQ ID NO: 916099
aucucauagucguuagagu

SEQ ID NO: 1130385 - RNA, 19 nt, Artificial Sequence
  Description of Artificial Sequence: Synthetic oligonucleotide
  Antisense strand to SEQ ID NO: 1130384
acucuaacgacuaugagau

SEQ ID NO: 1130386 - RNA, 19 nt, Artificial Sequence
  Description of Artificial Sequence: Synthetic oligonucleotide
  Sense strand starting at position 304 of SEQ ID NO: 916099
ucucauagucguuagagug

SEQ ID NO: 1130387 - RNA, 19 nt, Artificial Sequence
  Description of Artificial Sequence: Synthetic oligonucleotide
  Antisense strand to SEQ ID NO: 1130386
cacucuaacgacuaugaga

SEQ ID NO: 1130388 - RNA, 19 nt, Artificial Sequence
  Description of Artificial Sequence: Synthetic oligonucleotide
  Sense strand starting at position 517 of SEQ ID NO: 916099
ucaauauugugugcaguua

SEQ ID NO: 1130389 - RNA, 19 nt, Artificial Sequence
  Description of Artificial Sequence: Synthetic oligonucleotide
  Antisense strand to SEQ ID NO: 1130388
uaacugcacacaauauuga

SEQ ID NO: 1130390 - RNA, 19 nt, Artificial Sequence
  Description of Artificial Sequence: Synthetic oligonucleotide
  Sense strand starting at position 518 of SEQ ID NO: 916099
caauauugugugcaguuau

SEQ ID NO: 1130391 - RNA, 19 nt, Artificial Sequence
  Description of Artificial Sequence: Synthetic oligonucleotide
  Antisense strand to SEQ ID NO: 1130390
auaacugcacacaauauug

SEQ ID NO: 1130392 - RNA, 19 nt, Artificial Sequence
  Description of Artificial Sequence: Synthetic oligonucleotide
  Sense strand starting at position 521 of SEQ ID NO: 916099
uauugugugcaguuauguu

SEQ ID NO: 1130393 - RNA, 19 nt, Artificial Sequence
  Description of Artificial Sequence: Synthetic oligonucleotide
  Antisense strand to SEQ ID NO: 1130392
aacauaacugcacacaaua

SEQ ID NO: 1130394 - RNA, 19 nt, Artificial Sequence
  Description of Artificial Sequence: Synthetic oligonucleotide
  Sense strand starting at position 531 of SEQ ID NO: 916099
aguuauguuucaucgguau

SEQ ID NO: 1130395 - RNA, 19 nt, Artificial Sequence
  Description of Artificial Sequence: Synthetic oligonucleotide
  Antisense strand to SEQ ID NO: 1130394
auaccgaugaaacauaacu

SEQ ID NO: 1130396 - RNA, 19 nt, Artificial Sequence
  Description of Artificial Sequence: Synthetic oligonucleotide
  Sense strand starting at position 535 of SEQ ID NO: 916099
auguuucaucgguauguau

SEQ ID NO: 1130397 - RNA, 19 nt, Artificial Sequence
  Description of Artificial Sequence: Synthetic oligonucleotide
  Antisense strand to SEQ ID NO: 1130396
auacauaccgaugaaacau

SEQ ID NO: 1130398 - RNA, 19 nt, Artificial Sequence
  Description of Artificial Sequence: Synthetic oligonucleotide
  Sense strand starting at position 542 of SEQ ID NO: 916099
aucgguauguaucuauuaa

SEQ ID NO: 1130399 - RNA, 19 nt, Artificial Sequence
  Description of Artificial Sequence: Synthetic oligonucleotide
  Antisense strand to SEQ ID NO: 1130398
uuaauagauacauaccgau

SEQ ID NO: 1130400 - RNA, 19 nt, Artificial Sequence
  Description of Artificial Sequence: Synthetic oligonucleotide
  Sense strand starting at position 577 of SEQ ID NO: 916099
auguaccuuccacaaguaa

SEQ ID NO: 1130401 - RNA, 19 nt, Artificial Sequence
  Description of Artificial Sequence: Synthetic oligonucleotide
  Antisense strand to SEQ ID NO: 1130400
uuacuuguggaagguacau

SEQ ID NO: 1130402 - RNA, 19 nt, Artificial Sequence
  Description of Artificial Sequence: Synthetic oligonucleotide
  Sense strand starting at position 608 of SEQ ID NO: 916099
uggacaagauagguucuau

SEQ ID NO: 1130403 - RNA, 19 nt, Artificial Sequence
  Description of Artificial Sequence: Synthetic oligonucleotide
  Antisense strand to SEQ ID NO: 1130402
auagaaccuaucuugucca

SEQ ID NO: 1130404 - RNA, 19 nt, Artificial Sequence
  Description of Artificial Sequence: Synthetic oligonucleotide
  Sense strand starting at position 644 of SEQ ID NO: 916099
gcuccugacguuuauacca

SEQ ID NO: 1130405 - RNA, 19 nt, Artificial Sequence
  Description of Artificial Sequence: Synthetic oligonucleotide
  Antisense strand to SEQ ID NO: 1130404
ugguauaaacgucaggagc

SEQ ID NO: 1130406 - RNA, 19 nt, Artificial Sequence
  Description of Artificial Sequence: Synthetic oligonucleotide
  Sense strand starting at position 670 of SEQ ID NO: 916099
guccaauccucaguacaca

SEQ ID NO: 1130407 - RNA, 19 nt, Artificial Sequence
  Description of Artificial Sequence: Synthetic oligonucleotide
  Antisense strand to SEQ ID NO: 1130406
uguguacugaggauuggac

SEQ ID NO: 1130408 - RNA, 19 nt, Artificial Sequence
  Description of Artificial Sequence: Synthetic oligonucleotide
  Sense strand starting at position 770 of SEQ ID NO: 916099
acuuauuuaugcgauuucu

SEQ ID NO: 1130409 - RNA, 19 nt, Artificial Sequence
  Description of Artificial Sequence: Synthetic oligonucleotide
  Antisense strand to SEQ ID NO: 1130408
agaaaucgcauaaauaagu

SEQ ID NO: 1130410 - RNA, 19 nt, Artificial Sequence
  Description of Artificial Sequence: Synthetic oligonucleotide
  Sense strand starting at position 776 of SEQ ID NO: 916099
uuaugcgauuucucagauc

SEQ ID NO: 1130411 - RNA, 19 nt, Artificial Sequence
  Description of Artificial Sequence: Synthetic oligonucleotide
  Antisense strand to SEQ ID NO: 1130410
gaucugagaaaucgcauaa

SEQ ID NO: 1130412 - RNA, 19 nt, Artificial Sequence
  Description of Artificial Sequence: Synthetic oligonucleotide
  Sense strand starting at position 779 of SEQ ID NO: 916099
ugcgauuucucagauccaa

SEQ ID NO: 1130413 - RNA, 19 nt, Artificial Sequence
  Description of Artificial Sequence: Synthetic oligonucleotide
  Antisense strand to SEQ ID NO: 1130412
uuggaucugagaaaucgca

SEQ ID NO: 1130414 - RNA, 19 nt, Artificial Sequence
  Description of Artificial Sequence: Synthetic oligonucleotide
  Sense strand starting at position 1020 of SEQ ID NO: 916099
uuaaucauguuucugucua

SEQ ID NO: 1130415 - RNA, 19 nt, Artificial Sequence
  Description of Artificial Sequence: Synthetic oligonucleotide
  Antisense strand to SEQ ID NO: 1130414
uagacagaaacaugauuaa

SEQ ID NO: 1130416 - RNA, 19 nt, Artificial Sequence
  Description of Artificial Sequence: Synthetic oligonucleotide
  Sense strand starting at position 1060 of SEQ ID NO: 916099
ggagaacguucugccagau

SEQ ID NO: 1130417 - RNA, 19 nt, Artificial Sequence
  Description of Artificial Sequence: Synthetic oligonucleotide
  Antisense strand to SEQ ID NO: 1130416
aucuggcagaacguucucc

SEQ ID NO: 1130418 - RNA, 19 nt, Artificial Sequence
  Description of Artificial Sequence: Synthetic oligonucleotide
  Sense strand starting at position 1110 of SEQ ID NO: 916099
gacuaagagcccuacaagu

SEQ ID NO: 1130419 - RNA, 19 nt, Artificial Sequence
  Description of Artificial Sequence: Synthetic oligonucleotide
  Antisense strand to SEQ ID NO: 1130418
acuuguagggcucuuaguc

SEQ ID NO: 1130420 - RNA, 19 nt, Artificial Sequence
  Description of Artificial Sequence: Synthetic oligonucleotide
  Sense strand starting at position 1266 of SEQ ID NO: 916099
aaugucuuauaggagggaa

SEQ ID NO: 1130421 - RNA, 19 nt, Artificial Sequence
  Description of Artificial Sequence: Synthetic oligonucleotide
  Antisense strand to SEQ ID NO: 1130420
uucccuccuauaagacauu

SEQ ID NO: 1130422 - RNA, 19 nt, Artificial Sequence
  Description of Artificial Sequence: Synthetic oligonucleotide
  Sense strand starting at position 1404 of SEQ ID NO: 916099
cuacauuacggccaaauau

SEQ ID NO: 1130423 - RNA, 19 nt, Artificial Sequence
  Description of Artificial Sequence: Synthetic oligonucleotide
  Antisense strand to SEQ ID NO: 1130422
auauuuggccguaauguag

SEQ ID NO: 1130424 - RNA, 19 nt, Artificial Sequence
  Description of Artificial Sequence: Synthetic oligonucleotide
  Sense strand starting at position 1415 of SEQ ID NO: 916099
ccaaauauaggauguguuu

SEQ ID NO: 1130425 - RNA, 19 nt, Artificial Sequence
  Description of Artificial Sequence: Synthetic oligonucleotide
  Antisense strand to SEQ ID NO: 1130424
aaacacauccuauauuugg

SEQ ID NO: 1130426 - RNA, 19 nt, Artificial Sequence
  Description of Artificial Sequence: Synthetic oligonucleotide
  Sense strand starting at position 1418 of SEQ ID NO: 916099
aauauaggauguguuucua

SEQ ID NO: 1130427 - RNA, 19 nt, Artificial Sequence
  Description of Artificial Sequence: Synthetic oligonucleotide
  Antisense strand to SEQ ID NO: 1130426
uagaaacacauccuauauu

SEQ ID NO: 1130428 - RNA, 19 nt, Artificial Sequence
  Description of Artificial Sequence: Synthetic oligonucleotide
  Sense strand starting at position 1422 of SEQ ID NO: 916099
uaggauguguuucuaaauc

SEQ ID NO: 1130429 - RNA, 19 nt, Artificial Sequence
  Description of Artificial Sequence: Synthetic oligonucleotide
  Antisense strand to SEQ ID NO: 1130428
gauuuagaaacacauccua

SEQ ID NO: 1130430 - RNA, 19 nt, Artificial Sequence
  Description of Artificial Sequence: Synthetic oligonucleotide
  Sense strand starting at position 1428 of SEQ ID NO: 916099
guguuucuaaaucgugaug

SEQ ID NO: 1130431 - RNA, 19 nt, Artificial Sequence
  Description of Artificial Sequence: Synthetic oligonucleotide
  Antisense strand to SEQ ID NO: 1130430
caucacgauuuagaaacac

SEQ ID NO: 1130432 - RNA, 19 nt, Artificial Sequence
  Description of Artificial Sequence: Synthetic oligonucleotide
  Sense strand starting at position 1431 of SEQ ID NO: 916099
uuucuaaaucgugaugcag

SEQ ID NO: 1130433 - RNA, 19 nt, Artificial Sequence
  Description of Artificial Sequence: Synthetic oligonucleotide
  Antisense strand to SEQ ID NO: 1130432
cugcaucacgauuuagaaa

SEQ ID NO: 1130434 - RNA, 19 nt, Artificial Sequence
  Description of Artificial Sequence: Synthetic oligonucleotide
  Sense strand starting at position 1445 of SEQ ID NO: 916099
ugcaguaaagccuacgauu

SEQ ID NO: 1130435 - RNA, 19 nt, Artificial Sequence
  Description of Artificial Sequence: Synthetic oligonucleotide
  Antisense strand to SEQ ID NO: 1130434
aaucguaggcuuuacugca

SEQ ID NO: 1130436 - RNA, 19 nt, Artificial Sequence
  Description of Artificial Sequence: Synthetic oligonucleotide
  Sense strand starting at position 1679 of SEQ ID NO: 916099
ugaccucauccucagucau

SEQ ID NO: 1130437 - RNA, 19 nt, Artificial Sequence
  Description of Artificial Sequence: Synthetic oligonucleotide
  Antisense strand to SEQ ID NO: 1130436
augacugaggaugagguca

SEQ ID NO: 1130438 - RNA, 19 nt, Artificial Sequence
  Description of Artificial Sequence: Synthetic oligonucleotide
  Sense strand starting at position 2896 of SEQ ID NO: 916099
gcucuccagucaucugagu

SEQ ID NO: 1130439 - RNA, 19 nt, Artificial Sequence
  Description of Artificial Sequence: Synthetic oligonucleotide
  Antisense strand to SEQ ID NO: 1130438
acucagaugacuggagagc

SEQ ID NO: 1130440 - RNA, 19 nt, Artificial Sequence
  Description of Artificial Sequence: Synthetic oligonucleotide
  Sense strand starting at position 2902 of SEQ ID NO: 916099
cagucaucugagugguaga

SEQ ID NO: 1130441 - RNA, 19 nt, Artificial Sequence
  Description of Artificial Sequence: Synthetic oligonucleotide
  Antisense strand to SEQ ID NO: 1130440
ucuaccacucagaugacug

SEQ ID NO: 1130442 - RNA, 19 nt, Artificial Sequence
  Description of Artificial Sequence: Synthetic oligonucleotide
  Sense strand starting at position 2903 of SEQ ID NO: 916099
agucaucugagugguagag

SEQ ID NO: 1130443 - RNA, 19 nt, Artificial Sequence
  Description of Artificial Sequence: Synthetic oligonucleotide
  Antisense strand to SEQ ID NO: 1130442
cucuaccacucagaugacu

SEQ ID NO: 1130444 - RNA, 19 nt, Artificial Sequence
  Description of Artificial Sequence: Synthetic oligonucleotide
  Sense strand starting at position 3540 of SEQ ID NO: 916099
uggccagagucccuuaaua

SEQ ID NO: 1130445 - RNA, 19 nt, Artificial Sequence
  Description of Artificial Sequence: Synthetic oligonucleotide
  Antisense strand to SEQ ID NO: 1130444
uauuaagggacucuggcca

SEQ ID NO: 1130446 - RNA, 19 nt, Artificial Sequence
  Description of Artificial Sequence: Synthetic oligonucleotide
  Sense strand starting at position 3542 of SEQ ID NO: 916099
gccagagucccuuaauaac

SEQ ID NO: 1130447 - RNA, 19 nt, Artificial Sequence
  Description of Artificial Sequence: Synthetic oligonucleotide
  Antisense strand to SEQ ID NO: 1130446
guuauuaagggacucuggc

SEQ ID NO: 1130448 - RNA, 19 nt, Artificial Sequence
  Description of Artificial Sequence: Synthetic oligonucleotide
  Sense strand starting at position 3683 of SEQ ID NO: 916099
ugaagaaguuguccuguua

SEQ ID NO: 1130449 - RNA, 19 nt, Artificial Sequence
  Description of Artificial Sequence: Synthetic oligonucleotide
  Antisense strand to SEQ ID NO: 1130448
uaacaggacaacuucuuca

SEQ ID NO: 1130450 - RNA, 19 nt, Artificial Sequence
  Description of Artificial Sequence: Synthetic oligonucleotide
  Sense strand starting at position 3694 of SEQ ID NO: 916099
uccuguuaauagcuaaagu

SEQ ID NO: 1130451 - RNA, 19 nt, Artificial Sequence
  Description of Artificial Sequence: Synthetic oligonucleotide
  Antisense strand to SEQ ID NO: 1130450
acuuuagcuauuaacagga

SEQ ID NO: 1130452 - RNA, 19 nt, Artificial Sequence
  Description of Artificial Sequence: Synthetic oligonucleotide
  Sense strand starting at position 3860 of SEQ ID NO: 916099
cucagaaacguguguuauu

SEQ ID NO: 1130453 - RNA, 19 nt, Artificial Sequence
  Description of Artificial Sequence: Synthetic oligonucleotide
  Antisense strand to SEQ ID NO: 1130452
aauaacacacguuucugag

SEQ ID NO: 1130454 - RNA, 19 nt, Artificial Sequence
  Description of Artificial Sequence: Synthetic oligonucleotide
  Sense strand starting at position 3861 of SEQ ID NO: 916099
ucagaaacguguguuauuu

SEQ ID NO: 1130455 - RNA, 19 nt, Artificial Sequence
  Description of Artificial Sequence: Synthetic oligonucleotide
  Antisense strand to SEQ ID NO: 1130454
aaauaacacacguuucuga

SEQ ID NO: 1130456 - RNA, 19 nt, Artificial Sequence
  Description of Artificial Sequence: Synthetic oligonucleotide
  Sense strand starting at position 3863 of SEQ ID NO: 916099
agaaacguguguuauuuaa

SEQ ID NO: 1130457 - RNA, 19 nt, Artificial Sequence
  Description of Artificial Sequence: Synthetic oligonucleotide
  Antisense strand to SEQ ID NO: 1130456
uuaaauaacacacguuucu

SEQ ID NO: 1130458 - RNA, 19 nt, Artificial Sequence
  Description of Artificial Sequence: Synthetic oligonucleotide
  Sense strand starting at position 3938 of SEQ ID NO: 916099
gggucaguuucuuuaucug

SEQ ID NO: 1130459 - RNA, 19 nt, Artificial Sequence
  Description of Artificial Sequence: Synthetic oligonucleotide
  Antisense strand to SEQ ID NO: 1130458
cagauaaagaaacugaccc

SEQ ID NO: 1130460 - RNA, 19 nt, Artificial Sequence
  Description of Artificial Sequence: Synthetic oligonucleotide
  Sense strand starting at position 63 of SEQ ID NO: 916100
acuuauuuaugcgauuucu

SEQ ID NO: 1130461 - RNA, 19 nt, Artificial Sequence
  Description of Artificial Sequence: Synthetic oligonucleotide
  Antisense strand to SEQ ID NO: 1130460
agaaaucgcauaaauaagu

SEQ ID NO: 1130462 - RNA, 19 nt, Artificial Sequence
  Description of Artificial Sequence: Synthetic oligonucleotide
  Sense strand starting at position 69 of SEQ ID NO: 916100
uuaugcgauuucucagauc

SEQ ID NO: 1130463 - RNA, 19 nt, Artificial Sequence
  Description of Artificial Sequence: Synthetic oligonucleotide
  Antisense strand to SEQ ID NO: 1130462
gaucugagaaaucgcauaa

SEQ ID NO: 1130464 - RNA, 19 nt, Artificial Sequence
  Description of Artificial Sequence: Synthetic oligonucleotide
  Sense strand starting at position 72 of SEQ ID NO: 916100
ugcgauuucucagauccaa

SEQ ID NO: 1130465 - RNA, 19 nt, Artificial Sequence
  Description of Artificial Sequence: Synthetic oligonucleotide
  Antisense strand to SEQ ID NO: 1130464
uuggaucugagaaaucgca

SEQ ID NO: 1130466 - RNA, 19 nt, Artificial Sequence
  Description of Artificial Sequence: Synthetic oligonucleotide
  Sense strand starting at position 313 of SEQ ID NO: 916100
uuaaucauguuucugucua

SEQ ID NO: 1130467 - RNA, 19 nt, Artificial Sequence
  Description of Artificial Sequence: Synthetic oligonucleotide
  Antisense strand to SEQ ID NO: 1130466
uagacagaaacaugauuaa

SEQ ID NO: 1130468 - RNA, 19 nt, Artificial Sequence
  Description of Artificial Sequence: Synthetic oligonucleotide
  Sense strand starting at position 321 of SEQ ID NO: 916100
guuucugucuauuccagca

SEQ ID NO: 1130469 - RNA, 19 nt, Artificial Sequence
  Description of Artificial Sequence: Synthetic oligonucleotide
  Antisense strand to SEQ ID NO: 1130468
ugcuggaauagacagaaac

SEQ ID NO: 1130470 - RNA, 19 nt, Artificial Sequence
  Description of Artificial Sequence: Synthetic oligonucleotide
  Sense strand starting at position 353 of SEQ ID NO: 916100
ggagaacguucugccagau

SEQ ID NO: 1130471 - RNA, 19 nt, Artificial Sequence
  Description of Artificial Sequence: Synthetic oligonucleotide
  Antisense strand to SEQ ID NO: 1130470
aucuggcagaacguucucc

SEQ ID NO: 1130472 - RNA, 19 nt, Artificial Sequence
  Description of Artificial Sequence: Synthetic oligonucleotide
  Sense strand starting at position 383 of SEQ ID NO: 916100
gaugcauuauuauauagag

SEQ ID NO: 1130473 - RNA, 19 nt, Artificial Sequence
  Description of Artificial Sequence: Synthetic oligonucleotide
  Antisense strand to SEQ ID NO: 1130472
cucuauauaauaaugcauc

SEQ ID NO: 1130474 - RNA, 19 nt, Artificial Sequence
  Description of Artificial Sequence: Synthetic oligonucleotide
  Sense strand starting at position 403 of SEQ ID NO: 916100
gacuaagagcccuacaagu

SEQ ID NO: 1130475 - RNA, 19 nt, Artificial Sequence
  Description of Artificial Sequence: Synthetic oligonucleotide
  Antisense strand to SEQ ID NO: 1130474
acuuguagggcucuuaguc

SEQ ID NO: 1130476 - RNA, 19 nt, Artificial Sequence
  Description of Artificial Sequence: Synthetic oligonucleotide
  Sense strand starting at position 559 of SEQ ID NO: 916100
aaugucuuauaggagggaa

SEQ ID NO: 1130477 - RNA, 19 nt, Artificial Sequence
  Description of Artificial Sequence: Synthetic oligonucleotide
  Antisense strand to SEQ ID NO: 1130476
uucccuccuauaagacauu

SEQ ID NO: 1130478 - RNA, 19 nt, Artificial Sequence
  Description of Artificial Sequence: Synthetic oligonucleotide
  Sense strand starting at position 697 of SEQ ID NO: 916100
cuacauuacggccaaauau

SEQ ID NO: 1130479 - RNA, 19 nt, Artificial Sequence
  Description of Artificial Sequence: Synthetic oligonucleotide
  Antisense strand to SEQ ID NO: 1130478
auauuuggccguaauguag

SEQ ID NO: 1130480 - RNA, 19 nt, Artificial Sequence
  Description of Artificial Sequence: Synthetic oligonucleotide
  Sense strand starting at position 708 of SEQ ID NO: 916100
ccaaauauaggauguguuu

SEQ ID NO: 1130481 - RNA, 19 nt, Artificial Sequence
  Description of Artificial Sequence: Synthetic oligonucleotide
  Antisense strand to SEQ ID NO: 1130480
aaacacauccuauauuugg

SEQ ID NO: 1130482 - RNA, 19 nt, Artificial Sequence
  Description of Artificial Sequence: Synthetic oligonucleotide
  Sense strand starting at position 711 of SEQ ID NO: 916100
aauauaggauguguuucua

SEQ ID NO: 1130483 - RNA, 19 nt, Artificial Sequence
  Description of Artificial Sequence: Synthetic oligonucleotide
  Antisense strand to SEQ ID NO: 1130482
uagaaacacauccuauauu

SEQ ID NO: 1130484 - RNA, 19 nt, Artificial Sequence
  Description of Artificial Sequence: Synthetic oligonucleotide
  Sense strand starting at position 715 of SEQ ID NO: 916100
uaggauguguuucuaaauc

SEQ ID NO: 1130485 - RNA, 19 nt, Artificial Sequence
  Description of Artificial Sequence: Synthetic oligonucleotide
  Antisense strand to SEQ ID NO: 1130484
gauuuagaaacacauccua

SEQ ID NO: 1130486 - RNA, 19 nt, Artificial Sequence
  Description of Artificial Sequence: Synthetic oligonucleotide
  Sense strand starting at position 721 of SEQ ID NO: 916100
guguuucuaaaucgugaug

SEQ ID NO: 1130487 - RNA, 19 nt, Artificial Sequence
  Description of Artificial Sequence: Synthetic oligonucleotide
  Antisense strand to SEQ ID NO: 1130486
caucacgauuuagaaacac

SEQ ID NO: 1130488 - RNA, 19 nt, Artificial Sequence
  Description of Artificial Sequence: Synthetic oligonucleotide
  Sense strand starting at position 724 of SEQ ID NO: 916100
uuucuaaaucgugaugcag

SEQ ID NO: 1130489 - RNA, 19 nt, Artificial Sequence
  Description of Artificial Sequence: Synthetic oligonucleotide
  Antisense strand to SEQ ID NO: 1130488
cugcaucacgauuuagaaa

SEQ ID NO: 1130490 - RNA, 19 nt, Artificial Sequence
  Description of Artificial Sequence: Synthetic oligonucleotide
  Sense strand starting at position 738 of SEQ ID NO: 916100
ugcaguaaagccuacgauu

SEQ ID NO: 1130491 - RNA, 19 nt, Artificial Sequence
  Description of Artificial Sequence: Synthetic oligonucleotide
  Antisense strand to SEQ ID NO: 1130490
aaucguaggcuuuacugca

SEQ ID NO: 1130492 - RNA, 19 nt, Artificial Sequence
  Description of Artificial Sequence: Synthetic oligonucleotide
  Sense strand starting at position 972 of SEQ ID NO: 916100
ugaccucauccucagucau

SEQ ID NO: 1130493 - RNA, 19 nt, Artificial Sequence
  Description of Artificial Sequence: Synthetic oligonucleotide
  Antisense strand to SEQ ID NO: 1130492
augacugaggaugagguca

SEQ ID NO: 1130494 - RNA, 19 nt, Artificial Sequence
  Description of Artificial Sequence: Synthetic oligonucleotide
  Sense strand starting at position 2189 of SEQ ID NO: 916100
gcucuccagucaucugagu

SEQ ID NO: 1130495 - RNA, 19 nt, Artificial Sequence
  Description of Artificial Sequence: Synthetic oligonucleotide
  Antisense strand to SEQ ID NO: 1130494
acucagaugacuggagagc

SEQ ID NO: 1130496 - RNA, 19 nt, Artificial Sequence
  Description of Artificial Sequence: Synthetic oligonucleotide
  Sense strand starting at position 2195 of SEQ ID NO: 916100
cagucaucugagugguaga

SEQ ID NO: 1130497 - RNA, 19 nt, Artificial Sequence
  Description of Artificial Sequence: Synthetic oligonucleotide
  Antisense strand to SEQ ID NO: 1130496
ucuaccacucagaugacug

SEQ ID NO: 1130498 - RNA, 19 nt, Artificial Sequence
  Description of Artificial Sequence: Synthetic oligonucleotide
  Sense strand starting at position 2196 of SEQ ID NO: 916100
agucaucugagugguagag

SEQ ID NO: 1130499 - RNA, 19 nt, Artificial Sequence
  Description of Artificial Sequence: Synthetic oligonucleotide
  Antisense strand to SEQ ID NO: 1130498
cucuaccacucagaugacu

SEQ ID NO: 1130500 - RNA, 19 nt, Artificial Sequence
  Description of Artificial Sequence: Synthetic oligonucleotide
  Sense strand starting at position 2833 of SEQ ID NO: 916100
uggccagagucccuuaaua

SEQ ID NO: 1130501 - RNA, 19 nt, Artificial Sequence
  Description of Artificial Sequence: Synthetic oligonucleotide
  Antisense strand to SEQ ID NO: 1130500
uauuaagggacucuggcca

SEQ ID NO: 1130502 - RNA, 19 nt, Artificial Sequence
  Description of Artificial Sequence: Synthetic oligonucleotide
  Sense strand starting at position 2835 of SEQ ID NO: 916100
gccagagucccuuaauaac

SEQ ID NO: 1130503 - RNA, 19 nt, Artificial Sequence
  Description of Artificial Sequence: Synthetic oligonucleotide
  Antisense strand to SEQ ID NO: 1130502
guuauuaagggacucuggc

SEQ ID NO: 1130504 - RNA, 19 nt, Artificial Sequence
  Description of Artificial Sequence: Synthetic oligonucleotide
  Sense strand starting at position 2976 of SEQ ID NO: 916100
ugaagaaguuguccuguua

SEQ ID NO: 1130505 - RNA, 19 nt, Artificial Sequence
  Description of Artificial Sequence: Synthetic oligonucleotide
  Antisense strand to SEQ ID NO: 1130504
uaacaggacaacuucuuca

SEQ ID NO: 1130506 - RNA, 19 nt, Artificial Sequence
  Description of Artificial Sequence: Synthetic oligonucleotide
  Sense strand starting at position 2987 of SEQ ID NO: 916100
uccuguuaauagcuaaagu

SEQ ID NO: 1130507 - RNA, 19 nt, Artificial Sequence
  Description of Artificial Sequence: Synthetic oligonucleotide
  Antisense strand to SEQ ID NO: 1130506
acuuuagcuauuaacagga

SEQ ID NO: 1130508 - RNA, 19 nt, Artificial Sequence
  Description of Artificial Sequence: Synthetic oligonucleotide
  Sense strand starting at position 3151 of SEQ ID NO: 916100
gccucagaaacguguguua

SEQ ID NO: 1130509 - RNA, 19 nt, Artificial Sequence
  Description of Artificial Sequence: Synthetic oligonucleotide
  Antisense strand to SEQ ID NO: 1130508
uaacacacguuucugaggc

SEQ ID NO: 1130510 - RNA, 19 nt, Artificial Sequence
  Description of Artificial Sequence: Synthetic oligonucleotide
  Sense strand starting at position 3153 of SEQ ID NO: 916100
cucagaaacguguguuauu

SEQ ID NO: 1130511 - RNA, 19 nt, Artificial Sequence
  Description of Artificial Sequence: Synthetic oligonucleotide
  Antisense strand to SEQ ID NO: 1130510
aauaacacacguuucugag

SEQ ID NO: 1130512 - RNA, 19 nt, Artificial Sequence
  Description of Artificial Sequence: Synthetic oligonucleotide
  Sense strand starting at position 3154 of SEQ ID NO: 916100
ucagaaacguguguuauuu

SEQ ID NO: 1130513 - RNA, 19 nt, Artificial Sequence
  Description of Artificial Sequence: Synthetic oligonucleotide
  Antisense strand to SEQ ID NO: 1130512
aaauaacacacguuucuga

SEQ ID NO: 1130514 - RNA, 19 nt, Artificial Sequence
  Description of Artificial Sequence: Synthetic oligonucleotide
  Sense strand starting at position 3156 of SEQ ID NO: 916100
agaaacguguguuauuuaa

SEQ ID NO: 1130515 - RNA, 19 nt, Artificial Sequence
  Description of Artificial Sequence: Synthetic oligonucleotide
  Antisense strand to SEQ ID NO: 1130514
uuaaauaacacacguuucu

SEQ ID NO: 1130516 - RNA, 19 nt, Artificial Sequence
  Description of Artificial Sequence: Synthetic oligonucleotide
  Sense strand starting at position 3231 of SEQ ID NO: 916100
gggucaguuucuuuaucug

SEQ ID NO: 1130517 - RNA, 19 nt, Artificial Sequence
  Description of Artificial Sequence: Synthetic oligonucleotide
  Antisense strand to SEQ ID NO: 1130516
cagauaaagaaacugaccc

SEQ ID NO: 1130518 - RNA, 19 nt, Artificial Sequence
  Description of Artificial Sequence: Synthetic oligonucleotide
  Sense strand starting at position 3274 of SEQ ID NO: 916100
cucacaggguuccaugaga

SEQ ID NO: 1130519 - RNA, 19 nt, Artificial Sequence
  Description of Artificial Sequence: Synthetic oligonucleotide
  Antisense strand to SEQ ID NO: 1130518
ucucauggaacccugugag

SEQ ID NO: 1130520 - RNA, 19 nt, Artificial Sequence
  Description of Artificial Sequence: Synthetic oligonucleotide
  Sense strand starting at position 3279 of SEQ ID NO: 916100
aggguuccaugagaucaua

SEQ ID NO: 1130521 - RNA, 19 nt, Artificial Sequence
  Description of Artificial Sequence: Synthetic oligonucleotide
  Antisense strand to SEQ ID NO: 1130520
uaugaucucauggaacccu

SEQ ID NO: 1130522 - RNA, 19 nt, Artificial Sequence
  Description of Artificial Sequence: Synthetic oligonucleotide
  Sense strand starting at position 3303 of SEQ ID NO: 916100
agccaugaucguggcauua

SEQ ID NO: 1130523 - RNA, 19 nt, Artificial Sequence
  Description of Artificial Sequence: Synthetic oligonucleotide
  Antisense strand to SEQ ID NO: 1130522
uaaugccacgaucauggcu

SEQ ID NO: 1130524 - RNA, 19 nt, Artificial Sequence
  Description of Artificial Sequence: Synthetic oligonucleotide
  Sense strand starting at position 3368 of SEQ ID NO: 916100
ccaggauaauaguaauaua

SEQ ID NO: 1130525 - RNA, 19 nt, Artificial Sequence
  Description of Artificial Sequence: Synthetic oligonucleotide
  Antisense strand to SEQ ID NO: 1130524
uauauuacuauuauccugg

SEQ ID NO: 1130526 - RNA, 19 nt, Artificial Sequence
  Description of Artificial Sequence: Synthetic oligonucleotide
  Sense strand starting at position 3379 of SEQ ID NO: 916100
guaauauacuuagaagagu

SEQ ID NO: 1130527 - RNA, 19 nt, Artificial Sequence
  Description of Artificial Sequence: Synthetic oligonucleotide
  Antisense strand to SEQ ID NO: 1130526
acucuucuaaguauauuac

SEQ ID NO: 1130528 - RNA, 19 nt, Artificial Sequence
  Description of Artificial Sequence: Synthetic oligonucleotide
  Sense strand starting at position 3388 of SEQ ID NO: 916100
uuagaagaguuccuggcuu

SEQ ID NO: 1130529 - RNA, 19 nt, Artificial Sequence
  Description of Artificial Sequence: Synthetic oligonucleotide
  Antisense strand to SEQ ID NO: 1130528
aagccaggaacucuucuaa

SEQ ID NO: 1130530 - RNA, 19 nt, Artificial Sequence
  Description of Artificial Sequence: Synthetic oligonucleotide
  Sense strand starting at position 3390 of SEQ ID NO: 916100
agaagaguuccuggcuugu

SEQ ID NO: 1130531 - RNA, 19 nt, Artificial Sequence
  Description of Artificial Sequence: Synthetic oligonucleotide
  Antisense strand to SEQ ID NO: 1130530
acaagccaggaacucuucu

SEQ ID NO: 1130532 - RNA, 19 nt, Artificial Sequence
  Description of Artificial Sequence: Synthetic oligonucleotide
  Sense strand starting at position 3392 of SEQ ID NO: 916100
aagaguuccuggcuuguga

SEQ ID NO: 1130533 - RNA, 19 nt, Artificial Sequence
  Description of Artificial Sequence: Synthetic oligonucleotide
  Antisense strand to SEQ ID NO: 1130532
ucacaagccaggaacucuu

SEQ ID NO: 1130534 - RNA, 19 nt, Artificial Sequence
  Description of Artificial Sequence: Synthetic oligonucleotide
  Sense strand starting at position 3394 of SEQ ID NO: 916100
gaguuccuggcuugugaua

SEQ ID NO: 1130535 - RNA, 19 nt, Artificial Sequence
  Description of Artificial Sequence: Synthetic oligonucleotide
  Antisense strand to SEQ ID NO: 1130534
uaucacaagccaggaacuc

SEQ ID NO: 1130536 - RNA, 19 nt, Artificial Sequence
  Description of Artificial Sequence: Synthetic oligonucleotide
  Sense strand starting at position 3407 of SEQ ID NO: 916100
gugauaaacgcucgacagu

SEQ ID NO: 1130537 - RNA, 19 nt, Artificial Sequence
  Description of Artificial Sequence: Synthetic oligonucleotide
  Antisense strand to SEQ ID NO: 1130536
acugucgagcguuuaucac

SEQ ID NO: 1130538 - RNA, 19 nt, Artificial Sequence
  Description of Artificial Sequence: Synthetic oligonucleotide
  Sense strand starting at position 3408 of SEQ ID NO: 916100
ugauaaacgcucgacagua

SEQ ID NO: 1130539 - RNA, 19 nt, Artificial Sequence
  Description of Artificial Sequence: Synthetic oligonucleotide
  Antisense strand to SEQ ID NO: 1130538
uacugucgagcguuuauca

SEQ ID NO: 1130540 - RNA, 19 nt, Artificial Sequence
  Description of Artificial Sequence: Synthetic oligonucleotide
  Sense strand starting at position 95 of SEQ ID NO: 916101
gcagaagugggcugauaac

SEQ ID NO: 1130541 - RNA, 19 nt, Artificial Sequence
  Description of Artificial Sequence: Synthetic oligonucleotide
  Antisense strand to SEQ ID NO: 1130540
guuaucagcccacuucugc

SEQ ID NO: 1130542 - RNA, 19 nt, Artificial Sequence
  Description of Artificial Sequence: Synthetic oligonucleotide
  Sense strand starting at position 681 of SEQ ID NO: 916101
gcguaaacguauggguaga

SEQ ID NO: 1130543 - RNA, 19 nt, Artificial Sequence
  Description of Artificial Sequence: Synthetic oligonucleotide
  Antisense strand to SEQ ID NO: 1130542
ucuacccauacguuuacgc

SEQ ID NO: 1130544 - RNA, 19 nt, Artificial Sequence
  Description of Artificial Sequence: Synthetic oligonucleotide
  Sense strand starting at position 682 of SEQ ID NO: 916101
cguaaacguauggguagaa

SEQ ID NO: 1130545 - RNA, 19 nt, Artificial Sequence
  Description of Artificial Sequence: Synthetic oligonucleotide
  Antisense strand to SEQ ID NO: 1130544
uucuacccauacguuuacg

SEQ ID NO: 1130546 - RNA, 19 nt, Artificial Sequence
  Description of Artificial Sequence: Synthetic oligonucleotide
  Sense strand starting at position 725 of SEQ ID NO: 916101
cugcauaguggucaacuca

SEQ ID NO: 1130547 - RNA, 19 nt, Artificial Sequence
  Description of Artificial Sequence: Synthetic oligonucleotide
  Antisense strand to SEQ ID NO: 1130546
ugaguugaccacuaugcag

SEQ ID NO: 1130548 - RNA, 19 nt, Artificial Sequence
  Description of Artificial Sequence: Synthetic oligonucleotide
  Sense strand starting at position 787 of SEQ ID NO: 916101
gcacuuagagaguaguaca

SEQ ID NO: 1130549 - RNA, 19 nt, Artificial Sequence
  Description of Artificial Sequence: Synthetic oligonucleotide
  Antisense strand to SEQ ID NO: 1130548
uguacuacucucuaagugc

SEQ ID NO: 1130550 - RNA, 19 nt, Artificial Sequence
  Description of Artificial Sequence: Synthetic oligonucleotide
  Sense strand starting at position 1109 of SEQ ID NO: 916101
uggcuucugucauacagga

SEQ ID NO: 1130551 - RNA, 19 nt, Artificial Sequence
  Description of Artificial Sequence: Synthetic oligonucleotide
  Antisense strand to SEQ ID NO: 1130550
uccuguaugacagaagcca

SEQ ID NO: 1130552 - RNA, 19 nt, Artificial Sequence
  Description of Artificial Sequence: Synthetic oligonucleotide
  Sense strand starting at position 1284 of SEQ ID NO: 916101
gugagagcauuccaggaag

SEQ ID NO: 1130553 - RNA, 19 nt, Artificial Sequence
  Description of Artificial Sequence: Synthetic oligonucleotide
  Antisense strand to SEQ ID NO: 1130552
cuuccuggaaugcucucac

SEQ ID NO: 1130554 - RNA, 19 nt, Artificial Sequence
  Description of Artificial Sequence: Synthetic oligonucleotide
  Sense strand starting at position 1286 of SEQ ID NO: 916101
gagagcauuccaggaagug

SEQ ID NO: 1130555 - RNA, 19 nt, Artificial Sequence
  Description of Artificial Sequence: Synthetic oligonucleotide
  Antisense strand to SEQ ID NO: 1130554
cacuuccuggaaugcucuc

SEQ ID NO: 1130556 - RNA, 19 nt, Artificial Sequence
  Description of Artificial Sequence: Synthetic oligonucleotide
  Sense strand starting at position 1375 of SEQ ID NO: 916101
cgcagaggucuauagagca

SEQ ID NO: 1130557 - RNA, 19 nt, Artificial Sequence
  Description of Artificial Sequence: Synthetic oligonucleotide
  Antisense strand to SEQ ID NO: 1130556
ugcucuauagaccucugcg

SEQ ID NO: 1130558 - RNA, 19 nt, Artificial Sequence
  Description of Artificial Sequence: Synthetic oligonucleotide
  Sense strand starting at position 1434 of SEQ ID NO: 916101
ggcaggagucgagguuuga

SEQ ID NO: 1130559 - RNA, 19 nt, Artificial Sequence
  Description of Artificial Sequence: Synthetic oligonucleotide
  Antisense strand to SEQ ID NO: 1130558
ucaaaccucgacuccugcc

SEQ ID NO: 1130560 - RNA, 19 nt, Artificial Sequence
  Description of Artificial Sequence: Synthetic oligonucleotide
  Sense strand starting at position 1443 of SEQ ID NO: 916101
cgagguuugacaggauuag

SEQ ID NO: 1130561 - RNA, 19 nt, Artificial Sequence
  Description of Artificial Sequence: Synthetic oligonucleotide
  Antisense strand to SEQ ID NO: 1130560
cuaauccugucaaaccucg

SEQ ID NO: 1130562 - RNA, 19 nt, Artificial Sequence
  Description of Artificial Sequence: Synthetic oligonucleotide
  Sense strand starting at position 2015 of SEQ ID NO: 916101
ccguuauccuuacuacgca

SEQ ID NO: 1130563 - RNA, 19 nt, Artificial Sequence
  Description of Artificial Sequence: Synthetic oligonucleotide
  Antisense strand to SEQ ID NO: 1130562
ugcguaguaaggauaacgg

SEQ ID NO: 1130564 - RNA, 19 nt, Artificial Sequence
  Description of Artificial Sequence: Synthetic oligonucleotide
  Sense strand starting at position 2194 of SEQ ID NO: 916101
gccaguagcuggguagauu

SEQ ID NO: 1130565 - RNA, 19 nt, Artificial Sequence
  Description of Artificial Sequence: Synthetic oligonucleotide
  Antisense strand to SEQ ID NO: 1130564
aaucuacccagcuacuggc

SEQ ID NO: 1130566 - RNA, 19 nt, Artificial Sequence
  Description of Artificial Sequence: Synthetic oligonucleotide
  Sense strand starting at position 2380 of SEQ ID NO: 916101
ucccgugugugaucucuau

SEQ ID NO: 1130567 - RNA, 19 nt, Artificial Sequence
  Description of Artificial Sequence: Synthetic oligonucleotide
  Antisense strand to SEQ ID NO: 1130566
auagagaucacacacggga

SEQ ID NO: 1130568 - RNA, 19 nt, Artificial Sequence
  Description of Artificial Sequence: Synthetic oligonucleotide
  Sense strand starting at position 2384 of SEQ ID NO: 916101
gugugugaucucuauucuu

SEQ ID NO: 1130569 - RNA, 19 nt, Artificial Sequence
  Description of Artificial Sequence: Synthetic oligonucleotide
  Antisense strand to SEQ ID NO: 1130568
aagaauagagaucacacac

SEQ ID NO: 1130570 - RNA, 19 nt, Artificial Sequence
  Description of Artificial Sequence: Synthetic oligonucleotide
  Sense strand starting at position 2387 of SEQ ID NO: 916101
ugugaucucuauucuugca

SEQ ID NO: 1130571 - RNA, 19 nt, Artificial Sequence
  Description of Artificial Sequence: Synthetic oligonucleotide
  Antisense strand to SEQ ID NO: 1130570
ugcaagaauagagaucaca

SEQ ID NO: 1130572 - RNA, 19 nt, Artificial Sequence
  Description of Artificial Sequence: Synthetic oligonucleotide
  Sense strand starting at position 2390 of SEQ ID NO: 916101
gaucucuauucuugcagga

SEQ ID NO: 1130573 - RNA, 19 nt, Artificial Sequence
  Description of Artificial Sequence: Synthetic oligonucleotide
  Antisense strand to SEQ ID NO: 1130572
uccugcaagaauagagauc

SEQ ID NO: 1130574 - RNA, 19 nt, Artificial Sequence
  Description of Artificial Sequence: Synthetic oligonucleotide
  Sense strand starting at position 2399 of SEQ ID NO: 916101
ucuugcaggaggcaugaua

SEQ ID NO: 1130575 - RNA, 19 nt, Artificial Sequence
  Description of Artificial Sequence: Synthetic oligonucleotide
  Antisense strand to SEQ ID NO: 1130574
uaucaugccuccugcaaga

SEQ ID NO: 1130576 - RNA, 19 nt, Artificial Sequence
  Description of Artificial Sequence: Synthetic oligonucleotide
  Sense strand starting at position 2660 of SEQ ID NO: 916101
cucuucuuguuucuggaaa

SEQ ID NO: 1130577 - RNA, 19 nt, Artificial Sequence
  Description of Artificial Sequence: Synthetic oligonucleotide
  Antisense strand to SEQ ID NO: 1130576
uuuccagaaacaagaagag

SEQ ID NO: 1130578 - RNA, 19 nt, Artificial Sequence
  Description of Artificial Sequence: Synthetic oligonucleotide
  Sense strand starting at position 1 of SEQ ID NO: 916102
ggagaugcuuaauuaaaug

SEQ ID NO: 1130579 - RNA, 19 nt, Artificial Sequence
  Description of Artificial Sequence: Synthetic oligonucleotide
  Antisense strand to SEQ ID NO: 1130578
cauuuaauuaagcaucucc

SEQ ID NO: 1130580 - RNA, 19 nt, Artificial Sequence
  Description of Artificial Sequence: Synthetic oligonucleotide
  Sense strand starting at position 19 of SEQ ID NO: 916102
gcagauuucuggcaccauc

SEQ ID NO: 1130581 - RNA, 19 nt, Artificial Sequence
  Description of Artificial Sequence: Synthetic oligonucleotide
  Antisense strand to SEQ ID NO: 1130580
gauggugccagaaaucugc

SEQ ID NO: 1130582 - RNA, 19 nt, Artificial Sequence
  Description of Artificial Sequence: Synthetic oligonucleotide
  Sense strand starting at position 50 of SEQ ID NO: 916102
caauaucugggcugggaaa

SEQ ID NO: 1130583 - RNA, 19 nt, Artificial Sequence
  Description of Artificial Sequence: Synthetic oligonucleotide
  Antisense strand to SEQ ID NO: 1130582
uuucccagcccagauauug

SEQ ID NO: 1130584 - RNA, 19 nt, Artificial Sequence
  Description of Artificial Sequence: Synthetic oligonucleotide
  Sense strand starting at position 346 of SEQ ID NO: 916102
cugagaaaccuuuacuguu

SEQ ID NO: 1130585 - RNA, 19 nt, Artificial Sequence
  Description of Artificial Sequence: Synthetic oligonucleotide
  Antisense strand to SEQ ID NO: 1130584
aacaguaaagguuucucag

SEQ ID NO: 1130586 - RNA, 19 nt, Artificial Sequence
  Description of Artificial Sequence: Synthetic oligonucleotide
  Sense strand starting at position 356 of SEQ ID NO: 916102
uuuacuguuuggcuucuaa

SEQ ID NO: 1130587 - RNA, 19 nt, Artificial Sequence
  Description of Artificial Sequence: Synthetic oligonucleotide
  Antisense strand to SEQ ID NO: 1130586
uuagaagccaaacaguaaa

SEQ ID NO: 1130588 - RNA, 19 nt, Artificial Sequence
  Description of Artificial Sequence: Synthetic oligonucleotide
  Sense strand starting at position 373 of SEQ ID NO: 916102
aauugcauuguacaaggau

SEQ ID NO: 1130589 - RNA, 19 nt, Artificial Sequence
  Description of Artificial Sequence: Synthetic oligonucleotide
  Antisense strand to SEQ ID NO: 1130588
auccuuguacaaugcaauu

SEQ ID NO: 1130590 - RNA, 19 nt, Artificial Sequence
  Description of Artificial Sequence: Synthetic oligonucleotide
  Sense strand starting at position 420 of SEQ ID NO: 916102
ucaagagucuagguuaagu

SEQ ID NO: 1130591 - RNA, 19 nt, Artificial Sequence
  Description of Artificial Sequence: Synthetic oligonucleotide
  Antisense strand to SEQ ID NO: 1130590
acuuaaccuagacucuuga

SEQ ID NO: 1130592 - RNA, 19 nt, Artificial Sequence
  Description of Artificial Sequence: Synthetic oligonucleotide
  Sense strand starting at position 422 of SEQ ID NO: 916102
aagagucuagguuaaguuu

SEQ ID NO: 1130593 - RNA, 19 nt, Artificial Sequence
  Description of Artificial Sequence: Synthetic oligonucleotide
  Antisense strand to SEQ ID NO: 1130592
aaacuuaaccuagacucuu

SEQ ID NO: 1130594 - RNA, 19 nt, Artificial Sequence
  Description of Artificial Sequence: Synthetic oligonucleotide
  Sense strand starting at position 429 of SEQ ID NO: 916102
uagguuaaguuucuacaag

SEQ ID NO: 1130595 - RNA, 19 nt, Artificial Sequence
  Description of Artificial Sequence: Synthetic oligonucleotide
  Antisense strand to SEQ ID NO: 1130594
cuuguagaaacuuaaccua

SEQ ID NO: 1130596 - RNA, 19 nt, Artificial Sequence
  Description of Artificial Sequence: Synthetic oligonucleotide
  Sense strand starting at position 837 of SEQ ID NO: 916102
gcgcauggccaguauugaa

SEQ ID NO: 1130597 - RNA, 19 nt, Artificial Sequence
  Description of Artificial Sequence: Synthetic oligonucleotide
  Antisense strand to SEQ ID NO: 1130596
uucaauacuggccaugcgc

SEQ ID NO: 1130598 - RNA, 19 nt, Artificial Sequence
  Description of Artificial Sequence: Synthetic oligonucleotide
  Sense strand starting at position 850 of SEQ ID NO: 916102
auugaagaaucagaauaag

SEQ ID NO: 1130599 - RNA, 19 nt, Artificial Sequence
  Description of Artificial Sequence: Synthetic oligonucleotide
  Antisense strand to SEQ ID NO: 1130598
cuuauucugauucuucaau

SEQ ID NO: 1130600 - RNA, 19 nt, Artificial Sequence
  Description of Artificial Sequence: Synthetic oligonucleotide
  Sense strand starting at position 861 of SEQ ID NO: 916102
agaauaagcccuuguuaaa

SEQ ID NO: 1130601 - RNA, 19 nt, Artificial Sequence
  Description of Artificial Sequence: Synthetic oligonucleotide
  Antisense strand to SEQ ID NO: 1130600
uuuaacaagggcuuauucu

SEQ ID NO: 1130602 - RNA, 19 nt, Artificial Sequence
  Description of Artificial Sequence: Synthetic oligonucleotide
  Sense strand starting at position 1009 of SEQ ID NO: 916102
cugccagaugcccauguuu

SEQ ID NO: 1130603 - RNA, 19 nt, Artificial Sequence
  Description of Artificial Sequence: Synthetic oligonucleotide
  Antisense strand to SEQ ID NO: 1130602
aaacaugggcaucuggcag

SEQ ID NO: 1130604 - RNA, 19 nt, Artificial Sequence
  Description of Artificial Sequence: Synthetic oligonucleotide
  Sense strand starting at position 1202 of SEQ ID NO: 916102
uugccacucuaauuggauu

SEQ ID NO: 1130605 - RNA, 19 nt, Artificial Sequence
  Description of Artificial Sequence: Synthetic oligonucleotide
  Antisense strand to SEQ ID NO: 1130604
aauccaauuagaguggcaa

SEQ ID NO: 1130606 - RNA, 19 nt, Artificial Sequence
  Description of Artificial Sequence: Synthetic oligonucleotide
  Sense strand starting at position 1358 of SEQ ID NO: 916102
gcacuuauuguaugaccuu

SEQ ID NO: 1130607 - RNA, 19 nt, Artificial Sequence
  Description of Artificial Sequence: Synthetic oligonucleotide
  Antisense strand to SEQ ID NO: 1130606
aaggucauacaauaagugc

SEQ ID NO: 1130608 - RNA, 19 nt, Artificial Sequence
  Description of Artificial Sequence: Synthetic oligonucleotide
  Sense strand starting at position 1361 of SEQ ID NO: 916102
cuuauuguaugaccuugaa

SEQ ID NO: 1130609 - RNA, 19 nt, Artificial Sequence
  Description of Artificial Sequence: Synthetic oligonucleotide
  Antisense strand to SEQ ID NO: 1130608
uucaaggucauacaauaag

SEQ ID NO: 1130610 - RNA, 19 nt, Artificial Sequence
  Description of Artificial Sequence: Synthetic oligonucleotide
  Sense strand starting at position 1364 of SEQ ID NO: 916102
auuguaugaccuugaagaa

SEQ ID NO: 1130611 - RNA, 19 nt, Artificial Sequence
  Description of Artificial Sequence: Synthetic oligonucleotide
  Antisense strand to SEQ ID NO: 1130610
uucuucaaggucauacaau

SEQ ID NO: 1130612 - RNA, 19 nt, Artificial Sequence
  Description of Artificial Sequence: Synthetic oligonucleotide
  Sense strand starting at position 1382 of SEQ ID NO: 916102
agagaauugagacguaauc

SEQ ID NO: 1130613 - RNA, 19 nt, Artificial Sequence
  Description of Artificial Sequence: Synthetic oligonucleotide
  Antisense strand to SEQ ID NO: 1130612
gauuacgucucaauucucu

SEQ ID NO: 1130614 - RNA, 19 nt, Artificial Sequence
  Description of Artificial Sequence: Synthetic oligonucleotide
  Sense strand starting at position 1401 of SEQ ID NO: 916102
ccaagugucagcuguccau

SEQ ID NO: 1130615 - RNA, 19 nt, Artificial Sequence
  Description of Artificial Sequence: Synthetic oligonucleotide
  Antisense strand to SEQ ID NO: 1130614
auggacagcugacacuugg

SEQ ID NO: 1130616 - RNA, 19 nt, Artificial Sequence
  Description of Artificial Sequence: Synthetic oligonucleotide
  Sense strand starting at position 1445 of SEQ ID NO: 916102
ucuguuugugaggauaaac

SEQ ID NO: 1130617 - RNA, 19 nt, Artificial Sequence
  Description of Artificial Sequence: Synthetic oligonucleotide
  Antisense strand to SEQ ID NO: 1130616
guuuauccucacaaacaga

SEQ ID NO: 1130618 - RNA, 19 nt, Artificial Sequence
  Description of Artificial Sequence: Synthetic oligonucleotide
  Sense strand starting at position 2070 of SEQ ID NO: 916102
uggcauuaaccugagcacu

SEQ ID NO: 1130619 - RNA, 19 nt, Artificial Sequence
  Description of Artificial Sequence: Synthetic oligonucleotide
  Antisense strand to SEQ ID NO: 1130618
agugcucagguuaaugcca

SEQ ID NO: 1130620 - RNA, 19 nt, Artificial Sequence
  Description of Artificial Sequence: Synthetic oligonucleotide
  Sense strand starting at position 2072 of SEQ ID NO: 916102
gcauuaaccugagcacuau

SEQ ID NO: 1130621 - RNA, 19 nt, Artificial Sequence
  Description of Artificial Sequence: Synthetic oligonucleotide
  Antisense strand to SEQ ID NO: 1130620
auagugcucagguuaaugc

SEQ ID NO: 1130622 - RNA, 19 nt, Artificial Sequence
  Description of Artificial Sequence: Synthetic oligonucleotide
  Sense strand starting at position 2124 of SEQ ID NO: 916102
cggcaucucgggcaagaga

SEQ ID NO: 1130623 - RNA, 19 nt, Artificial Sequence
  Description of Artificial Sequence: Synthetic oligonucleotide
  Antisense strand to SEQ ID NO: 1130622
ucucuugcccgagaugccg

SEQ ID NO: 1130624 - RNA, 19 nt, Artificial Sequence
  Description of Artificial Sequence: Synthetic oligonucleotide
  Sense strand starting at position 2406 of SEQ ID NO: 916102
ugcaccuucgucguuauau

SEQ ID NO: 1130625 - RNA, 19 nt, Artificial Sequence
  Description of Artificial Sequence: Synthetic oligonucleotide
  Antisense strand to SEQ ID NO: 1130624
auauaacgacgaaggugca

SEQ ID NO: 1130626 - RNA, 19 nt, Artificial Sequence
  Description of Artificial Sequence: Synthetic oligonucleotide
  Sense strand starting at position 2408 of SEQ ID NO: 916102
caccuucgucguuauauua

SEQ ID NO: 1130627 - RNA, 19 nt, Artificial Sequence
  Description of Artificial Sequence: Synthetic oligonucleotide
  Antisense strand to SEQ ID NO: 1130626
uaauauaacgacgaaggug

SEQ ID NO: 1130628 - RNA, 19 nt, Artificial Sequence
  Description of Artificial Sequence: Synthetic oligonucleotide
  Sense strand starting at position 2451 of SEQ ID NO: 916102
gaauauaaagucugugaua

SEQ ID NO: 1130629 - RNA, 19 nt, Artificial Sequence
  Description of Artificial Sequence: Synthetic oligonucleotide
  Antisense strand to SEQ ID NO: 1130628
uaucacagacuuuauauuc

SEQ ID NO: 1130630 - RNA, 19 nt, Artificial Sequence
  Description of Artificial Sequence: Synthetic oligonucleotide
  Sense strand starting at position 2453 of SEQ ID NO: 916102
auauaaagucugugauacc

SEQ ID NO: 1130631 - RNA, 19 nt, Artificial Sequence
  Description of Artificial Sequence: Synthetic oligonucleotide
  Antisense strand to SEQ ID NO: 1130630
gguaucacagacuuuauau

SEQ ID NO: 1130632 - RNA, 19 nt, Artificial Sequence
  Description of Artificial Sequence: Synthetic oligonucleotide
  Sense strand starting at position 2462 of SEQ ID NO: 916102
cugugauaccaagaguuug

SEQ ID NO: 1130633 - RNA, 19 nt, Artificial Sequence
  Description of Artificial Sequence: Synthetic oligonucleotide
  Antisense strand to SEQ ID NO: 1130632
caaacucuugguaucacag

SEQ ID NO: 1130634 - RNA, 19 nt, Artificial Sequence
  Description of Artificial Sequence: Synthetic oligonucleotide
  Sense strand starting at position 2483 of SEQ ID NO: 916102
acugcagcauucucagaau

SEQ ID NO: 1130635 - RNA, 19 nt, Artificial Sequence
  Description of Artificial Sequence: Synthetic oligonucleotide
  Antisense strand to SEQ ID NO: 1130634
auucugagaaugcugcagu

SEQ ID NO: 1130636 - RNA, 19 nt, Artificial Sequence
  Description of Artificial Sequence: Synthetic oligonucleotide
  Sense strand starting at position 2497 of SEQ ID NO: 916102
agaauaaucugggaauggu

SEQ ID NO: 1130637 - RNA, 19 nt, Artificial Sequence
  Description of Artificial Sequence: Synthetic oligonucleotide
  Antisense strand to SEQ ID NO: 1130636
accauucccagauuauucu

SEQ ID NO: 1130638 - RNA, 19 nt, Artificial Sequence
  Description of Artificial Sequence: Synthetic oligonucleotide
  Sense strand starting at position 2512 of SEQ ID NO: 916102
ugguguaauuuggaaucau

SEQ ID NO: 1130639 - RNA, 19 nt, Artificial Sequence
  Description of Artificial Sequence: Synthetic oligonucleotide
  Antisense strand to SEQ ID NO: 1130638
augauuccaaauuacacca

SEQ ID NO: 1130640 - RNA, 19 nt, Artificial Sequence
  Description of Artificial Sequence: Synthetic oligonucleotide
  Sense strand starting at position 2523 of SEQ ID NO: 916102
ggaaucauaccuggcacau

SEQ ID NO: 1130641 - RNA, 19 nt, Artificial Sequence
  Description of Artificial Sequence: Synthetic oligonucleotide
  Antisense strand to SEQ ID NO: 1130640
augugccagguaugauucc

SEQ ID NO: 1130642 - RNA, 19 nt, Artificial Sequence
  Description of Artificial Sequence: Synthetic oligonucleotide
  Sense strand starting at position 2705 of SEQ ID NO: 916102
guuugacucuuguugcuua

SEQ ID NO: 1130643 - RNA, 19 nt, Artificial Sequence
  Description of Artificial Sequence: Synthetic oligonucleotide
  Antisense strand to SEQ ID NO: 1130642
uaagcaacaagagucaaac

SEQ ID NO: 1130644 - RNA, 19 nt, Artificial Sequence
  Description of Artificial Sequence: Synthetic oligonucleotide
  Sense strand starting at position 3090 of SEQ ID NO: 916102
gacagauugcuugagcuug

SEQ ID NO: 1130645 - RNA, 19 nt, Artificial Sequence
  Description of Artificial Sequence: Synthetic oligonucleotide
  Antisense strand to SEQ ID NO: 1130644
caagcucaagcaaucuguc

SEQ ID NO: 1130646 - RNA, 19 nt, Artificial Sequence
  Description of Artificial Sequence: Synthetic oligonucleotide
  Sense strand starting at position 3197 of SEQ ID NO: 916102
agacacaccuauguguaaa

SEQ ID NO: 1130647 - RNA, 19 nt, Artificial Sequence
  Description of Artificial Sequence: Synthetic oligonucleotide
  Antisense strand to SEQ ID NO: 1130646
uuuacacauaggugugucu

SEQ ID NO: 1130648 - RNA, 19 nt, Artificial Sequence
  Description of Artificial Sequence: Synthetic oligonucleotide
  Sense strand starting at position 3227 of SEQ ID NO: 916102
gcacacauuguugggagaa

SEQ ID NO: 1130649 - RNA, 19 nt, Artificial Sequence
  Description of Artificial Sequence: Synthetic oligonucleotide
  Antisense strand to SEQ ID NO: 1130648
uucucccaacaaugugugc

SEQ ID NO: 1130650 - RNA, 19 nt, Artificial Sequence
  Description of Artificial Sequence: Synthetic oligonucleotide
  Sense strand starting at position 3229 of SEQ ID NO: 916102
acacauuguugggagaaua

SEQ ID NO: 1130651 - RNA, 19 nt, Artificial Sequence
  Description of Artificial Sequence: Synthetic oligonucleotide
  Antisense strand to SEQ ID NO: 1130650
uauucucccaacaaugugu

SEQ ID NO: 1130652 - RNA, 19 nt, Artificial Sequence
  Description of Artificial Sequence: Synthetic oligonucleotide
  Sense strand starting at position 3266 of SEQ ID NO: 916102
uuggaaacccucuaagcau

SEQ ID NO: 1130653 - RNA, 19 nt, Artificial Sequence
  Description of Artificial Sequence: Synthetic oligonucleotide
  Antisense strand to SEQ ID NO: 1130652
augcuuagaggguuuccaa

SEQ ID NO: 1130654 - RNA, 19 nt, Artificial Sequence
  Description of Artificial Sequence: Synthetic oligonucleotide
  Sense strand starting at position 3281 of SEQ ID NO: 916102
gcaucuuuaugccucagau

SEQ ID NO: 1130655 - RNA, 19 nt, Artificial Sequence
  Description of Artificial Sequence: Synthetic oligonucleotide
  Antisense strand to SEQ ID NO: 1130654
aucugaggcauaaagaugc

SEQ ID NO: 1130656 - RNA, 19 nt, Artificial Sequence
  Description of Artificial Sequence: Synthetic oligonucleotide
  Sense strand starting at position 3940 of SEQ ID NO: 916102
gggacucuagugugagaag

SEQ ID NO: 1130657 - RNA, 19 nt, Artificial Sequence
  Description of Artificial Sequence: Synthetic oligonucleotide
  Antisense strand to SEQ ID NO: 1130656
cuucucacacuagaguccc

SEQ ID NO: 1130658 - RNA, 19 nt, Artificial Sequence
  Description of Artificial Sequence: Synthetic oligonucleotide
  Sense strand starting at position 59 of SEQ ID NO: 916103
gaugaagaauaugguaauu

SEQ ID NO: 1130659 - RNA, 19 nt, Artificial Sequence
  Description of Artificial Sequence: Synthetic oligonucleotide
  Antisense strand to SEQ ID NO: 1130658
aauuaccauauucuucauc

SEQ ID NO: 1130660 - RNA, 19 nt, Artificial Sequence
  Description of Artificial Sequence: Synthetic oligonucleotide
  Sense strand starting at position 76 of SEQ ID NO: 916103
uuaugagacucucaauuga

SEQ ID NO: 1130661 - RNA, 19 nt, Artificial Sequence
  Description of Artificial Sequence: Synthetic oligonucleotide
  Antisense strand to SEQ ID NO: 1130660
ucaauugagagucucauaa

SEQ ID NO: 1130662 - RNA, 19 nt, Artificial Sequence
  Description of Artificial Sequence: Synthetic oligonucleotide
  Sense strand starting at position 118 of SEQ ID NO: 916103
aagguagaguuugaacaca

SEQ ID NO: 1130663 - RNA, 19 nt, Artificial Sequence
  Description of Artificial Sequence: Synthetic oligonucleotide
  Antisense strand to SEQ ID NO: 1130662
uguguucaaacucuaccuu

SEQ ID NO: 1130664 - RNA, 19 nt, Artificial Sequence
  Description of Artificial Sequence: Synthetic oligonucleotide
  Sense strand starting at position 204 of SEQ ID NO: 916103
cugguaaccucuuugggaa

SEQ ID NO: 1130665 - RNA, 19 nt, Artificial Sequence
  Description of Artificial Sequence: Synthetic oligonucleotide
  Antisense strand to SEQ ID NO: 1130664
uucccaaagagguuaccag

SEQ ID NO: 1130666 - RNA, 19 nt, Artificial Sequence
  Description of Artificial Sequence: Synthetic oligonucleotide
  Sense strand starting at position 205 of SEQ ID NO: 916103
ugguaaccucuuugggaac

SEQ ID NO: 1130667 - RNA, 19 nt, Artificial Sequence
  Description of Artificial Sequence: Synthetic oligonucleotide
  Antisense strand to SEQ ID NO: 1130666
guucccaaagagguuacca

SEQ ID NO: 1130668 - RNA, 19 nt, Artificial Sequence
  Description of Artificial Sequence: Synthetic oligonucleotide
  Sense strand starting at position 216 of SEQ ID NO: 916103
uugggaacaucaggauaau

SEQ ID NO: 1130669 - RNA, 19 nt, Artificial Sequence
  Description of Artificial Sequence: Synthetic oligonucleotide
  Antisense strand to SEQ ID NO: 1130668
auuauccugauguucccaa

SEQ ID NO: 1130670 - RNA, 19 nt, Artificial Sequence
  Description of Artificial Sequence: Synthetic oligonucleotide
  Sense strand starting at position 740 of SEQ ID NO: 916103
uguaguuucuaacuuagaa

SEQ ID NO: 1130671 - RNA, 19 nt, Artificial Sequence
  Description of Artificial Sequence: Synthetic oligonucleotide
  Antisense strand to SEQ ID NO: 1130670
uucuaaguuagaaacuaca

SEQ ID NO: 1130672 - RNA, 19 nt, Artificial Sequence
  Description of Artificial Sequence: Synthetic oligonucleotide
  Sense strand starting at position 913 of SEQ ID NO: 916103
gggcuaauuauacacgaca

SEQ ID NO: 1130673 - RNA, 19 nt, Artificial Sequence
  Description of Artificial Sequence: Synthetic oligonucleotide
  Antisense strand to SEQ ID NO: 1130672
ugucguguauaauuagccc

SEQ ID NO: 1130674 - RNA, 19 nt, Artificial Sequence
  Description of Artificial Sequence: Synthetic oligonucleotide
  Sense strand starting at position 1157 of SEQ ID NO: 916103
uugggaguuuaucuugaaa

SEQ ID NO: 1130675 - RNA, 19 nt, Artificial Sequence
  Description of Artificial Sequence: Synthetic oligonucleotide
  Antisense strand to SEQ ID NO: 1130674
uuucaagauaaacucccaa

SEQ ID NO: 1130676 - RNA, 19 nt, Artificial Sequence
  Description of Artificial Sequence: Synthetic oligonucleotide
  Sense strand starting at position 1199 of SEQ ID NO: 916103
auaaccaaugucugcaaga

SEQ ID NO: 1130677 - RNA, 19 nt, Artificial Sequence
  Description of Artificial Sequence: Synthetic oligonucleotide
  Antisense strand to SEQ ID NO: 1130676
ucuugcagacauugguuau

SEQ ID NO: 1130678 - RNA, 19 nt, Artificial Sequence
  Description of Artificial Sequence: Synthetic oligonucleotide
  Sense strand starting at position 1410 of SEQ ID NO: 916103
gggcauauuuaaugaauac

SEQ ID NO: 1130679 - RNA, 19 nt, Artificial Sequence
  Description of Artificial Sequence: Synthetic oligonucleotide
  Antisense strand to SEQ ID NO: 1130678
guauucauuaaauaugccc

SEQ ID NO: 1130680 - RNA, 19 nt, Artificial Sequence
  Description of Artificial Sequence: Synthetic oligonucleotide
  Sense strand starting at position 1450 of SEQ ID NO: 916103
uggcaaaguguucacgaga

SEQ ID NO: 1130681 - RNA, 19 nt, Artificial Sequence
  Description of Artificial Sequence: Synthetic oligonucleotide
  Antisense strand to SEQ ID NO: 1130680
ucucgugaacacuuugcca

SEQ ID NO: 1130682 - RNA, 19 nt, Artificial Sequence
  Description of Artificial Sequence: Synthetic oligonucleotide
  Sense strand starting at position 1490 of SEQ ID NO: 916103
uucccaauacuguguaagu

SEQ ID NO: 1130683 - RNA, 19 nt, Artificial Sequence
  Description of Artificial Sequence: Synthetic oligonucleotide
  Antisense strand to SEQ ID NO: 1130682
acuuacacaguauugggaa

SEQ ID NO: 1130684 - RNA, 19 nt, Artificial Sequence
  Description of Artificial Sequence: Synthetic oligonucleotide
  Sense strand starting at position 1492 of SEQ ID NO: 916103
cccaauacuguguaaguga

SEQ ID NO: 1130685 - RNA, 19 nt, Artificial Sequence
  Description of Artificial Sequence: Synthetic oligonucleotide
  Antisense strand to SEQ ID NO: 1130684
ucacuuacacaguauuggg

SEQ ID NO: 1130686 - RNA, 19 nt, Artificial Sequence
  Description of Artificial Sequence: Synthetic oligonucleotide
  Sense strand starting at position 1500 of SEQ ID NO: 916103
uguguaagugagugacaga

SEQ ID NO: 1130687 - RNA, 19 nt, Artificial Sequence
  Description of Artificial Sequence: Synthetic oligonucleotide
  Antisense strand to SEQ ID NO: 1130686
ucugucacucacuuacaca

SEQ ID NO: 1130688 - RNA, 19 nt, Artificial Sequence
  Description of Artificial Sequence: Synthetic oligonucleotide
  Sense strand starting at position 1501 of SEQ ID NO: 916103
guguaagugagugacagaa

SEQ ID NO: 1130689 - RNA, 19 nt, Artificial Sequence
  Description of Artificial Sequence: Synthetic oligonucleotide
  Antisense strand to SEQ ID NO: 1130688
uucugucacucacuuacac

SEQ ID NO: 1130690 - RNA, 19 nt, Artificial Sequence
  Description of Artificial Sequence: Synthetic oligonucleotide
  Sense strand starting at position 1509 of SEQ ID NO: 916103
gagugacagaacuguaguu

SEQ ID NO: 1130691 - RNA, 19 nt, Artificial Sequence
  Description of Artificial Sequence: Synthetic oligonucleotide
  Antisense strand to SEQ ID NO: 1130690
aacuacaguucugucacuc

SEQ ID NO: 1130692 - RNA, 19 nt, Artificial Sequence
  Description of Artificial Sequence: Synthetic oligonucleotide
  Sense strand starting at position 1565 of SEQ ID NO: 916103
uggcggugguaguugaaau

SEQ ID NO: 1130693 - RNA, 19 nt, Artificial Sequence
  Description of Artificial Sequence: Synthetic oligonucleotide
  Antisense strand to SEQ ID NO: 1130692
auuucaacuaccaccgcca

SEQ ID NO: 1130694 - RNA, 19 nt, Artificial Sequence
  Description of Artificial Sequence: Synthetic oligonucleotide
  Sense strand starting at position 1566 of SEQ ID NO: 916103
ggcggugguaguugaaauc

SEQ ID NO: 1130695 - RNA, 19 nt, Artificial Sequence
  Description of Artificial Sequence: Synthetic oligonucleotide
  Antisense strand to SEQ ID NO: 1130694
gauuucaacuaccaccgcc

SEQ ID NO: 1130696 - RNA, 19 nt, Artificial Sequence
  Description of Artificial Sequence: Synthetic oligonucleotide
  Sense strand starting at position 1626 of SEQ ID NO: 916103
acgggaaguccauguucua

SEQ ID NO: 1130697 - RNA, 19 nt, Artificial Sequence
  Description of Artificial Sequence: Synthetic oligonucleotide
  Antisense strand to SEQ ID NO: 1130696
uagaacauggacuucccgu

SEQ ID NO: 1130698 - RNA, 19 nt, Artificial Sequence
  Description of Artificial Sequence: Synthetic oligonucleotide
  Sense strand starting at position 1633 of SEQ ID NO: 916103
guccauguucuagagauga

SEQ ID NO: 1130699 - RNA, 19 nt, Artificial Sequence
  Description of Artificial Sequence: Synthetic oligonucleotide
  Antisense strand to SEQ ID NO: 1130698
ucaucucuagaacauggac

SEQ ID NO: 1130700 - RNA, 19 nt, Artificial Sequence
  Description of Artificial Sequence: Synthetic oligonucleotide
  Sense strand starting at position 2610 of SEQ ID NO: 916103
uuacauagugggugggauu

SEQ ID NO: 1130701 - RNA, 19 nt, Artificial Sequence
  Description of Artificial Sequence: Synthetic oligonucleotide
  Antisense strand to SEQ ID NO: 1130700
aaucccacccacuauguaa

SEQ ID NO: 1130702 - RNA, 19 nt, Artificial Sequence
  Description of Artificial Sequence: Synthetic oligonucleotide
  Sense strand starting at position 2617 of SEQ ID NO: 916103
gugggugggauuuguguaa

SEQ ID NO: 1130703 - RNA, 19 nt, Artificial Sequence
  Description of Artificial Sequence: Synthetic oligonucleotide
  Antisense strand to SEQ ID NO: 1130702
uuacacaaaucccacccac

SEQ ID NO: 1130704 - RNA, 19 nt, Artificial Sequence
  Description of Artificial Sequence: Synthetic oligonucleotide
  Sense strand starting at position 2736 of SEQ ID NO: 916103
acaggucucucguccuaaa

SEQ ID NO: 1130705 - RNA, 19 nt, Artificial Sequence
  Description of Artificial Sequence: Synthetic oligonucleotide
  Antisense strand to SEQ ID NO: 1130704
uuuaggacgagagaccugu

SEQ ID NO: 1130706 - RNA, 19 nt, Artificial Sequence
  Description of Artificial Sequence: Synthetic oligonucleotide
  Sense strand starting at position 2766 of SEQ ID NO: 916103
ugcuccuuucuggaaggau

SEQ ID NO: 1130707 - RNA, 19 nt, Artificial Sequence
  Description of Artificial Sequence: Synthetic oligonucleotide
  Antisense strand to SEQ ID NO: 1130706
auccuuccagaaaggagca

SEQ ID NO: 1130708 - RNA, 19 nt, Artificial Sequence
  Description of Artificial Sequence: Synthetic oligonucleotide
  Sense strand starting at position 2788 of SEQ ID NO: 916103
auggucucugcacgagaga

SEQ ID NO: 1130709 - RNA, 19 nt, Artificial Sequence
  Description of Artificial Sequence: Synthetic oligonucleotide
  Antisense strand to SEQ ID NO: 1130708
ucucucgugcagagaccau

SEQ ID NO: 1130710 - RNA, 19 nt, Artificial Sequence
  Description of Artificial Sequence: Synthetic oligonucleotide
  Sense strand starting at position 2943 of SEQ ID NO: 916103
cacucucucccggauugua

SEQ ID NO: 1130711 - RNA, 19 nt, Artificial Sequence
  Description of Artificial Sequence: Synthetic oligonucleotide
  Antisense strand to SEQ ID NO: 1130710
uacaauccgggagagagug

SEQ ID NO: 1130712 - RNA, 19 nt, Artificial Sequence
  Description of Artificial Sequence: Synthetic oligonucleotide
  Sense strand starting at position 2990 of SEQ ID NO: 916103
gugucaagguccgcagaau

SEQ ID NO: 1130713 - RNA, 19 nt, Artificial Sequence
  Description of Artificial Sequence: Synthetic oligonucleotide
  Antisense strand to SEQ ID NO: 1130712
auucugcggaccuugacac

SEQ ID NO: 1130714 - RNA, 19 nt, Artificial Sequence
  Description of Artificial Sequence: Synthetic oligonucleotide
  Sense strand starting at position 2991 of SEQ ID NO: 916103
ugucaagguccgcagaaua

SEQ ID NO: 1130715 - RNA, 19 nt, Artificial Sequence
  Description of Artificial Sequence: Synthetic oligonucleotide
  Antisense strand to SEQ ID NO: 1130714
uauucugcggaccuugaca

SEQ ID NO: 1130716 - RNA, 19 nt, Artificial Sequence
  Description of Artificial Sequence: Synthetic oligonucleotide
  Sense strand starting at position 3077 of SEQ ID NO: 916103
gcccacgacuaauugaaua

SEQ ID NO: 1130717 - RNA, 19 nt, Artificial Sequence
  Description of Artificial Sequence: Synthetic oligonucleotide
  Antisense strand to SEQ ID NO: 1130716
uauucaauuagucgugggc

SEQ ID NO: 1130718 - RNA, 19 nt, Artificial Sequence
  Description of Artificial Sequence: Synthetic oligonucleotide
  Sense strand starting at position 3167 of SEQ ID NO: 916103
agagcugagaaccguuaga

SEQ ID NO: 1130719 - RNA, 19 nt, Artificial Sequence
  Description of Artificial Sequence: Synthetic oligonucleotide
  Antisense strand to SEQ ID NO: 1130718
ucuaacgguucucagcucu

SEQ ID NO: 1130720 - RNA, 19 nt, Artificial Sequence
  Description of Artificial Sequence: Synthetic oligonucleotide
  Sense strand starting at position 3250 of SEQ ID NO: 916103
ugagacuuccagugauucu

SEQ ID NO: 1130721 - RNA, 19 nt, Artificial Sequence
  Description of Artificial Sequence: Synthetic oligonucleotide
  Antisense strand to SEQ ID NO: 1130720
agaaucacuggaagucuca

SEQ ID NO: 1130722 - RNA, 19 nt, Artificial Sequence
  Description of Artificial Sequence: Synthetic oligonucleotide
  Sense strand starting at position 3260 of SEQ ID NO: 916103
agugauucugccgcagcau

SEQ ID NO: 1130723 - RNA, 19 nt, Artificial Sequence
  Description of Artificial Sequence: Synthetic oligonucleotide
  Antisense strand to SEQ ID NO: 1130722
augcugcggcagaaucacu

SEQ ID NO: 1130724 - RNA, 19 nt, Artificial Sequence
  Description of Artificial Sequence: Synthetic oligonucleotide
  Sense strand starting at position 3274 of SEQ ID NO: 916103
agcauagaagagugguuua

SEQ ID NO: 1130725 - RNA, 19 nt, Artificial Sequence
  Description of Artificial Sequence: Synthetic oligonucleotide
  Antisense strand to SEQ ID NO: 1130724
uaaaccacucuucuaugcu

SEQ ID NO: 1130726 - RNA, 19 nt, Artificial Sequence
  Description of Artificial Sequence: Synthetic oligonucleotide
  Sense strand starting at position 3412 of SEQ ID NO: 916103
guauaugugccacaguugu

SEQ ID NO: 1130727 - RNA, 19 nt, Artificial Sequence
  Description of Artificial Sequence: Synthetic oligonucleotide
  Antisense strand to SEQ ID NO: 1130726
acaacuguggcacauauac

SEQ ID NO: 1130728 - RNA, 19 nt, Artificial Sequence
  Description of Artificial Sequence: Synthetic oligonucleotide
  Sense strand starting at position 3500 of SEQ ID NO: 916103
gccaauucuugcucugaca

SEQ ID NO: 1130729 - RNA, 19 nt, Artificial Sequence
  Description of Artificial Sequence: Synthetic oligonucleotide
  Antisense strand to SEQ ID NO: 1130728
ugucagagcaagaauuggc

SEQ ID NO: 1130730 - RNA, 19 nt, Artificial Sequence
  Description of Artificial Sequence: Synthetic oligonucleotide
  Sense strand starting at position 3532 of SEQ ID NO: 916103
ucgacucugugccuuauuu

SEQ ID NO: 1130731 - RNA, 19 nt, Artificial Sequence
  Description of Artificial Sequence: Synthetic oligonucleotide
  Antisense strand to SEQ ID NO: 1130730
aaauaaggcacagagucga

SEQ ID NO: 1130732 - RNA, 19 nt, Artificial Sequence
  Description of Artificial Sequence: Synthetic oligonucleotide
  Sense strand starting at position 3609 of SEQ ID NO: 916103
uuguaagaacugugcgaag

SEQ ID NO: 1130733 - RNA, 19 nt, Artificial Sequence
  Description of Artificial Sequence: Synthetic oligonucleotide
  Antisense strand to SEQ ID NO: 1130732
cuucgcacaguucuuacaa

SEQ ID NO: 1130734 - RNA, 19 nt, Artificial Sequence
  Description of Artificial Sequence: Synthetic oligonucleotide
  Sense strand starting at position 3614 of SEQ ID NO: 916103
agaacugugcgaagcguuu

SEQ ID NO: 1130735 - RNA, 19 nt, Artificial Sequence
  Description of Artificial Sequence: Synthetic oligonucleotide
  Antisense strand to SEQ ID NO: 1130734
aaacgcuucgcacaguucu

SEQ ID NO: 1130736 - RNA, 19 nt, Artificial Sequence
  Description of Artificial Sequence: Synthetic oligonucleotide
  Sense strand starting at position 3618 of SEQ ID NO: 916103
cugugcgaagcguuuauua

SEQ ID NO: 1130737 - RNA, 19 nt, Artificial Sequence
  Description of Artificial Sequence: Synthetic oligonucleotide
  Antisense strand to SEQ ID NO: 1130736
uaauaaacgcuucgcacag

SEQ ID NO: 1130738 - RNA, 19 nt, Artificial Sequence
  Description of Artificial Sequence: Synthetic oligonucleotide
  Sense strand starting at position 372 of SEQ ID NO: 916104
acaacuguauaaguugaau

SEQ ID NO: 1130739 - RNA, 19 nt, Artificial Sequence
  Description of Artificial Sequence: Synthetic oligonucleotide
  Antisense strand to SEQ ID NO: 1130738
auucaacuuauacaguugu

SEQ ID NO: 1130740 - RNA, 19 nt, Artificial Sequence
  Description of Artificial Sequence: Synthetic oligonucleotide
  Sense strand starting at position 378 of SEQ ID NO: 916104
guauaaguugaaugagcca

SEQ ID NO: 1130741 - RNA, 19 nt, Artificial Sequence
  Description of Artificial Sequence: Synthetic oligonucleotide
  Antisense strand to SEQ ID NO: 1130740
uggcucauucaacuuauac

SEQ ID NO: 1130742 - RNA, 19 nt, Artificial Sequence
  Description of Artificial Sequence: Synthetic oligonucleotide
  Sense strand starting at position 383 of SEQ ID NO: 916104
aguugaaugagccaggcau

SEQ ID NO: 1130743 - RNA, 19 nt, Artificial Sequence
  Description of Artificial Sequence: Synthetic oligonucleotide
  Antisense strand to SEQ ID NO: 1130742
augccuggcucauucaacu

SEQ ID NO: 1130744 - RNA, 19 nt, Artificial Sequence
  Description of Artificial Sequence: Synthetic oligonucleotide
  Sense strand starting at position 548 of SEQ ID NO: 916104
acaacuguguagguugaaa

SEQ ID NO: 1130745 - RNA, 19 nt, Artificial Sequence
  Description of Artificial Sequence: Synthetic oligonucleotide
  Antisense strand to SEQ ID NO: 1130744
uuucaaccuacacaguugu

SEQ ID NO: 1130746 - RNA, 19 nt, Artificial Sequence
  Description of Artificial Sequence: Synthetic oligonucleotide
  Sense strand starting at position 623 of SEQ ID NO: 916104
guuuaaaguguuucguggu

SEQ ID NO: 1130747 - RNA, 19 nt, Artificial Sequence
  Description of Artificial Sequence: Synthetic oligonucleotide
  Antisense strand to SEQ ID NO: 1130746
accacgaaacacuuuaaac

SEQ ID NO: 1130748 - RNA, 19 nt, Artificial Sequence
  Description of Artificial Sequence: Synthetic oligonucleotide
  Sense strand starting at position 1433 of SEQ ID NO: 916104
ccagacaugccucauugua

SEQ ID NO: 1130749 - RNA, 19 nt, Artificial Sequence
  Description of Artificial Sequence: Synthetic oligonucleotide
  Antisense strand to SEQ ID NO: 1130748
uacaaugaggcaugucugg

SEQ ID NO: 1130750 - RNA, 19 nt, Artificial Sequence
  Description of Artificial Sequence: Synthetic oligonucleotide
  Sense strand starting at position 1464 of SEQ ID NO: 916104
uagaauuguugauagaaca

SEQ ID NO: 1130751 - RNA, 19 nt, Artificial Sequence
  Description of Artificial Sequence: Synthetic oligonucleotide
  Antisense strand to SEQ ID NO: 1130750
uguucuaucaacaauucua

SEQ ID NO: 1130752 - RNA, 19 nt, Artificial Sequence
  Description of Artificial Sequence: Synthetic oligonucleotide
  Sense strand starting at position 1477 of SEQ ID NO: 916104
agaacagacuccuuaaguc

SEQ ID NO: 1130753 - RNA, 19 nt, Artificial Sequence
  Description of Artificial Sequence: Synthetic oligonucleotide
  Antisense strand to SEQ ID NO: 1130752
gacuuaaggagucuguucu

SEQ ID NO: 1130754 - RNA, 19 nt, Artificial Sequence
  Description of Artificial Sequence: Synthetic oligonucleotide
  Sense strand starting at position 1484 of SEQ ID NO: 916104
acuccuuaagucugauaag

SEQ ID NO: 1130755 - RNA, 19 nt, Artificial Sequence
  Description of Artificial Sequence: Synthetic oligonucleotide
  Antisense strand to SEQ ID NO: 1130754
cuuaucagacuuaaggagu

SEQ ID NO: 1130756 - RNA, 19 nt, Artificial Sequence
  Description of Artificial Sequence: Synthetic oligonucleotide
  Sense strand starting at position 1529 of SEQ ID NO: 916104
aggcuuaaccugcacgaua

SEQ ID NO: 1130757 - RNA, 19 nt, Artificial Sequence
  Description of Artificial Sequence: Synthetic oligonucleotide
  Antisense strand to SEQ ID NO: 1130756
uaucgugcagguuaagccu

SEQ ID NO: 1130758 - RNA, 19 nt, Artificial Sequence
  Description of Artificial Sequence: Synthetic oligonucleotide
  Sense strand starting at position 1531 of SEQ ID NO: 916104
gcuuaaccugcacgauaaa

SEQ ID NO: 1130759 - RNA, 19 nt, Artificial Sequence
  Description of Artificial Sequence: Synthetic oligonucleotide
  Antisense strand to SEQ ID NO: 1130758
uuuaucgugcagguuaagc

SEQ ID NO: 1130760 - RNA, 19 nt, Artificial Sequence
  Description of Artificial Sequence: Synthetic oligonucleotide
  Sense strand starting at position 1880 of SEQ ID NO: 916104
gguuuacauucuguauaaa

SEQ ID NO: 1130761 - RNA, 19 nt, Artificial Sequence
  Description of Artificial Sequence: Synthetic oligonucleotide
  Antisense strand to SEQ ID NO: 1130760
uuuauacagaauguaaacc

SEQ ID NO: 1130762 - RNA, 19 nt, Artificial Sequence
  Description of Artificial Sequence: Synthetic oligonucleotide
  Sense strand starting at position 1921 of SEQ ID NO: 916104
ggaccuaccuuguuugauu

SEQ ID NO: 1130763 - RNA, 19 nt, Artificial Sequence
  Description of Artificial Sequence: Synthetic oligonucleotide
  Antisense strand to SEQ ID NO: 1130762
aaucaaacaagguaggucc

SEQ ID NO: 1130764 - RNA, 19 nt, Artificial Sequence
  Description of Artificial Sequence: Synthetic oligonucleotide
  Sense strand starting at position 2192 of SEQ ID NO: 916104
gcauuuguauguuauuucu

SEQ ID NO: 1130765 - RNA, 19 nt, Artificial Sequence
  Description of Artificial Sequence: Synthetic oligonucleotide
  Antisense strand to SEQ ID NO: 1130764
agaaauaacauacaaaugc

SEQ ID NO: 1130766 - RNA, 19 nt, Artificial Sequence
  Description of Artificial Sequence: Synthetic oligonucleotide
  Sense strand starting at position 2198 of SEQ ID NO: 916104
guauguuauuucuccuacu

SEQ ID NO: 1130767 - RNA, 19 nt, Artificial Sequence
  Description of Artificial Sequence: Synthetic oligonucleotide
  Antisense strand to SEQ ID NO: 1130766
aguaggagaaauaacauac

SEQ ID NO: 1130768 - RNA, 19 nt, Artificial Sequence
  Description of Artificial Sequence: Synthetic oligonucleotide
  Sense strand starting at position 2244 of SEQ ID NO: 916104
agugaaacuucauagggag

SEQ ID NO: 1130769 - RNA, 19 nt, Artificial Sequence
  Description of Artificial Sequence: Synthetic oligonucleotide
  Antisense strand to SEQ ID NO: 1130768
cucccuaugaaguuucacu

SEQ ID NO: 1130770 - RNA, 19 nt, Artificial Sequence
  Description of Artificial Sequence: Synthetic oligonucleotide
  Sense strand starting at position 2303 of SEQ ID NO: 916104
agaacauucucgccuugca

SEQ ID NO: 1130771 - RNA, 19 nt, Artificial Sequence
  Description of Artificial Sequence: Synthetic oligonucleotide
  Antisense strand to SEQ ID NO: 1130770
ugcaaggcgagaauguucu

SEQ ID NO: 1130772 - RNA, 19 nt, Artificial Sequence
  Description of Artificial Sequence: Synthetic oligonucleotide
  Sense strand starting at position 2324 of SEQ ID NO: 916104
acugaacuucuauggcuau

SEQ ID NO: 1130773 - RNA, 19 nt, Artificial Sequence
  Description of Artificial Sequence: Synthetic oligonucleotide
  Antisense strand to SEQ ID NO: 1130772
auagccauagaaguucagu

SEQ ID NO: 1130774 - RNA, 19 nt, Artificial Sequence
  Description of Artificial Sequence: Synthetic oligonucleotide
  Sense strand starting at position 2512 of SEQ ID NO: 916104
aguauagcauaugucagaa

SEQ ID NO: 1130775 - RNA, 19 nt, Artificial Sequence
  Description of Artificial Sequence: Synthetic oligonucleotide
  Antisense strand to SEQ ID NO: 1130774
uucugacauaugcuauacu

SEQ ID NO: 1130776 - RNA, 19 nt, Artificial Sequence
  Description of Artificial Sequence: Synthetic oligonucleotide
  Sense strand starting at position 2675 of SEQ ID NO: 916104
aggaaagguuuaucaugua

SEQ ID NO: 1130777 - RNA, 19 nt, Artificial Sequence
  Description of Artificial Sequence: Synthetic oligonucleotide
  Antisense strand to SEQ ID NO: 1130776
uacaugauaaaccuuuccu

SEQ ID NO: 1130778 - RNA, 19 nt, Artificial Sequence
  Description of Artificial Sequence: Synthetic oligonucleotide
  Sense strand starting at position 2793 of SEQ ID NO: 916104
ugcagagauugacaagaca

SEQ ID NO: 1130779 - RNA, 19 nt, Artificial Sequence
  Description of Artificial Sequence: Synthetic oligonucleotide
  Antisense strand to SEQ ID NO: 1130778
ugucuugucaaucucugca

SEQ ID NO: 1130780 - RNA, 19 nt, Artificial Sequence
  Description of Artificial Sequence: Synthetic oligonucleotide
  Sense strand starting at position 2822 of SEQ ID NO: 916104
gggauuccuaaugguggua

SEQ ID NO: 1130781 - RNA, 19 nt, Artificial Sequence
  Description of Artificial Sequence: Synthetic oligonucleotide
  Antisense strand to SEQ ID NO: 1130780
uaccaccauuaggaauccc

SEQ ID NO: 1130782 - RNA, 19 nt, Artificial Sequence
  Description of Artificial Sequence: Synthetic oligonucleotide
  Sense strand starting at position 2919 of SEQ ID NO: 916104
ccaggucuuugggcugaaa

SEQ ID NO: 1130783 - RNA, 19 nt, Artificial Sequence
  Description of Artificial Sequence: Synthetic oligonucleotide
  Antisense strand to SEQ ID NO: 1130782
uuucagcccaaagaccugg

SEQ ID NO: 1130784 - RNA, 19 nt, Artificial Sequence
  Description of Artificial Sequence: Synthetic oligonucleotide
  Sense strand starting at position 2944 of SEQ ID NO: 916104
uagagucaucuccagugau

SEQ ID NO: 1130785 - RNA, 19 nt, Artificial Sequence
  Description of Artificial Sequence: Synthetic oligonucleotide
  Antisense strand to SEQ ID NO: 1130784
aucacuggagaugacucua

SEQ ID NO: 1130786 - RNA, 19 nt, Artificial Sequence
  Description of Artificial Sequence: Synthetic oligonucleotide
  Sense strand starting at position 2947 of SEQ ID NO: 916104
agucaucuccagugaugaa

SEQ ID NO: 1130787 - RNA, 19 nt, Artificial Sequence
  Description of Artificial Sequence: Synthetic oligonucleotide
  Antisense strand to SEQ ID NO: 1130786
uucaucacuggagaugacu

SEQ ID NO: 1130788 - RNA, 19 nt, Artificial Sequence
  Description of Artificial Sequence: Synthetic oligonucleotide
  Sense strand starting at position 2948 of SEQ ID NO: 916104
gucaucuccagugaugaag

SEQ ID NO: 1130789 - RNA, 19 nt, Artificial Sequence
  Description of Artificial Sequence: Synthetic oligonucleotide
  Antisense strand to SEQ ID NO: 1130788
cuucaucacuggagaugac

SEQ ID NO: 1130790 - RNA, 19 nt, Artificial Sequence
  Description of Artificial Sequence: Synthetic oligonucleotide
  Sense strand starting at position 2966 of SEQ ID NO: 916104
gagucccgaugauuaauga

SEQ ID NO: 1130791 - RNA, 19 nt, Artificial Sequence
  Description of Artificial Sequence: Synthetic oligonucleotide
  Antisense strand to SEQ ID NO: 1130790
ucauuaaucaucgggacuc

SEQ ID NO: 1130792 - RNA, 19 nt, Artificial Sequence
  Description of Artificial Sequence: Synthetic oligonucleotide
  Sense strand starting at position 2988 of SEQ ID NO: 916104
caccuuugcgaagauuaug

SEQ ID NO: 1130793 - RNA, 19 nt, Artificial Sequence
  Description of Artificial Sequence: Synthetic oligonucleotide
  Antisense strand to SEQ ID NO: 1130792
cauaaucuucgcaaaggug

SEQ ID NO: 1130794 - RNA, 19 nt, Artificial Sequence
  Description of Artificial Sequence: Synthetic oligonucleotide
  Sense strand starting at position 3107 of SEQ ID NO: 916104
ggauuuaguuucuaguuua

SEQ ID NO: 1130795 - RNA, 19 nt, Artificial Sequence
  Description of Artificial Sequence: Synthetic oligonucleotide
  Antisense strand to SEQ ID NO: 1130794
uaaacuagaaacuaaaucc

SEQ ID NO: 1130796 - RNA, 19 nt, Artificial Sequence
  Description of Artificial Sequence: Synthetic oligonucleotide
  Sense strand starting at position 3119 of SEQ ID NO: 916104
uaguuuaauguggaagcaa

SEQ ID NO: 1130797 - RNA, 19 nt, Artificial Sequence
  Description of Artificial Sequence: Synthetic oligonucleotide
  Antisense strand to SEQ ID NO: 1130796
uugcuuccacauuaaacua

SEQ ID NO: 1130798 - RNA, 19 nt, Artificial Sequence
  Description of Artificial Sequence: Synthetic oligonucleotide
  Sense strand starting at position 3225 of SEQ ID NO: 916104
gaacuaugggaguggccua

SEQ ID NO: 1130799 - RNA, 19 nt, Artificial Sequence
  Description of Artificial Sequence: Synthetic oligonucleotide
  Antisense strand to SEQ ID NO: 1130798
uaggccacucccauaguuc

SEQ ID NO: 1130800 - RNA, 19 nt, Artificial Sequence
  Description of Artificial Sequence: Synthetic oligonucleotide
  Sense strand starting at position 3230 of SEQ ID NO: 916104
augggaguggccuaaauuc

SEQ ID NO: 1130801 - RNA, 19 nt, Artificial Sequence
  Description of Artificial Sequence: Synthetic oligonucleotide
  Antisense strand to SEQ ID NO: 1130800
gaauuuaggccacucccau

SEQ ID NO: 1130802 - RNA, 19 nt, Artificial Sequence
  Description of Artificial Sequence: Synthetic oligonucleotide
  Sense strand starting at position 3498 of SEQ ID NO: 916104
cuaugauuguauccucagu

SEQ ID NO: 1130803 - RNA, 19 nt, Artificial Sequence
  Description of Artificial Sequence: Synthetic oligonucleotide
  Antisense strand to SEQ ID NO: 1130802
acugaggauacaaucauag

SEQ ID NO: 1130804 - RNA, 19 nt, Artificial Sequence
  Description of Artificial Sequence: Synthetic oligonucleotide
  Sense strand starting at position 3500 of SEQ ID NO: 916104
augauuguauccucaguca

SEQ ID NO: 1130805 - RNA, 19 nt, Artificial Sequence
  Description of Artificial Sequence: Synthetic oligonucleotide
  Antisense strand to SEQ ID NO: 1130804
ugacugaggauacaaucau

SEQ ID NO: 1130806 - RNA, 19 nt, Artificial Sequence
  Description of Artificial Sequence: Synthetic oligonucleotide
  Sense strand starting at position 3685 of SEQ ID NO: 916104
uuggauuugucugugcaga

SEQ ID NO: 1130807 - RNA, 19 nt, Artificial Sequence
  Description of Artificial Sequence: Synthetic oligonucleotide
  Antisense strand to SEQ ID NO: 1130806
ucugcacagacaaauccaa

SEQ ID NO: 1130808 - RNA, 19 nt, Artificial Sequence
  Description of Artificial Sequence: Synthetic oligonucleotide
  Sense strand starting at position 3686 of SEQ ID NO: 916104
uggauuugucugugcagag

SEQ ID NO: 1130809 - RNA, 19 nt, Artificial Sequence
  Description of Artificial Sequence: Synthetic oligonucleotide
  Antisense strand to SEQ ID NO: 1130808
cucugcacagacaaaucca

SEQ ID NO: 1130810 - RNA, 19 nt, Artificial Sequence
  Description of Artificial Sequence: Synthetic oligonucleotide
  Sense strand starting at position 3717 of SEQ ID NO: 916104
ccaucaggugauugcauua

SEQ ID NO: 1130811 - RNA, 19 nt, Artificial Sequence
  Description of Artificial Sequence: Synthetic oligonucleotide
  Antisense strand to SEQ ID NO: 1130810
uaaugcaaucaccugaugg

SEQ ID NO: 1130812 - RNA, 19 nt, Artificial Sequence
  Description of Artificial Sequence: Synthetic oligonucleotide
  Sense strand starting at position 3722 of SEQ ID NO: 916104
aggugauugcauuaagagu

SEQ ID NO: 1130813 - RNA, 19 nt, Artificial Sequence
  Description of Artificial Sequence: Synthetic oligonucleotide
  Antisense strand to SEQ ID NO: 1130812
acucuuaaugcaaucaccu

SEQ ID NO: 1130814 - RNA, 19 nt, Artificial Sequence
  Description of Artificial Sequence: Synthetic oligonucleotide
  Sense strand starting at position 3740 of SEQ ID NO: 916104
uuguucucuuccuuggcaa

SEQ ID NO: 1130815 - RNA, 19 nt, Artificial Sequence
  Description of Artificial Sequence: Synthetic oligonucleotide
  Antisense strand to SEQ ID NO: 1130814
uugccaaggaagagaacaa

SEQ ID NO: 1130816 - RNA, 19 nt, Artificial Sequence
  Description of Artificial Sequence: Synthetic oligonucleotide
  Sense strand starting at position 3883 of SEQ ID NO: 916104
gcaagugagguugaacaca

SEQ ID NO: 1130817 - RNA, 19 nt, Artificial Sequence
  Description of Artificial Sequence: Synthetic oligonucleotide
  Antisense strand to SEQ ID NO: 1130816
uguguucaaccucacuugc

SEQ ID NO: 1130818 - RNA, 19 nt, Artificial Sequence
  Description of Artificial Sequence: Synthetic oligonucleotide
  Sense strand starting at position 78 of SEQ ID NO: 916105
aggacuuccggcuauccau

SEQ ID NO: 1130819 - RNA, 19 nt, Artificial Sequence
  Description of Artificial Sequence: Synthetic oligonucleotide
  Antisense strand to SEQ ID NO: 1130818
auggauagccggaaguccu

SEQ ID NO: 1130820 - RNA, 19 nt, Artificial Sequence
  Description of Artificial Sequence: Synthetic oligonucleotide
  Sense strand starting at position 101 of SEQ ID NO: 916105
uguauauaccaguaacuuc

SEQ ID NO: 1130821 - RNA, 19 nt, Artificial Sequence
  Description of Artificial Sequence: Synthetic oligonucleotide
  Antisense strand to SEQ ID NO: 1130820
gaaguuacugguauauaca

SEQ ID NO: 1130822 - RNA, 19 nt, Artificial Sequence
  Description of Artificial Sequence: Synthetic oligonucleotide
  Sense strand starting at position 259 of SEQ ID NO: 916105
gcuuaaugauagcuaucau

SEQ ID NO: 1130823 - RNA, 19 nt, Artificial Sequence
  Description of Artificial Sequence: Synthetic oligonucleotide
  Antisense strand to SEQ ID NO: 1130822
augauagcuaucauuaagc

SEQ ID NO: 1130824 - RNA, 19 nt, Artificial Sequence
  Description of Artificial Sequence: Synthetic oligonucleotide
  Sense strand starting at position 294 of SEQ ID NO: 916105
uccauagucccagaucagu

SEQ ID NO: 1130825 - RNA, 19 nt, Artificial Sequence
  Description of Artificial Sequence: Synthetic oligonucleotide
  Antisense strand to SEQ ID NO: 1130824
acugaucugggacuaugga

SEQ ID NO: 1130826 - RNA, 19 nt, Artificial Sequence
  Description of Artificial Sequence: Synthetic oligonucleotide
  Sense strand starting at position 299 of SEQ ID NO: 916105
agucccagaucagucuuaa

SEQ ID NO: 1130827 - RNA, 19 nt, Artificial Sequence
  Description of Artificial Sequence: Synthetic oligonucleotide
  Antisense strand to SEQ ID NO: 1130826
uuaagacugaucugggacu

SEQ ID NO: 1130828 - RNA, 19 nt, Artificial Sequence
  Description of Artificial Sequence: Synthetic oligonucleotide
  Sense strand starting at position 562 of SEQ ID NO: 916105
ggaggaugugagggcauaa

SEQ ID NO: 1130829 - RNA, 19 nt, Artificial Sequence
  Description of Artificial Sequence: Synthetic oligonucleotide
  Antisense strand to SEQ ID NO: 1130828
uuaugcccucacauccucc

SEQ ID NO: 1130830 - RNA, 19 nt, Artificial Sequence
  Description of Artificial Sequence: Synthetic oligonucleotide
  Sense strand starting at position 660 of SEQ ID NO: 916105
gggcuccagggucaauauu

SEQ ID NO: 1130831 - RNA, 19 nt, Artificial Sequence
  Description of Artificial Sequence: Synthetic oligonucleotide
  Antisense strand to SEQ ID NO: 1130830
aauauugacccuggagccc

SEQ ID NO: 1130832 - RNA, 19 nt, Artificial Sequence
  Description of Artificial Sequence: Synthetic oligonucleotide
  Sense strand starting at position 669 of SEQ ID NO: 916105
ggucaauauuaauucgcaa

SEQ ID NO: 1130833 - RNA, 19 nt, Artificial Sequence
  Description of Artificial Sequence: Synthetic oligonucleotide
  Antisense strand to SEQ ID NO: 1130832
uugcgaauuaauauugacc

SEQ ID NO: 1130834 - RNA, 19 nt, Artificial Sequence
  Description of Artificial Sequence: Synthetic oligonucleotide
  Sense strand starting at position 688 of SEQ ID NO: 916105
auuaguggccaguaccaau

SEQ ID NO: 1130835 - RNA, 19 nt, Artificial Sequence
  Description of Artificial Sequence: Synthetic oligonucleotide
  Antisense strand to SEQ ID NO: 1130834
auugguacuggccacuaau

SEQ ID NO: 1130836 - RNA, 19 nt, Artificial Sequence
  Description of Artificial Sequence: Synthetic oligonucleotide
  Sense strand starting at position 750 of SEQ ID NO: 916105
agcggugaugcugcuuuau

SEQ ID NO: 1130837 - RNA, 19 nt, Artificial Sequence
  Description of Artificial Sequence: Synthetic oligonucleotide
  Antisense strand to SEQ ID NO: 1130836
auaaagcagcaucaccgcu

SEQ ID NO: 1130838 - RNA, 19 nt, Artificial Sequence
  Description of Artificial Sequence: Synthetic oligonucleotide
  Sense strand starting at position 752 of SEQ ID NO: 916105
cggugaugcugcuuuauuu

SEQ ID NO: 1130839 - RNA, 19 nt, Artificial Sequence
  Description of Artificial Sequence: Synthetic oligonucleotide
  Antisense strand to SEQ ID NO: 1130838
aaauaaagcagcaucaccg

SEQ ID NO: 1130840 - RNA, 19 nt, Artificial Sequence
  Description of Artificial Sequence: Synthetic oligonucleotide
  Sense strand starting at position 795 of SEQ ID NO: 916105
ggacaacgaguuugcaauu

SEQ ID NO: 1130841 - RNA, 19 nt, Artificial Sequence
  Description of Artificial Sequence: Synthetic oligonucleotide
  Antisense strand to SEQ ID NO: 1130840
aauugcaaacucguugucc

SEQ ID NO: 1130842 - RNA, 19 nt, Artificial Sequence
  Description of Artificial Sequence: Synthetic oligonucleotide
  Sense strand starting at position 1116 of SEQ ID NO: 916105
ugggaauacaggcguauaa

SEQ ID NO: 1130843 - RNA, 19 nt, Artificial Sequence
  Description of Artificial Sequence: Synthetic oligonucleotide
  Antisense strand to SEQ ID NO: 1130842
uuauacgccuguauuccca

SEQ ID NO: 1130844 - RNA, 19 nt, Artificial Sequence
  Description of Artificial Sequence: Synthetic oligonucleotide
  Sense strand starting at position 1118 of SEQ ID NO: 916105
ggaauacaggcguauaaac

SEQ ID NO: 1130845 - RNA, 19 nt, Artificial Sequence
  Description of Artificial Sequence: Synthetic oligonucleotide
  Antisense strand to SEQ ID NO: 1130844
guuuauacgccuguauucc

SEQ ID NO: 1130846 - RNA, 19 nt, Artificial Sequence
  Description of Artificial Sequence: Synthetic oligonucleotide
  Sense strand starting at position 1219 of SEQ ID NO: 916105
cgugacuucccagaucuua

SEQ ID NO: 1130847 - RNA, 19 nt, Artificial Sequence
  Description of Artificial Sequence: Synthetic oligonucleotide
  Antisense strand to SEQ ID NO: 1130846
uaagaucugggaagucacg

SEQ ID NO: 1130848 - RNA, 19 nt, Artificial Sequence
  Description of Artificial Sequence: Synthetic oligonucleotide
  Sense strand starting at position 1228 of SEQ ID NO: 916105
ccagaucuuagguaaggca

SEQ ID NO: 1130849 - RNA, 19 nt, Artificial Sequence
  Description of Artificial Sequence: Synthetic oligonucleotide
  Antisense strand to SEQ ID NO: 1130848
ugccuuaccuaagaucugg

SEQ ID NO: 1130850 - RNA, 19 nt, Artificial Sequence
  Description of Artificial Sequence: Synthetic oligonucleotide
  Sense strand starting at position 1246 of SEQ ID NO: 916105
auagauucgucugcaagga

SEQ ID NO: 1130851 - RNA, 19 nt, Artificial Sequence
  Description of Artificial Sequence: Synthetic oligonucleotide
  Antisense strand to SEQ ID NO: 1130850
uccuugcagacgaaucuau

SEQ ID NO: 1130852 - RNA, 19 nt, Artificial Sequence
  Description of Artificial Sequence: Synthetic oligonucleotide
  Sense strand starting at position 1266 of SEQ ID NO: 916105
ggccgaaaucucuaccuau

SEQ ID NO: 1130853 - RNA, 19 nt, Artificial Sequence
  Description of Artificial Sequence: Synthetic oligonucleotide
  Antisense strand to SEQ ID NO: 1130852
auagguagagauuucggcc

SEQ ID NO: 1130854 - RNA, 19 nt, Artificial Sequence
  Description of Artificial Sequence: Synthetic oligonucleotide
  Sense strand starting at position 1269 of SEQ ID NO: 916105
cgaaaucucuaccuaucag

SEQ ID NO: 1130855 - RNA, 19 nt, Artificial Sequence
  Description of Artificial Sequence: Synthetic oligonucleotide
  Antisense strand to SEQ ID NO: 1130854
cugauagguagagauuucg

SEQ ID NO: 1130856 - RNA, 19 nt, Artificial Sequence
  Description of Artificial Sequence: Synthetic oligonucleotide
  Sense strand starting at position 1586 of SEQ ID NO: 916105
cagcguuucccagaaagaa

SEQ ID NO: 1130857 - RNA, 19 nt, Artificial Sequence
  Description of Artificial Sequence: Synthetic oligonucleotide
  Antisense strand to SEQ ID NO: 1130856
uucuuucugggaaacgcug

SEQ ID NO: 1130858 - RNA, 19 nt, Artificial Sequence
  Description of Artificial Sequence: Synthetic oligonucleotide
  Sense strand starting at position 2413 of SEQ ID NO: 916105
cgggaaggucucgaaguuu

SEQ ID NO: 1130859 - RNA, 19 nt, Artificial Sequence
  Description of Artificial Sequence: Synthetic oligonucleotide
  Antisense strand to SEQ ID NO: 1130858
aaacuucgagaccuucccg

SEQ ID NO: 1130860 - RNA, 19 nt, Artificial Sequence
  Description of Artificial Sequence: Synthetic oligonucleotide
  Sense strand starting at position 2530 of SEQ ID NO: 916105
cucggagcucuugggagau

SEQ ID NO: 1130861 - RNA, 19 nt, Artificial Sequence
  Description of Artificial Sequence: Synthetic oligonucleotide
  Antisense strand to SEQ ID NO: 1130860
aucucccaagagcuccgag

SEQ ID NO: 1130862 - RNA, 19 nt, Artificial Sequence
  Description of Artificial Sequence: Synthetic oligonucleotide
  Sense strand starting at position 2677 of SEQ ID NO: 916105
ggcaaaguggccgaucaau

SEQ ID NO: 1130863 - RNA, 19 nt, Artificial Sequence
  Description of Artificial Sequence: Synthetic oligonucleotide
  Antisense strand to SEQ ID NO: 1130862
auugaucggccacuuugcc

SEQ ID NO: 1130864 - RNA, 19 nt, Artificial Sequence
  Description of Artificial Sequence: Synthetic oligonucleotide
  Sense strand starting at position 2687 of SEQ ID NO: 916105
ccgaucaauauaugggaca

SEQ ID NO: 1130865 - RNA, 19 nt, Artificial Sequence
  Description of Artificial Sequence: Synthetic oligonucleotide
  Antisense strand to SEQ ID NO: 1130864
ugucccauauauugaucgg

SEQ ID NO: 1130866 - RNA, 19 nt, Artificial Sequence
  Description of Artificial Sequence: Synthetic oligonucleotide
  Sense strand starting at position 2860 of SEQ ID NO: 916105
uuccaaaggcaugaaaguu

SEQ ID NO: 1130867 - RNA, 19 nt, Artificial Sequence
  Description of Artificial Sequence: Synthetic oligonucleotide
  Antisense strand to SEQ ID NO: 1130866
aacuuucaugccuuuggaa

SEQ ID NO: 1130868 - RNA, 19 nt, Artificial Sequence
  Description of Artificial Sequence: Synthetic oligonucleotide
  Sense strand starting at position 3226 of SEQ ID NO: 916105
ggcggguguccguccgauu

SEQ ID NO: 1130869 - RNA, 19 nt, Artificial Sequence
  Description of Artificial Sequence: Synthetic oligonucleotide
  Antisense strand to SEQ ID NO: 1130868
aaucggacggacacccgcc

SEQ ID NO: 1130870 - RNA, 19 nt, Artificial Sequence
  Description of Artificial Sequence: Synthetic oligonucleotide
  Sense strand starting at position 3316 of SEQ ID NO: 916105
uugccuugcguuguaacau

SEQ ID NO: 1130871 - RNA, 19 nt, Artificial Sequence
  Description of Artificial Sequence: Synthetic oligonucleotide
  Antisense strand to SEQ ID NO: 1130870
auguuacaacgcaaggcaa

SEQ ID NO: 1130872 - RNA, 19 nt, Artificial Sequence
  Description of Artificial Sequence: Synthetic oligonucleotide
  Sense strand starting at position 3522 of SEQ ID NO: 916105
uguaguuuacugcgauuug

SEQ ID NO: 1130873 - RNA, 19 nt, Artificial Sequence
  Description of Artificial Sequence: Synthetic oligonucleotide
  Antisense strand to SEQ ID NO: 1130872
caaaucgcaguaaacuaca

SEQ ID NO: 1130874 - RNA, 19 nt, Artificial Sequence
  Description of Artificial Sequence: Synthetic oligonucleotide
  Sense strand starting at position 3533 of SEQ ID NO: 916105
gcgauuuggaaaugcccua

SEQ ID NO: 1130875 - RNA, 19 nt, Artificial Sequence
  Description of Artificial Sequence: Synthetic oligonucleotide
  Antisense strand to SEQ ID NO: 1130874
uagggcauuuccaaaucgc

SEQ ID NO: 1130876 - RNA, 19 nt, Artificial Sequence
  Description of Artificial Sequence: Synthetic oligonucleotide
  Sense strand starting at position 3582 of SEQ ID NO: 916105
aaguuaauuuggcauagag

SEQ ID NO: 1130877 - RNA, 19 nt, Artificial Sequence
  Description of Artificial Sequence: Synthetic oligonucleotide
  Antisense strand to SEQ ID NO: 1130876
cucuaugccaaauuaacuu

SEQ ID NO: 1130878 - RNA, 19 nt, Artificial Sequence
  Description of Artificial Sequence: Synthetic oligonucleotide
  Sense strand starting at position 3592 of SEQ ID NO: 916105
ggcauagagaucuagguuu

SEQ ID NO: 1130879 - RNA, 19 nt, Artificial Sequence
  Description of Artificial Sequence: Synthetic oligonucleotide
  Antisense strand to SEQ ID NO: 1130878
aaaccuagaucucuaugcc

SEQ ID NO: 1130880 - RNA, 19 nt, Artificial Sequence
  Description of Artificial Sequence: Synthetic oligonucleotide
  Sense strand starting at position 3663 of SEQ ID NO: 916105
acuugagaacuuuaguagu

SEQ ID NO: 1130881 - RNA, 19 nt, Artificial Sequence
  Description of Artificial Sequence: Synthetic oligonucleotide
  Antisense strand to SEQ ID NO: 1130880
acuacuaaaguucucaagu

SEQ ID NO: 1130882 - RNA, 19 nt, Artificial Sequence
  Description of Artificial Sequence: Synthetic oligonucleotide
  Sense strand starting at position 3665 of SEQ ID NO: 916105
uugagaacuuuaguaguca

SEQ ID NO: 1130883 - RNA, 19 nt, Artificial Sequence
  Description of Artificial Sequence: Synthetic oligonucleotide
  Antisense strand to SEQ ID NO: 1130882
ugacuacuaaaguucucaa

SEQ ID NO: 1130884 - RNA, 19 nt, Artificial Sequence
  Description of Artificial Sequence: Synthetic oligonucleotide
  Sense strand starting at position 3677 of SEQ ID NO: 916105
guagucaacaugugggaua

SEQ ID NO: 1130885 - RNA, 19 nt, Artificial Sequence
  Description of Artificial Sequence: Synthetic oligonucleotide
  Antisense strand to SEQ ID NO: 1130884
uaucccacauguugacuac

SEQ ID NO: 1130886 - RNA, 19 nt, Artificial Sequence
  Description of Artificial Sequence: Synthetic oligonucleotide
  Sense strand starting at position 3762 of SEQ ID NO: 916105
uccaucauucgauaaaugu

SEQ ID NO: 1130887 - RNA, 19 nt, Artificial Sequence
  Description of Artificial Sequence: Synthetic oligonucleotide
  Antisense strand to SEQ ID NO: 1130886
acauuuaucgaaugaugga

SEQ ID NO: 1130888 - RNA, 19 nt, Artificial Sequence
  Description of Artificial Sequence: Synthetic oligonucleotide
  Sense strand starting at position 3770 of SEQ ID NO: 916105
ucgauaaauguugacucau

SEQ ID NO: 1130889 - RNA, 19 nt, Artificial Sequence
  Description of Artificial Sequence: Synthetic oligonucleotide
  Antisense strand to SEQ ID NO: 1130888
augagucaacauuuaucga

SEQ ID NO: 1130890 - RNA, 19 nt, Artificial Sequence
  Description of Artificial Sequence: Synthetic oligonucleotide
  Sense strand starting at position 3772 of SEQ ID NO: 916105
gauaaauguugacucaugu

SEQ ID NO: 1130891 - RNA, 19 nt, Artificial Sequence
  Description of Artificial Sequence: Synthetic oligonucleotide
  Antisense strand to SEQ ID NO: 1130890
acaugagucaacauuuauc

SEQ ID NO: 1130892 - RNA, 19 nt, Artificial Sequence
  Description of Artificial Sequence: Synthetic oligonucleotide
  Sense strand starting at position 3786 of SEQ ID NO: 916105
cauguaucucccugugaag

SEQ ID NO: 1130893 - RNA, 19 nt, Artificial Sequence
  Description of Artificial Sequence: Synthetic oligonucleotide
  Antisense strand to SEQ ID NO: 1130892
cuucacagggagauacaug

SEQ ID NO: 1130894 - RNA, 19 nt, Artificial Sequence
  Description of Artificial Sequence: Synthetic oligonucleotide
  Sense strand starting at position 3797 of SEQ ID NO: 916105
cugugaagccaucaccaaa

SEQ ID NO: 1130895 - RNA, 19 nt, Artificial Sequence
  Description of Artificial Sequence: Synthetic oligonucleotide
  Antisense strand to SEQ ID NO: 1130894
uuuggugauggcuucacag

SEQ ID NO: 1130896 - RNA, 19 nt, Artificial Sequence
  Description of Artificial Sequence: Synthetic oligonucleotide
  Sense strand starting at position 3907 of SEQ ID NO: 916105
acugaucuuuaugucacua

SEQ ID NO: 1130897 - RNA, 19 nt, Artificial Sequence
  Description of Artificial Sequence: Synthetic oligonucleotide
  Antisense strand to SEQ ID NO: 1130896
uagugacauaaagaucagu

SEQ ID NO: 1130898 - RNA, 19 nt, Artificial Sequence
  Description of Artificial Sequence: Synthetic oligonucleotide
  Sense strand starting at position 62 of SEQ ID NO: 916106
accaauguauuaucuugua

SEQ ID NO: 1130899 - RNA, 19 nt, Artificial Sequence
  Description of Artificial Sequence: Synthetic oligonucleotide
  Antisense strand to SEQ ID NO: 1130898
uacaagauaauacauuggu

SEQ ID NO: 1130900 - RNA, 19 nt, Artificial Sequence
  Description of Artificial Sequence: Synthetic oligonucleotide
  Sense strand starting at position 96 of SEQ ID NO: 916106
ggcagucuugaacacucaa

SEQ ID NO: 1130901 - RNA, 19 nt, Artificial Sequence
  Description of Artificial Sequence: Synthetic oligonucleotide
  Antisense strand to SEQ ID NO: 1130900
uugaguguucaagacugcc

SEQ ID NO: 1130902 - RNA, 19 nt, Artificial Sequence
  Description of Artificial Sequence: Synthetic oligonucleotide
  Sense strand starting at position 219 of SEQ ID NO: 916106
guugcacucgaggaaugua

SEQ ID NO: 1130903 - RNA, 19 nt, Artificial Sequence
  Description of Artificial Sequence: Synthetic oligonucleotide
  Antisense strand to SEQ ID NO: 1130902
uacauuccucgagugcaac

SEQ ID NO: 1130904 - RNA, 19 nt, Artificial Sequence
  Description of Artificial Sequence: Synthetic oligonucleotide
  Sense strand starting at position 229 of SEQ ID NO: 916106
aggaauguaucugauuugu

SEQ ID NO: 1130905 - RNA, 19 nt, Artificial Sequence
  Description of Artificial Sequence: Synthetic oligonucleotide
  Antisense strand to SEQ ID NO: 1130904
acaaaucagauacauuccu

SEQ ID NO: 1130906 - RNA, 19 nt, Artificial Sequence
  Description of Artificial Sequence: Synthetic oligonucleotide
  Sense strand starting at position 235 of SEQ ID NO: 916106
guaucugauuuguaaugga

SEQ ID NO: 1130907 - RNA, 19 nt, Artificial Sequence
  Description of Artificial Sequence: Synthetic oligonucleotide
  Antisense strand to SEQ ID NO: 1130906
uccauuacaaaucagauac

SEQ ID NO: 1130908 - RNA, 19 nt, Artificial Sequence
  Description of Artificial Sequence: Synthetic oligonucleotide
  Sense strand starting at position 425 of SEQ ID NO: 916106
ggcacaaagucauuccuga

SEQ ID NO: 1130909 - RNA, 19 nt, Artificial Sequence
  Description of Artificial Sequence: Synthetic oligonucleotide
  Antisense strand to SEQ ID NO: 1130908
ucaggaaugacuuugugcc

SEQ ID NO: 1130910 - RNA, 19 nt, Artificial Sequence
  Description of Artificial Sequence: Synthetic oligonucleotide
  Sense strand starting at position 453 of SEQ ID NO: 916106
caguaaagaucucuugagu

SEQ ID NO: 1130911 - RNA, 19 nt, Artificial Sequence
  Description of Artificial Sequence: Synthetic oligonucleotide
  Antisense strand to SEQ ID NO: 1130910
acucaagagaucuuuacug

SEQ ID NO: 1130912 - RNA, 19 nt, Artificial Sequence
  Description of Artificial Sequence: Synthetic oligonucleotide
  Sense strand starting at position 493 of SEQ ID NO: 916106
ugagcaacuagucacgaau

SEQ ID NO: 1130913 - RNA, 19 nt, Artificial Sequence
  Description of Artificial Sequence: Synthetic oligonucleotide
  Antisense strand to SEQ ID NO: 1130912
auucgugacuaguugcuca

SEQ ID NO: 1130914 - RNA, 19 nt, Artificial Sequence
  Description of Artificial Sequence: Synthetic oligonucleotide
  Sense strand starting at position 496 of SEQ ID NO: 916106
gcaacuagucacgaauaug

SEQ ID NO: 1130915 - RNA, 19 nt, Artificial Sequence
  Description of Artificial Sequence: Synthetic oligonucleotide
  Antisense strand to SEQ ID NO: 1130914
cauauucgugacuaguugc

SEQ ID NO: 1130916 - RNA, 19 nt, Artificial Sequence
  Description of Artificial Sequence: Synthetic oligonucleotide
  Sense strand starting at position 505 of SEQ ID NO: 916106
cacgaauaugaugguuaau

SEQ ID NO: 1130917 - RNA, 19 nt, Artificial Sequence
  Description of Artificial Sequence: Synthetic oligonucleotide
  Antisense strand to SEQ ID NO: 1130916
auuaaccaucauauucgug

SEQ ID NO: 1130918 - RNA, 19 nt, Artificial Sequence
  Description of Artificial Sequence: Synthetic oligonucleotide
  Sense strand starting at position 769 of SEQ ID NO: 916106
agcaacgucguucaggaaa

SEQ ID NO: 1130919 - RNA, 19 nt, Artificial Sequence
  Description of Artificial Sequence: Synthetic oligonucleotide
  Antisense strand to SEQ ID NO: 1130918
uuuccugaacgacguugcu

SEQ ID NO: 1130920 - RNA, 19 nt, Artificial Sequence
  Description of Artificial Sequence: Synthetic oligonucleotide
  Sense strand starting at position 881 of SEQ ID NO: 916106
gggucuuaucuauaacucu

SEQ ID NO: 1130921 - RNA, 19 nt, Artificial Sequence
  Description of Artificial Sequence: Synthetic oligonucleotide
  Antisense strand to SEQ ID NO: 1130920
agaguuauagauaagaccc

SEQ ID NO: 1130922 - RNA, 19 nt, Artificial Sequence
  Description of Artificial Sequence: Synthetic oligonucleotide
  Sense strand starting at position 955 of SEQ ID NO: 916106
cuaugagaucuguggguga

SEQ ID NO: 1130923 - RNA, 19 nt, Artificial Sequence
  Description of Artificial Sequence: Synthetic oligonucleotide
  Antisense strand to SEQ ID NO: 1130922
ucacccacagaucucauag

SEQ ID NO: 1130924 - RNA, 19 nt, Artificial Sequence
  Description of Artificial Sequence: Synthetic oligonucleotide
  Sense strand starting at position 959 of SEQ ID NO: 916106
gagaucugugggugagcua

SEQ ID NO: 1130925 - RNA, 19 nt, Artificial Sequence
  Description of Artificial Sequence: Synthetic oligonucleotide
  Antisense strand to SEQ ID NO: 1130924
uagcucacccacagaucuc

SEQ ID NO: 1130926 - RNA, 19 nt, Artificial Sequence
  Description of Artificial Sequence: Synthetic oligonucleotide
  Sense strand starting at position 960 of SEQ ID NO: 916106
agaucugugggugagcuaa

SEQ ID NO: 1130927 - RNA, 19 nt, Artificial Sequence
  Description of Artificial Sequence: Synthetic oligonucleotide
  Antisense strand to SEQ ID NO: 1130926
uuagcucacccacagaucu

SEQ ID NO: 1130928 - RNA, 19 nt, Artificial Sequence
  Description of Artificial Sequence: Synthetic oligonucleotide
  Sense strand starting at position 1092 of SEQ ID NO: 916106
acugcaagcccuggauuaa

SEQ ID NO: 1130929 - RNA, 19 nt, Artificial Sequence
  Description of Artificial Sequence: Synthetic oligonucleotide
  Antisense strand to SEQ ID NO: 1130928
uuaauccagggcuugcagu

SEQ ID NO: 1130930 - RNA, 19 nt, Artificial Sequence
  Description of Artificial Sequence: Synthetic oligonucleotide
  Sense strand starting at position 1093 of SEQ ID NO: 916106
cugcaagcccuggauuaau

SEQ ID NO: 1130931 - RNA, 19 nt, Artificial Sequence
  Description of Artificial Sequence: Synthetic oligonucleotide
  Antisense strand to SEQ ID NO: 1130930
auuaauccagggcuugcag

SEQ ID NO: 1130932 - RNA, 19 nt, Artificial Sequence
  Description of Artificial Sequence: Synthetic oligonucleotide
  Sense strand starting at position 1153 of SEQ ID NO: 916106
agucaaaggacuuguugca

SEQ ID NO: 1130933 - RNA, 19 nt, Artificial Sequence
  Description of Artificial Sequence: Synthetic oligonucleotide
  Antisense strand to SEQ ID NO: 1130932
ugcaacaaguccuuugacu

SEQ ID NO: 1130934 - RNA, 19 nt, Artificial Sequence
  Description of Artificial Sequence: Synthetic oligonucleotide
  Sense strand starting at position 1228 of SEQ ID NO: 916106
cgccgaaaccugucgcaaa

SEQ ID NO: 1130935 - RNA, 19 nt, Artificial Sequence
  Description of Artificial Sequence: Synthetic oligonucleotide
  Antisense strand to SEQ ID NO: 1130934
uuugcgacagguuucggcg

SEQ ID NO: 1130936 - RNA, 19 nt, Artificial Sequence
  Description of Artificial Sequence: Synthetic oligonucleotide
  Sense strand starting at position 2256 of SEQ ID NO: 916106
ucauuuauccguuguucuu

SEQ ID NO: 1130937 - RNA, 19 nt, Artificial Sequence
  Description of Artificial Sequence: Synthetic oligonucleotide
  Antisense strand to SEQ ID NO: 1130936
aagaacaacggauaaauga

SEQ ID NO: 1130938 - RNA, 19 nt, Artificial Sequence
  Description of Artificial Sequence: Synthetic oligonucleotide
  Sense strand starting at position 2386 of SEQ ID NO: 916106
guuucugcauccucagaga

SEQ ID NO: 1130939 - RNA, 19 nt, Artificial Sequence
  Description of Artificial Sequence: Synthetic oligonucleotide
  Antisense strand to SEQ ID NO: 1130938
ucucugaggaugcagaaac

SEQ ID NO: 1130940 - RNA, 19 nt, Artificial Sequence
  Description of Artificial Sequence: Synthetic oligonucleotide
  Sense strand starting at position 2710 of SEQ ID NO: 916106
agguguccuuaggucuaaa

SEQ ID NO: 1130941 - RNA, 19 nt, Artificial Sequence
  Description of Artificial Sequence: Synthetic oligonucleotide
  Antisense strand to SEQ ID NO: 1130940
uuuagaccuaaggacaccu

SEQ ID NO: 1130942 - RNA, 19 nt, Artificial Sequence
  Description of Artificial Sequence: Synthetic oligonucleotide
  Sense strand starting at position 2713 of SEQ ID NO: 916106
uguccuuaggucuaaacau

SEQ ID NO: 1130943 - RNA, 19 nt, Artificial Sequence
  Description of Artificial Sequence: Synthetic oligonucleotide
  Antisense strand to SEQ ID NO: 1130942
auguuuagaccuaaggaca

SEQ ID NO: 1130944 - RNA, 19 nt, Artificial Sequence
  Description of Artificial Sequence: Synthetic oligonucleotide
  Sense strand starting at position 2784 of SEQ ID NO: 916106
caggucacauggucaauaa

SEQ ID NO: 1130945 - RNA, 19 nt, Artificial Sequence
  Description of Artificial Sequence: Synthetic oligonucleotide
  Antisense strand to SEQ ID NO: 1130944
uuauugaccaugugaccug

SEQ ID NO: 1130946 - RNA, 19 nt, Artificial Sequence
  Description of Artificial Sequence: Synthetic oligonucleotide
  Sense strand starting at position 2821 of SEQ ID NO: 916106
acgauacuuuacucaaaga

SEQ ID NO: 1130947 - RNA, 19 nt, Artificial Sequence
  Description of Artificial Sequence: Synthetic oligonucleotide
  Antisense strand to SEQ ID NO: 1130946
ucuuugaguaaaguaucgu

SEQ ID NO: 1130948 - RNA, 19 nt, Artificial Sequence
  Description of Artificial Sequence: Synthetic oligonucleotide
  Sense strand starting at position 3071 of SEQ ID NO: 916106
ucuuauuugccaggucgca

SEQ ID NO: 1130949 - RNA, 19 nt, Artificial Sequence
  Description of Artificial Sequence: Synthetic oligonucleotide
  Antisense strand to SEQ ID NO: 1130948
ugcgaccuggcaaauaaga

SEQ ID NO: 1130950 - RNA, 19 nt, Artificial Sequence
  Description of Artificial Sequence: Synthetic oligonucleotide
  Sense strand starting at position 3212 of SEQ ID NO: 916106
gucccaucuccuggauaau

SEQ ID NO: 1130951 - RNA, 19 nt, Artificial Sequence
  Description of Artificial Sequence: Synthetic oligonucleotide
  Antisense strand to SEQ ID NO: 1130950
auuauccaggagaugggac

SEQ ID NO: 1130952 - RNA, 19 nt, Artificial Sequence
  Description of Artificial Sequence: Synthetic oligonucleotide
  Sense strand starting at position 3347 of SEQ ID NO: 916106
uggugaucuggguacccau

SEQ ID NO: 1130953 - RNA, 19 nt, Artificial Sequence
  Description of Artificial Sequence: Synthetic oligonucleotide
  Antisense strand to SEQ ID NO: 1130952
auggguacccagaucacca

SEQ ID NO: 1130954 - RNA, 19 nt, Artificial Sequence
  Description of Artificial Sequence: Synthetic oligonucleotide
  Sense strand starting at position 3387 of SEQ ID NO: 916106
gcuagaugaccucagucaa

SEQ ID NO: 1130955 - RNA, 19 nt, Artificial Sequence
  Description of Artificial Sequence: Synthetic oligonucleotide
  Antisense strand to SEQ ID NO: 1130954
uugacugaggucaucuagc

SEQ ID NO: 1130956 - RNA, 19 nt, Artificial Sequence
  Description of Artificial Sequence: Synthetic oligonucleotide
  Sense strand starting at position 3598 of SEQ ID NO: 916106
gacacugacguuuaaaggu

SEQ ID NO: 1130957 - RNA, 19 nt, Artificial Sequence
  Description of Artificial Sequence: Synthetic oligonucleotide
  Antisense strand to SEQ ID NO: 1130956
accuuuaaacgucaguguc

SEQ ID NO: 1130958 - RNA, 19 nt, Artificial Sequence
  Description of Artificial Sequence: Synthetic oligonucleotide
  Sense strand starting at position 3604 of SEQ ID NO: 916106
gacguuuaaaggugagagu

SEQ ID NO: 1130959 - RNA, 19 nt, Artificial Sequence
  Description of Artificial Sequence: Synthetic oligonucleotide
  Antisense strand to SEQ ID NO: 1130958
acucucaccuuuaaacguc

SEQ ID NO: 1130960 - RNA, 19 nt, Artificial Sequence
  Description of Artificial Sequence: Synthetic oligonucleotide
  Sense strand starting at position 3605 of SEQ ID NO: 916106
acguuuaaaggugagagua

SEQ ID NO: 1130961 - RNA, 19 nt, Artificial Sequence
  Description of Artificial Sequence: Synthetic oligonucleotide
  Antisense strand to SEQ ID NO: 1130960
uacucucaccuuuaaacgu

SEQ ID NO: 1130962 - RNA, 19 nt, Artificial Sequence
  Description of Artificial Sequence: Synthetic oligonucleotide
  Sense strand starting at position 3630 of SEQ ID NO: 916106
agauugguggugugguaga

SEQ ID NO: 1130963 - RNA, 19 nt, Artificial Sequence
  Description of Artificial Sequence: Synthetic oligonucleotide
  Antisense strand to SEQ ID NO: 1130962
ucuaccacaccaccaaucu

SEQ ID NO: 1130964 - RNA, 19 nt, Artificial Sequence
  Description of Artificial Sequence: Synthetic oligonucleotide
  Sense strand starting at position 3635 of SEQ ID NO: 916106
gguggugugguagaauaau

SEQ ID NO: 1130965 - RNA, 19 nt, Artificial Sequence
  Description of Artificial Sequence: Synthetic oligonucleotide
  Antisense strand to SEQ ID NO: 1130964
auuauucuaccacaccacc

SEQ ID NO: 1130966 - RNA, 19 nt, Artificial Sequence
  Description of Artificial Sequence: Synthetic oligonucleotide
  Sense strand starting at position 3694 of SEQ ID NO: 916106
ugaauauguuacccuugca

SEQ ID NO: 1130967 - RNA, 19 nt, Artificial Sequence
  Description of Artificial Sequence: Synthetic oligonucleotide
  Antisense strand to SEQ ID NO: 1130966
ugcaaggguaacauauuca

SEQ ID NO: 1130968 - RNA, 19 nt, Artificial Sequence
  Description of Artificial Sequence: Synthetic oligonucleotide
  Sense strand starting at position 3697 of SEQ ID NO: 916106
auauguuacccuugcagau

SEQ ID NO: 1130969 - RNA, 19 nt, Artificial Sequence
  Description of Artificial Sequence: Synthetic oligonucleotide
  Antisense strand to SEQ ID NO: 1130968
aucugcaaggguaacauau

SEQ ID NO: 1130970 - RNA, 19 nt, Artificial Sequence
  Description of Artificial Sequence: Synthetic oligonucleotide
  Sense strand starting at position 3701 of SEQ ID NO: 916106
guuacccuugcagauauga

SEQ ID NO: 1130971 - RNA, 19 nt, Artificial Sequence
  Description of Artificial Sequence: Synthetic oligonucleotide
  Antisense strand to SEQ ID NO: 1130970
ucauaucugcaaggguaac

SEQ ID NO: 1130972 - RNA, 19 nt, Artificial Sequence
  Description of Artificial Sequence: Synthetic oligonucleotide
  Sense strand starting at position 3778 of SEQ ID NO: 916106
guaauuugcaagggucuuu

SEQ ID NO: 1130973 - RNA, 19 nt, Artificial Sequence
  Description of Artificial Sequence: Synthetic oligonucleotide
  Antisense strand to SEQ ID NO: 1130972
aaagacccuugcaaauuac

SEQ ID NO: 1130974 - RNA, 19 nt, Artificial Sequence
  Description of Artificial Sequence: Synthetic oligonucleotide
  Sense strand starting at position 3783 of SEQ ID NO: 916106
uugcaagggucuuuagaag

SEQ ID NO: 1130975 - RNA, 19 nt, Artificial Sequence
  Description of Artificial Sequence: Synthetic oligonucleotide
  Antisense strand to SEQ ID NO: 1130974
cuucuaaagacccuugcaa

SEQ ID NO: 1130976 - RNA, 19 nt, Artificial Sequence
  Description of Artificial Sequence: Synthetic oligonucleotide
  Sense strand starting at position 3790 of SEQ ID NO: 916106
ggucuuuagaagugaaaga

SEQ ID NO: 1130977 - RNA, 19 nt, Artificial Sequence
  Description of Artificial Sequence: Synthetic oligonucleotide
  Antisense strand to SEQ ID NO: 1130976
ucuuucacuucuaaagacc

SEQ ID NO: 1130978 - RNA, 19 nt, Artificial Sequence
  Description of Artificial Sequence: Synthetic oligonucleotide
  Sense strand starting at position 44 of SEQ ID NO: 916107
gcacauggcagaugacuuu

SEQ ID NO: 1130979 - RNA, 19 nt, Artificial Sequence
  Description of Artificial Sequence: Synthetic oligonucleotide
  Antisense strand to SEQ ID NO: 1130978
aaagucaucugccaugugc

SEQ ID NO: 1130980 - RNA, 19 nt, Artificial Sequence
  Description of Artificial Sequence: Synthetic oligonucleotide
  Sense strand starting at position 205 of SEQ ID NO: 916107
gaugacauguucuucugaa

SEQ ID NO: 1130981 - RNA, 19 nt, Artificial Sequence
  Description of Artificial Sequence: Synthetic oligonucleotide
  Antisense strand to SEQ ID NO: 1130980
uucagaagaacaugucauc

SEQ ID NO: 1130982 - RNA, 19 nt, Artificial Sequence
  Description of Artificial Sequence: Synthetic oligonucleotide
  Sense strand starting at position 206 of SEQ ID NO: 916107
augacauguucuucugaac

SEQ ID NO: 1130983 - RNA, 19 nt, Artificial Sequence
  Description of Artificial Sequence: Synthetic oligonucleotide
  Antisense strand to SEQ ID NO: 1130982
guucagaagaacaugucau

SEQ ID NO: 1130984 - RNA, 19 nt, Artificial Sequence
  Description of Artificial Sequence: Synthetic oligonucleotide
  Sense strand starting at position 348 of SEQ ID NO: 916107
cggauuguccacuacauua

SEQ ID NO: 1130985 - RNA, 19 nt, Artificial Sequence
  Description of Artificial Sequence: Synthetic oligonucleotide
  Antisense strand to SEQ ID NO: 1130984
uaauguaguggacaauccg

SEQ ID NO: 1130986 - RNA, 19 nt, Artificial Sequence
  Description of Artificial Sequence: Synthetic oligonucleotide
  Sense strand starting at position 366 of SEQ ID NO: 916107
acuccuugcuccucaggua

SEQ ID NO: 1130987 - RNA, 19 nt, Artificial Sequence
  Description of Artificial Sequence: Synthetic oligonucleotide
  Antisense strand to SEQ ID NO: 1130986
uaccugaggagcaaggagu

SEQ ID NO: 1130988 - RNA, 19 nt, Artificial Sequence
  Description of Artificial Sequence: Synthetic oligonucleotide
  Sense strand starting at position 677 of SEQ ID NO: 916107
guagcucuuaugggcaaau

SEQ ID NO: 1130989 - RNA, 19 nt, Artificial Sequence
  Description of Artificial Sequence: Synthetic oligonucleotide
  Antisense strand to SEQ ID NO: 1130988
auuugcccauaagagcuac

SEQ ID NO: 1130990 - RNA, 19 nt, Artificial Sequence
  Description of Artificial Sequence: Synthetic oligonucleotide
  Sense strand starting at position 739 of SEQ ID NO: 916107
gcaugaacucuggacccuu

SEQ ID NO: 1130991 - RNA, 19 nt, Artificial Sequence
  Description of Artificial Sequence: Synthetic oligonucleotide
  Antisense strand to SEQ ID NO: 1130990
aaggguccagaguucaugc

SEQ ID NO: 1130992 - RNA, 19 nt, Artificial Sequence
  Description of Artificial Sequence: Synthetic oligonucleotide
  Sense strand starting at position 781 of SEQ ID NO: 916107
ggagcaaacugcucugauu

SEQ ID NO: 1130993 - RNA, 19 nt, Artificial Sequence
  Description of Artificial Sequence: Synthetic oligonucleotide
  Antisense strand to SEQ ID NO: 1130992
aaucagagcaguuugcucc

SEQ ID NO: 1130994 - RNA, 19 nt, Artificial Sequence
  Description of Artificial Sequence: Synthetic oligonucleotide
  Sense strand starting at position 783 of SEQ ID NO: 916107
agcaaacugcucugauuuc

SEQ ID NO: 1130995 - RNA, 19 nt, Artificial Sequence
  Description of Artificial Sequence: Synthetic oligonucleotide
  Antisense strand to SEQ ID NO: 1130994
gaaaucagagcaguuugcu

SEQ ID NO: 1130996 - RNA, 19 nt, Artificial Sequence
  Description of Artificial Sequence: Synthetic oligonucleotide
  Sense strand starting at position 849 of SEQ ID NO: 916107
ugcuuucuuccagagacaa

SEQ ID NO: 1130997 - RNA, 19 nt, Artificial Sequence
  Description of Artificial Sequence: Synthetic oligonucleotide
  Antisense strand to SEQ ID NO: 1130996
uugucucuggaagaaagca

SEQ ID NO: 1130998 - RNA, 19 nt, Artificial Sequence
  Description of Artificial Sequence: Synthetic oligonucleotide
  Sense strand starting at position 1305 of SEQ ID NO: 916107
uccuuugcucugggagguu

SEQ ID NO: 1130999 - RNA, 19 nt, Artificial Sequence
  Description of Artificial Sequence: Synthetic oligonucleotide
  Antisense strand to SEQ ID NO: 1130998
aaccucccagagcaaagga

SEQ ID NO: 1131000 - RNA, 19 nt, Artificial Sequence
  Description of Artificial Sequence: Synthetic oligonucleotide
  Sense strand starting at position 1546 of SEQ ID NO: 916107
agguccuuuccugaccaaa

SEQ ID NO: 1131001 - RNA, 19 nt, Artificial Sequence
  Description of Artificial Sequence: Synthetic oligonucleotide
  Antisense strand to SEQ ID NO: 1131000
uuuggucaggaaaggaccu

SEQ ID NO: 1131002 - RNA, 19 nt, Artificial Sequence
  Description of Artificial Sequence: Synthetic oligonucleotide
  Sense strand starting at position 2310 of SEQ ID NO: 916107
uucuacugugggcaugaau

SEQ ID NO: 1131003 - RNA, 19 nt, Artificial Sequence
  Description of Artificial Sequence: Synthetic oligonucleotide
  Antisense strand to SEQ ID NO: 1131002
auucaugcccacaguagaa

SEQ ID NO: 1131004 - RNA, 19 nt, Artificial Sequence
  Description of Artificial Sequence: Synthetic oligonucleotide
  Sense strand starting at position 2317 of SEQ ID NO: 916107
gugggcaugaaucguuaaa

SEQ ID NO: 1131005 - RNA, 19 nt, Artificial Sequence
  Description of Artificial Sequence: Synthetic oligonucleotide
  Antisense strand to SEQ ID NO: 1131004
uuuaacgauucaugcccac

SEQ ID NO: 1131006 - RNA, 19 nt, Artificial Sequence
  Description of Artificial Sequence: Synthetic oligonucleotide
  Sense strand starting at position 2372 of SEQ ID NO: 916107
uuaauaaagcacugaguaa

SEQ ID NO: 1131007 - RNA, 19 nt, Artificial Sequence
  Description of Artificial Sequence: Synthetic oligonucleotide
  Antisense strand to SEQ ID NO: 1131006
uuacucagugcuuuauuaa

SEQ ID NO: 1131008 - RNA, 19 nt, Artificial Sequence
  Description of Artificial Sequence: Synthetic oligonucleotide
  Sense strand starting at position 2718 of SEQ ID NO: 916107
cccaguucuuuccuggcaa

SEQ ID NO: 1131009 - RNA, 19 nt, Artificial Sequence
  Description of Artificial Sequence: Synthetic oligonucleotide
  Antisense strand to SEQ ID NO: 1131008
uugccaggaaagaacuggg

SEQ ID NO: 1131010 - RNA, 19 nt, Artificial Sequence
  Description of Artificial Sequence: Synthetic oligonucleotide
  Sense strand starting at position 2842 of SEQ ID NO: 916107
uauaaauuacucuguggag

SEQ ID NO: 1131011 - RNA, 19 nt, Artificial Sequence
  Description of Artificial Sequence: Synthetic oligonucleotide
  Antisense strand to SEQ ID NO: 1131010
cuccacagaguaauuuaua

SEQ ID NO: 1131012 - RNA, 19 nt, Artificial Sequence
  Description of Artificial Sequence: Synthetic oligonucleotide
  Sense strand starting at position 2843 of SEQ ID NO: 916107
auaaauuacucuguggagu

SEQ ID NO: 1131013 - RNA, 19 nt, Artificial Sequence
  Description of Artificial Sequence: Synthetic oligonucleotide
  Antisense strand to SEQ ID NO: 1131012
acuccacagaguaauuuau

SEQ ID NO: 1131014 - RNA, 19 nt, Artificial Sequence
  Description of Artificial Sequence: Synthetic oligonucleotide
  Sense strand starting at position 2844 of SEQ ID NO: 916107
uaaauuacucuguggaguc

SEQ ID NO: 1131015 - RNA, 19 nt, Artificial Sequence
  Description of Artificial Sequence: Synthetic oligonucleotide
  Antisense strand to SEQ ID NO: 1131014
gacuccacagaguaauuua

SEQ ID NO: 1131016 - RNA, 19 nt, Artificial Sequence
  Description of Artificial Sequence: Synthetic oligonucleotide
  Sense strand starting at position 3057 of SEQ ID NO: 916107
uucucucagccuuauguga

SEQ ID NO: 1131017 - RNA, 19 nt, Artificial Sequence
  Description of Artificial Sequence: Synthetic oligonucleotide
  Antisense strand to SEQ ID NO: 1131016
ucacauaaggcugagagaa

SEQ ID NO: 1131018 - RNA, 19 nt, Artificial Sequence
  Description of Artificial Sequence: Synthetic oligonucleotide
  Sense strand starting at position 3061 of SEQ ID NO: 916107
cucagccuuaugugaggaa

SEQ ID NO: 1131019 - RNA, 19 nt, Artificial Sequence
  Description of Artificial Sequence: Synthetic oligonucleotide
  Antisense strand to SEQ ID NO: 1131018
uuccucacauaaggcugag

SEQ ID NO: 1131020 - RNA, 19 nt, Artificial Sequence
  Description of Artificial Sequence: Synthetic oligonucleotide
  Sense strand starting at position 3122 of SEQ ID NO: 916107
cucagagauuauccagugu

SEQ ID NO: 1131021 - RNA, 19 nt, Artificial Sequence
  Description of Artificial Sequence: Synthetic oligonucleotide
  Antisense strand to SEQ ID NO: 1131020
acacuggauaaucucugag

SEQ ID NO: 1131022 - RNA, 19 nt, Artificial Sequence
  Description of Artificial Sequence: Synthetic oligonucleotide
  Sense strand starting at position 3126 of SEQ ID NO: 916107
gagauuauccaguguaaag

SEQ ID NO: 1131023 - RNA, 19 nt, Artificial Sequence
  Description of Artificial Sequence: Synthetic oligonucleotide
  Antisense strand to SEQ ID NO: 1131022
cuuuacacuggauaaucuc

SEQ ID NO: 1131024 - RNA, 19 nt, Artificial Sequence
  Description of Artificial Sequence: Synthetic oligonucleotide
  Sense strand starting at position 3208 of SEQ ID NO: 916107
gguaccuaccauuguuauu

SEQ ID NO: 1131025 - RNA, 19 nt, Artificial Sequence
  Description of Artificial Sequence: Synthetic oligonucleotide
  Antisense strand to SEQ ID NO: 1131024
aauaacaaugguagguacc

SEQ ID NO: 1131026 - RNA, 19 nt, Artificial Sequence
  Description of Artificial Sequence: Synthetic oligonucleotide
  Sense strand starting at position 3240 of SEQ ID NO: 916107
guguuaauacuugcacguu

SEQ ID NO: 1131027 - RNA, 19 nt, Artificial Sequence
  Description of Artificial Sequence: Synthetic oligonucleotide
  Antisense strand to SEQ ID NO: 1131026
aacgugcaaguauuaacac

SEQ ID NO: 1131028 - RNA, 19 nt, Artificial Sequence
  Description of Artificial Sequence: Synthetic oligonucleotide
  Sense strand starting at position 3318 of SEQ ID NO: 916107
gagguauuacagugguuag

SEQ ID NO: 1131029 - RNA, 19 nt, Artificial Sequence
  Description of Artificial Sequence: Synthetic oligonucleotide
  Antisense strand to SEQ ID NO: 1131028
cuaaccacuguaauaccuc

SEQ ID NO: 1131030 - RNA, 19 nt, Artificial Sequence
  Description of Artificial Sequence: Synthetic oligonucleotide
  Sense strand starting at position 3319 of SEQ ID NO: 916107
agguauuacagugguuagu

SEQ ID NO: 1131031 - RNA, 19 nt, Artificial Sequence
  Description of Artificial Sequence: Synthetic oligonucleotide
  Antisense strand to SEQ ID NO: 1131030
acuaaccacuguaauaccu

SEQ ID NO: 1131032 - RNA, 19 nt, Artificial Sequence
  Description of Artificial Sequence: Synthetic oligonucleotide
  Sense strand starting at position 3367 of SEQ ID NO: 916107
uuugaaucucagugcucca

SEQ ID NO: 1131033 - RNA, 19 nt, Artificial Sequence
  Description of Artificial Sequence: Synthetic oligonucleotide
  Antisense strand to SEQ ID NO: 1131032
uggagcacugagauucaaa

SEQ ID NO: 1131034 - RNA, 19 nt, Artificial Sequence
  Description of Artificial Sequence: Synthetic oligonucleotide
  Sense strand starting at position 3404 of SEQ ID NO: 916107
uggcaaguuacuggaacuu

SEQ ID NO: 1131035 - RNA, 19 nt, Artificial Sequence
  Description of Artificial Sequence: Synthetic oligonucleotide
  Antisense strand to SEQ ID NO: 1131034
aaguuccaguaacuugcca

SEQ ID NO: 1131036 - RNA, 19 nt, Artificial Sequence
  Description of Artificial Sequence: Synthetic oligonucleotide
  Sense strand starting at position 3415 of SEQ ID NO: 916107
uggaacuuucuccaucagu

SEQ ID NO: 1131037 - RNA, 19 nt, Artificial Sequence
  Description of Artificial Sequence: Synthetic oligonucleotide
  Antisense strand to SEQ ID NO: 1131036
acugauggagaaaguucca

SEQ ID NO: 1131038 - RNA, 19 nt, Artificial Sequence
  Description of Artificial Sequence: Synthetic oligonucleotide
  Sense strand starting at position 3426 of SEQ ID NO: 916107
ccaucaguacaauguggau

SEQ ID NO: 1131039 - RNA, 19 nt, Artificial Sequence
  Description of Artificial Sequence: Synthetic oligonucleotide
  Antisense strand to SEQ ID NO: 1131038
auccacauuguacugaugg

SEQ ID NO: 1131040 - RNA, 19 nt, Artificial Sequence
  Description of Artificial Sequence: Synthetic oligonucleotide
  Sense strand starting at position 3432 of SEQ ID NO: 916107
guacaauguggauaguaac

SEQ ID NO: 1131041 - RNA, 19 nt, Artificial Sequence
  Description of Artificial Sequence: Synthetic oligonucleotide
  Antisense strand to SEQ ID NO: 1131040
guuacuauccacauuguac

SEQ ID NO: 1131042 - RNA, 19 nt, Artificial Sequence
  Description of Artificial Sequence: Synthetic oligonucleotide
  Sense strand starting at position 3481 of SEQ ID NO: 916107
cgaaauaaauguguaucuu

SEQ ID NO: 1131043 - RNA, 19 nt, Artificial Sequence
  Description of Artificial Sequence: Synthetic oligonucleotide
  Antisense strand to SEQ ID NO: 1131042
aagauacacauuuauuucg

SEQ ID NO: 1131044 - RNA, 19 nt, Artificial Sequence
  Description of Artificial Sequence: Synthetic oligonucleotide
  Sense strand starting at position 3487 of SEQ ID NO: 916107
aaauguguaucuuuaaagg

SEQ ID NO: 1131045 - RNA, 19 nt, Artificial Sequence
  Description of Artificial Sequence: Synthetic oligonucleotide
  Antisense strand to SEQ ID NO: 1131044
ccuuuaaagauacacauuu

SEQ ID NO: 1131046 - RNA, 19 nt, Artificial Sequence
  Description of Artificial Sequence: Synthetic oligonucleotide
  Sense strand starting at position 3643 of SEQ ID NO: 916107
cuuugaggaugguuucuca

SEQ ID NO: 1131047 - RNA, 19 nt, Artificial Sequence
  Description of Artificial Sequence: Synthetic oligonucleotide
  Antisense strand to SEQ ID NO: 1131046
ugagaaaccauccucaaag

SEQ ID NO: 1131048 - RNA, 19 nt, Artificial Sequence
  Description of Artificial Sequence: Synthetic oligonucleotide
  Sense strand starting at position 3675 of SEQ ID NO: 916107
agucaucuuugucucugau

SEQ ID NO: 1131049 - RNA, 19 nt, Artificial Sequence
  Description of Artificial Sequence: Synthetic oligonucleotide
  Antisense strand to SEQ ID NO: 1131048
aucagagacaaagaugacu

SEQ ID NO: 1131050 - RNA, 19 nt, Artificial Sequence
  Description of Artificial Sequence: Synthetic oligonucleotide
  Sense strand starting at position 3719 of SEQ ID NO: 916107
gucugagucuaaccaccua

SEQ ID NO: 1131051 - RNA, 19 nt, Artificial Sequence
  Description of Artificial Sequence: Synthetic oligonucleotide
  Antisense strand to SEQ ID NO: 1131050
uaggugguuagacucagac

SEQ ID NO: 1131052 - RNA, 19 nt, Artificial Sequence
  Description of Artificial Sequence: Synthetic oligonucleotide
  Sense strand starting at position 3731 of SEQ ID NO: 916107
ccaccuauuuaauagggaa

SEQ ID NO: 1131053 - RNA, 19 nt, Artificial Sequence
  Description of Artificial Sequence: Synthetic oligonucleotide
  Antisense strand to SEQ ID NO: 1131052
uucccuauuaaauaggugg

SEQ ID NO: 1131054 - RNA, 19 nt, Artificial Sequence
  Description of Artificial Sequence: Synthetic oligonucleotide
  Sense strand starting at position 3734 of SEQ ID NO: 916107
ccuauuuaauagggaagaa

SEQ ID NO: 1131055 - RNA, 19 nt, Artificial Sequence
  Description of Artificial Sequence: Synthetic oligonucleotide
  Antisense strand to SEQ ID NO: 1131054
uucuucccuauuaaauagg

SEQ ID NO: 1131056 - RNA, 19 nt, Artificial Sequence
  Description of Artificial Sequence: Synthetic oligonucleotide
  Sense strand starting at position 3935 of SEQ ID NO: 916107
uguacauucgugccucuuu

SEQ ID NO: 1131057 - RNA, 19 nt, Artificial Sequence
  Description of Artificial Sequence: Synthetic oligonucleotide
  Antisense strand to SEQ ID NO: 1131056
aaagaggcacgaauguaca

SEQ ID NO: 1131058 - RNA, 19 nt, Artificial Sequence
  Description of Artificial Sequence: Synthetic oligonucleotide
  Sense strand starting at position 661 of SEQ ID NO: 916108
aagacagugucacugcaau

SEQ ID NO: 1131059 - RNA, 19 nt, Artificial Sequence
  Description of Artificial Sequence: Synthetic oligonucleotide
  Antisense strand to SEQ ID NO: 1131058
auugcagugacacugucuu

SEQ ID NO: 1131060 - RNA, 19 nt, Artificial Sequence
  Description of Artificial Sequence: Synthetic oligonucleotide
  Sense strand starting at position 722 of SEQ ID NO: 916108
cugccaggucaugguauuu

SEQ ID NO: 1131061 - RNA, 19 nt, Artificial Sequence
  Description of Artificial Sequence: Synthetic oligonucleotide
  Antisense strand to SEQ ID NO: 1131060
aaauaccaugaccuggcag

SEQ ID NO: 1131062 - RNA, 19 nt, Artificial Sequence
  Description of Artificial Sequence: Synthetic oligonucleotide
  Sense strand starting at position 1198 of SEQ ID NO: 916108
gugcccagucuacaauaaa

SEQ ID NO: 1131063 - RNA, 19 nt, Artificial Sequence
  Description of Artificial Sequence: Synthetic oligonucleotide
  Antisense strand to SEQ ID NO: 1131062
uuuauuguagacugggcac

SEQ ID NO: 1131064 - RNA, 19 nt, Artificial Sequence
  Description of Artificial Sequence: Synthetic oligonucleotide
  Sense strand starting at position 1428 of SEQ ID NO: 916108
guguaaggcagugaagguu

SEQ ID NO: 1131065 - RNA, 19 nt, Artificial Sequence
  Description of Artificial Sequence: Synthetic oligonucleotide
  Antisense strand to SEQ ID NO: 1131064
aaccuucacugccuuacac

SEQ ID NO: 1131066 - RNA, 19 nt, Artificial Sequence
  Description of Artificial Sequence: Synthetic oligonucleotide
  Sense strand starting at position 1434 of SEQ ID NO: 916108
ggcagugaagguuaaguga

SEQ ID NO: 1131067 - RNA, 19 nt, Artificial Sequence
  Description of Artificial Sequence: Synthetic oligonucleotide
  Antisense strand to SEQ ID NO: 1131066
ucacuuaaccuucacugcc

SEQ ID NO: 1131068 - RNA, 19 nt, Artificial Sequence
  Description of Artificial Sequence: Synthetic oligonucleotide
  Sense strand starting at position 1553 of SEQ ID NO: 916108
uguaaaguucaggagguga

SEQ ID NO: 1131069 - RNA, 19 nt, Artificial Sequence
  Description of Artificial Sequence: Synthetic oligonucleotide
  Antisense strand to SEQ ID NO: 1131068
ucaccuccugaacuuuaca

SEQ ID NO: 1131070 - RNA, 19 nt, Artificial Sequence
  Description of Artificial Sequence: Synthetic oligonucleotide
  Sense strand starting at position 1636 of SEQ ID NO: 916108
ucugcuucggccgcugaaa

SEQ ID NO: 1131071 - RNA, 19 nt, Artificial Sequence
  Description of Artificial Sequence: Synthetic oligonucleotide
  Antisense strand to SEQ ID NO: 1131070
uuucagcggccgaagcaga

SEQ ID NO: 1131072 - RNA, 19 nt, Artificial Sequence
  Description of Artificial Sequence: Synthetic oligonucleotide
  Sense strand starting at position 1716 of SEQ ID NO: 916108
gagugcugggaaugaacua

SEQ ID NO: 1131073 - RNA, 19 nt, Artificial Sequence
  Description of Artificial Sequence: Synthetic oligonucleotide
  Antisense strand to SEQ ID NO: 1131072
uaguucauucccagcacuc

SEQ ID NO: 1131074 - RNA, 19 nt, Artificial Sequence
  Description of Artificial Sequence: Synthetic oligonucleotide
  Sense strand starting at position 1987 of SEQ ID NO: 916108
aucuuuguuaauggcgaaa

SEQ ID NO: 1131075 - RNA, 19 nt, Artificial Sequence
  Description of Artificial Sequence: Synthetic oligonucleotide
  Antisense strand to SEQ ID NO: 1131074
uuucgccauuaacaaagau

SEQ ID NO: 1131076 - RNA, 19 nt, Artificial Sequence
  Description of Artificial Sequence: Synthetic oligonucleotide
  Sense strand starting at position 2113 of SEQ ID NO: 916108
ugcuuacuguggguaaaca

SEQ ID NO: 1131077 - RNA, 19 nt, Artificial Sequence
  Description of Artificial Sequence: Synthetic oligonucleotide
  Antisense strand to SEQ ID NO: 1131076
uguuuacccacaguaagca

SEQ ID NO: 1131078 - RNA, 19 nt, Artificial Sequence
  Description of Artificial Sequence: Synthetic oligonucleotide
  Sense strand starting at position 2114 of SEQ ID NO: 916108
gcuuacuguggguaaacaa

SEQ ID NO: 1131079 - RNA, 19 nt, Artificial Sequence
  Description of Artificial Sequence: Synthetic oligonucleotide
  Antisense strand to SEQ ID NO: 1131078
uuguuuacccacaguaagc

SEQ ID NO: 1131080 - RNA, 19 nt, Artificial Sequence
  Description of Artificial Sequence: Synthetic oligonucleotide
  Sense strand starting at position 2155 of SEQ ID NO: 916108
accguagugucacuuaaag

SEQ ID NO: 1131081 - RNA, 19 nt, Artificial Sequence
  Description of Artificial Sequence: Synthetic oligonucleotide
  Antisense strand to SEQ ID NO: 1131080
cuuuaagugacacuacggu

SEQ ID NO: 1131082 - RNA, 19 nt, Artificial Sequence
  Description of Artificial Sequence: Synthetic oligonucleotide
  Sense strand starting at position 2167 of SEQ ID NO: 916108
cuuaaaggguaucuaagua

SEQ ID NO: 1131083 - RNA, 19 nt, Artificial Sequence
  Description of Artificial Sequence: Synthetic oligonucleotide
  Antisense strand to SEQ ID NO: 1131082
uacuuagauacccuuuaag

SEQ ID NO: 1131084 - RNA, 19 nt, Artificial Sequence
  Description of Artificial Sequence: Synthetic oligonucleotide
  Sense strand starting at position 2191 of SEQ ID NO: 916108
guaauugaaucauugcauu

SEQ ID NO: 1131085 - RNA, 19 nt, Artificial Sequence
  Description of Artificial Sequence: Synthetic oligonucleotide
  Antisense strand to SEQ ID NO: 1131084
aaugcaaugauucaauuac

SEQ ID NO: 1131086 - RNA, 19 nt, Artificial Sequence
  Description of Artificial Sequence: Synthetic oligonucleotide
  Sense strand starting at position 2285 of SEQ ID NO: 916108
agaagccuucucugaccua

SEQ ID NO: 1131087 - RNA, 19 nt, Artificial Sequence
  Description of Artificial Sequence: Synthetic oligonucleotide
  Antisense strand to SEQ ID NO: 1131086
uaggucagagaaggcuucu

SEQ ID NO: 1131088 - RNA, 19 nt, Artificial Sequence
  Description of Artificial Sequence: Synthetic oligonucleotide
  Sense strand starting at position 2473 of SEQ ID NO: 916108
ccgcaaagaguuuacaaau

SEQ ID NO: 1131089 - RNA, 19 nt, Artificial Sequence
  Description of Artificial Sequence: Synthetic oligonucleotide
  Antisense strand to SEQ ID NO: 1131088
auuuguaaacucuuugcgg

SEQ ID NO: 1131090 - RNA, 19 nt, Artificial Sequence
  Description of Artificial Sequence: Synthetic oligonucleotide
  Sense strand starting at position 2486 of SEQ ID NO: 916108
acaaaucugucagucagga

SEQ ID NO: 1131091 - RNA, 19 nt, Artificial Sequence
  Description of Artificial Sequence: Synthetic oligonucleotide
  Antisense strand to SEQ ID NO: 1131090
uccugacugacagauuugu

SEQ ID NO: 1131092 - RNA, 19 nt, Artificial Sequence
  Description of Artificial Sequence: Synthetic oligonucleotide
  Sense strand starting at position 2525 of SEQ ID NO: 916108
aguuacuccuagucagaaa

SEQ ID NO: 1131093 - RNA, 19 nt, Artificial Sequence
  Description of Artificial Sequence: Synthetic oligonucleotide
  Antisense strand to SEQ ID NO: 1131092
uuucugacuaggaguaacu

SEQ ID NO: 1131094 - RNA, 19 nt, Artificial Sequence
  Description of Artificial Sequence: Synthetic oligonucleotide
  Sense strand starting at position 2605 of SEQ ID NO: 916108
gcugaacauccauggauga

SEQ ID NO: 1131095 - RNA, 19 nt, Artificial Sequence
  Description of Artificial Sequence: Synthetic oligonucleotide
  Antisense strand to SEQ ID NO: 1131094
ucauccauggauguucagc

SEQ ID NO: 1131096 - RNA, 19 nt, Artificial Sequence
  Description of Artificial Sequence: Synthetic oligonucleotide
  Sense strand starting at position 2627 of SEQ ID NO: 916108
ccuagauaagauugcugau

SEQ ID NO: 1131097 - RNA, 19 nt, Artificial Sequence
  Description of Artificial Sequence: Synthetic oligonucleotide
  Antisense strand to SEQ ID NO: 1131096
aucagcaaucuuaucuagg

SEQ ID NO: 1131098 - RNA, 19 nt, Artificial Sequence
  Description of Artificial Sequence: Synthetic oligonucleotide
  Sense strand starting at position 2838 of SEQ ID NO: 916108
gugagaccaaucugacaug

SEQ ID NO: 1131099 - RNA, 19 nt, Artificial Sequence
  Description of Artificial Sequence: Synthetic oligonucleotide
  Antisense strand to SEQ ID NO: 1131098
caugucagauuggucucac

SEQ ID NO: 1131100 - RNA, 19 nt, Artificial Sequence
  Description of Artificial Sequence: Synthetic oligonucleotide
  Sense strand starting at position 2855 of SEQ ID NO: 916108
ugcagaauauuagcagcaa

SEQ ID NO: 1131101 - RNA, 19 nt, Artificial Sequence
  Description of Artificial Sequence: Synthetic oligonucleotide
  Antisense strand to SEQ ID NO: 1131100
uugcugcuaauauucugca

SEQ ID NO: 1131102 - RNA, 19 nt, Artificial Sequence
  Description of Artificial Sequence: Synthetic oligonucleotide
  Sense strand starting at position 3057 of SEQ ID NO: 916108
uccucacauuccuuuguga

SEQ ID NO: 1131103 - RNA, 19 nt, Artificial Sequence
  Description of Artificial Sequence: Synthetic oligonucleotide
  Antisense strand to SEQ ID NO: 1131102
ucacaaaggaaugugagga

SEQ ID NO: 1131104 - RNA, 19 nt, Artificial Sequence
  Description of Artificial Sequence: Synthetic oligonucleotide
  Sense strand starting at position 3059 of SEQ ID NO: 916108
cucacauuccuuugugaag

SEQ ID NO: 1131105 - RNA, 19 nt, Artificial Sequence
  Description of Artificial Sequence: Synthetic oligonucleotide
  Antisense strand to SEQ ID NO: 1131104
cuucacaaaggaaugugag

SEQ ID NO: 1131106 - RNA, 19 nt, Artificial Sequence
  Description of Artificial Sequence: Synthetic oligonucleotide
  Sense strand starting at position 3079 of SEQ ID NO: 916108
gaggcaggcgaucaauaaa

SEQ ID NO: 1131107 - RNA, 19 nt, Artificial Sequence
  Description of Artificial Sequence: Synthetic oligonucleotide
  Antisense strand to SEQ ID NO: 1131106
uuuauugaucgccugccuc

SEQ ID NO: 1131108 - RNA, 19 nt, Artificial Sequence
  Description of Artificial Sequence: Synthetic oligonucleotide
  Sense strand starting at position 3425 of SEQ ID NO: 916108
auaacaauauuugggucaa

SEQ ID NO: 1131109 - RNA, 19 nt, Artificial Sequence
  Description of Artificial Sequence: Synthetic oligonucleotide
  Antisense strand to SEQ ID NO: 1131108
uugacccaaauauuguuau

SEQ ID NO: 1131110 - RNA, 19 nt, Artificial Sequence
  Description of Artificial Sequence: Synthetic oligonucleotide
  Sense strand starting at position 3485 of SEQ ID NO: 916108
ugcuauauggccuaaguau

SEQ ID NO: 1131111 - RNA, 19 nt, Artificial Sequence
  Description of Artificial Sequence: Synthetic oligonucleotide
  Antisense strand to SEQ ID NO: 1131110
auacuuaggccauauagca

SEQ ID NO: 1131112 - RNA, 19 nt, Artificial Sequence
  Description of Artificial Sequence: Synthetic oligonucleotide
  Sense strand starting at position 3547 of SEQ ID NO: 916108
uuguuugcacaaugacaca

SEQ ID NO: 1131113 - RNA, 19 nt, Artificial Sequence
  Description of Artificial Sequence: Synthetic oligonucleotide
  Antisense strand to SEQ ID NO: 1131112
ugugucauugugcaaacaa

SEQ ID NO: 1131114 - RNA, 19 nt, Artificial Sequence
  Description of Artificial Sequence: Synthetic oligonucleotide
  Sense strand starting at position 3575 of SEQ ID NO: 916108
auguaucuccacuguuaca

SEQ ID NO: 1131115 - RNA, 19 nt, Artificial Sequence
  Description of Artificial Sequence: Synthetic oligonucleotide
  Antisense strand to SEQ ID NO: 1131114
uguaacaguggagauacau

SEQ ID NO: 1131116 - RNA, 19 nt, Artificial Sequence
  Description of Artificial Sequence: Synthetic oligonucleotide
  Sense strand starting at position 3600 of SEQ ID NO: 916108
uuagcauuugcauguauaa

SEQ ID NO: 1131117 - RNA, 19 nt, Artificial Sequence
  Description of Artificial Sequence: Synthetic oligonucleotide
  Antisense strand to SEQ ID NO: 1131116
uuauacaugcaaaugcuaa

SEQ ID NO: 1131118 - RNA, 19 nt, Artificial Sequence
  Description of Artificial Sequence: Synthetic oligonucleotide
  Sense strand starting at position 3611 of SEQ ID NO: 916108
auguauaaagacuguggaa

SEQ ID NO: 1131119 - RNA, 19 nt, Artificial Sequence
  Description of Artificial Sequence: Synthetic oligonucleotide
  Antisense strand to SEQ ID NO: 1131118
uuccacagucuuuauacau

SEQ ID NO: 1131120 - RNA, 19 nt, Artificial Sequence
  Description of Artificial Sequence: Synthetic oligonucleotide
  Sense strand starting at position 3613 of SEQ ID NO: 916108
guauaaagacuguggaauc

SEQ ID NO: 1131121 - RNA, 19 nt, Artificial Sequence
  Description of Artificial Sequence: Synthetic oligonucleotide
  Antisense strand to SEQ ID NO: 1131120
gauuccacagucuuuauac

SEQ ID NO: 1131122 - RNA, 19 nt, Artificial Sequence
  Description of Artificial Sequence: Synthetic oligonucleotide
  Sense strand starting at position 3624 of SEQ ID NO: 916108
guggaaucagaauggucaa

SEQ ID NO: 1131123 - RNA, 19 nt, Artificial Sequence
  Description of Artificial Sequence: Synthetic oligonucleotide
  Antisense strand to SEQ ID NO: 1131122
uugaccauucugauuccac

SEQ ID NO: 1131124 - RNA, 19 nt, Artificial Sequence
  Description of Artificial Sequence: Synthetic oligonucleotide
  Sense strand starting at position 3739 of SEQ ID NO: 916108
uuguauagugaagaguuua

SEQ ID NO: 1131125 - RNA, 19 nt, Artificial Sequence
  Description of Artificial Sequence: Synthetic oligonucleotide
  Antisense strand to SEQ ID NO: 1131124
uaaacucuucacuauacaa

SEQ ID NO: 1131126 - RNA, 19 nt, Artificial Sequence
  Description of Artificial Sequence: Synthetic oligonucleotide
  Sense strand starting at position 3744 of SEQ ID NO: 916108
uagugaagaguuuauuguu

SEQ ID NO: 1131127 - RNA, 19 nt, Artificial Sequence
  Description of Artificial Sequence: Synthetic oligonucleotide
  Antisense strand to SEQ ID NO: 1131126
aacaauaaacucuucacua

SEQ ID NO: 1131128 - RNA, 19 nt, Artificial Sequence
  Description of Artificial Sequence: Synthetic oligonucleotide
  Sense strand starting at position 3750 of SEQ ID NO: 916108
agaguuuauuguucuaaug

SEQ ID NO: 1131129 - RNA, 19 nt, Artificial Sequence
  Description of Artificial Sequence: Synthetic oligonucleotide
  Antisense strand to SEQ ID NO: 1131128
cauuagaacaauaaacucu

SEQ ID NO: 1131130 - RNA, 19 nt, Artificial Sequence
  Description of Artificial Sequence: Synthetic oligonucleotide
  Sense strand starting at position 3868 of SEQ ID NO: 916108
gcuugagaaucauuguccu

SEQ ID NO: 1131131 - RNA, 19 nt, Artificial Sequence
  Description of Artificial Sequence: Synthetic oligonucleotide
  Antisense strand to SEQ ID NO: 1131130
aggacaaugauucucaagc

SEQ ID NO: 1131132 - RNA, 19 nt, Artificial Sequence
  Description of Artificial Sequence: Synthetic oligonucleotide
  Sense strand starting at position 3871 of SEQ ID NO: 916108
ugagaaucauuguccuuuc

SEQ ID NO: 1131133 - RNA, 19 nt, Artificial Sequence
  Description of Artificial Sequence: Synthetic oligonucleotide
  Antisense strand to SEQ ID NO: 1131132
gaaaggacaaugauucuca

SEQ ID NO: 1131134 - RNA, 19 nt, Artificial Sequence
  Description of Artificial Sequence: Synthetic oligonucleotide
  Sense strand starting at position 3882 of SEQ ID NO: 916108
guccuuuccucagcaagau

SEQ ID NO: 1131135 - RNA, 19 nt, Artificial Sequence
  Description of Artificial Sequence: Synthetic oligonucleotide
  Antisense strand to SEQ ID NO: 1131134
aucuugcugaggaaaggac

SEQ ID NO: 1131136 - RNA, 19 nt, Artificial Sequence
  Description of Artificial Sequence: Synthetic oligonucleotide
  Sense strand starting at position 3916 of SEQ ID NO: 916108
agacaaauguuagcaccau

SEQ ID NO: 1131137 - RNA, 19 nt, Artificial Sequence
  Description of Artificial Sequence: Synthetic oligonucleotide
  Antisense strand to SEQ ID NO: 1131136
auggugcuaacauuugucu

SEQ ID NO: 1131138 - RNA, 19 nt, Artificial Sequence
  Description of Artificial Sequence: Synthetic oligonucleotide
  Sense strand starting at position 31 of SEQ ID NO: 916109
aauguuaucccgcauucug

SEQ ID NO: 1131139 - RNA, 19 nt, Artificial Sequence
  Description of Artificial Sequence: Synthetic oligonucleotide
  Antisense strand to SEQ ID NO: 1131138
cagaaugcgggauaacauu

SEQ ID NO: 1131140 - RNA, 19 nt, Artificial Sequence
  Description of Artificial Sequence: Synthetic oligonucleotide
  Sense strand starting at position 71 of SEQ ID NO: 916109
agggcaagauucuugucaa

SEQ ID NO: 1131141 - RNA, 19 nt, Artificial Sequence
  Description of Artificial Sequence: Synthetic oligonucleotide
  Antisense strand to SEQ ID NO: 1131140
uugacaagaaucuugcccu

SEQ ID NO: 1131142 - RNA, 19 nt, Artificial Sequence
  Description of Artificial Sequence: Synthetic oligonucleotide
  Sense strand starting at position 74 of SEQ ID NO: 916109
gcaagauucuugucaaggg

SEQ ID NO: 1131143 - RNA, 19 nt, Artificial Sequence
  Description of Artificial Sequence: Synthetic oligonucleotide
  Antisense strand to SEQ ID NO: 1131142
cccuugacaagaaucuugc

SEQ ID NO: 1131144 - RNA, 19 nt, Artificial Sequence
  Description of Artificial Sequence: Synthetic oligonucleotide
  Sense strand starting at position 89 of SEQ ID NO: 916109
agggaauuaauguguguac

SEQ ID NO: 1131145 - RNA, 19 nt, Artificial Sequence
  Description of Artificial Sequence: Synthetic oligonucleotide
  Antisense strand to SEQ ID NO: 1131144
guacacacauuaauucccu

SEQ ID NO: 1131146 - RNA, 19 nt, Artificial Sequence
  Description of Artificial Sequence: Synthetic oligonucleotide
  Sense strand starting at position 90 of SEQ ID NO: 916109
gggaauuaauguguguacu

SEQ ID NO: 1131147 - RNA, 19 nt, Artificial Sequence
  Description of Artificial Sequence: Synthetic oligonucleotide
  Antisense strand to SEQ ID NO: 1131146
aguacacacauuaauuccc

SEQ ID NO: 1131148 - RNA, 19 nt, Artificial Sequence
  Description of Artificial Sequence: Synthetic oligonucleotide
  Sense strand starting at position 91 of SEQ ID NO: 916109
ggaauuaauguguguacug

SEQ ID NO: 1131149 - RNA, 19 nt, Artificial Sequence
  Description of Artificial Sequence: Synthetic oligonucleotide
  Antisense strand to SEQ ID NO: 1131148
caguacacacauuaauucc

SEQ ID NO: 1131150 - RNA, 19 nt, Artificial Sequence
  Description of Artificial Sequence: Synthetic oligonucleotide
  Sense strand starting at position 92 of SEQ ID NO: 916109
gaauuaauguguguacuga

SEQ ID NO: 1131151 - RNA, 19 nt, Artificial Sequence
  Description of Artificial Sequence: Synthetic oligonucleotide
  Antisense strand to SEQ ID NO: 1131150
ucaguacacacauuaauuc

SEQ ID NO: 1131152 - RNA, 19 nt, Artificial Sequence
  Description of Artificial Sequence: Synthetic oligonucleotide
  Sense strand starting at position 100 of SEQ ID NO: 916109
guguguacugagcauauua

SEQ ID NO: 1131153 - RNA, 19 nt, Artificial Sequence
  Description of Artificial Sequence: Synthetic oligonucleotide
  Antisense strand to SEQ ID NO: 1131152
uaauaugcucaguacacac

SEQ ID NO: 1131154 - RNA, 19 nt, Artificial Sequence
  Description of Artificial Sequence: Synthetic oligonucleotide
  Sense strand starting at position 120 of SEQ ID NO: 916109
gcacucuuaugagcugaua

SEQ ID NO: 1131155 - RNA, 19 nt, Artificial Sequence
  Description of Artificial Sequence: Synthetic oligonucleotide
  Antisense strand to SEQ ID NO: 1131154
uaucagcucauaagagugc

SEQ ID NO: 1131156 - RNA, 19 nt, Artificial Sequence
  Description of Artificial Sequence: Synthetic oligonucleotide
  Sense strand starting at position 132 of SEQ ID NO: 916109
gcugauagcuuccugaaac

SEQ ID NO: 1131157 - RNA, 19 nt, Artificial Sequence
  Description of Artificial Sequence: Synthetic oligonucleotide
  Antisense strand to SEQ ID NO: 1131156
guuucaggaagcuaucagc

SEQ ID NO: 1131158 - RNA, 19 nt, Artificial Sequence
  Description of Artificial Sequence: Synthetic oligonucleotide
  Sense strand starting at position 220 of SEQ ID NO: 916109
uccucuaggugaguaacaa

SEQ ID NO: 1131159 - RNA, 19 nt, Artificial Sequence
  Description of Artificial Sequence: Synthetic oligonucleotide
  Antisense strand to SEQ ID NO: 1131158
uuguuacucaccuagagga

SEQ ID NO: 1131160 - RNA, 19 nt, Artificial Sequence
  Description of Artificial Sequence: Synthetic oligonucleotide
  Sense strand starting at position 221 of SEQ ID NO: 916109
ccucuaggugaguaacaau

SEQ ID NO: 1131161 - RNA, 19 nt, Artificial Sequence
  Description of Artificial Sequence: Synthetic oligonucleotide
  Antisense strand to SEQ ID NO: 1131160
auuguuacucaccuagagg

SEQ ID NO: 1131162 - RNA, 19 nt, Artificial Sequence
  Description of Artificial Sequence: Synthetic oligonucleotide
  Sense strand starting at position 232 of SEQ ID NO: 916109
guaacaauuccagaguacu

SEQ ID NO: 1131163 - RNA, 19 nt, Artificial Sequence
  Description of Artificial Sequence: Synthetic oligonucleotide
  Antisense strand to SEQ ID NO: 1131162
aguacucuggaauuguuac

SEQ ID NO: 1131164 - RNA, 19 nt, Artificial Sequence
  Description of Artificial Sequence: Synthetic oligonucleotide
  Sense strand starting at position 439 of SEQ ID NO: 916109
ucguaaagaguaugccaaa

SEQ ID NO: 1131165 - RNA, 19 nt, Artificial Sequence
  Description of Artificial Sequence: Synthetic oligonucleotide
  Antisense strand to SEQ ID NO: 1131164
uuuggcauacucuuuacga

SEQ ID NO: 1131166 - RNA, 19 nt, Artificial Sequence
  Description of Artificial Sequence: Synthetic oligonucleotide
  Sense strand starting at position 449 of SEQ ID NO: 916109
uaugccaaagacugugaaa

SEQ ID NO: 1131167 - RNA, 19 nt, Artificial Sequence
  Description of Artificial Sequence: Synthetic oligonucleotide
  Antisense strand to SEQ ID NO: 1131166
uuucacagucuuuggcaua

SEQ ID NO: 1131168 - RNA, 19 nt, Artificial Sequence
  Description of Artificial Sequence: Synthetic oligonucleotide
  Sense strand starting at position 525 of SEQ ID NO: 916109
uuagaagucugauuccuua

SEQ ID NO: 1131169 - RNA, 19 nt, Artificial Sequence
  Description of Artificial Sequence: Synthetic oligonucleotide
  Antisense strand to SEQ ID NO: 1131168
uaaggaaucagacuucuaa

SEQ ID NO: 1131170 - RNA, 19 nt, Artificial Sequence
  Description of Artificial Sequence: Synthetic oligonucleotide
  Sense strand starting at position 630 of SEQ ID NO: 916109
aacacuaauguggguagau

SEQ ID NO: 1131171 - RNA, 19 nt, Artificial Sequence
  Description of Artificial Sequence: Synthetic oligonucleotide
  Antisense strand to SEQ ID NO: 1131170
aucuacccacauuaguguu

SEQ ID NO: 1131172 - RNA, 19 nt, Artificial Sequence
  Description of Artificial Sequence: Synthetic oligonucleotide
  Sense strand starting at position 631 of SEQ ID NO: 916109
acacuaauguggguagaug

SEQ ID NO: 1131173 - RNA, 19 nt, Artificial Sequence
  Description of Artificial Sequence: Synthetic oligonucleotide
  Antisense strand to SEQ ID NO: 1131172
caucuacccacauuagugu

SEQ ID NO: 1131174 - RNA, 19 nt, Artificial Sequence
  Description of Artificial Sequence: Synthetic oligonucleotide
  Sense strand starting at position 632 of SEQ ID NO: 916109
cacuaauguggguagaugu

SEQ ID NO: 1131175 - RNA, 19 nt, Artificial Sequence
  Description of Artificial Sequence: Synthetic oligonucleotide
  Antisense strand to SEQ ID NO: 1131174
acaucuacccacauuagug

SEQ ID NO: 1131176 - RNA, 19 nt, Artificial Sequence
  Description of Artificial Sequence: Synthetic oligonucleotide
  Sense strand starting at position 639 of SEQ ID NO: 916109
guggguagauguaaagaga

SEQ ID NO: 1131177 - RNA, 19 nt, Artificial Sequence
  Description of Artificial Sequence: Synthetic oligonucleotide
  Antisense strand to SEQ ID NO: 1131176
ucucuuuacaucuacccac

SEQ ID NO: 1131178 - RNA, 19 nt, Artificial Sequence
  Description of Artificial Sequence: Synthetic oligonucleotide
  Sense strand starting at position 1115 of SEQ ID NO: 916109
aggcuuucuaguggagguu

SEQ ID NO: 1131179 - RNA, 19 nt, Artificial Sequence
  Description of Artificial Sequence: Synthetic oligonucleotide
  Antisense strand to SEQ ID NO: 1131178
aaccuccacuagaaagccu

SEQ ID NO: 1131180 - RNA, 19 nt, Artificial Sequence
  Description of Artificial Sequence: Synthetic oligonucleotide
  Sense strand starting at position 1116 of SEQ ID NO: 916109
ggcuuucuaguggagguua

SEQ ID NO: 1131181 - RNA, 19 nt, Artificial Sequence
  Description of Artificial Sequence: Synthetic oligonucleotide
  Antisense strand to SEQ ID NO: 1131180
uaaccuccacuagaaagcc

SEQ ID NO: 1131182 - RNA, 19 nt, Artificial Sequence
  Description of Artificial Sequence: Synthetic oligonucleotide
  Sense strand starting at position 1118 of SEQ ID NO: 916109
cuuucuaguggagguuaaa

SEQ ID NO: 1131183 - RNA, 19 nt, Artificial Sequence
  Description of Artificial Sequence: Synthetic oligonucleotide
  Antisense strand to SEQ ID NO: 1131182
uuuaaccuccacuagaaag

SEQ ID NO: 1131184 - RNA, 19 nt, Artificial Sequence
  Description of Artificial Sequence: Synthetic oligonucleotide
  Sense strand starting at position 1360 of SEQ ID NO: 916109
uucuuaucucgacaggcaa

SEQ ID NO: 1131185 - RNA, 19 nt, Artificial Sequence
  Description of Artificial Sequence: Synthetic oligonucleotide
  Antisense strand to SEQ ID NO: 1131184
uugccugucgagauaagaa

SEQ ID NO: 1131186 - RNA, 19 nt, Artificial Sequence
  Description of Artificial Sequence: Synthetic oligonucleotide
  Sense strand starting at position 1596 of SEQ ID NO: 916109
cuagcauugagcgacaaga

SEQ ID NO: 1131187 - RNA, 19 nt, Artificial Sequence
  Description of Artificial Sequence: Synthetic oligonucleotide
  Antisense strand to SEQ ID NO: 1131186
ucuugucgcucaaugcuag

SEQ ID NO: 1131188 - RNA, 19 nt, Artificial Sequence
  Description of Artificial Sequence: Synthetic oligonucleotide
  Sense strand starting at position 1639 of SEQ ID NO: 916109
agacuuaccuuacugucau

SEQ ID NO: 1131189 - RNA, 19 nt, Artificial Sequence
  Description of Artificial Sequence: Synthetic oligonucleotide
  Antisense strand to SEQ ID NO: 1131188
augacaguaagguaagucu

SEQ ID NO: 1131190 - RNA, 19 nt, Artificial Sequence
  Description of Artificial Sequence: Synthetic oligonucleotide
  Sense strand starting at position 2375 of SEQ ID NO: 916109
gaagaaauuuggcaguucu

SEQ ID NO: 1131191 - RNA, 19 nt, Artificial Sequence
  Description of Artificial Sequence: Synthetic oligonucleotide
  Antisense strand to SEQ ID NO: 1131190
agaacugccaaauuucuuc

SEQ ID NO: 1131192 - RNA, 19 nt, Artificial Sequence
  Description of Artificial Sequence: Synthetic oligonucleotide
  Sense strand starting at position 2511 of SEQ ID NO: 916109
acgcaaauguccuuuacug

SEQ ID NO: 1131193 - RNA, 19 nt, Artificial Sequence
  Description of Artificial Sequence: Synthetic oligonucleotide
  Antisense strand to SEQ ID NO: 1131192
caguaaaggacauuugcgu

SEQ ID NO: 1131194 - RNA, 19 nt, Artificial Sequence
  Description of Artificial Sequence: Synthetic oligonucleotide
  Sense strand starting at position 2513 of SEQ ID NO: 916109
gcaaauguccuuuacugga

SEQ ID NO: 1131195 - RNA, 19 nt, Artificial Sequence
  Description of Artificial Sequence: Synthetic oligonucleotide
  Antisense strand to SEQ ID NO: 1131194
uccaguaaaggacauuugc

SEQ ID NO: 1131196 - RNA, 19 nt, Artificial Sequence
  Description of Artificial Sequence: Synthetic oligonucleotide
  Sense strand starting at position 2518 of SEQ ID NO: 916109
uguccuuuacuggaugaau

SEQ ID NO: 1131197 - RNA, 19 nt, Artificial Sequence
  Description of Artificial Sequence: Synthetic oligonucleotide
  Antisense strand to SEQ ID NO: 1131196
auucauccaguaaaggaca

SEQ ID NO: 1131198 - RNA, 19 nt, Artificial Sequence
  Description of Artificial Sequence: Synthetic oligonucleotide
  Sense strand starting at position 2995 of SEQ ID NO: 916109
uuaguuggguguguuacaa

SEQ ID NO: 1131199 - RNA, 19 nt, Artificial Sequence
  Description of Artificial Sequence: Synthetic oligonucleotide
  Antisense strand to SEQ ID NO: 1131198
uuguaacacacccaacuaa

SEQ ID NO: 1131200 - RNA, 19 nt, Artificial Sequence
  Description of Artificial Sequence: Synthetic oligonucleotide
  Sense strand starting at position 3310 of SEQ ID NO: 916109
uaaugaagugucuggaaca

SEQ ID NO: 1131201 - RNA, 19 nt, Artificial Sequence
  Description of Artificial Sequence: Synthetic oligonucleotide
  Antisense strand to SEQ ID NO: 1131200
uguuccagacacuucauua

SEQ ID NO: 1131202 - RNA, 19 nt, Artificial Sequence
  Description of Artificial Sequence: Synthetic oligonucleotide
  Sense strand starting at position 3352 of SEQ ID NO: 916109
auccauuagugguugccaa

SEQ ID NO: 1131203 - RNA, 19 nt, Artificial Sequence
  Description of Artificial Sequence: Synthetic oligonucleotide
  Antisense strand to SEQ ID NO: 1131202
uuggcaaccacuaauggau

SEQ ID NO: 1131204 - RNA, 19 nt, Artificial Sequence
  Description of Artificial Sequence: Synthetic oligonucleotide
  Sense strand starting at position 3371 of SEQ ID NO: 916109
gggcuaggguugaagaaug

SEQ ID NO: 1131205 - RNA, 19 nt, Artificial Sequence
  Description of Artificial Sequence: Synthetic oligonucleotide
  Antisense strand to SEQ ID NO: 1131204
cauucuucaacccuagccc

SEQ ID NO: 1131206 - RNA, 19 nt, Artificial Sequence
  Description of Artificial Sequence: Synthetic oligonucleotide
  Sense strand starting at position 3427 of SEQ ID NO: 916109
uaaugaguacuggguuucu

SEQ ID NO: 1131207 - RNA, 19 nt, Artificial Sequence
  Description of Artificial Sequence: Synthetic oligonucleotide
  Antisense strand to SEQ ID NO: 1131206
agaaacccaguacucauua

SEQ ID NO: 1131208 - RNA, 19 nt, Artificial Sequence
  Description of Artificial Sequence: Synthetic oligonucleotide
  Sense strand starting at position 3619 of SEQ ID NO: 916109
gggagagcauaccuguaau

SEQ ID NO: 1131209 - RNA, 19 nt, Artificial Sequence
  Description of Artificial Sequence: Synthetic oligonucleotide
  Antisense strand to SEQ ID NO: 1131208
auuacagguaugcucuccc

SEQ ID NO: 1131210 - RNA, 19 nt, Artificial Sequence
  Description of Artificial Sequence: Synthetic oligonucleotide
  Sense strand starting at position 3817 of SEQ ID NO: 916109
uugcacauccugugaauau

SEQ ID NO: 1131211 - RNA, 19 nt, Artificial Sequence
  Description of Artificial Sequence: Synthetic oligonucleotide
  Antisense strand to SEQ ID NO: 1131210
auauucacaggaugugcaa

SEQ ID NO: 1131212 - RNA, 19 nt, Artificial Sequence
  Description of Artificial Sequence: Synthetic oligonucleotide
  Sense strand starting at position 3876 of SEQ ID NO: 916109
acuuuaaaugaguggauua

SEQ ID NO: 1131213 - RNA, 19 nt, Artificial Sequence
  Description of Artificial Sequence: Synthetic oligonucleotide
  Antisense strand to SEQ ID NO: 1131212
uaauccacucauuuaaagu

SEQ ID NO: 1131214 - RNA, 19 nt, Artificial Sequence
  Description of Artificial Sequence: Synthetic oligonucleotide
  Sense strand starting at position 3923 of SEQ ID NO: 916109
cuggcuguguccucauuua

SEQ ID NO: 1131215 - RNA, 19 nt, Artificial Sequence
  Description of Artificial Sequence: Synthetic oligonucleotide
  Antisense strand to SEQ ID NO: 1131214
uaaaugaggacacagccag

SEQ ID NO: 1131216 - RNA, 19 nt, Artificial Sequence
  Description of Artificial Sequence: Synthetic oligonucleotide
  Sense strand starting at position 3940 of SEQ ID NO: 916109
uaauaaagucagugagcuu

SEQ ID NO: 1131217 - RNA, 19 nt, Artificial Sequence
  Description of Artificial Sequence: Synthetic oligonucleotide
  Antisense strand to SEQ ID NO: 1131216
aagcucacugacuuuauua

SEQ ID NO: 1131218 - RNA, 19 nt, Artificial Sequence
  Description of Artificial Sequence: Synthetic oligonucleotide
  Sense strand starting at position 143 of SEQ ID NO: 916110
uuuacuuucugcuugaaga

SEQ ID NO: 1131219 - RNA, 19 nt, Artificial Sequence
  Description of Artificial Sequence: Synthetic oligonucleotide
  Antisense strand to SEQ ID NO: 1131218
ucuucaagcagaaaguaaa

SEQ ID NO: 1131220 - RNA, 19 nt, Artificial Sequence
  Description of Artificial Sequence: Synthetic oligonucleotide
  Sense strand starting at position 144 of SEQ ID NO: 916110
uuacuuucugcuugaagac

SEQ ID NO: 1131221 - RNA, 19 nt, Artificial Sequence
  Description of Artificial Sequence: Synthetic oligonucleotide
  Antisense strand to SEQ ID NO: 1131220
gucuucaagcagaaaguaa

SEQ ID NO: 1131222 - RNA, 19 nt, Artificial Sequence
  Description of Artificial Sequence: Synthetic oligonucleotide
  Sense strand starting at position 159 of SEQ ID NO: 916110
agacaugacuuucugucuu

SEQ ID NO: 1131223 - RNA, 19 nt, Artificial Sequence
  Description of Artificial Sequence: Synthetic oligonucleotide
  Antisense strand to SEQ ID NO: 1131222
aagacagaaagucaugucu

SEQ ID NO: 1131224 - RNA, 19 nt, Artificial Sequence
  Description of Artificial Sequence: Synthetic oligonucleotide
  Sense strand starting at position 221 of SEQ ID NO: 916110
caugcuaagugaucaagag

SEQ ID NO: 1131225 - RNA, 19 nt, Artificial Sequence
  Description of Artificial Sequence: Synthetic oligonucleotide
  Antisense strand to SEQ ID NO: 1131224
cucuugaucacuuagcaug

SEQ ID NO: 1131226 - RNA, 19 nt, Artificial Sequence
  Description of Artificial Sequence: Synthetic oligonucleotide
  Sense strand starting at position 222 of SEQ ID NO: 916110
augcuaagugaucaagagu

SEQ ID NO: 1131227 - RNA, 19 nt, Artificial Sequence
  Description of Artificial Sequence: Synthetic oligonucleotide
  Antisense strand to SEQ ID NO: 1131226
acucuugaucacuuagcau

SEQ ID NO: 1131228 - RNA, 19 nt, Artificial Sequence
  Description of Artificial Sequence: Synthetic oligonucleotide
  Sense strand starting at position 230 of SEQ ID NO: 916110
ugaucaagagucuaucugu

SEQ ID NO: 1131229 - RNA, 19 nt, Artificial Sequence
  Description of Artificial Sequence: Synthetic oligonucleotide
  Antisense strand to SEQ ID NO: 1131228
acagauagacucuugauca

SEQ ID NO: 1131230 - RNA, 19 nt, Artificial Sequence
  Description of Artificial Sequence: Synthetic oligonucleotide
  Sense strand starting at position 233 of SEQ ID NO: 916110
ucaagagucuaucuguuga

SEQ ID NO: 1131231 - RNA, 19 nt, Artificial Sequence
  Description of Artificial Sequence: Synthetic oligonucleotide
  Antisense strand to SEQ ID NO: 1131230
ucaacagauagacucuuga

SEQ ID NO: 1131232 - RNA, 19 nt, Artificial Sequence
  Description of Artificial Sequence: Synthetic oligonucleotide
  Sense strand starting at position 387 of SEQ ID NO: 916110
cugugcuuugucucggcaa

SEQ ID NO: 1131233 - RNA, 19 nt, Artificial Sequence
  Description of Artificial Sequence: Synthetic oligonucleotide
  Antisense strand to SEQ ID NO: 1131232
uugccgagacaaagcacag

SEQ ID NO: 1131234 - RNA, 19 nt, Artificial Sequence
  Description of Artificial Sequence: Synthetic oligonucleotide
  Sense strand starting at position 511 of SEQ ID NO: 916110
gccugcuguacugaaugaa

SEQ ID NO: 1131235 - RNA, 19 nt, Artificial Sequence
  Description of Artificial Sequence: Synthetic oligonucleotide
  Antisense strand to SEQ ID NO: 1131234
uucauucaguacagcaggc

SEQ ID NO: 1131236 - RNA, 19 nt, Artificial Sequence
  Description of Artificial Sequence: Synthetic oligonucleotide
  Sense strand starting at position 515 of SEQ ID NO: 916110
gcuguacugaaugaaugau

SEQ ID NO: 1131237 - RNA, 19 nt, Artificial Sequence
  Description of Artificial Sequence: Synthetic oligonucleotide
  Antisense strand to SEQ ID NO: 1131236
aucauucauucaguacagc

SEQ ID NO: 1131238 - RNA, 19 nt, Artificial Sequence
  Description of Artificial Sequence: Synthetic oligonucleotide
  Sense strand starting at position 536 of SEQ ID NO: 916110
uucuccauacuaugaguua

SEQ ID NO: 1131239 - RNA, 19 nt, Artificial Sequence
  Description of Artificial Sequence: Synthetic oligonucleotide
  Antisense strand to SEQ ID NO: 1131238
uaacucauaguauggagaa

SEQ ID NO: 1131240 - RNA, 19 nt, Artificial Sequence
  Description of Artificial Sequence: Synthetic oligonucleotide
  Sense strand starting at position 644 of SEQ ID NO: 916110
caggaaagguguuucuuua

SEQ ID NO: 1131241 - RNA, 19 nt, Artificial Sequence
  Description of Artificial Sequence: Synthetic oligonucleotide
  Antisense strand to SEQ ID NO: 1131240
uaaagaaacaccuuuccug

SEQ ID NO: 1131242 - RNA, 19 nt, Artificial Sequence
  Description of Artificial Sequence: Synthetic oligonucleotide
  Sense strand starting at position 748 of SEQ ID NO: 916110
guguuucaggucgucagua

SEQ ID NO: 1131243 - RNA, 19 nt, Artificial Sequence
  Description of Artificial Sequence: Synthetic oligonucleotide
  Antisense strand to SEQ ID NO: 1131242
uacugacgaccugaaacac

SEQ ID NO: 1131244 - RNA, 19 nt, Artificial Sequence
  Description of Artificial Sequence: Synthetic oligonucleotide
  Sense strand starting at position 763 of SEQ ID NO: 916110
aguacucuuuggccagaga

SEQ ID NO: 1131245 - RNA, 19 nt, Artificial Sequence
  Description of Artificial Sequence: Synthetic oligonucleotide
  Antisense strand to SEQ ID NO: 1131244
ucucuggccaaagaguacu

SEQ ID NO: 1131246 - RNA, 19 nt, Artificial Sequence
  Description of Artificial Sequence: Synthetic oligonucleotide
  Sense strand starting at position 764 of SEQ ID NO: 916110
guacucuuuggccagagaa

SEQ ID NO: 1131247 - RNA, 19 nt, Artificial Sequence
  Description of Artificial Sequence: Synthetic oligonucleotide
  Antisense strand to SEQ ID NO: 1131246
uucucuggccaaagaguac

SEQ ID NO: 1131248 - RNA, 19 nt, Artificial Sequence
  Description of Artificial Sequence: Synthetic oligonucleotide
  Sense strand starting at position 766 of SEQ ID NO: 916110
acucuuuggccagagaagu

SEQ ID NO: 1131249 - RNA, 19 nt, Artificial Sequence
  Description of Artificial Sequence: Synthetic oligonucleotide
  Antisense strand to SEQ ID NO: 1131248
acuucucuggccaaagagu

SEQ ID NO: 1131250 - RNA, 19 nt, Artificial Sequence
  Description of Artificial Sequence: Synthetic oligonucleotide
  Sense strand starting at position 954 of SEQ ID NO: 916110
uguugaugcccacauugga

SEQ ID NO: 1131251 - RNA, 19 nt, Artificial Sequence
  Description of Artificial Sequence: Synthetic oligonucleotide
  Antisense strand to SEQ ID NO: 1131250
uccaaugugggcaucaaca

SEQ ID NO: 1131252 - RNA, 19 nt, Artificial Sequence
  Description of Artificial Sequence: Synthetic oligonucleotide
  Sense strand starting at position 1119 of SEQ ID NO: 916110
cggguccuccacggagaaa

SEQ ID NO: 1131253 - RNA, 19 nt, Artificial Sequence
  Description of Artificial Sequence: Synthetic oligonucleotide
  Antisense strand to SEQ ID NO: 1131252
uuucuccguggaggacccg

SEQ ID NO: 1131254 - RNA, 19 nt, Artificial Sequence
  Description of Artificial Sequence: Synthetic oligonucleotide
  Sense strand starting at position 1120 of SEQ ID NO: 916110
ggguccuccacggagaaau

SEQ ID NO: 1131255 - RNA, 19 nt, Artificial Sequence
  Description of Artificial Sequence: Synthetic oligonucleotide
  Antisense strand to SEQ ID NO: 1131254
auuucuccguggaggaccc

SEQ ID NO: 1131256 - RNA, 19 nt, Artificial Sequence
  Description of Artificial Sequence: Synthetic oligonucleotide
  Sense strand starting at position 1172 of SEQ ID NO: 916110
cuucgcuuccaagagaauu

SEQ ID NO: 1131257 - RNA, 19 nt, Artificial Sequence
  Description of Artificial Sequence: Synthetic oligonucleotide
  Antisense strand to SEQ ID NO: 1131256
aauucucuuggaagcgaag

SEQ ID NO: 1131258 - RNA, 19 nt, Artificial Sequence
  Description of Artificial Sequence: Synthetic oligonucleotide
  Sense strand starting at position 1467 of SEQ ID NO: 916110
ccaggagauucgucacgga

SEQ ID NO: 1131259 - RNA, 19 nt, Artificial Sequence
  Description of Artificial Sequence: Synthetic oligonucleotide
  Antisense strand to SEQ ID NO: 1131258
uccgugacgaaucuccugg

SEQ ID NO: 1131260 - RNA, 19 nt, Artificial Sequence
  Description of Artificial Sequence: Synthetic oligonucleotide
  Sense strand starting at position 1472 of SEQ ID NO: 916110
agauucgucacggaaaccu

SEQ ID NO: 1131261 - RNA, 19 nt, Artificial Sequence
  Description of Artificial Sequence: Synthetic oligonucleotide
  Antisense strand to SEQ ID NO: 1131260
agguuuccgugacgaaucu

SEQ ID NO: 1131262 - RNA, 19 nt, Artificial Sequence
  Description of Artificial Sequence: Synthetic oligonucleotide
  Sense strand starting at position 2166 of SEQ ID NO: 916110
gauuccucccgugggauuu

SEQ ID NO: 1131263 - RNA, 19 nt, Artificial Sequence
  Description of Artificial Sequence: Synthetic oligonucleotide
  Antisense strand to SEQ ID NO: 1131262
aaaucccacgggaggaauc

SEQ ID NO: 1131264 - RNA, 19 nt, Artificial Sequence
  Description of Artificial Sequence: Synthetic oligonucleotide
  Sense strand starting at position 2320 of SEQ ID NO: 916110
uccugcuuuggccagagaa

SEQ ID NO: 1131265 - RNA, 19 nt, Artificial Sequence
  Description of Artificial Sequence: Synthetic oligonucleotide
  Antisense strand to SEQ ID NO: 1131264
uucucuggccaaagcagga

SEQ ID NO: 1131266 - RNA, 19 nt, Artificial Sequence
  Description of Artificial Sequence: Synthetic oligonucleotide
  Sense strand starting at position 2425 of SEQ ID NO: 916110
ggguaauuggcaggacgga

SEQ ID NO: 1131267 - RNA, 19 nt, Artificial Sequence
  Description of Artificial Sequence: Synthetic oligonucleotide
  Antisense strand to SEQ ID NO: 1131266
uccguccugccaauuaccc

SEQ ID NO: 1131268 - RNA, 19 nt, Artificial Sequence
  Description of Artificial Sequence: Synthetic oligonucleotide
  Sense strand starting at position 2787 of SEQ ID NO: 916110
ggaauccaguacucaauau

SEQ ID NO: 1131269 - RNA, 19 nt, Artificial Sequence
  Description of Artificial Sequence: Synthetic oligonucleotide
  Antisense strand to SEQ ID NO: 1131268
auauugaguacuggauucc

SEQ ID NO: 1131270 - RNA, 19 nt, Artificial Sequence
  Description of Artificial Sequence: Synthetic oligonucleotide
  Sense strand starting at position 2814 of SEQ ID NO: 916110
uugagcuaccuaggauauu

SEQ ID NO: 1131271 - RNA, 19 nt, Artificial Sequence
  Description of Artificial Sequence: Synthetic oligonucleotide
  Antisense strand to SEQ ID NO: 1131270
aauauccuagguagcucaa

SEQ ID NO: 1131272 - RNA, 19 nt, Artificial Sequence
  Description of Artificial Sequence: Synthetic oligonucleotide
  Sense strand starting at position 2885 of SEQ ID NO: 916110
uccugaucccuagggcaaa

SEQ ID NO: 1131273 - RNA, 19 nt, Artificial Sequence
  Description of Artificial Sequence: Synthetic oligonucleotide
  Antisense strand to SEQ ID NO: 1131272
uuugcccuagggaucagga

SEQ ID NO: 1131274 - RNA, 19 nt, Artificial Sequence
  Description of Artificial Sequence: Synthetic oligonucleotide
  Sense strand starting at position 2918 of SEQ ID NO: 916110
ggguucuccaaguauguuu

SEQ ID NO: 1131275 - RNA, 19 nt, Artificial Sequence
  Description of Artificial Sequence: Synthetic oligonucleotide
  Antisense strand to SEQ ID NO: 1131274
aaacauacuuggagaaccc

SEQ ID NO: 1131276 - RNA, 19 nt, Artificial Sequence
  Description of Artificial Sequence: Synthetic oligonucleotide
  Sense strand starting at position 3025 of SEQ ID NO: 916110
auaauaaugugccucugau

SEQ ID NO: 1131277 - RNA, 19 nt, Artificial Sequence
  Description of Artificial Sequence: Synthetic oligonucleotide
  Antisense strand to SEQ ID NO: 1131276
aucagaggcacauuauuau

SEQ ID NO: 1131278 - RNA, 19 nt, Artificial Sequence
  Description of Artificial Sequence: Synthetic oligonucleotide
  Sense strand starting at position 3038 of SEQ ID NO: 916110
ucugauucccucugaagug

SEQ ID NO: 1131279 - RNA, 19 nt, Artificial Sequence
  Description of Artificial Sequence: Synthetic oligonucleotide
  Antisense strand to SEQ ID NO: 1131278
cacuucagagggaaucaga

SEQ ID NO: 1131280 - RNA, 19 nt, Artificial Sequence
  Description of Artificial Sequence: Synthetic oligonucleotide
  Sense strand starting at position 3232 of SEQ ID NO: 916110
auucuuauugguugaauug

SEQ ID NO: 1131281 - RNA, 19 nt, Artificial Sequence
  Description of Artificial Sequence: Synthetic oligonucleotide
  Antisense strand to SEQ ID NO: 1131280
caauucaaccaauaagaau

SEQ ID NO: 1131282 - RNA, 19 nt, Artificial Sequence
  Description of Artificial Sequence: Synthetic oligonucleotide
  Sense strand starting at position 3233 of SEQ ID NO: 916110
uucuuauugguugaauugu

SEQ ID NO: 1131283 - RNA, 19 nt, Artificial Sequence
  Description of Artificial Sequence: Synthetic oligonucleotide
  Antisense strand to SEQ ID NO: 1131282
acaauucaaccaauaagaa

SEQ ID NO: 1131284 - RNA, 19 nt, Artificial Sequence
  Description of Artificial Sequence: Synthetic oligonucleotide
  Sense strand starting at position 3303 of SEQ ID NO: 916110
gaaauaaggucuuuguaca

SEQ ID NO: 1131285 - RNA, 19 nt, Artificial Sequence
  Description of Artificial Sequence: Synthetic oligonucleotide
  Antisense strand to SEQ ID NO: 1131284
uguacaaagaccuuauuuc

SEQ ID NO: 1131286 - RNA, 19 nt, Artificial Sequence
  Description of Artificial Sequence: Synthetic oligonucleotide
  Sense strand starting at position 3432 of SEQ ID NO: 916110
ccauguaaagauuggaacu

SEQ ID NO: 1131287 - RNA, 19 nt, Artificial Sequence
  Description of Artificial Sequence: Synthetic oligonucleotide
  Antisense strand to SEQ ID NO: 1131286
aguuccaaucuuuacaugg

SEQ ID NO: 1131288 - RNA, 19 nt, Artificial Sequence
  Description of Artificial Sequence: Synthetic oligonucleotide
  Sense strand starting at position 3496 of SEQ ID NO: 916110
uggaacagauccuuucuua

SEQ ID NO: 1131289 - RNA, 19 nt, Artificial Sequence
  Description of Artificial Sequence: Synthetic oligonucleotide
  Antisense strand to SEQ ID NO: 1131288
uaagaaaggaucuguucca

SEQ ID NO: 1131290 - RNA, 19 nt, Artificial Sequence
  Description of Artificial Sequence: Synthetic oligonucleotide
  Sense strand starting at position 3569 of SEQ ID NO: 916110
cuagaacugcgagacaguu

SEQ ID NO: 1131291 - RNA, 19 nt, Artificial Sequence
  Description of Artificial Sequence: Synthetic oligonucleotide
  Antisense strand to SEQ ID NO: 1131290
aacugucucgcaguucuag

SEQ ID NO: 1131292 - RNA, 19 nt, Artificial Sequence
  Description of Artificial Sequence: Synthetic oligonucleotide
  Sense strand starting at position 3680 of SEQ ID NO: 916110
gagagccaaucugucugaa

SEQ ID NO: 1131293 - RNA, 19 nt, Artificial Sequence
  Description of Artificial Sequence: Synthetic oligonucleotide
  Antisense strand to SEQ ID NO: 1131292
uucagacagauuggcucuc

SEQ ID NO: 1131294 - RNA, 19 nt, Artificial Sequence
  Description of Artificial Sequence: Synthetic oligonucleotide
  Sense strand starting at position 3682 of SEQ ID NO: 916110
gagccaaucugucugaaua

SEQ ID NO: 1131295 - RNA, 19 nt, Artificial Sequence
  Description of Artificial Sequence: Synthetic oligonucleotide
  Antisense strand to SEQ ID NO: 1131294
uauucagacagauuggcuc

SEQ ID NO: 1131296 - RNA, 19 nt, Artificial Sequence
  Description of Artificial Sequence: Synthetic oligonucleotide
  Sense strand starting at position 3683 of SEQ ID NO: 916110
agccaaucugucugaauag

SEQ ID NO: 1131297 - RNA, 19 nt, Artificial Sequence
  Description of Artificial Sequence: Synthetic oligonucleotide
  Antisense strand to SEQ ID NO: 1131296
cuauucagacagauuggcu

SEQ ID NO: 1131298 - RNA, 19 nt, Artificial Sequence
  Description of Artificial Sequence: Synthetic oligonucleotide
  Sense strand starting at position 111 of SEQ ID NO: 916111
gacuaucuggucuggguua

SEQ ID NO: 1131299 - RNA, 19 nt, Artificial Sequence
  Description of Artificial Sequence: Synthetic oligonucleotide
  Antisense strand to SEQ ID NO: 1131298
uaacccagaccagauaguc

SEQ ID NO: 1131300 - RNA, 19 nt, Artificial Sequence
  Description of Artificial Sequence: Synthetic oligonucleotide
  Sense strand starting at position 124 of SEQ ID NO: 916111
ggguuagcagcucagaaau

SEQ ID NO: 1131301 - RNA, 19 nt, Artificial Sequence
  Description of Artificial Sequence: Synthetic oligonucleotide
  Antisense strand to SEQ ID NO: 1131300
auuucugagcugcuaaccc

SEQ ID NO: 1131302 - RNA, 19 nt, Artificial Sequence
  Description of Artificial Sequence: Synthetic oligonucleotide
  Sense strand starting at position 471 of SEQ ID NO: 916111
agacgcugccucuacuaaa

SEQ ID NO: 1131303 - RNA, 19 nt, Artificial Sequence
  Description of Artificial Sequence: Synthetic oligonucleotide
  Antisense strand to SEQ ID NO: 1131302
uuuaguagaggcagcgucu

SEQ ID NO: 1131304 - RNA, 19 nt, Artificial Sequence
  Description of Artificial Sequence: Synthetic oligonucleotide
  Sense strand starting at position 622 of SEQ ID NO: 916111
gcuugagugacagagcaau

SEQ ID NO: 1131305 - RNA, 19 nt, Artificial Sequence
  Description of Artificial Sequence: Synthetic oligonucleotide
  Antisense strand to SEQ ID NO: 1131304
auugcucugucacucaagc

SEQ ID NO: 1131306 - RNA, 19 nt, Artificial Sequence
  Description of Artificial Sequence: Synthetic oligonucleotide
  Sense strand starting at position 724 of SEQ ID NO: 916111
uuuaaauuauccgcaggaa

SEQ ID NO: 1131307 - RNA, 19 nt, Artificial Sequence
  Description of Artificial Sequence: Synthetic oligonucleotide
  Antisense strand to SEQ ID NO: 1131306
uuccugcggauaauuuaaa

SEQ ID NO: 1131308 - RNA, 19 nt, Artificial Sequence
  Description of Artificial Sequence: Synthetic oligonucleotide
  Sense strand starting at position 725 of SEQ ID NO: 916111
uuaaauuauccgcaggaaa

SEQ ID NO: 1131309 - RNA, 19 nt, Artificial Sequence
  Description of Artificial Sequence: Synthetic oligonucleotide
  Antisense strand to SEQ ID NO: 1131308
uuuccugcggauaauuuaa

SEQ ID NO: 1131310 - RNA, 19 nt, Artificial Sequence
  Description of Artificial Sequence: Synthetic oligonucleotide
  Sense strand starting at position 748 of SEQ ID NO: 916111
aaguucuuugcagaaguca

SEQ ID NO: 1131311 - RNA, 19 nt, Artificial Sequence
  Description of Artificial Sequence: Synthetic oligonucleotide
  Antisense strand to SEQ ID NO: 1131310
ugacuucugcaaagaacuu

SEQ ID NO: 1131312 - RNA, 19 nt, Artificial Sequence
  Description of Artificial Sequence: Synthetic oligonucleotide
  Sense strand starting at position 984 of SEQ ID NO: 916111
acuuaagaucaacggcaua

SEQ ID NO: 1131313 - RNA, 19 nt, Artificial Sequence
  Description of Artificial Sequence: Synthetic oligonucleotide
  Antisense strand to SEQ ID NO: 1131312
uaugccguugaucuuaagu

SEQ ID NO: 1131314 - RNA, 19 nt, Artificial Sequence
  Description of Artificial Sequence: Synthetic oligonucleotide
  Sense strand starting at position 1018 of SEQ ID NO: 916111
uaguaugacggucauguga

SEQ ID NO: 1131315 - RNA, 19 nt, Artificial Sequence
  Description of Artificial Sequence: Synthetic oligonucleotide
  Antisense strand to SEQ ID NO: 1131314
ucacaugaccgucauacua

SEQ ID NO: 1131316 - RNA, 19 nt, Artificial Sequence
  Description of Artificial Sequence: Synthetic oligonucleotide
  Sense strand starting at position 1048 of SEQ ID NO: 916111
guaucucuugccgaggauc

SEQ ID NO: 1131317 - RNA, 19 nt, Artificial Sequence
  Description of Artificial Sequence: Synthetic oligonucleotide
  Antisense strand to SEQ ID NO: 1131316
gauccucggcaagagauac

SEQ ID NO: 1131318 - RNA, 19 nt, Artificial Sequence
  Description of Artificial Sequence: Synthetic oligonucleotide
  Sense strand starting at position 1069 of SEQ ID NO: 916111
cauuuauuggcuugcaguu

SEQ ID NO: 1131319 - RNA, 19 nt, Artificial Sequence
  Description of Artificial Sequence: Synthetic oligonucleotide
  Antisense strand to SEQ ID NO: 1131318
aacugcaagccaauaaaug

SEQ ID NO: 1131320 - RNA, 19 nt, Artificial Sequence
  Description of Artificial Sequence: Synthetic oligonucleotide
  Sense strand starting at position 1128 of SEQ ID NO: 916111
gauagucaugcaggagguu

SEQ ID NO: 1131321 - RNA, 19 nt, Artificial Sequence
  Description of Artificial Sequence: Synthetic oligonucleotide
  Antisense strand to SEQ ID NO: 1131320
aaccuccugcaugacuauc

SEQ ID NO: 1131322 - RNA, 19 nt, Artificial Sequence
  Description of Artificial Sequence: Synthetic oligonucleotide
  Sense strand starting at position 1247 of SEQ ID NO: 916111
cguggucaccgaaggcuua

SEQ ID NO: 1131323 - RNA, 19 nt, Artificial Sequence
  Description of Artificial Sequence: Synthetic oligonucleotide
  Antisense strand to SEQ ID NO: 1131322
uaagccuucggugaccacg

SEQ ID NO: 1131324 - RNA, 19 nt, Artificial Sequence
  Description of Artificial Sequence: Synthetic oligonucleotide
  Sense strand starting at position 1399 of SEQ ID NO: 916111
cuguaacuccaguggaaca

SEQ ID NO: 1131325 - RNA, 19 nt, Artificial Sequence
  Description of Artificial Sequence: Synthetic oligonucleotide
  Antisense strand to SEQ ID NO: 1131324
uguuccacuggaguuacag

SEQ ID NO: 1131326 - RNA, 19 nt, Artificial Sequence
  Description of Artificial Sequence: Synthetic oligonucleotide
  Sense strand starting at position 1422 of SEQ ID NO: 916111
aucucuagucucuaccaga

SEQ ID NO: 1131327 - RNA, 19 nt, Artificial Sequence
  Description of Artificial Sequence: Synthetic oligonucleotide
  Antisense strand to SEQ ID NO: 1131326
ucugguagagacuagagau

SEQ ID NO: 1131328 - RNA, 19 nt, Artificial Sequence
  Description of Artificial Sequence: Synthetic oligonucleotide
  Sense strand starting at position 1905 of SEQ ID NO: 916111
acggguugacaagguugaa

SEQ ID NO: 1131329 - RNA, 19 nt, Artificial Sequence
  Description of Artificial Sequence: Synthetic oligonucleotide
  Antisense strand to SEQ ID NO: 1131328
uucaaccuugucaacccgu

SEQ ID NO: 1131330 - RNA, 19 nt, Artificial Sequence
  Description of Artificial Sequence: Synthetic oligonucleotide
  Sense strand starting at position 2122 of SEQ ID NO: 916111
ccggauuagggcuaauuaa

SEQ ID NO: 1131331 - RNA, 19 nt, Artificial Sequence
  Description of Artificial Sequence: Synthetic oligonucleotide
  Antisense strand to SEQ ID NO: 1131330
uuaauuagcccuaauccgg

SEQ ID NO: 1131332 - RNA, 19 nt, Artificial Sequence
  Description of Artificial Sequence: Synthetic oligonucleotide
  Sense strand starting at position 2130 of SEQ ID NO: 916111
gggcuaauuaaggguggau

SEQ ID NO: 1131333 - RNA, 19 nt, Artificial Sequence
  Description of Artificial Sequence: Synthetic oligonucleotide
  Antisense strand to SEQ ID NO: 1131332
auccacccuuaauuagccc

SEQ ID NO: 1131334 - RNA, 19 nt, Artificial Sequence
  Description of Artificial Sequence: Synthetic oligonucleotide
  Sense strand starting at position 2176 of SEQ ID NO: 916111
cuaaauaggugccugauaa

SEQ ID NO: 1131335 - RNA, 19 nt, Artificial Sequence
  Description of Artificial Sequence: Synthetic oligonucleotide
  Antisense strand to SEQ ID NO: 1131334
uuaucaggcaccuauuuag

SEQ ID NO: 1131336 - RNA, 19 nt, Artificial Sequence
  Description of Artificial Sequence: Synthetic oligonucleotide
  Sense strand starting at position 2177 of SEQ ID NO: 916111
uaaauaggugccugauaac

SEQ ID NO: 1131337 - RNA, 19 nt, Artificial Sequence
  Description of Artificial Sequence: Synthetic oligonucleotide
  Antisense strand to SEQ ID NO: 1131336
guuaucaggcaccuauuua

SEQ ID NO: 1131338 - RNA, 19 nt, Artificial Sequence
  Description of Artificial Sequence: Synthetic oligonucleotide
  Sense strand starting at position 2305 of SEQ ID NO: 916111
gagccaauuccguaauaug

SEQ ID NO: 1131339 - RNA, 19 nt, Artificial Sequence
  Description of Artificial Sequence: Synthetic oligonucleotide
  Antisense strand to SEQ ID NO: 1131338
cauauuacggaauuggcuc

SEQ ID NO: 1131340 - RNA, 19 nt, Artificial Sequence
  Description of Artificial Sequence: Synthetic oligonucleotide
  Sense strand starting at position 2313 of SEQ ID NO: 916111
uccguaauaugaucaugga

SEQ ID NO: 1131341 - RNA, 19 nt, Artificial Sequence
  Description of Artificial Sequence: Synthetic oligonucleotide
  Antisense strand to SEQ ID NO: 1131340
uccaugaucauauuacgga

SEQ ID NO: 1131342 - RNA, 19 nt, Artificial Sequence
  Description of Artificial Sequence: Synthetic oligonucleotide
  Sense strand starting at position 2335 of SEQ ID NO: 916111
ugaucauugccugauccuu

SEQ ID NO: 1131343 - RNA, 19 nt, Artificial Sequence
  Description of Artificial Sequence: Synthetic oligonucleotide
  Antisense strand to SEQ ID NO: 1131342
aaggaucaggcaaugauca

SEQ ID NO: 1131344 - RNA, 19 nt, Artificial Sequence
  Description of Artificial Sequence: Synthetic oligonucleotide
  Sense strand starting at position 2368 of SEQ ID NO: 916111
cgcuuucuugaggaauguc

SEQ ID NO: 1131345 - RNA, 19 nt, Artificial Sequence
  Description of Artificial Sequence: Synthetic oligonucleotide
  Antisense strand to SEQ ID NO: 1131344
gacauuccucaagaaagcg

SEQ ID NO: 1131346 - RNA, 19 nt, Artificial Sequence
  Description of Artificial Sequence: Synthetic oligonucleotide
  Sense strand starting at position 2371 of SEQ ID NO: 916111
uuucuugaggaaugucuuu

SEQ ID NO: 1131347 - RNA, 19 nt, Artificial Sequence
  Description of Artificial Sequence: Synthetic oligonucleotide
  Antisense strand to SEQ ID NO: 1131346
aaagacauuccucaagaaa

SEQ ID NO: 1131348 - RNA, 19 nt, Artificial Sequence
  Description of Artificial Sequence: Synthetic oligonucleotide
  Sense strand starting at position 2376 of SEQ ID NO: 916111
ugaggaaugucuuugguua

SEQ ID NO: 1131349 - RNA, 19 nt, Artificial Sequence
  Description of Artificial Sequence: Synthetic oligonucleotide
  Antisense strand to SEQ ID NO: 1131348
uaaccaaagacauuccuca

SEQ ID NO: 1131350 - RNA, 19 nt, Artificial Sequence
  Description of Artificial Sequence: Synthetic oligonucleotide
  Sense strand starting at position 2377 of SEQ ID NO: 916111
gaggaaugucuuugguuaa

SEQ ID NO: 1131351 - RNA, 19 nt, Artificial Sequence
  Description of Artificial Sequence: Synthetic oligonucleotide
  Antisense strand to SEQ ID NO: 1131350
uuaaccaaagacauuccuc

SEQ ID NO: 1131352 - RNA, 19 nt, Artificial Sequence
  Description of Artificial Sequence: Synthetic oligonucleotide
  Sense strand starting at position 2414 of SEQ ID NO: 916111
ggugacaucauguggacaa

SEQ ID NO: 1131353 - RNA, 19 nt, Artificial Sequence
  Description of Artificial Sequence: Synthetic oligonucleotide
  Antisense strand to SEQ ID NO: 1131352
uuguccacaugaugucacc

SEQ ID NO: 1131354 - RNA, 19 nt, Artificial Sequence
  Description of Artificial Sequence: Synthetic oligonucleotide
  Sense strand starting at position 2463 of SEQ ID NO: 916111
uggagaucauuugagguca

SEQ ID NO: 1131355 - RNA, 19 nt, Artificial Sequence
  Description of Artificial Sequence: Synthetic oligonucleotide
  Antisense strand to SEQ ID NO: 1131354
ugaccucaaaugaucucca

SEQ ID NO: 1131356 - RNA, 19 nt, Artificial Sequence
  Description of Artificial Sequence: Synthetic oligonucleotide
  Sense strand starting at position 2481 of SEQ ID NO: 916111
agcagaggccacgauauua

SEQ ID NO: 1131357 - RNA, 19 nt, Artificial Sequence
  Description of Artificial Sequence: Synthetic oligonucleotide
  Antisense strand to SEQ ID NO: 1131356
uaauaucguggccucugcu

SEQ ID NO: 1131358 - RNA, 19 nt, Artificial Sequence
  Description of Artificial Sequence: Synthetic oligonucleotide
  Sense strand starting at position 2536 of SEQ ID NO: 916111
aaagcaggagccugaauau

SEQ ID NO: 1131359 - RNA, 19 nt, Artificial Sequence
  Description of Artificial Sequence: Synthetic oligonucleotide
  Antisense strand to SEQ ID NO: 1131358
auauucaggcuccugcuuu

SEQ ID NO: 1131360 - RNA, 19 nt, Artificial Sequence
  Description of Artificial Sequence: Synthetic oligonucleotide
  Sense strand starting at position 2582 of SEQ ID NO: 916111
uguguaauggcaggaaauc

SEQ ID NO: 1131361 - RNA, 19 nt, Artificial Sequence
  Description of Artificial Sequence: Synthetic oligonucleotide
  Antisense strand to SEQ ID NO: 1131360
gauuuccugccauuacaca

SEQ ID NO: 1131362 - RNA, 19 nt, Artificial Sequence
  Description of Artificial Sequence: Synthetic oligonucleotide
  Sense strand starting at position 2858 of SEQ ID NO: 916111
acgacccugaagugauauu

SEQ ID NO: 1131363 - RNA, 19 nt, Artificial Sequence
  Description of Artificial Sequence: Synthetic oligonucleotide
  Antisense strand to SEQ ID NO: 1131362
aauaucacuucagggucgu

SEQ ID NO: 1131364 - RNA, 19 nt, Artificial Sequence
  Description of Artificial Sequence: Synthetic oligonucleotide
  Sense strand starting at position 2868 of SEQ ID NO: 916111
agugauauuccgcaccacu

SEQ ID NO: 1131365 - RNA, 19 nt, Artificial Sequence
  Description of Artificial Sequence: Synthetic oligonucleotide
  Antisense strand to SEQ ID NO: 1131364
aguggugcggaauaucacu

SEQ ID NO: 1131366 - RNA, 19 nt, Artificial Sequence
  Description of Artificial Sequence: Synthetic oligonucleotide
  Sense strand starting at position 2887 of SEQ ID NO: 916111
uucuaaauccucuggguag

SEQ ID NO: 1131367 - RNA, 19 nt, Artificial Sequence
  Description of Artificial Sequence: Synthetic oligonucleotide
  Antisense strand to SEQ ID NO: 1131366
cuacccagaggauuuagaa

SEQ ID NO: 1131368 - RNA, 19 nt, Artificial Sequence
  Description of Artificial Sequence: Synthetic oligonucleotide
  Sense strand starting at position 3023 of SEQ ID NO: 916111
gacagaucuugcucuguag

SEQ ID NO: 1131369 - RNA, 19 nt, Artificial Sequence
  Description of Artificial Sequence: Synthetic oligonucleotide
  Antisense strand to SEQ ID NO: 1131368
cuacagagcaagaucuguc

SEQ ID NO: 1131370 - RNA, 19 nt, Artificial Sequence
  Description of Artificial Sequence: Synthetic oligonucleotide
  Sense strand starting at position 3461 of SEQ ID NO: 916111
ggaucagauaguuaggucu

SEQ ID NO: 1131371 - RNA, 19 nt, Artificial Sequence
  Description of Artificial Sequence: Synthetic oligonucleotide
  Antisense strand to SEQ ID NO: 1131370
agaccuaacuaucugaucc

SEQ ID NO: 1131372 - RNA, 19 nt, Artificial Sequence
  Description of Artificial Sequence: Synthetic oligonucleotide
  Sense strand starting at position 3615 of SEQ ID NO: 916111
agaauagucugaccugguu

SEQ ID NO: 1131373 - RNA, 19 nt, Artificial Sequence
  Description of Artificial Sequence: Synthetic oligonucleotide
  Antisense strand to SEQ ID NO: 1131372
aaccaggucagacuauucu

SEQ ID NO: 1131374 - RNA, 19 nt, Artificial Sequence
  Description of Artificial Sequence: Synthetic oligonucleotide
  Sense strand starting at position 3642 of SEQ ID NO: 916111
cugguuaauuauccacaga

SEQ ID NO: 1131375 - RNA, 19 nt, Artificial Sequence
  Description of Artificial Sequence: Synthetic oligonucleotide
  Antisense strand to SEQ ID NO: 1131374
ucuguggauaauuaaccag

SEQ ID NO: 1131376 - RNA, 19 nt, Artificial Sequence
  Description of Artificial Sequence: Synthetic oligonucleotide
  Sense strand starting at position 3938 of SEQ ID NO: 916111
ggccuagauuccuucucaa

SEQ ID NO: 1131377 - RNA, 19 nt, Artificial Sequence
  Description of Artificial Sequence: Synthetic oligonucleotide
  Antisense strand to SEQ ID NO: 1131376
uugagaaggaaucuaggcc

SEQ ID NO: 1131378 - RNA, 19 nt, Artificial Sequence
  Description of Artificial Sequence: Synthetic oligonucleotide
  Sense strand starting at position 346 of SEQ ID NO: 916112
acuggaauacugugcaaca

SEQ ID NO: 1131379 - RNA, 19 nt, Artificial Sequence
  Description of Artificial Sequence: Synthetic oligonucleotide
  Antisense strand to SEQ ID NO: 1131378
uguugcacaguauuccagu

SEQ ID NO: 1131380 - RNA, 19 nt, Artificial Sequence
  Description of Artificial Sequence: Synthetic oligonucleotide
  Sense strand starting at position 348 of SEQ ID NO: 916112
uggaauacugugcaacagu

SEQ ID NO: 1131381 - RNA, 19 nt, Artificial Sequence
  Description of Artificial Sequence: Synthetic oligonucleotide
  Antisense strand to SEQ ID NO: 1131380
acuguugcacaguauucca

SEQ ID NO: 1131382 - RNA, 19 nt, Artificial Sequence
  Description of Artificial Sequence: Synthetic oligonucleotide
  Sense strand starting at position 373 of SEQ ID NO: 916112
aauguuagcugacucagau

SEQ ID NO: 1131383 - RNA, 19 nt, Artificial Sequence
  Description of Artificial Sequence: Synthetic oligonucleotide
  Antisense strand to SEQ ID NO: 1131382
aucugagucagcuaacauu

SEQ ID NO: 1131384 - RNA, 19 nt, Artificial Sequence
  Description of Artificial Sequence: Synthetic oligonucleotide
  Sense strand starting at position 495 of SEQ ID NO: 916112
ugguaagaaugauucccuu

SEQ ID NO: 1131385 - RNA, 19 nt, Artificial Sequence
  Description of Artificial Sequence: Synthetic oligonucleotide
  Antisense strand to SEQ ID NO: 1131384
aagggaaucauucuuacca

SEQ ID NO: 1131386 - RNA, 19 nt, Artificial Sequence
  Description of Artificial Sequence: Synthetic oligonucleotide
  Sense strand starting at position 570 of SEQ ID NO: 916112
ugcguugugucgauuugua

SEQ ID NO: 1131387 - RNA, 19 nt, Artificial Sequence
  Description of Artificial Sequence: Synthetic oligonucleotide
  Antisense strand to SEQ ID NO: 1131386
uacaaaucgacacaacgca

SEQ ID NO: 1131388 - RNA, 19 nt, Artificial Sequence
  Description of Artificial Sequence: Synthetic oligonucleotide
  Sense strand starting at position 623 of SEQ ID NO: 916112
aaagacuuauuccugguga

SEQ ID NO: 1131389 - RNA, 19 nt, Artificial Sequence
  Description of Artificial Sequence: Synthetic oligonucleotide
  Antisense strand to SEQ ID NO: 1131388
ucaccaggaauaagucuuu

SEQ ID NO: 1131390 - RNA, 19 nt, Artificial Sequence
  Description of Artificial Sequence: Synthetic oligonucleotide
  Sense strand starting at position 625 of SEQ ID NO: 916112
agacuuauuccuggugaug

SEQ ID NO: 1131391 - RNA, 19 nt, Artificial Sequence
  Description of Artificial Sequence: Synthetic oligonucleotide
  Antisense strand to SEQ ID NO: 1131390
caucaccaggaauaagucu

SEQ ID NO: 1131392 - RNA, 19 nt, Artificial Sequence
  Description of Artificial Sequence: Synthetic oligonucleotide
  Sense strand starting at position 628 of SEQ ID NO: 916112
cuuauuccuggugauguuu

SEQ ID NO: 1131393 - RNA, 19 nt, Artificial Sequence
  Description of Artificial Sequence: Synthetic oligonucleotide
  Antisense strand to SEQ ID NO: 1131392
aaacaucaccaggaauaag

SEQ ID NO: 1131394 - RNA, 19 nt, Artificial Sequence
  Description of Artificial Sequence: Synthetic oligonucleotide
  Sense strand starting at position 773 of SEQ ID NO: 916112
aguugagaauccuugucuu

SEQ ID NO: 1131395 - RNA, 19 nt, Artificial Sequence
  Description of Artificial Sequence: Synthetic oligonucleotide
  Antisense strand to SEQ ID NO: 1131394
aagacaaggauucucaacu

SEQ ID NO: 1131396 - RNA, 19 nt, Artificial Sequence
  Description of Artificial Sequence: Synthetic oligonucleotide
  Sense strand starting at position 876 of SEQ ID NO: 916112
ugaggacuucaguggaauu

SEQ ID NO: 1131397 - RNA, 19 nt, Artificial Sequence
  Description of Artificial Sequence: Synthetic oligonucleotide
  Antisense strand to SEQ ID NO: 1131396
aauuccacugaaguccuca

SEQ ID NO: 1131398 - RNA, 19 nt, Artificial Sequence
  Description of Artificial Sequence: Synthetic oligonucleotide
  Sense strand starting at position 978 of SEQ ID NO: 916112
aagacagucugguuuccau

SEQ ID NO: 1131399 - RNA, 19 nt, Artificial Sequence
  Description of Artificial Sequence: Synthetic oligonucleotide
  Antisense strand to SEQ ID NO: 1131398
auggaaaccagacugucuu

SEQ ID NO: 1131400 - RNA, 19 nt, Artificial Sequence
  Description of Artificial Sequence: Synthetic oligonucleotide
  Sense strand starting at position 1032 of SEQ ID NO: 916112
ccauaagacuagucuacug

SEQ ID NO: 1131401 - RNA, 19 nt, Artificial Sequence
  Description of Artificial Sequence: Synthetic oligonucleotide
  Antisense strand to SEQ ID NO: 1131400
caguagacuagucuuaugg

SEQ ID NO: 1131402 - RNA, 19 nt, Artificial Sequence
  Description of Artificial Sequence: Synthetic oligonucleotide
  Sense strand starting at position 2419 of SEQ ID NO: 916112
agucuugccgccucuguaa

SEQ ID NO: 1131403 - RNA, 19 nt, Artificial Sequence
  Description of Artificial Sequence: Synthetic oligonucleotide
  Antisense strand to SEQ ID NO: 1131402
uuacagaggcggcaagacu

SEQ ID NO: 1131404 - RNA, 19 nt, Artificial Sequence
  Description of Artificial Sequence: Synthetic oligonucleotide
  Sense strand starting at position 2710 of SEQ ID NO: 916112
guuguaauggccugaagau

SEQ ID NO: 1131405 - RNA, 19 nt, Artificial Sequence
  Description of Artificial Sequence: Synthetic oligonucleotide
  Antisense strand to SEQ ID NO: 1131404
aucuucaggccauuacaac

SEQ ID NO: 1131406 - RNA, 19 nt, Artificial Sequence
  Description of Artificial Sequence: Synthetic oligonucleotide
  Sense strand starting at position 2711 of SEQ ID NO: 916112
uuguaauggccugaagaug

SEQ ID NO: 1131407 - RNA, 19 nt, Artificial Sequence
  Description of Artificial Sequence: Synthetic oligonucleotide
  Antisense strand to SEQ ID NO: 1131406
caucuucaggccauuacaa

SEQ ID NO: 1131408 - RNA, 19 nt, Artificial Sequence
  Description of Artificial Sequence: Synthetic oligonucleotide
  Sense strand starting at position 3151 of SEQ ID NO: 916112
ugccuuagucaacauauug

SEQ ID NO: 1131409 - RNA, 19 nt, Artificial Sequence
  Description of Artificial Sequence: Synthetic oligonucleotide
  Antisense strand to SEQ ID NO: 1131408
caauauguugacuaaggca

SEQ ID NO: 1131410 - RNA, 19 nt, Artificial Sequence
  Description of Artificial Sequence: Synthetic oligonucleotide
  Sense strand starting at position 3183 of SEQ ID NO: 916112
auccaagcucuguauuaag

SEQ ID NO: 1131411 - RNA, 19 nt, Artificial Sequence
  Description of Artificial Sequence: Synthetic oligonucleotide
  Antisense strand to SEQ ID NO: 1131410
cuuaauacagagcuuggau

SEQ ID NO: 1131412 - RNA, 19 nt, Artificial Sequence
  Description of Artificial Sequence: Synthetic oligonucleotide
  Sense strand starting at position 3258 of SEQ ID NO: 916112
ggagcuuccagucaaauga

SEQ ID NO: 1131413 - RNA, 19 nt, Artificial Sequence
  Description of Artificial Sequence: Synthetic oligonucleotide
  Antisense strand to SEQ ID NO: 1131412
ucauuugacuggaagcucc

SEQ ID NO: 1131414 - RNA, 19 nt, Artificial Sequence
  Description of Artificial Sequence: Synthetic oligonucleotide
  Sense strand starting at position 3369 of SEQ ID NO: 916112
guguaagggagugaauagu

SEQ ID NO: 1131415 - RNA, 19 nt, Artificial Sequence
  Description of Artificial Sequence: Synthetic oligonucleotide
  Antisense strand to SEQ ID NO: 1131414
acuauucacucccuuacac

SEQ ID NO: 1131416 - RNA, 19 nt, Artificial Sequence
  Description of Artificial Sequence: Synthetic oligonucleotide
  Sense strand starting at position 3377 of SEQ ID NO: 916112
gagugaauaguacggugaa

SEQ ID NO: 1131417 - RNA, 19 nt, Artificial Sequence
  Description of Artificial Sequence: Synthetic oligonucleotide
  Antisense strand to SEQ ID NO: 1131416
uucaccguacuauucacuc

SEQ ID NO: 1131418 - RNA, 19 nt, Artificial Sequence
  Description of Artificial Sequence: Synthetic oligonucleotide
  Sense strand starting at position 3471 of SEQ ID NO: 916112
gaugaauacgauuguccuu

SEQ ID NO: 1131419 - RNA, 19 nt, Artificial Sequence
  Description of Artificial Sequence: Synthetic oligonucleotide
  Antisense strand to SEQ ID NO: 1131418
aaggacaaucguauucauc

SEQ ID NO: 1131420 - RNA, 19 nt, Artificial Sequence
  Description of Artificial Sequence: Synthetic oligonucleotide
  Sense strand starting at position 3591 of SEQ ID NO: 916112
gacucugaaucuguugauu

SEQ ID NO: 1131421 - RNA, 19 nt, Artificial Sequence
  Description of Artificial Sequence: Synthetic oligonucleotide
  Antisense strand to SEQ ID NO: 1131420
aaucaacagauucagaguc

SEQ ID NO: 1131422 - RNA, 19 nt, Artificial Sequence
  Description of Artificial Sequence: Synthetic oligonucleotide
  Sense strand starting at position 3596 of SEQ ID NO: 916112
ugaaucuguugauugagga

SEQ ID NO: 1131423 - RNA, 19 nt, Artificial Sequence
  Description of Artificial Sequence: Synthetic oligonucleotide
  Antisense strand to SEQ ID NO: 1131422
uccucaaucaacagauuca

SEQ ID NO: 1131424 - RNA, 19 nt, Artificial Sequence
  Description of Artificial Sequence: Synthetic oligonucleotide
  Sense strand starting at position 3604 of SEQ ID NO: 916112
uugauugaggaaugugcaa

SEQ ID NO: 1131425 - RNA, 19 nt, Artificial Sequence
  Description of Artificial Sequence: Synthetic oligonucleotide
  Antisense strand to SEQ ID NO: 1131424
uugcacauuccucaaucaa

SEQ ID NO: 1131426 - RNA, 19 nt, Artificial Sequence
  Description of Artificial Sequence: Synthetic oligonucleotide
  Sense strand starting at position 3651 of SEQ ID NO: 916112
aguacuucugcuuggauag

SEQ ID NO: 1131427 - RNA, 19 nt, Artificial Sequence
  Description of Artificial Sequence: Synthetic oligonucleotide
  Antisense strand to SEQ ID NO: 1131426
cuauccaagcagaaguacu

SEQ ID NO: 1131428 - RNA, 19 nt, Artificial Sequence
  Description of Artificial Sequence: Synthetic oligonucleotide
  Sense strand starting at position 3652 of SEQ ID NO: 916112
guacuucugcuuggauaga

SEQ ID NO: 1131429 - RNA, 19 nt, Artificial Sequence
  Description of Artificial Sequence: Synthetic oligonucleotide
  Antisense strand to SEQ ID NO: 1131428
ucuauccaagcagaaguac

SEQ ID NO: 1131430 - RNA, 19 nt, Artificial Sequence
  Description of Artificial Sequence: Synthetic oligonucleotide
  Sense strand starting at position 3717 of SEQ ID NO: 916112
cgagaaggguguuuggaca

SEQ ID NO: 1131431 - RNA, 19 nt, Artificial Sequence
  Description of Artificial Sequence: Synthetic oligonucleotide
  Antisense strand to SEQ ID NO: 1131430
uguccaaacacccuucucg

SEQ ID NO: 1131432 - RNA, 19 nt, Artificial Sequence
  Description of Artificial Sequence: Synthetic oligonucleotide
  Sense strand starting at position 3806 of SEQ ID NO: 916112
uugauaguuacggaguaag

SEQ ID NO: 1131433 - RNA, 19 nt, Artificial Sequence
  Description of Artificial Sequence: Synthetic oligonucleotide
  Antisense strand to SEQ ID NO: 1131432
cuuacuccguaacuaucaa

SEQ ID NO: 1131434 - RNA, 19 nt, Artificial Sequence
  Description of Artificial Sequence: Synthetic oligonucleotide
  Sense strand starting at position 3838 of SEQ ID NO: 916112
gauaguuauggagguagua

SEQ ID NO: 1131435 - RNA, 19 nt, Artificial Sequence
  Description of Artificial Sequence: Synthetic oligonucleotide
  Antisense strand to SEQ ID NO: 1131434
uacuaccuccauaacuauc

SEQ ID NO: 1131436 - RNA, 19 nt, Artificial Sequence
  Description of Artificial Sequence: Synthetic oligonucleotide
  Sense strand starting at position 3840 of SEQ ID NO: 916112
uaguuauggagguaguauu

SEQ ID NO: 1131437 - RNA, 19 nt, Artificial Sequence
  Description of Artificial Sequence: Synthetic oligonucleotide
  Antisense strand to SEQ ID NO: 1131436
aauacuaccuccauaacua

SEQ ID NO: 1131438 - RNA, 19 nt, Artificial Sequence
  Description of Artificial Sequence: Synthetic oligonucleotide
  Sense strand starting at position 3852 of SEQ ID NO: 916112
uaguauugacagugauagg

SEQ ID NO: 1131439 - RNA, 19 nt, Artificial Sequence
  Description of Artificial Sequence: Synthetic oligonucleotide
  Antisense strand to SEQ ID NO: 1131438
ccuaucacugucaauacua

SEQ ID NO: 1131440 - RNA, 19 nt, Artificial Sequence
  Description of Artificial Sequence: Synthetic oligonucleotide
  Sense strand starting at position 3853 of SEQ ID NO: 916112
aguauugacagugauaggu

SEQ ID NO: 1131441 - RNA, 19 nt, Artificial Sequence
  Description of Artificial Sequence: Synthetic oligonucleotide
  Antisense strand to SEQ ID NO: 1131440
accuaucacugucaauacu

SEQ ID NO: 1131442 - RNA, 19 nt, Artificial Sequence
  Description of Artificial Sequence: Synthetic oligonucleotide
  Sense strand starting at position 3929 of SEQ ID NO: 916112
uaaguuaagcagcagagua

SEQ ID NO: 1131443 - RNA, 19 nt, Artificial Sequence
  Description of Artificial Sequence: Synthetic oligonucleotide
  Antisense strand to SEQ ID NO: 1131442
uacucugcugcuuaacuua

SEQ ID NO: 1131444 - RNA, 19 nt, Artificial Sequence
  Description of Artificial Sequence: Synthetic oligonucleotide
  Sense strand starting at position 3945 of SEQ ID NO: 916112
guagcaucagaucaguguu

SEQ ID NO: 1131445 - RNA, 19 nt, Artificial Sequence
  Description of Artificial Sequence: Synthetic oligonucleotide
  Antisense strand to SEQ ID NO: 1131444
aacacugaucugaugcuac

SEQ ID NO: 1131446 - RNA, 19 nt, Artificial Sequence
  Description of Artificial Sequence: Synthetic oligonucleotide
  Sense strand starting at position 3947 of SEQ ID NO: 916112
agcaucagaucaguguuau

SEQ ID NO: 1131447 - RNA, 19 nt, Artificial Sequence
  Description of Artificial Sequence: Synthetic oligonucleotide
  Antisense strand to SEQ ID NO: 1131446
auaacacugaucugaugcu

SEQ ID NO: 1131448 - RNA, 19 nt, Artificial Sequence
  Description of Artificial Sequence: Synthetic oligonucleotide
  Sense strand starting at position 3957 of SEQ ID NO: 916112
caguguuauguagaagguc

SEQ ID NO: 1131449 - RNA, 19 nt, Artificial Sequence
  Description of Artificial Sequence: Synthetic oligonucleotide
  Antisense strand to SEQ ID NO: 1131448
gaccuucuacauaacacug

SEQ ID NO: 1131450 - RNA, 19 nt, Artificial Sequence
  Description of Artificial Sequence: Synthetic oligonucleotide
  Sense strand starting at position 3960 of SEQ ID NO: 916112
uguuauguagaaggucauu

SEQ ID NO: 1131451 - RNA, 19 nt, Artificial Sequence
  Description of Artificial Sequence: Synthetic oligonucleotide
  Antisense strand to SEQ ID NO: 1131450
aaugaccuucuacauaaca

SEQ ID NO: 1131452 - RNA, 19 nt, Artificial Sequence
  Description of Artificial Sequence: Synthetic oligonucleotide
  Sense strand starting at position 3963 of SEQ ID NO: 916112
uauguagaaggucauuauu

SEQ ID NO: 1131453 - RNA, 19 nt, Artificial Sequence
  Description of Artificial Sequence: Synthetic oligonucleotide
  Antisense strand to SEQ ID NO: 1131452
aauaaugaccuucuacaua

SEQ ID NO: 1131454 - RNA, 19 nt, Artificial Sequence
  Description of Artificial Sequence: Synthetic oligonucleotide
  Sense strand starting at position 3965 of SEQ ID NO: 916112
uguagaaggucauuauugu

SEQ ID NO: 1131455 - RNA, 19 nt, Artificial Sequence
  Description of Artificial Sequence: Synthetic oligonucleotide
  Antisense strand to SEQ ID NO: 1131454
acaauaaugaccuucuaca

SEQ ID NO: 1131456 - RNA, 19 nt, Artificial Sequence
  Description of Artificial Sequence: Synthetic oligonucleotide
  Sense strand starting at position 3966 of SEQ ID NO: 916112
guagaaggucauuauugug

SEQ ID NO: 1131457 - RNA, 19 nt, Artificial Sequence
  Description of Artificial Sequence: Synthetic oligonucleotide
  Antisense strand to SEQ ID NO: 1131456
cacaauaaugaccuucuac

SEQ ID NO: 1131458 - RNA, 19 nt, Artificial Sequence
  Description of Artificial Sequence: Synthetic oligonucleotide
  Sense strand starting at position 1235 of SEQ ID NO: 916113
guugcccucuuugcagaaa

SEQ ID NO: 1131459 - RNA, 19 nt, Artificial Sequence
  Description of Artificial Sequence: Synthetic oligonucleotide
  Antisense strand to SEQ ID NO: 1131458
uuucugcaaagagggcaac

SEQ ID NO: 1131460 - RNA, 19 nt, Artificial Sequence
  Description of Artificial Sequence: Synthetic oligonucleotide
  Sense strand starting at position 1236 of SEQ ID NO: 916113
uugcccucuuugcagaaau

SEQ ID NO: 1131461 - RNA, 19 nt, Artificial Sequence
  Description of Artificial Sequence: Synthetic oligonucleotide
  Antisense strand to SEQ ID NO: 1131460
auuucugcaaagagggcaa

SEQ ID NO: 1131462 - RNA, 19 nt, Artificial Sequence
  Description of Artificial Sequence: Synthetic oligonucleotide
  Sense strand starting at position 1469 of SEQ ID NO: 916113
ucaagugauuuacaacaag

SEQ ID NO: 1131463 - RNA, 19 nt, Artificial Sequence
  Description of Artificial Sequence: Synthetic oligonucleotide
  Antisense strand to SEQ ID NO: 1131462
cuuguuguaaaucacuuga

SEQ ID NO: 1131464 - RNA, 19 nt, Artificial Sequence
  Description of Artificial Sequence: Synthetic oligonucleotide
  Sense strand starting at position 1627 of SEQ ID NO: 916113
gccuaaaucccagggcuaa

SEQ ID NO: 1131465 - RNA, 19 nt, Artificial Sequence
  Description of Artificial Sequence: Synthetic oligonucleotide
  Antisense strand to SEQ ID NO: 1131464
uuagcccugggauuuaggc

SEQ ID NO: 1131466 - RNA, 19 nt, Artificial Sequence
  Description of Artificial Sequence: Synthetic oligonucleotide
  Sense strand starting at position 1628 of SEQ ID NO: 916113
ccuaaaucccagggcuaaa

SEQ ID NO: 1131467 - RNA, 19 nt, Artificial Sequence
  Description of Artificial Sequence: Synthetic oligonucleotide
  Antisense strand to SEQ ID NO: 1131466
uuuagcccugggauuuagg

SEQ ID NO: 1131468 - RNA, 19 nt, Artificial Sequence
  Description of Artificial Sequence: Synthetic oligonucleotide
  Sense strand starting at position 1673 of SEQ ID NO: 916113
aggaguaaaucuuugugag

SEQ ID NO: 1131469 - RNA, 19 nt, Artificial Sequence
  Description of Artificial Sequence: Synthetic oligonucleotide
  Antisense strand to SEQ ID NO: 1131468
cucacaaagauuuacuccu

SEQ ID NO: 1131470 - RNA, 19 nt, Artificial Sequence
  Description of Artificial Sequence: Synthetic oligonucleotide
  Sense strand starting at position 1674 of SEQ ID NO: 916113
ggaguaaaucuuugugagc

SEQ ID NO: 1131471 - RNA, 19 nt, Artificial Sequence
  Description of Artificial Sequence: Synthetic oligonucleotide
  Antisense strand to SEQ ID NO: 1131470
gcucacaaagauuuacucc

SEQ ID NO: 1131472 - RNA, 19 nt, Artificial Sequence
  Description of Artificial Sequence: Synthetic oligonucleotide
  Sense strand starting at position 1675 of SEQ ID NO: 916113
gaguaaaucuuugugagcu

SEQ ID NO: 1131473 - RNA, 19 nt, Artificial Sequence
  Description of Artificial Sequence: Synthetic oligonucleotide
  Antisense strand to SEQ ID NO: 1131472
agcucacaaagauuuacuc

SEQ ID NO: 1131474 - RNA, 19 nt, Artificial Sequence
  Description of Artificial Sequence: Synthetic oligonucleotide
  Sense strand starting at position 1676 of SEQ ID NO: 916113
aguaaaucuuugugagcuu

SEQ ID NO: 1131475 - RNA, 19 nt, Artificial Sequence
  Description of Artificial Sequence: Synthetic oligonucleotide
  Antisense strand to SEQ ID NO: 1131474
aagcucacaaagauuuacu

SEQ ID NO: 1131476 - RNA, 19 nt, Artificial Sequence
  Description of Artificial Sequence: Synthetic oligonucleotide
  Sense strand starting at position 1679 of SEQ ID NO: 916113
aaaucuuugugagcuugga

SEQ ID NO: 1131477 - RNA, 19 nt, Artificial Sequence
  Description of Artificial Sequence: Synthetic oligonucleotide
  Antisense strand to SEQ ID NO: 1131476
uccaagcucacaaagauuu

SEQ ID NO: 1131478 - RNA, 19 nt, Artificial Sequence
  Description of Artificial Sequence: Synthetic oligonucleotide
  Sense strand starting at position 1683 of SEQ ID NO: 916113
cuuugugagcuuggauuag

SEQ ID NO: 1131479 - RNA, 19 nt, Artificial Sequence
  Description of Artificial Sequence: Synthetic oligonucleotide
  Antisense strand to SEQ ID NO: 1131478
cuaauccaagcucacaaag

SEQ ID NO: 1131480 - RNA, 19 nt, Artificial Sequence
  Description of Artificial Sequence: Synthetic oligonucleotide
  Sense strand starting at position 1687 of SEQ ID NO: 916113
gugagcuuggauuagguua

SEQ ID NO: 1131481 - RNA, 19 nt, Artificial Sequence
  Description of Artificial Sequence: Synthetic oligonucleotide
  Antisense strand to SEQ ID NO: 1131480
uaaccuaauccaagcucac

SEQ ID NO: 1131482 - RNA, 19 nt, Artificial Sequence
  Description of Artificial Sequence: Synthetic oligonucleotide
  Sense strand starting at position 1689 of SEQ ID NO: 916113
gagcuuggauuagguuaaa

SEQ ID NO: 1131483 - RNA, 19 nt, Artificial Sequence
  Description of Artificial Sequence: Synthetic oligonucleotide
  Antisense strand to SEQ ID NO: 1131482
uuuaaccuaauccaagcuc

SEQ ID NO: 1131484 - RNA, 19 nt, Artificial Sequence
  Description of Artificial Sequence: Synthetic oligonucleotide
  Sense strand starting at position 1868 of SEQ ID NO: 916113
uuuaauguggcauauacaa

SEQ ID NO: 1131485 - RNA, 19 nt, Artificial Sequence
  Description of Artificial Sequence: Synthetic oligonucleotide
  Antisense strand to SEQ ID NO: 1131484
uuguauaugccacauuaaa

SEQ ID NO: 1131486 - RNA, 19 nt, Artificial Sequence
  Description of Artificial Sequence: Synthetic oligonucleotide
  Sense strand starting at position 2025 of SEQ ID NO: 916113
gcuaaauacugaguccaca

SEQ ID NO: 1131487 - RNA, 19 nt, Artificial Sequence
  Description of Artificial Sequence: Synthetic oligonucleotide
  Antisense strand to SEQ ID NO: 1131486
uguggacucaguauuuagc

SEQ ID NO: 1131488 - RNA, 19 nt, Artificial Sequence
  Description of Artificial Sequence: Synthetic oligonucleotide
  Sense strand starting at position 2047 of SEQ ID NO: 916113
acagaaagaugggaacaaa

SEQ ID NO: 1131489 - RNA, 19 nt, Artificial Sequence
  Description of Artificial Sequence: Synthetic oligonucleotide
  Antisense strand to SEQ ID NO: 1131488
uuuguucccaucuuucugu

SEQ ID NO: 1131490 - RNA, 19 nt, Artificial Sequence
  Description of Artificial Sequence: Synthetic oligonucleotide
  Sense strand starting at position 2665 of SEQ ID NO: 916113
agagaugugucucuaccaa

SEQ ID NO: 1131491 - RNA, 19 nt, Artificial Sequence
  Description of Artificial Sequence: Synthetic oligonucleotide
  Antisense strand to SEQ ID NO: 1131490
uugguagagacacaucucu

SEQ ID NO: 1131492 - RNA, 19 nt, Artificial Sequence
  Description of Artificial Sequence: Synthetic oligonucleotide
  Sense strand starting at position 3210 of SEQ ID NO: 916113
cguugacaaggaugugaau

SEQ ID NO: 1131493 - RNA, 19 nt, Artificial Sequence
  Description of Artificial Sequence: Synthetic oligonucleotide
  Antisense strand to SEQ ID NO: 1131492
auucacauccuugucaacg

SEQ ID NO: 1131494 - RNA, 19 nt, Artificial Sequence
  Description of Artificial Sequence: Synthetic oligonucleotide
  Sense strand starting at position 3213 of SEQ ID NO: 916113
ugacaaggaugugaauaaa

SEQ ID NO: 1131495 - RNA, 19 nt, Artificial Sequence
  Description of Artificial Sequence: Synthetic oligonucleotide
  Antisense strand to SEQ ID NO: 1131494
uuuauucacauccuuguca

SEQ ID NO: 1131496 - RNA, 19 nt, Artificial Sequence
  Description of Artificial Sequence: Synthetic oligonucleotide
  Sense strand starting at position 3622 of SEQ ID NO: 916113
aggucagaguuugauacca

SEQ ID NO: 1131497 - RNA, 19 nt, Artificial Sequence
  Description of Artificial Sequence: Synthetic oligonucleotide
  Antisense strand to SEQ ID NO: 1131496
ugguaucaaacucugaccu

SEQ ID NO: 1131498 - RNA, 19 nt, Artificial Sequence
  Description of Artificial Sequence: Synthetic oligonucleotide
  Sense strand starting at position 3964 of SEQ ID NO: 916113
gguaaugaguuguuguuug

SEQ ID NO: 1131499 - RNA, 19 nt, Artificial Sequence
  Description of Artificial Sequence: Synthetic oligonucleotide
  Antisense strand to SEQ ID NO: 1131498
caaacaacaacucauuacc

SEQ ID NO: 1131500 - RNA, 19 nt, Artificial Sequence
  Description of Artificial Sequence: Synthetic oligonucleotide
  Sense strand starting at position 3968 of SEQ ID NO: 916113
augaguuguuguuugauga

SEQ ID NO: 1131501 - RNA, 19 nt, Artificial Sequence
  Description of Artificial Sequence: Synthetic oligonucleotide
  Antisense strand to SEQ ID NO: 1131500
ucaucaaacaacaacucau

SEQ ID NO: 1131502 - RNA, 19 nt, Artificial Sequence
  Description of Artificial Sequence: Synthetic oligonucleotide
  Sense strand starting at position 3969 of SEQ ID NO: 916113
ugaguuguuguuugaugag

SEQ ID NO: 1131503 - RNA, 19 nt, Artificial Sequence
  Description of Artificial Sequence: Synthetic oligonucleotide
  Antisense strand to SEQ ID NO: 1131502
cucaucaaacaacaacuca

SEQ ID NO: 1131504 - RNA, 19 nt, Artificial Sequence
  Description of Artificial Sequence: Synthetic oligonucleotide
  Sense strand starting at position 3972 of SEQ ID NO: 916113
guuguuguuugaugaguau

SEQ ID NO: 1131505 - RNA, 19 nt, Artificial Sequence
  Description of Artificial Sequence: Synthetic oligonucleotide
  Antisense strand to SEQ ID NO: 1131504
auacucaucaaacaacaac

SEQ ID NO: 1131506 - RNA, 19 nt, Artificial Sequence
  Description of Artificial Sequence: Synthetic oligonucleotide
  Sense strand starting at position 3975 of SEQ ID NO: 916113
guuguuugaugaguaugga

SEQ ID NO: 1131507 - RNA, 19 nt, Artificial Sequence
  Description of Artificial Sequence: Synthetic oligonucleotide
  Antisense strand to SEQ ID NO: 1131506
uccauacucaucaaacaac

SEQ ID NO: 1131508 - RNA, 19 nt, Artificial Sequence
  Description of Artificial Sequence: Synthetic oligonucleotide
  Sense strand starting at position 3978 of SEQ ID NO: 916113
guuugaugaguauggaguu

SEQ ID NO: 1131509 - RNA, 19 nt, Artificial Sequence
  Description of Artificial Sequence: Synthetic oligonucleotide
  Antisense strand to SEQ ID NO: 1131508
aacuccauacucaucaaac

SEQ ID NO: 1131510 - RNA, 19 nt, Artificial Sequence
  Description of Artificial Sequence: Synthetic oligonucleotide
  Sense strand starting at position 246 of SEQ ID NO: 916114
acucuuauugcccaggaaa

SEQ ID NO: 1131511 - RNA, 19 nt, Artificial Sequence
  Description of Artificial Sequence: Synthetic oligonucleotide
  Antisense strand to SEQ ID NO: 1131510
uuuccugggcaauaagagu

SEQ ID NO: 1131512 - RNA, 19 nt, Artificial Sequence
  Description of Artificial Sequence: Synthetic oligonucleotide
  Sense strand starting at position 609 of SEQ ID NO: 916114
acuggaauacugugcaaca

SEQ ID NO: 1131513 - RNA, 19 nt, Artificial Sequence
  Description of Artificial Sequence: Synthetic oligonucleotide
  Antisense strand to SEQ ID NO: 1131512
uguugcacaguauuccagu

SEQ ID NO: 1131514 - RNA, 19 nt, Artificial Sequence
  Description of Artificial Sequence: Synthetic oligonucleotide
  Sense strand starting at position 611 of SEQ ID NO: 916114
uggaauacugugcaacagu

SEQ ID NO: 1131515 - RNA, 19 nt, Artificial Sequence
  Description of Artificial Sequence: Synthetic oligonucleotide
  Antisense strand to SEQ ID NO: 1131514
acuguugcacaguauucca

SEQ ID NO: 1131516 - RNA, 19 nt, Artificial Sequence
  Description of Artificial Sequence: Synthetic oligonucleotide
  Sense strand starting at position 636 of SEQ ID NO: 916114
aauguuagcugacucagau

SEQ ID NO: 1131517 - RNA, 19 nt, Artificial Sequence
  Description of Artificial Sequence: Synthetic oligonucleotide
  Antisense strand to SEQ ID NO: 1131516
aucugagucagcuaacauu

SEQ ID NO: 1131518 - RNA, 19 nt, Artificial Sequence
  Description of Artificial Sequence: Synthetic oligonucleotide
  Sense strand starting at position 665 of SEQ ID NO: 916114
cacuguauggcgcauuaca

SEQ ID NO: 1131519 - RNA, 19 nt, Artificial Sequence
  Description of Artificial Sequence: Synthetic oligonucleotide
  Antisense strand to SEQ ID NO: 1131518
uguaaugcgccauacagug

SEQ ID NO: 1131520 - RNA, 19 nt, Artificial Sequence
  Description of Artificial Sequence: Synthetic oligonucleotide
  Sense strand starting at position 749 of SEQ ID NO: 916114
auaccaaacugguaagaau

SEQ ID NO: 1131521 - RNA, 19 nt, Artificial Sequence
  Description of Artificial Sequence: Synthetic oligonucleotide
  Antisense strand to SEQ ID NO: 1131520
auucuuaccaguuugguau

SEQ ID NO: 1131522 - RNA, 19 nt, Artificial Sequence
  Description of Artificial Sequence: Synthetic oligonucleotide
  Sense strand starting at position 758 of SEQ ID NO: 916114
ugguaagaaugauucccuu

SEQ ID NO: 1131523 - RNA, 19 nt, Artificial Sequence
  Description of Artificial Sequence: Synthetic oligonucleotide
  Antisense strand to SEQ ID NO: 1131522
aagggaaucauucuuacca

SEQ ID NO: 1131524 - RNA, 19 nt, Artificial Sequence
  Description of Artificial Sequence: Synthetic oligonucleotide
  Sense strand starting at position 832 of SEQ ID NO: 916114
uugcguugugucgauuugu

SEQ ID NO: 1131525 - RNA, 19 nt, Artificial Sequence
  Description of Artificial Sequence: Synthetic oligonucleotide
  Antisense strand to SEQ ID NO: 1131524
acaaaucgacacaacgcaa

SEQ ID NO: 1131526 - RNA, 19 nt, Artificial Sequence
  Description of Artificial Sequence: Synthetic oligonucleotide
  Sense strand starting at position 833 of SEQ ID NO: 916114
ugcguugugucgauuugua

SEQ ID NO: 1131527 - RNA, 19 nt, Artificial Sequence
  Description of Artificial Sequence: Synthetic oligonucleotide
  Antisense strand to SEQ ID NO: 1131526
uacaaaucgacacaacgca

SEQ ID NO: 1131528 - RNA, 19 nt, Artificial Sequence
  Description of Artificial Sequence: Synthetic oligonucleotide
  Sense strand starting at position 886 of SEQ ID NO: 916114
aaagacuuauuccugguga

SEQ ID NO: 1131529 - RNA, 19 nt, Artificial Sequence
  Description of Artificial Sequence: Synthetic oligonucleotide
  Antisense strand to SEQ ID NO: 1131528
ucaccaggaauaagucuuu

SEQ ID NO: 1131530 - RNA, 19 nt, Artificial Sequence
  Description of Artificial Sequence: Synthetic oligonucleotide
  Sense strand starting at position 888 of SEQ ID NO: 916114
agacuuauuccuggugaug

SEQ ID NO: 1131531 - RNA, 19 nt, Artificial Sequence
  Description of Artificial Sequence: Synthetic oligonucleotide
  Antisense strand to SEQ ID NO: 1131530
caucaccaggaauaagucu

SEQ ID NO: 1131532 - RNA, 19 nt, Artificial Sequence
  Description of Artificial Sequence: Synthetic oligonucleotide
  Sense strand starting at position 891 of SEQ ID NO: 916114
cuuauuccuggugauguuu

SEQ ID NO: 1131533 - RNA, 19 nt, Artificial Sequence
  Description of Artificial Sequence: Synthetic oligonucleotide
  Antisense strand to SEQ ID NO: 1131532
aaacaucaccaggaauaag

SEQ ID NO: 1131534 - RNA, 19 nt, Artificial Sequence
  Description of Artificial Sequence: Synthetic oligonucleotide
  Sense strand starting at position 899 of SEQ ID NO: 916114
uggugauguuucuuuaucu

SEQ ID NO: 1131535 - RNA, 19 nt, Artificial Sequence
  Description of Artificial Sequence: Synthetic oligonucleotide
  Antisense strand to SEQ ID NO: 1131534
agauaaagaaacaucacca

SEQ ID NO: 1131536 - RNA, 19 nt, Artificial Sequence
  Description of Artificial Sequence: Synthetic oligonucleotide
  Sense strand starting at position 900 of SEQ ID NO: 916114
ggugauguuucuuuaucuc

SEQ ID NO: 1131537 - RNA, 19 nt, Artificial Sequence
  Description of Artificial Sequence: Synthetic oligonucleotide
  Antisense strand to SEQ ID NO: 1131536
gagauaaagaaacaucacc

SEQ ID NO: 1131538 - RNA, 19 nt, Artificial Sequence
  Description of Artificial Sequence: Synthetic oligonucleotide
  Sense strand starting at position 1036 of SEQ ID NO: 916114
aguugagaauccuugucuu

SEQ ID NO: 1131539 - RNA, 19 nt, Artificial Sequence
  Description of Artificial Sequence: Synthetic oligonucleotide
  Antisense strand to SEQ ID NO: 1131538
aagacaaggauucucaacu

SEQ ID NO: 1131540 - RNA, 19 nt, Artificial Sequence
  Description of Artificial Sequence: Synthetic oligonucleotide
  Sense strand starting at position 1139 of SEQ ID NO: 916114
ugaggacuucaguggaauu

SEQ ID NO: 1131541 - RNA, 19 nt, Artificial Sequence
  Description of Artificial Sequence: Synthetic oligonucleotide
  Antisense strand to SEQ ID NO: 1131540
aauuccacugaaguccuca

SEQ ID NO: 1131542 - RNA, 19 nt, Artificial Sequence
  Description of Artificial Sequence: Synthetic oligonucleotide
  Sense strand starting at position 1241 of SEQ ID NO: 916114
aagacagucugguuuccau

SEQ ID NO: 1131543 - RNA, 19 nt, Artificial Sequence
  Description of Artificial Sequence: Synthetic oligonucleotide
  Antisense strand to SEQ ID NO: 1131542
auggaaaccagacugucuu

SEQ ID NO: 1131544 - RNA, 19 nt, Artificial Sequence
  Description of Artificial Sequence: Synthetic oligonucleotide
  Sense strand starting at position 1295 of SEQ ID NO: 916114
ccauaagacuagucuacug

SEQ ID NO: 1131545 - RNA, 19 nt, Artificial Sequence
  Description of Artificial Sequence: Synthetic oligonucleotide
  Antisense strand to SEQ ID NO: 1131544
caguagacuagucuuaugg

SEQ ID NO: 1131546 - RNA, 19 nt, Artificial Sequence
  Description of Artificial Sequence: Synthetic oligonucleotide
  Sense strand starting at position 2682 of SEQ ID NO: 916114
agucuugccgccucuguaa

SEQ ID NO: 1131547 - RNA, 19 nt, Artificial Sequence
  Description of Artificial Sequence: Synthetic oligonucleotide
  Antisense strand to SEQ ID NO: 1131546
uuacagaggcggcaagacu

SEQ ID NO: 1131548 - RNA, 19 nt, Artificial Sequence
  Description of Artificial Sequence: Synthetic oligonucleotide
  Sense strand starting at position 2801 of SEQ ID NO: 916114
uuggcagaguuccuccaua

SEQ ID NO: 1131549 - RNA, 19 nt, Artificial Sequence
  Description of Artificial Sequence: Synthetic oligonucleotide
  Antisense strand to SEQ ID NO: 1131548
uauggaggaacucugccaa

SEQ ID NO: 1131550 - RNA, 19 nt, Artificial Sequence
  Description of Artificial Sequence: Synthetic oligonucleotide
  Sense strand starting at position 2973 of SEQ ID NO: 916114
guuguaauggccugaagau

SEQ ID NO: 1131551 - RNA, 19 nt, Artificial Sequence
  Description of Artificial Sequence: Synthetic oligonucleotide
  Antisense strand to SEQ ID NO: 1131550
aucuucaggccauuacaac

SEQ ID NO: 1131552 - RNA, 19 nt, Artificial Sequence
  Description of Artificial Sequence: Synthetic oligonucleotide
  Sense strand starting at position 2974 of SEQ ID NO: 916114
uuguaauggccugaagaug

SEQ ID NO: 1131553 - RNA, 19 nt, Artificial Sequence
  Description of Artificial Sequence: Synthetic oligonucleotide
  Antisense strand to SEQ ID NO: 1131552
caucuucaggccauuacaa

SEQ ID NO: 1131554 - RNA, 19 nt, Artificial Sequence
  Description of Artificial Sequence: Synthetic oligonucleotide
  Sense strand starting at position 3414 of SEQ ID NO: 916114
ugccuuagucaacauauug

SEQ ID NO: 1131555 - RNA, 19 nt, Artificial Sequence
  Description of Artificial Sequence: Synthetic oligonucleotide
  Antisense strand to SEQ ID NO: 1131554
caauauguugacuaaggca

SEQ ID NO: 1131556 - RNA, 19 nt, Artificial Sequence
  Description of Artificial Sequence: Synthetic oligonucleotide
  Sense strand starting at position 3444 of SEQ ID NO: 916114
ugauccaagcucuguauua

SEQ ID NO: 1131557 - RNA, 19 nt, Artificial Sequence
  Description of Artificial Sequence: Synthetic oligonucleotide
  Antisense strand to SEQ ID NO: 1131556
uaauacagagcuuggauca

SEQ ID NO: 1131558 - RNA, 19 nt, Artificial Sequence
  Description of Artificial Sequence: Synthetic oligonucleotide
  Sense strand starting at position 3446 of SEQ ID NO: 916114
auccaagcucuguauuaag

SEQ ID NO: 1131559 - RNA, 19 nt, Artificial Sequence
  Description of Artificial Sequence: Synthetic oligonucleotide
  Antisense strand to SEQ ID NO: 1131558
cuuaauacagagcuuggau

SEQ ID NO: 1131560 - RNA, 19 nt, Artificial Sequence
  Description of Artificial Sequence: Synthetic oligonucleotide
  Sense strand starting at position 3521 of SEQ ID NO: 916114
ggagcuuccagucaaauga

SEQ ID NO: 1131561 - RNA, 19 nt, Artificial Sequence
  Description of Artificial Sequence: Synthetic oligonucleotide
  Antisense strand to SEQ ID NO: 1131560
ucauuugacuggaagcucc

SEQ ID NO: 1131562 - RNA, 19 nt, Artificial Sequence
  Description of Artificial Sequence: Synthetic oligonucleotide
  Sense strand starting at position 3602 of SEQ ID NO: 916114
guuuacauuugguacauua

SEQ ID NO: 1131563 - RNA, 19 nt, Artificial Sequence
  Description of Artificial Sequence: Synthetic oligonucleotide
  Antisense strand to SEQ ID NO: 1131562
uaauguaccaaauguaaac

SEQ ID NO: 1131564 - RNA, 19 nt, Artificial Sequence
  Description of Artificial Sequence: Synthetic oligonucleotide
  Sense strand starting at position 3632 of SEQ ID NO: 916114
guguaagggagugaauagu

SEQ ID NO: 1131565 - RNA, 19 nt, Artificial Sequence
  Description of Artificial Sequence: Synthetic oligonucleotide
  Antisense strand to SEQ ID NO: 1131564
acuauucacucccuuacac

SEQ ID NO: 1131566 - RNA, 19 nt, Artificial Sequence
  Description of Artificial Sequence: Synthetic oligonucleotide
  Sense strand starting at position 3640 of SEQ ID NO: 916114
gagugaauaguacggugaa

SEQ ID NO: 1131567 - RNA, 19 nt, Artificial Sequence
  Description of Artificial Sequence: Synthetic oligonucleotide
  Antisense strand to SEQ ID NO: 1131566
uucaccguacuauucacuc

SEQ ID NO: 1131568 - RNA, 19 nt, Artificial Sequence
  Description of Artificial Sequence: Synthetic oligonucleotide
  Sense strand starting at position 3680 of SEQ ID NO: 916114
acaggaauuuauugaguuc

SEQ ID NO: 1131569 - RNA, 19 nt, Artificial Sequence
  Description of Artificial Sequence: Synthetic oligonucleotide
  Antisense strand to SEQ ID NO: 1131568
gaacucaauaaauuccugu

SEQ ID NO: 1131570 - RNA, 19 nt, Artificial Sequence
  Description of Artificial Sequence: Synthetic oligonucleotide
  Sense strand starting at position 3711 of SEQ ID NO: 916114
aggcauugugcugggaaua

SEQ ID NO: 1131571 - RNA, 19 nt, Artificial Sequence
  Description of Artificial Sequence: Synthetic oligonucleotide
  Antisense strand to SEQ ID NO: 1131570
uauucccagcacaaugccu

SEQ ID NO: 1131572 - RNA, 19 nt, Artificial Sequence
  Description of Artificial Sequence: Synthetic oligonucleotide
  Sense strand starting at position 3712 of SEQ ID NO: 916114
ggcauugugcugggaauac

SEQ ID NO: 1131573 - RNA, 19 nt, Artificial Sequence
  Description of Artificial Sequence: Synthetic oligonucleotide
  Antisense strand to SEQ ID NO: 1131572
guauucccagcacaaugcc

SEQ ID NO: 1131574 - RNA, 19 nt, Artificial Sequence
  Description of Artificial Sequence: Synthetic oligonucleotide
  Sense strand starting at position 3734 of SEQ ID NO: 916114
gaugaauacgauuguccuu

SEQ ID NO: 1131575 - RNA, 19 nt, Artificial Sequence
  Description of Artificial Sequence: Synthetic oligonucleotide
  Antisense strand to SEQ ID NO: 1131574
aaggacaaucguauucauc

SEQ ID NO: 1131576 - RNA, 19 nt, Artificial Sequence
  Description of Artificial Sequence: Synthetic oligonucleotide
  Sense strand starting at position 3854 of SEQ ID NO: 916114
gacucugaaucuguugauu

SEQ ID NO: 1131577 - RNA, 19 nt, Artificial Sequence
  Description of Artificial Sequence: Synthetic oligonucleotide
  Antisense strand to SEQ ID NO: 1131576
aaucaacagauucagaguc

SEQ ID NO: 1131578 - RNA, 19 nt, Artificial Sequence
  Description of Artificial Sequence: Synthetic oligonucleotide
  Sense strand starting at position 3859 of SEQ ID NO: 916114
ugaaucuguugauugagga

SEQ ID NO: 1131579 - RNA, 19 nt, Artificial Sequence
  Description of Artificial Sequence: Synthetic oligonucleotide
  Antisense strand to SEQ ID NO: 1131578
uccucaaucaacagauuca

SEQ ID NO: 1131580 - RNA, 19 nt, Artificial Sequence
  Description of Artificial Sequence: Synthetic oligonucleotide
  Sense strand starting at position 3867 of SEQ ID NO: 916114
uugauugaggaaugugcaa

SEQ ID NO: 1131581 - RNA, 19 nt, Artificial Sequence
  Description of Artificial Sequence: Synthetic oligonucleotide
  Antisense strand to SEQ ID NO: 1131580
uugcacauuccucaaucaa

SEQ ID NO: 1131582 - RNA, 19 nt, Artificial Sequence
  Description of Artificial Sequence: Synthetic oligonucleotide
  Sense strand starting at position 3913 of SEQ ID NO: 916114
caguacuucugcuuggaua

SEQ ID NO: 1131583 - RNA, 19 nt, Artificial Sequence
  Description of Artificial Sequence: Synthetic oligonucleotide
  Antisense strand to SEQ ID NO: 1131582
uauccaagcagaaguacug

SEQ ID NO: 1131584 - RNA, 19 nt, Artificial Sequence
  Description of Artificial Sequence: Synthetic oligonucleotide
  Sense strand starting at position 3914 of SEQ ID NO: 916114
aguacuucugcuuggauag

SEQ ID NO: 1131585 - RNA, 19 nt, Artificial Sequence
  Description of Artificial Sequence: Synthetic oligonucleotide
  Antisense strand to SEQ ID NO: 1131584
cuauccaagcagaaguacu

SEQ ID NO: 1131586 - RNA, 19 nt, Artificial Sequence
  Description of Artificial Sequence: Synthetic oligonucleotide
  Sense strand starting at position 3915 of SEQ ID NO: 916114
guacuucugcuuggauaga

SEQ ID NO: 1131587 - RNA, 19 nt, Artificial Sequence
  Description of Artificial Sequence: Synthetic oligonucleotide
  Antisense strand to SEQ ID NO: 1131586
ucuauccaagcagaaguac

SEQ ID NO: 1131588 - RNA, 19 nt, Artificial Sequence
  Description of Artificial Sequence: Synthetic oligonucleotide
  Sense strand starting at position 3980 of SEQ ID NO: 916114
cgagaaggguguuuggaca

SEQ ID NO: 1131589 - RNA, 19 nt, Artificial Sequence
  Description of Artificial Sequence: Synthetic oligonucleotide
  Antisense strand to SEQ ID NO: 1131588
uguccaaacacccuucucg

SEQ ID NO: 1131590 - RNA, 19 nt, Artificial Sequence
  Description of Artificial Sequence: Synthetic oligonucleotide
  Sense strand starting at position 72 of SEQ ID NO: 916115
guuccaccagaauauguau

SEQ ID NO: 1131591 - RNA, 19 nt, Artificial Sequence
  Description of Artificial Sequence: Synthetic oligonucleotide
  Antisense strand to SEQ ID NO: 1131590
auacauauucugguggaac

SEQ ID NO: 1131592 - RNA, 19 nt, Artificial Sequence
  Description of Artificial Sequence: Synthetic oligonucleotide
  Sense strand starting at position 238 of SEQ ID NO: 916115
agaaucuauuugcaaaguu

SEQ ID NO: 1131593 - RNA, 19 nt, Artificial Sequence
  Description of Artificial Sequence: Synthetic oligonucleotide
  Antisense strand to SEQ ID NO: 1131592
aacuuugcaaauagauucu

SEQ ID NO: 1131594 - RNA, 19 nt, Artificial Sequence
  Description of Artificial Sequence: Synthetic oligonucleotide
  Sense strand starting at position 248 of SEQ ID NO: 916115
ugcaaaguuuagguaauau

SEQ ID NO: 1131595 - RNA, 19 nt, Artificial Sequence
  Description of Artificial Sequence: Synthetic oligonucleotide
  Antisense strand to SEQ ID NO: 1131594
auauuaccuaaacuuugca

SEQ ID NO: 1131596 - RNA, 19 nt, Artificial Sequence
  Description of Artificial Sequence: Synthetic oligonucleotide
  Sense strand starting at position 351 of SEQ ID NO: 916115
gcuaaaggucaaggaauca

SEQ ID NO: 1131597 - RNA, 19 nt, Artificial Sequence
  Description of Artificial Sequence: Synthetic oligonucleotide
  Antisense strand to SEQ ID NO: 1131596
ugauuccuugaccuuuagc

SEQ ID NO: 1131598 - RNA, 19 nt, Artificial Sequence
  Description of Artificial Sequence: Synthetic oligonucleotide
  Sense strand starting at position 427 of SEQ ID NO: 916115
gcugcuguguuaccauaaa

SEQ ID NO: 1131599 - RNA, 19 nt, Artificial Sequence
  Description of Artificial Sequence: Synthetic oligonucleotide
  Antisense strand to SEQ ID NO: 1131598
uuuaugguaacacagcagc

SEQ ID NO: 1131600 - RNA, 19 nt, Artificial Sequence
  Description of Artificial Sequence: Synthetic oligonucleotide
  Sense strand starting at position 489 of SEQ ID NO: 916115
ugugguuguuucucauaua

SEQ ID NO: 1131601 - RNA, 19 nt, Artificial Sequence
  Description of Artificial Sequence: Synthetic oligonucleotide
  Antisense strand to SEQ ID NO: 1131600
uauaugagaaacaaccaca

SEQ ID NO: 1131602 - RNA, 19 nt, Artificial Sequence
  Description of Artificial Sequence: Synthetic oligonucleotide
  Sense strand starting at position 523 of SEQ ID NO: 916115
auccaugugucuuugugau

SEQ ID NO: 1131603 - RNA, 19 nt, Artificial Sequence
  Description of Artificial Sequence: Synthetic oligonucleotide
  Antisense strand to SEQ ID NO: 1131602
aucacaaagacacauggau

SEQ ID NO: 1131604 - RNA, 19 nt, Artificial Sequence
  Description of Artificial Sequence: Synthetic oligonucleotide
  Sense strand starting at position 525 of SEQ ID NO: 916115
ccaugugucuuugugauca

SEQ ID NO: 1131605 - RNA, 19 nt, Artificial Sequence
  Description of Artificial Sequence: Synthetic oligonucleotide
  Antisense strand to SEQ ID NO: 1131604
ugaucacaaagacacaugg

SEQ ID NO: 1131606 - RNA, 19 nt, Artificial Sequence
  Description of Artificial Sequence: Synthetic oligonucleotide
  Sense strand starting at position 529 of SEQ ID NO: 916115
gugucuuugugaucaccag

SEQ ID NO: 1131607 - RNA, 19 nt, Artificial Sequence
  Description of Artificial Sequence: Synthetic oligonucleotide
  Antisense strand to SEQ ID NO: 1131606
cuggugaucacaaagacac

SEQ ID NO: 1131608 - RNA, 19 nt, Artificial Sequence
  Description of Artificial Sequence: Synthetic oligonucleotide
  Sense strand starting at position 533 of SEQ ID NO: 916115
cuuugugaucaccaggauc

SEQ ID NO: 1131609 - RNA, 19 nt, Artificial Sequence
  Description of Artificial Sequence: Synthetic oligonucleotide
  Antisense strand to SEQ ID NO: 1131608
gauccuggugaucacaaag

SEQ ID NO: 1131610 - RNA, 19 nt, Artificial Sequence
  Description of Artificial Sequence: Synthetic oligonucleotide
  Sense strand starting at position 535 of SEQ ID NO: 916115
uugugaucaccaggaucau

SEQ ID NO: 1131611 - RNA, 19 nt, Artificial Sequence
  Description of Artificial Sequence: Synthetic oligonucleotide
  Antisense strand to SEQ ID NO: 1131610
augauccuggugaucacaa

SEQ ID NO: 1131612 - RNA, 19 nt, Artificial Sequence
  Description of Artificial Sequence: Synthetic oligonucleotide
  Sense strand starting at position 586 of SEQ ID NO: 916115
gcuuaaguuagguguuuaa

SEQ ID NO: 1131613 - RNA, 19 nt, Artificial Sequence
  Description of Artificial Sequence: Synthetic oligonucleotide
  Antisense strand to SEQ ID NO: 1131612
uuaaacaccuaacuuaagc

SEQ ID NO: 1131614 - RNA, 19 nt, Artificial Sequence
  Description of Artificial Sequence: Synthetic oligonucleotide
  Sense strand starting at position 589 of SEQ ID NO: 916115
uaaguuagguguuuaaaga

SEQ ID NO: 1131615 - RNA, 19 nt, Artificial Sequence
  Description of Artificial Sequence: Synthetic oligonucleotide
  Antisense strand to SEQ ID NO: 1131614
ucuuuaaacaccuaacuua

SEQ ID NO: 1131616 - RNA, 19 nt, Artificial Sequence
  Description of Artificial Sequence: Synthetic oligonucleotide
  Sense strand starting at position 689 of SEQ ID NO: 916115
caucguguggaagacagau

SEQ ID NO: 1131617 - RNA, 19 nt, Artificial Sequence
  Description of Artificial Sequence: Synthetic oligonucleotide
  Antisense strand to SEQ ID NO: 1131616
aucugucuuccacacgaug

SEQ ID NO: 1131618 - RNA, 19 nt, Artificial Sequence
  Description of Artificial Sequence: Synthetic oligonucleotide
  Sense strand starting at position 918 of SEQ ID NO: 916115
ugaagaacaguuugugugu

SEQ ID NO: 1131619 - RNA, 19 nt, Artificial Sequence
  Description of Artificial Sequence: Synthetic oligonucleotide
  Antisense strand to SEQ ID NO: 1131618
acacacaaacuguucuuca

SEQ ID NO: 1131620 - RNA, 19 nt, Artificial Sequence
  Description of Artificial Sequence: Synthetic oligonucleotide
  Sense strand starting at position 1013 of SEQ ID NO: 916115
cguaauugggccuaugaaa

SEQ ID NO: 1131621 - RNA, 19 nt, Artificial Sequence
  Description of Artificial Sequence: Synthetic oligonucleotide
  Antisense strand to SEQ ID NO: 1131620
uuucauaggcccaauuacg

SEQ ID NO: 1131622 - RNA, 19 nt, Artificial Sequence
  Description of Artificial Sequence: Synthetic oligonucleotide
  Sense strand starting at position 1085 of SEQ ID NO: 916115
ccagaaauaugggagacau

SEQ ID NO: 1131623 - RNA, 19 nt, Artificial Sequence
  Description of Artificial Sequence: Synthetic oligonucleotide
  Antisense strand to SEQ ID NO: 1131622
augucucccauauuucugg

SEQ ID NO: 1131624 - RNA, 19 nt, Artificial Sequence
  Description of Artificial Sequence: Synthetic oligonucleotide
  Sense strand starting at position 1609 of SEQ ID NO: 916115
ggccgaucccgagaaagga

SEQ ID NO: 1131625 - RNA, 19 nt, Artificial Sequence
  Description of Artificial Sequence: Synthetic oligonucleotide
  Antisense strand to SEQ ID NO: 1131624
uccuuucucgggaucggcc

SEQ ID NO: 1131626 - RNA, 19 nt, Artificial Sequence
  Description of Artificial Sequence: Synthetic oligonucleotide
  Sense strand starting at position 2037 of SEQ ID NO: 916115
gggaguuguaggcgguaac

SEQ ID NO: 1131627 - RNA, 19 nt, Artificial Sequence
  Description of Artificial Sequence: Synthetic oligonucleotide
  Antisense strand to SEQ ID NO: 1131626
guuaccgccuacaacuccc

SEQ ID NO: 1131628 - RNA, 19 nt, Artificial Sequence
  Description of Artificial Sequence: Synthetic oligonucleotide
  Sense strand starting at position 2038 of SEQ ID NO: 916115
ggaguuguaggcgguaacu

SEQ ID NO: 1131629 - RNA, 19 nt, Artificial Sequence
  Description of Artificial Sequence: Synthetic oligonucleotide
  Antisense strand to SEQ ID NO: 1131628
aguuaccgccuacaacucc

SEQ ID NO: 1131630 - RNA, 19 nt, Artificial Sequence
  Description of Artificial Sequence: Synthetic oligonucleotide
  Sense strand starting at position 2162 of SEQ ID NO: 916115
cgaauucuccuccaaagcu

SEQ ID NO: 1131631 - RNA, 19 nt, Artificial Sequence
  Description of Artificial Sequence: Synthetic oligonucleotide
  Antisense strand to SEQ ID NO: 1131630
agcuuuggaggagaauucg

SEQ ID NO: 1131632 - RNA, 19 nt, Artificial Sequence
  Description of Artificial Sequence: Synthetic oligonucleotide
  Sense strand starting at position 2306 of SEQ ID NO: 916115
gcaauaucuugaguuaucu

SEQ ID NO: 1131633 - RNA, 19 nt, Artificial Sequence
  Description of Artificial Sequence: Synthetic oligonucleotide
  Antisense strand to SEQ ID NO: 1131632
agauaacucaagauauugc

SEQ ID NO: 1131634 - RNA, 19 nt, Artificial Sequence
  Description of Artificial Sequence: Synthetic oligonucleotide
  Sense strand starting at position 2315 of SEQ ID NO: 916115
ugaguuaucuacuuauaug

SEQ ID NO: 1131635 - RNA, 19 nt, Artificial Sequence
  Description of Artificial Sequence: Synthetic oligonucleotide
  Antisense strand to SEQ ID NO: 1131634
cauauaaguagauaacuca

SEQ ID NO: 1131636 - RNA, 19 nt, Artificial Sequence
  Description of Artificial Sequence: Synthetic oligonucleotide
  Sense strand starting at position 2333 of SEQ ID NO: 916115
gagggagugcuuugagugu

SEQ ID NO: 1131637 - RNA, 19 nt, Artificial Sequence
  Description of Artificial Sequence: Synthetic oligonucleotide
  Antisense strand to SEQ ID NO: 1131636
acacucaaagcacucccuc

SEQ ID NO: 1131638 - RNA, 19 nt, Artificial Sequence
  Description of Artificial Sequence: Synthetic oligonucleotide
  Sense strand starting at position 3193 of SEQ ID NO: 916115
aguuguaugugauuugcca

SEQ ID NO: 1131639 - RNA, 19 nt, Artificial Sequence
  Description of Artificial Sequence: Synthetic oligonucleotide
  Antisense strand to SEQ ID NO: 1131638
uggcaaaucacauacaacu

SEQ ID NO: 1131640 - RNA, 19 nt, Artificial Sequence
  Description of Artificial Sequence: Synthetic oligonucleotide
  Sense strand starting at position 3195 of SEQ ID NO: 916115
uuguaugugauuugccaag

SEQ ID NO: 1131641 - RNA, 19 nt, Artificial Sequence
  Description of Artificial Sequence: Synthetic oligonucleotide
  Antisense strand to SEQ ID NO: 1131640
cuuggcaaaucacauacaa

SEQ ID NO: 1131642 - RNA, 19 nt, Artificial Sequence
  Description of Artificial Sequence: Synthetic oligonucleotide
  Sense strand starting at position 3370 of SEQ ID NO: 916115
ugaauacacuggccucauu

SEQ ID NO: 1131643 - RNA, 19 nt, Artificial Sequence
  Description of Artificial Sequence: Synthetic oligonucleotide
  Antisense strand to SEQ ID NO: 1131642
aaugaggccaguguauuca

SEQ ID NO: 1131644 - RNA, 19 nt, Artificial Sequence
  Description of Artificial Sequence: Synthetic oligonucleotide
  Sense strand starting at position 3475 of SEQ ID NO: 916115
auaauaucugcucgaaugu

SEQ ID NO: 1131645 - RNA, 19 nt, Artificial Sequence
  Description of Artificial Sequence: Synthetic oligonucleotide
  Antisense strand to SEQ ID NO: 1131644
acauucgagcagauauuau

SEQ ID NO: 1131646 - RNA, 19 nt, Artificial Sequence
  Description of Artificial Sequence: Synthetic oligonucleotide
  Sense strand starting at position 3502 of SEQ ID NO: 916115
ccgagaucuucccuaacca

SEQ ID NO: 1131647 - RNA, 19 nt, Artificial Sequence
  Description of Artificial Sequence: Synthetic oligonucleotide
  Antisense strand to SEQ ID NO: 1131646
ugguuagggaagaucucgg

SEQ ID NO: 1131648 - RNA, 19 nt, Artificial Sequence
  Description of Artificial Sequence: Synthetic oligonucleotide
  Sense strand starting at position 3503 of SEQ ID NO: 916115
cgagaucuucccuaaccau

SEQ ID NO: 1131649 - RNA, 19 nt, Artificial Sequence
  Description of Artificial Sequence: Synthetic oligonucleotide
  Antisense strand to SEQ ID NO: 1131648
augguuagggaagaucucg

SEQ ID NO: 1131650 - RNA, 19 nt, Artificial Sequence
  Description of Artificial Sequence: Synthetic oligonucleotide
  Sense strand starting at position 3619 of SEQ ID NO: 916115
ggcacaaaugccuaaccau

SEQ ID NO: 1131651 - RNA, 19 nt, Artificial Sequence
  Description of Artificial Sequence: Synthetic oligonucleotide
  Antisense strand to SEQ ID NO: 1131650
augguuaggcauuugugcc

SEQ ID NO: 1131652 - RNA, 19 nt, Artificial Sequence
  Description of Artificial Sequence: Synthetic oligonucleotide
  Sense strand starting at position 3664 of SEQ ID NO: 916115
uuucuaucccugugccuua

SEQ ID NO: 1131653 - RNA, 19 nt, Artificial Sequence
  Description of Artificial Sequence: Synthetic oligonucleotide
  Antisense strand to SEQ ID NO: 1131652
uaaggcacagggauagaaa

SEQ ID NO: 1131654 - RNA, 19 nt, Artificial Sequence
  Description of Artificial Sequence: Synthetic oligonucleotide
  Sense strand starting at position 3714 of SEQ ID NO: 916115
ugucuugucucacuugacu

SEQ ID NO: 1131655 - RNA, 19 nt, Artificial Sequence
  Description of Artificial Sequence: Synthetic oligonucleotide
  Antisense strand to SEQ ID NO: 1131654
agucaagugagacaagaca

SEQ ID NO: 1131656 - RNA, 19 nt, Artificial Sequence
  Description of Artificial Sequence: Synthetic oligonucleotide
  Sense strand starting at position 3728 of SEQ ID NO: 916115
ugacuaaauucggugagag

SEQ ID NO: 1131657 - RNA, 19 nt, Artificial Sequence
  Description of Artificial Sequence: Synthetic oligonucleotide
  Antisense strand to SEQ ID NO: 1131656
cucucaccgaauuuaguca

SEQ ID NO: 1131658 - RNA, 19 nt, Artificial Sequence
  Description of Artificial Sequence: Synthetic oligonucleotide
  Sense strand starting at position 3729 of SEQ ID NO: 916115
gacuaaauucggugagagc

SEQ ID NO: 1131659 - RNA, 19 nt, Artificial Sequence
  Description of Artificial Sequence: Synthetic oligonucleotide
  Antisense strand to SEQ ID NO: 1131658
gcucucaccgaauuuaguc

SEQ ID NO: 1131660 - RNA, 19 nt, Artificial Sequence
  Description of Artificial Sequence: Synthetic oligonucleotide
  Sense strand starting at position 3730 of SEQ ID NO: 916115
acuaaauucggugagagca

SEQ ID NO: 1131661 - RNA, 19 nt, Artificial Sequence
  Description of Artificial Sequence: Synthetic oligonucleotide
  Antisense strand to SEQ ID NO: 1131660
ugcucucaccgaauuuagu

SEQ ID NO: 1131662 - RNA, 19 nt, Artificial Sequence
  Description of Artificial Sequence: Synthetic oligonucleotide
  Sense strand starting at position 3792 of SEQ ID NO: 916115
ccuaguaguugacauuuaa

SEQ ID NO: 1131663 - RNA, 19 nt, Artificial Sequence
  Description of Artificial Sequence: Synthetic oligonucleotide
  Antisense strand to SEQ ID NO: 1131662
uuaaaugucaacuacuagg

SEQ ID NO: 1131664 - RNA, 19 nt, Artificial Sequence
  Description of Artificial Sequence: Synthetic oligonucleotide
  Sense strand starting at position 3852 of SEQ ID NO: 916115
gauuuaaacucacguuagg

SEQ ID NO: 1131665 - RNA, 19 nt, Artificial Sequence
  Description of Artificial Sequence: Synthetic oligonucleotide
  Antisense strand to SEQ ID NO: 1131664
ccuaacgugaguuuaaauc

SEQ ID NO: 1131666 - RNA, 19 nt, Artificial Sequence
  Description of Artificial Sequence: Synthetic oligonucleotide
  Sense strand starting at position 3863 of SEQ ID NO: 916115
acguuaggcugguuccaaa

SEQ ID NO: 1131667 - RNA, 19 nt, Artificial Sequence
  Description of Artificial Sequence: Synthetic oligonucleotide
  Antisense strand to SEQ ID NO: 1131666
uuuggaaccagccuaacgu

SEQ ID NO: 1131668 - RNA, 19 nt, Artificial Sequence
  Description of Artificial Sequence: Synthetic oligonucleotide
  Sense strand starting at position 3942 of SEQ ID NO: 916115
ccaucucagcuuuagaagu

SEQ ID NO: 1131669 - RNA, 19 nt, Artificial Sequence
  Description of Artificial Sequence: Synthetic oligonucleotide
  Antisense strand to SEQ ID NO: 1131668
acuucuaaagcugagaugg

SEQ ID NO: 1131670 - RNA, 19 nt, Artificial Sequence
  Description of Artificial Sequence: Synthetic oligonucleotide
  Sense strand starting at position 181 of SEQ ID NO: 916116
auugcuguccucuacucua

SEQ ID NO: 1131671 - RNA, 19 nt, Artificial Sequence
  Description of Artificial Sequence: Synthetic oligonucleotide
  Antisense strand to SEQ ID NO: 1131670
uagaguagaggacagcaau

SEQ ID NO: 1131672 - RNA, 19 nt, Artificial Sequence
  Description of Artificial Sequence: Synthetic oligonucleotide
  Sense strand starting at position 305 of SEQ ID NO: 916116
guacuuagccuauaccagu

SEQ ID NO: 1131673 - RNA, 19 nt, Artificial Sequence
  Description of Artificial Sequence: Synthetic oligonucleotide
  Antisense strand to SEQ ID NO: 1131672
acugguauaggcuaaguac

SEQ ID NO: 1131674 - RNA, 19 nt, Artificial Sequence
  Description of Artificial Sequence: Synthetic oligonucleotide
  Sense strand starting at position 338 of SEQ ID NO: 916116
guuaaauacauucggagaa

SEQ ID NO: 1131675 - RNA, 19 nt, Artificial Sequence
  Description of Artificial Sequence: Synthetic oligonucleotide
  Antisense strand to SEQ ID NO: 1131674
uucuccgaauguauuuaac

SEQ ID NO: 1131676 - RNA, 19 nt, Artificial Sequence
  Description of Artificial Sequence: Synthetic oligonucleotide
  Sense strand starting at position 405 of SEQ ID NO: 916116
auaccuauugugugaguca

SEQ ID NO: 1131677 - RNA, 19 nt, Artificial Sequence
  Description of Artificial Sequence: Synthetic oligonucleotide
  Antisense strand to SEQ ID NO: 1131676
ugacucacacaauagguau

SEQ ID NO: 1131678 - RNA, 19 nt, Artificial Sequence
  Description of Artificial Sequence: Synthetic oligonucleotide
  Sense strand starting at position 408 of SEQ ID NO: 916116
ccuauugugugagucaaau

SEQ ID NO: 1131679 - RNA, 19 nt, Artificial Sequence
  Description of Artificial Sequence: Synthetic oligonucleotide
  Antisense strand to SEQ ID NO: 1131678
auuugacucacacaauagg

SEQ ID NO: 1131680 - RNA, 19 nt, Artificial Sequence
  Description of Artificial Sequence: Synthetic oligonucleotide
  Sense strand starting at position 472 of SEQ ID NO: 916116
cagucaauuguccaaggua

SEQ ID NO: 1131681 - RNA, 19 nt, Artificial Sequence
  Description of Artificial Sequence: Synthetic oligonucleotide
  Antisense strand to SEQ ID NO: 1131680
uaccuuggacaauugacug

SEQ ID NO: 1131682 - RNA, 19 nt, Artificial Sequence
  Description of Artificial Sequence: Synthetic oligonucleotide
  Sense strand starting at position 602 of SEQ ID NO: 916116
gagaaauacugacaaagua

SEQ ID NO: 1131683 - RNA, 19 nt, Artificial Sequence
  Description of Artificial Sequence: Synthetic oligonucleotide
  Antisense strand to SEQ ID NO: 1131682
uacuuugucaguauuucuc

SEQ ID NO: 1131684 - RNA, 19 nt, Artificial Sequence
  Description of Artificial Sequence: Synthetic oligonucleotide
  Sense strand starting at position 710 of SEQ ID NO: 916116
uucugaaacuauguuagau

SEQ ID NO: 1131685 - RNA, 19 nt, Artificial Sequence
  Description of Artificial Sequence: Synthetic oligonucleotide
  Antisense strand to SEQ ID NO: 1131684
aucuaacauaguuucagaa

SEQ ID NO: 1131686 - RNA, 19 nt, Artificial Sequence
  Description of Artificial Sequence: Synthetic oligonucleotide
  Sense strand starting at position 987 of SEQ ID NO: 916116
guuugcagacugcaaauaa

SEQ ID NO: 1131687 - RNA, 19 nt, Artificial Sequence
  Description of Artificial Sequence: Synthetic oligonucleotide
  Antisense strand to SEQ ID NO: 1131686
uuauuugcagucugcaaac

SEQ ID NO: 1131688 - RNA, 19 nt, Artificial Sequence
  Description of Artificial Sequence: Synthetic oligonucleotide
  Sense strand starting at position 1138 of SEQ ID NO: 916116
ugaaucuggcucuggagaa

SEQ ID NO: 1131689 - RNA, 19 nt, Artificial Sequence
  Description of Artificial Sequence: Synthetic oligonucleotide
  Antisense strand to SEQ ID NO: 1131688
uucuccagagccagauuca

SEQ ID NO: 1131690 - RNA, 19 nt, Artificial Sequence
  Description of Artificial Sequence: Synthetic oligonucleotide
  Sense strand starting at position 1159 of SEQ ID NO: 916116
cagaaugugauucgcagga

SEQ ID NO: 1131691 - RNA, 19 nt, Artificial Sequence
  Description of Artificial Sequence: Synthetic oligonucleotide
  Antisense strand to SEQ ID NO: 1131690
uccugcgaaucacauucug

SEQ ID NO: 1131692 - RNA, 19 nt, Artificial Sequence
  Description of Artificial Sequence: Synthetic oligonucleotide
  Sense strand starting at position 1220 of SEQ ID NO: 916116
uuguaccugaaucguagaa

SEQ ID NO: 1131693 - RNA, 19 nt, Artificial Sequence
  Description of Artificial Sequence: Synthetic oligonucleotide
  Antisense strand to SEQ ID NO: 1131692
uucuacgauucagguacaa

SEQ ID NO: 1131694 - RNA, 19 nt, Artificial Sequence
  Description of Artificial Sequence: Synthetic oligonucleotide
  Sense strand starting at position 1224 of SEQ ID NO: 916116
accugaaucguagaaaguu

SEQ ID NO: 1131695 - RNA, 19 nt, Artificial Sequence
  Description of Artificial Sequence: Synthetic oligonucleotide
  Antisense strand to SEQ ID NO: 1131694
aacuuucuacgauucaggu

SEQ ID NO: 1131696 - RNA, 19 nt, Artificial Sequence
  Description of Artificial Sequence: Synthetic oligonucleotide
  Sense strand starting at position 1255 of SEQ ID NO: 916116
aggaguaagugauugacau

SEQ ID NO: 1131697 - RNA, 19 nt, Artificial Sequence
  Description of Artificial Sequence: Synthetic oligonucleotide
  Antisense strand to SEQ ID NO: 1131696
augucaaucacuuacuccu

SEQ ID NO: 1131698 - RNA, 19 nt, Artificial Sequence
  Description of Artificial Sequence: Synthetic oligonucleotide
  Sense strand starting at position 1256 of SEQ ID NO: 916116
ggaguaagugauugacauu

SEQ ID NO: 1131699 - RNA, 19 nt, Artificial Sequence
  Description of Artificial Sequence: Synthetic oligonucleotide
  Antisense strand to SEQ ID NO: 1131698
aaugucaaucacuuacucc

SEQ ID NO: 1131700 - RNA, 19 nt, Artificial Sequence
  Description of Artificial Sequence: Synthetic oligonucleotide
  Sense strand starting at position 2451 of SEQ ID NO: 916116
ugccuuguccuugucagua

SEQ ID NO: 1131701 - RNA, 19 nt, Artificial Sequence
  Description of Artificial Sequence: Synthetic oligonucleotide
  Antisense strand to SEQ ID NO: 1131700
uacugacaaggacaaggca

SEQ ID NO: 1131702 - RNA, 19 nt, Artificial Sequence
  Description of Artificial Sequence: Synthetic oligonucleotide
  Sense strand starting at position 2456 of SEQ ID NO: 916116
uguccuugucaguaaacuc

SEQ ID NO: 1131703 - RNA, 19 nt, Artificial Sequence
  Description of Artificial Sequence: Synthetic oligonucleotide
  Antisense strand to SEQ ID NO: 1131702
gaguuuacugacaaggaca

SEQ ID NO: 1131704 - RNA, 19 nt, Artificial Sequence
  Description of Artificial Sequence: Synthetic oligonucleotide
  Sense strand starting at position 2465 of SEQ ID NO: 916116
caguaaacucaacgugauu

SEQ ID NO: 1131705 - RNA, 19 nt, Artificial Sequence
  Description of Artificial Sequence: Synthetic oligonucleotide
  Antisense strand to SEQ ID NO: 1131704
aaucacguugaguuuacug

SEQ ID NO: 1131706 - RNA, 19 nt, Artificial Sequence
  Description of Artificial Sequence: Synthetic oligonucleotide
  Sense strand starting at position 2478 of SEQ ID NO: 916116
gugauuaacuucccuaguu

SEQ ID NO: 1131707 - RNA, 19 nt, Artificial Sequence
  Description of Artificial Sequence: Synthetic oligonucleotide
  Antisense strand to SEQ ID NO: 1131706
aacuagggaaguuaaucac

SEQ ID NO: 1131708 - RNA, 19 nt, Artificial Sequence
  Description of Artificial Sequence: Synthetic oligonucleotide
  Sense strand starting at position 2705 of SEQ ID NO: 916116
cuguauuuauauguguuga

SEQ ID NO: 1131709 - RNA, 19 nt, Artificial Sequence
  Description of Artificial Sequence: Synthetic oligonucleotide
  Antisense strand to SEQ ID NO: 1131708
ucaacacauauaaauacag

SEQ ID NO: 1131710 - RNA, 19 nt, Artificial Sequence
  Description of Artificial Sequence: Synthetic oligonucleotide
  Sense strand starting at position 2710 of SEQ ID NO: 916116
uuuauauguguugauguca

SEQ ID NO: 1131711 - RNA, 19 nt, Artificial Sequence
  Description of Artificial Sequence: Synthetic oligonucleotide
  Antisense strand to SEQ ID NO: 1131710
ugacaucaacacauauaaa

SEQ ID NO: 1131712 - RNA, 19 nt, Artificial Sequence
  Description of Artificial Sequence: Synthetic oligonucleotide
  Sense strand starting at position 2760 of SEQ ID NO: 916116
ggaccuaaugccuaagcua

SEQ ID NO: 1131713 - RNA, 19 nt, Artificial Sequence
  Description of Artificial Sequence: Synthetic oligonucleotide
  Antisense strand to SEQ ID NO: 1131712
uagcuuaggcauuaggucc

SEQ ID NO: 1131714 - RNA, 19 nt, Artificial Sequence
  Description of Artificial Sequence: Synthetic oligonucleotide
  Sense strand starting at position 2874 of SEQ ID NO: 916116
agcaaugaucccggagaac

SEQ ID NO: 1131715 - RNA, 19 nt, Artificial Sequence
  Description of Artificial Sequence: Synthetic oligonucleotide
  Antisense strand to SEQ ID NO: 1131714
guucuccgggaucauugcu

SEQ ID NO: 1131716 - RNA, 19 nt, Artificial Sequence
  Description of Artificial Sequence: Synthetic oligonucleotide
  Sense strand starting at position 3157 of SEQ ID NO: 916116
agcacauauccgcaugaca

SEQ ID NO: 1131717 - RNA, 19 nt, Artificial Sequence
  Description of Artificial Sequence: Synthetic oligonucleotide
  Antisense strand to SEQ ID NO: 1131716
ugucaugcggauaugugcu

SEQ ID NO: 1131718 - RNA, 19 nt, Artificial Sequence
  Description of Artificial Sequence: Synthetic oligonucleotide
  Sense strand starting at position 3235 of SEQ ID NO: 916116
aggauaaacucauuauagc

SEQ ID NO: 1131719 - RNA, 19 nt, Artificial Sequence
  Description of Artificial Sequence: Synthetic oligonucleotide
  Antisense strand to SEQ ID NO: 1131718
gcuauaaugaguuuauccu

SEQ ID NO: 1131720 - RNA, 19 nt, Artificial Sequence
  Description of Artificial Sequence: Synthetic oligonucleotide
  Sense strand starting at position 3292 of SEQ ID NO: 916116
cauaguggugauugacauc

SEQ ID NO: 1131721 - RNA, 19 nt, Artificial Sequence
  Description of Artificial Sequence: Synthetic oligonucleotide
  Antisense strand to SEQ ID NO: 1131720
gaugucaaucaccacuaug

SEQ ID NO: 1131722 - RNA, 19 nt, Artificial Sequence
  Description of Artificial Sequence: Synthetic oligonucleotide
  Sense strand starting at position 3388 of SEQ ID NO: 916116
agugauaucagcuagugua

SEQ ID NO: 1131723 - RNA, 19 nt, Artificial Sequence
  Description of Artificial Sequence: Synthetic oligonucleotide
  Antisense strand to SEQ ID NO: 1131722
uacacuagcugauaucacu

SEQ ID NO: 1131724 - RNA, 19 nt, Artificial Sequence
  Description of Artificial Sequence: Synthetic oligonucleotide
  Sense strand starting at position 3398 of SEQ ID NO: 916116
gcuaguguaagugacuuga

SEQ ID NO: 1131725 - RNA, 19 nt, Artificial Sequence
  Description of Artificial Sequence: Synthetic oligonucleotide
  Antisense strand to SEQ ID NO: 1131724
ucaagucacuuacacuagc

SEQ ID NO: 1131726 - RNA, 19 nt, Artificial Sequence
  Description of Artificial Sequence: Synthetic oligonucleotide
  Sense strand starting at position 3400 of SEQ ID NO: 916116
uaguguaagugacuugacu

SEQ ID NO: 1131727 - RNA, 19 nt, Artificial Sequence
  Description of Artificial Sequence: Synthetic oligonucleotide
  Antisense strand to SEQ ID NO: 1131726
agucaagucacuuacacua

SEQ ID NO: 1131728 - RNA, 19 nt, Artificial Sequence
  Description of Artificial Sequence: Synthetic oligonucleotide
  Sense strand starting at position 3402 of SEQ ID NO: 916116
guguaagugacuugacuca

SEQ ID NO: 1131729 - RNA, 19 nt, Artificial Sequence
  Description of Artificial Sequence: Synthetic oligonucleotide
  Antisense strand to SEQ ID NO: 1131728
ugagucaagucacuuacac

SEQ ID NO: 1131730 - RNA, 19 nt, Artificial Sequence
  Description of Artificial Sequence: Synthetic oligonucleotide
  Sense strand starting at position 3515 of SEQ ID NO: 916116
gcuucuacugaaugaaacu

SEQ ID NO: 1131731 - RNA, 19 nt, Artificial Sequence
  Description of Artificial Sequence: Synthetic oligonucleotide
  Antisense strand to SEQ ID NO: 1131730
aguuucauucaguagaagc

SEQ ID NO: 1131732 - RNA, 19 nt, Artificial Sequence
  Description of Artificial Sequence: Synthetic oligonucleotide
  Sense strand starting at position 3541 of SEQ ID NO: 916116
ugagucucacugcagcaaa

SEQ ID NO: 1131733 - RNA, 19 nt, Artificial Sequence
  Description of Artificial Sequence: Synthetic oligonucleotide
  Antisense strand to SEQ ID NO: 1131732
uuugcugcagugagacuca

SEQ ID NO: 1131734 - RNA, 19 nt, Artificial Sequence
  Description of Artificial Sequence: Synthetic oligonucleotide
  Sense strand starting at position 3629 of SEQ ID NO: 916116
agcuguuugcuuuccguca

SEQ ID NO: 1131735 - RNA, 19 nt, Artificial Sequence
  Description of Artificial Sequence: Synthetic oligonucleotide
  Antisense strand to SEQ ID NO: 1131734
ugacggaaagcaaacagcu

SEQ ID NO: 1131736 - RNA, 19 nt, Artificial Sequence
  Description of Artificial Sequence: Synthetic oligonucleotide
  Sense strand starting at position 3633 of SEQ ID NO: 916116
guuugcuuuccgucaagcu

SEQ ID NO: 1131737 - RNA, 19 nt, Artificial Sequence
  Description of Artificial Sequence: Synthetic oligonucleotide
  Antisense strand to SEQ ID NO: 1131736
agcuugacggaaagcaaac

SEQ ID NO: 1131738 - RNA, 19 nt, Artificial Sequence
  Description of Artificial Sequence: Synthetic oligonucleotide
  Sense strand starting at position 3651 of SEQ ID NO: 916116
ucauguugucccuaaauuc

SEQ ID NO: 1131739 - RNA, 19 nt, Artificial Sequence
  Description of Artificial Sequence: Synthetic oligonucleotide
  Antisense strand to SEQ ID NO: 1131738
gaauuuagggacaacauga

SEQ ID NO: 1131740 - RNA, 19 nt, Artificial Sequence
  Description of Artificial Sequence: Synthetic oligonucleotide
  Sense strand starting at position 3666 of SEQ ID NO: 916116
auuccauagccaugucuua

SEQ ID NO: 1131741 - RNA, 19 nt, Artificial Sequence
  Description of Artificial Sequence: Synthetic oligonucleotide
  Antisense strand to SEQ ID NO: 1131740
uaagacauggcuauggaau

SEQ ID NO: 1131742 - RNA, 19 nt, Artificial Sequence
  Description of Artificial Sequence: Synthetic oligonucleotide
  Sense strand starting at position 3679 of SEQ ID NO: 916116
gucuuaucauuugaaauug

SEQ ID NO: 1131743 - RNA, 19 nt, Artificial Sequence
  Description of Artificial Sequence: Synthetic oligonucleotide
  Antisense strand to SEQ ID NO: 1131742
caauuucaaaugauaagac

SEQ ID NO: 1131744 - RNA, 19 nt, Artificial Sequence
  Description of Artificial Sequence: Synthetic oligonucleotide
  Sense strand starting at position 3953 of SEQ ID NO: 916116
ugagucugcagaugauaua

SEQ ID NO: 1131745 - RNA, 19 nt, Artificial Sequence
  Description of Artificial Sequence: Synthetic oligonucleotide
  Antisense strand to SEQ ID NO: 1131744
uauaucaucugcagacuca

SEQ ID NO: 1131746 - RNA, 19 nt, Artificial Sequence
  Description of Artificial Sequence: Synthetic oligonucleotide
  Sense strand starting at position 3963 of SEQ ID NO: 916116
gaugauauacaacguguga

SEQ ID NO: 1131747 - RNA, 19 nt, Artificial Sequence
  Description of Artificial Sequence: Synthetic oligonucleotide
  Antisense strand to SEQ ID NO: 1131746
ucacacguuguauaucauc

SEQ ID NO: 1131748 - RNA, 19 nt, Artificial Sequence
  Description of Artificial Sequence: Synthetic oligonucleotide
  Sense strand starting at position 3965 of SEQ ID NO: 916116
ugauauacaacgugugauu

SEQ ID NO: 1131749 - RNA, 19 nt, Artificial Sequence
  Description of Artificial Sequence: Synthetic oligonucleotide
  Antisense strand to SEQ ID NO: 1131748
aaucacacguuguauauca

SEQ ID NO: 1131750 - RNA, 19 nt, Artificial Sequence
  Description of Artificial Sequence: Synthetic oligonucleotide
  Sense strand starting at position 66 of SEQ ID NO: 916117
uagugaccugcugacuaau

SEQ ID NO: 1131751 - RNA, 19 nt, Artificial Sequence
  Description of Artificial Sequence: Synthetic oligonucleotide
  Antisense strand to SEQ ID NO: 1131750
auuagucagcaggucacua

SEQ ID NO: 1131752 - RNA, 19 nt, Artificial Sequence
  Description of Artificial Sequence: Synthetic oligonucleotide
  Sense strand starting at position 568 of SEQ ID NO: 916117
uucgcugcgcgauucagaa

SEQ ID NO: 1131753 - RNA, 19 nt, Artificial Sequence
  Description of Artificial Sequence: Synthetic oligonucleotide
  Antisense strand to SEQ ID NO: 1131752
uucugaaucgcgcagcgaa

SEQ ID NO: 1131754 - RNA, 19 nt, Artificial Sequence
  Description of Artificial Sequence: Synthetic oligonucleotide
  Sense strand starting at position 600 of SEQ ID NO: 916117
gaugccauccggcgaauua

SEQ ID NO: 1131755 - RNA, 19 nt, Artificial Sequence
  Description of Artificial Sequence: Synthetic oligonucleotide
  Antisense strand to SEQ ID NO: 1131754
uaauucgccggauggcauc

SEQ ID NO: 1131756 - RNA, 19 nt, Artificial Sequence
  Description of Artificial Sequence: Synthetic oligonucleotide
  Sense strand starting at position 601 of SEQ ID NO: 916117
augccauccggcgaauuau

SEQ ID NO: 1131757 - RNA, 19 nt, Artificial Sequence
  Description of Artificial Sequence: Synthetic oligonucleotide
  Antisense strand to SEQ ID NO: 1131756
auaauucgccggauggcau

SEQ ID NO: 1131758 - RNA, 19 nt, Artificial Sequence
  Description of Artificial Sequence: Synthetic oligonucleotide
  Sense strand starting at position 609 of SEQ ID NO: 916117
cggcgaauuauguaaccag

SEQ ID NO: 1131759 - RNA, 19 nt, Artificial Sequence
  Description of Artificial Sequence: Synthetic oligonucleotide
  Antisense strand to SEQ ID NO: 1131758
cugguuacauaauucgccg

SEQ ID NO: 1131760 - RNA, 19 nt, Artificial Sequence
  Description of Artificial Sequence: Synthetic oligonucleotide
  Sense strand starting at position 612 of SEQ ID NO: 916117
cgaauuauguaaccaggga

SEQ ID NO: 1131761 - RNA, 19 nt, Artificial Sequence
  Description of Artificial Sequence: Synthetic oligonucleotide
  Antisense strand to SEQ ID NO: 1131760
ucccugguuacauaauucg

SEQ ID NO: 1131762 - RNA, 19 nt, Artificial Sequence
  Description of Artificial Sequence: Synthetic oligonucleotide
  Sense strand starting at position 729 of SEQ ID NO: 916117
gggcuuguuugcucagcga

SEQ ID NO: 1131763 - RNA, 19 nt, Artificial Sequence
  Description of Artificial Sequence: Synthetic oligonucleotide
  Antisense strand to SEQ ID NO: 1131762
ucgcugagcaaacaagccc

SEQ ID NO: 1131764 - RNA, 19 nt, Artificial Sequence
  Description of Artificial Sequence: Synthetic oligonucleotide
  Sense strand starting at position 732 of SEQ ID NO: 916117
cuuguuugcucagcgaaac

SEQ ID NO: 1131765 - RNA, 19 nt, Artificial Sequence
  Description of Artificial Sequence: Synthetic oligonucleotide
  Antisense strand to SEQ ID NO: 1131764
guuucgcugagcaaacaag

SEQ ID NO: 1131766 - RNA, 19 nt, Artificial Sequence
  Description of Artificial Sequence: Synthetic oligonucleotide
  Sense strand starting at position 733 of SEQ ID NO: 916117
uuguuugcucagcgaaacu

SEQ ID NO: 1131767 - RNA, 19 nt, Artificial Sequence
  Description of Artificial Sequence: Synthetic oligonucleotide
  Antisense strand to SEQ ID NO: 1131766
aguuucgcugagcaaacaa

SEQ ID NO: 1131768 - RNA, 19 nt, Artificial Sequence
  Description of Artificial Sequence: Synthetic oligonucleotide
  Sense strand starting at position 1808 of SEQ ID NO: 916117
cuccguacuccagauaaac

SEQ ID NO: 1131769 - RNA, 19 nt, Artificial Sequence
  Description of Artificial Sequence: Synthetic oligonucleotide
  Antisense strand to SEQ ID NO: 1131768
guuuaucuggaguacggag

SEQ ID NO: 1131770 - RNA, 19 nt, Artificial Sequence
  Description of Artificial Sequence: Synthetic oligonucleotide
  Sense strand starting at position 2072 of SEQ ID NO: 916117
auuggcucucuuggagaaa

SEQ ID NO: 1131771 - RNA, 19 nt, Artificial Sequence
  Description of Artificial Sequence: Synthetic oligonucleotide
  Antisense strand to SEQ ID NO: 1131770
uuucuccaagagagccaau

SEQ ID NO: 1131772 - RNA, 19 nt, Artificial Sequence
  Description of Artificial Sequence: Synthetic oligonucleotide
  Sense strand starting at position 2403 of SEQ ID NO: 916117
ccugcuuagcccuagaauc

SEQ ID NO: 1131773 - RNA, 19 nt, Artificial Sequence
  Description of Artificial Sequence: Synthetic oligonucleotide
  Antisense strand to SEQ ID NO: 1131772
gauucuagggcuaagcagg

SEQ ID NO: 1131774 - RNA, 19 nt, Artificial Sequence
  Description of Artificial Sequence: Synthetic oligonucleotide
  Sense strand starting at position 2405 of SEQ ID NO: 916117
ugcuuagcccuagaaucaa

SEQ ID NO: 1131775 - RNA, 19 nt, Artificial Sequence
  Description of Artificial Sequence: Synthetic oligonucleotide
  Antisense strand to SEQ ID NO: 1131774
uugauucuagggcuaagca

SEQ ID NO: 1131776 - RNA, 19 nt, Artificial Sequence
  Description of Artificial Sequence: Synthetic oligonucleotide
  Sense strand starting at position 2644 of SEQ ID NO: 916117
ggcaaagacuugcuugaac

SEQ ID NO: 1131777 - RNA, 19 nt, Artificial Sequence
  Description of Artificial Sequence: Synthetic oligonucleotide
  Antisense strand to SEQ ID NO: 1131776
guucaagcaagucuuugcc

SEQ ID NO: 1131778 - RNA, 19 nt, Artificial Sequence
  Description of Artificial Sequence: Synthetic oligonucleotide
  Sense strand starting at position 2984 of SEQ ID NO: 916117
gucccagcuuccuuuagau

SEQ ID NO: 1131779 - RNA, 19 nt, Artificial Sequence
  Description of Artificial Sequence: Synthetic oligonucleotide
  Antisense strand to SEQ ID NO: 1131778
aucuaaaggaagcugggac

SEQ ID NO: 1131780 - RNA, 19 nt, Artificial Sequence
  Description of Artificial Sequence: Synthetic oligonucleotide
  Sense strand starting at position 2988 of SEQ ID NO: 916117
cagcuuccuuuagauggau

SEQ ID NO: 1131781 - RNA, 19 nt, Artificial Sequence
  Description of Artificial Sequence: Synthetic oligonucleotide
  Antisense strand to SEQ ID NO: 1131780
auccaucuaaaggaagcug

SEQ ID NO: 1131782 - RNA, 19 nt, Artificial Sequence
  Description of Artificial Sequence: Synthetic oligonucleotide
  Sense strand starting at position 3100 of SEQ ID NO: 916117
ccuggagucucugcucaag

SEQ ID NO: 1131783 - RNA, 19 nt, Artificial Sequence
  Description of Artificial Sequence: Synthetic oligonucleotide
  Antisense strand to SEQ ID NO: 1131782
cuugagcagagacuccagg

SEQ ID NO: 1131784 - RNA, 19 nt, Artificial Sequence
  Description of Artificial Sequence: Synthetic oligonucleotide
  Sense strand starting at position 3102 of SEQ ID NO: 916117
uggagucucugcucaaggu

SEQ ID NO: 1131785 - RNA, 19 nt, Artificial Sequence
  Description of Artificial Sequence: Synthetic oligonucleotide
  Antisense strand to SEQ ID NO: 1131784
accuugagcagagacucca

SEQ ID NO: 1131786 - RNA, 19 nt, Artificial Sequence
  Description of Artificial Sequence: Synthetic oligonucleotide
  Sense strand starting at position 3103 of SEQ ID NO: 916117
ggagucucugcucaagguu

SEQ ID NO: 1131787 - RNA, 19 nt, Artificial Sequence
  Description of Artificial Sequence: Synthetic oligonucleotide
  Antisense strand to SEQ ID NO: 1131786
aaccuugagcagagacucc

SEQ ID NO: 1131788 - RNA, 19 nt, Artificial Sequence
  Description of Artificial Sequence: Synthetic oligonucleotide
  Sense strand starting at position 3190 of SEQ ID NO: 916117
uccagugaucuacaucugu

SEQ ID NO: 1131789 - RNA, 19 nt, Artificial Sequence
  Description of Artificial Sequence: Synthetic oligonucleotide
  Antisense strand to SEQ ID NO: 1131788
acagauguagaucacugga

SEQ ID NO: 1131790 - RNA, 19 nt, Artificial Sequence
  Description of Artificial Sequence: Synthetic oligonucleotide
  Sense strand starting at position 3268 of SEQ ID NO: 916117
agugguguagagugagauu

SEQ ID NO: 1131791 - RNA, 19 nt, Artificial Sequence
  Description of Artificial Sequence: Synthetic oligonucleotide
  Antisense strand to SEQ ID NO: 1131790
aaucucacucuacaccacu

SEQ ID NO: 1131792 - RNA, 19 nt, Artificial Sequence
  Description of Artificial Sequence: Synthetic oligonucleotide
  Sense strand starting at position 3279 of SEQ ID NO: 916117
gugagauugcacuggguga

SEQ ID NO: 1131793 - RNA, 19 nt, Artificial Sequence
  Description of Artificial Sequence: Synthetic oligonucleotide
  Antisense strand to SEQ ID NO: 1131792
ucacccagugcaaucucac

SEQ ID NO: 1131794 - RNA, 19 nt, Artificial Sequence
  Description of Artificial Sequence: Synthetic oligonucleotide
  Sense strand starting at position 3293 of SEQ ID NO: 916117
ggugacuucugagcuaaau

SEQ ID NO: 1131795 - RNA, 19 nt, Artificial Sequence
  Description of Artificial Sequence: Synthetic oligonucleotide
  Antisense strand to SEQ ID NO: 1131794
auuuagcucagaagucacc

SEQ ID NO: 1131796 - RNA, 19 nt, Artificial Sequence
  Description of Artificial Sequence: Synthetic oligonucleotide
  Sense strand starting at position 3402 of SEQ ID NO: 916117
aggucuuacugaugauuag

SEQ ID NO: 1131797 - RNA, 19 nt, Artificial Sequence
  Description of Artificial Sequence: Synthetic oligonucleotide
  Antisense strand to SEQ ID NO: 1131796
cuaaucaucaguaagaccu

SEQ ID NO: 1131798 - RNA, 19 nt, Artificial Sequence
  Description of Artificial Sequence: Synthetic oligonucleotide
  Sense strand starting at position 3408 of SEQ ID NO: 916117
uacugaugauuagaggaca

SEQ ID NO: 1131799 - RNA, 19 nt, Artificial Sequence
  Description of Artificial Sequence: Synthetic oligonucleotide
  Antisense strand to SEQ ID NO: 1131798
uguccucuaaucaucagua

SEQ ID NO: 1131800 - RNA, 19 nt, Artificial Sequence
  Description of Artificial Sequence: Synthetic oligonucleotide
  Sense strand starting at position 3439 of SEQ ID NO: 916117
cuaagcuugccagguacua

SEQ ID NO: 1131801 - RNA, 19 nt, Artificial Sequence
  Description of Artificial Sequence: Synthetic oligonucleotide
  Antisense strand to SEQ ID NO: 1131800
uaguaccuggcaagcuuag

SEQ ID NO: 1131802 - RNA, 19 nt, Artificial Sequence
  Description of Artificial Sequence: Synthetic oligonucleotide
  Sense strand starting at position 3502 of SEQ ID NO: 916117
aggucaugaucugcauaug

SEQ ID NO: 1131803 - RNA, 19 nt, Artificial Sequence
  Description of Artificial Sequence: Synthetic oligonucleotide
  Antisense strand to SEQ ID NO: 1131802
cauaugcagaucaugaccu

SEQ ID NO: 1131804 - RNA, 19 nt, Artificial Sequence
  Description of Artificial Sequence: Synthetic oligonucleotide
  Sense strand starting at position 3522 of SEQ ID NO: 916117
cugugugccauacagugau

SEQ ID NO: 1131805 - RNA, 19 nt, Artificial Sequence
  Description of Artificial Sequence: Synthetic oligonucleotide
  Antisense strand to SEQ ID NO: 1131804
aucacuguauggcacacag

SEQ ID NO: 1131806 - RNA, 19 nt, Artificial Sequence
  Description of Artificial Sequence: Synthetic oligonucleotide
  Sense strand starting at position 3525 of SEQ ID NO: 916117
ugugccauacagugaucau

SEQ ID NO: 1131807 - RNA, 19 nt, Artificial Sequence
  Description of Artificial Sequence: Synthetic oligonucleotide
  Antisense strand to SEQ ID NO: 1131806
augaucacuguauggcaca

SEQ ID NO: 1131808 - RNA, 19 nt, Artificial Sequence
  Description of Artificial Sequence: Synthetic oligonucleotide
  Sense strand starting at position 3526 of SEQ ID NO: 916117
gugccauacagugaucaug

SEQ ID NO: 1131809 - RNA, 19 nt, Artificial Sequence
  Description of Artificial Sequence: Synthetic oligonucleotide
  Antisense strand to SEQ ID NO: 1131808
caugaucacuguauggcac

SEQ ID NO: 1131810 - RNA, 19 nt, Artificial Sequence
  Description of Artificial Sequence: Synthetic oligonucleotide
  Sense strand starting at position 3528 of SEQ ID NO: 916117
gccauacagugaucaugug

SEQ ID NO: 1131811 - RNA, 19 nt, Artificial Sequence
  Description of Artificial Sequence: Synthetic oligonucleotide
  Antisense strand to SEQ ID NO: 1131810
cacaugaucacuguauggc

SEQ ID NO: 1131812 - RNA, 19 nt, Artificial Sequence
  Description of Artificial Sequence: Synthetic oligonucleotide
  Sense strand starting at position 3627 of SEQ ID NO: 916117
aaugaaaguggcuguuaca

SEQ ID NO: 1131813 - RNA, 19 nt, Artificial Sequence
  Description of Artificial Sequence: Synthetic oligonucleotide
  Antisense strand to SEQ ID NO: 1131812
uguaacagccacuuucauu

SEQ ID NO: 1131814 - RNA, 19 nt, Artificial Sequence
  Description of Artificial Sequence: Synthetic oligonucleotide
  Sense strand starting at position 3630 of SEQ ID NO: 916117
gaaaguggcuguuacagau

SEQ ID NO: 1131815 - RNA, 19 nt, Artificial Sequence
  Description of Artificial Sequence: Synthetic oligonucleotide
  Antisense strand to SEQ ID NO: 1131814
aucuguaacagccacuuuc

SEQ ID NO: 1131816 - RNA, 19 nt, Artificial Sequence
  Description of Artificial Sequence: Synthetic oligonucleotide
  Sense strand starting at position 3634 of SEQ ID NO: 916117
guggcuguuacagaucuga

SEQ ID NO: 1131817 - RNA, 19 nt, Artificial Sequence
  Description of Artificial Sequence: Synthetic oligonucleotide
  Antisense strand to SEQ ID NO: 1131816
ucagaucuguaacagccac

SEQ ID NO: 1131818 - RNA, 19 nt, Artificial Sequence
  Description of Artificial Sequence: Synthetic oligonucleotide
  Sense strand starting at position 3639 of SEQ ID NO: 916117
uguuacagaucugaaugau

SEQ ID NO: 1131819 - RNA, 19 nt, Artificial Sequence
  Description of Artificial Sequence: Synthetic oligonucleotide
  Antisense strand to SEQ ID NO: 1131818
aucauucagaucuguaaca

SEQ ID NO: 1131820 - RNA, 19 nt, Artificial Sequence
  Description of Artificial Sequence: Synthetic oligonucleotide
  Sense strand starting at position 3645 of SEQ ID NO: 916117
agaucugaaugaugcuuau

SEQ ID NO: 1131821 - RNA, 19 nt, Artificial Sequence
  Description of Artificial Sequence: Synthetic oligonucleotide
  Antisense strand to SEQ ID NO: 1131820
auaagcaucauucagaucu

SEQ ID NO: 1131822 - RNA, 19 nt, Artificial Sequence
  Description of Artificial Sequence: Synthetic oligonucleotide
  Sense strand starting at position 3648 of SEQ ID NO: 916117
ucugaaugaugcuuaugua

SEQ ID NO: 1131823 - RNA, 19 nt, Artificial Sequence
  Description of Artificial Sequence: Synthetic oligonucleotide
  Antisense strand to SEQ ID NO: 1131822
uacauaagcaucauucaga

SEQ ID NO: 1131824 - RNA, 19 nt, Artificial Sequence
  Description of Artificial Sequence: Synthetic oligonucleotide
  Sense strand starting at position 3649 of SEQ ID NO: 916117
cugaaugaugcuuauguaa

SEQ ID NO: 1131825 - RNA, 19 nt, Artificial Sequence
  Description of Artificial Sequence: Synthetic oligonucleotide
  Antisense strand to SEQ ID NO: 1131824
uuacauaagcaucauucag

SEQ ID NO: 1131826 - RNA, 19 nt, Artificial Sequence
  Description of Artificial Sequence: Synthetic oligonucleotide
  Sense strand starting at position 3755 of SEQ ID NO: 916117
acaauaggaucuuuaaggu

SEQ ID NO: 1131827 - RNA, 19 nt, Artificial Sequence
  Description of Artificial Sequence: Synthetic oligonucleotide
  Antisense strand to SEQ ID NO: 1131826
accuuaaagauccuauugu

SEQ ID NO: 1131828 - RNA, 19 nt, Artificial Sequence
  Description of Artificial Sequence: Synthetic oligonucleotide
  Sense strand starting at position 3828 of SEQ ID NO: 916117
ucuucuaagguagauuagu

SEQ ID NO: 1131829 - RNA, 19 nt, Artificial Sequence
  Description of Artificial Sequence: Synthetic oligonucleotide
  Antisense strand to SEQ ID NO: 1131828
acuaaucuaccuuagaaga

SEQ ID NO: 1131830 - RNA, 19 nt, Artificial Sequence
  Description of Artificial Sequence: Synthetic oligonucleotide
  Sense strand starting at position 148 of SEQ ID NO: 916118
gucucaguuggccaccaaa

SEQ ID NO: 1131831 - RNA, 19 nt, Artificial Sequence
  Description of Artificial Sequence: Synthetic oligonucleotide
  Antisense strand to SEQ ID NO: 1131830
uuugguggccaacugagac

SEQ ID NO: 1131832 - RNA, 19 nt, Artificial Sequence
  Description of Artificial Sequence: Synthetic oligonucleotide
  Sense strand starting at position 351 of SEQ ID NO: 916118
ggaaccacuuaucagaaga

SEQ ID NO: 1131833 - RNA, 19 nt, Artificial Sequence
  Description of Artificial Sequence: Synthetic oligonucleotide
  Antisense strand to SEQ ID NO: 1131832
ucuucugauaagugguucc

SEQ ID NO: 1131834 - RNA, 19 nt, Artificial Sequence
  Description of Artificial Sequence: Synthetic oligonucleotide
  Sense strand starting at position 376 of SEQ ID NO: 916118
acgagauuugccggcggau

SEQ ID NO: 1131835 - RNA, 19 nt, Artificial Sequence
  Description of Artificial Sequence: Synthetic oligonucleotide
  Antisense strand to SEQ ID NO: 1131834
auccgccggcaaaucucgu

SEQ ID NO: 1131836 - RNA, 19 nt, Artificial Sequence
  Description of Artificial Sequence: Synthetic oligonucleotide
  Sense strand starting at position 378 of SEQ ID NO: 916118
gagauuugccggcggauua

SEQ ID NO: 1131837 - RNA, 19 nt, Artificial Sequence
  Description of Artificial Sequence: Synthetic oligonucleotide
  Antisense strand to SEQ ID NO: 1131836
uaauccgccggcaaaucuc

SEQ ID NO: 1131838 - RNA, 19 nt, Artificial Sequence
  Description of Artificial Sequence: Synthetic oligonucleotide
  Sense strand starting at position 379 of SEQ ID NO: 916118
agauuugccggcggauuaa

SEQ ID NO: 1131839 - RNA, 19 nt, Artificial Sequence
  Description of Artificial Sequence: Synthetic oligonucleotide
  Antisense strand to SEQ ID NO: 1131838
uuaauccgccggcaaaucu

SEQ ID NO: 1131840 - RNA, 19 nt, Artificial Sequence
  Description of Artificial Sequence: Synthetic oligonucleotide
  Sense strand starting at position 424 of SEQ ID NO: 916118
uuaucuccagacugaugau

SEQ ID NO: 1131841 - RNA, 19 nt, Artificial Sequence
  Description of Artificial Sequence: Synthetic oligonucleotide
  Antisense strand to SEQ ID NO: 1131840
aucaucagucuggagauaa

SEQ ID NO: 1131842 - RNA, 19 nt, Artificial Sequence
  Description of Artificial Sequence: Synthetic oligonucleotide
  Sense strand starting at position 446 of SEQ ID NO: 916118
gcgucuuccgcgaauguca

SEQ ID NO: 1131843 - RNA, 19 nt, Artificial Sequence
  Description of Artificial Sequence: Synthetic oligonucleotide
  Antisense strand to SEQ ID NO: 1131842
ugacauucgcggaagacgc

SEQ ID NO: 1131844 - RNA, 19 nt, Artificial Sequence
  Description of Artificial Sequence: Synthetic oligonucleotide
  Sense strand starting at position 480 of SEQ ID NO: 916118
gcucuaaccgcccuguuau

SEQ ID NO: 1131845 - RNA, 19 nt, Artificial Sequence
  Description of Artificial Sequence: Synthetic oligonucleotide
  Antisense strand to SEQ ID NO: 1131844
auaacagggcgguuagagc

SEQ ID NO: 1131846 - RNA, 19 nt, Artificial Sequence
  Description of Artificial Sequence: Synthetic oligonucleotide
  Sense strand starting at position 539 of SEQ ID NO: 916118
gagacuuugcgagacucca

SEQ ID NO: 1131847 - RNA, 19 nt, Artificial Sequence
  Description of Artificial Sequence: Synthetic oligonucleotide
  Antisense strand to SEQ ID NO: 1131846
uggagucucgcaaagucuc

SEQ ID NO: 1131848 - RNA, 19 nt, Artificial Sequence
  Description of Artificial Sequence: Synthetic oligonucleotide
  Sense strand starting at position 1570 of SEQ ID NO: 916118
gcagcuaaucgaugacuga

SEQ ID NO: 1131849 - RNA, 19 nt, Artificial Sequence
  Description of Artificial Sequence: Synthetic oligonucleotide
  Antisense strand to SEQ ID NO: 1131848
ucagucaucgauuagcugc

SEQ ID NO: 1131850 - RNA, 19 nt, Artificial Sequence
  Description of Artificial Sequence: Synthetic oligonucleotide
  Sense strand starting at position 1571 of SEQ ID NO: 916118
cagcuaaucgaugacugaa

SEQ ID NO: 1131851 - RNA, 19 nt, Artificial Sequence
  Description of Artificial Sequence: Synthetic oligonucleotide
  Antisense strand to SEQ ID NO: 1131850
uucagucaucgauuagcug

SEQ ID NO: 1131852 - RNA, 19 nt, Artificial Sequence
  Description of Artificial Sequence: Synthetic oligonucleotide
  Sense strand starting at position 1608 of SEQ ID NO: 916118
cgagaucaauuccuaauac

SEQ ID NO: 1131853 - RNA, 19 nt, Artificial Sequence
  Description of Artificial Sequence: Synthetic oligonucleotide
  Antisense strand to SEQ ID NO: 1131852
guauuaggaauugaucucg

SEQ ID NO: 1131854 - RNA, 19 nt, Artificial Sequence
  Description of Artificial Sequence: Synthetic oligonucleotide
  Sense strand starting at position 2292 of SEQ ID NO: 916118
gcgcgauugcacuugacuu

SEQ ID NO: 1131855 - RNA, 19 nt, Artificial Sequence
  Description of Artificial Sequence: Synthetic oligonucleotide
  Antisense strand to SEQ ID NO: 1131854
aagucaagugcaaucgcgc

SEQ ID NO: 1131856 - RNA, 19 nt, Artificial Sequence
  Description of Artificial Sequence: Synthetic oligonucleotide
  Sense strand starting at position 2441 of SEQ ID NO: 916118
ccggcauugcacgcuuaaa

SEQ ID NO: 1131857 - RNA, 19 nt, Artificial Sequence
  Description of Artificial Sequence: Synthetic oligonucleotide
  Antisense strand to SEQ ID NO: 1131856
uuuaagcgugcaaugccgg

SEQ ID NO: 1131858 - RNA, 19 nt, Artificial Sequence
  Description of Artificial Sequence: Synthetic oligonucleotide
  Sense strand starting at position 2546 of SEQ ID NO: 916118
gccagauaugcuugggauc

SEQ ID NO: 1131859 - RNA, 19 nt, Artificial Sequence
  Description of Artificial Sequence: Synthetic oligonucleotide
  Antisense strand to SEQ ID NO: 1131858
gaucccaagcauaucuggc

SEQ ID NO: 1131860 - RNA, 19 nt, Artificial Sequence
  Description of Artificial Sequence: Synthetic oligonucleotide
  Sense strand starting at position 2639 of SEQ ID NO: 916118
cacugagucgugggaaaug

SEQ ID NO: 1131861 - RNA, 19 nt, Artificial Sequence
  Description of Artificial Sequence: Synthetic oligonucleotide
  Antisense strand to SEQ ID NO: 1131860
cauuucccacgacucagug

SEQ ID NO: 1131862 - RNA, 19 nt, Artificial Sequence
  Description of Artificial Sequence: Synthetic oligonucleotide
  Sense strand starting at position 2672 of SEQ ID NO: 916118
cacaguuuccgcgccauua

SEQ ID NO: 1131863 - RNA, 19 nt, Artificial Sequence
  Description of Artificial Sequence: Synthetic oligonucleotide
  Antisense strand to SEQ ID NO: 1131862
uaauggcgcggaaacugug

SEQ ID NO: 1131864 - RNA, 19 nt, Artificial Sequence
  Description of Artificial Sequence: Synthetic oligonucleotide
  Sense strand starting at position 2673 of SEQ ID NO: 916118
acaguuuccgcgccauuau

SEQ ID NO: 1131865 - RNA, 19 nt, Artificial Sequence
  Description of Artificial Sequence: Synthetic oligonucleotide
  Antisense strand to SEQ ID NO: 1131864
auaauggcgcggaaacugu

SEQ ID NO: 1131866 - RNA, 19 nt, Artificial Sequence
  Description of Artificial Sequence: Synthetic oligonucleotide
  Sense strand starting at position 2676 of SEQ ID NO: 916118
guuuccgcgccauuauauu

SEQ ID NO: 1131867 - RNA, 19 nt, Artificial Sequence
  Description of Artificial Sequence: Synthetic oligonucleotide
  Antisense strand to SEQ ID NO: 1131866
aauauaauggcgcggaaac

SEQ ID NO: 1131868 - RNA, 19 nt, Artificial Sequence
  Description of Artificial Sequence: Synthetic oligonucleotide
  Sense strand starting at position 2715 of SEQ ID NO: 916118
gggcuucgucugaguagua

SEQ ID NO: 1131869 - RNA, 19 nt, Artificial Sequence
  Description of Artificial Sequence: Synthetic oligonucleotide
  Antisense strand to SEQ ID NO: 1131868
uacuacucagacgaagccc

SEQ ID NO: 1131870 - RNA, 19 nt, Artificial Sequence
  Description of Artificial Sequence: Synthetic oligonucleotide
  Sense strand starting at position 2725 of SEQ ID NO: 916118
ugaguaguagcucaggguu

SEQ ID NO: 1131871 - RNA, 19 nt, Artificial Sequence
  Description of Artificial Sequence: Synthetic oligonucleotide
  Antisense strand to SEQ ID NO: 1131870
aacccugagcuacuacuca

SEQ ID NO: 1131872 - RNA, 19 nt, Artificial Sequence
  Description of Artificial Sequence: Synthetic oligonucleotide
  Sense strand starting at position 2769 of SEQ ID NO: 916118
ggccucagguccuuuggaa

SEQ ID NO: 1131873 - RNA, 19 nt, Artificial Sequence
  Description of Artificial Sequence: Synthetic oligonucleotide
  Antisense strand to SEQ ID NO: 1131872
uuccaaaggaccugaggcc

SEQ ID NO: 1131874 - RNA, 19 nt, Artificial Sequence
  Description of Artificial Sequence: Synthetic oligonucleotide
  Sense strand starting at position 2846 of SEQ ID NO: 916118
acagcuuugcaaggugaaa

SEQ ID NO: 1131875 - RNA, 19 nt, Artificial Sequence
  Description of Artificial Sequence: Synthetic oligonucleotide
  Antisense strand to SEQ ID NO: 1131874
uuucaccuugcaaagcugu

SEQ ID NO: 1131876 - RNA, 19 nt, Artificial Sequence
  Description of Artificial Sequence: Synthetic oligonucleotide
  Sense strand starting at position 2900 of SEQ ID NO: 916118
uuauuugguucugaaccaa

SEQ ID NO: 1131877 - RNA, 19 nt, Artificial Sequence
  Description of Artificial Sequence: Synthetic oligonucleotide
  Antisense strand to SEQ ID NO: 1131876
uugguucagaaccaaauaa

SEQ ID NO: 1131878 - RNA, 19 nt, Artificial Sequence
  Description of Artificial Sequence: Synthetic oligonucleotide
  Sense strand starting at position 3061 of SEQ ID NO: 916118
cguucuuugcaacaugaca

SEQ ID NO: 1131879 - RNA, 19 nt, Artificial Sequence
  Description of Artificial Sequence: Synthetic oligonucleotide
  Antisense strand to SEQ ID NO: 1131878
ugucauguugcaaagaacg

SEQ ID NO: 1131880 - RNA, 19 nt, Artificial Sequence
  Description of Artificial Sequence: Synthetic oligonucleotide
  Sense strand starting at position 3074 of SEQ ID NO: 916118
augacauuccuuuauugug

SEQ ID NO: 1131881 - RNA, 19 nt, Artificial Sequence
  Description of Artificial Sequence: Synthetic oligonucleotide
  Antisense strand to SEQ ID NO: 1131880
cacaauaaaggaaugucau

SEQ ID NO: 1131882 - RNA, 19 nt, Artificial Sequence
  Description of Artificial Sequence: Synthetic oligonucleotide
  Sense strand starting at position 3103 of SEQ ID NO: 916118
gggagagggucuucagcau

SEQ ID NO: 1131883 - RNA, 19 nt, Artificial Sequence
  Description of Artificial Sequence: Synthetic oligonucleotide
  Antisense strand to SEQ ID NO: 1131882
augcugaagacccucuccc

SEQ ID NO: 1131884 - RNA, 19 nt, Artificial Sequence
  Description of Artificial Sequence: Synthetic oligonucleotide
  Sense strand starting at position 3553 of SEQ ID NO: 916118
ucacucuuggucugggaca

SEQ ID NO: 1131885 - RNA, 19 nt, Artificial Sequence
  Description of Artificial Sequence: Synthetic oligonucleotide
  Antisense strand to SEQ ID NO: 1131884
ugucccagaccaagaguga

SEQ ID NO: 1131886 - RNA, 19 nt, Artificial Sequence
  Description of Artificial Sequence: Synthetic oligonucleotide
  Sense strand starting at position 3555 of SEQ ID NO: 916118
acucuuggucugggacaau

SEQ ID NO: 1131887 - RNA, 19 nt, Artificial Sequence
  Description of Artificial Sequence: Synthetic oligonucleotide
  Antisense strand to SEQ ID NO: 1131886
auugucccagaccaagagu

SEQ ID NO: 1131888 - RNA, 19 nt, Artificial Sequence
  Description of Artificial Sequence: Synthetic oligonucleotide
  Sense strand starting at position 3576 of SEQ ID NO: 916118
aucaauacaguggguuaua

SEQ ID NO: 1131889 - RNA, 19 nt, Artificial Sequence
  Description of Artificial Sequence: Synthetic oligonucleotide
  Antisense strand to SEQ ID NO: 1131888
uauaacccacuguauugau

SEQ ID NO: 1131890 - RNA, 19 nt, Artificial Sequence
  Description of Artificial Sequence: Synthetic oligonucleotide
  Sense strand starting at position 3577 of SEQ ID NO: 916118
ucaauacaguggguuauaa

SEQ ID NO: 1131891 - RNA, 19 nt, Artificial Sequence
  Description of Artificial Sequence: Synthetic oligonucleotide
  Antisense strand to SEQ ID NO: 1131890
uuauaacccacuguauuga

SEQ ID NO: 1131892 - RNA, 19 nt, Artificial Sequence
  Description of Artificial Sequence: Synthetic oligonucleotide
  Sense strand starting at position 3682 of SEQ ID NO: 916118
cgugcuuugaggcaauuaa

SEQ ID NO: 1131893 - RNA, 19 nt, Artificial Sequence
  Description of Artificial Sequence: Synthetic oligonucleotide
  Antisense strand to SEQ ID NO: 1131892
uuaauugccucaaagcacg

SEQ ID NO: 1131894 - RNA, 19 nt, Artificial Sequence
  Description of Artificial Sequence: Synthetic oligonucleotide
  Sense strand starting at position 3729 of SEQ ID NO: 916118
ucauaaaugcuucggaaga

SEQ ID NO: 1131895 - RNA, 19 nt, Artificial Sequence
  Description of Artificial Sequence: Synthetic oligonucleotide
  Antisense strand to SEQ ID NO: 1131894
ucuuccgaagcauuuauga

SEQ ID NO: 1131896 - RNA, 19 nt, Artificial Sequence
  Description of Artificial Sequence: Synthetic oligonucleotide
  Sense strand starting at position 3753 of SEQ ID NO: 916118
ugaucuuucugagcaauca

SEQ ID NO: 1131897 - RNA, 19 nt, Artificial Sequence
  Description of Artificial Sequence: Synthetic oligonucleotide
  Antisense strand to SEQ ID NO: 1131896
ugauugcucagaaagauca

SEQ ID NO: 1131898 - RNA, 19 nt, Artificial Sequence
  Description of Artificial Sequence: Synthetic oligonucleotide
  Sense strand starting at position 3765 of SEQ ID NO: 916118
gcaaucauuugagcuguuu

SEQ ID NO: 1131899 - RNA, 19 nt, Artificial Sequence
  Description of Artificial Sequence: Synthetic oligonucleotide
  Antisense strand to SEQ ID NO: 1131898
aaacagcucaaaugauugc

SEQ ID NO: 1131900 - RNA, 19 nt, Artificial Sequence
  Description of Artificial Sequence: Synthetic oligonucleotide
  Sense strand starting at position 3843 of SEQ ID NO: 916118
uuccaugaggucuggguaa

SEQ ID NO: 1131901 - RNA, 19 nt, Artificial Sequence
  Description of Artificial Sequence: Synthetic oligonucleotide
  Antisense strand to SEQ ID NO: 1131900
uuacccagaccucauggaa

SEQ ID NO: 1131902 - RNA, 19 nt, Artificial Sequence
  Description of Artificial Sequence: Synthetic oligonucleotide
  Sense strand starting at position 3845 of SEQ ID NO: 916118
ccaugaggucuggguaaau

SEQ ID NO: 1131903 - RNA, 19 nt, Artificial Sequence
  Description of Artificial Sequence: Synthetic oligonucleotide
  Antisense strand to SEQ ID NO: 1131902
auuuacccagaccucaugg

SEQ ID NO: 1131904 - RNA, 19 nt, Artificial Sequence
  Description of Artificial Sequence: Synthetic oligonucleotide
  Sense strand starting at position 3924 of SEQ ID NO: 916118
augaauuaggccuaguuag

SEQ ID NO: 1131905 - RNA, 19 nt, Artificial Sequence
  Description of Artificial Sequence: Synthetic oligonucleotide
  Antisense strand to SEQ ID NO: 1131904
cuaacuaggccuaauucau

SEQ ID NO: 1131906 - RNA, 19 nt, Artificial Sequence
  Description of Artificial Sequence: Synthetic oligonucleotide
  Sense strand starting at position 3959 of SEQ ID NO: 916118
guuucccugccagauuaaa

SEQ ID NO: 1131907 - RNA, 19 nt, Artificial Sequence
  Description of Artificial Sequence: Synthetic oligonucleotide
  Antisense strand to SEQ ID NO: 1131906
uuuaaucuggcagggaaac

SEQ ID NO: 1131908 - RNA, 19 nt, Artificial Sequence
  Description of Artificial Sequence: Synthetic oligonucleotide
  Sense strand starting at position 3971 of SEQ ID NO: 916118
gauuaaauugcacgugaug

SEQ ID NO: 1131909 - RNA, 19 nt, Artificial Sequence
  Description of Artificial Sequence: Synthetic oligonucleotide
  Antisense strand to SEQ ID NO: 1131908
caucacgugcaauuuaauc

SEQ ID NO: 1131910 - RNA, 19 nt, Artificial Sequence
  Description of Artificial Sequence: Synthetic oligonucleotide
  Sense strand starting at position 687 of SEQ ID NO: 916119
caagaugcccaaugguaga

SEQ ID NO: 1131911 - RNA, 19 nt, Artificial Sequence
  Description of Artificial Sequence: Synthetic oligonucleotide
  Antisense strand to SEQ ID NO: 1131910
ucuaccauugggcaucuug

SEQ ID NO: 1131912 - RNA, 19 nt, Artificial Sequence
  Description of Artificial Sequence: Synthetic oligonucleotide
  Sense strand starting at position 1081 of SEQ ID NO: 916119
guugacugggcuugggaau

SEQ ID NO: 1131913 - RNA, 19 nt, Artificial Sequence
  Description of Artificial Sequence: Synthetic oligonucleotide
  Antisense strand to SEQ ID NO: 1131912
auucccaagcccagucaac

SEQ ID NO: 1131914 - RNA, 19 nt, Artificial Sequence
  Description of Artificial Sequence: Synthetic oligonucleotide
  Sense strand starting at position 1082 of SEQ ID NO: 916119
uugacugggcuugggaaua

SEQ ID NO: 1131915 - RNA, 19 nt, Artificial Sequence
  Description of Artificial Sequence: Synthetic oligonucleotide
  Antisense strand to SEQ ID NO: 1131914
uauucccaagcccagucaa

SEQ ID NO: 1131916 - RNA, 19 nt, Artificial Sequence
  Description of Artificial Sequence: Synthetic oligonucleotide
  Sense strand starting at position 1182 of SEQ ID NO: 916119
uagaaaguuugagugugau

SEQ ID NO: 1131917 - RNA, 19 nt, Artificial Sequence
  Description of Artificial Sequence: Synthetic oligonucleotide
  Antisense strand to SEQ ID NO: 1131916
aucacacucaaacuuucua

SEQ ID NO: 1131918 - RNA, 19 nt, Artificial Sequence
  Description of Artificial Sequence: Synthetic oligonucleotide
  Sense strand starting at position 1234 of SEQ ID NO: 916119
ucaggaccucucugaucau

SEQ ID NO: 1131919 - RNA, 19 nt, Artificial Sequence
  Description of Artificial Sequence: Synthetic oligonucleotide
  Antisense strand to SEQ ID NO: 1131918
augaucagagagguccuga

SEQ ID NO: 1131920 - RNA, 19 nt, Artificial Sequence
  Description of Artificial Sequence: Synthetic oligonucleotide
  Sense strand starting at position 1293 of SEQ ID NO: 916119
uguccaucucaggacgagu

SEQ ID NO: 1131921 - RNA, 19 nt, Artificial Sequence
  Description of Artificial Sequence: Synthetic oligonucleotide
  Antisense strand to SEQ ID NO: 1131920
acucguccugagauggaca

SEQ ID NO: 1131922 - RNA, 19 nt, Artificial Sequence
  Description of Artificial Sequence: Synthetic oligonucleotide
  Sense strand starting at position 1302 of SEQ ID NO: 916119
caggacgaguccucaguga

SEQ ID NO: 1131923 - RNA, 19 nt, Artificial Sequence
  Description of Artificial Sequence: Synthetic oligonucleotide
  Antisense strand to SEQ ID NO: 1131922
ucacugaggacucguccug

SEQ ID NO: 1131924 - RNA, 19 nt, Artificial Sequence
  Description of Artificial Sequence: Synthetic oligonucleotide
  Sense strand starting at position 1306 of SEQ ID NO: 916119
acgaguccucagugaauga

SEQ ID NO: 1131925 - RNA, 19 nt, Artificial Sequence
  Description of Artificial Sequence: Synthetic oligonucleotide
  Antisense strand to SEQ ID NO: 1131924
ucauucacugaggacucgu

SEQ ID NO: 1131926 - RNA, 19 nt, Artificial Sequence
  Description of Artificial Sequence: Synthetic oligonucleotide
  Sense strand starting at position 1307 of SEQ ID NO: 916119
cgaguccucagugaaugaa

SEQ ID NO: 1131927 - RNA, 19 nt, Artificial Sequence
  Description of Artificial Sequence: Synthetic oligonucleotide
  Antisense strand to SEQ ID NO: 1131926
uucauucacugaggacucg

SEQ ID NO: 1131928 - RNA, 19 nt, Artificial Sequence
  Description of Artificial Sequence: Synthetic oligonucleotide
  Sense strand starting at position 1400 of SEQ ID NO: 916119
uguacuuuaucugcaggau

SEQ ID NO: 1131929 - RNA, 19 nt, Artificial Sequence
  Description of Artificial Sequence: Synthetic oligonucleotide
  Antisense strand to SEQ ID NO: 1131928
auccugcagauaaaguaca

SEQ ID NO: 1131930 - RNA, 19 nt, Artificial Sequence
  Description of Artificial Sequence: Synthetic oligonucleotide
  Sense strand starting at position 1401 of SEQ ID NO: 916119
guacuuuaucugcaggauc

SEQ ID NO: 1131931 - RNA, 19 nt, Artificial Sequence
  Description of Artificial Sequence: Synthetic oligonucleotide
  Antisense strand to SEQ ID NO: 1131930
gauccugcagauaaaguac

SEQ ID NO: 1131932 - RNA, 19 nt, Artificial Sequence
  Description of Artificial Sequence: Synthetic oligonucleotide
  Sense strand starting at position 1436 of SEQ ID NO: 916119
gcgagaaggcgcuuucgca

SEQ ID NO: 1131933 - RNA, 19 nt, Artificial Sequence
  Description of Artificial Sequence: Synthetic oligonucleotide
  Antisense strand to SEQ ID NO: 1131932
ugcgaaagcgccuucucgc

SEQ ID NO: 1131934 - RNA, 19 nt, Artificial Sequence
  Description of Artificial Sequence: Synthetic oligonucleotide
  Sense strand starting at position 1579 of SEQ ID NO: 916119
acuagucaguccuuucuga

SEQ ID NO: 1131935 - RNA, 19 nt, Artificial Sequence
  Description of Artificial Sequence: Synthetic oligonucleotide
  Antisense strand to SEQ ID NO: 1131934
ucagaaaggacugacuagu

SEQ ID NO: 1131936 - RNA, 19 nt, Artificial Sequence
  Description of Artificial Sequence: Synthetic oligonucleotide
  Sense strand starting at position 1858 of SEQ ID NO: 916119
cagggugcucgcgaaagaa

SEQ ID NO: 1131937 - RNA, 19 nt, Artificial Sequence
  Description of Artificial Sequence: Synthetic oligonucleotide
  Antisense strand to SEQ ID NO: 1131936
uucuuucgcgagcacccug

SEQ ID NO: 1131938 - RNA, 19 nt, Artificial Sequence
  Description of Artificial Sequence: Synthetic oligonucleotide
  Sense strand starting at position 1880 of SEQ ID NO: 916119
gcuucuccugagcaucaua

SEQ ID NO: 1131939 - RNA, 19 nt, Artificial Sequence
  Description of Artificial Sequence: Synthetic oligonucleotide
  Antisense strand to SEQ ID NO: 1131938
uaugaugcucaggagaagc

SEQ ID NO: 1131940 - RNA, 19 nt, Artificial Sequence
  Description of Artificial Sequence: Synthetic oligonucleotide
  Sense strand starting at position 2184 of SEQ ID NO: 916119
acuagucagucucugauau

SEQ ID NO: 1131941 - RNA, 19 nt, Artificial Sequence
  Description of Artificial Sequence: Synthetic oligonucleotide
  Antisense strand to SEQ ID NO: 1131940
auaucagagacugacuagu

SEQ ID NO: 1131942 - RNA, 19 nt, Artificial Sequence
  Description of Artificial Sequence: Synthetic oligonucleotide
  Sense strand starting at position 2185 of SEQ ID NO: 916119
cuagucagucucugauauu

SEQ ID NO: 1131943 - RNA, 19 nt, Artificial Sequence
  Description of Artificial Sequence: Synthetic oligonucleotide
  Antisense strand to SEQ ID NO: 1131942
aauaucagagacugacuag

SEQ ID NO: 1131944 - RNA, 19 nt, Artificial Sequence
  Description of Artificial Sequence: Synthetic oligonucleotide
  Sense strand starting at position 2333 of SEQ ID NO: 916119
guaucuucucugcauuauu

SEQ ID NO: 1131945 - RNA, 19 nt, Artificial Sequence
  Description of Artificial Sequence: Synthetic oligonucleotide
  Antisense strand to SEQ ID NO: 1131944
aauaaugcagagaagauac

SEQ ID NO: 1131946 - RNA, 19 nt, Artificial Sequence
  Description of Artificial Sequence: Synthetic oligonucleotide
  Sense strand starting at position 2450 of SEQ ID NO: 916119
ucuuucuuucuugaggaua

SEQ ID NO: 1131947 - RNA, 19 nt, Artificial Sequence
  Description of Artificial Sequence: Synthetic oligonucleotide
  Antisense strand to SEQ ID NO: 1131946
uauccucaagaaagaaaga

SEQ ID NO: 1131948 - RNA, 19 nt, Artificial Sequence
  Description of Artificial Sequence: Synthetic oligonucleotide
  Sense strand starting at position 2472 of SEQ ID NO: 916119
gggucucuuggguauacaa

SEQ ID NO: 1131949 - RNA, 19 nt, Artificial Sequence
  Description of Artificial Sequence: Synthetic oligonucleotide
  Antisense strand to SEQ ID NO: 1131948
uuguauacccaagagaccc

SEQ ID NO: 1131950 - RNA, 19 nt, Artificial Sequence
  Description of Artificial Sequence: Synthetic oligonucleotide
  Sense strand starting at position 2590 of SEQ ID NO: 916119
gagcuaaauggauguggau

SEQ ID NO: 1131951 - RNA, 19 nt, Artificial Sequence
  Description of Artificial Sequence: Synthetic oligonucleotide
  Antisense strand to SEQ ID NO: 1131950
auccacauccauuuagcuc

SEQ ID NO: 1131952 - RNA, 19 nt, Artificial Sequence
  Description of Artificial Sequence: Synthetic oligonucleotide
  Sense strand starting at position 2599 of SEQ ID NO: 916119
ggauguggauguucuaauu

SEQ ID NO: 1131953 - RNA, 19 nt, Artificial Sequence
  Description of Artificial Sequence: Synthetic oligonucleotide
  Antisense strand to SEQ ID NO: 1131952
aauuagaacauccacaucc

SEQ ID NO: 1131954 - RNA, 19 nt, Artificial Sequence
  Description of Artificial Sequence: Synthetic oligonucleotide
  Sense strand starting at position 2920 of SEQ ID NO: 916119
guggaacugucucuacaaa

SEQ ID NO: 1131955 - RNA, 19 nt, Artificial Sequence
  Description of Artificial Sequence: Synthetic oligonucleotide
  Antisense strand to SEQ ID NO: 1131954
uuuguagagacaguuccac

SEQ ID NO: 1131956 - RNA, 19 nt, Artificial Sequence
  Description of Artificial Sequence: Synthetic oligonucleotide
  Sense strand starting at position 3200 of SEQ ID NO: 916119
ucuggaauugaaggucaau

SEQ ID NO: 1131957 - RNA, 19 nt, Artificial Sequence
  Description of Artificial Sequence: Synthetic oligonucleotide
  Antisense strand to SEQ ID NO: 1131956
auugaccuucaauuccaga

SEQ ID NO: 1131958 - RNA, 19 nt, Artificial Sequence
  Description of Artificial Sequence: Synthetic oligonucleotide
  Sense strand starting at position 3206 of SEQ ID NO: 916119
auugaaggucaaugugaaa

SEQ ID NO: 1131959 - RNA, 19 nt, Artificial Sequence
  Description of Artificial Sequence: Synthetic oligonucleotide
  Antisense strand to SEQ ID NO: 1131958
uuucacauugaccuucaau

SEQ ID NO: 1131960 - RNA, 19 nt, Artificial Sequence
  Description of Artificial Sequence: Synthetic oligonucleotide
  Sense strand starting at position 3334 of SEQ ID NO: 916119
guagaaggcauaugauaca

SEQ ID NO: 1131961 - RNA, 19 nt, Artificial Sequence
  Description of Artificial Sequence: Synthetic oligonucleotide
  Antisense strand to SEQ ID NO: 1131960
uguaucauaugccuucuac

SEQ ID NO: 1131962 - RNA, 19 nt, Artificial Sequence
  Description of Artificial Sequence: Synthetic oligonucleotide
  Sense strand starting at position 3363 of SEQ ID NO: 916119
uuuccugagaaauggcaga

SEQ ID NO: 1131963 - RNA, 19 nt, Artificial Sequence
  Description of Artificial Sequence: Synthetic oligonucleotide
  Antisense strand to SEQ ID NO: 1131962
ucugccauuucucaggaaa

SEQ ID NO: 1131964 - RNA, 19 nt, Artificial Sequence
  Description of Artificial Sequence: Synthetic oligonucleotide
  Sense strand starting at position 3383 of SEQ ID NO: 916119
uaggcauguguacacauau

SEQ ID NO: 1131965 - RNA, 19 nt, Artificial Sequence
  Description of Artificial Sequence: Synthetic oligonucleotide
  Antisense strand to SEQ ID NO: 1131964
auauguguacacaugccua

SEQ ID NO: 1131966 - RNA, 19 nt, Artificial Sequence
  Description of Artificial Sequence: Synthetic oligonucleotide
  Sense strand starting at position 3425 of SEQ ID NO: 916119
agcaaacagaagugguaau

SEQ ID NO: 1131967 - RNA, 19 nt, Artificial Sequence
  Description of Artificial Sequence: Synthetic oligonucleotide
  Antisense strand to SEQ ID NO: 1131966
auuaccacuucuguuugcu

SEQ ID NO: 1131968 - RNA, 19 nt, Artificial Sequence
  Description of Artificial Sequence: Synthetic oligonucleotide
  Sense strand starting at position 3426 of SEQ ID NO: 916119
gcaaacagaagugguaauu

SEQ ID NO: 1131969 - RNA, 19 nt, Artificial Sequence
  Description of Artificial Sequence: Synthetic oligonucleotide
  Antisense strand to SEQ ID NO: 1131968
aauuaccacuucuguuugc

SEQ ID NO: 1131970 - RNA, 19 nt, Artificial Sequence
  Description of Artificial Sequence: Synthetic oligonucleotide
  Sense strand starting at position 3438 of SEQ ID NO: 916119
gguaauugagccuagcaag

SEQ ID NO: 1131971 - RNA, 19 nt, Artificial Sequence
  Description of Artificial Sequence: Synthetic oligonucleotide
  Antisense strand to SEQ ID NO: 1131970
cuugcuaggcucaauuacc

SEQ ID NO: 1131972 - RNA, 19 nt, Artificial Sequence
  Description of Artificial Sequence: Synthetic oligonucleotide
  Sense strand starting at position 3694 of SEQ ID NO: 916119
aagagaguacugugucuca

SEQ ID NO: 1131973 - RNA, 19 nt, Artificial Sequence
  Description of Artificial Sequence: Synthetic oligonucleotide
  Antisense strand to SEQ ID NO: 1131972
ugagacacaguacucucuu

SEQ ID NO: 1131974 - RNA, 19 nt, Artificial Sequence
  Description of Artificial Sequence: Synthetic oligonucleotide
  Sense strand starting at position 3756 of SEQ ID NO: 916119
uucucuaaucccugggaga

SEQ ID NO: 1131975 - RNA, 19 nt, Artificial Sequence
  Description of Artificial Sequence: Synthetic oligonucleotide
  Antisense strand to SEQ ID NO: 1131974
ucucccagggauuagagaa

SEQ ID NO: 1131976 - RNA, 19 nt, Artificial Sequence
  Description of Artificial Sequence: Synthetic oligonucleotide
  Sense strand starting at position 3757 of SEQ ID NO: 916119
ucucuaaucccugggagac

SEQ ID NO: 1131977 - RNA, 19 nt, Artificial Sequence
  Description of Artificial Sequence: Synthetic oligonucleotide
  Antisense strand to SEQ ID NO: 1131976
gucucccagggauuagaga

SEQ ID NO: 1131978 - RNA, 19 nt, Artificial Sequence
  Description of Artificial Sequence: Synthetic oligonucleotide
  Sense strand starting at position 3850 of SEQ ID NO: 916119
gaucuuguauucuucggaa

SEQ ID NO: 1131979 - RNA, 19 nt, Artificial Sequence
  Description of Artificial Sequence: Synthetic oligonucleotide
  Antisense strand to SEQ ID NO: 1131978
uuccgaagaauacaagauc

SEQ ID NO: 1131980 - RNA, 19 nt, Artificial Sequence
  Description of Artificial Sequence: Synthetic oligonucleotide
  Sense strand starting at position 3852 of SEQ ID NO: 916119
ucuuguauucuucggaaga

SEQ ID NO: 1131981 - RNA, 19 nt, Artificial Sequence
  Description of Artificial Sequence: Synthetic oligonucleotide
  Antisense strand to SEQ ID NO: 1131980
ucuuccgaagaauacaaga

SEQ ID NO: 1131982 - RNA, 19 nt, Artificial Sequence
  Description of Artificial Sequence: Synthetic oligonucleotide
  Sense strand starting at position 3863 of SEQ ID NO: 916119
ucggaagauggcugggaaa

SEQ ID NO: 1131983 - RNA, 19 nt, Artificial Sequence
  Description of Artificial Sequence: Synthetic oligonucleotide
  Antisense strand to SEQ ID NO: 1131982
uuucccagccaucuuccga

SEQ ID NO: 1131984 - RNA, 19 nt, Artificial Sequence
  Description of Artificial Sequence: Synthetic oligonucleotide
  Sense strand starting at position 3920 of SEQ ID NO: 916119
aguugaggugccuagaugu

SEQ ID NO: 1131985 - RNA, 19 nt, Artificial Sequence
  Description of Artificial Sequence: Synthetic oligonucleotide
  Antisense strand to SEQ ID NO: 1131984
acaucuaggcaccucaacu

SEQ ID NO: 1131986 - RNA, 19 nt, Artificial Sequence
  Description of Artificial Sequence: Synthetic oligonucleotide
  Sense strand starting at position 3927 of SEQ ID NO: 916119
gugccuagaugucccacaa

SEQ ID NO: 1131987 - RNA, 19 nt, Artificial Sequence
  Description of Artificial Sequence: Synthetic oligonucleotide
  Antisense strand to SEQ ID NO: 1131986
uugugggacaucuaggcac

SEQ ID NO: 1131988 - RNA, 19 nt, Artificial Sequence
  Description of Artificial Sequence: Synthetic oligonucleotide
  Sense strand starting at position 3948 of SEQ ID NO: 916119
gggucuucacucugggaga

SEQ ID NO: 1131989 - RNA, 19 nt, Artificial Sequence
  Description of Artificial Sequence: Synthetic oligonucleotide
  Antisense strand to SEQ ID NO: 1131988
ucucccagagugaagaccc

SEQ ID NO: 1131990 - RNA, 19 nt, Artificial Sequence
  Description of Artificial Sequence: Synthetic oligonucleotide
  Sense strand starting at position 25 of SEQ ID NO: 916120
ugagaaucaagccgguaaa

SEQ ID NO: 1131991 - RNA, 19 nt, Artificial Sequence
  Description of Artificial Sequence: Synthetic oligonucleotide
  Antisense strand to SEQ ID NO: 1131990
uuuaccggcuugauucuca

SEQ ID NO: 1131992 - RNA, 19 nt, Artificial Sequence
  Description of Artificial Sequence: Synthetic oligonucleotide
  Sense strand starting at position 26 of SEQ ID NO: 916120
gagaaucaagccgguaaau

SEQ ID NO: 1131993 - RNA, 19 nt, Artificial Sequence
  Description of Artificial Sequence: Synthetic oligonucleotide
  Antisense strand to SEQ ID NO: 1131992
auuuaccggcuugauucuc

SEQ ID NO: 1131994 - RNA, 19 nt, Artificial Sequence
  Description of Artificial Sequence: Synthetic oligonucleotide
  Sense strand starting at position 28 of SEQ ID NO: 916120
gaaucaagccgguaaauag

SEQ ID NO: 1131995 - RNA, 19 nt, Artificial Sequence
  Description of Artificial Sequence: Synthetic oligonucleotide
  Antisense strand to SEQ ID NO: 1131994
cuauuuaccggcuugauuc

SEQ ID NO: 1131996 - RNA, 19 nt, Artificial Sequence
  Description of Artificial Sequence: Synthetic oligonucleotide
  Sense strand starting at position 139 of SEQ ID NO: 916120
uuuagaguguugguaggaa

SEQ ID NO: 1131997 - RNA, 19 nt, Artificial Sequence
  Description of Artificial Sequence: Synthetic oligonucleotide
  Antisense strand to SEQ ID NO: 1131996
uuccuaccaacacucuaaa

SEQ ID NO: 1131998 - RNA, 19 nt, Artificial Sequence
  Description of Artificial Sequence: Synthetic oligonucleotide
  Sense strand starting at position 395 of SEQ ID NO: 916120
gauugcagugggcagaaau

SEQ ID NO: 1131999 - RNA, 19 nt, Artificial Sequence
  Description of Artificial Sequence: Synthetic oligonucleotide
  Antisense strand to SEQ ID NO: 1131998
auuucugcccacugcaauc

SEQ ID NO: 1132000 - RNA, 19 nt, Artificial Sequence
  Description of Artificial Sequence: Synthetic oligonucleotide
  Sense strand starting at position 627 of SEQ ID NO: 916120
gcaugagguccucaugaca

SEQ ID NO: 1132001 - RNA, 19 nt, Artificial Sequence
  Description of Artificial Sequence: Synthetic oligonucleotide
  Antisense strand to SEQ ID NO: 1132000
ugucaugaggaccucaugc

SEQ ID NO: 1132002 - RNA, 19 nt, Artificial Sequence
  Description of Artificial Sequence: Synthetic oligonucleotide
  Sense strand starting at position 655 of SEQ ID NO: 916120
cagauugucagauguggca

SEQ ID NO: 1132003 - RNA, 19 nt, Artificial Sequence
  Description of Artificial Sequence: Synthetic oligonucleotide
  Antisense strand to SEQ ID NO: 1132002
ugccacaucugacaaucug

SEQ ID NO: 1132004 - RNA, 19 nt, Artificial Sequence
  Description of Artificial Sequence: Synthetic oligonucleotide
  Sense strand starting at position 657 of SEQ ID NO: 916120
gauugucagauguggcaga

SEQ ID NO: 1132005 - RNA, 19 nt, Artificial Sequence
  Description of Artificial Sequence: Synthetic oligonucleotide
  Antisense strand to SEQ ID NO: 1132004
ucugccacaucugacaauc

SEQ ID NO: 1132006 - RNA, 19 nt, Artificial Sequence
  Description of Artificial Sequence: Synthetic oligonucleotide
  Sense strand starting at position 672 of SEQ ID NO: 916120
cagauccagccuuagguaa

SEQ ID NO: 1132007 - RNA, 19 nt, Artificial Sequence
  Description of Artificial Sequence: Synthetic oligonucleotide
  Antisense strand to SEQ ID NO: 1132006
uuaccuaaggcuggaucug

SEQ ID NO: 1132008 - RNA, 19 nt, Artificial Sequence
  Description of Artificial Sequence: Synthetic oligonucleotide
  Sense strand starting at position 831 of SEQ ID NO: 916120
gcaagcuuggaguauguau

SEQ ID NO: 1132009 - RNA, 19 nt, Artificial Sequence
  Description of Artificial Sequence: Synthetic oligonucleotide
  Antisense strand to SEQ ID NO: 1132008
auacauacuccaagcuugc

SEQ ID NO: 1132010 - RNA, 19 nt, Artificial Sequence
  Description of Artificial Sequence: Synthetic oligonucleotide
  Sense strand starting at position 838 of SEQ ID NO: 916120
uggaguauguaucccagaa

SEQ ID NO: 1132011 - RNA, 19 nt, Artificial Sequence
  Description of Artificial Sequence: Synthetic oligonucleotide
  Antisense strand to SEQ ID NO: 1132010
uucugggauacauacucca

SEQ ID NO: 1132012 - RNA, 19 nt, Artificial Sequence
  Description of Artificial Sequence: Synthetic oligonucleotide
  Sense strand starting at position 858 of SEQ ID NO: 916120
augcaaacagcugggauua

SEQ ID NO: 1132013 - RNA, 19 nt, Artificial Sequence
  Description of Artificial Sequence: Synthetic oligonucleotide
  Antisense strand to SEQ ID NO: 1132012
uaaucccagcuguuugcau

SEQ ID NO: 1132014 - RNA, 19 nt, Artificial Sequence
  Description of Artificial Sequence: Synthetic oligonucleotide
  Sense strand starting at position 859 of SEQ ID NO: 916120
ugcaaacagcugggauuau

SEQ ID NO: 1132015 - RNA, 19 nt, Artificial Sequence
  Description of Artificial Sequence: Synthetic oligonucleotide
  Antisense strand to SEQ ID NO: 1132014
auaaucccagcuguuugca

SEQ ID NO: 1132016 - RNA, 19 nt, Artificial Sequence
  Description of Artificial Sequence: Synthetic oligonucleotide
  Sense strand starting at position 868 of SEQ ID NO: 916120
cugggauuauuauauuugu

SEQ ID NO: 1132017 - RNA, 19 nt, Artificial Sequence
  Description of Artificial Sequence: Synthetic oligonucleotide
  Antisense strand to SEQ ID NO: 1132016
acaaauauaauaaucccag

SEQ ID NO: 1132018 - RNA, 19 nt, Artificial Sequence
  Description of Artificial Sequence: Synthetic oligonucleotide
  Sense strand starting at position 918 of SEQ ID NO: 916120
ugauuagaaugucugugua

SEQ ID NO: 1132019 - RNA, 19 nt, Artificial Sequence
  Description of Artificial Sequence: Synthetic oligonucleotide
  Antisense strand to SEQ ID NO: 1132018
uacacagacauucuaauca

SEQ ID NO: 1132020 - RNA, 19 nt, Artificial Sequence
  Description of Artificial Sequence: Synthetic oligonucleotide
  Sense strand starting at position 920 of SEQ ID NO: 916120
auuagaaugucuguguaag

SEQ ID NO: 1132021 - RNA, 19 nt, Artificial Sequence
  Description of Artificial Sequence: Synthetic oligonucleotide
  Antisense strand to SEQ ID NO: 1132020
cuuacacagacauucuaau

SEQ ID NO: 1132022 - RNA, 19 nt, Artificial Sequence
  Description of Artificial Sequence: Synthetic oligonucleotide
  Sense strand starting at position 922 of SEQ ID NO: 916120
uagaaugucuguguaagug

SEQ ID NO: 1132023 - RNA, 19 nt, Artificial Sequence
  Description of Artificial Sequence: Synthetic oligonucleotide
  Antisense strand to SEQ ID NO: 1132022
cacuuacacagacauucua

SEQ ID NO: 1132024 - RNA, 19 nt, Artificial Sequence
  Description of Artificial Sequence: Synthetic oligonucleotide
  Sense strand starting at position 1029 of SEQ ID NO: 916120
ucaacugcucuaggaagua

SEQ ID NO: 1132025 - RNA, 19 nt, Artificial Sequence
  Description of Artificial Sequence: Synthetic oligonucleotide
  Antisense strand to SEQ ID NO: 1132024
uacuuccuagagcaguuga

SEQ ID NO: 1132026 - RNA, 19 nt, Artificial Sequence
  Description of Artificial Sequence: Synthetic oligonucleotide
  Sense strand starting at position 1124 of SEQ ID NO: 916120
gucaguaugggacagcauu

SEQ ID NO: 1132027 - RNA, 19 nt, Artificial Sequence
  Description of Artificial Sequence: Synthetic oligonucleotide
  Antisense strand to SEQ ID NO: 1132026
aaugcugucccauacugac

SEQ ID NO: 1132028 - RNA, 19 nt, Artificial Sequence
  Description of Artificial Sequence: Synthetic oligonucleotide
  Sense strand starting at position 1250 of SEQ ID NO: 916120
gcauuuaucugccuaggac

SEQ ID NO: 1132029 - RNA, 19 nt, Artificial Sequence
  Description of Artificial Sequence: Synthetic oligonucleotide
  Antisense strand to SEQ ID NO: 1132028
guccuaggcagauaaaugc

SEQ ID NO: 1132030 - RNA, 19 nt, Artificial Sequence
  Description of Artificial Sequence: Synthetic oligonucleotide
  Sense strand starting at position 1431 of SEQ ID NO: 916120
gcuacuucucaugaaguua

SEQ ID NO: 1132031 - RNA, 19 nt, Artificial Sequence
  Description of Artificial Sequence: Synthetic oligonucleotide
  Antisense strand to SEQ ID NO: 1132030
uaacuucaugagaaguagc

SEQ ID NO: 1132032 - RNA, 19 nt, Artificial Sequence
  Description of Artificial Sequence: Synthetic oligonucleotide
  Sense strand starting at position 1452 of SEQ ID NO: 916120
ugcagaguuuauccuugaa

SEQ ID NO: 1132033 - RNA, 19 nt, Artificial Sequence
  Description of Artificial Sequence: Synthetic oligonucleotide
  Antisense strand to SEQ ID NO: 1132032
uucaaggauaaacucugca

SEQ ID NO: 1132034 - RNA, 19 nt, Artificial Sequence
  Description of Artificial Sequence: Synthetic oligonucleotide
  Sense strand starting at position 1455 of SEQ ID NO: 916120
agaguuuauccuugaaaug

SEQ ID NO: 1132035 - RNA, 19 nt, Artificial Sequence
  Description of Artificial Sequence: Synthetic oligonucleotide
  Antisense strand to SEQ ID NO: 1132034
cauuucaaggauaaacucu

SEQ ID NO: 1132036 - RNA, 19 nt, Artificial Sequence
  Description of Artificial Sequence: Synthetic oligonucleotide
  Sense strand starting at position 1539 of SEQ ID NO: 916120
ccauuugaguacuugcuau

SEQ ID NO: 1132037 - RNA, 19 nt, Artificial Sequence
  Description of Artificial Sequence: Synthetic oligonucleotide
  Antisense strand to SEQ ID NO: 1132036
auagcaaguacucaaaugg

SEQ ID NO: 1132038 - RNA, 19 nt, Artificial Sequence
  Description of Artificial Sequence: Synthetic oligonucleotide
  Sense strand starting at position 1607 of SEQ ID NO: 916120
ucagacucacgcuguaaga

SEQ ID NO: 1132039 - RNA, 19 nt, Artificial Sequence
  Description of Artificial Sequence: Synthetic oligonucleotide
  Antisense strand to SEQ ID NO: 1132038
ucuuacagcgugagucuga

SEQ ID NO: 1132040 - RNA, 19 nt, Artificial Sequence
  Description of Artificial Sequence: Synthetic oligonucleotide
  Sense strand starting at position 1641 of SEQ ID NO: 916120
ccauguuccaggugaagaa

SEQ ID NO: 1132041 - RNA, 19 nt, Artificial Sequence
  Description of Artificial Sequence: Synthetic oligonucleotide
  Antisense strand to SEQ ID NO: 1132040
uucuucaccuggaacaugg

SEQ ID NO: 1132042 - RNA, 19 nt, Artificial Sequence
  Description of Artificial Sequence: Synthetic oligonucleotide
  Sense strand starting at position 1707 of SEQ ID NO: 916120
ggauguuugagaggcugga

SEQ ID NO: 1132043 - RNA, 19 nt, Artificial Sequence
  Description of Artificial Sequence: Synthetic oligonucleotide
  Antisense strand to SEQ ID NO: 1132042
uccagccucucaaacaucc

SEQ ID NO: 1132044 - RNA, 19 nt, Artificial Sequence
  Description of Artificial Sequence: Synthetic oligonucleotide
  Sense strand starting at position 1993 of SEQ ID NO: 916120
ggucaaagucuggagcuau

SEQ ID NO: 1132045 - RNA, 19 nt, Artificial Sequence
  Description of Artificial Sequence: Synthetic oligonucleotide
  Antisense strand to SEQ ID NO: 1132044
auagcuccagacuuugacc

SEQ ID NO: 1132046 - RNA, 19 nt, Artificial Sequence
  Description of Artificial Sequence: Synthetic oligonucleotide
  Sense strand starting at position 2176 of SEQ ID NO: 916120
ggcauucuuggaggguuga

SEQ ID NO: 1132047 - RNA, 19 nt, Artificial Sequence
  Description of Artificial Sequence: Synthetic oligonucleotide
  Antisense strand to SEQ ID NO: 1132046
ucaacccuccaagaaugcc

SEQ ID NO: 1132048 - RNA, 19 nt, Artificial Sequence
  Description of Artificial Sequence: Synthetic oligonucleotide
  Sense strand starting at position 2177 of SEQ ID NO: 916120
gcauucuuggaggguugau

SEQ ID NO: 1132049 - RNA, 19 nt, Artificial Sequence
  Description of Artificial Sequence: Synthetic oligonucleotide
  Antisense strand to SEQ ID NO: 1132048
aucaacccuccaagaaugc

SEQ ID NO: 1132050 - RNA, 19 nt, Artificial Sequence
  Description of Artificial Sequence: Synthetic oligonucleotide
  Sense strand starting at position 2442 of SEQ ID NO: 916120
cugugugggccaugaggau

SEQ ID NO: 1132051 - RNA, 19 nt, Artificial Sequence
  Description of Artificial Sequence: Synthetic oligonucleotide
  Antisense strand to SEQ ID NO: 1132050
auccucauggcccacacag

SEQ ID NO: 1132052 - RNA, 19 nt, Artificial Sequence
  Description of Artificial Sequence: Synthetic oligonucleotide
  Sense strand starting at position 2514 of SEQ ID NO: 916120
cuuccucugccagggauaa

SEQ ID NO: 1132053 - RNA, 19 nt, Artificial Sequence
  Description of Artificial Sequence: Synthetic oligonucleotide
  Antisense strand to SEQ ID NO: 1132052
uuaucccuggcagaggaag

SEQ ID NO: 1132054 - RNA, 19 nt, Artificial Sequence
  Description of Artificial Sequence: Synthetic oligonucleotide
  Sense strand starting at position 2515 of SEQ ID NO: 916120
uuccucugccagggauaaa

SEQ ID NO: 1132055 - RNA, 19 nt, Artificial Sequence
  Description of Artificial Sequence: Synthetic oligonucleotide
  Antisense strand to SEQ ID NO: 1132054
uuuaucccuggcagaggaa

SEQ ID NO: 1132056 - RNA, 19 nt, Artificial Sequence
  Description of Artificial Sequence: Synthetic oligonucleotide
  Sense strand starting at position 2570 of SEQ ID NO: 916120
ggcaccucacuguacagau

SEQ ID NO: 1132057 - RNA, 19 nt, Artificial Sequence
  Description of Artificial Sequence: Synthetic oligonucleotide
  Antisense strand to SEQ ID NO: 1132056
aucuguacagugaggugcc

SEQ ID NO: 1132058 - RNA, 19 nt, Artificial Sequence
  Description of Artificial Sequence: Synthetic oligonucleotide
  Sense strand starting at position 2632 of SEQ ID NO: 916120
ggaggcauucuuuggguca

SEQ ID NO: 1132059 - RNA, 19 nt, Artificial Sequence
  Description of Artificial Sequence: Synthetic oligonucleotide
  Antisense strand to SEQ ID NO: 1132058
ugacccaaagaaugccucc

SEQ ID NO: 1132060 - RNA, 19 nt, Artificial Sequence
  Description of Artificial Sequence: Synthetic oligonucleotide
  Sense strand starting at position 2643 of SEQ ID NO: 916120
uugggucagcuuuagcaau

SEQ ID NO: 1132061 - RNA, 19 nt, Artificial Sequence
  Description of Artificial Sequence: Synthetic oligonucleotide
  Antisense strand to SEQ ID NO: 1132060
auugcuaaagcugacccaa

SEQ ID NO: 1132062 - RNA, 19 nt, Artificial Sequence
  Description of Artificial Sequence: Synthetic oligonucleotide
  Sense strand starting at position 2733 of SEQ ID NO: 916120
auacucacugcauaguauu

SEQ ID NO: 1132063 - RNA, 19 nt, Artificial Sequence
  Description of Artificial Sequence: Synthetic oligonucleotide
  Antisense strand to SEQ ID NO: 1132062
aauacuaugcagugaguau

SEQ ID NO: 1132064 - RNA, 19 nt, Artificial Sequence
  Description of Artificial Sequence: Synthetic oligonucleotide
  Sense strand starting at position 3529 of SEQ ID NO: 916120
acuacagaugcaugccaua

SEQ ID NO: 1132065 - RNA, 19 nt, Artificial Sequence
  Description of Artificial Sequence: Synthetic oligonucleotide
  Antisense strand to SEQ ID NO: 1132064
uauggcaugcaucuguagu

SEQ ID NO: 1132066 - RNA, 19 nt, Artificial Sequence
  Description of Artificial Sequence: Synthetic oligonucleotide
  Sense strand starting at position 3780 of SEQ ID NO: 916120
agucauguaucacuuauau

SEQ ID NO: 1132067 - RNA, 19 nt, Artificial Sequence
  Description of Artificial Sequence: Synthetic oligonucleotide
  Antisense strand to SEQ ID NO: 1132066
auauaagugauacaugacu

SEQ ID NO: 1132068 - RNA, 19 nt, Artificial Sequence
  Description of Artificial Sequence: Synthetic oligonucleotide
  Sense strand starting at position 3923 of SEQ ID NO: 916120
uaaauugcgguguaccaau

SEQ ID NO: 1132069 - RNA, 19 nt, Artificial Sequence
  Description of Artificial Sequence: Synthetic oligonucleotide
  Antisense strand to SEQ ID NO: 1132068
auugguacaccgcaauuua

SEQ ID NO: 1132070 - RNA, 19 nt, Artificial Sequence
  Description of Artificial Sequence: Synthetic oligonucleotide
  Sense strand starting at position 6 of SEQ ID NO: 916121
ggaucacuuucugcuauag

SEQ ID NO: 1132071 - RNA, 19 nt, Artificial Sequence
  Description of Artificial Sequence: Synthetic oligonucleotide
  Antisense strand to SEQ ID NO: 1132070
cuauagcagaaagugaucc

SEQ ID NO: 1132072 - RNA, 19 nt, Artificial Sequence
  Description of Artificial Sequence: Synthetic oligonucleotide
  Sense strand starting at position 23 of SEQ ID NO: 916121
agcuaauguugggcucaca

SEQ ID NO: 1132073 - RNA, 19 nt, Artificial Sequence
  Description of Artificial Sequence: Synthetic oligonucleotide
  Antisense strand to SEQ ID NO: 1132072
ugugagcccaacauuagcu

SEQ ID NO: 1132074 - RNA, 19 nt, Artificial Sequence
  Description of Artificial Sequence: Synthetic oligonucleotide
  Sense strand starting at position 26 of SEQ ID NO: 916121
uaauguugggcucacagaa

SEQ ID NO: 1132075 - RNA, 19 nt, Artificial Sequence
  Description of Artificial Sequence: Synthetic oligonucleotide
  Antisense strand to SEQ ID NO: 1132074
uucugugagcccaacauua

SEQ ID NO: 1132076 - RNA, 19 nt, Artificial Sequence
  Description of Artificial Sequence: Synthetic oligonucleotide
  Sense strand starting at position 63 of SEQ ID NO: 916121
accuuagccugugccaaau

SEQ ID NO: 1132077 - RNA, 19 nt, Artificial Sequence
  Description of Artificial Sequence: Synthetic oligonucleotide
  Antisense strand to SEQ ID NO: 1132076
auuuggcacaggcuaaggu

SEQ ID NO: 1132078 - RNA, 19 nt, Artificial Sequence
  Description of Artificial Sequence: Synthetic oligonucleotide
  Sense strand starting at position 158 of SEQ ID NO: 916121
guuagcauuugugaagagu

SEQ ID NO: 1132079 - RNA, 19 nt, Artificial Sequence
  Description of Artificial Sequence: Synthetic oligonucleotide
  Antisense strand to SEQ ID NO: 1132078
acucuucacaaaugcuaac

SEQ ID NO: 1132080 - RNA, 19 nt, Artificial Sequence
  Description of Artificial Sequence: Synthetic oligonucleotide
  Sense strand starting at position 171 of SEQ ID NO: 916121
aagaguaaauaugugaagu

SEQ ID NO: 1132081 - RNA, 19 nt, Artificial Sequence
  Description of Artificial Sequence: Synthetic oligonucleotide
  Antisense strand to SEQ ID NO: 1132080
acuucacauauuuacucuu

SEQ ID NO: 1132082 - RNA, 19 nt, Artificial Sequence
  Description of Artificial Sequence: Synthetic oligonucleotide
  Sense strand starting at position 172 of SEQ ID NO: 916121
agaguaaauaugugaaguc

SEQ ID NO: 1132083 - RNA, 19 nt, Artificial Sequence
  Description of Artificial Sequence: Synthetic oligonucleotide
  Antisense strand to SEQ ID NO: 1132082
gacuucacauauuuacucu

SEQ ID NO: 1132084 - RNA, 19 nt, Artificial Sequence
  Description of Artificial Sequence: Synthetic oligonucleotide
  Sense strand starting at position 173 of SEQ ID NO: 916121
gaguaaauaugugaaguca

SEQ ID NO: 1132085 - RNA, 19 nt, Artificial Sequence
  Description of Artificial Sequence: Synthetic oligonucleotide
  Antisense strand to SEQ ID NO: 1132084
ugacuucacauauuuacuc

SEQ ID NO: 1132086 - RNA, 19 nt, Artificial Sequence
  Description of Artificial Sequence: Synthetic oligonucleotide
  Sense strand starting at position 191 of SEQ ID NO: 916121
agauuuagcuaaggacuaa

SEQ ID NO: 1132087 - RNA, 19 nt, Artificial Sequence
  Description of Artificial Sequence: Synthetic oligonucleotide
  Antisense strand to SEQ ID NO: 1132086
uuaguccuuagcuaaaucu

SEQ ID NO: 1132088 - RNA, 19 nt, Artificial Sequence
  Description of Artificial Sequence: Synthetic oligonucleotide
  Sense strand starting at position 211 of SEQ ID NO: 916121
ggaccacccuaagaguauu

SEQ ID NO: 1132089 - RNA, 19 nt, Artificial Sequence
  Description of Artificial Sequence: Synthetic oligonucleotide
  Antisense strand to SEQ ID NO: 1132088
aauacucuuaggguggucc

SEQ ID NO: 1132090 - RNA, 19 nt, Artificial Sequence
  Description of Artificial Sequence: Synthetic oligonucleotide
  Sense strand starting at position 219 of SEQ ID NO: 916121
cuaagaguauucccagcua

SEQ ID NO: 1132091 - RNA, 19 nt, Artificial Sequence
  Description of Artificial Sequence: Synthetic oligonucleotide
  Antisense strand to SEQ ID NO: 1132090
uagcugggaauacucuuag

SEQ ID NO: 1132092 - RNA, 19 nt, Artificial Sequence
  Description of Artificial Sequence: Synthetic oligonucleotide
  Sense strand starting at position 370 of SEQ ID NO: 916121
guuggauauugaccugaaa

SEQ ID NO: 1132093 - RNA, 19 nt, Artificial Sequence
  Description of Artificial Sequence: Synthetic oligonucleotide
  Antisense strand to SEQ ID NO: 1132092
uuucaggucaauauccaac

SEQ ID NO: 1132094 - RNA, 19 nt, Artificial Sequence
  Description of Artificial Sequence: Synthetic oligonucleotide
  Sense strand starting at position 399 of SEQ ID NO: 916121
aaaugaagguugccuacua

SEQ ID NO: 1132095 - RNA, 19 nt, Artificial Sequence
  Description of Artificial Sequence: Synthetic oligonucleotide
  Antisense strand to SEQ ID NO: 1132094
uaguaggcaaccuucauuu

SEQ ID NO: 1132096 - RNA, 19 nt, Artificial Sequence
  Description of Artificial Sequence: Synthetic oligonucleotide
  Sense strand starting at position 441 of SEQ ID NO: 916121
ggucauaucggguagcuaa

SEQ ID NO: 1132097 - RNA, 19 nt, Artificial Sequence
  Description of Artificial Sequence: Synthetic oligonucleotide
  Antisense strand to SEQ ID NO: 1132096
uuagcuacccgauaugacc

SEQ ID NO: 1132098 - RNA, 19 nt, Artificial Sequence
  Description of Artificial Sequence: Synthetic oligonucleotide
  Sense strand starting at position 509 of SEQ ID NO: 916121
gccugauuccuggaacuaa

SEQ ID NO: 1132099 - RNA, 19 nt, Artificial Sequence
  Description of Artificial Sequence: Synthetic oligonucleotide
  Antisense strand to SEQ ID NO: 1132098
uuaguuccaggaaucaggc

SEQ ID NO: 1132100 - RNA, 19 nt, Artificial Sequence
  Description of Artificial Sequence: Synthetic oligonucleotide
  Sense strand starting at position 695 of SEQ ID NO: 916121
gcuguucuggcuuaucaag

SEQ ID NO: 1132101 - RNA, 19 nt, Artificial Sequence
  Description of Artificial Sequence: Synthetic oligonucleotide
  Antisense strand to SEQ ID NO: 1132100
cuugauaagccagaacagc

SEQ ID NO: 1132102 - RNA, 19 nt, Artificial Sequence
  Description of Artificial Sequence: Synthetic oligonucleotide
  Sense strand starting at position 758 of SEQ ID NO: 916121
cccagacuucguggguaac

SEQ ID NO: 1132103 - RNA, 19 nt, Artificial Sequence
  Description of Artificial Sequence: Synthetic oligonucleotide
  Antisense strand to SEQ ID NO: 1132102
guuacccacgaagucuggg

SEQ ID NO: 1132104 - RNA, 19 nt, Artificial Sequence
  Description of Artificial Sequence: Synthetic oligonucleotide
  Sense strand starting at position 759 of SEQ ID NO: 916121
ccagacuucguggguaaca

SEQ ID NO: 1132105 - RNA, 19 nt, Artificial Sequence
  Description of Artificial Sequence: Synthetic oligonucleotide
  Antisense strand to SEQ ID NO: 1132104
uguuacccacgaagucugg

SEQ ID NO: 1132106 - RNA, 19 nt, Artificial Sequence
  Description of Artificial Sequence: Synthetic oligonucleotide
  Sense strand starting at position 821 of SEQ ID NO: 916121
ccaaacaaagggugugaau

SEQ ID NO: 1132107 - RNA, 19 nt, Artificial Sequence
  Description of Artificial Sequence: Synthetic oligonucleotide
  Antisense strand to SEQ ID NO: 1132106
auucacacccuuuguuugg

SEQ ID NO: 1132108 - RNA, 19 nt, Artificial Sequence
  Description of Artificial Sequence: Synthetic oligonucleotide
  Sense strand starting at position 824 of SEQ ID NO: 916121
aacaaagggugugaaugau

SEQ ID NO: 1132109 - RNA, 19 nt, Artificial Sequence
  Description of Artificial Sequence: Synthetic oligonucleotide
  Antisense strand to SEQ ID NO: 1132108
aucauucacacccuuuguu

SEQ ID NO: 1132110 - RNA, 19 nt, Artificial Sequence
  Description of Artificial Sequence: Synthetic oligonucleotide
  Sense strand starting at position 843 of SEQ ID NO: 916121
ggaagugaaccgugagacu

SEQ ID NO: 1132111 - RNA, 19 nt, Artificial Sequence
  Description of Artificial Sequence: Synthetic oligonucleotide
  Antisense strand to SEQ ID NO: 1132110
agucucacgguucacuucc

SEQ ID NO: 1132112 - RNA, 19 nt, Artificial Sequence
  Description of Artificial Sequence: Synthetic oligonucleotide
  Sense strand starting at position 1268 of SEQ ID NO: 916121
aaccuauuccugcguuaug

SEQ ID NO: 1132113 - RNA, 19 nt, Artificial Sequence
  Description of Artificial Sequence: Synthetic oligonucleotide
  Antisense strand to SEQ ID NO: 1132112
cauaacgcaggaauagguu

SEQ ID NO: 1132114 - RNA, 19 nt, Artificial Sequence
  Description of Artificial Sequence: Synthetic oligonucleotide
  Sense strand starting at position 1271 of SEQ ID NO: 916121
cuauuccugcguuauggga

SEQ ID NO: 1132115 - RNA, 19 nt, Artificial Sequence
  Description of Artificial Sequence: Synthetic oligonucleotide
  Antisense strand to SEQ ID NO: 1132114
ucccauaacgcaggaauag

SEQ ID NO: 1132116 - RNA, 19 nt, Artificial Sequence
  Description of Artificial Sequence: Synthetic oligonucleotide
  Sense strand starting at position 1285 of SEQ ID NO: 916121
ugggaaucauguuccgaca

SEQ ID NO: 1132117 - RNA, 19 nt, Artificial Sequence
  Description of Artificial Sequence: Synthetic oligonucleotide
  Antisense strand to SEQ ID NO: 1132116
ugucggaacaugauuccca

SEQ ID NO: 1132118 - RNA, 19 nt, Artificial Sequence
  Description of Artificial Sequence: Synthetic oligonucleotide
  Sense strand starting at position 1338 of SEQ ID NO: 916121
uucugaucccgucagcgaa

SEQ ID NO: 1132119 - RNA, 19 nt, Artificial Sequence
  Description of Artificial Sequence: Synthetic oligonucleotide
  Antisense strand to SEQ ID NO: 1132118
uucgcugacgggaucagaa

SEQ ID NO: 1132120 - RNA, 19 nt, Artificial Sequence
  Description of Artificial Sequence: Synthetic oligonucleotide
  Sense strand starting at position 1632 of SEQ ID NO: 916121
gccguaauuuggguaugac

SEQ ID NO: 1132121 - RNA, 19 nt, Artificial Sequence
  Description of Artificial Sequence: Synthetic oligonucleotide
  Antisense strand to SEQ ID NO: 1132120
gucauacccaaauuacggc

SEQ ID NO: 1132122 - RNA, 19 nt, Artificial Sequence
  Description of Artificial Sequence: Synthetic oligonucleotide
  Sense strand starting at position 2094 of SEQ ID NO: 916121
gcagguauugucuggaaac

SEQ ID NO: 1132123 - RNA, 19 nt, Artificial Sequence
  Description of Artificial Sequence: Synthetic oligonucleotide
  Antisense strand to SEQ ID NO: 1132122
guuuccagacaauaccugc

SEQ ID NO: 1132124 - RNA, 19 nt, Artificial Sequence
  Description of Artificial Sequence: Synthetic oligonucleotide
  Sense strand starting at position 2229 of SEQ ID NO: 916121
ggcuuagauuucugcaaau

SEQ ID NO: 1132125 - RNA, 19 nt, Artificial Sequence
  Description of Artificial Sequence: Synthetic oligonucleotide
  Antisense strand to SEQ ID NO: 1132124
auuugcagaaaucuaagcc

SEQ ID NO: 1132126 - RNA, 19 nt, Artificial Sequence
  Description of Artificial Sequence: Synthetic oligonucleotide
  Sense strand starting at position 2362 of SEQ ID NO: 916121
auguauccuuuccugaaug

SEQ ID NO: 1132127 - RNA, 19 nt, Artificial Sequence
  Description of Artificial Sequence: Synthetic oligonucleotide
  Antisense strand to SEQ ID NO: 1132126
cauucaggaaaggauacau

SEQ ID NO: 1132128 - RNA, 19 nt, Artificial Sequence
  Description of Artificial Sequence: Synthetic oligonucleotide
  Sense strand starting at position 2364 of SEQ ID NO: 916121
guauccuuuccugaaugag

SEQ ID NO: 1132129 - RNA, 19 nt, Artificial Sequence
  Description of Artificial Sequence: Synthetic oligonucleotide
  Antisense strand to SEQ ID NO: 1132128
cucauucaggaaaggauac

SEQ ID NO: 1132130 - RNA, 19 nt, Artificial Sequence
  Description of Artificial Sequence: Synthetic oligonucleotide
  Sense strand starting at position 2430 of SEQ ID NO: 916121
gccuuucucacguacagga

SEQ ID NO: 1132131 - RNA, 19 nt, Artificial Sequence
  Description of Artificial Sequence: Synthetic oligonucleotide
  Antisense strand to SEQ ID NO: 1132130
uccuguacgugagaaaggc

SEQ ID NO: 1132132 - RNA, 19 nt, Artificial Sequence
  Description of Artificial Sequence: Synthetic oligonucleotide
  Sense strand starting at position 2504 of SEQ ID NO: 916121
gcacuacccauggaguguu

SEQ ID NO: 1132133 - RNA, 19 nt, Artificial Sequence
  Description of Artificial Sequence: Synthetic oligonucleotide
  Antisense strand to SEQ ID NO: 1132132
aacacuccauggguagugc

SEQ ID NO: 1132134 - RNA, 19 nt, Artificial Sequence
  Description of Artificial Sequence: Synthetic oligonucleotide
  Sense strand starting at position 2553 of SEQ ID NO: 916121
gcaggugaccuguauggua

SEQ ID NO: 1132135 - RNA, 19 nt, Artificial Sequence
  Description of Artificial Sequence: Synthetic oligonucleotide
  Antisense strand to SEQ ID NO: 1132134
uaccauacaggucaccugc

SEQ ID NO: 1132136 - RNA, 19 nt, Artificial Sequence
  Description of Artificial Sequence: Synthetic oligonucleotide
  Sense strand starting at position 2561 of SEQ ID NO: 916121
ccuguaugguaccucuauu

SEQ ID NO: 1132137 - RNA, 19 nt, Artificial Sequence
  Description of Artificial Sequence: Synthetic oligonucleotide
  Antisense strand to SEQ ID NO: 1132136
aauagagguaccauacagg

SEQ ID NO: 1132138 - RNA, 19 nt, Artificial Sequence
  Description of Artificial Sequence: Synthetic oligonucleotide
  Sense strand starting at position 2638 of SEQ ID NO: 916121
ccuuuagggcagcgauuaa

SEQ ID NO: 1132139 - RNA, 19 nt, Artificial Sequence
  Description of Artificial Sequence: Synthetic oligonucleotide
  Antisense strand to SEQ ID NO: 1132138
uuaaucgcugcccuaaagg

SEQ ID NO: 1132140 - RNA, 19 nt, Artificial Sequence
  Description of Artificial Sequence: Synthetic oligonucleotide
  Sense strand starting at position 3584 of SEQ ID NO: 916121
auuggucaggccuacuuua

SEQ ID NO: 1132141 - RNA, 19 nt, Artificial Sequence
  Description of Artificial Sequence: Synthetic oligonucleotide
  Antisense strand to SEQ ID NO: 1132140
uaaaguaggccugaccaau

SEQ ID NO: 1132142 - RNA, 19 nt, Artificial Sequence
  Description of Artificial Sequence: Synthetic oligonucleotide
  Sense strand starting at position 3658 of SEQ ID NO: 916121
ggcagagccaaaugagauu

SEQ ID NO: 1132143 - RNA, 19 nt, Artificial Sequence
  Description of Artificial Sequence: Synthetic oligonucleotide
  Antisense strand to SEQ ID NO: 1132142
aaucucauuuggcucugcc

SEQ ID NO: 1132144 - RNA, 19 nt, Artificial Sequence
  Description of Artificial Sequence: Synthetic oligonucleotide
  Sense strand starting at position 3872 of SEQ ID NO: 916121
aguaguaauuagcuacuuu

SEQ ID NO: 1132145 - RNA, 19 nt, Artificial Sequence
  Description of Artificial Sequence: Synthetic oligonucleotide
  Antisense strand to SEQ ID NO: 1132144
aaaguagcuaauuacuacu

SEQ ID NO: 1132146 - RNA, 19 nt, Artificial Sequence
  Description of Artificial Sequence: Synthetic oligonucleotide
  Sense strand starting at position 3898 of SEQ ID NO: 916121
aggaucaaacuuuggcauu

SEQ ID NO: 1132147 - RNA, 19 nt, Artificial Sequence
  Description of Artificial Sequence: Synthetic oligonucleotide
  Antisense strand to SEQ ID NO: 1132146
aaugccaaaguuugauccu

SEQ ID NO: 1132148 - RNA, 19 nt, Artificial Sequence
  Description of Artificial Sequence: Synthetic oligonucleotide
  Sense strand starting at position 3899 of SEQ ID NO: 916121
ggaucaaacuuuggcauuu

SEQ ID NO: 1132149 - RNA, 19 nt, Artificial Sequence
  Description of Artificial Sequence: Synthetic oligonucleotide
  Antisense strand to SEQ ID NO: 1132148
aaaugccaaaguuugaucc

SEQ ID NO: 1132150 - RNA, 19 nt, Artificial Sequence
  Description of Artificial Sequence: Synthetic oligonucleotide
  Sense strand starting at position 2 of SEQ ID NO: 916122
cugugaaaucugcaaaggu

SEQ ID NO: 1132151 - RNA, 19 nt, Artificial Sequence
  Description of Artificial Sequence: Synthetic oligonucleotide
  Antisense strand to SEQ ID NO: 1132150
accuuugcagauuucacag

SEQ ID NO: 1132152 - RNA, 19 nt, Artificial Sequence
  Description of Artificial Sequence: Synthetic oligonucleotide
  Sense strand starting at position 45 of SEQ ID NO: 916122
ggagacaauuaugauuaga

SEQ ID NO: 1132153 - RNA, 19 nt, Artificial Sequence
  Description of Artificial Sequence: Synthetic oligonucleotide
  Antisense strand to SEQ ID NO: 1132152
ucuaaucauaauugucucc

SEQ ID NO: 1132154 - RNA, 19 nt, Artificial Sequence
  Description of Artificial Sequence: Synthetic oligonucleotide
  Sense strand starting at position 188 of SEQ ID NO: 916122
ccaagugaaucugcuuuau

SEQ ID NO: 1132155 - RNA, 19 nt, Artificial Sequence
  Description of Artificial Sequence: Synthetic oligonucleotide
  Antisense strand to SEQ ID NO: 1132154
auaaagcagauucacuugg

SEQ ID NO: 1132156 - RNA, 19 nt, Artificial Sequence
  Description of Artificial Sequence: Synthetic oligonucleotide
  Sense strand starting at position 335 of SEQ ID NO: 916122
ugagaccgguguucauaua

SEQ ID NO: 1132157 - RNA, 19 nt, Artificial Sequence
  Description of Artificial Sequence: Synthetic oligonucleotide
  Antisense strand to SEQ ID NO: 1132156
uauaugaacaccggucuca

SEQ ID NO: 1132158 - RNA, 19 nt, Artificial Sequence
  Description of Artificial Sequence: Synthetic oligonucleotide
  Sense strand starting at position 494 of SEQ ID NO: 916122
gucuauuagucauucugga

SEQ ID NO: 1132159 - RNA, 19 nt, Artificial Sequence
  Description of Artificial Sequence: Synthetic oligonucleotide
  Antisense strand to SEQ ID NO: 1132158
uccagaaugacuaauagac

SEQ ID NO: 1132160 - RNA, 19 nt, Artificial Sequence
  Description of Artificial Sequence: Synthetic oligonucleotide
  Sense strand starting at position 510 of SEQ ID NO: 916122
ggacaaacccaucgggauu

SEQ ID NO: 1132161 - RNA, 19 nt, Artificial Sequence
  Description of Artificial Sequence: Synthetic oligonucleotide
  Antisense strand to SEQ ID NO: 1132160
aaucccgauggguuugucc

SEQ ID NO: 1132162 - RNA, 19 nt, Artificial Sequence
  Description of Artificial Sequence: Synthetic oligonucleotide
  Sense strand starting at position 535 of SEQ ID NO: 916122
augaguuaagaucguuuaa

SEQ ID NO: 1132163 - RNA, 19 nt, Artificial Sequence
  Description of Artificial Sequence: Synthetic oligonucleotide
  Antisense strand to SEQ ID NO: 1132162
uuaaacgaucuuaacucau

SEQ ID NO: 1132164 - RNA, 19 nt, Artificial Sequence
  Description of Artificial Sequence: Synthetic oligonucleotide
  Sense strand starting at position 537 of SEQ ID NO: 916122
gaguuaagaucguuuaagg

SEQ ID NO: 1132165 - RNA, 19 nt, Artificial Sequence
  Description of Artificial Sequence: Synthetic oligonucleotide
  Antisense strand to SEQ ID NO: 1132164
ccuuaaacgaucuuaacuc

SEQ ID NO: 1132166 - RNA, 19 nt, Artificial Sequence
  Description of Artificial Sequence: Synthetic oligonucleotide
  Sense strand starting at position 594 of SEQ ID NO: 916122
guuucugagucucuaagag

SEQ ID NO: 1132167 - RNA, 19 nt, Artificial Sequence
  Description of Artificial Sequence: Synthetic oligonucleotide
  Antisense strand to SEQ ID NO: 1132166
cucuuagagacucagaaac

SEQ ID NO: 1132168 - RNA, 19 nt, Artificial Sequence
  Description of Artificial Sequence: Synthetic oligonucleotide
  Sense strand starting at position 674 of SEQ ID NO: 916122
cuaaauugucggcauccuu

SEQ ID NO: 1132169 - RNA, 19 nt, Artificial Sequence
  Description of Artificial Sequence: Synthetic oligonucleotide
  Antisense strand to SEQ ID NO: 1132168
aaggaugccgacaauuuag

SEQ ID NO: 1132170 - RNA, 19 nt, Artificial Sequence
  Description of Artificial Sequence: Synthetic oligonucleotide
  Sense strand starting at position 747 of SEQ ID NO: 916122
cccuucuuucgguaaauuc

SEQ ID NO: 1132171 - RNA, 19 nt, Artificial Sequence
  Description of Artificial Sequence: Synthetic oligonucleotide
  Antisense strand to SEQ ID NO: 1132170
gaauuuaccgaaagaaggg

SEQ ID NO: 1132172 - RNA, 19 nt, Artificial Sequence
  Description of Artificial Sequence: Synthetic oligonucleotide
  Sense strand starting at position 842 of SEQ ID NO: 916122
ucauuucuuugcgccuaaa

SEQ ID NO: 1132173 - RNA, 19 nt, Artificial Sequence
  Description of Artificial Sequence: Synthetic oligonucleotide
  Antisense strand to SEQ ID NO: 1132172
uuuaggcgcaaagaaauga

SEQ ID NO: 1132174 - RNA, 19 nt, Artificial Sequence
  Description of Artificial Sequence: Synthetic oligonucleotide
  Sense strand starting at position 1060 of SEQ ID NO: 916122
gcagguuagaaacguugaa

SEQ ID NO: 1132175 - RNA, 19 nt, Artificial Sequence
  Description of Artificial Sequence: Synthetic oligonucleotide
  Antisense strand to SEQ ID NO: 1132174
uucaacguuucuaaccugc

SEQ ID NO: 1132176 - RNA, 19 nt, Artificial Sequence
  Description of Artificial Sequence: Synthetic oligonucleotide
  Sense strand starting at position 1064 of SEQ ID NO: 916122
guuagaaacguugaacuug

SEQ ID NO: 1132177 - RNA, 19 nt, Artificial Sequence
  Description of Artificial Sequence: Synthetic oligonucleotide
  Antisense strand to SEQ ID NO: 1132176
caaguucaacguuucuaac

SEQ ID NO: 1132178 - RNA, 19 nt, Artificial Sequence
  Description of Artificial Sequence: Synthetic oligonucleotide
  Sense strand starting at position 1070 of SEQ ID NO: 916122
aacguugaacuuggugaaa

SEQ ID NO: 1132179 - RNA, 19 nt, Artificial Sequence
  Description of Artificial Sequence: Synthetic oligonucleotide
  Antisense strand to SEQ ID NO: 1132178
uuucaccaaguucaacguu

SEQ ID NO: 1132180 - RNA, 19 nt, Artificial Sequence
  Description of Artificial Sequence: Synthetic oligonucleotide
  Sense strand starting at position 1295 of SEQ ID NO: 916122
cgagaugcuccaggaaguu

SEQ ID NO: 1132181 - RNA, 19 nt, Artificial Sequence
  Description of Artificial Sequence: Synthetic oligonucleotide
  Antisense strand to SEQ ID NO: 1132180
aacuuccuggagcaucucg

SEQ ID NO: 1132182 - RNA, 19 nt, Artificial Sequence
  Description of Artificial Sequence: Synthetic oligonucleotide
  Sense strand starting at position 1985 of SEQ ID NO: 916122
gcggacuuggaacgauauu

SEQ ID NO: 1132183 - RNA, 19 nt, Artificial Sequence
  Description of Artificial Sequence: Synthetic oligonucleotide
  Antisense strand to SEQ ID NO: 1132182
aauaucguuccaaguccgc

SEQ ID NO: 1132184 - RNA, 19 nt, Artificial Sequence
  Description of Artificial Sequence: Synthetic oligonucleotide
  Sense strand starting at position 2596 of SEQ ID NO: 916122
agguaucaccgagacuguu

SEQ ID NO: 1132185 - RNA, 19 nt, Artificial Sequence
  Description of Artificial Sequence: Synthetic oligonucleotide
  Antisense strand to SEQ ID NO: 1132184
aacagucucggugauaccu

SEQ ID NO: 1132186 - RNA, 19 nt, Artificial Sequence
  Description of Artificial Sequence: Synthetic oligonucleotide
  Sense strand starting at position 2617 of SEQ ID NO: 916122
agcugugccgcccuugaaa

SEQ ID NO: 1132187 - RNA, 19 nt, Artificial Sequence
  Description of Artificial Sequence: Synthetic oligonucleotide
  Antisense strand to SEQ ID NO: 1132186
uuucaagggcggcacagcu

SEQ ID NO: 1132188 - RNA, 19 nt, Artificial Sequence
  Description of Artificial Sequence: Synthetic oligonucleotide
  Sense strand starting at position 2644 of SEQ ID NO: 916122
cugaaagaguggguuguuu

SEQ ID NO: 1132189 - RNA, 19 nt, Artificial Sequence
  Description of Artificial Sequence: Synthetic oligonucleotide
  Antisense strand to SEQ ID NO: 1132188
aaacaacccacucuuucag

SEQ ID NO: 1132190 - RNA, 19 nt, Artificial Sequence
  Description of Artificial Sequence: Synthetic oligonucleotide
  Sense strand starting at position 2656 of SEQ ID NO: 916122
guuguuugcguauuaaacg

SEQ ID NO: 1132191 - RNA, 19 nt, Artificial Sequence
  Description of Artificial Sequence: Synthetic oligonucleotide
  Antisense strand to SEQ ID NO: 1132190
cguuuaauacgcaaacaac

SEQ ID NO: 1132192 - RNA, 19 nt, Artificial Sequence
  Description of Artificial Sequence: Synthetic oligonucleotide
  Sense strand starting at position 2670 of SEQ ID NO: 916122
aaacgaggcccuuauguua

SEQ ID NO: 1132193 - RNA, 19 nt, Artificial Sequence
  Description of Artificial Sequence: Synthetic oligonucleotide
  Antisense strand to SEQ ID NO: 1132192
uaacauaagggccucguuu

SEQ ID NO: 1132194 - RNA, 19 nt, Artificial Sequence
  Description of Artificial Sequence: Synthetic oligonucleotide
  Sense strand starting at position 2862 of SEQ ID NO: 916122
gcucauagucggaguuggu

SEQ ID NO: 1132195 - RNA, 19 nt, Artificial Sequence
  Description of Artificial Sequence: Synthetic oligonucleotide
  Antisense strand to SEQ ID NO: 1132194
accaacuccgacuaugagc

SEQ ID NO: 1132196 - RNA, 19 nt, Artificial Sequence
  Description of Artificial Sequence: Synthetic oligonucleotide
  Sense strand starting at position 3059 of SEQ ID NO: 916122
uuauuaacaguuugcuaag

SEQ ID NO: 1132197 - RNA, 19 nt, Artificial Sequence
  Description of Artificial Sequence: Synthetic oligonucleotide
  Antisense strand to SEQ ID NO: 1132196
cuuagcaaacuguuaauaa

SEQ ID NO: 1132198 - RNA, 19 nt, Artificial Sequence
  Description of Artificial Sequence: Synthetic oligonucleotide
  Sense strand starting at position 3065 of SEQ ID NO: 916122
acaguuugcuaagugggaa

SEQ ID NO: 1132199 - RNA, 19 nt, Artificial Sequence
  Description of Artificial Sequence: Synthetic oligonucleotide
  Antisense strand to SEQ ID NO: 1132198
uucccacuuagcaaacugu

SEQ ID NO: 1132200 - RNA, 19 nt, Artificial Sequence
  Description of Artificial Sequence: Synthetic oligonucleotide
  Sense strand starting at position 3184 of SEQ ID NO: 916122
gaaggcugcuccuuuagga

SEQ ID NO: 1132201 - RNA, 19 nt, Artificial Sequence
  Description of Artificial Sequence: Synthetic oligonucleotide
  Antisense strand to SEQ ID NO: 1132200
uccuaaaggagcagccuuc

SEQ ID NO: 1132202 - RNA, 19 nt, Artificial Sequence
  Description of Artificial Sequence: Synthetic oligonucleotide
  Sense strand starting at position 3197 of SEQ ID NO: 916122
uuaggaaacucuguaacag

SEQ ID NO: 1132203 - RNA, 19 nt, Artificial Sequence
  Description of Artificial Sequence: Synthetic oligonucleotide
  Antisense strand to SEQ ID NO: 1132202
cuguuacagaguuuccuaa

SEQ ID NO: 1132204 - RNA, 19 nt, Artificial Sequence
  Description of Artificial Sequence: Synthetic oligonucleotide
  Sense strand starting at position 3209 of SEQ ID NO: 916122
guaacaguggaguguuaaa

SEQ ID NO: 1132205 - RNA, 19 nt, Artificial Sequence
  Description of Artificial Sequence: Synthetic oligonucleotide
  Antisense strand to SEQ ID NO: 1132204
uuuaacacuccacuguuac

SEQ ID NO: 1132206 - RNA, 19 nt, Artificial Sequence
  Description of Artificial Sequence: Synthetic oligonucleotide
  Sense strand starting at position 3272 of SEQ ID NO: 916122
uguccaaauuuagaugaau

SEQ ID NO: 1132207 - RNA, 19 nt, Artificial Sequence
  Description of Artificial Sequence: Synthetic oligonucleotide
  Antisense strand to SEQ ID NO: 1132206
auucaucuaaauuuggaca

SEQ ID NO: 1132208 - RNA, 19 nt, Artificial Sequence
  Description of Artificial Sequence: Synthetic oligonucleotide
  Sense strand starting at position 3286 of SEQ ID NO: 916122
ugaauuuauucugaaugag

SEQ ID NO: 1132209 - RNA, 19 nt, Artificial Sequence
  Description of Artificial Sequence: Synthetic oligonucleotide
  Antisense strand to SEQ ID NO: 1132208
cucauucagaauaaauuca

SEQ ID NO: 1132210 - RNA, 19 nt, Artificial Sequence
  Description of Artificial Sequence: Synthetic oligonucleotide
  Sense strand starting at position 3311 of SEQ ID NO: 916122
uaaggaugccugugaaguu

SEQ ID NO: 1132211 - RNA, 19 nt, Artificial Sequence
  Description of Artificial Sequence: Synthetic oligonucleotide
  Antisense strand to SEQ ID NO: 1132210
aacuucacaggcauccuua

SEQ ID NO: 1132212 - RNA, 19 nt, Artificial Sequence
  Description of Artificial Sequence: Synthetic oligonucleotide
  Sense strand starting at position 3479 of SEQ ID NO: 916122
caaagaugagcguagguaa

SEQ ID NO: 1132213 - RNA, 19 nt, Artificial Sequence
  Description of Artificial Sequence: Synthetic oligonucleotide
  Antisense strand to SEQ ID NO: 1132212
uuaccuacgcucaucuuug

SEQ ID NO: 1132214 - RNA, 19 nt, Artificial Sequence
  Description of Artificial Sequence: Synthetic oligonucleotide
  Sense strand starting at position 3486 of SEQ ID NO: 916122
gagcguagguaacuaaauu

SEQ ID NO: 1132215 - RNA, 19 nt, Artificial Sequence
  Description of Artificial Sequence: Synthetic oligonucleotide
  Antisense strand to SEQ ID NO: 1132214
aauuuaguuaccuacgcuc

SEQ ID NO: 1132216 - RNA, 19 nt, Artificial Sequence
  Description of Artificial Sequence: Synthetic oligonucleotide
  Sense strand starting at position 3487 of SEQ ID NO: 916122
agcguagguaacuaaauua

SEQ ID NO: 1132217 - RNA, 19 nt, Artificial Sequence
  Description of Artificial Sequence: Synthetic oligonucleotide
  Antisense strand to SEQ ID NO: 1132216
uaauuuaguuaccuacgcu

SEQ ID NO: 1132218 - RNA, 19 nt, Artificial Sequence
  Description of Artificial Sequence: Synthetic oligonucleotide
  Sense strand starting at position 3544 of SEQ ID NO: 916122
uuaugacgugccgcuaaau

SEQ ID NO: 1132219 - RNA, 19 nt, Artificial Sequence
  Description of Artificial Sequence: Synthetic oligonucleotide
  Antisense strand to SEQ ID NO: 1132218
auuuagcggcacgucauaa

SEQ ID NO: 1132220 - RNA, 19 nt, Artificial Sequence
  Description of Artificial Sequence: Synthetic oligonucleotide
  Sense strand starting at position 3568 of SEQ ID NO: 916122
gaaaguuauuugcaagacu

SEQ ID NO: 1132221 - RNA, 19 nt, Artificial Sequence
  Description of Artificial Sequence: Synthetic oligonucleotide
  Antisense strand to SEQ ID NO: 1132220
agucuugcaaauaacuuuc

SEQ ID NO: 1132222 - RNA, 19 nt, Artificial Sequence
  Description of Artificial Sequence: Synthetic oligonucleotide
  Sense strand starting at position 3584 of SEQ ID NO: 916122
acugauuuauacuaccgau

SEQ ID NO: 1132223 - RNA, 19 nt, Artificial Sequence
  Description of Artificial Sequence: Synthetic oligonucleotide
  Antisense strand to SEQ ID NO: 1132222
aucgguaguauaaaucagu

SEQ ID NO: 1132224 - RNA, 19 nt, Artificial Sequence
  Description of Artificial Sequence: Synthetic oligonucleotide
  Sense strand starting at position 3614 of SEQ ID NO: 916122
uguugaguuagucagcaga

SEQ ID NO: 1132225 - RNA, 19 nt, Artificial Sequence
  Description of Artificial Sequence: Synthetic oligonucleotide
  Antisense strand to SEQ ID NO: 1132224
ucugcugacuaacucaaca

SEQ ID NO: 1132226 - RNA, 19 nt, Artificial Sequence
  Description of Artificial Sequence: Synthetic oligonucleotide
  Sense strand starting at position 3617 of SEQ ID NO: 916122
ugaguuagucagcagaccu

SEQ ID NO: 1132227 - RNA, 19 nt, Artificial Sequence
  Description of Artificial Sequence: Synthetic oligonucleotide
  Antisense strand to SEQ ID NO: 1132226
aggucugcugacuaacuca

SEQ ID NO: 1132228 - RNA, 19 nt, Artificial Sequence
  Description of Artificial Sequence: Synthetic oligonucleotide
  Sense strand starting at position 3766 of SEQ ID NO: 916122
acuucuaauuuggaaggaa

SEQ ID NO: 1132229 - RNA, 19 nt, Artificial Sequence
  Description of Artificial Sequence: Synthetic oligonucleotide
  Antisense strand to SEQ ID NO: 1132228
uuccuuccaaauuagaagu

SEQ ID NO: 1132230 - RNA, 19 nt, Artificial Sequence
  Description of Artificial Sequence: Synthetic oligonucleotide
  Sense strand starting at position 39 of SEQ ID NO: 916123
ggacuugaagcuuguuaga

SEQ ID NO: 1132231 - RNA, 19 nt, Artificial Sequence
  Description of Artificial Sequence: Synthetic oligonucleotide
  Antisense strand to SEQ ID NO: 1132230
ucuaacaagcuucaagucc

SEQ ID NO: 1132232 - RNA, 19 nt, Artificial Sequence
  Description of Artificial Sequence: Synthetic oligonucleotide
  Sense strand starting at position 106 of SEQ ID NO: 916123
guaguagaaaguuacucau

SEQ ID NO: 1132233 - RNA, 19 nt, Artificial Sequence
  Description of Artificial Sequence: Synthetic oligonucleotide
  Antisense strand to SEQ ID NO: 1132232
augaguaacuuucuacuac

SEQ ID NO: 1132234 - RNA, 19 nt, Artificial Sequence
  Description of Artificial Sequence: Synthetic oligonucleotide
  Sense strand starting at position 135 of SEQ ID NO: 916123
gaaacaaauguauaacguu

SEQ ID NO: 1132235 - RNA, 19 nt, Artificial Sequence
  Description of Artificial Sequence: Synthetic oligonucleotide
  Antisense strand to SEQ ID NO: 1132234
aacguuauacauuuguuuc

SEQ ID NO: 1132236 - RNA, 19 nt, Artificial Sequence
  Description of Artificial Sequence: Synthetic oligonucleotide
  Sense strand starting at position 147 of SEQ ID NO: 916123
uaacguuugauguggagaa

SEQ ID NO: 1132237 - RNA, 19 nt, Artificial Sequence
  Description of Artificial Sequence: Synthetic oligonucleotide
  Antisense strand to SEQ ID NO: 1132236
uucuccacaucaaacguua

SEQ ID NO: 1132238 - RNA, 19 nt, Artificial Sequence
  Description of Artificial Sequence: Synthetic oligonucleotide
  Sense strand starting at position 149 of SEQ ID NO: 916123
acguuugauguggagaaug

SEQ ID NO: 1132239 - RNA, 19 nt, Artificial Sequence
  Description of Artificial Sequence: Synthetic oligonucleotide
  Antisense strand to SEQ ID NO: 1132238
cauucuccacaucaaacgu

SEQ ID NO: 1132240 - RNA, 19 nt, Artificial Sequence
  Description of Artificial Sequence: Synthetic oligonucleotide
  Sense strand starting at position 151 of SEQ ID NO: 916123
guuugauguggagaaugca

SEQ ID NO: 1132241 - RNA, 19 nt, Artificial Sequence
  Description of Artificial Sequence: Synthetic oligonucleotide
  Antisense strand to SEQ ID NO: 1132240
ugcauucuccacaucaaac

SEQ ID NO: 1132242 - RNA, 19 nt, Artificial Sequence
  Description of Artificial Sequence: Synthetic oligonucleotide
  Sense strand starting at position 253 of SEQ ID NO: 916123
gaguuucgugaugagaaau

SEQ ID NO: 1132243 - RNA, 19 nt, Artificial Sequence
  Description of Artificial Sequence: Synthetic oligonucleotide
  Antisense strand to SEQ ID NO: 1132242
auuucucaucacgaaacuc

SEQ ID NO: 1132244 - RNA, 19 nt, Artificial Sequence
  Description of Artificial Sequence: Synthetic oligonucleotide
  Sense strand starting at position 297 of SEQ ID NO: 916123
auugaaauuguuggugaag

SEQ ID NO: 1132245 - RNA, 19 nt, Artificial Sequence
  Description of Artificial Sequence: Synthetic oligonucleotide
  Antisense strand to SEQ ID NO: 1132244
cuucaccaacaauuucaau

SEQ ID NO: 1132246 - RNA, 19 nt, Artificial Sequence
  Description of Artificial Sequence: Synthetic oligonucleotide
  Sense strand starting at position 856 of SEQ ID NO: 916123
uguuauccucccuagaccu

SEQ ID NO: 1132247 - RNA, 19 nt, Artificial Sequence
  Description of Artificial Sequence: Synthetic oligonucleotide
  Antisense strand to SEQ ID NO: 1132246
aggucuagggaggauaaca

SEQ ID NO: 1132248 - RNA, 19 nt, Artificial Sequence
  Description of Artificial Sequence: Synthetic oligonucleotide
  Sense strand starting at position 901 of SEQ ID NO: 916123
auggaaucauucucugacu

SEQ ID NO: 1132249 - RNA, 19 nt, Artificial Sequence
  Description of Artificial Sequence: Synthetic oligonucleotide
  Antisense strand to SEQ ID NO: 1132248
agucagagaaugauuccau

SEQ ID NO: 1132250 - RNA, 19 nt, Artificial Sequence
  Description of Artificial Sequence: Synthetic oligonucleotide
  Sense strand starting at position 903 of SEQ ID NO: 916123
ggaaucauucucugacucu

SEQ ID NO: 1132251 - RNA, 19 nt, Artificial Sequence
  Description of Artificial Sequence: Synthetic oligonucleotide
  Antisense strand to SEQ ID NO: 1132250
agagucagagaaugauucc

SEQ ID NO: 1132252 - RNA, 19 nt, Artificial Sequence
  Description of Artificial Sequence: Synthetic oligonucleotide
  Sense strand starting at position 929 of SEQ ID NO: 916123
gucuuagauguccaaguuu

SEQ ID NO: 1132253 - RNA, 19 nt, Artificial Sequence
  Description of Artificial Sequence: Synthetic oligonucleotide
  Antisense strand to SEQ ID NO: 1132252
aaacuuggacaucuaagac

SEQ ID NO: 1132254 - RNA, 19 nt, Artificial Sequence
  Description of Artificial Sequence: Synthetic oligonucleotide
  Sense strand starting at position 1022 of SEQ ID NO: 916123
uucugauugucaccugaua

SEQ ID NO: 1132255 - RNA, 19 nt, Artificial Sequence
  Description of Artificial Sequence: Synthetic oligonucleotide
  Antisense strand to SEQ ID NO: 1132254
uaucaggugacaaucagaa

SEQ ID NO: 1132256 - RNA, 19 nt, Artificial Sequence
  Description of Artificial Sequence: Synthetic oligonucleotide
  Sense strand starting at position 1102 of SEQ ID NO: 916123
cgcauuaugcaccagacau

SEQ ID NO: 1132257 - RNA, 19 nt, Artificial Sequence
  Description of Artificial Sequence: Synthetic oligonucleotide
  Antisense strand to SEQ ID NO: 1132256
augucuggugcauaaugcg

SEQ ID NO: 1132258 - RNA, 19 nt, Artificial Sequence
  Description of Artificial Sequence: Synthetic oligonucleotide
  Sense strand starting at position 1121 of SEQ ID NO: 916123
gguguuagaggcuagagau

SEQ ID NO: 1132259 - RNA, 19 nt, Artificial Sequence
  Description of Artificial Sequence: Synthetic oligonucleotide
  Antisense strand to SEQ ID NO: 1132258
aucucuagccucuaacacc

SEQ ID NO: 1132260 - RNA, 19 nt, Artificial Sequence
  Description of Artificial Sequence: Synthetic oligonucleotide
  Sense strand starting at position 1135 of SEQ ID NO: 916123
gagauacagcugugaggaa

SEQ ID NO: 1132261 - RNA, 19 nt, Artificial Sequence
  Description of Artificial Sequence: Synthetic oligonucleotide
  Antisense strand to SEQ ID NO: 1132260
uuccucacagcuguaucuc

SEQ ID NO: 1132262 - RNA, 19 nt, Artificial Sequence
  Description of Artificial Sequence: Synthetic oligonucleotide
  Sense strand starting at position 1246 of SEQ ID NO: 916123
gugauagugcuaggaagga

SEQ ID NO: 1132263 - RNA, 19 nt, Artificial Sequence
  Description of Artificial Sequence: Synthetic oligonucleotide
  Antisense strand to SEQ ID NO: 1132262
uccuuccuagcacuaucac

SEQ ID NO: 1132264 - RNA, 19 nt, Artificial Sequence
  Description of Artificial Sequence: Synthetic oligonucleotide
  Sense strand starting at position 1402 of SEQ ID NO: 916123
gugggugggugaaauaaug

SEQ ID NO: 1132265 - RNA, 19 nt, Artificial Sequence
  Description of Artificial Sequence: Synthetic oligonucleotide
  Antisense strand to SEQ ID NO: 1132264
cauuauuucacccacccac

SEQ ID NO: 1132266 - RNA, 19 nt, Artificial Sequence
  Description of Artificial Sequence: Synthetic oligonucleotide
  Sense strand starting at position 1450 of SEQ ID NO: 916123
aagucuuggcagugggaaa

SEQ ID NO: 1132267 - RNA, 19 nt, Artificial Sequence
  Description of Artificial Sequence: Synthetic oligonucleotide
  Antisense strand to SEQ ID NO: 1132266
uuucccacugccaagacuu

SEQ ID NO: 1132268 - RNA, 19 nt, Artificial Sequence
  Description of Artificial Sequence: Synthetic oligonucleotide
  Sense strand starting at position 1462 of SEQ ID NO: 916123
ugggaaauggcuugguuca

SEQ ID NO: 1132269 - RNA, 19 nt, Artificial Sequence
  Description of Artificial Sequence: Synthetic oligonucleotide
  Antisense strand to SEQ ID NO: 1132268
ugaaccaagccauuuccca

SEQ ID NO: 1132270 - RNA, 19 nt, Artificial Sequence
  Description of Artificial Sequence: Synthetic oligonucleotide
  Sense strand starting at position 1463 of SEQ ID NO: 916123
gggaaauggcuugguucau

SEQ ID NO: 1132271 - RNA, 19 nt, Artificial Sequence
  Description of Artificial Sequence: Synthetic oligonucleotide
  Antisense strand to SEQ ID NO: 1132270
augaaccaagccauuuccc

SEQ ID NO: 1132272 - RNA, 19 nt, Artificial Sequence
  Description of Artificial Sequence: Synthetic oligonucleotide
  Sense strand starting at position 1464 of SEQ ID NO: 916123
ggaaauggcuugguucauu

SEQ ID NO: 1132273 - RNA, 19 nt, Artificial Sequence
  Description of Artificial Sequence: Synthetic oligonucleotide
  Antisense strand to SEQ ID NO: 1132272
aaugaaccaagccauuucc

SEQ ID NO: 1132274 - RNA, 19 nt, Artificial Sequence
  Description of Artificial Sequence: Synthetic oligonucleotide
  Sense strand starting at position 1581 of SEQ ID NO: 916123
ggcuuccucugaccauaga

SEQ ID NO: 1132275 - RNA, 19 nt, Artificial Sequence
  Description of Artificial Sequence: Synthetic oligonucleotide
  Antisense strand to SEQ ID NO: 1132274
ucuauggucagaggaagcc

SEQ ID NO: 1132276 - RNA, 19 nt, Artificial Sequence
  Description of Artificial Sequence: Synthetic oligonucleotide
  Sense strand starting at position 1835 of SEQ ID NO: 916123
gccaccaaauccuuggaga

SEQ ID NO: 1132277 - RNA, 19 nt, Artificial Sequence
  Description of Artificial Sequence: Synthetic oligonucleotide
  Antisense strand to SEQ ID NO: 1132276
ucuccaaggauuugguggc

SEQ ID NO: 1132278 - RNA, 19 nt, Artificial Sequence
  Description of Artificial Sequence: Synthetic oligonucleotide
  Sense strand starting at position 1836 of SEQ ID NO: 916123
ccaccaaauccuuggagau

SEQ ID NO: 1132279 - RNA, 19 nt, Artificial Sequence
  Description of Artificial Sequence: Synthetic oligonucleotide
  Antisense strand to SEQ ID NO: 1132278
aucuccaaggauuuggugg

SEQ ID NO: 1132280 - RNA, 19 nt, Artificial Sequence
  Description of Artificial Sequence: Synthetic oligonucleotide
  Sense strand starting at position 1846 of SEQ ID NO: 916123
cuuggagaucuugggaucu

SEQ ID NO: 1132281 - RNA, 19 nt, Artificial Sequence
  Description of Artificial Sequence: Synthetic oligonucleotide
  Antisense strand to SEQ ID NO: 1132280
agaucccaagaucuccaag

SEQ ID NO: 1132282 - RNA, 19 nt, Artificial Sequence
  Description of Artificial Sequence: Synthetic oligonucleotide
  Sense strand starting at position 2483 of SEQ ID NO: 916123
cugguaaguuaaccagaau

SEQ ID NO: 1132283 - RNA, 19 nt, Artificial Sequence
  Description of Artificial Sequence: Synthetic oligonucleotide
  Antisense strand to SEQ ID NO: 1132282
auucugguuaacuuaccag

SEQ ID NO: 1132284 - RNA, 19 nt, Artificial Sequence
  Description of Artificial Sequence: Synthetic oligonucleotide
  Sense strand starting at position 2572 of SEQ ID NO: 916123
ggagaauccaaaggugcuu

SEQ ID NO: 1132285 - RNA, 19 nt, Artificial Sequence
  Description of Artificial Sequence: Synthetic oligonucleotide
  Antisense strand to SEQ ID NO: 1132284
aagcaccuuuggauucucc

SEQ ID NO: 1132286 - RNA, 19 nt, Artificial Sequence
  Description of Artificial Sequence: Synthetic oligonucleotide
  Sense strand starting at position 2640 of SEQ ID NO: 916123
gcagaaaguccuggagaug

SEQ ID NO: 1132287 - RNA, 19 nt, Artificial Sequence
  Description of Artificial Sequence: Synthetic oligonucleotide
  Antisense strand to SEQ ID NO: 1132286
caucuccaggacuuucugc

SEQ ID NO: 1132288 - RNA, 19 nt, Artificial Sequence
  Description of Artificial Sequence: Synthetic oligonucleotide
  Sense strand starting at position 2649 of SEQ ID NO: 916123
ccuggagauguggguuuau

SEQ ID NO: 1132289 - RNA, 19 nt, Artificial Sequence
  Description of Artificial Sequence: Synthetic oligonucleotide
  Antisense strand to SEQ ID NO: 1132288
auaaacccacaucuccagg

SEQ ID NO: 1132290 - RNA, 19 nt, Artificial Sequence
  Description of Artificial Sequence: Synthetic oligonucleotide
  Sense strand starting at position 3048 of SEQ ID NO: 916123
ucgugugaggaauacaugu

SEQ ID NO: 1132291 - RNA, 19 nt, Artificial Sequence
  Description of Artificial Sequence: Synthetic oligonucleotide
  Antisense strand to SEQ ID NO: 1132290
acauguauuccucacacga

SEQ ID NO: 1132292 - RNA, 19 nt, Artificial Sequence
  Description of Artificial Sequence: Synthetic oligonucleotide
  Sense strand starting at position 3160 of SEQ ID NO: 916123
ccaguuacuuccuugagau

SEQ ID NO: 1132293 - RNA, 19 nt, Artificial Sequence
  Description of Artificial Sequence: Synthetic oligonucleotide
  Antisense strand to SEQ ID NO: 1132292
aucucaaggaaguaacugg

SEQ ID NO: 1132294 - RNA, 19 nt, Artificial Sequence
  Description of Artificial Sequence: Synthetic oligonucleotide
  Sense strand starting at position 3161 of SEQ ID NO: 916123
caguuacuuccuugagaug

SEQ ID NO: 1132295 - RNA, 19 nt, Artificial Sequence
  Description of Artificial Sequence: Synthetic oligonucleotide
  Antisense strand to SEQ ID NO: 1132294
caucucaaggaaguaacug

SEQ ID NO: 1132296 - RNA, 19 nt, Artificial Sequence
  Description of Artificial Sequence: Synthetic oligonucleotide
  Sense strand starting at position 3162 of SEQ ID NO: 916123
aguuacuuccuugagaugu

SEQ ID NO: 1132297 - RNA, 19 nt, Artificial Sequence
  Description of Artificial Sequence: Synthetic oligonucleotide
  Antisense strand to SEQ ID NO: 1132296
acaucucaaggaaguaacu

SEQ ID NO: 1132298 - RNA, 19 nt, Artificial Sequence
  Description of Artificial Sequence: Synthetic oligonucleotide
  Sense strand starting at position 3369 of SEQ ID NO: 916123
gggacaauugaugguagca

SEQ ID NO: 1132299 - RNA, 19 nt, Artificial Sequence
  Description of Artificial Sequence: Synthetic oligonucleotide
  Antisense strand to SEQ ID NO: 1132298
ugcuaccaucaauuguccc

SEQ ID NO: 1132300 - RNA, 19 nt, Artificial Sequence
  Description of Artificial Sequence: Synthetic oligonucleotide
  Sense strand starting at position 3457 of SEQ ID NO: 916123
ccacuuagaggcugaauga

SEQ ID NO: 1132301 - RNA, 19 nt, Artificial Sequence
  Description of Artificial Sequence: Synthetic oligonucleotide
  Antisense strand to SEQ ID NO: 1132300
ucauucagccucuaagugg

SEQ ID NO: 1132302 - RNA, 19 nt, Artificial Sequence
  Description of Artificial Sequence: Synthetic oligonucleotide
  Sense strand starting at position 3850 of SEQ ID NO: 916123
cuuaucacccuguaauguu

SEQ ID NO: 1132303 - RNA, 19 nt, Artificial Sequence
  Description of Artificial Sequence: Synthetic oligonucleotide
  Antisense strand to SEQ ID NO: 1132302
aacauuacagggugauaag

SEQ ID NO: 1132304 - RNA, 19 nt, Artificial Sequence
  Description of Artificial Sequence: Synthetic oligonucleotide
  Sense strand starting at position 3889 of SEQ ID NO: 916123
cgagauacauccuugccaa

SEQ ID NO: 1132305 - RNA, 19 nt, Artificial Sequence
  Description of Artificial Sequence: Synthetic oligonucleotide
  Antisense strand to SEQ ID NO: 1132304
uuggcaaggauguaucucg

SEQ ID NO: 1132306 - RNA, 19 nt, Artificial Sequence
  Description of Artificial Sequence: Synthetic oligonucleotide
  Sense strand starting at position 3892 of SEQ ID NO: 916123
gauacauccuugccaaggu

SEQ ID NO: 1132307 - RNA, 19 nt, Artificial Sequence
  Description of Artificial Sequence: Synthetic oligonucleotide
  Antisense strand to SEQ ID NO: 1132306
accuuggcaaggauguauc

SEQ ID NO: 1132308 - RNA, 19 nt, Artificial Sequence
  Description of Artificial Sequence: Synthetic oligonucleotide
  Sense strand starting at position 3960 of SEQ ID NO: 916123
gggcucugacacuguuaga

SEQ ID NO: 1132309 - RNA, 19 nt, Artificial Sequence
  Description of Artificial Sequence: Synthetic oligonucleotide
  Antisense strand to SEQ ID NO: 1132308
ucuaacagugucagagccc

SEQ ID NO: 1132310 - RNA, 19 nt, Artificial Sequence
  Description of Artificial Sequence: Synthetic oligonucleotide
  Sense strand starting at position 188 of SEQ ID NO: 916124
ugcauuuaacccugacugu

SEQ ID NO: 1132311 - RNA, 19 nt, Artificial Sequence
  Description of Artificial Sequence: Synthetic oligonucleotide
  Antisense strand to SEQ ID NO: 1132310
acagucaggguuaaaugca

SEQ ID NO: 1132312 - RNA, 19 nt, Artificial Sequence
  Description of Artificial Sequence: Synthetic oligonucleotide
  Sense strand starting at position 218 of SEQ ID NO: 916124
auaauugcauguccagaaa

SEQ ID NO: 1132313 - RNA, 19 nt, Artificial Sequence
  Description of Artificial Sequence: Synthetic oligonucleotide
  Antisense strand to SEQ ID NO: 1132312
uuucuggacaugcaauuau

SEQ ID NO: 1132314 - RNA, 19 nt, Artificial Sequence
  Description of Artificial Sequence: Synthetic oligonucleotide
  Sense strand starting at position 221 of SEQ ID NO: 916124
auugcauguccagaaacuu

SEQ ID NO: 1132315 - RNA, 19 nt, Artificial Sequence
  Description of Artificial Sequence: Synthetic oligonucleotide
  Antisense strand to SEQ ID NO: 1132314
aaguuucuggacaugcaau

SEQ ID NO: 1132316 - RNA, 19 nt, Artificial Sequence
  Description of Artificial Sequence: Synthetic oligonucleotide
  Sense strand starting at position 229 of SEQ ID NO: 916124
uccagaaacuuugugcaaa

SEQ ID NO: 1132317 - RNA, 19 nt, Artificial Sequence
  Description of Artificial Sequence: Synthetic oligonucleotide
  Antisense strand to SEQ ID NO: 1132316
uuugcacaaaguuucugga

SEQ ID NO: 1132318 - RNA, 19 nt, Artificial Sequence
  Description of Artificial Sequence: Synthetic oligonucleotide
  Sense strand starting at position 312 of SEQ ID NO: 916124
cauuuaaugugggcuguca

SEQ ID NO: 1132319 - RNA, 19 nt, Artificial Sequence
  Description of Artificial Sequence: Synthetic oligonucleotide
  Antisense strand to SEQ ID NO: 1132318
ugacagcccacauuaaaug

SEQ ID NO: 1132320 - RNA, 19 nt, Artificial Sequence
  Description of Artificial Sequence: Synthetic oligonucleotide
  Sense strand starting at position 320 of SEQ ID NO: 916124
gugggcugucaauacugau

SEQ ID NO: 1132321 - RNA, 19 nt, Artificial Sequence
  Description of Artificial Sequence: Synthetic oligonucleotide
  Antisense strand to SEQ ID NO: 1132320
aucaguauugacagcccac

SEQ ID NO: 1132322 - RNA, 19 nt, Artificial Sequence
  Description of Artificial Sequence: Synthetic oligonucleotide
  Sense strand starting at position 424 of SEQ ID NO: 916124
uuguuauugagaugauaug

SEQ ID NO: 1132323 - RNA, 19 nt, Artificial Sequence
  Description of Artificial Sequence: Synthetic oligonucleotide
  Antisense strand to SEQ ID NO: 1132322
cauaucaucucaauaacaa

SEQ ID NO: 1132324 - RNA, 19 nt, Artificial Sequence
  Description of Artificial Sequence: Synthetic oligonucleotide
  Sense strand starting at position 485 of SEQ ID NO: 916124
gcaugacaauguccaagau

SEQ ID NO: 1132325 - RNA, 19 nt, Artificial Sequence
  Description of Artificial Sequence: Synthetic oligonucleotide
  Antisense strand to SEQ ID NO: 1132324
aucuuggacauugucaugc

SEQ ID NO: 1132326 - RNA, 19 nt, Artificial Sequence
  Description of Artificial Sequence: Synthetic oligonucleotide
  Sense strand starting at position 489 of SEQ ID NO: 916124
gacaauguccaagaugcua

SEQ ID NO: 1132327 - RNA, 19 nt, Artificial Sequence
  Description of Artificial Sequence: Synthetic oligonucleotide
  Antisense strand to SEQ ID NO: 1132326
uagcaucuuggacauuguc

SEQ ID NO: 1132328 - RNA, 19 nt, Artificial Sequence
  Description of Artificial Sequence: Synthetic oligonucleotide
  Sense strand starting at position 599 of SEQ ID NO: 916124
aguuaagcccauuaaauga

SEQ ID NO: 1132329 - RNA, 19 nt, Artificial Sequence
  Description of Artificial Sequence: Synthetic oligonucleotide
  Antisense strand to SEQ ID NO: 1132328
ucauuuaaugggcuuaacu

SEQ ID NO: 1132330 - RNA, 19 nt, Artificial Sequence
  Description of Artificial Sequence: Synthetic oligonucleotide
  Sense strand starting at position 615 of SEQ ID NO: 916124
ugaaguaugucauccagau

SEQ ID NO: 1132331 - RNA, 19 nt, Artificial Sequence
  Description of Artificial Sequence: Synthetic oligonucleotide
  Antisense strand to SEQ ID NO: 1132330
aucuggaugacauacuuca

SEQ ID NO: 1132332 - RNA, 19 nt, Artificial Sequence
  Description of Artificial Sequence: Synthetic oligonucleotide
  Sense strand starting at position 619 of SEQ ID NO: 916124
guaugucauccagaucaac

SEQ ID NO: 1132333 - RNA, 19 nt, Artificial Sequence
  Description of Artificial Sequence: Synthetic oligonucleotide
  Antisense strand to SEQ ID NO: 1132332
guugaucuggaugacauac

SEQ ID NO: 1132334 - RNA, 19 nt, Artificial Sequence
  Description of Artificial Sequence: Synthetic oligonucleotide
  Sense strand starting at position 737 of SEQ ID NO: 916124
ccuacagcacuagaugauu

SEQ ID NO: 1132335 - RNA, 19 nt, Artificial Sequence
  Description of Artificial Sequence: Synthetic oligonucleotide
  Antisense strand to SEQ ID NO: 1132334
aaucaucuagugcuguagg

SEQ ID NO: 1132336 - RNA, 19 nt, Artificial Sequence
  Description of Artificial Sequence: Synthetic oligonucleotide
  Sense strand starting at position 801 of SEQ ID NO: 916124
ggcggcauuuauccacaaa

SEQ ID NO: 1132337 - RNA, 19 nt, Artificial Sequence
  Description of Artificial Sequence: Synthetic oligonucleotide
  Antisense strand to SEQ ID NO: 1132336
uuuguggauaaaugccgcc

SEQ ID NO: 1132338 - RNA, 19 nt, Artificial Sequence
  Description of Artificial Sequence: Synthetic oligonucleotide
  Sense strand starting at position 1023 of SEQ ID NO: 916124
ugggacacuuuacauuuaa

SEQ ID NO: 1132339 - RNA, 19 nt, Artificial Sequence
  Description of Artificial Sequence: Synthetic oligonucleotide
  Antisense strand to SEQ ID NO: 1132338
uuaaauguaaaguguccca

SEQ ID NO: 1132340 - RNA, 19 nt, Artificial Sequence
  Description of Artificial Sequence: Synthetic oligonucleotide
  Sense strand starting at position 1168 of SEQ ID NO: 916124
ucagcuaaucaccagaguu

SEQ ID NO: 1132341 - RNA, 19 nt, Artificial Sequence
  Description of Artificial Sequence: Synthetic oligonucleotide
  Antisense strand to SEQ ID NO: 1132340
aacucuggugauuagcuga

SEQ ID NO: 1132342 - RNA, 19 nt, Artificial Sequence
  Description of Artificial Sequence: Synthetic oligonucleotide
  Sense strand starting at position 1302 of SEQ ID NO: 916124
ccaucucuugaagagcuaa

SEQ ID NO: 1132343 - RNA, 19 nt, Artificial Sequence
  Description of Artificial Sequence: Synthetic oligonucleotide
  Antisense strand to SEQ ID NO: 1132342
uuagcucuucaagagaugg

SEQ ID NO: 1132344 - RNA, 19 nt, Artificial Sequence
  Description of Artificial Sequence: Synthetic oligonucleotide
  Sense strand starting at position 1741 of SEQ ID NO: 916124
cucugugacuagguugaaa

SEQ ID NO: 1132345 - RNA, 19 nt, Artificial Sequence
  Description of Artificial Sequence: Synthetic oligonucleotide
  Antisense strand to SEQ ID NO: 1132344
uuucaaccuagucacagag

SEQ ID NO: 1132346 - RNA, 19 nt, Artificial Sequence
  Description of Artificial Sequence: Synthetic oligonucleotide
  Sense strand starting at position 2131 of SEQ ID NO: 916124
ugggauguguaaguccaga

SEQ ID NO: 1132347 - RNA, 19 nt, Artificial Sequence
  Description of Artificial Sequence: Synthetic oligonucleotide
  Antisense strand to SEQ ID NO: 1132346
ucuggacuuacacauccca

SEQ ID NO: 1132348 - RNA, 19 nt, Artificial Sequence
  Description of Artificial Sequence: Synthetic oligonucleotide
  Sense strand starting at position 2219 of SEQ ID NO: 916124
ugaaacuacucauucggau

SEQ ID NO: 1132349 - RNA, 19 nt, Artificial Sequence
  Description of Artificial Sequence: Synthetic oligonucleotide
  Antisense strand to SEQ ID NO: 1132348
auccgaaugaguaguuuca

SEQ ID NO: 1132350 - RNA, 19 nt, Artificial Sequence
  Description of Artificial Sequence: Synthetic oligonucleotide
  Sense strand starting at position 2303 of SEQ ID NO: 916124
uggacauauuucuaaagug

SEQ ID NO: 1132351 - RNA, 19 nt, Artificial Sequence
  Description of Artificial Sequence: Synthetic oligonucleotide
  Antisense strand to SEQ ID NO: 1132350
cacuuuagaaauaugucca

SEQ ID NO: 1132352 - RNA, 19 nt, Artificial Sequence
  Description of Artificial Sequence: Synthetic oligonucleotide
  Sense strand starting at position 2311 of SEQ ID NO: 916124
uuucuaaaguguccugaaa

SEQ ID NO: 1132353 - RNA, 19 nt, Artificial Sequence
  Description of Artificial Sequence: Synthetic oligonucleotide
  Antisense strand to SEQ ID NO: 1132352
uuucaggacacuuuagaaa

SEQ ID NO: 1132354 - RNA, 19 nt, Artificial Sequence
  Description of Artificial Sequence: Synthetic oligonucleotide
  Sense strand starting at position 2436 of SEQ ID NO: 916124
ccuguaguugaucacaaca

SEQ ID NO: 1132355 - RNA, 19 nt, Artificial Sequence
  Description of Artificial Sequence: Synthetic oligonucleotide
  Antisense strand to SEQ ID NO: 1132354
uguugugaucaacuacagg

SEQ ID NO: 1132356 - RNA, 19 nt, Artificial Sequence
  Description of Artificial Sequence: Synthetic oligonucleotide
  Sense strand starting at position 2441 of SEQ ID NO: 916124
aguugaucacaacauaguu

SEQ ID NO: 1132357 - RNA, 19 nt, Artificial Sequence
  Description of Artificial Sequence: Synthetic oligonucleotide
  Antisense strand to SEQ ID NO: 1132356
aacuauguugugaucaacu

SEQ ID NO: 1132358 - RNA, 19 nt, Artificial Sequence
  Description of Artificial Sequence: Synthetic oligonucleotide
  Sense strand starting at position 2656 of SEQ ID NO: 916124
cuguuaguugucucugugu

SEQ ID NO: 1132359 - RNA, 19 nt, Artificial Sequence
  Description of Artificial Sequence: Synthetic oligonucleotide
  Antisense strand to SEQ ID NO: 1132358
acacagagacaacuaacag

SEQ ID NO: 1132360 - RNA, 19 nt, Artificial Sequence
  Description of Artificial Sequence: Synthetic oligonucleotide
  Sense strand starting at position 2901 of SEQ ID NO: 916124
gcguguuaccacguuauag

SEQ ID NO: 1132361 - RNA, 19 nt, Artificial Sequence
  Description of Artificial Sequence: Synthetic oligonucleotide
  Antisense strand to SEQ ID NO: 1132360
cuauaacgugguaacacgc

SEQ ID NO: 1132362 - RNA, 19 nt, Artificial Sequence
  Description of Artificial Sequence: Synthetic oligonucleotide
  Sense strand starting at position 2902 of SEQ ID NO: 916124
cguguuaccacguuauagu

SEQ ID NO: 1132363 - RNA, 19 nt, Artificial Sequence
  Description of Artificial Sequence: Synthetic oligonucleotide
  Antisense strand to SEQ ID NO: 1132362
acuauaacgugguaacacg

SEQ ID NO: 1132364 - RNA, 19 nt, Artificial Sequence
  Description of Artificial Sequence: Synthetic oligonucleotide
  Sense strand starting at position 3182 of SEQ ID NO: 916124
cgugucuuacuccaaggga

SEQ ID NO: 1132365 - RNA, 19 nt, Artificial Sequence
  Description of Artificial Sequence: Synthetic oligonucleotide
  Antisense strand to SEQ ID NO: 1132364
ucccuuggaguaagacacg

SEQ ID NO: 1132366 - RNA, 19 nt, Artificial Sequence
  Description of Artificial Sequence: Synthetic oligonucleotide
  Sense strand starting at position 3199 of SEQ ID NO: 916124
gaggaaugacauuguguuc

SEQ ID NO: 1132367 - RNA, 19 nt, Artificial Sequence
  Description of Artificial Sequence: Synthetic oligonucleotide
  Antisense strand to SEQ ID NO: 1132366
gaacacaaugucauuccuc

SEQ ID NO: 1132368 - RNA, 19 nt, Artificial Sequence
  Description of Artificial Sequence: Synthetic oligonucleotide
  Sense strand starting at position 3239 of SEQ ID NO: 916124
ccagaauagccaugguaua

SEQ ID NO: 1132369 - RNA, 19 nt, Artificial Sequence
  Description of Artificial Sequence: Synthetic oligonucleotide
  Antisense strand to SEQ ID NO: 1132368
uauaccauggcuauucugg

SEQ ID NO: 1132370 - RNA, 19 nt, Artificial Sequence
  Description of Artificial Sequence: Synthetic oligonucleotide
  Sense strand starting at position 3240 of SEQ ID NO: 916124
cagaauagccaugguauau

SEQ ID NO: 1132371 - RNA, 19 nt, Artificial Sequence
  Description of Artificial Sequence: Synthetic oligonucleotide
  Antisense strand to SEQ ID NO: 1132370
auauaccauggcuauucug

SEQ ID NO: 1132372 - RNA, 19 nt, Artificial Sequence
  Description of Artificial Sequence: Synthetic oligonucleotide
  Sense strand starting at position 3252 of SEQ ID NO: 916124
gguauauacuaaguuacca

SEQ ID NO: 1132373 - RNA, 19 nt, Artificial Sequence
  Description of Artificial Sequence: Synthetic oligonucleotide
  Antisense strand to SEQ ID NO: 1132372
ugguaacuuaguauauacc

SEQ ID NO: 1132374 - RNA, 19 nt, Artificial Sequence
  Description of Artificial Sequence: Synthetic oligonucleotide
  Sense strand starting at position 3300 of SEQ ID NO: 916124
ucaaaugauuggcuaugga

SEQ ID NO: 1132375 - RNA, 19 nt, Artificial Sequence
  Description of Artificial Sequence: Synthetic oligonucleotide
  Antisense strand to SEQ ID NO: 1132374
uccauagccaaucauuuga

SEQ ID NO: 1132376 - RNA, 19 nt, Artificial Sequence
  Description of Artificial Sequence: Synthetic oligonucleotide
  Sense strand starting at position 3350 of SEQ ID NO: 916124
uggcuuacuguuuaucaaa

SEQ ID NO: 1132377 - RNA, 19 nt, Artificial Sequence
  Description of Artificial Sequence: Synthetic oligonucleotide
  Antisense strand to SEQ ID NO: 1132376
uuugauaaacaguaagcca

SEQ ID NO: 1132378 - RNA, 19 nt, Artificial Sequence
  Description of Artificial Sequence: Synthetic oligonucleotide
  Sense strand starting at position 3376 of SEQ ID NO: 916124
ccuacuaaaguguauauga

SEQ ID NO: 1132379 - RNA, 19 nt, Artificial Sequence
  Description of Artificial Sequence: Synthetic oligonucleotide
  Antisense strand to SEQ ID NO: 1132378
ucauauacacuuuaguagg

SEQ ID NO: 1132380 - RNA, 19 nt, Artificial Sequence
  Description of Artificial Sequence: Synthetic oligonucleotide
  Sense strand starting at position 3532 of SEQ ID NO: 916124
gaaccauuaugguuaagau

SEQ ID NO: 1132381 - RNA, 19 nt, Artificial Sequence
  Description of Artificial Sequence: Synthetic oligonucleotide
  Antisense strand to SEQ ID NO: 1132380
aucuuaaccauaaugguuc

SEQ ID NO: 1132382 - RNA, 19 nt, Artificial Sequence
  Description of Artificial Sequence: Synthetic oligonucleotide
  Sense strand starting at position 3542 of SEQ ID NO: 916124
gguuaagauuuagaucuug

SEQ ID NO: 1132383 - RNA, 19 nt, Artificial Sequence
  Description of Artificial Sequence: Synthetic oligonucleotide
  Antisense strand to SEQ ID NO: 1132382
caagaucuaaaucuuaacc

SEQ ID NO: 1132384 - RNA, 19 nt, Artificial Sequence
  Description of Artificial Sequence: Synthetic oligonucleotide
  Sense strand starting at position 3571 of SEQ ID NO: 916124
ccgauaguaagcuauauga

SEQ ID NO: 1132385 - RNA, 19 nt, Artificial Sequence
  Description of Artificial Sequence: Synthetic oligonucleotide
  Antisense strand to SEQ ID NO: 1132384
ucauauagcuuacuaucgg

SEQ ID NO: 1132386 - RNA, 19 nt, Artificial Sequence
  Description of Artificial Sequence: Synthetic oligonucleotide
  Sense strand starting at position 3668 of SEQ ID NO: 916124
aguguuggaguggagauua

SEQ ID NO: 1132387 - RNA, 19 nt, Artificial Sequence
  Description of Artificial Sequence: Synthetic oligonucleotide
  Antisense strand to SEQ ID NO: 1132386
uaaucuccacuccaacacu

SEQ ID NO: 1132388 - RNA, 19 nt, Artificial Sequence
  Description of Artificial Sequence: Synthetic oligonucleotide
  Sense strand starting at position 3982 of SEQ ID NO: 916124
ggaagcaaauucuuacaua

SEQ ID NO: 1132389 - RNA, 19 nt, Artificial Sequence
  Description of Artificial Sequence: Synthetic oligonucleotide
  Antisense strand to SEQ ID NO: 1132388
uauguaagaauuugcuucc

SEQ ID NO: 1132390 - RNA, 19 nt, Artificial Sequence
  Description of Artificial Sequence: Synthetic oligonucleotide
  Sense strand starting at position 335 of SEQ ID NO: 916125
gggcuaagugaauaguaga

SEQ ID NO: 1132391 - RNA, 19 nt, Artificial Sequence
  Description of Artificial Sequence: Synthetic oligonucleotide
  Antisense strand to SEQ ID NO: 1132390
ucuacuauucacuuagccc

SEQ ID NO: 1132392 - RNA, 19 nt, Artificial Sequence
  Description of Artificial Sequence: Synthetic oligonucleotide
  Sense strand starting at position 722 of SEQ ID NO: 916125
caaguaagguagguaaaga

SEQ ID NO: 1132393 - RNA, 19 nt, Artificial Sequence
  Description of Artificial Sequence: Synthetic oligonucleotide
  Antisense strand to SEQ ID NO: 1132392
ucuuuaccuaccuuacuug

SEQ ID NO: 1132394 - RNA, 19 nt, Artificial Sequence
  Description of Artificial Sequence: Synthetic oligonucleotide
  Sense strand starting at position 898 of SEQ ID NO: 916125
auaagccucucuguugaaa

SEQ ID NO: 1132395 - RNA, 19 nt, Artificial Sequence
  Description of Artificial Sequence: Synthetic oligonucleotide
  Antisense strand to SEQ ID NO: 1132394
uuucaacagagaggcuuau

SEQ ID NO: 1132396 - RNA, 19 nt, Artificial Sequence
  Description of Artificial Sequence: Synthetic oligonucleotide
  Sense strand starting at position 952 of SEQ ID NO: 916125
ggaugauaguggccuucau

SEQ ID NO: 1132397 - RNA, 19 nt, Artificial Sequence
  Description of Artificial Sequence: Synthetic oligonucleotide
  Antisense strand to SEQ ID NO: 1132396
augaaggccacuaucaucc

SEQ ID NO: 1132398 - RNA, 19 nt, Artificial Sequence
  Description of Artificial Sequence: Synthetic oligonucleotide
  Sense strand starting at position 1048 of SEQ ID NO: 916125
cugugugucguuucuuaua

SEQ ID NO: 1132399 - RNA, 19 nt, Artificial Sequence
  Description of Artificial Sequence: Synthetic oligonucleotide
  Antisense strand to SEQ ID NO: 1132398
uauaagaaacgacacacag

SEQ ID NO: 1132400 - RNA, 19 nt, Artificial Sequence
  Description of Artificial Sequence: Synthetic oligonucleotide
  Sense strand starting at position 1192 of SEQ ID NO: 916125
cuauuuacuuaggaugaga

SEQ ID NO: 1132401 - RNA, 19 nt, Artificial Sequence
  Description of Artificial Sequence: Synthetic oligonucleotide
  Antisense strand to SEQ ID NO: 1132400
ucucauccuaaguaaauag

SEQ ID NO: 1132402 - RNA, 19 nt, Artificial Sequence
  Description of Artificial Sequence: Synthetic oligonucleotide
  Sense strand starting at position 1206 of SEQ ID NO: 916125
ugagaaaucugaguauuau

SEQ ID NO: 1132403 - RNA, 19 nt, Artificial Sequence
  Description of Artificial Sequence: Synthetic oligonucleotide
  Antisense strand to SEQ ID NO: 1132402
auaauacucagauuucuca

SEQ ID NO: 1132404 - RNA, 19 nt, Artificial Sequence
  Description of Artificial Sequence: Synthetic oligonucleotide
  Sense strand starting at position 1223 of SEQ ID NO: 916125
auuuaaaucugcuuguuug

SEQ ID NO: 1132405 - RNA, 19 nt, Artificial Sequence
  Description of Artificial Sequence: Synthetic oligonucleotide
  Antisense strand to SEQ ID NO: 1132404
caaacaagcagauuuaaau

SEQ ID NO: 1132406 - RNA, 19 nt, Artificial Sequence
  Description of Artificial Sequence: Synthetic oligonucleotide
  Sense strand starting at position 1335 of SEQ ID NO: 916125
cuuaacacauggucagaua

SEQ ID NO: 1132407 - RNA, 19 nt, Artificial Sequence
  Description of Artificial Sequence: Synthetic oligonucleotide
  Antisense strand to SEQ ID NO: 1132406
uaucugaccauguguuaag

SEQ ID NO: 1132408 - RNA, 19 nt, Artificial Sequence
  Description of Artificial Sequence: Synthetic oligonucleotide
  Sense strand starting at position 1781 of SEQ ID NO: 916125
uugcaagagaguuguaaag

SEQ ID NO: 1132409 - RNA, 19 nt, Artificial Sequence
  Description of Artificial Sequence: Synthetic oligonucleotide
  Antisense strand to SEQ ID NO: 1132408
cuuuacaacucucuugcaa

SEQ ID NO: 1132410 - RNA, 19 nt, Artificial Sequence
  Description of Artificial Sequence: Synthetic oligonucleotide
  Sense strand starting at position 1835 of SEQ ID NO: 916125
cuggcucauccaggcaaga

SEQ ID NO: 1132411 - RNA, 19 nt, Artificial Sequence
  Description of Artificial Sequence: Synthetic oligonucleotide
  Antisense strand to SEQ ID NO: 1132410
ucuugccuggaugagccag

SEQ ID NO: 1132412 - RNA, 19 nt, Artificial Sequence
  Description of Artificial Sequence: Synthetic oligonucleotide
  Sense strand starting at position 1837 of SEQ ID NO: 916125
ggcucauccaggcaagaug

SEQ ID NO: 1132413 - RNA, 19 nt, Artificial Sequence
  Description of Artificial Sequence: Synthetic oligonucleotide
  Antisense strand to SEQ ID NO: 1132412
caucuugccuggaugagcc

SEQ ID NO: 1132414 - RNA, 19 nt, Artificial Sequence
  Description of Artificial Sequence: Synthetic oligonucleotide
  Sense strand starting at position 1948 of SEQ ID NO: 916125
uggucugucccucacuaga

SEQ ID NO: 1132415 - RNA, 19 nt, Artificial Sequence
  Description of Artificial Sequence: Synthetic oligonucleotide
  Antisense strand to SEQ ID NO: 1132414
ucuagugagggacagacca

SEQ ID NO: 1132416 - RNA, 19 nt, Artificial Sequence
  Description of Artificial Sequence: Synthetic oligonucleotide
  Sense strand starting at position 2072 of SEQ ID NO: 916125
gacgauuuauuccauuugu

SEQ ID NO: 1132417 - RNA, 19 nt, Artificial Sequence
  Description of Artificial Sequence: Synthetic oligonucleotide
  Antisense strand to SEQ ID NO: 1132416
acaaauggaauaaaucguc

SEQ ID NO: 1132418 - RNA, 19 nt, Artificial Sequence
  Description of Artificial Sequence: Synthetic oligonucleotide
  Sense strand starting at position 2190 of SEQ ID NO: 916125
uaagcaagaucggcuuuaa

SEQ ID NO: 1132419 - RNA, 19 nt, Artificial Sequence
  Description of Artificial Sequence: Synthetic oligonucleotide
  Antisense strand to SEQ ID NO: 1132418
uuaaagccgaucuugcuua

SEQ ID NO: 1132420 - RNA, 19 nt, Artificial Sequence
  Description of Artificial Sequence: Synthetic oligonucleotide
  Sense strand starting at position 2488 of SEQ ID NO: 916125
caaagucauuugggagaug

SEQ ID NO: 1132421 - RNA, 19 nt, Artificial Sequence
  Description of Artificial Sequence: Synthetic oligonucleotide
  Antisense strand to SEQ ID NO: 1132420
caucucccaaaugacuuug

SEQ ID NO: 1132422 - RNA, 19 nt, Artificial Sequence
  Description of Artificial Sequence: Synthetic oligonucleotide
  Sense strand starting at position 2489 of SEQ ID NO: 916125
aaagucauuugggagauga

SEQ ID NO: 1132423 - RNA, 19 nt, Artificial Sequence
  Description of Artificial Sequence: Synthetic oligonucleotide
  Antisense strand to SEQ ID NO: 1132422
ucaucucccaaaugacuuu

SEQ ID NO: 1132424 - RNA, 19 nt, Artificial Sequence
  Description of Artificial Sequence: Synthetic oligonucleotide
  Sense strand starting at position 2635 of SEQ ID NO: 916125
uaaagcuguacguucguaa

SEQ ID NO: 1132425 - RNA, 19 nt, Artificial Sequence
  Description of Artificial Sequence: Synthetic oligonucleotide
  Antisense strand to SEQ ID NO: 1132424
uuacgaacguacagcuuua

SEQ ID NO: 1132426 - RNA, 19 nt, Artificial Sequence
  Description of Artificial Sequence: Synthetic oligonucleotide
  Sense strand starting at position 2640 of SEQ ID NO: 916125
cuguacguucguaaguaga

SEQ ID NO: 1132427 - RNA, 19 nt, Artificial Sequence
  Description of Artificial Sequence: Synthetic oligonucleotide
  Antisense strand to SEQ ID NO: 1132426
ucuacuuacgaacguacag

SEQ ID NO: 1132428 - RNA, 19 nt, Artificial Sequence
  Description of Artificial Sequence: Synthetic oligonucleotide
  Sense strand starting at position 2673 of SEQ ID NO: 916125
uugagucauuauccaauug

SEQ ID NO: 1132429 - RNA, 19 nt, Artificial Sequence
  Description of Artificial Sequence: Synthetic oligonucleotide
  Antisense strand to SEQ ID NO: 1132428
caauuggauaaugacucaa

SEQ ID NO: 1132430 - RNA, 19 nt, Artificial Sequence
  Description of Artificial Sequence: Synthetic oligonucleotide
  Sense strand starting at position 2890 of SEQ ID NO: 916125
ugccuagauucucuagaga

SEQ ID NO: 1132431 - RNA, 19 nt, Artificial Sequence
  Description of Artificial Sequence: Synthetic oligonucleotide
  Antisense strand to SEQ ID NO: 1132430
ucucuagagaaucuaggca

SEQ ID NO: 1132432 - RNA, 19 nt, Artificial Sequence
  Description of Artificial Sequence: Synthetic oligonucleotide
  Sense strand starting at position 2963 of SEQ ID NO: 916125
cugauaugugucuaaggca

SEQ ID NO: 1132433 - RNA, 19 nt, Artificial Sequence
  Description of Artificial Sequence: Synthetic oligonucleotide
  Antisense strand to SEQ ID NO: 1132432
ugccuuagacacauaucag

SEQ ID NO: 1132434 - RNA, 19 nt, Artificial Sequence
  Description of Artificial Sequence: Synthetic oligonucleotide
  Sense strand starting at position 3150 of SEQ ID NO: 916125
uuggauuguaucugaggga

SEQ ID NO: 1132435 - RNA, 19 nt, Artificial Sequence
  Description of Artificial Sequence: Synthetic oligonucleotide
  Antisense strand to SEQ ID NO: 1132434
ucccucagauacaauccaa

SEQ ID NO: 1132436 - RNA, 19 nt, Artificial Sequence
  Description of Artificial Sequence: Synthetic oligonucleotide
  Sense strand starting at position 3202 of SEQ ID NO: 916125
auguuuaugguuuaccaca

SEQ ID NO: 1132437 - RNA, 19 nt, Artificial Sequence
  Description of Artificial Sequence: Synthetic oligonucleotide
  Antisense strand to SEQ ID NO: 1132436
ugugguaaaccauaaacau

SEQ ID NO: 1132438 - RNA, 19 nt, Artificial Sequence
  Description of Artificial Sequence: Synthetic oligonucleotide
  Sense strand starting at position 3226 of SEQ ID NO: 916125
gcuagccuugcauauuuaa

SEQ ID NO: 1132439 - RNA, 19 nt, Artificial Sequence
  Description of Artificial Sequence: Synthetic oligonucleotide
  Antisense strand to SEQ ID NO: 1132438
uuaaauaugcaaggcuagc

SEQ ID NO: 1132440 - RNA, 19 nt, Artificial Sequence
  Description of Artificial Sequence: Synthetic oligonucleotide
  Sense strand starting at position 3270 of SEQ ID NO: 916125
gaagcaaagucauugcaga

SEQ ID NO: 1132441 - RNA, 19 nt, Artificial Sequence
  Description of Artificial Sequence: Synthetic oligonucleotide
  Antisense strand to SEQ ID NO: 1132440
ucugcaaugacuuugcuuc

SEQ ID NO: 1132442 - RNA, 19 nt, Artificial Sequence
  Description of Artificial Sequence: Synthetic oligonucleotide
  Sense strand starting at position 3271 of SEQ ID NO: 916125
aagcaaagucauugcagau

SEQ ID NO: 1132443 - RNA, 19 nt, Artificial Sequence
  Description of Artificial Sequence: Synthetic oligonucleotide
  Antisense strand to SEQ ID NO: 1132442
aucugcaaugacuuugcuu

SEQ ID NO: 1132444 - RNA, 19 nt, Artificial Sequence
  Description of Artificial Sequence: Synthetic oligonucleotide
  Sense strand starting at position 3306 of SEQ ID NO: 916125
acaguuaaugcagauguca

SEQ ID NO: 1132445 - RNA, 19 nt, Artificial Sequence
  Description of Artificial Sequence: Synthetic oligonucleotide
  Antisense strand to SEQ ID NO: 1132444
ugacaucugcauuaacugu

SEQ ID NO: 1132446 - RNA, 19 nt, Artificial Sequence
  Description of Artificial Sequence: Synthetic oligonucleotide
  Sense strand starting at position 3391 of SEQ ID NO: 916125
uguugaguauuagcugaga

SEQ ID NO: 1132447 - RNA, 19 nt, Artificial Sequence
  Description of Artificial Sequence: Synthetic oligonucleotide
  Antisense strand to SEQ ID NO: 1132446
ucucagcuaauacucaaca

SEQ ID NO: 1132448 - RNA, 19 nt, Artificial Sequence
  Description of Artificial Sequence: Synthetic oligonucleotide
  Sense strand starting at position 3393 of SEQ ID NO: 916125
uugaguauuagcugagaga

SEQ ID NO: 1132449 - RNA, 19 nt, Artificial Sequence
  Description of Artificial Sequence: Synthetic oligonucleotide
  Antisense strand to SEQ ID NO: 1132448
ucucucagcuaauacucaa

SEQ ID NO: 1132450 - RNA, 19 nt, Artificial Sequence
  Description of Artificial Sequence: Synthetic oligonucleotide
  Sense strand starting at position 3635 of SEQ ID NO: 916125
ugcauuuaacccugacugu

SEQ ID NO: 1132451 - RNA, 19 nt, Artificial Sequence
  Description of Artificial Sequence: Synthetic oligonucleotide
  Antisense strand to SEQ ID NO: 1132450
acagucaggguuaaaugca

SEQ ID NO: 1132452 - RNA, 19 nt, Artificial Sequence
  Description of Artificial Sequence: Synthetic oligonucleotide
  Sense strand starting at position 3665 of SEQ ID NO: 916125
auaauugcauguccagaaa

SEQ ID NO: 1132453 - RNA, 19 nt, Artificial Sequence
  Description of Artificial Sequence: Synthetic oligonucleotide
  Antisense strand to SEQ ID NO: 1132452
uuucuggacaugcaauuau

SEQ ID NO: 1132454 - RNA, 19 nt, Artificial Sequence
  Description of Artificial Sequence: Synthetic oligonucleotide
  Sense strand starting at position 3668 of SEQ ID NO: 916125
auugcauguccagaaacuu

SEQ ID NO: 1132455 - RNA, 19 nt, Artificial Sequence
  Description of Artificial Sequence: Synthetic oligonucleotide
  Antisense strand to SEQ ID NO: 1132454
aaguuucuggacaugcaau

SEQ ID NO: 1132456 - RNA, 19 nt, Artificial Sequence
  Description of Artificial Sequence: Synthetic oligonucleotide
  Sense strand starting at position 3676 of SEQ ID NO: 916125
uccagaaacuuugugcaaa

SEQ ID NO: 1132457 - RNA, 19 nt, Artificial Sequence
  Description of Artificial Sequence: Synthetic oligonucleotide
  Antisense strand to SEQ ID NO: 1132456
uuugcacaaaguuucugga

SEQ ID NO: 1132458 - RNA, 19 nt, Artificial Sequence
  Description of Artificial Sequence: Synthetic oligonucleotide
  Sense strand starting at position 3759 of SEQ ID NO: 916125
cauuuaaugugggcuguca

SEQ ID NO: 1132459 - RNA, 19 nt, Artificial Sequence
  Description of Artificial Sequence: Synthetic oligonucleotide
  Antisense strand to SEQ ID NO: 1132458
ugacagcccacauuaaaug

SEQ ID NO: 1132460 - RNA, 19 nt, Artificial Sequence
  Description of Artificial Sequence: Synthetic oligonucleotide
  Sense strand starting at position 3767 of SEQ ID NO: 916125
gugggcugucaauacugau

SEQ ID NO: 1132461 - RNA, 19 nt, Artificial Sequence
  Description of Artificial Sequence: Synthetic oligonucleotide
  Antisense strand to SEQ ID NO: 1132460
aucaguauugacagcccac

SEQ ID NO: 1132462 - RNA, 19 nt, Artificial Sequence
  Description of Artificial Sequence: Synthetic oligonucleotide
  Sense strand starting at position 3871 of SEQ ID NO: 916125
uuguuauugagaugauaug

SEQ ID NO: 1132463 - RNA, 19 nt, Artificial Sequence
  Description of Artificial Sequence: Synthetic oligonucleotide
  Antisense strand to SEQ ID NO: 1132462
cauaucaucucaauaacaa

SEQ ID NO: 1132464 - RNA, 19 nt, Artificial Sequence
  Description of Artificial Sequence: Synthetic oligonucleotide
  Sense strand starting at position 3877 of SEQ ID NO: 916125
uugagaugauaugcuguuu

SEQ ID NO: 1132465 - RNA, 19 nt, Artificial Sequence
  Description of Artificial Sequence: Synthetic oligonucleotide
  Antisense strand to SEQ ID NO: 1132464
aaacagcauaucaucucaa

SEQ ID NO: 1132466 - RNA, 19 nt, Artificial Sequence
  Description of Artificial Sequence: Synthetic oligonucleotide
  Sense strand starting at position 3932 of SEQ ID NO: 916125
gcaugacaauguccaagau

SEQ ID NO: 1132467 - RNA, 19 nt, Artificial Sequence
  Description of Artificial Sequence: Synthetic oligonucleotide
  Antisense strand to SEQ ID NO: 1132466
aucuuggacauugucaugc

SEQ ID NO: 1132468 - RNA, 19 nt, Artificial Sequence
  Description of Artificial Sequence: Synthetic oligonucleotide
  Sense strand starting at position 3936 of SEQ ID NO: 916125
gacaauguccaagaugcua

SEQ ID NO: 1132469 - RNA, 19 nt, Artificial Sequence
  Description of Artificial Sequence: Synthetic oligonucleotide
  Antisense strand to SEQ ID NO: 1132468
uagcaucuuggacauuguc

SEQ ID NO: 1132470 - RNA, 19 nt, Artificial Sequence
  Description of Artificial Sequence: Synthetic oligonucleotide
  Sense strand starting at position 170 of SEQ ID NO: 916126
aauacauguagcgagagua

SEQ ID NO: 1132471 - RNA, 19 nt, Artificial Sequence
  Description of Artificial Sequence: Synthetic oligonucleotide
  Antisense strand to SEQ ID NO: 1132470
uacucucgcuacauguauu

SEQ ID NO: 1132472 - RNA, 19 nt, Artificial Sequence
  Description of Artificial Sequence: Synthetic oligonucleotide
  Sense strand starting at position 283 of SEQ ID NO: 916126
agauuauccuguguauauc

SEQ ID NO: 1132473 - RNA, 19 nt, Artificial Sequence
  Description of Artificial Sequence: Synthetic oligonucleotide
  Antisense strand to SEQ ID NO: 1132472
gauauacacaggauaaucu

SEQ ID NO: 1132474 - RNA, 19 nt, Artificial Sequence
  Description of Artificial Sequence: Synthetic oligonucleotide
  Sense strand starting at position 289 of SEQ ID NO: 916126
uccuguguauauccaucaa

SEQ ID NO: 1132475 - RNA, 19 nt, Artificial Sequence
  Description of Artificial Sequence: Synthetic oligonucleotide
  Antisense strand to SEQ ID NO: 1132474
uugauggauauacacagga

SEQ ID NO: 1132476 - RNA, 19 nt, Artificial Sequence
  Description of Artificial Sequence: Synthetic oligonucleotide
  Sense strand starting at position 371 of SEQ ID NO: 916126
aggucaucucuagaugcuu

SEQ ID NO: 1132477 - RNA, 19 nt, Artificial Sequence
  Description of Artificial Sequence: Synthetic oligonucleotide
  Antisense strand to SEQ ID NO: 1132476
aagcaucuagagaugaccu

SEQ ID NO: 1132478 - RNA, 19 nt, Artificial Sequence
  Description of Artificial Sequence: Synthetic oligonucleotide
  Sense strand starting at position 398 of SEQ ID NO: 916126
ucugaagaguaauccaauc

SEQ ID NO: 1132479 - RNA, 19 nt, Artificial Sequence
  Description of Artificial Sequence: Synthetic oligonucleotide
  Antisense strand to SEQ ID NO: 1132478
gauuggauuacucuucaga

SEQ ID NO: 1132480 - RNA, 19 nt, Artificial Sequence
  Description of Artificial Sequence: Synthetic oligonucleotide
  Sense strand starting at position 542 of SEQ ID NO: 916126
caugauggguucccgauau

SEQ ID NO: 1132481 - RNA, 19 nt, Artificial Sequence
  Description of Artificial Sequence: Synthetic oligonucleotide
  Antisense strand to SEQ ID NO: 1132480
auaucgggaacccaucaug

SEQ ID NO: 1132482 - RNA, 19 nt, Artificial Sequence
  Description of Artificial Sequence: Synthetic oligonucleotide
  Sense strand starting at position 546 of SEQ ID NO: 916126
auggguucccgauauagcu

SEQ ID NO: 1132483 - RNA, 19 nt, Artificial Sequence
  Description of Artificial Sequence: Synthetic oligonucleotide
  Antisense strand to SEQ ID NO: 1132482
agcuauaucgggaacccau

SEQ ID NO: 1132484 - RNA, 19 nt, Artificial Sequence
  Description of Artificial Sequence: Synthetic oligonucleotide
  Sense strand starting at position 559 of SEQ ID NO: 916126
auagcuucugaaugacuga

SEQ ID NO: 1132485 - RNA, 19 nt, Artificial Sequence
  Description of Artificial Sequence: Synthetic oligonucleotide
  Antisense strand to SEQ ID NO: 1132484
ucagucauucagaagcuau

SEQ ID NO: 1132486 - RNA, 19 nt, Artificial Sequence
  Description of Artificial Sequence: Synthetic oligonucleotide
  Sense strand starting at position 562 of SEQ ID NO: 916126
gcuucugaaugacugaaca

SEQ ID NO: 1132487 - RNA, 19 nt, Artificial Sequence
  Description of Artificial Sequence: Synthetic oligonucleotide
  Antisense strand to SEQ ID NO: 1132486
uguucagucauucagaagc

SEQ ID NO: 1132488 - RNA, 19 nt, Artificial Sequence
  Description of Artificial Sequence: Synthetic oligonucleotide
  Sense strand starting at position 663 of SEQ ID NO: 916126
auauguguugaagaagcua

SEQ ID NO: 1132489 - RNA, 19 nt, Artificial Sequence
  Description of Artificial Sequence: Synthetic oligonucleotide
  Antisense strand to SEQ ID NO: 1132488
uagcuucuucaacacauau

SEQ ID NO: 1132490 - RNA, 19 nt, Artificial Sequence
  Description of Artificial Sequence: Synthetic oligonucleotide
  Sense strand starting at position 794 of SEQ ID NO: 916126
uagaaagcauguucugagu

SEQ ID NO: 1132491 - RNA, 19 nt, Artificial Sequence
  Description of Artificial Sequence: Synthetic oligonucleotide
  Antisense strand to SEQ ID NO: 1132490
acucagaacaugcuuucua

SEQ ID NO: 1132492 - RNA, 19 nt, Artificial Sequence
  Description of Artificial Sequence: Synthetic oligonucleotide
  Sense strand starting at position 800 of SEQ ID NO: 916126
gcauguucugaguaaauau

SEQ ID NO: 1132493 - RNA, 19 nt, Artificial Sequence
  Description of Artificial Sequence: Synthetic oligonucleotide
  Antisense strand to SEQ ID NO: 1132492
auauuuacucagaacaugc

SEQ ID NO: 1132494 - RNA, 19 nt, Artificial Sequence
  Description of Artificial Sequence: Synthetic oligonucleotide
  Sense strand starting at position 828 of SEQ ID NO: 916126
gaaagaagugccugaucau

SEQ ID NO: 1132495 - RNA, 19 nt, Artificial Sequence
  Description of Artificial Sequence: Synthetic oligonucleotide
  Antisense strand to SEQ ID NO: 1132494
augaucaggcacuucuuuc

SEQ ID NO: 1132496 - RNA, 19 nt, Artificial Sequence
  Description of Artificial Sequence: Synthetic oligonucleotide
  Sense strand starting at position 831 of SEQ ID NO: 916126
agaagugccugaucauagu

SEQ ID NO: 1132497 - RNA, 19 nt, Artificial Sequence
  Description of Artificial Sequence: Synthetic oligonucleotide
  Antisense strand to SEQ ID NO: 1132496
acuaugaucaggcacuucu

SEQ ID NO: 1132498 - RNA, 19 nt, Artificial Sequence
  Description of Artificial Sequence: Synthetic oligonucleotide
  Sense strand starting at position 839 of SEQ ID NO: 916126
cugaucauaguauggaauu

SEQ ID NO: 1132499 - RNA, 19 nt, Artificial Sequence
  Description of Artificial Sequence: Synthetic oligonucleotide
  Antisense strand to SEQ ID NO: 1132498
aauuccauacuaugaucag

SEQ ID NO: 1132500 - RNA, 19 nt, Artificial Sequence
  Description of Artificial Sequence: Synthetic oligonucleotide
  Sense strand starting at position 840 of SEQ ID NO: 916126
ugaucauaguauggaauuu

SEQ ID NO: 1132501 - RNA, 19 nt, Artificial Sequence
  Description of Artificial Sequence: Synthetic oligonucleotide
  Antisense strand to SEQ ID NO: 1132500
aaauuccauacuaugauca

SEQ ID NO: 1132502 - RNA, 19 nt, Artificial Sequence
  Description of Artificial Sequence: Synthetic oligonucleotide
  Sense strand starting at position 872 of SEQ ID NO: 916126
guacacauggcggaaucau

SEQ ID NO: 1132503 - RNA, 19 nt, Artificial Sequence
  Description of Artificial Sequence: Synthetic oligonucleotide
  Antisense strand to SEQ ID NO: 1132502
augauuccgccauguguac

SEQ ID NO: 1132504 - RNA, 19 nt, Artificial Sequence
  Description of Artificial Sequence: Synthetic oligonucleotide
  Sense strand starting at position 1357 of SEQ ID NO: 916126
uguugucugggcuaaguga

SEQ ID NO: 1132505 - RNA, 19 nt, Artificial Sequence
  Description of Artificial Sequence: Synthetic oligonucleotide
  Antisense strand to SEQ ID NO: 1132504
ucacuuagcccagacaaca

SEQ ID NO: 1132506 - RNA, 19 nt, Artificial Sequence
  Description of Artificial Sequence: Synthetic oligonucleotide
  Sense strand starting at position 1365 of SEQ ID NO: 916126
gggcuaagugaauaguaga

SEQ ID NO: 1132507 - RNA, 19 nt, Artificial Sequence
  Description of Artificial Sequence: Synthetic oligonucleotide
  Antisense strand to SEQ ID NO: 1132506
ucuacuauucacuuagccc

SEQ ID NO: 1132508 - RNA, 19 nt, Artificial Sequence
  Description of Artificial Sequence: Synthetic oligonucleotide
  Sense strand starting at position 1752 of SEQ ID NO: 916126
caaguaagguagguaaaga

SEQ ID NO: 1132509 - RNA, 19 nt, Artificial Sequence
  Description of Artificial Sequence: Synthetic oligonucleotide
  Antisense strand to SEQ ID NO: 1132508
ucuuuaccuaccuuacuug

SEQ ID NO: 1132510 - RNA, 19 nt, Artificial Sequence
  Description of Artificial Sequence: Synthetic oligonucleotide
  Sense strand starting at position 1928 of SEQ ID NO: 916126
auaagccucucuguugaaa

SEQ ID NO: 1132511 - RNA, 19 nt, Artificial Sequence
  Description of Artificial Sequence: Synthetic oligonucleotide
  Antisense strand to SEQ ID NO: 1132510
uuucaacagagaggcuuau

SEQ ID NO: 1132512 - RNA, 19 nt, Artificial Sequence
  Description of Artificial Sequence: Synthetic oligonucleotide
  Sense strand starting at position 1982 of SEQ ID NO: 916126
ggaugauaguggccuucau

SEQ ID NO: 1132513 - RNA, 19 nt, Artificial Sequence
  Description of Artificial Sequence: Synthetic oligonucleotide
  Antisense strand to SEQ ID NO: 1132512
augaaggccacuaucaucc

SEQ ID NO: 1132514 - RNA, 19 nt, Artificial Sequence
  Description of Artificial Sequence: Synthetic oligonucleotide
  Sense strand starting at position 2078 of SEQ ID NO: 916126
cugugugucguuucuuaua

SEQ ID NO: 1132515 - RNA, 19 nt, Artificial Sequence
  Description of Artificial Sequence: Synthetic oligonucleotide
  Antisense strand to SEQ ID NO: 1132514
uauaagaaacgacacacag

SEQ ID NO: 1132516 - RNA, 19 nt, Artificial Sequence
  Description of Artificial Sequence: Synthetic oligonucleotide
  Sense strand starting at position 2222 of SEQ ID NO: 916126
cuauuuacuuaggaugaga

SEQ ID NO: 1132517 - RNA, 19 nt, Artificial Sequence
  Description of Artificial Sequence: Synthetic oligonucleotide
  Antisense strand to SEQ ID NO: 1132516
ucucauccuaaguaaauag

SEQ ID NO: 1132518 - RNA, 19 nt, Artificial Sequence
  Description of Artificial Sequence: Synthetic oligonucleotide
  Sense strand starting at position 2236 of SEQ ID NO: 916126
ugagaaaucugaguauuau

SEQ ID NO: 1132519 - RNA, 19 nt, Artificial Sequence
  Description of Artificial Sequence: Synthetic oligonucleotide
  Antisense strand to SEQ ID NO: 1132518
auaauacucagauuucuca

SEQ ID NO: 1132520 - RNA, 19 nt, Artificial Sequence
  Description of Artificial Sequence: Synthetic oligonucleotide
  Sense strand starting at position 2253 of SEQ ID NO: 916126
auuuaaaucugcuuguuug

SEQ ID NO: 1132521 - RNA, 19 nt, Artificial Sequence
  Description of Artificial Sequence: Synthetic oligonucleotide
  Antisense strand to SEQ ID NO: 1132520
caaacaagcagauuuaaau

SEQ ID NO: 1132522 - RNA, 19 nt, Artificial Sequence
  Description of Artificial Sequence: Synthetic oligonucleotide
  Sense strand starting at position 2254 of SEQ ID NO: 916126
uuuaaaucugcuuguuuga

SEQ ID NO: 1132523 - RNA, 19 nt, Artificial Sequence
  Description of Artificial Sequence: Synthetic oligonucleotide
  Antisense strand to SEQ ID NO: 1132522
ucaaacaagcagauuuaaa

SEQ ID NO: 1132524 - RNA, 19 nt, Artificial Sequence
  Description of Artificial Sequence: Synthetic oligonucleotide
  Sense strand starting at position 2365 of SEQ ID NO: 916126
cuuaacacauggucagaua

SEQ ID NO: 1132525 - RNA, 19 nt, Artificial Sequence
  Description of Artificial Sequence: Synthetic oligonucleotide
  Antisense strand to SEQ ID NO: 1132524
uaucugaccauguguuaag

SEQ ID NO: 1132526 - RNA, 19 nt, Artificial Sequence
  Description of Artificial Sequence: Synthetic oligonucleotide
  Sense strand starting at position 2811 of SEQ ID NO: 916126
uugcaagagaguuguaaag

SEQ ID NO: 1132527 - RNA, 19 nt, Artificial Sequence
  Description of Artificial Sequence: Synthetic oligonucleotide
  Antisense strand to SEQ ID NO: 1132526
cuuuacaacucucuugcaa

SEQ ID NO: 1132528 - RNA, 19 nt, Artificial Sequence
  Description of Artificial Sequence: Synthetic oligonucleotide
  Sense strand starting at position 2865 of SEQ ID NO: 916126
cuggcucauccaggcaaga

SEQ ID NO: 1132529 - RNA, 19 nt, Artificial Sequence
  Description of Artificial Sequence: Synthetic oligonucleotide
  Antisense strand to SEQ ID NO: 1132528
ucuugccuggaugagccag

SEQ ID NO: 1132530 - RNA, 19 nt, Artificial Sequence
  Description of Artificial Sequence: Synthetic oligonucleotide
  Sense strand starting at position 2867 of SEQ ID NO: 916126
ggcucauccaggcaagaug

SEQ ID NO: 1132531 - RNA, 19 nt, Artificial Sequence
  Description of Artificial Sequence: Synthetic oligonucleotide
  Antisense strand to SEQ ID NO: 1132530
caucuugccuggaugagcc

SEQ ID NO: 1132532 - RNA, 19 nt, Artificial Sequence
  Description of Artificial Sequence: Synthetic oligonucleotide
  Sense strand starting at position 2978 of SEQ ID NO: 916126
uggucugucccucacuaga

SEQ ID NO: 1132533 - RNA, 19 nt, Artificial Sequence
  Description of Artificial Sequence: Synthetic oligonucleotide
  Antisense strand to SEQ ID NO: 1132532
ucuagugagggacagacca

SEQ ID NO: 1132534 - RNA, 19 nt, Artificial Sequence
  Description of Artificial Sequence: Synthetic oligonucleotide
  Sense strand starting at position 3102 of SEQ ID NO: 916126
gacgauuuauuccauuugu

SEQ ID NO: 1132535 - RNA, 19 nt, Artificial Sequence
  Description of Artificial Sequence: Synthetic oligonucleotide
  Antisense strand to SEQ ID NO: 1132534
acaaauggaauaaaucguc

SEQ ID NO: 1132536 - RNA, 19 nt, Artificial Sequence
  Description of Artificial Sequence: Synthetic oligonucleotide
  Sense strand starting at position 3220 of SEQ ID NO: 916126
uaagcaagaucggcuuuaa

SEQ ID NO: 1132537 - RNA, 19 nt, Artificial Sequence
  Description of Artificial Sequence: Synthetic oligonucleotide
  Antisense strand to SEQ ID NO: 1132536
uuaaagccgaucuugcuua

SEQ ID NO: 1132538 - RNA, 19 nt, Artificial Sequence
  Description of Artificial Sequence: Synthetic oligonucleotide
  Sense strand starting at position 3518 of SEQ ID NO: 916126
caaagucauuugggagaug

SEQ ID NO: 1132539 - RNA, 19 nt, Artificial Sequence
  Description of Artificial Sequence: Synthetic oligonucleotide
  Antisense strand to SEQ ID NO: 1132538
caucucccaaaugacuuug

SEQ ID NO: 1132540 - RNA, 19 nt, Artificial Sequence
  Description of Artificial Sequence: Synthetic oligonucleotide
  Sense strand starting at position 3519 of SEQ ID NO: 916126
aaagucauuugggagauga

SEQ ID NO: 1132541 - RNA, 19 nt, Artificial Sequence
  Description of Artificial Sequence: Synthetic oligonucleotide
  Antisense strand to SEQ ID NO: 1132540
ucaucucccaaaugacuuu

SEQ ID NO: 1132542 - RNA, 19 nt, Artificial Sequence
  Description of Artificial Sequence: Synthetic oligonucleotide
  Sense strand starting at position 3665 of SEQ ID NO: 916126
uaaagcuguacguucguaa

SEQ ID NO: 1132543 - RNA, 19 nt, Artificial Sequence
  Description of Artificial Sequence: Synthetic oligonucleotide
  Antisense strand to SEQ ID NO: 1132542
uuacgaacguacagcuuua

SEQ ID NO: 1132544 - RNA, 19 nt, Artificial Sequence
  Description of Artificial Sequence: Synthetic oligonucleotide
  Sense strand starting at position 3670 of SEQ ID NO: 916126
cuguacguucguaaguaga

SEQ ID NO: 1132545 - RNA, 19 nt, Artificial Sequence
  Description of Artificial Sequence: Synthetic oligonucleotide
  Antisense strand to SEQ ID NO: 1132544
ucuacuuacgaacguacag

SEQ ID NO: 1132546 - RNA, 19 nt, Artificial Sequence
  Description of Artificial Sequence: Synthetic oligonucleotide
  Sense strand starting at position 3703 of SEQ ID NO: 916126
uugagucauuauccaauug

SEQ ID NO: 1132547 - RNA, 19 nt, Artificial Sequence
  Description of Artificial Sequence: Synthetic oligonucleotide
  Antisense strand to SEQ ID NO: 1132546
caauuggauaaugacucaa

SEQ ID NO: 1132548 - RNA, 19 nt, Artificial Sequence
  Description of Artificial Sequence: Synthetic oligonucleotide
  Sense strand starting at position 3920 of SEQ ID NO: 916126
ugccuagauucucuagaga

SEQ ID NO: 1132549 - RNA, 19 nt, Artificial Sequence
  Description of Artificial Sequence: Synthetic oligonucleotide
  Antisense strand to SEQ ID NO: 1132548
ucucuagagaaucuaggca

SEQ ID NO: 1132550 - RNA, 19 nt, Artificial Sequence
  Description of Artificial Sequence: Synthetic oligonucleotide
  Sense strand starting at position 12 of SEQ ID NO: 916127
ugaggcuuuagguaucuaa

SEQ ID NO: 1132551 - RNA, 19 nt, Artificial Sequence
  Description of Artificial Sequence: Synthetic oligonucleotide
  Antisense strand to SEQ ID NO: 1132550
uuagauaccuaaagccuca

SEQ ID NO: 1132552 - RNA, 19 nt, Artificial Sequence
  Description of Artificial Sequence: Synthetic oligonucleotide
  Sense strand starting at position 15 of SEQ ID NO: 916127
ggcuuuagguaucuaauaa

SEQ ID NO: 1132553 - RNA, 19 nt, Artificial Sequence
  Description of Artificial Sequence: Synthetic oligonucleotide
  Antisense strand to SEQ ID NO: 1132552
uuauuagauaccuaaagcc

SEQ ID NO: 1132554 - RNA, 19 nt, Artificial Sequence
  Description of Artificial Sequence: Synthetic oligonucleotide
  Sense strand starting at position 110 of SEQ ID NO: 916127
agagaaaugcucuacucuc

SEQ ID NO: 1132555 - RNA, 19 nt, Artificial Sequence
  Description of Artificial Sequence: Synthetic oligonucleotide
  Antisense strand to SEQ ID NO: 1132554
gagaguagagcauuucucu

SEQ ID NO: 1132556 - RNA, 19 nt, Artificial Sequence
  Description of Artificial Sequence: Synthetic oligonucleotide
  Sense strand starting at position 134 of SEQ ID NO: 916127
acugacaguuucuugggau

SEQ ID NO: 1132557 - RNA, 19 nt, Artificial Sequence
  Description of Artificial Sequence: Synthetic oligonucleotide
  Antisense strand to SEQ ID NO: 1132556
aucccaagaaacugucagu

SEQ ID NO: 1132558 - RNA, 19 nt, Artificial Sequence
  Description of Artificial Sequence: Synthetic oligonucleotide
  Sense strand starting at position 212 of SEQ ID NO: 916127
aucucucuacuacggaauu

SEQ ID NO: 1132559 - RNA, 19 nt, Artificial Sequence
  Description of Artificial Sequence: Synthetic oligonucleotide
  Antisense strand to SEQ ID NO: 1132558
aauuccguaguagagagau

SEQ ID NO: 1132560 - RNA, 19 nt, Artificial Sequence
  Description of Artificial Sequence: Synthetic oligonucleotide
  Sense strand starting at position 329 of SEQ ID NO: 916127
ggaggaaacugucuauguu

SEQ ID NO: 1132561 - RNA, 19 nt, Artificial Sequence
  Description of Artificial Sequence: Synthetic oligonucleotide
  Antisense strand to SEQ ID NO: 1132560
aacauagacaguuuccucc

SEQ ID NO: 1132562 - RNA, 19 nt, Artificial Sequence
  Description of Artificial Sequence: Synthetic oligonucleotide
  Sense strand starting at position 330 of SEQ ID NO: 916127
gaggaaacugucuauguug

SEQ ID NO: 1132563 - RNA, 19 nt, Artificial Sequence
  Description of Artificial Sequence: Synthetic oligonucleotide
  Antisense strand to SEQ ID NO: 1132562
caacauagacaguuuccuc

SEQ ID NO: 1132564 - RNA, 19 nt, Artificial Sequence
  Description of Artificial Sequence: Synthetic oligonucleotide
  Sense strand starting at position 349 of SEQ ID NO: 916127
cucaauguucuuuauguaa

SEQ ID NO: 1132565 - RNA, 19 nt, Artificial Sequence
  Description of Artificial Sequence: Synthetic oligonucleotide
  Antisense strand to SEQ ID NO: 1132564
uuacauaaagaacauugag

SEQ ID NO: 1132566 - RNA, 19 nt, Artificial Sequence
  Description of Artificial Sequence: Synthetic oligonucleotide
  Sense strand starting at position 459 of SEQ ID NO: 916127
ucuuucuccugaucaagag

SEQ ID NO: 1132567 - RNA, 19 nt, Artificial Sequence
  Description of Artificial Sequence: Synthetic oligonucleotide
  Antisense strand to SEQ ID NO: 1132566
cucuugaucaggagaaaga

SEQ ID NO: 1132568 - RNA, 19 nt, Artificial Sequence
  Description of Artificial Sequence: Synthetic oligonucleotide
  Sense strand starting at position 579 of SEQ ID NO: 916127
cggcaaauuuccuccguua

SEQ ID NO: 1132569 - RNA, 19 nt, Artificial Sequence
  Description of Artificial Sequence: Synthetic oligonucleotide
  Antisense strand to SEQ ID NO: 1132568
uaacggaggaaauuugccg

SEQ ID NO: 1132570 - RNA, 19 nt, Artificial Sequence
  Description of Artificial Sequence: Synthetic oligonucleotide
  Sense strand starting at position 581 of SEQ ID NO: 916127
gcaaauuuccuccguuaag

SEQ ID NO: 1132571 - RNA, 19 nt, Artificial Sequence
  Description of Artificial Sequence: Synthetic oligonucleotide
  Antisense strand to SEQ ID NO: 1132570
cuuaacggaggaaauuugc

SEQ ID NO: 1132572 - RNA, 19 nt, Artificial Sequence
  Description of Artificial Sequence: Synthetic oligonucleotide
  Sense strand starting at position 719 of SEQ ID NO: 916127
uaugaauguggguguuaaa

SEQ ID NO: 1132573 - RNA, 19 nt, Artificial Sequence
  Description of Artificial Sequence: Synthetic oligonucleotide
  Antisense strand to SEQ ID NO: 1132572
uuuaacacccacauucaua

SEQ ID NO: 1132574 - RNA, 19 nt, Artificial Sequence
  Description of Artificial Sequence: Synthetic oligonucleotide
  Sense strand starting at position 843 of SEQ ID NO: 916127
ggcuaaguucuccauacug

SEQ ID NO: 1132575 - RNA, 19 nt, Artificial Sequence
  Description of Artificial Sequence: Synthetic oligonucleotide
  Antisense strand to SEQ ID NO: 1132574
caguauggagaacuuagcc

SEQ ID NO: 1132576 - RNA, 19 nt, Artificial Sequence
  Description of Artificial Sequence: Synthetic oligonucleotide
  Sense strand starting at position 886 of SEQ ID NO: 916127
ggauaucauguaugugaua

SEQ ID NO: 1132577 - RNA, 19 nt, Artificial Sequence
  Description of Artificial Sequence: Synthetic oligonucleotide
  Antisense strand to SEQ ID NO: 1132576
uaucacauacaugauaucc

SEQ ID NO: 1132578 - RNA, 19 nt, Artificial Sequence
  Description of Artificial Sequence: Synthetic oligonucleotide
  Sense strand starting at position 887 of SEQ ID NO: 916127
gauaucauguaugugauac

SEQ ID NO: 1132579 - RNA, 19 nt, Artificial Sequence
  Description of Artificial Sequence: Synthetic oligonucleotide
  Antisense strand to SEQ ID NO: 1132578
guaucacauacaugauauc

SEQ ID NO: 1132580 - RNA, 19 nt, Artificial Sequence
  Description of Artificial Sequence: Synthetic oligonucleotide
  Sense strand starting at position 1094 of SEQ ID NO: 916127
cugggacucugcuuugaga

SEQ ID NO: 1132581 - RNA, 19 nt, Artificial Sequence
  Description of Artificial Sequence: Synthetic oligonucleotide
  Antisense strand to SEQ ID NO: 1132580
ucucaaagcagagucccag

SEQ ID NO: 1132582 - RNA, 19 nt, Artificial Sequence
  Description of Artificial Sequence: Synthetic oligonucleotide
  Sense strand starting at position 1096 of SEQ ID NO: 916127
gggacucugcuuugagaag

SEQ ID NO: 1132583 - RNA, 19 nt, Artificial Sequence
  Description of Artificial Sequence: Synthetic oligonucleotide
  Antisense strand to SEQ ID NO: 1132582
cuucucaaagcagaguccc

SEQ ID NO: 1132584 - RNA, 19 nt, Artificial Sequence
  Description of Artificial Sequence: Synthetic oligonucleotide
  Sense strand starting at position 1162 of SEQ ID NO: 916127
gugugcugccguguaauaa

SEQ ID NO: 1132585 - RNA, 19 nt, Artificial Sequence
  Description of Artificial Sequence: Synthetic oligonucleotide
  Antisense strand to SEQ ID NO: 1132584
uuauuacacggcagcacac

SEQ ID NO: 1132586 - RNA, 19 nt, Artificial Sequence
  Description of Artificial Sequence: Synthetic oligonucleotide
  Sense strand starting at position 1172 of SEQ ID NO: 916127
guguaauaaucuucccaag

SEQ ID NO: 1132587 - RNA, 19 nt, Artificial Sequence
  Description of Artificial Sequence: Synthetic oligonucleotide
  Antisense strand to SEQ ID NO: 1132586
cuugggaagauuauuacac

SEQ ID NO: 1132588 - RNA, 19 nt, Artificial Sequence
  Description of Artificial Sequence: Synthetic oligonucleotide
  Sense strand starting at position 1174 of SEQ ID NO: 916127
guaauaaucuucccaagag

SEQ ID NO: 1132589 - RNA, 19 nt, Artificial Sequence
  Description of Artificial Sequence: Synthetic oligonucleotide
  Antisense strand to SEQ ID NO: 1132588
cucuugggaagauuauuac

SEQ ID NO: 1132590 - RNA, 19 nt, Artificial Sequence
  Description of Artificial Sequence: Synthetic oligonucleotide
  Sense strand starting at position 1964 of SEQ ID NO: 916127
cucucaauagaucgcagaa

SEQ ID NO: 1132591 - RNA, 19 nt, Artificial Sequence
  Description of Artificial Sequence: Synthetic oligonucleotide
  Antisense strand to SEQ ID NO: 1132590
uucugcgaucuauugagag

SEQ ID NO: 1132592 - RNA, 19 nt, Artificial Sequence
  Description of Artificial Sequence: Synthetic oligonucleotide
  Sense strand starting at position 2223 of SEQ ID NO: 916127
gcgguaggauuuccuucuu

SEQ ID NO: 1132593 - RNA, 19 nt, Artificial Sequence
  Description of Artificial Sequence: Synthetic oligonucleotide
  Antisense strand to SEQ ID NO: 1132592
aagaaggaaauccuaccgc

SEQ ID NO: 1132594 - RNA, 19 nt, Artificial Sequence
  Description of Artificial Sequence: Synthetic oligonucleotide
  Sense strand starting at position 2351 of SEQ ID NO: 916127
uugauuucugaaugcgcua

SEQ ID NO: 1132595 - RNA, 19 nt, Artificial Sequence
  Description of Artificial Sequence: Synthetic oligonucleotide
  Antisense strand to SEQ ID NO: 1132594
uagcgcauucagaaaucaa

SEQ ID NO: 1132596 - RNA, 19 nt, Artificial Sequence
  Description of Artificial Sequence: Synthetic oligonucleotide
  Sense strand starting at position 2354 of SEQ ID NO: 916127
auuucugaaugcgcuaaca

SEQ ID NO: 1132597 - RNA, 19 nt, Artificial Sequence
  Description of Artificial Sequence: Synthetic oligonucleotide
  Antisense strand to SEQ ID NO: 1132596
uguuagcgcauucagaaau

SEQ ID NO: 1132598 - RNA, 19 nt, Artificial Sequence
  Description of Artificial Sequence: Synthetic oligonucleotide
  Sense strand starting at position 2401 of SEQ ID NO: 916127
ccuggaacccuuugggagu

SEQ ID NO: 1132599 - RNA, 19 nt, Artificial Sequence
  Description of Artificial Sequence: Synthetic oligonucleotide
  Antisense strand to SEQ ID NO: 1132598
acucccaaaggguuccagg

SEQ ID NO: 1132600 - RNA, 19 nt, Artificial Sequence
  Description of Artificial Sequence: Synthetic oligonucleotide
  Sense strand starting at position 2721 of SEQ ID NO: 916127
cuuaauccuuggguacaau

SEQ ID NO: 1132601 - RNA, 19 nt, Artificial Sequence
  Description of Artificial Sequence: Synthetic oligonucleotide
  Antisense strand to SEQ ID NO: 1132600
auuguacccaaggauuaag

SEQ ID NO: 1132602 - RNA, 19 nt, Artificial Sequence
  Description of Artificial Sequence: Synthetic oligonucleotide
  Sense strand starting at position 2722 of SEQ ID NO: 916127
uuaauccuuggguacaauu

SEQ ID NO: 1132603 - RNA, 19 nt, Artificial Sequence
  Description of Artificial Sequence: Synthetic oligonucleotide
  Antisense strand to SEQ ID NO: 1132602
aauuguacccaaggauuaa

SEQ ID NO: 1132604 - RNA, 19 nt, Artificial Sequence
  Description of Artificial Sequence: Synthetic oligonucleotide
  Sense strand starting at position 2805 of SEQ ID NO: 916127
ugugucauauuugucucua

SEQ ID NO: 1132605 - RNA, 19 nt, Artificial Sequence
  Description of Artificial Sequence: Synthetic oligonucleotide
  Antisense strand to SEQ ID NO: 1132604
uagagacaaauaugacaca

SEQ ID NO: 1132606 - RNA, 19 nt, Artificial Sequence
  Description of Artificial Sequence: Synthetic oligonucleotide
  Sense strand starting at position 2806 of SEQ ID NO: 916127
gugucauauuugucucuag

SEQ ID NO: 1132607 - RNA, 19 nt, Artificial Sequence
  Description of Artificial Sequence: Synthetic oligonucleotide
  Antisense strand to SEQ ID NO: 1132606
cuagagacaaauaugacac

SEQ ID NO: 1132608 - RNA, 19 nt, Artificial Sequence
  Description of Artificial Sequence: Synthetic oligonucleotide
  Sense strand starting at position 2907 of SEQ ID NO: 916127
augggcaaacuaugauuau

SEQ ID NO: 1132609 - RNA, 19 nt, Artificial Sequence
  Description of Artificial Sequence: Synthetic oligonucleotide
  Antisense strand to SEQ ID NO: 1132608
auaaucauaguuugcccau

SEQ ID NO: 1132610 - RNA, 19 nt, Artificial Sequence
  Description of Artificial Sequence: Synthetic oligonucleotide
  Sense strand starting at position 3079 of SEQ ID NO: 916127
cuugacaucucaguacuua

SEQ ID NO: 1132611 - RNA, 19 nt, Artificial Sequence
  Description of Artificial Sequence: Synthetic oligonucleotide
  Antisense strand to SEQ ID NO: 1132610
uaaguacugagaugucaag

SEQ ID NO: 1132612 - RNA, 19 nt, Artificial Sequence
  Description of Artificial Sequence: Synthetic oligonucleotide
  Sense strand starting at position 3195 of SEQ ID NO: 916127
aacucagugguccaguauu

SEQ ID NO: 1132613 - RNA, 19 nt, Artificial Sequence
  Description of Artificial Sequence: Synthetic oligonucleotide
  Antisense strand to SEQ ID NO: 1132612
aauacuggaccacugaguu

SEQ ID NO: 1132614 - RNA, 19 nt, Artificial Sequence
  Description of Artificial Sequence: Synthetic oligonucleotide
  Sense strand starting at position 3376 of SEQ ID NO: 916127
uuugguauauuauccaaga

SEQ ID NO: 1132615 - RNA, 19 nt, Artificial Sequence
  Description of Artificial Sequence: Synthetic oligonucleotide
  Antisense strand to SEQ ID NO: 1132614
ucuuggauaauauaccaaa

SEQ ID NO: 1132616 - RNA, 19 nt, Artificial Sequence
  Description of Artificial Sequence: Synthetic oligonucleotide
  Sense strand starting at position 3377 of SEQ ID NO: 916127
uugguauauuauccaagaa

SEQ ID NO: 1132617 - RNA, 19 nt, Artificial Sequence
  Description of Artificial Sequence: Synthetic oligonucleotide
  Antisense strand to SEQ ID NO: 1132616
uucuuggauaauauaccaa

SEQ ID NO: 1132618 - RNA, 19 nt, Artificial Sequence
  Description of Artificial Sequence: Synthetic oligonucleotide
  Sense strand starting at position 3459 of SEQ ID NO: 916127
uacauaugaggccagaguu

SEQ ID NO: 1132619 - RNA, 19 nt, Artificial Sequence
  Description of Artificial Sequence: Synthetic oligonucleotide
  Antisense strand to SEQ ID NO: 1132618
aacucuggccucauaugua

SEQ ID NO: 1132620 - RNA, 19 nt, Artificial Sequence
  Description of Artificial Sequence: Synthetic oligonucleotide
  Sense strand starting at position 3544 of SEQ ID NO: 916127
ugguaaauauaggugggua

SEQ ID NO: 1132621 - RNA, 19 nt, Artificial Sequence
  Description of Artificial Sequence: Synthetic oligonucleotide
  Antisense strand to SEQ ID NO: 1132620
uacccaccuauauuuacca

SEQ ID NO: 1132622 - RNA, 19 nt, Artificial Sequence
  Description of Artificial Sequence: Synthetic oligonucleotide
  Sense strand starting at position 3545 of SEQ ID NO: 916127
gguaaauauagguggguau

SEQ ID NO: 1132623 - RNA, 19 nt, Artificial Sequence
  Description of Artificial Sequence: Synthetic oligonucleotide
  Antisense strand to SEQ ID NO: 1132622
auacccaccuauauuuacc

SEQ ID NO: 1132624 - RNA, 19 nt, Artificial Sequence
  Description of Artificial Sequence: Synthetic oligonucleotide
  Sense strand starting at position 3546 of SEQ ID NO: 916127
guaaauauagguggguaua

SEQ ID NO: 1132625 - RNA, 19 nt, Artificial Sequence
  Description of Artificial Sequence: Synthetic oligonucleotide
  Antisense strand to SEQ ID NO: 1132624
uauacccaccuauauuuac

SEQ ID NO: 1132626 - RNA, 19 nt, Artificial Sequence
  Description of Artificial Sequence: Synthetic oligonucleotide
  Sense strand starting at position 3547 of SEQ ID NO: 916127
uaaauauagguggguauaa

SEQ ID NO: 1132627 - RNA, 19 nt, Artificial Sequence
  Description of Artificial Sequence: Synthetic oligonucleotide
  Antisense strand to SEQ ID NO: 1132626
uuauacccaccuauauuua

SEQ ID NO: 1132628 - RNA, 19 nt, Artificial Sequence
  Description of Artificial Sequence: Synthetic oligonucleotide
  Sense strand starting at position 3967 of SEQ ID NO: 916127
aguugagaaugguugaucu

SEQ ID NO: 1132629 - RNA, 19 nt, Artificial Sequence
  Description of Artificial Sequence: Synthetic oligonucleotide
  Antisense strand to SEQ ID NO: 1132628
agaucaaccauucucaacu

SEQ ID NO: 1132630 - RNA, 19 nt, Artificial Sequence
  Description of Artificial Sequence: Synthetic oligonucleotide
  Sense strand starting at position 150 of SEQ ID NO: 916128
cucagaauucucggaucua

SEQ ID NO: 1132631 - RNA, 19 nt, Artificial Sequence
  Description of Artificial Sequence: Synthetic oligonucleotide
  Antisense strand to SEQ ID NO: 1132630
uagauccgagaauucugag

SEQ ID NO: 1132632 - RNA, 19 nt, Artificial Sequence
  Description of Artificial Sequence: Synthetic oligonucleotide
  Sense strand starting at position 331 of SEQ ID NO: 916128
uugguagcaguuuauuaca

SEQ ID NO: 1132633 - RNA, 19 nt, Artificial Sequence
  Description of Artificial Sequence: Synthetic oligonucleotide
  Antisense strand to SEQ ID NO: 1132632
uguaauaaacugcuaccaa

SEQ ID NO: 1132634 - RNA, 19 nt, Artificial Sequence
  Description of Artificial Sequence: Synthetic oligonucleotide
  Sense strand starting at position 455 of SEQ ID NO: 916128
gaaucagggcuuugcaaac

SEQ ID NO: 1132635 - RNA, 19 nt, Artificial Sequence
  Description of Artificial Sequence: Synthetic oligonucleotide
  Antisense strand to SEQ ID NO: 1132634
guuugcaaagcccugauuc

SEQ ID NO: 1132636 - RNA, 19 nt, Artificial Sequence
  Description of Artificial Sequence: Synthetic oligonucleotide
  Sense strand starting at position 485 of SEQ ID NO: 916128
gcuguaauuccgcugacuu

SEQ ID NO: 1132637 - RNA, 19 nt, Artificial Sequence
  Description of Artificial Sequence: Synthetic oligonucleotide
  Antisense strand to SEQ ID NO: 1132636
aagucagcggaauuacagc

SEQ ID NO: 1132638 - RNA, 19 nt, Artificial Sequence
  Description of Artificial Sequence: Synthetic oligonucleotide
  Sense strand starting at position 687 of SEQ ID NO: 916128
acauucuuaccgcaucgaa

SEQ ID NO: 1132639 - RNA, 19 nt, Artificial Sequence
  Description of Artificial Sequence: Synthetic oligonucleotide
  Antisense strand to SEQ ID NO: 1132638
uucgaugcgguaagaaugu

SEQ ID NO: 1132640 - RNA, 19 nt, Artificial Sequence
  Description of Artificial Sequence: Synthetic oligonucleotide
  Sense strand starting at position 903 of SEQ ID NO: 916128
gugagucaacaguauguca

SEQ ID NO: 1132641 - RNA, 19 nt, Artificial Sequence
  Description of Artificial Sequence: Synthetic oligonucleotide
  Antisense strand to SEQ ID NO: 1132640
ugacauacuguugacucac

SEQ ID NO: 1132642 - RNA, 19 nt, Artificial Sequence
  Description of Artificial Sequence: Synthetic oligonucleotide
  Sense strand starting at position 958 of SEQ ID NO: 916128
acaauugggaccugacagu

SEQ ID NO: 1132643 - RNA, 19 nt, Artificial Sequence
  Description of Artificial Sequence: Synthetic oligonucleotide
  Antisense strand to SEQ ID NO: 1132642
acugucaggucccaauugu

SEQ ID NO: 1132644 - RNA, 19 nt, Artificial Sequence
  Description of Artificial Sequence: Synthetic oligonucleotide
  Sense strand starting at position 972 of SEQ ID NO: 916128
acaguaaacggugagugua

SEQ ID NO: 1132645 - RNA, 19 nt, Artificial Sequence
  Description of Artificial Sequence: Synthetic oligonucleotide
  Antisense strand to SEQ ID NO: 1132644
uacacucaccguuuacugu

SEQ ID NO: 1132646 - RNA, 19 nt, Artificial Sequence
  Description of Artificial Sequence: Synthetic oligonucleotide
  Sense strand starting at position 991 of SEQ ID NO: 916128
agugauagcaacgauguua

SEQ ID NO: 1132647 - RNA, 19 nt, Artificial Sequence
  Description of Artificial Sequence: Synthetic oligonucleotide
  Antisense strand to SEQ ID NO: 1132646
uaacaucguugcuaucacu

SEQ ID NO: 1132648 - RNA, 19 nt, Artificial Sequence
  Description of Artificial Sequence: Synthetic oligonucleotide
  Sense strand starting at position 1060 of SEQ ID NO: 916128
ggugaaggcuauccuccaa

SEQ ID NO: 1132649 - RNA, 19 nt, Artificial Sequence
  Description of Artificial Sequence: Synthetic oligonucleotide
  Antisense strand to SEQ ID NO: 1132648
uuggaggauagccuucacc

SEQ ID NO: 1132650 - RNA, 19 nt, Artificial Sequence
  Description of Artificial Sequence: Synthetic oligonucleotide
  Sense strand starting at position 1127 of SEQ ID NO: 916128
ggaccuuaguacucaaggu

SEQ ID NO: 1132651 - RNA, 19 nt, Artificial Sequence
  Description of Artificial Sequence: Synthetic oligonucleotide
  Antisense strand to SEQ ID NO: 1132650
accuugaguacuaaggucc

SEQ ID NO: 1132652 - RNA, 19 nt, Artificial Sequence
  Description of Artificial Sequence: Synthetic oligonucleotide
  Sense strand starting at position 1206 of SEQ ID NO: 916128
caggauugucaugggagug

SEQ ID NO: 1132653 - RNA, 19 nt, Artificial Sequence
  Description of Artificial Sequence: Synthetic oligonucleotide
  Antisense strand to SEQ ID NO: 1132652
cacucccaugacaauccug

SEQ ID NO: 1132654 - RNA, 19 nt, Artificial Sequence
  Description of Artificial Sequence: Synthetic oligonucleotide
  Sense strand starting at position 1243 of SEQ ID NO: 916128
agguucccucaaggauaga

SEQ ID NO: 1132655 - RNA, 19 nt, Artificial Sequence
  Description of Artificial Sequence: Synthetic oligonucleotide
  Antisense strand to SEQ ID NO: 1132654
ucuauccuugagggaaccu

SEQ ID NO: 1132656 - RNA, 19 nt, Artificial Sequence
  Description of Artificial Sequence: Synthetic oligonucleotide
  Sense strand starting at position 1318 of SEQ ID NO: 916128
gaugaaggccaucguuaag

SEQ ID NO: 1132657 - RNA, 19 nt, Artificial Sequence
  Description of Artificial Sequence: Synthetic oligonucleotide
  Antisense strand to SEQ ID NO: 1132656
cuuaacgauggccuucauc

SEQ ID NO: 1132658 - RNA, 19 nt, Artificial Sequence
  Description of Artificial Sequence: Synthetic oligonucleotide
  Sense strand starting at position 1329 of SEQ ID NO: 916128
ucguuaaguggucuggugu

SEQ ID NO: 1132659 - RNA, 19 nt, Artificial Sequence
  Description of Artificial Sequence: Synthetic oligonucleotide
  Antisense strand to SEQ ID NO: 1132658
acaccagaccacuuaacga

SEQ ID NO: 1132660 - RNA, 19 nt, Artificial Sequence
  Description of Artificial Sequence: Synthetic oligonucleotide
  Sense strand starting at position 1441 of SEQ ID NO: 916128
gucaguacccggagucgau

SEQ ID NO: 1132661 - RNA, 19 nt, Artificial Sequence
  Description of Artificial Sequence: Synthetic oligonucleotide
  Antisense strand to SEQ ID NO: 1132660
aucgacuccggguacugac

SEQ ID NO: 1132662 - RNA, 19 nt, Artificial Sequence
  Description of Artificial Sequence: Synthetic oligonucleotide
  Sense strand starting at position 1456 of SEQ ID NO: 916128
cgauuucugggccgagcua

SEQ ID NO: 1132663 - RNA, 19 nt, Artificial Sequence
  Description of Artificial Sequence: Synthetic oligonucleotide
  Antisense strand to SEQ ID NO: 1132662
uagcucggcccagaaaucg

SEQ ID NO: 1132664 - RNA, 19 nt, Artificial Sequence
  Description of Artificial Sequence: Synthetic oligonucleotide
  Sense strand starting at position 2208 of SEQ ID NO: 916128
acaagaaguuugcuugaua

SEQ ID NO: 1132665 - RNA, 19 nt, Artificial Sequence
  Description of Artificial Sequence: Synthetic oligonucleotide
  Antisense strand to SEQ ID NO: 1132664
uaucaagcaaacuucuugu

SEQ ID NO: 1132666 - RNA, 19 nt, Artificial Sequence
  Description of Artificial Sequence: Synthetic oligonucleotide
  Sense strand starting at position 2209 of SEQ ID NO: 916128
caagaaguuugcuugauac

SEQ ID NO: 1132667 - RNA, 19 nt, Artificial Sequence
  Description of Artificial Sequence: Synthetic oligonucleotide
  Antisense strand to SEQ ID NO: 1132666
guaucaagcaaacuucuug

SEQ ID NO: 1132668 - RNA, 19 nt, Artificial Sequence
  Description of Artificial Sequence: Synthetic oligonucleotide
  Sense strand starting at position 2211 of SEQ ID NO: 916128
agaaguuugcuugauacug

SEQ ID NO: 1132669 - RNA, 19 nt, Artificial Sequence
  Description of Artificial Sequence: Synthetic oligonucleotide
  Antisense strand to SEQ ID NO: 1132668
caguaucaagcaaacuucu

SEQ ID NO: 1132670 - RNA, 19 nt, Artificial Sequence
  Description of Artificial Sequence: Synthetic oligonucleotide
  Sense strand starting at position 2220 of SEQ ID NO: 916128
cuugauacuguguauuaua

SEQ ID NO: 1132671 - RNA, 19 nt, Artificial Sequence
  Description of Artificial Sequence: Synthetic oligonucleotide
  Antisense strand to SEQ ID NO: 1132670
uauaauacacaguaucaag

SEQ ID NO: 1132672 - RNA, 19 nt, Artificial Sequence
  Description of Artificial Sequence: Synthetic oligonucleotide
  Sense strand starting at position 2470 of SEQ ID NO: 916128
uggcaauucuaucugaagu

SEQ ID NO: 1132673 - RNA, 19 nt, Artificial Sequence
  Description of Artificial Sequence: Synthetic oligonucleotide
  Antisense strand to SEQ ID NO: 1132672
acuucagauagaauugcca

SEQ ID NO: 1132674 - RNA, 19 nt, Artificial Sequence
  Description of Artificial Sequence: Synthetic oligonucleotide
  Sense strand starting at position 2541 of SEQ ID NO: 916128
uuaacuacuucguuaauag

SEQ ID NO: 1132675 - RNA, 19 nt, Artificial Sequence
  Description of Artificial Sequence: Synthetic oligonucleotide
  Antisense strand to SEQ ID NO: 1132674
cuauuaacgaaguaguuaa

SEQ ID NO: 1132676 - RNA, 19 nt, Artificial Sequence
  Description of Artificial Sequence: Synthetic oligonucleotide
  Sense strand starting at position 2618 of SEQ ID NO: 916128
auguauuuaugggacacau

SEQ ID NO: 1132677 - RNA, 19 nt, Artificial Sequence
  Description of Artificial Sequence: Synthetic oligonucleotide
  Antisense strand to SEQ ID NO: 1132676
augugucccauaaauacau

SEQ ID NO: 1132678 - RNA, 19 nt, Artificial Sequence
  Description of Artificial Sequence: Synthetic oligonucleotide
  Sense strand starting at position 2764 of SEQ ID NO: 916128
acaguugaguuauucuuga

SEQ ID NO: 1132679 - RNA, 19 nt, Artificial Sequence
  Description of Artificial Sequence: Synthetic oligonucleotide
  Antisense strand to SEQ ID NO: 1132678
ucaagaauaacucaacugu

SEQ ID NO: 1132680 - RNA, 19 nt, Artificial Sequence
  Description of Artificial Sequence: Synthetic oligonucleotide
  Sense strand starting at position 2769 of SEQ ID NO: 916128
ugaguuauucuugacuaua

SEQ ID NO: 1132681 - RNA, 19 nt, Artificial Sequence
  Description of Artificial Sequence: Synthetic oligonucleotide
  Antisense strand to SEQ ID NO: 1132680
uauagucaagaauaacuca

SEQ ID NO: 1132682 - RNA, 19 nt, Artificial Sequence
  Description of Artificial Sequence: Synthetic oligonucleotide
  Sense strand starting at position 3015 of SEQ ID NO: 916128
aggacacacucagaauaaa

SEQ ID NO: 1132683 - RNA, 19 nt, Artificial Sequence
  Description of Artificial Sequence: Synthetic oligonucleotide
  Antisense strand to SEQ ID NO: 1132682
uuuauucugaguguguccu

SEQ ID NO: 1132684 - RNA, 19 nt, Artificial Sequence
  Description of Artificial Sequence: Synthetic oligonucleotide
  Sense strand starting at position 3106 of SEQ ID NO: 916128
agggcauacucagugaacu

SEQ ID NO: 1132685 - RNA, 19 nt, Artificial Sequence
  Description of Artificial Sequence: Synthetic oligonucleotide
  Antisense strand to SEQ ID NO: 1132684
aguucacugaguaugcccu

SEQ ID NO: 1132686 - RNA, 19 nt, Artificial Sequence
  Description of Artificial Sequence: Synthetic oligonucleotide
  Sense strand starting at position 3107 of SEQ ID NO: 916128
gggcauacucagugaacuu

SEQ ID NO: 1132687 - RNA, 19 nt, Artificial Sequence
  Description of Artificial Sequence: Synthetic oligonucleotide
  Antisense strand to SEQ ID NO: 1132686
aaguucacugaguaugccc

SEQ ID NO: 1132688 - RNA, 19 nt, Artificial Sequence
  Description of Artificial Sequence: Synthetic oligonucleotide
  Sense strand starting at position 3213 of SEQ ID NO: 916128
augggauguuucccaggau

SEQ ID NO: 1132689 - RNA, 19 nt, Artificial Sequence
  Description of Artificial Sequence: Synthetic oligonucleotide
  Antisense strand to SEQ ID NO: 1132688
auccugggaaacaucccau

SEQ ID NO: 1132690 - RNA, 19 nt, Artificial Sequence
  Description of Artificial Sequence: Synthetic oligonucleotide
  Sense strand starting at position 3217 of SEQ ID NO: 916128
gauguuucccaggauguuu

SEQ ID NO: 1132691 - RNA, 19 nt, Artificial Sequence
  Description of Artificial Sequence: Synthetic oligonucleotide
  Antisense strand to SEQ ID NO: 1132690
aaacauccugggaaacauc

SEQ ID NO: 1132692 - RNA, 19 nt, Artificial Sequence
  Description of Artificial Sequence: Synthetic oligonucleotide
  Sense strand starting at position 3261 of SEQ ID NO: 916128
cuuagaaauugugccaaac

SEQ ID NO: 1132693 - RNA, 19 nt, Artificial Sequence
  Description of Artificial Sequence: Synthetic oligonucleotide
  Antisense strand to SEQ ID NO: 1132692
guuuggcacaauuucuaag

SEQ ID NO: 1132694 - RNA, 19 nt, Artificial Sequence
  Description of Artificial Sequence: Synthetic oligonucleotide
  Sense strand starting at position 3286 of SEQ ID NO: 916128
acuagagaguuccugaguu

SEQ ID NO: 1132695 - RNA, 19 nt, Artificial Sequence
  Description of Artificial Sequence: Synthetic oligonucleotide
  Antisense strand to SEQ ID NO: 1132694
aacucaggaacucucuagu

SEQ ID NO: 1132696 - RNA, 19 nt, Artificial Sequence
  Description of Artificial Sequence: Synthetic oligonucleotide
  Sense strand starting at position 3359 of SEQ ID NO: 916128
uccauaguccuacagcuuu

SEQ ID NO: 1132697 - RNA, 19 nt, Artificial Sequence
  Description of Artificial Sequence: Synthetic oligonucleotide
  Antisense strand to SEQ ID NO: 1132696
aaagcuguaggacuaugga

SEQ ID NO: 1132698 - RNA, 19 nt, Artificial Sequence
  Description of Artificial Sequence: Synthetic oligonucleotide
  Sense strand starting at position 3468 of SEQ ID NO: 916128
cugaguucugaauaguuag

SEQ ID NO: 1132699 - RNA, 19 nt, Artificial Sequence
  Description of Artificial Sequence: Synthetic oligonucleotide
  Antisense strand to SEQ ID NO: 1132698
cuaacuauucagaacucag

SEQ ID NO: 1132700 - RNA, 19 nt, Artificial Sequence
  Description of Artificial Sequence: Synthetic oligonucleotide
  Sense strand starting at position 3669 of SEQ ID NO: 916128
aggccugugacauggagaa

SEQ ID NO: 1132701 - RNA, 19 nt, Artificial Sequence
  Description of Artificial Sequence: Synthetic oligonucleotide
  Antisense strand to SEQ ID NO: 1132700
uucuccaugucacaggccu

SEQ ID NO: 1132702 - RNA, 19 nt, Artificial Sequence
  Description of Artificial Sequence: Synthetic oligonucleotide
  Sense strand starting at position 3733 of SEQ ID NO: 916128
gcaggagucugacccaaag

SEQ ID NO: 1132703 - RNA, 19 nt, Artificial Sequence
  Description of Artificial Sequence: Synthetic oligonucleotide
  Antisense strand to SEQ ID NO: 1132702
cuuugggucagacuccugc

SEQ ID NO: 1132704 - RNA, 19 nt, Artificial Sequence
  Description of Artificial Sequence: Synthetic oligonucleotide
  Sense strand starting at position 3883 of SEQ ID NO: 916128
cacacacucccguagguau

SEQ ID NO: 1132705 - RNA, 19 nt, Artificial Sequence
  Description of Artificial Sequence: Synthetic oligonucleotide
  Antisense strand to SEQ ID NO: 1132704
auaccuacgggagugugug

SEQ ID NO: 1132706 - RNA, 19 nt, Artificial Sequence
  Description of Artificial Sequence: Synthetic oligonucleotide
  Sense strand starting at position 3891 of SEQ ID NO: 916128
cccguagguaucugaauuu

SEQ ID NO: 1132707 - RNA, 19 nt, Artificial Sequence
  Description of Artificial Sequence: Synthetic oligonucleotide
  Antisense strand to SEQ ID NO: 1132706
aaauucagauaccuacggg

SEQ ID NO: 1132708 - RNA, 19 nt, Artificial Sequence
  Description of Artificial Sequence: Synthetic oligonucleotide
  Sense strand starting at position 3925 of SEQ ID NO: 916128
gccggcuuugccucagacu

SEQ ID NO: 1132709 - RNA, 19 nt, Artificial Sequence
  Description of Artificial Sequence: Synthetic oligonucleotide
  Antisense strand to SEQ ID NO: 1132708
agucugaggcaaagccggc

SEQ ID NO: 1132710 - RNA, 19 nt, Artificial Sequence
  Description of Artificial Sequence: Synthetic oligonucleotide
  Sense strand starting at position 4 of SEQ ID NO: 916129
ggcaaacucuugcugauuu

SEQ ID NO: 1132711 - RNA, 19 nt, Artificial Sequence
  Description of Artificial Sequence: Synthetic oligonucleotide
  Antisense strand to SEQ ID NO: 1132710
aaaucagcaagaguuugcc

SEQ ID NO: 1132712 - RNA, 19 nt, Artificial Sequence
  Description of Artificial Sequence: Synthetic oligonucleotide
  Sense strand starting at position 52 of SEQ ID NO: 916129
ugacaacucuaguugcuua

SEQ ID NO: 1132713 - RNA, 19 nt, Artificial Sequence
  Description of Artificial Sequence: Synthetic oligonucleotide
  Antisense strand to SEQ ID NO: 1132712
uaagcaacuagaguuguca

SEQ ID NO: 1132714 - RNA, 19 nt, Artificial Sequence
  Description of Artificial Sequence: Synthetic oligonucleotide
  Sense strand starting at position 57 of SEQ ID NO: 916129
acucuaguugcuuaagcua

SEQ ID NO: 1132715 - RNA, 19 nt, Artificial Sequence
  Description of Artificial Sequence: Synthetic oligonucleotide
  Antisense strand to SEQ ID NO: 1132714
uagcuuaagcaacuagagu

SEQ ID NO: 1132716 - RNA, 19 nt, Artificial Sequence
  Description of Artificial Sequence: Synthetic oligonucleotide
  Sense strand starting at position 477 of SEQ ID NO: 916129
cuuugcuuagaagaaucua

SEQ ID NO: 1132717 - RNA, 19 nt, Artificial Sequence
  Description of Artificial Sequence: Synthetic oligonucleotide
  Antisense strand to SEQ ID NO: 1132716
uagauucuucuaagcaaag

SEQ ID NO: 1132718 - RNA, 19 nt, Artificial Sequence
  Description of Artificial Sequence: Synthetic oligonucleotide
  Sense strand starting at position 554 of SEQ ID NO: 916129
ugcagaaacuuucugacug

SEQ ID NO: 1132719 - RNA, 19 nt, Artificial Sequence
  Description of Artificial Sequence: Synthetic oligonucleotide
  Antisense strand to SEQ ID NO: 1132718
cagucagaaaguuucugca

SEQ ID NO: 1132720 - RNA, 19 nt, Artificial Sequence
  Description of Artificial Sequence: Synthetic oligonucleotide
  Sense strand starting at position 571 of SEQ ID NO: 916129
ugcagaaggucuucccauu

SEQ ID NO: 1132721 - RNA, 19 nt, Artificial Sequence
  Description of Artificial Sequence: Synthetic oligonucleotide
  Antisense strand to SEQ ID NO: 1132720
aaugggaagaccuucugca

SEQ ID NO: 1132722 - RNA, 19 nt, Artificial Sequence
  Description of Artificial Sequence: Synthetic oligonucleotide
  Sense strand starting at position 655 of SEQ ID NO: 916129
aggucauuccucugcucaa

SEQ ID NO: 1132723 - RNA, 19 nt, Artificial Sequence
  Description of Artificial Sequence: Synthetic oligonucleotide
  Antisense strand to SEQ ID NO: 1132722
uugagcagaggaaugaccu

SEQ ID NO: 1132724 - RNA, 19 nt, Artificial Sequence
  Description of Artificial Sequence: Synthetic oligonucleotide
  Sense strand starting at position 656 of SEQ ID NO: 916129
ggucauuccucugcucaaa

SEQ ID NO: 1132725 - RNA, 19 nt, Artificial Sequence
  Description of Artificial Sequence: Synthetic oligonucleotide
  Antisense strand to SEQ ID NO: 1132724
uuugagcagaggaaugacc

SEQ ID NO: 1132726 - RNA, 19 nt, Artificial Sequence
  Description of Artificial Sequence: Synthetic oligonucleotide
  Sense strand starting at position 815 of SEQ ID NO: 916129
gcuuucuccguggcacuua

SEQ ID NO: 1132727 - RNA, 19 nt, Artificial Sequence
  Description of Artificial Sequence: Synthetic oligonucleotide
  Antisense strand to SEQ ID NO: 1132726
uaagugccacggagaaagc

SEQ ID NO: 1132728 - RNA, 19 nt, Artificial Sequence
  Description of Artificial Sequence: Synthetic oligonucleotide
  Sense strand starting at position 871 of SEQ ID NO: 916129
uuuccucuugcucaaggau

SEQ ID NO: 1132729 - RNA, 19 nt, Artificial Sequence
  Description of Artificial Sequence: Synthetic oligonucleotide
  Antisense strand to SEQ ID NO: 1132728
auccuugagcaagaggaaa

SEQ ID NO: 1132730 - RNA, 19 nt, Artificial Sequence
  Description of Artificial Sequence: Synthetic oligonucleotide
  Sense strand starting at position 874 of SEQ ID NO: 916129
ccucuugcucaaggaugua

SEQ ID NO: 1132731 - RNA, 19 nt, Artificial Sequence
  Description of Artificial Sequence: Synthetic oligonucleotide
  Antisense strand to SEQ ID NO: 1132730
uacauccuugagcaagagg

SEQ ID NO: 1132732 - RNA, 19 nt, Artificial Sequence
  Description of Artificial Sequence: Synthetic oligonucleotide
  Sense strand starting at position 918 of SEQ ID NO: 916129
acaguagguccucauuaag

SEQ ID NO: 1132733 - RNA, 19 nt, Artificial Sequence
  Description of Artificial Sequence: Synthetic oligonucleotide
  Antisense strand to SEQ ID NO: 1132732
cuuaaugaggaccuacugu

SEQ ID NO: 1132734 - RNA, 19 nt, Artificial Sequence
  Description of Artificial Sequence: Synthetic oligonucleotide
  Sense strand starting at position 921 of SEQ ID NO: 916129
guagguccucauuaaguau

SEQ ID NO: 1132735 - RNA, 19 nt, Artificial Sequence
  Description of Artificial Sequence: Synthetic oligonucleotide
  Antisense strand to SEQ ID NO: 1132734
auacuuaaugaggaccuac

SEQ ID NO: 1132736 - RNA, 19 nt, Artificial Sequence
  Description of Artificial Sequence: Synthetic oligonucleotide
  Sense strand starting at position 1023 of SEQ ID NO: 916129
gggcuagagaugcaauauu

SEQ ID NO: 1132737 - RNA, 19 nt, Artificial Sequence
  Description of Artificial Sequence: Synthetic oligonucleotide
  Antisense strand to SEQ ID NO: 1132736
aauauugcaucucuagccc

SEQ ID NO: 1132738 - RNA, 19 nt, Artificial Sequence
  Description of Artificial Sequence: Synthetic oligonucleotide
  Sense strand starting at position 1032 of SEQ ID NO: 916129
augcaauauugcccgaagu

SEQ ID NO: 1132739 - RNA, 19 nt, Artificial Sequence
  Description of Artificial Sequence: Synthetic oligonucleotide
  Antisense strand to SEQ ID NO: 1132738
acuucgggcaauauugcau

SEQ ID NO: 1132740 - RNA, 19 nt, Artificial Sequence
  Description of Artificial Sequence: Synthetic oligonucleotide
  Sense strand starting at position 1033 of SEQ ID NO: 916129
ugcaauauugcccgaagua

SEQ ID NO: 1132741 - RNA, 19 nt, Artificial Sequence
  Description of Artificial Sequence: Synthetic oligonucleotide
  Antisense strand to SEQ ID NO: 1132740
uacuucgggcaauauugca

SEQ ID NO: 1132742 - RNA, 19 nt, Artificial Sequence
  Description of Artificial Sequence: Synthetic oligonucleotide
  Sense strand starting at position 1034 of SEQ ID NO: 916129
gcaauauugcccgaaguau

SEQ ID NO: 1132743 - RNA, 19 nt, Artificial Sequence
  Description of Artificial Sequence: Synthetic oligonucleotide
  Antisense strand to SEQ ID NO: 1132742
auacuucgggcaauauugc

SEQ ID NO: 1132744 - RNA, 19 nt, Artificial Sequence
  Description of Artificial Sequence: Synthetic oligonucleotide
  Sense strand starting at position 1168 of SEQ ID NO: 916129
gccugaugcaaugguuaca

SEQ ID NO: 1132745 - RNA, 19 nt, Artificial Sequence
  Description of Artificial Sequence: Synthetic oligonucleotide
  Antisense strand to SEQ ID NO: 1132744
uguaaccauugcaucaggc

SEQ ID NO: 1132746 - RNA, 19 nt, Artificial Sequence
  Description of Artificial Sequence: Synthetic oligonucleotide
  Sense strand starting at position 1201 of SEQ ID NO: 916129
gagacaggaccggguuaaa

SEQ ID NO: 1132747 - RNA, 19 nt, Artificial Sequence
  Description of Artificial Sequence: Synthetic oligonucleotide
  Antisense strand to SEQ ID NO: 1132746
uuuaacccgguccugucuc

SEQ ID NO: 1132748 - RNA, 19 nt, Artificial Sequence
  Description of Artificial Sequence: Synthetic oligonucleotide
  Sense strand starting at position 1320 of SEQ ID NO: 916129
cagagaccucuacggcaaa

SEQ ID NO: 1132749 - RNA, 19 nt, Artificial Sequence
  Description of Artificial Sequence: Synthetic oligonucleotide
  Antisense strand to SEQ ID NO: 1132748
uuugccguagaggucucug

SEQ ID NO: 1132750 - RNA, 19 nt, Artificial Sequence
  Description of Artificial Sequence: Synthetic oligonucleotide
  Sense strand starting at position 1604 of SEQ ID NO: 916129
aacgaugaggccugaaguu

SEQ ID NO: 1132751 - RNA, 19 nt, Artificial Sequence
  Description of Artificial Sequence: Synthetic oligonucleotide
  Antisense strand to SEQ ID NO: 1132750
aacuucaggccucaucguu

SEQ ID NO: 1132752 - RNA, 19 nt, Artificial Sequence
  Description of Artificial Sequence: Synthetic oligonucleotide
  Sense strand starting at position 1616 of SEQ ID NO: 916129
ugaaguuggcuacgggaaa

SEQ ID NO: 1132753 - RNA, 19 nt, Artificial Sequence
  Description of Artificial Sequence: Synthetic oligonucleotide
  Antisense strand to SEQ ID NO: 1132752
uuucccguagccaacuuca

SEQ ID NO: 1132754 - RNA, 19 nt, Artificial Sequence
  Description of Artificial Sequence: Synthetic oligonucleotide
  Sense strand starting at position 1723 of SEQ ID NO: 916129
cgccgucguccgaagcaau

SEQ ID NO: 1132755 - RNA, 19 nt, Artificial Sequence
  Description of Artificial Sequence: Synthetic oligonucleotide
  Antisense strand to SEQ ID NO: 1132754
auugcuucggacgacggcg

SEQ ID NO: 1132756 - RNA, 19 nt, Artificial Sequence
  Description of Artificial Sequence: Synthetic oligonucleotide
  Sense strand starting at position 1724 of SEQ ID NO: 916129
gccgucguccgaagcaaua

SEQ ID NO: 1132757 - RNA, 19 nt, Artificial Sequence
  Description of Artificial Sequence: Synthetic oligonucleotide
  Antisense strand to SEQ ID NO: 1132756
uauugcuucggacgacggc

SEQ ID NO: 1132758 - RNA, 19 nt, Artificial Sequence
  Description of Artificial Sequence: Synthetic oligonucleotide
  Sense strand starting at position 1968 of SEQ ID NO: 916129
cgcucagugccuuagacuu

SEQ ID NO: 1132759 - RNA, 19 nt, Artificial Sequence
  Description of Artificial Sequence: Synthetic oligonucleotide
  Antisense strand to SEQ ID NO: 1132758
aagucuaaggcacugagcg

SEQ ID NO: 1132760 - RNA, 19 nt, Artificial Sequence
  Description of Artificial Sequence: Synthetic oligonucleotide
  Sense strand starting at position 1981 of SEQ ID NO: 916129
agacuuaagucucugaccu

SEQ ID NO: 1132761 - RNA, 19 nt, Artificial Sequence
  Description of Artificial Sequence: Synthetic oligonucleotide
  Antisense strand to SEQ ID NO: 1132760
aggucagagacuuaagucu

SEQ ID NO: 1132762 - RNA, 19 nt, Artificial Sequence
  Description of Artificial Sequence: Synthetic oligonucleotide
  Sense strand starting at position 2611 of SEQ ID NO: 916129
guauccauccacugggauu

SEQ ID NO: 1132763 - RNA, 19 nt, Artificial Sequence
  Description of Artificial Sequence: Synthetic oligonucleotide
  Antisense strand to SEQ ID NO: 1132762
aaucccaguggauggauac

SEQ ID NO: 1132764 - RNA, 19 nt, Artificial Sequence
  Description of Artificial Sequence: Synthetic oligonucleotide
  Sense strand starting at position 2629 of SEQ ID NO: 916129
ugucgacaucucgagucuu

SEQ ID NO: 1132765 - RNA, 19 nt, Artificial Sequence
  Description of Artificial Sequence: Synthetic oligonucleotide
  Antisense strand to SEQ ID NO: 1132764
aagacucgagaugucgaca

SEQ ID NO: 1132766 - RNA, 19 nt, Artificial Sequence
  Description of Artificial Sequence: Synthetic oligonucleotide
  Sense strand starting at position 2637 of SEQ ID NO: 916129
ucucgagucuucuuaaaga

SEQ ID NO: 1132767 - RNA, 19 nt, Artificial Sequence
  Description of Artificial Sequence: Synthetic oligonucleotide
  Antisense strand to SEQ ID NO: 1132766
ucuuuaagaagacucgaga

SEQ ID NO: 1132768 - RNA, 19 nt, Artificial Sequence
  Description of Artificial Sequence: Synthetic oligonucleotide
  Sense strand starting at position 3033 of SEQ ID NO: 916129
acuggaaucccuugguagu

SEQ ID NO: 1132769 - RNA, 19 nt, Artificial Sequence
  Description of Artificial Sequence: Synthetic oligonucleotide
  Antisense strand to SEQ ID NO: 1132768
acuaccaagggauuccagu

SEQ ID NO: 1132770 - RNA, 19 nt, Artificial Sequence
  Description of Artificial Sequence: Synthetic oligonucleotide
  Sense strand starting at position 3276 of SEQ ID NO: 916129
agguguucgggucgagauu

SEQ ID NO: 1132771 - RNA, 19 nt, Artificial Sequence
  Description of Artificial Sequence: Synthetic oligonucleotide
  Antisense strand to SEQ ID NO: 1132770
aaucucgacccgaacaccu

SEQ ID NO: 1132772 - RNA, 19 nt, Artificial Sequence
  Description of Artificial Sequence: Synthetic oligonucleotide
  Sense strand starting at position 3277 of SEQ ID NO: 916129
gguguucgggucgagauuu

SEQ ID NO: 1132773 - RNA, 19 nt, Artificial Sequence
  Description of Artificial Sequence: Synthetic oligonucleotide
  Antisense strand to SEQ ID NO: 1132772
aaaucucgacccgaacacc

SEQ ID NO: 1132774 - RNA, 19 nt, Artificial Sequence
  Description of Artificial Sequence: Synthetic oligonucleotide
  Sense strand starting at position 3278 of SEQ ID NO: 916129
guguucgggucgagauuua

SEQ ID NO: 1132775 - RNA, 19 nt, Artificial Sequence
  Description of Artificial Sequence: Synthetic oligonucleotide
  Antisense strand to SEQ ID NO: 1132774
uaaaucucgacccgaacac

SEQ ID NO: 1132776 - RNA, 19 nt, Artificial Sequence
  Description of Artificial Sequence: Synthetic oligonucleotide
  Sense strand starting at position 3411 of SEQ ID NO: 916129
uaccguccuuguuuguaaa

SEQ ID NO: 1132777 - RNA, 19 nt, Artificial Sequence
  Description of Artificial Sequence: Synthetic oligonucleotide
  Antisense strand to SEQ ID NO: 1132776
uuuacaaacaaggacggua

SEQ ID NO: 1132778 - RNA, 19 nt, Artificial Sequence
  Description of Artificial Sequence: Synthetic oligonucleotide
  Sense strand starting at position 3412 of SEQ ID NO: 916129
accguccuuguuuguaaau

SEQ ID NO: 1132779 - RNA, 19 nt, Artificial Sequence
  Description of Artificial Sequence: Synthetic oligonucleotide
  Antisense strand to SEQ ID NO: 1132778
auuuacaaacaaggacggu

SEQ ID NO: 1132780 - RNA, 19 nt, Artificial Sequence
  Description of Artificial Sequence: Synthetic oligonucleotide
  Sense strand starting at position 3593 of SEQ ID NO: 916129
gccagaguuuaaguagaaa

SEQ ID NO: 1132781 - RNA, 19 nt, Artificial Sequence
  Description of Artificial Sequence: Synthetic oligonucleotide
  Antisense strand to SEQ ID NO: 1132780
uuucuacuuaaacucuggc

SEQ ID NO: 1132782 - RNA, 19 nt, Artificial Sequence
  Description of Artificial Sequence: Synthetic oligonucleotide
  Sense strand starting at position 3632 of SEQ ID NO: 916129
acuggagugguguggcaau

SEQ ID NO: 1132783 - RNA, 19 nt, Artificial Sequence
  Description of Artificial Sequence: Synthetic oligonucleotide
  Antisense strand to SEQ ID NO: 1132782
auugccacaccacuccagu

SEQ ID NO: 1132784 - RNA, 19 nt, Artificial Sequence
  Description of Artificial Sequence: Synthetic oligonucleotide
  Sense strand starting at position 3643 of SEQ ID NO: 916129
guggcaaugacaggucuuu

SEQ ID NO: 1132785 - RNA, 19 nt, Artificial Sequence
  Description of Artificial Sequence: Synthetic oligonucleotide
  Antisense strand to SEQ ID NO: 1132784
aaagaccugucauugccac

SEQ ID NO: 1132786 - RNA, 19 nt, Artificial Sequence
  Description of Artificial Sequence: Synthetic oligonucleotide
  Sense strand starting at position 3648 of SEQ ID NO: 916129
aaugacaggucuuugguua

SEQ ID NO: 1132787 - RNA, 19 nt, Artificial Sequence
  Description of Artificial Sequence: Synthetic oligonucleotide
  Antisense strand to SEQ ID NO: 1132786
uaaccaaagaccugucauu

SEQ ID NO: 1132788 - RNA, 19 nt, Artificial Sequence
  Description of Artificial Sequence: Synthetic oligonucleotide
  Sense strand starting at position 3800 of SEQ ID NO: 916129
ggcugaggucguguuguga

SEQ ID NO: 1132789 - RNA, 19 nt, Artificial Sequence
  Description of Artificial Sequence: Synthetic oligonucleotide
  Antisense strand to SEQ ID NO: 1132788
ucacaacacgaccucagcc

SEQ ID NO: 1132790 - RNA, 19 nt, Artificial Sequence
  Description of Artificial Sequence: Synthetic oligonucleotide
  Sense strand starting at position 168 of SEQ ID NO: 916130
ggaacauauugggaucgua

SEQ ID NO: 1132791 - RNA, 19 nt, Artificial Sequence
  Description of Artificial Sequence: Synthetic oligonucleotide
  Antisense strand to SEQ ID NO: 1132790
uacgaucccaauauguucc

SEQ ID NO: 1132792 - RNA, 19 nt, Artificial Sequence
  Description of Artificial Sequence: Synthetic oligonucleotide
  Sense strand starting at position 171 of SEQ ID NO: 916130
acauauugggaucguauca

SEQ ID NO: 1132793 - RNA, 19 nt, Artificial Sequence
  Description of Artificial Sequence: Synthetic oligonucleotide
  Antisense strand to SEQ ID NO: 1132792
ugauacgaucccaauaugu

SEQ ID NO: 1132794 - RNA, 19 nt, Artificial Sequence
  Description of Artificial Sequence: Synthetic oligonucleotide
  Sense strand starting at position 194 of SEQ ID NO: 916130
gcacguggcgucaaugaca

SEQ ID NO: 1132795 - RNA, 19 nt, Artificial Sequence
  Description of Artificial Sequence: Synthetic oligonucleotide
  Antisense strand to SEQ ID NO: 1132794
ugucauugacgccacgugc

SEQ ID NO: 1132796 - RNA, 19 nt, Artificial Sequence
  Description of Artificial Sequence: Synthetic oligonucleotide
  Sense strand starting at position 724 of SEQ ID NO: 916130
cgaggacgucccgguagau

SEQ ID NO: 1132797 - RNA, 19 nt, Artificial Sequence
  Description of Artificial Sequence: Synthetic oligonucleotide
  Antisense strand to SEQ ID NO: 1132796
aucuaccgggacguccucg

SEQ ID NO: 1132798 - RNA, 19 nt, Artificial Sequence
  Description of Artificial Sequence: Synthetic oligonucleotide
  Sense strand starting at position 1495 of SEQ ID NO: 916130
gugcguauauguuaggacu

SEQ ID NO: 1132799 - RNA, 19 nt, Artificial Sequence
  Description of Artificial Sequence: Synthetic oligonucleotide
  Antisense strand to SEQ ID NO: 1132798
aguccuaacauauacgcac

SEQ ID NO: 1132800 - RNA, 19 nt, Artificial Sequence
  Description of Artificial Sequence: Synthetic oligonucleotide
  Sense strand starting at position 1497 of SEQ ID NO: 916130
gcguauauguuaggacuga

SEQ ID NO: 1132801 - RNA, 19 nt, Artificial Sequence
  Description of Artificial Sequence: Synthetic oligonucleotide
  Antisense strand to SEQ ID NO: 1132800
ucaguccuaacauauacgc

SEQ ID NO: 1132802 - RNA, 19 nt, Artificial Sequence
  Description of Artificial Sequence: Synthetic oligonucleotide
  Sense strand starting at position 1498 of SEQ ID NO: 916130
cguauauguuaggacugaa

SEQ ID NO: 1132803 - RNA, 19 nt, Artificial Sequence
  Description of Artificial Sequence: Synthetic oligonucleotide
  Antisense strand to SEQ ID NO: 1132802
uucaguccuaacauauacg

SEQ ID NO: 1132804 - RNA, 19 nt, Artificial Sequence
  Description of Artificial Sequence: Synthetic oligonucleotide
  Sense strand starting at position 1843 of SEQ ID NO: 916130
cgacuauaaugacaggaaa

SEQ ID NO: 1132805 - RNA, 19 nt, Artificial Sequence
  Description of Artificial Sequence: Synthetic oligonucleotide
  Antisense strand to SEQ ID NO: 1132804
uuuccugucauuauagucg

SEQ ID NO: 1132806 - RNA, 19 nt, Artificial Sequence
  Description of Artificial Sequence: Synthetic oligonucleotide
  Sense strand starting at position 2282 of SEQ ID NO: 916130
acuuaugauucuugccaag

SEQ ID NO: 1132807 - RNA, 19 nt, Artificial Sequence
  Description of Artificial Sequence: Synthetic oligonucleotide
  Antisense strand to SEQ ID NO: 1132806
cuuggcaagaaucauaagu

SEQ ID NO: 1132808 - RNA, 19 nt, Artificial Sequence
  Description of Artificial Sequence: Synthetic oligonucleotide
  Sense strand starting at position 2284 of SEQ ID NO: 916130
uuaugauucuugccaagcu

SEQ ID NO: 1132809 - RNA, 19 nt, Artificial Sequence
  Description of Artificial Sequence: Synthetic oligonucleotide
  Antisense strand to SEQ ID NO: 1132808
agcuuggcaagaaucauaa

SEQ ID NO: 1132810 - RNA, 19 nt, Artificial Sequence
  Description of Artificial Sequence: Synthetic oligonucleotide
  Sense strand starting at position 2434 of SEQ ID NO: 916130
aacauagagugaugagauu

SEQ ID NO: 1132811 - RNA, 19 nt, Artificial Sequence
  Description of Artificial Sequence: Synthetic oligonucleotide
  Antisense strand to SEQ ID NO: 1132810
aaucucaucacucuauguu

SEQ ID NO: 1132812 - RNA, 19 nt, Artificial Sequence
  Description of Artificial Sequence: Synthetic oligonucleotide
  Sense strand starting at position 2551 of SEQ ID NO: 916130
gcuguucgggugcagagau

SEQ ID NO: 1132813 - RNA, 19 nt, Artificial Sequence
  Description of Artificial Sequence: Synthetic oligonucleotide
  Antisense strand to SEQ ID NO: 1132812
aucucugcacccgaacagc

SEQ ID NO: 1132814 - RNA, 19 nt, Artificial Sequence
  Description of Artificial Sequence: Synthetic oligonucleotide
  Sense strand starting at position 2778 of SEQ ID NO: 916130
aguuccauucuacauguuu

SEQ ID NO: 1132815 - RNA, 19 nt, Artificial Sequence
  Description of Artificial Sequence: Synthetic oligonucleotide
  Antisense strand to SEQ ID NO: 1132814
aaacauguagaauggaacu

SEQ ID NO: 1132816 - RNA, 19 nt, Artificial Sequence
  Description of Artificial Sequence: Synthetic oligonucleotide
  Sense strand starting at position 2789 of SEQ ID NO: 916130
acauguuuguccuugggca

SEQ ID NO: 1132817 - RNA, 19 nt, Artificial Sequence
  Description of Artificial Sequence: Synthetic oligonucleotide
  Antisense strand to SEQ ID NO: 1132816
ugcccaaggacaaacaugu

SEQ ID NO: 1132818 - RNA, 19 nt, Artificial Sequence
  Description of Artificial Sequence: Synthetic oligonucleotide
  Sense strand starting at position 2915 of SEQ ID NO: 916130
cagaguaagugcuuaugca

SEQ ID NO: 1132819 - RNA, 19 nt, Artificial Sequence
  Description of Artificial Sequence: Synthetic oligonucleotide
  Antisense strand to SEQ ID NO: 1132818
ugcauaagcacuuacucug

SEQ ID NO: 1132820 - RNA, 19 nt, Artificial Sequence
  Description of Artificial Sequence: Synthetic oligonucleotide
  Sense strand starting at position 2916 of SEQ ID NO: 916130
agaguaagugcuuaugcac

SEQ ID NO: 1132821 - RNA, 19 nt, Artificial Sequence
  Description of Artificial Sequence: Synthetic oligonucleotide
  Antisense strand to SEQ ID NO: 1132820
gugcauaagcacuuacucu

SEQ ID NO: 1132822 - RNA, 19 nt, Artificial Sequence
  Description of Artificial Sequence: Synthetic oligonucleotide
  Sense strand starting at position 2960 of SEQ ID NO: 916130
ggagaaaugauguguuugc

SEQ ID NO: 1132823 - RNA, 19 nt, Artificial Sequence
  Description of Artificial Sequence: Synthetic oligonucleotide
  Antisense strand to SEQ ID NO: 1132822
gcaaacacaucauuucucc

SEQ ID NO: 1132824 - RNA, 19 nt, Artificial Sequence
  Description of Artificial Sequence: Synthetic oligonucleotide
  Sense strand starting at position 2961 of SEQ ID NO: 916130
gagaaaugauguguuugcu

SEQ ID NO: 1132825 - RNA, 19 nt, Artificial Sequence
  Description of Artificial Sequence: Synthetic oligonucleotide
  Antisense strand to SEQ ID NO: 1132824
agcaaacacaucauuucuc

SEQ ID NO: 1132826 - RNA, 19 nt, Artificial Sequence
  Description of Artificial Sequence: Synthetic oligonucleotide
  Sense strand starting at position 2967 of SEQ ID NO: 916130
ugauguguuugcuuggcaa

SEQ ID NO: 1132827 - RNA, 19 nt, Artificial Sequence
  Description of Artificial Sequence: Synthetic oligonucleotide
  Antisense strand to SEQ ID NO: 1132826
uugccaagcaaacacauca

SEQ ID NO: 1132828 - RNA, 19 nt, Artificial Sequence
  Description of Artificial Sequence: Synthetic oligonucleotide
  Sense strand starting at position 3198 of SEQ ID NO: 916130
ucaccaugguaauguuagu

SEQ ID NO: 1132829 - RNA, 19 nt, Artificial Sequence
  Description of Artificial Sequence: Synthetic oligonucleotide
  Antisense strand to SEQ ID NO: 1132828
acuaacauuaccaugguga

SEQ ID NO: 1132830 - RNA, 19 nt, Artificial Sequence
  Description of Artificial Sequence: Synthetic oligonucleotide
  Sense strand starting at position 3329 of SEQ ID NO: 916130
gggcaugguuccucgggaa

SEQ ID NO: 1132831 - RNA, 19 nt, Artificial Sequence
  Description of Artificial Sequence: Synthetic oligonucleotide
  Antisense strand to SEQ ID NO: 1132830
uucccgaggaaccaugccc

SEQ ID NO: 1132832 - RNA, 19 nt, Artificial Sequence
  Description of Artificial Sequence: Synthetic oligonucleotide
  Sense strand starting at position 3332 of SEQ ID NO: 916130
caugguuccucgggaagaa

SEQ ID NO: 1132833 - RNA, 19 nt, Artificial Sequence
  Description of Artificial Sequence: Synthetic oligonucleotide
  Antisense strand to SEQ ID NO: 1132832
uucuucccgaggaaccaug

SEQ ID NO: 1132834 - RNA, 19 nt, Artificial Sequence
  Description of Artificial Sequence: Synthetic oligonucleotide
  Sense strand starting at position 3360 of SEQ ID NO: 916130
ugccucucuggagaggaau

SEQ ID NO: 1132835 - RNA, 19 nt, Artificial Sequence
  Description of Artificial Sequence: Synthetic oligonucleotide
  Antisense strand to SEQ ID NO: 1132834
auuccucuccagagaggca

SEQ ID NO: 1132836 - RNA, 19 nt, Artificial Sequence
  Description of Artificial Sequence: Synthetic oligonucleotide
  Sense strand starting at position 3373 of SEQ ID NO: 916130
aggaauagguaagaauaga

SEQ ID NO: 1132837 - RNA, 19 nt, Artificial Sequence
  Description of Artificial Sequence: Synthetic oligonucleotide
  Antisense strand to SEQ ID NO: 1132836
ucuauucuuaccuauuccu

SEQ ID NO: 1132838 - RNA, 19 nt, Artificial Sequence
  Description of Artificial Sequence: Synthetic oligonucleotide
  Sense strand starting at position 3384 of SEQ ID NO: 916130
agaauagaagcuugugagu

SEQ ID NO: 1132839 - RNA, 19 nt, Artificial Sequence
  Description of Artificial Sequence: Synthetic oligonucleotide
  Antisense strand to SEQ ID NO: 1132838
acucacaagcuucuauucu

SEQ ID NO: 1132840 - RNA, 19 nt, Artificial Sequence
  Description of Artificial Sequence: Synthetic oligonucleotide
  Sense strand starting at position 3386 of SEQ ID NO: 916130
aauagaagcuugugagucu

SEQ ID NO: 1132841 - RNA, 19 nt, Artificial Sequence
  Description of Artificial Sequence: Synthetic oligonucleotide
  Antisense strand to SEQ ID NO: 1132840
agacucacaagcuucuauu

SEQ ID NO: 1132842 - RNA, 19 nt, Artificial Sequence
  Description of Artificial Sequence: Synthetic oligonucleotide
  Sense strand starting at position 3393 of SEQ ID NO: 916130
gcuugugagucucccaaau

SEQ ID NO: 1132843 - RNA, 19 nt, Artificial Sequence
  Description of Artificial Sequence: Synthetic oligonucleotide
  Antisense strand to SEQ ID NO: 1132842
auuugggagacucacaagc

SEQ ID NO: 1132844 - RNA, 19 nt, Artificial Sequence
  Description of Artificial Sequence: Synthetic oligonucleotide
  Sense strand starting at position 3395 of SEQ ID NO: 916130
uugugagucucccaaauuu

SEQ ID NO: 1132845 - RNA, 19 nt, Artificial Sequence
  Description of Artificial Sequence: Synthetic oligonucleotide
  Antisense strand to SEQ ID NO: 1132844
aaauuugggagacucacaa

SEQ ID NO: 1132846 - RNA, 19 nt, Artificial Sequence
  Description of Artificial Sequence: Synthetic oligonucleotide
  Sense strand starting at position 3623 of SEQ ID NO: 916130
ccaggucucugcucccuaa

SEQ ID NO: 1132847 - RNA, 19 nt, Artificial Sequence
  Description of Artificial Sequence: Synthetic oligonucleotide
  Antisense strand to SEQ ID NO: 1132846
uuagggagcagagaccugg

SEQ ID NO: 1132848 - RNA, 19 nt, Artificial Sequence
  Description of Artificial Sequence: Synthetic oligonucleotide
  Sense strand starting at position 3726 of SEQ ID NO: 916130
acuugacucgaagaugcuu

SEQ ID NO: 1132849 - RNA, 19 nt, Artificial Sequence
  Description of Artificial Sequence: Synthetic oligonucleotide
  Antisense strand to SEQ ID NO: 1132848
aagcaucuucgagucaagu

SEQ ID NO: 1132850 - RNA, 19 nt, Artificial Sequence
  Description of Artificial Sequence: Synthetic oligonucleotide
  Sense strand starting at position 3761 of SEQ ID NO: 916130
ccacuagaguccugaggcu

SEQ ID NO: 1132851 - RNA, 19 nt, Artificial Sequence
  Description of Artificial Sequence: Synthetic oligonucleotide
  Antisense strand to SEQ ID NO: 1132850
agccucaggacucuagugg

SEQ ID NO: 1132852 - RNA, 19 nt, Artificial Sequence
  Description of Artificial Sequence: Synthetic oligonucleotide
  Sense strand starting at position 3804 of SEQ ID NO: 916130
aggcaaaucuuccuuaaug

SEQ ID NO: 1132853 - RNA, 19 nt, Artificial Sequence
  Description of Artificial Sequence: Synthetic oligonucleotide
  Antisense strand to SEQ ID NO: 1132852
cauuaaggaagauuugccu

SEQ ID NO: 1132854 - RNA, 19 nt, Artificial Sequence
  Description of Artificial Sequence: Synthetic oligonucleotide
  Sense strand starting at position 3805 of SEQ ID NO: 916130
ggcaaaucuuccuuaauga

SEQ ID NO: 1132855 - RNA, 19 nt, Artificial Sequence
  Description of Artificial Sequence: Synthetic oligonucleotide
  Antisense strand to SEQ ID NO: 1132854
ucauuaaggaagauuugcc

SEQ ID NO: 1132856 - RNA, 19 nt, Artificial Sequence
  Description of Artificial Sequence: Synthetic oligonucleotide
  Sense strand starting at position 3806 of SEQ ID NO: 916130
gcaaaucuuccuuaaugag

SEQ ID NO: 1132857 - RNA, 19 nt, Artificial Sequence
  Description of Artificial Sequence: Synthetic oligonucleotide
  Antisense strand to SEQ ID NO: 1132856
cucauuaaggaagauuugc

SEQ ID NO: 1132858 - RNA, 19 nt, Artificial Sequence
  Description of Artificial Sequence: Synthetic oligonucleotide
  Sense strand starting at position 3813 of SEQ ID NO: 916130
uuccuuaaugagggaaugu

SEQ ID NO: 1132859 - RNA, 19 nt, Artificial Sequence
  Description of Artificial Sequence: Synthetic oligonucleotide
  Antisense strand to SEQ ID NO: 1132858
acauucccucauuaaggaa

SEQ ID NO: 1132860 - RNA, 19 nt, Artificial Sequence
  Description of Artificial Sequence: Synthetic oligonucleotide
  Sense strand starting at position 3928 of SEQ ID NO: 916130
gguugagaaugugcuguga

SEQ ID NO: 1132861 - RNA, 19 nt, Artificial Sequence
  Description of Artificial Sequence: Synthetic oligonucleotide
  Antisense strand to SEQ ID NO: 1132860
ucacagcacauucucaacc

SEQ ID NO: 1132862 - RNA, 19 nt, Artificial Sequence
  Description of Artificial Sequence: Synthetic oligonucleotide
  Sense strand starting at position 3930 of SEQ ID NO: 916130
uugagaaugugcugugaga

SEQ ID NO: 1132863 - RNA, 19 nt, Artificial Sequence
  Description of Artificial Sequence: Synthetic oligonucleotide
  Antisense strand to SEQ ID NO: 1132862
ucucacagcacauucucaa

SEQ ID NO: 1132864 - RNA, 19 nt, Artificial Sequence
  Description of Artificial Sequence: Synthetic oligonucleotide
  Sense strand starting at position 3939 of SEQ ID NO: 916130
ugcugugagagcuguaaag

SEQ ID NO: 1132865 - RNA, 19 nt, Artificial Sequence
  Description of Artificial Sequence: Synthetic oligonucleotide
  Antisense strand to SEQ ID NO: 1132864
cuuuacagcucucacagca

SEQ ID NO: 1132866 - RNA, 19 nt, Artificial Sequence
  Description of Artificial Sequence: Synthetic oligonucleotide
  Sense strand starting at position 31 of SEQ ID NO: 916131
acuggaauauacguuccau

SEQ ID NO: 1132867 - RNA, 19 nt, Artificial Sequence
  Description of Artificial Sequence: Synthetic oligonucleotide
  Antisense strand to SEQ ID NO: 1132866
auggaacguauauuccagu

SEQ ID NO: 1132868 - RNA, 19 nt, Artificial Sequence
  Description of Artificial Sequence: Synthetic oligonucleotide
  Sense strand starting at position 151 of SEQ ID NO: 916131
ugaguagccagccagacau

SEQ ID NO: 1132869 - RNA, 19 nt, Artificial Sequence
  Description of Artificial Sequence: Synthetic oligonucleotide
  Antisense strand to SEQ ID NO: 1132868
augucuggcuggcuacuca

SEQ ID NO: 1132870 - RNA, 19 nt, Artificial Sequence
  Description of Artificial Sequence: Synthetic oligonucleotide
  Sense strand starting at position 535 of SEQ ID NO: 916131
gaagaaacguaaguauuau

SEQ ID NO: 1132871 - RNA, 19 nt, Artificial Sequence
  Description of Artificial Sequence: Synthetic oligonucleotide
  Antisense strand to SEQ ID NO: 1132870
auaauacuuacguuucuuc

SEQ ID NO: 1132872 - RNA, 19 nt, Artificial Sequence
  Description of Artificial Sequence: Synthetic oligonucleotide
  Sense strand starting at position 853 of SEQ ID NO: 916131
acucauuacugaguacaga

SEQ ID NO: 1132873 - RNA, 19 nt, Artificial Sequence
  Description of Artificial Sequence: Synthetic oligonucleotide
  Antisense strand to SEQ ID NO: 1132872
ucuguacucaguaaugagu

SEQ ID NO: 1132874 - RNA, 19 nt, Artificial Sequence
  Description of Artificial Sequence: Synthetic oligonucleotide
  Sense strand starting at position 1021 of SEQ ID NO: 916131
gcagguacuaucuaccgua

SEQ ID NO: 1132875 - RNA, 19 nt, Artificial Sequence
  Description of Artificial Sequence: Synthetic oligonucleotide
  Antisense strand to SEQ ID NO: 1132874
uacgguagauaguaccugc

SEQ ID NO: 1132876 - RNA, 19 nt, Artificial Sequence
  Description of Artificial Sequence: Synthetic oligonucleotide
  Sense strand starting at position 1261 of SEQ ID NO: 916131
agcugcuuaucagcauuua

SEQ ID NO: 1132877 - RNA, 19 nt, Artificial Sequence
  Description of Artificial Sequence: Synthetic oligonucleotide
  Antisense strand to SEQ ID NO: 1132876
uaaaugcugauaagcagcu

SEQ ID NO: 1132878 - RNA, 19 nt, Artificial Sequence
  Description of Artificial Sequence: Synthetic oligonucleotide
  Sense strand starting at position 1262 of SEQ ID NO: 916131
gcugcuuaucagcauuuaa

SEQ ID NO: 1132879 - RNA, 19 nt, Artificial Sequence
  Description of Artificial Sequence: Synthetic oligonucleotide
  Antisense strand to SEQ ID NO: 1132878
uuaaaugcugauaagcagc

SEQ ID NO: 1132880 - RNA, 19 nt, Artificial Sequence
  Description of Artificial Sequence: Synthetic oligonucleotide
  Sense strand starting at position 1303 of SEQ ID NO: 916131
ucaacaaucuggucaagug

SEQ ID NO: 1132881 - RNA, 19 nt, Artificial Sequence
  Description of Artificial Sequence: Synthetic oligonucleotide
  Antisense strand to SEQ ID NO: 1132880
cacuugaccagauuguuga

SEQ ID NO: 1132882 - RNA, 19 nt, Artificial Sequence
  Description of Artificial Sequence: Synthetic oligonucleotide
  Sense strand starting at position 1413 of SEQ ID NO: 916131
gggcucugauugccaaguu

SEQ ID NO: 1132883 - RNA, 19 nt, Artificial Sequence
  Description of Artificial Sequence: Synthetic oligonucleotide
  Antisense strand to SEQ ID NO: 1132882
aacuuggcaaucagagccc

SEQ ID NO: 1132884 - RNA, 19 nt, Artificial Sequence
  Description of Artificial Sequence: Synthetic oligonucleotide
  Sense strand starting at position 1473 of SEQ ID NO: 916131
ggcucaguuuccguaagag

SEQ ID NO: 1132885 - RNA, 19 nt, Artificial Sequence
  Description of Artificial Sequence: Synthetic oligonucleotide
  Antisense strand to SEQ ID NO: 1132884
cucuuacggaaacugagcc

SEQ ID NO: 1132886 - RNA, 19 nt, Artificial Sequence
  Description of Artificial Sequence: Synthetic oligonucleotide
  Sense strand starting at position 1526 of SEQ ID NO: 916131
gugucuuaucuacguaaga

SEQ ID NO: 1132887 - RNA, 19 nt, Artificial Sequence
  Description of Artificial Sequence: Synthetic oligonucleotide
  Antisense strand to SEQ ID NO: 1132886
ucuuacguagauaagacac

SEQ ID NO: 1132888 - RNA, 19 nt, Artificial Sequence
  Description of Artificial Sequence: Synthetic oligonucleotide
  Sense strand starting at position 1527 of SEQ ID NO: 916131
ugucuuaucuacguaagau

SEQ ID NO: 1132889 - RNA, 19 nt, Artificial Sequence
  Description of Artificial Sequence: Synthetic oligonucleotide
  Antisense strand to SEQ ID NO: 1132888
aucuuacguagauaagaca

SEQ ID NO: 1132890 - RNA, 19 nt, Artificial Sequence
  Description of Artificial Sequence: Synthetic oligonucleotide
  Sense strand starting at position 1536 of SEQ ID NO: 916131
uacguaagauaauccauga

SEQ ID NO: 1132891 - RNA, 19 nt, Artificial Sequence
  Description of Artificial Sequence: Synthetic oligonucleotide
  Antisense strand to SEQ ID NO: 1132890
ucauggauuaucuuacgua

SEQ ID NO: 1132892 - RNA, 19 nt, Artificial Sequence
  Description of Artificial Sequence: Synthetic oligonucleotide
  Sense strand starting at position 2149 of SEQ ID NO: 916131
ccgauuagcgccaggugua

SEQ ID NO: 1132893 - RNA, 19 nt, Artificial Sequence
  Description of Artificial Sequence: Synthetic oligonucleotide
  Antisense strand to SEQ ID NO: 1132892
uacaccuggcgcuaaucgg

SEQ ID NO: 1132894 - RNA, 19 nt, Artificial Sequence
  Description of Artificial Sequence: Synthetic oligonucleotide
  Sense strand starting at position 2196 of SEQ ID NO: 916131
ugaaacaucagccgauguu

SEQ ID NO: 1132895 - RNA, 19 nt, Artificial Sequence
  Description of Artificial Sequence: Synthetic oligonucleotide
  Antisense strand to SEQ ID NO: 1132894
aacaucggcugauguuuca

SEQ ID NO: 1132896 - RNA, 19 nt, Artificial Sequence
  Description of Artificial Sequence: Synthetic oligonucleotide
  Sense strand starting at position 2388 of SEQ ID NO: 916131
cgucuagaugacgaguuua

SEQ ID NO: 1132897 - RNA, 19 nt, Artificial Sequence
  Description of Artificial Sequence: Synthetic oligonucleotide
  Antisense strand to SEQ ID NO: 1132896
uaaacucgucaucuagacg

SEQ ID NO: 1132898 - RNA, 19 nt, Artificial Sequence
  Description of Artificial Sequence: Synthetic oligonucleotide
  Sense strand starting at position 2396 of SEQ ID NO: 916131
ugacgaguuuaugaaauug

SEQ ID NO: 1132899 - RNA, 19 nt, Artificial Sequence
  Description of Artificial Sequence: Synthetic oligonucleotide
  Antisense strand to SEQ ID NO: 1132898
caauuucauaaacucguca

SEQ ID NO: 1132900 - RNA, 19 nt, Artificial Sequence
  Description of Artificial Sequence: Synthetic oligonucleotide
  Sense strand starting at position 2615 of SEQ ID NO: 916131
ggaucaucuuaugcuauga

SEQ ID NO: 1132901 - RNA, 19 nt, Artificial Sequence
  Description of Artificial Sequence: Synthetic oligonucleotide
  Antisense strand to SEQ ID NO: 1132900
ucauagcauaagaugaucc

SEQ ID NO: 1132902 - RNA, 19 nt, Artificial Sequence
  Description of Artificial Sequence: Synthetic oligonucleotide
  Sense strand starting at position 2628 of SEQ ID NO: 916131
cuaugagcuuuccuggaau

SEQ ID NO: 1132903 - RNA, 19 nt, Artificial Sequence
  Description of Artificial Sequence: Synthetic oligonucleotide
  Antisense strand to SEQ ID NO: 1132902
auuccaggaaagcucauag

SEQ ID NO: 1132904 - RNA, 19 nt, Artificial Sequence
  Description of Artificial Sequence: Synthetic oligonucleotide
  Sense strand starting at position 2630 of SEQ ID NO: 916131
augagcuuuccuggaauga

SEQ ID NO: 1132905 - RNA, 19 nt, Artificial Sequence
  Description of Artificial Sequence: Synthetic oligonucleotide
  Antisense strand to SEQ ID NO: 1132904
ucauuccaggaaagcucau

SEQ ID NO: 1132906 - RNA, 19 nt, Artificial Sequence
  Description of Artificial Sequence: Synthetic oligonucleotide
  Sense strand starting at position 2631 of SEQ ID NO: 916131
ugagcuuuccuggaaugac

SEQ ID NO: 1132907 - RNA, 19 nt, Artificial Sequence
  Description of Artificial Sequence: Synthetic oligonucleotide
  Antisense strand to SEQ ID NO: 1132906
gucauuccaggaaagcuca

SEQ ID NO: 1132908 - RNA, 19 nt, Artificial Sequence
  Description of Artificial Sequence: Synthetic oligonucleotide
  Sense strand starting at position 2639 of SEQ ID NO: 916131
ccuggaaugacagguaauu

SEQ ID NO: 1132909 - RNA, 19 nt, Artificial Sequence
  Description of Artificial Sequence: Synthetic oligonucleotide
  Antisense strand to SEQ ID NO: 1132908
aauuaccugucauuccagg

SEQ ID NO: 1132910 - RNA, 19 nt, Artificial Sequence
  Description of Artificial Sequence: Synthetic oligonucleotide
  Sense strand starting at position 2681 of SEQ ID NO: 916131
gggagaguugcugggacuu

SEQ ID NO: 1132911 - RNA, 19 nt, Artificial Sequence
  Description of Artificial Sequence: Synthetic oligonucleotide
  Antisense strand to SEQ ID NO: 1132910
aagucccagcaacucuccc

SEQ ID NO: 1132912 - RNA, 19 nt, Artificial Sequence
  Description of Artificial Sequence: Synthetic oligonucleotide
  Sense strand starting at position 2914 of SEQ ID NO: 916131
uagaauuaaugggcagagu

SEQ ID NO: 1132913 - RNA, 19 nt, Artificial Sequence
  Description of Artificial Sequence: Synthetic oligonucleotide
  Antisense strand to SEQ ID NO: 1132912
acucugcccauuaauucua

SEQ ID NO: 1132914 - RNA, 19 nt, Artificial Sequence
  Description of Artificial Sequence: Synthetic oligonucleotide
  Sense strand starting at position 2923 of SEQ ID NO: 916131
ugggcagaguacuuaaaua

SEQ ID NO: 1132915 - RNA, 19 nt, Artificial Sequence
  Description of Artificial Sequence: Synthetic oligonucleotide
  Antisense strand to SEQ ID NO: 1132914
uauuuaaguacucugccca

SEQ ID NO: 1132916 - RNA, 19 nt, Artificial Sequence
  Description of Artificial Sequence: Synthetic oligonucleotide
  Sense strand starting at position 3034 of SEQ ID NO: 916131
aaauaacuguugucuggua

SEQ ID NO: 1132917 - RNA, 19 nt, Artificial Sequence
  Description of Artificial Sequence: Synthetic oligonucleotide
  Antisense strand to SEQ ID NO: 1132916
uaccagacaacaguuauuu

SEQ ID NO: 1132918 - RNA, 19 nt, Artificial Sequence
  Description of Artificial Sequence: Synthetic oligonucleotide
  Sense strand starting at position 3035 of SEQ ID NO: 916131
aauaacuguugucugguaa

SEQ ID NO: 1132919 - RNA, 19 nt, Artificial Sequence
  Description of Artificial Sequence: Synthetic oligonucleotide
  Antisense strand to SEQ ID NO: 1132918
uuaccagacaacaguuauu

SEQ ID NO: 1132920 - RNA, 19 nt, Artificial Sequence
  Description of Artificial Sequence: Synthetic oligonucleotide
  Sense strand starting at position 3036 of SEQ ID NO: 916131
auaacuguugucugguaaa

SEQ ID NO: 1132921 - RNA, 19 nt, Artificial Sequence
  Description of Artificial Sequence: Synthetic oligonucleotide
  Antisense strand to SEQ ID NO: 1132920
uuuaccagacaacaguuau

SEQ ID NO: 1132922 - RNA, 19 nt, Artificial Sequence
  Description of Artificial Sequence: Synthetic oligonucleotide
  Sense strand starting at position 3132 of SEQ ID NO: 916131
gggugugcaucauccaguu

SEQ ID NO: 1132923 - RNA, 19 nt, Artificial Sequence
  Description of Artificial Sequence: Synthetic oligonucleotide
  Antisense strand to SEQ ID NO: 1132922
aacuggaugaugcacaccc

SEQ ID NO: 1132924 - RNA, 19 nt, Artificial Sequence
  Description of Artificial Sequence: Synthetic oligonucleotide
  Sense strand starting at position 3134 of SEQ ID NO: 916131
gugugcaucauccaguuua

SEQ ID NO: 1132925 - RNA, 19 nt, Artificial Sequence
  Description of Artificial Sequence: Synthetic oligonucleotide
  Antisense strand to SEQ ID NO: 1132924
uaaacuggaugaugcacac

SEQ ID NO: 1132926 - RNA, 19 nt, Artificial Sequence
  Description of Artificial Sequence: Synthetic oligonucleotide
  Sense strand starting at position 3177 of SEQ ID NO: 916131
uugauaguguguccagaau

SEQ ID NO: 1132927 - RNA, 19 nt, Artificial Sequence
  Description of Artificial Sequence: Synthetic oligonucleotide
  Antisense strand to SEQ ID NO: 1132926
auucuggacacacuaucaa

SEQ ID NO: 1132928 - RNA, 19 nt, Artificial Sequence
  Description of Artificial Sequence: Synthetic oligonucleotide
  Sense strand starting at position 3362 of SEQ ID NO: 916131
agaccuucgccugaguguu

SEQ ID NO: 1132929 - RNA, 19 nt, Artificial Sequence
  Description of Artificial Sequence: Synthetic oligonucleotide
  Antisense strand to SEQ ID NO: 1132928
aacacucaggcgaaggucu

SEQ ID NO: 1132930 - RNA, 19 nt, Artificial Sequence
  Description of Artificial Sequence: Synthetic oligonucleotide
  Sense strand starting at position 3427 of SEQ ID NO: 916131
ggguucguguaucucacua

SEQ ID NO: 1132931 - RNA, 19 nt, Artificial Sequence
  Description of Artificial Sequence: Synthetic oligonucleotide
  Antisense strand to SEQ ID NO: 1132930
uagugagauacacgaaccc

SEQ ID NO: 1132932 - RNA, 19 nt, Artificial Sequence
  Description of Artificial Sequence: Synthetic oligonucleotide
  Sense strand starting at position 3469 of SEQ ID NO: 916131
auuugcagugaguguuaca

SEQ ID NO: 1132933 - RNA, 19 nt, Artificial Sequence
  Description of Artificial Sequence: Synthetic oligonucleotide
  Antisense strand to SEQ ID NO: 1132932
uguaacacucacugcaaau

SEQ ID NO: 1132934 - RNA, 19 nt, Artificial Sequence
  Description of Artificial Sequence: Synthetic oligonucleotide
  Sense strand starting at position 3533 of SEQ ID NO: 916131
uccauacugugguaagaaa

SEQ ID NO: 1132935 - RNA, 19 nt, Artificial Sequence
  Description of Artificial Sequence: Synthetic oligonucleotide
  Antisense strand to SEQ ID NO: 1132934
uuucuuaccacaguaugga

SEQ ID NO: 1132936 - RNA, 19 nt, Artificial Sequence
  Description of Artificial Sequence: Synthetic oligonucleotide
  Sense strand starting at position 3560 of SEQ ID NO: 916131
gaguuacugcugcugucuu

SEQ ID NO: 1132937 - RNA, 19 nt, Artificial Sequence
  Description of Artificial Sequence: Synthetic oligonucleotide
  Antisense strand to SEQ ID NO: 1132936
aagacagcagcaguaacuc

SEQ ID NO: 1132938 - RNA, 19 nt, Artificial Sequence
  Description of Artificial Sequence: Synthetic oligonucleotide
  Sense strand starting at position 3578 of SEQ ID NO: 916131
uagggcagccuguguuuau

SEQ ID NO: 1132939 - RNA, 19 nt, Artificial Sequence
  Description of Artificial Sequence: Synthetic oligonucleotide
  Antisense strand to SEQ ID NO: 1132938
auaaacacaggcugcccua

SEQ ID NO: 1132940 - RNA, 19 nt, Artificial Sequence
  Description of Artificial Sequence: Synthetic oligonucleotide
  Sense strand starting at position 3579 of SEQ ID NO: 916131
agggcagccuguguuuauu

SEQ ID NO: 1132941 - RNA, 19 nt, Artificial Sequence
  Description of Artificial Sequence: Synthetic oligonucleotide
  Antisense strand to SEQ ID NO: 1132940
aauaaacacaggcugcccu

SEQ ID NO: 1132942 - RNA, 19 nt, Artificial Sequence
  Description of Artificial Sequence: Synthetic oligonucleotide
  Sense strand starting at position 3753 of SEQ ID NO: 916131
cuagauuagcgagauacac

SEQ ID NO: 1132943 - RNA, 19 nt, Artificial Sequence
  Description of Artificial Sequence: Synthetic oligonucleotide
  Antisense strand to SEQ ID NO: 1132942
guguaucucgcuaaucuag

SEQ ID NO: 1132944 - RNA, 19 nt, Artificial Sequence
  Description of Artificial Sequence: Synthetic oligonucleotide
  Sense strand starting at position 3762 of SEQ ID NO: 916131
cgagauacacagugucgau

SEQ ID NO: 1132945 - RNA, 19 nt, Artificial Sequence
  Description of Artificial Sequence: Synthetic oligonucleotide
  Antisense strand to SEQ ID NO: 1132944
aucgacacuguguaucucg

SEQ ID NO: 1132946 - RNA, 19 nt, Artificial Sequence
  Description of Artificial Sequence: Synthetic oligonucleotide
  Sense strand starting at position 40 of SEQ ID NO: 916132
guaggcagcgucagaguau

SEQ ID NO: 1132947 - RNA, 19 nt, Artificial Sequence
  Description of Artificial Sequence: Synthetic oligonucleotide
  Antisense strand to SEQ ID NO: 1132946
auacucugacgcugccuac

SEQ ID NO: 1132948 - RNA, 19 nt, Artificial Sequence
  Description of Artificial Sequence: Synthetic oligonucleotide
  Sense strand starting at position 243 of SEQ ID NO: 916132
gugugagaauaucugugga

SEQ ID NO: 1132949 - RNA, 19 nt, Artificial Sequence
  Description of Artificial Sequence: Synthetic oligonucleotide
  Antisense strand to SEQ ID NO: 1132948
uccacagauauucucacac

SEQ ID NO: 1132950 - RNA, 19 nt, Artificial Sequence
  Description of Artificial Sequence: Synthetic oligonucleotide
  Sense strand starting at position 245 of SEQ ID NO: 916132
gugagaauaucuguggaga

SEQ ID NO: 1132951 - RNA, 19 nt, Artificial Sequence
  Description of Artificial Sequence: Synthetic oligonucleotide
  Antisense strand to SEQ ID NO: 1132950
ucuccacagauauucucac

SEQ ID NO: 1132952 - RNA, 19 nt, Artificial Sequence
  Description of Artificial Sequence: Synthetic oligonucleotide
  Sense strand starting at position 374 of SEQ ID NO: 916132
gauauuaccuaaguaggca

SEQ ID NO: 1132953 - RNA, 19 nt, Artificial Sequence
  Description of Artificial Sequence: Synthetic oligonucleotide
  Antisense strand to SEQ ID NO: 1132952
ugccuacuuagguaauauc

SEQ ID NO: 1132954 - RNA, 19 nt, Artificial Sequence
  Description of Artificial Sequence: Synthetic oligonucleotide
  Sense strand starting at position 428 of SEQ ID NO: 916132
agaauugagcucuggaaca

SEQ ID NO: 1132955 - RNA, 19 nt, Artificial Sequence
  Description of Artificial Sequence: Synthetic oligonucleotide
  Antisense strand to SEQ ID NO: 1132954
uguuccagagcucaauucu

SEQ ID NO: 1132956 - RNA, 19 nt, Artificial Sequence
  Description of Artificial Sequence: Synthetic oligonucleotide
  Sense strand starting at position 455 of SEQ ID NO: 916132
ggaguuagccacgggauga

SEQ ID NO: 1132957 - RNA, 19 nt, Artificial Sequence
  Description of Artificial Sequence: Synthetic oligonucleotide
  Antisense strand to SEQ ID NO: 1132956
ucaucccguggcuaacucc

SEQ ID NO: 1132958 - RNA, 19 nt, Artificial Sequence
  Description of Artificial Sequence: Synthetic oligonucleotide
  Sense strand starting at position 456 of SEQ ID NO: 916132
gaguuagccacgggaugaa

SEQ ID NO: 1132959 - RNA, 19 nt, Artificial Sequence
  Description of Artificial Sequence: Synthetic oligonucleotide
  Antisense strand to SEQ ID NO: 1132958
uucaucccguggcuaacuc

SEQ ID NO: 1132960 - RNA, 19 nt, Artificial Sequence
  Description of Artificial Sequence: Synthetic oligonucleotide
  Sense strand starting at position 497 of SEQ ID NO: 916132
acuagcagccagugagaaa

SEQ ID NO: 1132961 - RNA, 19 nt, Artificial Sequence
  Description of Artificial Sequence: Synthetic oligonucleotide
  Antisense strand to SEQ ID NO: 1132960
uuucucacuggcugcuagu

SEQ ID NO: 1132962 - RNA, 19 nt, Artificial Sequence
  Description of Artificial Sequence: Synthetic oligonucleotide
  Sense strand starting at position 681 of SEQ ID NO: 916132
guugcauugcgggaaugga

SEQ ID NO: 1132963 - RNA, 19 nt, Artificial Sequence
  Description of Artificial Sequence: Synthetic oligonucleotide
  Antisense strand to SEQ ID NO: 1132962
uccauucccgcaaugcaac

SEQ ID NO: 1132964 - RNA, 19 nt, Artificial Sequence
  Description of Artificial Sequence: Synthetic oligonucleotide
  Sense strand starting at position 707 of SEQ ID NO: 916132
guggaaugaguuuggaaga

SEQ ID NO: 1132965 - RNA, 19 nt, Artificial Sequence
  Description of Artificial Sequence: Synthetic oligonucleotide
  Antisense strand to SEQ ID NO: 1132964
ucuuccaaacucauuccac

SEQ ID NO: 1132966 - RNA, 19 nt, Artificial Sequence
  Description of Artificial Sequence: Synthetic oligonucleotide
  Sense strand starting at position 1596 of SEQ ID NO: 916132
ccaguuuggcugcaccaaa

SEQ ID NO: 1132967 - RNA, 19 nt, Artificial Sequence
  Description of Artificial Sequence: Synthetic oligonucleotide
  Antisense strand to SEQ ID NO: 1132966
uuuggugcagccaaacugg

SEQ ID NO: 1132968 - RNA, 19 nt, Artificial Sequence
  Description of Artificial Sequence: Synthetic oligonucleotide
  Sense strand starting at position 1614 of SEQ ID NO: 916132
aggcuacuuuaagcaugaa

SEQ ID NO: 1132969 - RNA, 19 nt, Artificial Sequence
  Description of Artificial Sequence: Synthetic oligonucleotide
  Antisense strand to SEQ ID NO: 1132968
uucaugcuuaaaguagccu

SEQ ID NO: 1132970 - RNA, 19 nt, Artificial Sequence
  Description of Artificial Sequence: Synthetic oligonucleotide
  Sense strand starting at position 1617 of SEQ ID NO: 916132
cuacuuuaagcaugaaaga

SEQ ID NO: 1132971 - RNA, 19 nt, Artificial Sequence
  Description of Artificial Sequence: Synthetic oligonucleotide
  Antisense strand to SEQ ID NO: 1132970
ucuuucaugcuuaaaguag

SEQ ID NO: 1132972 - RNA, 19 nt, Artificial Sequence
  Description of Artificial Sequence: Synthetic oligonucleotide
  Sense strand starting at position 2237 of SEQ ID NO: 916132
cuggucuuccuagaaacua

SEQ ID NO: 1132973 - RNA, 19 nt, Artificial Sequence
  Description of Artificial Sequence: Synthetic oligonucleotide
  Antisense strand to SEQ ID NO: 1132972
uaguuucuaggaagaccag

SEQ ID NO: 1132974 - RNA, 19 nt, Artificial Sequence
  Description of Artificial Sequence: Synthetic oligonucleotide
  Sense strand starting at position 2249 of SEQ ID NO: 916132
gaaacuacggucuaugacu

SEQ ID NO: 1132975 - RNA, 19 nt, Artificial Sequence
  Description of Artificial Sequence: Synthetic oligonucleotide
  Antisense strand to SEQ ID NO: 1132974
agucauagaccguaguuuc

SEQ ID NO: 1132976 - RNA, 19 nt, Artificial Sequence
  Description of Artificial Sequence: Synthetic oligonucleotide
  Sense strand starting at position 2279 of SEQ ID NO: 916132
uggcuuacaguggaggaau

SEQ ID NO: 1132977 - RNA, 19 nt, Artificial Sequence
  Description of Artificial Sequence: Synthetic oligonucleotide
  Antisense strand to SEQ ID NO: 1132976
auuccuccacuguaagcca

SEQ ID NO: 1132978 - RNA, 19 nt, Artificial Sequence
  Description of Artificial Sequence: Synthetic oligonucleotide
  Sense strand starting at position 2303 of SEQ ID NO: 916132
ggcuuccugagauaucugu

SEQ ID NO: 1132979 - RNA, 19 nt, Artificial Sequence
  Description of Artificial Sequence: Synthetic oligonucleotide
  Antisense strand to SEQ ID NO: 1132978
acagauaucucaggaagcc

SEQ ID NO: 1132980 - RNA, 19 nt, Artificial Sequence
  Description of Artificial Sequence: Synthetic oligonucleotide
  Sense strand starting at position 2309 of SEQ ID NO: 916132
cugagauaucuguaguacg

SEQ ID NO: 1132981 - RNA, 19 nt, Artificial Sequence
  Description of Artificial Sequence: Synthetic oligonucleotide
  Antisense strand to SEQ ID NO: 1132980
cguacuacagauaucucag

SEQ ID NO: 1132982 - RNA, 19 nt, Artificial Sequence
  Description of Artificial Sequence: Synthetic oligonucleotide
  Sense strand starting at position 2316 of SEQ ID NO: 916132
aucuguaguacguaauuau

SEQ ID NO: 1132983 - RNA, 19 nt, Artificial Sequence
  Description of Artificial Sequence: Synthetic oligonucleotide
  Antisense strand to SEQ ID NO: 1132982
auaauuacguacuacagau

SEQ ID NO: 1132984 - RNA, 19 nt, Artificial Sequence
  Description of Artificial Sequence: Synthetic oligonucleotide
  Sense strand starting at position 2325 of SEQ ID NO: 916132
acguaauuauagcuaacaa

SEQ ID NO: 1132985 - RNA, 19 nt, Artificial Sequence
  Description of Artificial Sequence: Synthetic oligonucleotide
  Antisense strand to SEQ ID NO: 1132984
uuguuagcuauaauuacgu

SEQ ID NO: 1132986 - RNA, 19 nt, Artificial Sequence
  Description of Artificial Sequence: Synthetic oligonucleotide
  Sense strand starting at position 2356 of SEQ ID NO: 916132
uaaauaccauucguggaaa

SEQ ID NO: 1132987 - RNA, 19 nt, Artificial Sequence
  Description of Artificial Sequence: Synthetic oligonucleotide
  Antisense strand to SEQ ID NO: 1132986
uuuccacgaaugguauuua

SEQ ID NO: 1132988 - RNA, 19 nt, Artificial Sequence
  Description of Artificial Sequence: Synthetic oligonucleotide
  Sense strand starting at position 2495 of SEQ ID NO: 916132
ggaacuaucccaggcuuag

SEQ ID NO: 1132989 - RNA, 19 nt, Artificial Sequence
  Description of Artificial Sequence: Synthetic oligonucleotide
  Antisense strand to SEQ ID NO: 1132988
cuaagccugggauaguucc

SEQ ID NO: 1132990 - RNA, 19 nt, Artificial Sequence
  Description of Artificial Sequence: Synthetic oligonucleotide
  Sense strand starting at position 2575 of SEQ ID NO: 916132
uuguuacagcuccaaauga

SEQ ID NO: 1132991 - RNA, 19 nt, Artificial Sequence
  Description of Artificial Sequence: Synthetic oligonucleotide
  Antisense strand to SEQ ID NO: 1132990
ucauuuggagcuguaacaa

SEQ ID NO: 1132992 - RNA, 19 nt, Artificial Sequence
  Description of Artificial Sequence: Synthetic oligonucleotide
  Sense strand starting at position 2611 of SEQ ID NO: 916132
uaaaguccucccggaagga

SEQ ID NO: 1132993 - RNA, 19 nt, Artificial Sequence
  Description of Artificial Sequence: Synthetic oligonucleotide
  Antisense strand to SEQ ID NO: 1132992
uccuuccgggaggacuuua

SEQ ID NO: 1132994 - RNA, 19 nt, Artificial Sequence
  Description of Artificial Sequence: Synthetic oligonucleotide
  Sense strand starting at position 2705 of SEQ ID NO: 916132
uuggaaugugaccaauugu

SEQ ID NO: 1132995 - RNA, 19 nt, Artificial Sequence
  Description of Artificial Sequence: Synthetic oligonucleotide
  Antisense strand to SEQ ID NO: 1132994
acaauuggucacauuccaa

SEQ ID NO: 1132996 - RNA, 19 nt, Artificial Sequence
  Description of Artificial Sequence: Synthetic oligonucleotide
  Sense strand starting at position 2713 of SEQ ID NO: 916132
ugaccaauuguugagcuau

SEQ ID NO: 1132997 - RNA, 19 nt, Artificial Sequence
  Description of Artificial Sequence: Synthetic oligonucleotide
  Antisense strand to SEQ ID NO: 1132996
auagcucaacaauugguca

SEQ ID NO: 1132998 - RNA, 19 nt, Artificial Sequence
  Description of Artificial Sequence: Synthetic oligonucleotide
  Sense strand starting at position 2846 of SEQ ID NO: 916132
ucguaaguucacuuugugu

SEQ ID NO: 1132999 - RNA, 19 nt, Artificial Sequence
  Description of Artificial Sequence: Synthetic oligonucleotide
  Antisense strand to SEQ ID NO: 1132998
acacaaagugaacuuacga

SEQ ID NO: 1133000 - RNA, 19 nt, Artificial Sequence
  Description of Artificial Sequence: Synthetic oligonucleotide
  Sense strand starting at position 2926 of SEQ ID NO: 916132
gcggaaacgguuuagauaa

SEQ ID NO: 1133001 - RNA, 19 nt, Artificial Sequence
  Description of Artificial Sequence: Synthetic oligonucleotide
  Antisense strand to SEQ ID NO: 1133000
uuaucuaaaccguuuccgc

SEQ ID NO: 1133002 - RNA, 19 nt, Artificial Sequence
  Description of Artificial Sequence: Synthetic oligonucleotide
  Sense strand starting at position 3052 of SEQ ID NO: 916132
caagcagagccucaggaua

SEQ ID NO: 1133003 - RNA, 19 nt, Artificial Sequence
  Description of Artificial Sequence: Synthetic oligonucleotide
  Antisense strand to SEQ ID NO: 1133002
uauccugaggcucugcuug

SEQ ID NO: 1133004 - RNA, 19 nt, Artificial Sequence
  Description of Artificial Sequence: Synthetic oligonucleotide
  Sense strand starting at position 3102 of SEQ ID NO: 916132
cguacaauggcccaaagua

SEQ ID NO: 1133005 - RNA, 19 nt, Artificial Sequence
  Description of Artificial Sequence: Synthetic oligonucleotide
  Antisense strand to SEQ ID NO: 1133004
uacuuugggccauuguacg

SEQ ID NO: 1133006 - RNA, 19 nt, Artificial Sequence
  Description of Artificial Sequence: Synthetic oligonucleotide
  Sense strand starting at position 3115 of SEQ ID NO: 916132
aaaguaacccucggagaca

SEQ ID NO: 1133007 - RNA, 19 nt, Artificial Sequence
  Description of Artificial Sequence: Synthetic oligonucleotide
  Antisense strand to SEQ ID NO: 1133006
ugucuccgaggguuacuuu

SEQ ID NO: 1133008 - RNA, 19 nt, Artificial Sequence
  Description of Artificial Sequence: Synthetic oligonucleotide
  Sense strand starting at position 3213 of SEQ ID NO: 916132
gagaucuguuagguguaau

SEQ ID NO: 1133009 - RNA, 19 nt, Artificial Sequence
  Description of Artificial Sequence: Synthetic oligonucleotide
  Antisense strand to SEQ ID NO: 1133008
auuacaccuaacagaucuc

SEQ ID NO: 1133010 - RNA, 19 nt, Artificial Sequence
  Description of Artificial Sequence: Synthetic oligonucleotide
  Sense strand starting at position 3274 of SEQ ID NO: 916132
agauuaaacuaagaaucag

SEQ ID NO: 1133011 - RNA, 19 nt, Artificial Sequence
  Description of Artificial Sequence: Synthetic oligonucleotide
  Antisense strand to SEQ ID NO: 1133010
cugauucuuaguuuaaucu

SEQ ID NO: 1133012 - RNA, 19 nt, Artificial Sequence
  Description of Artificial Sequence: Synthetic oligonucleotide
  Sense strand starting at position 3299 of SEQ ID NO: 916132
caugguaggccagaaucuu

SEQ ID NO: 1133013 - RNA, 19 nt, Artificial Sequence
  Description of Artificial Sequence: Synthetic oligonucleotide
  Antisense strand to SEQ ID NO: 1133012
aagauucuggccuaccaug

SEQ ID NO: 1133014 - RNA, 19 nt, Artificial Sequence
  Description of Artificial Sequence: Synthetic oligonucleotide
  Sense strand starting at position 3343 of SEQ ID NO: 916132
agaaucuucuaagugcuca

SEQ ID NO: 1133015 - RNA, 19 nt, Artificial Sequence
  Description of Artificial Sequence: Synthetic oligonucleotide
  Antisense strand to SEQ ID NO: 1133014
ugagcacuuagaagauucu

SEQ ID NO: 1133016 - RNA, 19 nt, Artificial Sequence
  Description of Artificial Sequence: Synthetic oligonucleotide
  Sense strand starting at position 3405 of SEQ ID NO: 916132
uucucauagcaguaugaga

SEQ ID NO: 1133017 - RNA, 19 nt, Artificial Sequence
  Description of Artificial Sequence: Synthetic oligonucleotide
  Antisense strand to SEQ ID NO: 1133016
ucucauacugcuaugagaa

SEQ ID NO: 1133018 - RNA, 19 nt, Artificial Sequence
  Description of Artificial Sequence: Synthetic oligonucleotide
  Sense strand starting at position 3450 of SEQ ID NO: 916132
aggagauuguggcccagaa

SEQ ID NO: 1133019 - RNA, 19 nt, Artificial Sequence
  Description of Artificial Sequence: Synthetic oligonucleotide
  Antisense strand to SEQ ID NO: 1133018
uucugggccacaaucuccu

SEQ ID NO: 1133020 - RNA, 19 nt, Artificial Sequence
  Description of Artificial Sequence: Synthetic oligonucleotide
  Sense strand starting at position 3785 of SEQ ID NO: 916132
gcuccuggagggugauaaa

SEQ ID NO: 1133021 - RNA, 19 nt, Artificial Sequence
  Description of Artificial Sequence: Synthetic oligonucleotide
  Antisense strand to SEQ ID NO: 1133020
uuuaucacccuccaggagc

SEQ ID NO: 1133022 - RNA, 19 nt, Artificial Sequence
  Description of Artificial Sequence: Synthetic oligonucleotide
  Sense strand starting at position 3847 of SEQ ID NO: 916132
cgcacaucucaugacacau

SEQ ID NO: 1133023 - RNA, 19 nt, Artificial Sequence
  Description of Artificial Sequence: Synthetic oligonucleotide
  Antisense strand to SEQ ID NO: 1133022
augugucaugagaugugcg

SEQ ID NO: 1133024 - RNA, 19 nt, Artificial Sequence
  Description of Artificial Sequence: Synthetic oligonucleotide
  Sense strand starting at position 3863 of SEQ ID NO: 916132
cauguaagacauugggcuu

SEQ ID NO: 1133025 - RNA, 19 nt, Artificial Sequence
  Description of Artificial Sequence: Synthetic oligonucleotide
  Antisense strand to SEQ ID NO: 1133024
aagcccaaugucuuacaug

SEQ ID NO: 1133026 - RNA, 19 nt, Artificial Sequence
  Description of Artificial Sequence: Synthetic oligonucleotide
  Sense strand starting at position 235 of SEQ ID NO: 916133
ugaggaucuuaauagauuu

SEQ ID NO: 1133027 - RNA, 19 nt, Artificial Sequence
  Description of Artificial Sequence: Synthetic oligonucleotide
  Antisense strand to SEQ ID NO: 1133026
aaaucuauuaagauccuca

SEQ ID NO: 1133028 - RNA, 19 nt, Artificial Sequence
  Description of Artificial Sequence: Synthetic oligonucleotide
  Sense strand starting at position 290 of SEQ ID NO: 916133
acccuaauccuguaaaguu

SEQ ID NO: 1133029 - RNA, 19 nt, Artificial Sequence
  Description of Artificial Sequence: Synthetic oligonucleotide
  Antisense strand to SEQ ID NO: 1133028
aacuuuacaggauuagggu

SEQ ID NO: 1133030 - RNA, 19 nt, Artificial Sequence
  Description of Artificial Sequence: Synthetic oligonucleotide
  Sense strand starting at position 329 of SEQ ID NO: 916133
gcaggacuuuacuucuacu

SEQ ID NO: 1133031 - RNA, 19 nt, Artificial Sequence
  Description of Artificial Sequence: Synthetic oligonucleotide
  Antisense strand to SEQ ID NO: 1133030
aguagaaguaaaguccugc

SEQ ID NO: 1133032 - RNA, 19 nt, Artificial Sequence
  Description of Artificial Sequence: Synthetic oligonucleotide
  Sense strand starting at position 813 of SEQ ID NO: 916133
ggcauccuucccuaagugu

SEQ ID NO: 1133033 - RNA, 19 nt, Artificial Sequence
  Description of Artificial Sequence: Synthetic oligonucleotide
  Antisense strand to SEQ ID NO: 1133032
acacuuagggaaggaugcc

SEQ ID NO: 1133034 - RNA, 19 nt, Artificial Sequence
  Description of Artificial Sequence: Synthetic oligonucleotide
  Sense strand starting at position 853 of SEQ ID NO: 916133
cuaccaagauugucguuaa

SEQ ID NO: 1133035 - RNA, 19 nt, Artificial Sequence
  Description of Artificial Sequence: Synthetic oligonucleotide
  Antisense strand to SEQ ID NO: 1133034
uuaacgacaaucuugguag

SEQ ID NO: 1133036 - RNA, 19 nt, Artificial Sequence
  Description of Artificial Sequence: Synthetic oligonucleotide
  Sense strand starting at position 856 of SEQ ID NO: 916133
ccaagauugucguuaauau

SEQ ID NO: 1133037 - RNA, 19 nt, Artificial Sequence
  Description of Artificial Sequence: Synthetic oligonucleotide
  Antisense strand to SEQ ID NO: 1133036
auauuaacgacaaucuugg

SEQ ID NO: 1133038 - RNA, 19 nt, Artificial Sequence
  Description of Artificial Sequence: Synthetic oligonucleotide
  Sense strand starting at position 857 of SEQ ID NO: 916133
caagauugucguuaauaua

SEQ ID NO: 1133039 - RNA, 19 nt, Artificial Sequence
  Description of Artificial Sequence: Synthetic oligonucleotide
  Antisense strand to SEQ ID NO: 1133038
uauauuaacgacaaucuug

SEQ ID NO: 1133040 - RNA, 19 nt, Artificial Sequence
  Description of Artificial Sequence: Synthetic oligonucleotide
  Sense strand starting at position 909 of SEQ ID NO: 916133
gcaucuguggcagagaaca

SEQ ID NO: 1133041 - RNA, 19 nt, Artificial Sequence
  Description of Artificial Sequence: Synthetic oligonucleotide
  Antisense strand to SEQ ID NO: 1133040
uguucucugccacagaugc

SEQ ID NO: 1133042 - RNA, 19 nt, Artificial Sequence
  Description of Artificial Sequence: Synthetic oligonucleotide
  Sense strand starting at position 1207 of SEQ ID NO: 916133
cugucacacccuuggaauu

SEQ ID NO: 1133043 - RNA, 19 nt, Artificial Sequence
  Description of Artificial Sequence: Synthetic oligonucleotide
  Antisense strand to SEQ ID NO: 1133042
aauuccaagggugugacag

SEQ ID NO: 1133044 - RNA, 19 nt, Artificial Sequence
  Description of Artificial Sequence: Synthetic oligonucleotide
  Sense strand starting at position 1300 of SEQ ID NO: 916133
guacaaccauuguauuuga

SEQ ID NO: 1133045 - RNA, 19 nt, Artificial Sequence
  Description of Artificial Sequence: Synthetic oligonucleotide
  Antisense strand to SEQ ID NO: 1133044
ucaaauacaaugguuguac

SEQ ID NO: 1133046 - RNA, 19 nt, Artificial Sequence
  Description of Artificial Sequence: Synthetic oligonucleotide
  Sense strand starting at position 1325 of SEQ ID NO: 916133
agguauuuacugugcaucu

SEQ ID NO: 1133047 - RNA, 19 nt, Artificial Sequence
  Description of Artificial Sequence: Synthetic oligonucleotide
  Antisense strand to SEQ ID NO: 1133046
agaugcacaguaaauaccu

SEQ ID NO: 1133048 - RNA, 19 nt, Artificial Sequence
  Description of Artificial Sequence: Synthetic oligonucleotide
  Sense strand starting at position 1373 of SEQ ID NO: 916133
acaguagcucaagacuuaa

SEQ ID NO: 1133049 - RNA, 19 nt, Artificial Sequence
  Description of Artificial Sequence: Synthetic oligonucleotide
  Antisense strand to SEQ ID NO: 1133048
uuaagucuugagcuacugu

SEQ ID NO: 1133050 - RNA, 19 nt, Artificial Sequence
  Description of Artificial Sequence: Synthetic oligonucleotide
  Sense strand starting at position 1457 of SEQ ID NO: 916133
acaacaauucugcgaggua

SEQ ID NO: 1133051 - RNA, 19 nt, Artificial Sequence
  Description of Artificial Sequence: Synthetic oligonucleotide
  Antisense strand to SEQ ID NO: 1133050
uaccucgcagaauuguugu

SEQ ID NO: 1133052 - RNA, 19 nt, Artificial Sequence
  Description of Artificial Sequence: Synthetic oligonucleotide
  Sense strand starting at position 1466 of SEQ ID NO: 916133
cugcgagguaaguacuuau

SEQ ID NO: 1133053 - RNA, 19 nt, Artificial Sequence
  Description of Artificial Sequence: Synthetic oligonucleotide
  Antisense strand to SEQ ID NO: 1133052
auaaguacuuaccucgcag

SEQ ID NO: 1133054 - RNA, 19 nt, Artificial Sequence
  Description of Artificial Sequence: Synthetic oligonucleotide
  Sense strand starting at position 1469 of SEQ ID NO: 916133
cgagguaaguacuuauuac

SEQ ID NO: 1133055 - RNA, 19 nt, Artificial Sequence
  Description of Artificial Sequence: Synthetic oligonucleotide
  Antisense strand to SEQ ID NO: 1133054
guaauaaguacuuaccucg

SEQ ID NO: 1133056 - RNA, 19 nt, Artificial Sequence
  Description of Artificial Sequence: Synthetic oligonucleotide
  Sense strand starting at position 1531 of SEQ ID NO: 916133
acaacuuguccucaguaag

SEQ ID NO: 1133057 - RNA, 19 nt, Artificial Sequence
  Description of Artificial Sequence: Synthetic oligonucleotide
  Antisense strand to SEQ ID NO: 1133056
cuuacugaggacaaguugu

SEQ ID NO: 1133058 - RNA, 19 nt, Artificial Sequence
  Description of Artificial Sequence: Synthetic oligonucleotide
  Sense strand starting at position 1534 of SEQ ID NO: 916133
acuuguccucaguaagaga

SEQ ID NO: 1133059 - RNA, 19 nt, Artificial Sequence
  Description of Artificial Sequence: Synthetic oligonucleotide
  Antisense strand to SEQ ID NO: 1133058
ucucuuacugaggacaagu

SEQ ID NO: 1133060 - RNA, 19 nt, Artificial Sequence
  Description of Artificial Sequence: Synthetic oligonucleotide
  Sense strand starting at position 1542 of SEQ ID NO: 916133
ucaguaagagacuguguca

SEQ ID NO: 1133061 - RNA, 19 nt, Artificial Sequence
  Description of Artificial Sequence: Synthetic oligonucleotide
  Antisense strand to SEQ ID NO: 1133060
ugacacagucucuuacuga

SEQ ID NO: 1133062 - RNA, 19 nt, Artificial Sequence
  Description of Artificial Sequence: Synthetic oligonucleotide
  Sense strand starting at position 1807 of SEQ ID NO: 916133
cuaucagagcgggaucuaa

SEQ ID NO: 1133063 - RNA, 19 nt, Artificial Sequence
  Description of Artificial Sequence: Synthetic oligonucleotide
  Antisense strand to SEQ ID NO: 1133062
uuagaucccgcucugauag

SEQ ID NO: 1133064 - RNA, 19 nt, Artificial Sequence
  Description of Artificial Sequence: Synthetic oligonucleotide
  Sense strand starting at position 1889 of SEQ ID NO: 916133
ucaccaggucuuuaaaugu

SEQ ID NO: 1133065 - RNA, 19 nt, Artificial Sequence
  Description of Artificial Sequence: Synthetic oligonucleotide
  Antisense strand to SEQ ID NO: 1133064
acauuuaaagaccugguga

SEQ ID NO: 1133066 - RNA, 19 nt, Artificial Sequence
  Description of Artificial Sequence: Synthetic oligonucleotide
  Sense strand starting at position 2148 of SEQ ID NO: 916133
aauagauccgagugcagaa

SEQ ID NO: 1133067 - RNA, 19 nt, Artificial Sequence
  Description of Artificial Sequence: Synthetic oligonucleotide
  Antisense strand to SEQ ID NO: 1133066
uucugcacucggaucuauu

SEQ ID NO: 1133068 - RNA, 19 nt, Artificial Sequence
  Description of Artificial Sequence: Synthetic oligonucleotide
  Sense strand starting at position 2227 of SEQ ID NO: 916133
gugugucgccaguuauguu

SEQ ID NO: 1133069 - RNA, 19 nt, Artificial Sequence
  Description of Artificial Sequence: Synthetic oligonucleotide
  Antisense strand to SEQ ID NO: 1133068
aacauaacuggcgacacac

SEQ ID NO: 1133070 - RNA, 19 nt, Artificial Sequence
  Description of Artificial Sequence: Synthetic oligonucleotide
  Sense strand starting at position 2264 of SEQ ID NO: 916133
agaguuuggaacggauuga

SEQ ID NO: 1133071 - RNA, 19 nt, Artificial Sequence
  Description of Artificial Sequence: Synthetic oligonucleotide
  Antisense strand to SEQ ID NO: 1133070
ucaauccguuccaaacucu

SEQ ID NO: 1133072 - RNA, 19 nt, Artificial Sequence
  Description of Artificial Sequence: Synthetic oligonucleotide
  Sense strand starting at position 2268 of SEQ ID NO: 916133
uuuggaacggauugauauu

SEQ ID NO: 1133073 - RNA, 19 nt, Artificial Sequence
  Description of Artificial Sequence: Synthetic oligonucleotide
  Antisense strand to SEQ ID NO: 1133072
aauaucaauccguuccaaa

SEQ ID NO: 1133074 - RNA, 19 nt, Artificial Sequence
  Description of Artificial Sequence: Synthetic oligonucleotide
  Sense strand starting at position 2356 of SEQ ID NO: 916133
augcuagauggcuggugaa

SEQ ID NO: 1133075 - RNA, 19 nt, Artificial Sequence
  Description of Artificial Sequence: Synthetic oligonucleotide
  Antisense strand to SEQ ID NO: 1133074
uucaccagccaucuagcau

SEQ ID NO: 1133076 - RNA, 19 nt, Artificial Sequence
  Description of Artificial Sequence: Synthetic oligonucleotide
  Sense strand starting at position 2387 of SEQ ID NO: 916133
cccugcccucgugaagaaa

SEQ ID NO: 1133077 - RNA, 19 nt, Artificial Sequence
  Description of Artificial Sequence: Synthetic oligonucleotide
  Antisense strand to SEQ ID NO: 1133076
uuucuucacgagggcaggg

SEQ ID NO: 1133078 - RNA, 19 nt, Artificial Sequence
  Description of Artificial Sequence: Synthetic oligonucleotide
  Sense strand starting at position 2800 of SEQ ID NO: 916133
gccucucugagacagugau

SEQ ID NO: 1133079 - RNA, 19 nt, Artificial Sequence
  Description of Artificial Sequence: Synthetic oligonucleotide
  Antisense strand to SEQ ID NO: 1133078
aucacugucucagagaggc

SEQ ID NO: 1133080 - RNA, 19 nt, Artificial Sequence
  Description of Artificial Sequence: Synthetic oligonucleotide
  Sense strand starting at position 2806 of SEQ ID NO: 916133
cugagacagugauauuuga

SEQ ID NO: 1133081 - RNA, 19 nt, Artificial Sequence
  Description of Artificial Sequence: Synthetic oligonucleotide
  Antisense strand to SEQ ID NO: 1133080
ucaaauaucacugucucag

SEQ ID NO: 1133082 - RNA, 19 nt, Artificial Sequence
  Description of Artificial Sequence: Synthetic oligonucleotide
  Sense strand starting at position 2823 of SEQ ID NO: 916133
gaguuaagaccucacuguu

SEQ ID NO: 1133083 - RNA, 19 nt, Artificial Sequence
  Description of Artificial Sequence: Synthetic oligonucleotide
  Antisense strand to SEQ ID NO: 1133082
aacagugaggucuuaacuc

SEQ ID NO: 1133084 - RNA, 19 nt, Artificial Sequence
  Description of Artificial Sequence: Synthetic oligonucleotide
  Sense strand starting at position 2835 of SEQ ID NO: 916133
cacuguugagcaggagaaa

SEQ ID NO: 1133085 - RNA, 19 nt, Artificial Sequence
  Description of Artificial Sequence: Synthetic oligonucleotide
  Antisense strand to SEQ ID NO: 1133084
uuucuccugcucaacagug

SEQ ID NO: 1133086 - RNA, 19 nt, Artificial Sequence
  Description of Artificial Sequence: Synthetic oligonucleotide
  Sense strand starting at position 2925 of SEQ ID NO: 916133
aaggcuauucuggaaagca

SEQ ID NO: 1133087 - RNA, 19 nt, Artificial Sequence
  Description of Artificial Sequence: Synthetic oligonucleotide
  Antisense strand to SEQ ID NO: 1133086
ugcuuuccagaauagccuu

SEQ ID NO: 1133088 - RNA, 19 nt, Artificial Sequence
  Description of Artificial Sequence: Synthetic oligonucleotide
  Sense strand starting at position 3111 of SEQ ID NO: 916133
ugaacauggugucuacaaa

SEQ ID NO: 1133089 - RNA, 19 nt, Artificial Sequence
  Description of Artificial Sequence: Synthetic oligonucleotide
  Antisense strand to SEQ ID NO: 1133088
uuuguagacaccauguuca

SEQ ID NO: 1133090 - RNA, 19 nt, Artificial Sequence
  Description of Artificial Sequence: Synthetic oligonucleotide
  Sense strand starting at position 3274 of SEQ ID NO: 916133
uagaaugguugccugcaga

SEQ ID NO: 1133091 - RNA, 19 nt, Artificial Sequence
  Description of Artificial Sequence: Synthetic oligonucleotide
  Antisense strand to SEQ ID NO: 1133090
ucugcaggcaaccauucua

SEQ ID NO: 1133092 - RNA, 19 nt, Artificial Sequence
  Description of Artificial Sequence: Synthetic oligonucleotide
  Sense strand starting at position 3294 of SEQ ID NO: 916133
ggagaagaauuagaauaaa

SEQ ID NO: 1133093 - RNA, 19 nt, Artificial Sequence
  Description of Artificial Sequence: Synthetic oligonucleotide
  Antisense strand to SEQ ID NO: 1133092
uuuauucuaauucuucucc

SEQ ID NO: 1133094 - RNA, 19 nt, Artificial Sequence
  Description of Artificial Sequence: Synthetic oligonucleotide
  Sense strand starting at position 3368 of SEQ ID NO: 916133
ggcucacaccuguaucuua

SEQ ID NO: 1133095 - RNA, 19 nt, Artificial Sequence
  Description of Artificial Sequence: Synthetic oligonucleotide
  Antisense strand to SEQ ID NO: 1133094
uaagauacaggugugagcc

SEQ ID NO: 1133096 - RNA, 19 nt, Artificial Sequence
  Description of Artificial Sequence: Synthetic oligonucleotide
  Sense strand starting at position 3696 of SEQ ID NO: 916133
ugugcuugaccugagaauu

SEQ ID NO: 1133097 - RNA, 19 nt, Artificial Sequence
  Description of Artificial Sequence: Synthetic oligonucleotide
  Antisense strand to SEQ ID NO: 1133096
aauucucaggucaagcaca

SEQ ID NO: 1133098 - RNA, 19 nt, Artificial Sequence
  Description of Artificial Sequence: Synthetic oligonucleotide
  Sense strand starting at position 3814 of SEQ ID NO: 916133
gguaggauguggucagaga

SEQ ID NO: 1133099 - RNA, 19 nt, Artificial Sequence
  Description of Artificial Sequence: Synthetic oligonucleotide
  Antisense strand to SEQ ID NO: 1133098
ucucugaccacauccuacc

SEQ ID NO: 1133100 - RNA, 19 nt, Artificial Sequence
  Description of Artificial Sequence: Synthetic oligonucleotide
  Sense strand starting at position 3829 of SEQ ID NO: 916133
gagaauugggcucagcuca

SEQ ID NO: 1133101 - RNA, 19 nt, Artificial Sequence
  Description of Artificial Sequence: Synthetic oligonucleotide
  Antisense strand to SEQ ID NO: 1133100
ugagcugagcccaauucuc

SEQ ID NO: 1133102 - RNA, 19 nt, Artificial Sequence
  Description of Artificial Sequence: Synthetic oligonucleotide
  Sense strand starting at position 3883 of SEQ ID NO: 916133
uuuggauguuauccuaaau

SEQ ID NO: 1133103 - RNA, 19 nt, Artificial Sequence
  Description of Artificial Sequence: Synthetic oligonucleotide
  Antisense strand to SEQ ID NO: 1133102
auuuaggauaacauccaaa

SEQ ID NO: 1133104 - RNA, 19 nt, Artificial Sequence
  Description of Artificial Sequence: Synthetic oligonucleotide
  Sense strand starting at position 3920 of SEQ ID NO: 916133
ggguuuagagcagggaaga

SEQ ID NO: 1133105 - RNA, 19 nt, Artificial Sequence
  Description of Artificial Sequence: Synthetic oligonucleotide
  Antisense strand to SEQ ID NO: 1133104
ucuucccugcucuaaaccc

SEQ ID NO: 1133106 - RNA, 19 nt, Artificial Sequence
  Description of Artificial Sequence: Synthetic oligonucleotide
  Sense strand starting at position 257 of SEQ ID NO: 916134
gaaccaugagcuugagagu

SEQ ID NO: 1133107 - RNA, 19 nt, Artificial Sequence
  Description of Artificial Sequence: Synthetic oligonucleotide
  Antisense strand to SEQ ID NO: 1133106
acucucaagcucaugguuc

SEQ ID NO: 1133108 - RNA, 19 nt, Artificial Sequence
  Description of Artificial Sequence: Synthetic oligonucleotide
  Sense strand starting at position 453 of SEQ ID NO: 916134
cagggauguccucgauagg

SEQ ID NO: 1133109 - RNA, 19 nt, Artificial Sequence
  Description of Artificial Sequence: Synthetic oligonucleotide
  Antisense strand to SEQ ID NO: 1133108
ccuaucgaggacaucccug

SEQ ID NO: 1133110 - RNA, 19 nt, Artificial Sequence
  Description of Artificial Sequence: Synthetic oligonucleotide
  Sense strand starting at position 456 of SEQ ID NO: 916134
ggauguccucgauaggaac

SEQ ID NO: 1133111 - RNA, 19 nt, Artificial Sequence
  Description of Artificial Sequence: Synthetic oligonucleotide
  Antisense strand to SEQ ID NO: 1133110
guuccuaucgaggacaucc

SEQ ID NO: 1133112 - RNA, 19 nt, Artificial Sequence
  Description of Artificial Sequence: Synthetic oligonucleotide
  Sense strand starting at position 474 of SEQ ID NO: 916134
ccaggucuucggugacauu

SEQ ID NO: 1133113 - RNA, 19 nt, Artificial Sequence
  Description of Artificial Sequence: Synthetic oligonucleotide
  Antisense strand to SEQ ID NO: 1133112
aaugucaccgaagaccugg

SEQ ID NO: 1133114 - RNA, 19 nt, Artificial Sequence
  Description of Artificial Sequence: Synthetic oligonucleotide
  Sense strand starting at position 729 of SEQ ID NO: 916134
ugagcaaacucacucugua

SEQ ID NO: 1133115 - RNA, 19 nt, Artificial Sequence
  Description of Artificial Sequence: Synthetic oligonucleotide
  Antisense strand to SEQ ID NO: 1133114
uacagagugaguuugcuca

SEQ ID NO: 1133116 - RNA, 19 nt, Artificial Sequence
  Description of Artificial Sequence: Synthetic oligonucleotide
  Sense strand starting at position 945 of SEQ ID NO: 916134
gcccgagcacucugucaaa

SEQ ID NO: 1133117 - RNA, 19 nt, Artificial Sequence
  Description of Artificial Sequence: Synthetic oligonucleotide
  Antisense strand to SEQ ID NO: 1133116
uuugacagagugcucgggc

SEQ ID NO: 1133118 - RNA, 19 nt, Artificial Sequence
  Description of Artificial Sequence: Synthetic oligonucleotide
  Sense strand starting at position 956 of SEQ ID NO: 916134
cugucaaacuucucgcuuu

SEQ ID NO: 1133119 - RNA, 19 nt, Artificial Sequence
  Description of Artificial Sequence: Synthetic oligonucleotide
  Antisense strand to SEQ ID NO: 1133118
aaagcgagaaguuugacag

SEQ ID NO: 1133120 - RNA, 19 nt, Artificial Sequence
  Description of Artificial Sequence: Synthetic oligonucleotide
  Sense strand starting at position 977 of SEQ ID NO: 916134
ucaccugucucgccggaaa

SEQ ID NO: 1133121 - RNA, 19 nt, Artificial Sequence
  Description of Artificial Sequence: Synthetic oligonucleotide
  Antisense strand to SEQ ID NO: 1133120
uuuccggcgagacagguga

SEQ ID NO: 1133122 - RNA, 19 nt, Artificial Sequence
  Description of Artificial Sequence: Synthetic oligonucleotide
  Sense strand starting at position 979 of SEQ ID NO: 916134
accugucucgccggaaauc

SEQ ID NO: 1133123 - RNA, 19 nt, Artificial Sequence
  Description of Artificial Sequence: Synthetic oligonucleotide
  Antisense strand to SEQ ID NO: 1133122
gauuuccggcgagacaggu

SEQ ID NO: 1133124 - RNA, 19 nt, Artificial Sequence
  Description of Artificial Sequence: Synthetic oligonucleotide
  Sense strand starting at position 980 of SEQ ID NO: 916134
ccugucucgccggaaaucu

SEQ ID NO: 1133125 - RNA, 19 nt, Artificial Sequence
  Description of Artificial Sequence: Synthetic oligonucleotide
  Antisense strand to SEQ ID NO: 1133124
agauuuccggcgagacagg

SEQ ID NO: 1133126 - RNA, 19 nt, Artificial Sequence
  Description of Artificial Sequence: Synthetic oligonucleotide
  Sense strand starting at position 989 of SEQ ID NO: 916134
ccggaaaucucuuuaccga

SEQ ID NO: 1133127 - RNA, 19 nt, Artificial Sequence
  Description of Artificial Sequence: Synthetic oligonucleotide
  Antisense strand to SEQ ID NO: 1133126
ucgguaaagagauuuccgg

SEQ ID NO: 1133128 - RNA, 19 nt, Artificial Sequence
  Description of Artificial Sequence: Synthetic oligonucleotide
  Sense strand starting at position 990 of SEQ ID NO: 916134
cggaaaucucuuuaccgaa

SEQ ID NO: 1133129 - RNA, 19 nt, Artificial Sequence
  Description of Artificial Sequence: Synthetic oligonucleotide
  Antisense strand to SEQ ID NO: 1133128
uucgguaaagagauuuccg

SEQ ID NO: 1133130 - RNA, 19 nt, Artificial Sequence
  Description of Artificial Sequence: Synthetic oligonucleotide
  Sense strand starting at position 1246 of SEQ ID NO: 916134
ggcugugacccgggaacau

SEQ ID NO: 1133131 - RNA, 19 nt, Artificial Sequence
  Description of Artificial Sequence: Synthetic oligonucleotide
  Antisense strand to SEQ ID NO: 1133130
auguucccgggucacagcc

SEQ ID NO: 1133132 - RNA, 19 nt, Artificial Sequence
  Description of Artificial Sequence: Synthetic oligonucleotide
  Sense strand starting at position 1257 of SEQ ID NO: 916134
gggaacauucgcugaacga

SEQ ID NO: 1133133 - RNA, 19 nt, Artificial Sequence
  Description of Artificial Sequence: Synthetic oligonucleotide
  Antisense strand to SEQ ID NO: 1133132
ucguucagcgaauguuccc

SEQ ID NO: 1133134 - RNA, 19 nt, Artificial Sequence
  Description of Artificial Sequence: Synthetic oligonucleotide
  Sense strand starting at position 1258 of SEQ ID NO: 916134
ggaacauucgcugaacgaa

SEQ ID NO: 1133135 - RNA, 19 nt, Artificial Sequence
  Description of Artificial Sequence: Synthetic oligonucleotide
  Antisense strand to SEQ ID NO: 1133134
uucguucagcgaauguucc

SEQ ID NO: 1133136 - RNA, 19 nt, Artificial Sequence
  Description of Artificial Sequence: Synthetic oligonucleotide
  Sense strand starting at position 2692 of SEQ ID NO: 916134
aggcuuugucaccauggga

SEQ ID NO: 1133137 - RNA, 19 nt, Artificial Sequence
  Description of Artificial Sequence: Synthetic oligonucleotide
  Antisense strand to SEQ ID NO: 1133136
ucccauggugacaaagccu

SEQ ID NO: 1133138 - RNA, 19 nt, Artificial Sequence
  Description of Artificial Sequence: Synthetic oligonucleotide
  Sense strand starting at position 2695 of SEQ ID NO: 916134
cuuugucaccaugggauga

SEQ ID NO: 1133139 - RNA, 19 nt, Artificial Sequence
  Description of Artificial Sequence: Synthetic oligonucleotide
  Antisense strand to SEQ ID NO: 1133138
ucaucccauggugacaaag

SEQ ID NO: 1133140 - RNA, 19 nt, Artificial Sequence
  Description of Artificial Sequence: Synthetic oligonucleotide
  Sense strand starting at position 2881 of SEQ ID NO: 916134
guaauuugauguugacuga

SEQ ID NO: 1133141 - RNA, 19 nt, Artificial Sequence
  Description of Artificial Sequence: Synthetic oligonucleotide
  Antisense strand to SEQ ID NO: 1133140
ucagucaacaucaaauuac

SEQ ID NO: 1133142 - RNA, 19 nt, Artificial Sequence
  Description of Artificial Sequence: Synthetic oligonucleotide
  Sense strand starting at position 2920 of SEQ ID NO: 916134
cucggagcuuccuuuaugu

SEQ ID NO: 1133143 - RNA, 19 nt, Artificial Sequence
  Description of Artificial Sequence: Synthetic oligonucleotide
  Antisense strand to SEQ ID NO: 1133142
acauaaaggaagcuccgag

SEQ ID NO: 1133144 - RNA, 19 nt, Artificial Sequence
  Description of Artificial Sequence: Synthetic oligonucleotide
  Sense strand starting at position 2952 of SEQ ID NO: 916134
acgucaggucuuggaguaa

SEQ ID NO: 1133145 - RNA, 19 nt, Artificial Sequence
  Description of Artificial Sequence: Synthetic oligonucleotide
  Antisense strand to SEQ ID NO: 1133144
uuacuccaagaccugacgu

SEQ ID NO: 1133146 - RNA, 19 nt, Artificial Sequence
  Description of Artificial Sequence: Synthetic oligonucleotide
  Sense strand starting at position 3054 of SEQ ID NO: 916134
agggaaugugcuggucuca

SEQ ID NO: 1133147 - RNA, 19 nt, Artificial Sequence
  Description of Artificial Sequence: Synthetic oligonucleotide
  Antisense strand to SEQ ID NO: 1133146
ugagaccagcacauucccu

SEQ ID NO: 1133148 - RNA, 19 nt, Artificial Sequence
  Description of Artificial Sequence: Synthetic oligonucleotide
  Sense strand starting at position 3413 of SEQ ID NO: 916134
cccacaauuguccaggcaa

SEQ ID NO: 1133149 - RNA, 19 nt, Artificial Sequence
  Description of Artificial Sequence: Synthetic oligonucleotide
  Antisense strand to SEQ ID NO: 1133148
uugccuggacaauuguggg

SEQ ID NO: 1133150 - RNA, 19 nt, Artificial Sequence
  Description of Artificial Sequence: Synthetic oligonucleotide
  Sense strand starting at position 3415 of SEQ ID NO: 916134
cacaauuguccaggcaaag

SEQ ID NO: 1133151 - RNA, 19 nt, Artificial Sequence
  Description of Artificial Sequence: Synthetic oligonucleotide
  Antisense strand to SEQ ID NO: 1133150
cuuugccuggacaauugug

SEQ ID NO: 1133152 - RNA, 19 nt, Artificial Sequence
  Description of Artificial Sequence: Synthetic oligonucleotide
  Sense strand starting at position 3492 of SEQ ID NO: 916134
uaucgaguccuguagugaa

SEQ ID NO: 1133153 - RNA, 19 nt, Artificial Sequence
  Description of Artificial Sequence: Synthetic oligonucleotide
  Antisense strand to SEQ ID NO: 1133152
uucacuacaggacucgaua

SEQ ID NO: 1133154 - RNA, 19 nt, Artificial Sequence
  Description of Artificial Sequence: Synthetic oligonucleotide
  Sense strand starting at position 3499 of SEQ ID NO: 916134
uccuguagugaauauugaa

SEQ ID NO: 1133155 - RNA, 19 nt, Artificial Sequence
  Description of Artificial Sequence: Synthetic oligonucleotide
  Antisense strand to SEQ ID NO: 1133154
uucaauauucacuacagga

SEQ ID NO: 1133156 - RNA, 19 nt, Artificial Sequence
  Description of Artificial Sequence: Synthetic oligonucleotide
  Sense strand starting at position 3520 of SEQ ID NO: 916134
cgcagaauccguguucauu

SEQ ID NO: 1133157 - RNA, 19 nt, Artificial Sequence
  Description of Artificial Sequence: Synthetic oligonucleotide
  Antisense strand to SEQ ID NO: 1133156
aaugaacacggauucugcg

SEQ ID NO: 1133158 - RNA, 19 nt, Artificial Sequence
  Description of Artificial Sequence: Synthetic oligonucleotide
  Sense strand starting at position 3556 of SEQ ID NO: 916134
ggaucucuguguuugcaua

SEQ ID NO: 1133159 - RNA, 19 nt, Artificial Sequence
  Description of Artificial Sequence: Synthetic oligonucleotide
  Antisense strand to SEQ ID NO: 1133158
uaugcaaacacagagaucc

SEQ ID NO: 1133160 - RNA, 19 nt, Artificial Sequence
  Description of Artificial Sequence: Synthetic oligonucleotide
  Sense strand starting at position 3558 of SEQ ID NO: 916134
aucucuguguuugcauaga

SEQ ID NO: 1133161 - RNA, 19 nt, Artificial Sequence
  Description of Artificial Sequence: Synthetic oligonucleotide
  Antisense strand to SEQ ID NO: 1133160
ucuaugcaaacacagagau

SEQ ID NO: 1133162 - RNA, 19 nt, Artificial Sequence
  Description of Artificial Sequence: Synthetic oligonucleotide
  Sense strand starting at position 3605 of SEQ ID NO: 916134
acagauguguuugcucaga

SEQ ID NO: 1133163 - RNA, 19 nt, Artificial Sequence
  Description of Artificial Sequence: Synthetic oligonucleotide
  Antisense strand to SEQ ID NO: 1133162
ucugagcaaacacaucugu

SEQ ID NO: 1133164 - RNA, 19 nt, Artificial Sequence
  Description of Artificial Sequence: Synthetic oligonucleotide
  Sense strand starting at position 3607 of SEQ ID NO: 916134
agauguguuugcucagauc

SEQ ID NO: 1133165 - RNA, 19 nt, Artificial Sequence
  Description of Artificial Sequence: Synthetic oligonucleotide
  Antisense strand to SEQ ID NO: 1133164
gaucugagcaaacacaucu

SEQ ID NO: 1133166 - RNA, 19 nt, Artificial Sequence
  Description of Artificial Sequence: Synthetic oligonucleotide
  Sense strand starting at position 3639 of SEQ ID NO: 916134
cagccaugggaaugcauua

SEQ ID NO: 1133167 - RNA, 19 nt, Artificial Sequence
  Description of Artificial Sequence: Synthetic oligonucleotide
  Antisense strand to SEQ ID NO: 1133166
uaaugcauucccauggcug

SEQ ID NO: 1133168 - RNA, 19 nt, Artificial Sequence
  Description of Artificial Sequence: Synthetic oligonucleotide
  Sense strand starting at position 3698 of SEQ ID NO: 916134
caguuuaccguuuaaagcu

SEQ ID NO: 1133169 - RNA, 19 nt, Artificial Sequence
  Description of Artificial Sequence: Synthetic oligonucleotide
  Antisense strand to SEQ ID NO: 1133168
agcuuuaaacgguaaacug

SEQ ID NO: 1133170 - RNA, 19 nt, Artificial Sequence
  Description of Artificial Sequence: Synthetic oligonucleotide
  Sense strand starting at position 3704 of SEQ ID NO: 916134
accguuuaaagcugagaag

SEQ ID NO: 1133171 - RNA, 19 nt, Artificial Sequence
  Description of Artificial Sequence: Synthetic oligonucleotide
  Antisense strand to SEQ ID NO: 1133170
cuucucagcuuuaaacggu

SEQ ID NO: 1133172 - RNA, 19 nt, Artificial Sequence
  Description of Artificial Sequence: Synthetic oligonucleotide
  Sense strand starting at position 3705 of SEQ ID NO: 916134
ccguuuaaagcugagaagu

SEQ ID NO: 1133173 - RNA, 19 nt, Artificial Sequence
  Description of Artificial Sequence: Synthetic oligonucleotide
  Antisense strand to SEQ ID NO: 1133172
acuucucagcuuuaaacgg

SEQ ID NO: 1133174 - RNA, 19 nt, Artificial Sequence
  Description of Artificial Sequence: Synthetic oligonucleotide
  Sense strand starting at position 3855 of SEQ ID NO: 916134
acuccuggaucagugguua

SEQ ID NO: 1133175 - RNA, 19 nt, Artificial Sequence
  Description of Artificial Sequence: Synthetic oligonucleotide
  Antisense strand to SEQ ID NO: 1133174
uaaccacugauccaggagu

SEQ ID NO: 1133176 - RNA, 19 nt, Artificial Sequence
  Description of Artificial Sequence: Synthetic oligonucleotide
  Sense strand starting at position 3868 of SEQ ID NO: 916134
ugguuacuuccuggaucaa

SEQ ID NO: 1133177 - RNA, 19 nt, Artificial Sequence
  Description of Artificial Sequence: Synthetic oligonucleotide
  Antisense strand to SEQ ID NO: 1133176
uugauccaggaaguaacca

SEQ ID NO: 1133178 - RNA, 19 nt, Artificial Sequence
  Description of Artificial Sequence: Synthetic oligonucleotide
  Sense strand starting at position 3869 of SEQ ID NO: 916134
gguuacuuccuggaucaau

SEQ ID NO: 1133179 - RNA, 19 nt, Artificial Sequence
  Description of Artificial Sequence: Synthetic oligonucleotide
  Antisense strand to SEQ ID NO: 1133178
auugauccaggaaguaacc

SEQ ID NO: 1133180 - RNA, 19 nt, Artificial Sequence
  Description of Artificial Sequence: Synthetic oligonucleotide
  Sense strand starting at position 3947 of SEQ ID NO: 916134
acucaucggcguguucgaa

SEQ ID NO: 1133181 - RNA, 19 nt, Artificial Sequence
  Description of Artificial Sequence: Synthetic oligonucleotide
  Antisense strand to SEQ ID NO: 1133180
uucgaacacgccgaugagu

SEQ ID NO: 1133182 - RNA, 19 nt, Artificial Sequence
  Description of Artificial Sequence: Synthetic oligonucleotide
  Sense strand starting at position 3960 of SEQ ID NO: 916134
uucgaaguucguucucuuu

SEQ ID NO: 1133183 - RNA, 19 nt, Artificial Sequence
  Description of Artificial Sequence: Synthetic oligonucleotide
  Antisense strand to SEQ ID NO: 1133182
aaagagaacgaacuucgaa

SEQ ID NO: 1133184 - RNA, 19 nt, Artificial Sequence
  Description of Artificial Sequence: Synthetic oligonucleotide
  Sense strand starting at position 3971 of SEQ ID NO: 916134
uucucuuuguggcugagua

SEQ ID NO: 1133185 - RNA, 19 nt, Artificial Sequence
  Description of Artificial Sequence: Synthetic oligonucleotide
  Antisense strand to SEQ ID NO: 1133184
uacucagccacaaagagaa

SEQ ID NO: 1133186 - RNA, 19 nt, Artificial Sequence
  Description of Artificial Sequence: Synthetic oligonucleotide
  Sense strand starting at position 216 of SEQ ID NO: 916135
guuugaaucuccuggcucu

SEQ ID NO: 1133187 - RNA, 19 nt, Artificial Sequence
  Description of Artificial Sequence: Synthetic oligonucleotide
  Antisense strand to SEQ ID NO: 1133186
agagccaggagauucaaac

SEQ ID NO: 1133188 - RNA, 19 nt, Artificial Sequence
  Description of Artificial Sequence: Synthetic oligonucleotide
  Sense strand starting at position 337 of SEQ ID NO: 916135
uugcucuguugcuuaugau

SEQ ID NO: 1133189 - RNA, 19 nt, Artificial Sequence
  Description of Artificial Sequence: Synthetic oligonucleotide
  Antisense strand to SEQ ID NO: 1133188
aucauaagcaacagagcaa

SEQ ID NO: 1133190 - RNA, 19 nt, Artificial Sequence
  Description of Artificial Sequence: Synthetic oligonucleotide
  Sense strand starting at position 340 of SEQ ID NO: 916135
cucuguugcuuaugaugga

SEQ ID NO: 1133191 - RNA, 19 nt, Artificial Sequence
  Description of Artificial Sequence: Synthetic oligonucleotide
  Antisense strand to SEQ ID NO: 1133190
uccaucauaagcaacagag

SEQ ID NO: 1133192 - RNA, 19 nt, Artificial Sequence
  Description of Artificial Sequence: Synthetic oligonucleotide
  Sense strand starting at position 894 of SEQ ID NO: 916135
acaccaggccuuugacuau

SEQ ID NO: 1133193 - RNA, 19 nt, Artificial Sequence
  Description of Artificial Sequence: Synthetic oligonucleotide
  Antisense strand to SEQ ID NO: 1133192
auagucaaaggccuggugu

SEQ ID NO: 1133194 - RNA, 19 nt, Artificial Sequence
  Description of Artificial Sequence: Synthetic oligonucleotide
  Sense strand starting at position 931 of SEQ ID NO: 916135
ucaguuuccuccuguagaa

SEQ ID NO: 1133195 - RNA, 19 nt, Artificial Sequence
  Description of Artificial Sequence: Synthetic oligonucleotide
  Antisense strand to SEQ ID NO: 1133194
uucuacaggaggaaacuga

SEQ ID NO: 1133196 - RNA, 19 nt, Artificial Sequence
  Description of Artificial Sequence: Synthetic oligonucleotide
  Sense strand starting at position 983 of SEQ ID NO: 916135
caacguuggugugaggauu

SEQ ID NO: 1133197 - RNA, 19 nt, Artificial Sequence
  Description of Artificial Sequence: Synthetic oligonucleotide
  Antisense strand to SEQ ID NO: 1133196
aauccucacaccaacguug

SEQ ID NO: 1133198 - RNA, 19 nt, Artificial Sequence
  Description of Artificial Sequence: Synthetic oligonucleotide
  Sense strand starting at position 1361 of SEQ ID NO: 916135
uaauucguuucccagaggu

SEQ ID NO: 1133199 - RNA, 19 nt, Artificial Sequence
  Description of Artificial Sequence: Synthetic oligonucleotide
  Antisense strand to SEQ ID NO: 1133198
accucugggaaacgaauua

SEQ ID NO: 1133200 - RNA, 19 nt, Artificial Sequence
  Description of Artificial Sequence: Synthetic oligonucleotide
  Sense strand starting at position 1363 of SEQ ID NO: 916135
auucguuucccagagguuu

SEQ ID NO: 1133201 - RNA, 19 nt, Artificial Sequence
  Description of Artificial Sequence: Synthetic oligonucleotide
  Antisense strand to SEQ ID NO: 1133200
aaaccucugggaaacgaau

SEQ ID NO: 1133202 - RNA, 19 nt, Artificial Sequence
  Description of Artificial Sequence: Synthetic oligonucleotide
  Sense strand starting at position 1375 of SEQ ID NO: 916135
gagguuuggaggcgucaca

SEQ ID NO: 1133203 - RNA, 19 nt, Artificial Sequence
  Description of Artificial Sequence: Synthetic oligonucleotide
  Antisense strand to SEQ ID NO: 1133202
ugugacgccuccaaaccuc

SEQ ID NO: 1133204 - RNA, 19 nt, Artificial Sequence
  Description of Artificial Sequence: Synthetic oligonucleotide
  Sense strand starting at position 1813 of SEQ ID NO: 916135
cgucaucuuccgccuggau

SEQ ID NO: 1133205 - RNA, 19 nt, Artificial Sequence
  Description of Artificial Sequence: Synthetic oligonucleotide
  Antisense strand to SEQ ID NO: 1133204
auccaggcggaagaugacg

SEQ ID NO: 1133206 - RNA, 19 nt, Artificial Sequence
  Description of Artificial Sequence: Synthetic oligonucleotide
  Sense strand starting at position 2530 of SEQ ID NO: 916135
ccaagaugcucagguagga

SEQ ID NO: 1133207 - RNA, 19 nt, Artificial Sequence
  Description of Artificial Sequence: Synthetic oligonucleotide
  Antisense strand to SEQ ID NO: 1133206
uccuaccugagcaucuugg

SEQ ID NO: 1133208 - RNA, 19 nt, Artificial Sequence
  Description of Artificial Sequence: Synthetic oligonucleotide
  Sense strand starting at position 2635 of SEQ ID NO: 916135
cggugaucucccgauagca

SEQ ID NO: 1133209 - RNA, 19 nt, Artificial Sequence
  Description of Artificial Sequence: Synthetic oligonucleotide
  Antisense strand to SEQ ID NO: 1133208
ugcuaucgggagaucaccg

SEQ ID NO: 1133210 - RNA, 19 nt, Artificial Sequence
  Description of Artificial Sequence: Synthetic oligonucleotide
  Sense strand starting at position 2637 of SEQ ID NO: 916135
gugaucucccgauagcagu

SEQ ID NO: 1133211 - RNA, 19 nt, Artificial Sequence
  Description of Artificial Sequence: Synthetic oligonucleotide
  Antisense strand to SEQ ID NO: 1133210
acugcuaucgggagaucac

SEQ ID NO: 1133212 - RNA, 19 nt, Artificial Sequence
  Description of Artificial Sequence: Synthetic oligonucleotide
  Sense strand starting at position 2701 of SEQ ID NO: 916135
uuuagcuuuauagguguga

SEQ ID NO: 1133213 - RNA, 19 nt, Artificial Sequence
  Description of Artificial Sequence: Synthetic oligonucleotide
  Antisense strand to SEQ ID NO: 1133212
ucacaccuauaaagcuaaa

SEQ ID NO: 1133214 - RNA, 19 nt, Artificial Sequence
  Description of Artificial Sequence: Synthetic oligonucleotide
  Sense strand starting at position 2930 of SEQ ID NO: 916135
ucugguuggugccuaaaua

SEQ ID NO: 1133215 - RNA, 19 nt, Artificial Sequence
  Description of Artificial Sequence: Synthetic oligonucleotide
  Antisense strand to SEQ ID NO: 1133214
uauuuaggcaccaaccaga

SEQ ID NO: 1133216 - RNA, 19 nt, Artificial Sequence
  Description of Artificial Sequence: Synthetic oligonucleotide
  Sense strand starting at position 2973 of SEQ ID NO: 916135
ccgccagagucauucugua

SEQ ID NO: 1133217 - RNA, 19 nt, Artificial Sequence
  Description of Artificial Sequence: Synthetic oligonucleotide
  Antisense strand to SEQ ID NO: 1133216
uacagaaugacucuggcgg

SEQ ID NO: 1133218 - RNA, 19 nt, Artificial Sequence
  Description of Artificial Sequence: Synthetic oligonucleotide
  Sense strand starting at position 3622 of SEQ ID NO: 916135
caguuacagcucugguguu

SEQ ID NO: 1133219 - RNA, 19 nt, Artificial Sequence
  Description of Artificial Sequence: Synthetic oligonucleotide
  Antisense strand to SEQ ID NO: 1133218
aacaccagagcuguaacug

SEQ ID NO: 1133220 - RNA, 19 nt, Artificial Sequence
  Description of Artificial Sequence: Synthetic oligonucleotide
  Sense strand starting at position 3684 of SEQ ID NO: 916135
ccaguuuacucauguggaa

SEQ ID NO: 1133221 - RNA, 19 nt, Artificial Sequence
  Description of Artificial Sequence: Synthetic oligonucleotide
  Antisense strand to SEQ ID NO: 1133220
uuccacaugaguaaacugg

SEQ ID NO: 1133222 - RNA, 19 nt, Artificial Sequence
  Description of Artificial Sequence: Synthetic oligonucleotide
  Sense strand starting at position 3729 of SEQ ID NO: 916135
gggauuguugauggauuaa

SEQ ID NO: 1133223 - RNA, 19 nt, Artificial Sequence
  Description of Artificial Sequence: Synthetic oligonucleotide
  Antisense strand to SEQ ID NO: 1133222
uuaauccaucaacaauccc

SEQ ID NO: 1133224 - RNA, 19 nt, Artificial Sequence
  Description of Artificial Sequence: Synthetic oligonucleotide
  Sense strand starting at position 3762 of SEQ ID NO: 916135
ugcagugcuucgcacagua

SEQ ID NO: 1133225 - RNA, 19 nt, Artificial Sequence
  Description of Artificial Sequence: Synthetic oligonucleotide
  Antisense strand to SEQ ID NO: 1133224
uacugugcgaagcacugca

SEQ ID NO: 1133226 - RNA, 19 nt, Artificial Sequence
  Description of Artificial Sequence: Synthetic oligonucleotide
  Sense strand starting at position 3790 of SEQ ID NO: 916135
uuagaaagcugucaauaaa

SEQ ID NO: 1133227 - RNA, 19 nt, Artificial Sequence
  Description of Artificial Sequence: Synthetic oligonucleotide
  Antisense strand to SEQ ID NO: 1133226
uuuauugacagcuuucuaa

SEQ ID NO: 1133228 - RNA, 19 nt, Artificial Sequence
  Description of Artificial Sequence: Synthetic oligonucleotide
  Sense strand starting at position 3797 of SEQ ID NO: 916135
gcugucaauaaaugguagu

SEQ ID NO: 1133229 - RNA, 19 nt, Artificial Sequence
  Description of Artificial Sequence: Synthetic oligonucleotide
  Antisense strand to SEQ ID NO: 1133228
acuaccauuuauugacagc

SEQ ID NO: 1133230 - RNA, 19 nt, Artificial Sequence
  Description of Artificial Sequence: Synthetic oligonucleotide
  Sense strand starting at position 3800 of SEQ ID NO: 916135
gucaauaaaugguaguguu

SEQ ID NO: 1133231 - RNA, 19 nt, Artificial Sequence
  Description of Artificial Sequence: Synthetic oligonucleotide
  Antisense strand to SEQ ID NO: 1133230
aacacuaccauuuauugac

SEQ ID NO: 1133232 - RNA, 19 nt, Artificial Sequence
  Description of Artificial Sequence: Synthetic oligonucleotide
  Sense strand starting at position 3803 of SEQ ID NO: 916135
aauaaaugguaguguugau

SEQ ID NO: 1133233 - RNA, 19 nt, Artificial Sequence
  Description of Artificial Sequence: Synthetic oligonucleotide
  Antisense strand to SEQ ID NO: 1133232
aucaacacuaccauuuauu

SEQ ID NO: 1133234 - RNA, 19 nt, Artificial Sequence
  Description of Artificial Sequence: Synthetic oligonucleotide
  Sense strand starting at position 3812 of SEQ ID NO: 916135
uaguguugaugguugugau

SEQ ID NO: 1133235 - RNA, 19 nt, Artificial Sequence
  Description of Artificial Sequence: Synthetic oligonucleotide
  Antisense strand to SEQ ID NO: 1133234
aucacaaccaucaacacua

SEQ ID NO: 1133236 - RNA, 19 nt, Artificial Sequence
  Description of Artificial Sequence: Synthetic oligonucleotide
  Sense strand starting at position 3815 of SEQ ID NO: 916135
uguugaugguugugauggu

SEQ ID NO: 1133237 - RNA, 19 nt, Artificial Sequence
  Description of Artificial Sequence: Synthetic oligonucleotide
  Antisense strand to SEQ ID NO: 1133236
accaucacaaccaucaaca

SEQ ID NO: 1133238 - RNA, 19 nt, Artificial Sequence
  Description of Artificial Sequence: Synthetic oligonucleotide
  Sense strand starting at position 3819 of SEQ ID NO: 916135
gaugguugugauggugaac

SEQ ID NO: 1133239 - RNA, 19 nt, Artificial Sequence
  Description of Artificial Sequence: Synthetic oligonucleotide
  Antisense strand to SEQ ID NO: 1133238
guucaccaucacaaccauc

SEQ ID NO: 1133240 - RNA, 19 nt, Artificial Sequence
  Description of Artificial Sequence: Synthetic oligonucleotide
  Sense strand starting at position 3881 of SEQ ID NO: 916135
ggagucagcugaggcauaa

SEQ ID NO: 1133241 - RNA, 19 nt, Artificial Sequence
  Description of Artificial Sequence: Synthetic oligonucleotide
  Antisense strand to SEQ ID NO: 1133240
uuaugccucagcugacucc

SEQ ID NO: 1133242 - RNA, 19 nt, Artificial Sequence
  Description of Artificial Sequence: Synthetic oligonucleotide
  Sense strand starting at position 3893 of SEQ ID NO: 916135
ggcauaagaucacagagaa

SEQ ID NO: 1133243 - RNA, 19 nt, Artificial Sequence
  Description of Artificial Sequence: Synthetic oligonucleotide
  Antisense strand to SEQ ID NO: 1133242
uucucugugaucuuaugcc

SEQ ID NO: 1133244 - RNA, 19 nt, Artificial Sequence
  Description of Artificial Sequence: Synthetic oligonucleotide
  Sense strand starting at position 3931 of SEQ ID NO: 916135
uauuaauguguucgauccu

SEQ ID NO: 1133245 - RNA, 19 nt, Artificial Sequence
  Description of Artificial Sequence: Synthetic oligonucleotide
  Antisense strand to SEQ ID NO: 1133244
aggaucgaacacauuaaua

SEQ ID NO: 1133246 - RNA, 19 nt, Artificial Sequence
  Description of Artificial Sequence: Synthetic oligonucleotide
  Sense strand starting at position 3932 of SEQ ID NO: 916135
auuaauguguucgauccuu

SEQ ID NO: 1133247 - RNA, 19 nt, Artificial Sequence
  Description of Artificial Sequence: Synthetic oligonucleotide
  Antisense strand to SEQ ID NO: 1133246
aaggaucgaacacauuaau

SEQ ID NO: 1133248 - RNA, 19 nt, Artificial Sequence
  Description of Artificial Sequence: Synthetic oligonucleotide
  Sense strand starting at position 3937 of SEQ ID NO: 916135
uguguucgauccuugaaau

SEQ ID NO: 1133249 - RNA, 19 nt, Artificial Sequence
  Description of Artificial Sequence: Synthetic oligonucleotide
  Antisense strand to SEQ ID NO: 1133248
auuucaaggaucgaacaca

SEQ ID NO: 1133250 - RNA, 19 nt, Artificial Sequence
  Description of Artificial Sequence: Synthetic oligonucleotide
  Sense strand starting at position 3938 of SEQ ID NO: 916135
guguucgauccuugaaaug

SEQ ID NO: 1133251 - RNA, 19 nt, Artificial Sequence
  Description of Artificial Sequence: Synthetic oligonucleotide
  Antisense strand to SEQ ID NO: 1133250
cauuucaaggaucgaacac

SEQ ID NO: 1133252 - RNA, 19 nt, Artificial Sequence
  Description of Artificial Sequence: Synthetic oligonucleotide
  Sense strand starting at position 3955 of SEQ ID NO: 916135
ugacauagaugugguguuu

SEQ ID NO: 1133253 - RNA, 19 nt, Artificial Sequence
  Description of Artificial Sequence: Synthetic oligonucleotide
  Antisense strand to SEQ ID NO: 1133252
aaacaccacaucuauguca

SEQ ID NO: 1133254 - RNA, 19 nt, Artificial Sequence
  Description of Artificial Sequence: Synthetic oligonucleotide
  Sense strand starting at position 3964 of SEQ ID NO: 916135
ugugguguuucugaaguca

SEQ ID NO: 1133255 - RNA, 19 nt, Artificial Sequence
  Description of Artificial Sequence: Synthetic oligonucleotide
  Antisense strand to SEQ ID NO: 1133254
ugacuucagaaacaccaca

SEQ ID NO: 1133256 - RNA, 19 nt, Artificial Sequence
  Description of Artificial Sequence: Synthetic oligonucleotide
  Sense strand starting at position 384 of SEQ ID NO: 916136
gccagucauucuugggaaa

SEQ ID NO: 1133257 - RNA, 19 nt, Artificial Sequence
  Description of Artificial Sequence: Synthetic oligonucleotide
  Antisense strand to SEQ ID NO: 1133256
uuucccaagaaugacuggc

SEQ ID NO: 1133258 - RNA, 19 nt, Artificial Sequence
  Description of Artificial Sequence: Synthetic oligonucleotide
  Sense strand starting at position 385 of SEQ ID NO: 916136
ccagucauucuugggaaau

SEQ ID NO: 1133259 - RNA, 19 nt, Artificial Sequence
  Description of Artificial Sequence: Synthetic oligonucleotide
  Antisense strand to SEQ ID NO: 1133258
auuucccaagaaugacugg

SEQ ID NO: 1133260 - RNA, 19 nt, Artificial Sequence
  Description of Artificial Sequence: Synthetic oligonucleotide
  Sense strand starting at position 386 of SEQ ID NO: 916136
cagucauucuugggaaaug

SEQ ID NO: 1133261 - RNA, 19 nt, Artificial Sequence
  Description of Artificial Sequence: Synthetic oligonucleotide
  Antisense strand to SEQ ID NO: 1133260
cauuucccaagaaugacug

SEQ ID NO: 1133262 - RNA, 19 nt, Artificial Sequence
  Description of Artificial Sequence: Synthetic oligonucleotide
  Sense strand starting at position 397 of SEQ ID NO: 916136
gggaaaugguaacaccauu

SEQ ID NO: 1133263 - RNA, 19 nt, Artificial Sequence
  Description of Artificial Sequence: Synthetic oligonucleotide
  Antisense strand to SEQ ID NO: 1133262
aaugguguuaccauuuccc

SEQ ID NO: 1133264 - RNA, 19 nt, Artificial Sequence
  Description of Artificial Sequence: Synthetic oligonucleotide
  Sense strand starting at position 815 of SEQ ID NO: 916136
ugugacuucucaguaucca

SEQ ID NO: 1133265 - RNA, 19 nt, Artificial Sequence
  Description of Artificial Sequence: Synthetic oligonucleotide
  Antisense strand to SEQ ID NO: 1133264
uggauacugagaagucaca

SEQ ID NO: 1133266 - RNA, 19 nt, Artificial Sequence
  Description of Artificial Sequence: Synthetic oligonucleotide
  Sense strand starting at position 816 of SEQ ID NO: 916136
gugacuucucaguauccac

SEQ ID NO: 1133267 - RNA, 19 nt, Artificial Sequence
  Description of Artificial Sequence: Synthetic oligonucleotide
  Antisense strand to SEQ ID NO: 1133266
guggauacugagaagucac

SEQ ID NO: 1133268 - RNA, 19 nt, Artificial Sequence
  Description of Artificial Sequence: Synthetic oligonucleotide
  Sense strand starting at position 906 of SEQ ID NO: 916136
aucucuuaugccuggaaag

SEQ ID NO: 1133269 - RNA, 19 nt, Artificial Sequence
  Description of Artificial Sequence: Synthetic oligonucleotide
  Antisense strand to SEQ ID NO: 1133268
cuuuccaggcauaagagau

SEQ ID NO: 1133270 - RNA, 19 nt, Artificial Sequence
  Description of Artificial Sequence: Synthetic oligonucleotide
  Sense strand starting at position 1045 of SEQ ID NO: 916136
uuacacuacucuugauguu

SEQ ID NO: 1133271 - RNA, 19 nt, Artificial Sequence
  Description of Artificial Sequence: Synthetic oligonucleotide
  Antisense strand to SEQ ID NO: 1133270
aacaucaagaguaguguaa

SEQ ID NO: 1133272 - RNA, 19 nt, Artificial Sequence
  Description of Artificial Sequence: Synthetic oligonucleotide
  Sense strand starting at position 1119 of SEQ ID NO: 916136
auuuaugugcacugguauu

SEQ ID NO: 1133273 - RNA, 19 nt, Artificial Sequence
  Description of Artificial Sequence: Synthetic oligonucleotide
  Antisense strand to SEQ ID NO: 1133272
aauaccagugcacauaaau

SEQ ID NO: 1133274 - RNA, 19 nt, Artificial Sequence
  Description of Artificial Sequence: Synthetic oligonucleotide
  Sense strand starting at position 1129 of SEQ ID NO: 916136
acugguauuucucuccagu

SEQ ID NO: 1133275 - RNA, 19 nt, Artificial Sequence
  Description of Artificial Sequence: Synthetic oligonucleotide
  Antisense strand to SEQ ID NO: 1133274
acuggagagaaauaccagu

SEQ ID NO: 1133276 - RNA, 19 nt, Artificial Sequence
  Description of Artificial Sequence: Synthetic oligonucleotide
  Sense strand starting at position 1137 of SEQ ID NO: 916136
uucucuccaguggaauaau

SEQ ID NO: 1133277 - RNA, 19 nt, Artificial Sequence
  Description of Artificial Sequence: Synthetic oligonucleotide
  Antisense strand to SEQ ID NO: 1133276
auuauuccacuggagagaa

SEQ ID NO: 1133278 - RNA, 19 nt, Artificial Sequence
  Description of Artificial Sequence: Synthetic oligonucleotide
  Sense strand starting at position 1339 of SEQ ID NO: 916136
gcucuugcacuagaaagua

SEQ ID NO: 1133279 - RNA, 19 nt, Artificial Sequence
  Description of Artificial Sequence: Synthetic oligonucleotide
  Antisense strand to SEQ ID NO: 1133278
uacuuucuagugcaagagc

SEQ ID NO: 1133280 - RNA, 19 nt, Artificial Sequence
  Description of Artificial Sequence: Synthetic oligonucleotide
  Sense strand starting at position 1416 of SEQ ID NO: 916136
cauagcagguccucaagaa

SEQ ID NO: 1133281 - RNA, 19 nt, Artificial Sequence
  Description of Artificial Sequence: Synthetic oligonucleotide
  Antisense strand to SEQ ID NO: 1133280
uucuugaggaccugcuaug

SEQ ID NO: 1133282 - RNA, 19 nt, Artificial Sequence
  Description of Artificial Sequence: Synthetic oligonucleotide
  Sense strand starting at position 1420 of SEQ ID NO: 916136
gcagguccucaagaaauau

SEQ ID NO: 1133283 - RNA, 19 nt, Artificial Sequence
  Description of Artificial Sequence: Synthetic oligonucleotide
  Antisense strand to SEQ ID NO: 1133282
auauuucuugaggaccugc

SEQ ID NO: 1133284 - RNA, 19 nt, Artificial Sequence
  Description of Artificial Sequence: Synthetic oligonucleotide
  Sense strand starting at position 1483 of SEQ ID NO: 916136
uagugugccgacugguuua

SEQ ID NO: 1133285 - RNA, 19 nt, Artificial Sequence
  Description of Artificial Sequence: Synthetic oligonucleotide
  Antisense strand to SEQ ID NO: 1133284
uaaaccagucggcacacua

SEQ ID NO: 1133286 - RNA, 19 nt, Artificial Sequence
  Description of Artificial Sequence: Synthetic oligonucleotide
  Sense strand starting at position 1521 of SEQ ID NO: 916136
ccauaaggaggguguuauu

SEQ ID NO: 1133287 - RNA, 19 nt, Artificial Sequence
  Description of Artificial Sequence: Synthetic oligonucleotide
  Antisense strand to SEQ ID NO: 1133286
aauaacacccuccuuaugg

SEQ ID NO: 1133288 - RNA, 19 nt, Artificial Sequence
  Description of Artificial Sequence: Synthetic oligonucleotide
  Sense strand starting at position 1627 of SEQ ID NO: 916136
ggaugagaaccaggcuuga

SEQ ID NO: 1133289 - RNA, 19 nt, Artificial Sequence
  Description of Artificial Sequence: Synthetic oligonucleotide
  Antisense strand to SEQ ID NO: 1133288
ucaagccugguucucaucc

SEQ ID NO: 1133290 - RNA, 19 nt, Artificial Sequence
  Description of Artificial Sequence: Synthetic oligonucleotide
  Sense strand starting at position 1776 of SEQ ID NO: 916136
gggcucagaucuguccgau

SEQ ID NO: 1133291 - RNA, 19 nt, Artificial Sequence
  Description of Artificial Sequence: Synthetic oligonucleotide
  Antisense strand to SEQ ID NO: 1133290
aucggacagaucugagccc

SEQ ID NO: 1133292 - RNA, 19 nt, Artificial Sequence
  Description of Artificial Sequence: Synthetic oligonucleotide
  Sense strand starting at position 2416 of SEQ ID NO: 916136
gccgguacguccugaaugu

SEQ ID NO: 1133293 - RNA, 19 nt, Artificial Sequence
  Description of Artificial Sequence: Synthetic oligonucleotide
  Antisense strand to SEQ ID NO: 1133292
acauucaggacguaccggc

SEQ ID NO: 1133294 - RNA, 19 nt, Artificial Sequence
  Description of Artificial Sequence: Synthetic oligonucleotide
  Sense strand starting at position 2417 of SEQ ID NO: 916136
ccgguacguccugaauguu

SEQ ID NO: 1133295 - RNA, 19 nt, Artificial Sequence
  Description of Artificial Sequence: Synthetic oligonucleotide
  Antisense strand to SEQ ID NO: 1133294
aacauucaggacguaccgg

SEQ ID NO: 1133296 - RNA, 19 nt, Artificial Sequence
  Description of Artificial Sequence: Synthetic oligonucleotide
  Sense strand starting at position 2454 of SEQ ID NO: 916136
cguccugaauguugguuua

SEQ ID NO: 1133297 - RNA, 19 nt, Artificial Sequence
  Description of Artificial Sequence: Synthetic oligonucleotide
  Antisense strand to SEQ ID NO: 1133296
uaaaccaacauucaggacg

SEQ ID NO: 1133298 - RNA, 19 nt, Artificial Sequence
  Description of Artificial Sequence: Synthetic oligonucleotide
  Sense strand starting at position 2456 of SEQ ID NO: 916136
uccugaauguugguuuacu

SEQ ID NO: 1133299 - RNA, 19 nt, Artificial Sequence
  Description of Artificial Sequence: Synthetic oligonucleotide
  Antisense strand to SEQ ID NO: 1133298
aguaaaccaacauucagga

SEQ ID NO: 1133300 - RNA, 19 nt, Artificial Sequence
  Description of Artificial Sequence: Synthetic oligonucleotide
  Sense strand starting at position 2457 of SEQ ID NO: 916136
ccugaauguugguuuacuu

SEQ ID NO: 1133301 - RNA, 19 nt, Artificial Sequence
  Description of Artificial Sequence: Synthetic oligonucleotide
  Antisense strand to SEQ ID NO: 1133300
aaguaaaccaacauucagg

SEQ ID NO: 1133302 - RNA, 19 nt, Artificial Sequence
  Description of Artificial Sequence: Synthetic oligonucleotide
  Sense strand starting at position 2465 of SEQ ID NO: 916136
uugguuuacuuucccggaa

SEQ ID NO: 1133303 - RNA, 19 nt, Artificial Sequence
  Description of Artificial Sequence: Synthetic oligonucleotide
  Antisense strand to SEQ ID NO: 1133302
uuccgggaaaguaaaccaa

SEQ ID NO: 1133304 - RNA, 19 nt, Artificial Sequence
  Description of Artificial Sequence: Synthetic oligonucleotide
  Sense strand starting at position 2467 of SEQ ID NO: 916136
gguuuacuuucccggaagu

SEQ ID NO: 1133305 - RNA, 19 nt, Artificial Sequence
  Description of Artificial Sequence: Synthetic oligonucleotide
  Antisense strand to SEQ ID NO: 1133304
acuuccgggaaaguaaacc

SEQ ID NO: 1133306 - RNA, 19 nt, Artificial Sequence
  Description of Artificial Sequence: Synthetic oligonucleotide
  Sense strand starting at position 2468 of SEQ ID NO: 916136
guuuacuuucccggaaguu

SEQ ID NO: 1133307 - RNA, 19 nt, Artificial Sequence
  Description of Artificial Sequence: Synthetic oligonucleotide
  Antisense strand to SEQ ID NO: 1133306
aacuuccgggaaaguaaac

SEQ ID NO: 1133308 - RNA, 19 nt, Artificial Sequence
  Description of Artificial Sequence: Synthetic oligonucleotide
  Sense strand starting at position 2469 of SEQ ID NO: 916136
uuuacuuucccggaaguua

SEQ ID NO: 1133309 - RNA, 19 nt, Artificial Sequence
  Description of Artificial Sequence: Synthetic oligonucleotide
  Antisense strand to SEQ ID NO: 1133308
uaacuuccgggaaaguaaa

SEQ ID NO: 1133310 - RNA, 19 nt, Artificial Sequence
  Description of Artificial Sequence: Synthetic oligonucleotide
  Sense strand starting at position 2488 of SEQ ID NO: 916136
gggucagaguccuaacuaa

SEQ ID NO: 1133311 - RNA, 19 nt, Artificial Sequence
  Description of Artificial Sequence: Synthetic oligonucleotide
  Antisense strand to SEQ ID NO: 1133310
uuaguuaggacucugaccc

SEQ ID NO: 1133312 - RNA, 19 nt, Artificial Sequence
  Description of Artificial Sequence: Synthetic oligonucleotide
  Sense strand starting at position 2920 of SEQ ID NO: 916136
cucauuaugugcccucuau

SEQ ID NO: 1133313 - RNA, 19 nt, Artificial Sequence
  Description of Artificial Sequence: Synthetic oligonucleotide
  Antisense strand to SEQ ID NO: 1133312
auagagggcacauaaugag

SEQ ID NO: 1133314 - RNA, 19 nt, Artificial Sequence
  Description of Artificial Sequence: Synthetic oligonucleotide
  Sense strand starting at position 3070 of SEQ ID NO: 916136
cucugauucucugaggcua

SEQ ID NO: 1133315 - RNA, 19 nt, Artificial Sequence
  Description of Artificial Sequence: Synthetic oligonucleotide
  Antisense strand to SEQ ID NO: 1133314
uagccucagagaaucagag

SEQ ID NO: 1133316 - RNA, 19 nt, Artificial Sequence
  Description of Artificial Sequence: Synthetic oligonucleotide
  Sense strand starting at position 3220 of SEQ ID NO: 916136
agaaauuauuggccuggca

SEQ ID NO: 1133317 - RNA, 19 nt, Artificial Sequence
  Description of Artificial Sequence: Synthetic oligonucleotide
  Antisense strand to SEQ ID NO: 1133316
ugccaggccaauaauuucu

SEQ ID NO: 1133318 - RNA, 19 nt, Artificial Sequence
  Description of Artificial Sequence: Synthetic oligonucleotide
  Sense strand starting at position 3509 of SEQ ID NO: 916136
aagaaauuaucugggcuag

SEQ ID NO: 1133319 - RNA, 19 nt, Artificial Sequence
  Description of Artificial Sequence: Synthetic oligonucleotide
  Antisense strand to SEQ ID NO: 1133318
cuagcccagauaauuucuu

SEQ ID NO: 1133320 - RNA, 19 nt, Artificial Sequence
  Description of Artificial Sequence: Synthetic oligonucleotide
  Sense strand starting at position 3511 of SEQ ID NO: 916136
gaaauuaucugggcuaggu

SEQ ID NO: 1133321 - RNA, 19 nt, Artificial Sequence
  Description of Artificial Sequence: Synthetic oligonucleotide
  Antisense strand to SEQ ID NO: 1133320
accuagcccagauaauuuc

SEQ ID NO: 1133322 - RNA, 19 nt, Artificial Sequence
  Description of Artificial Sequence: Synthetic oligonucleotide
  Sense strand starting at position 3736 of SEQ ID NO: 916136
gcaguaauccuagaucgca

SEQ ID NO: 1133323 - RNA, 19 nt, Artificial Sequence
  Description of Artificial Sequence: Synthetic oligonucleotide
  Antisense strand to SEQ ID NO: 1133322
ugcgaucuaggauuacugc

SEQ ID NO: 1133324 - RNA, 19 nt, Artificial Sequence
  Description of Artificial Sequence: Synthetic oligonucleotide
  Sense strand starting at position 9 of SEQ ID NO: 916137
uucucucugugccuaaaga

SEQ ID NO: 1133325 - RNA, 19 nt, Artificial Sequence
  Description of Artificial Sequence: Synthetic oligonucleotide
  Antisense strand to SEQ ID NO: 1133324
ucuuuaggcacagagagaa

SEQ ID NO: 1133326 - RNA, 19 nt, Artificial Sequence
  Description of Artificial Sequence: Synthetic oligonucleotide
  Sense strand starting at position 20 of SEQ ID NO: 916137
ccuaaagaguccuagguca

SEQ ID NO: 1133327 - RNA, 19 nt, Artificial Sequence
  Description of Artificial Sequence: Synthetic oligonucleotide
  Antisense strand to SEQ ID NO: 1133326
ugaccuaggacucuuuagg

SEQ ID NO: 1133328 - RNA, 19 nt, Artificial Sequence
  Description of Artificial Sequence: Synthetic oligonucleotide
  Sense strand starting at position 22 of SEQ ID NO: 916137
uaaagaguccuaggucaca

SEQ ID NO: 1133329 - RNA, 19 nt, Artificial Sequence
  Description of Artificial Sequence: Synthetic oligonucleotide
  Antisense strand to SEQ ID NO: 1133328
ugugaccuaggacucuuua

SEQ ID NO: 1133330 - RNA, 19 nt, Artificial Sequence
  Description of Artificial Sequence: Synthetic oligonucleotide
  Sense strand starting at position 107 of SEQ ID NO: 916137
auuagucaucacugacaga

SEQ ID NO: 1133331 - RNA, 19 nt, Artificial Sequence
  Description of Artificial Sequence: Synthetic oligonucleotide
  Antisense strand to SEQ ID NO: 1133330
ucugucagugaugacuaau

SEQ ID NO: 1133332 - RNA, 19 nt, Artificial Sequence
  Description of Artificial Sequence: Synthetic oligonucleotide
  Sense strand starting at position 155 of SEQ ID NO: 916137
uguuuaggaucuuuaggga

SEQ ID NO: 1133333 - RNA, 19 nt, Artificial Sequence
  Description of Artificial Sequence: Synthetic oligonucleotide
  Antisense strand to SEQ ID NO: 1133332
ucccuaaagauccuaaaca

SEQ ID NO: 1133334 - RNA, 19 nt, Artificial Sequence
  Description of Artificial Sequence: Synthetic oligonucleotide
  Sense strand starting at position 158 of SEQ ID NO: 916137
uuaggaucuuuagggaaga

SEQ ID NO: 1133335 - RNA, 19 nt, Artificial Sequence
  Description of Artificial Sequence: Synthetic oligonucleotide
  Antisense strand to SEQ ID NO: 1133334
ucuucccuaaagauccuaa

SEQ ID NO: 1133336 - RNA, 19 nt, Artificial Sequence
  Description of Artificial Sequence: Synthetic oligonucleotide
  Sense strand starting at position 159 of SEQ ID NO: 916137
uaggaucuuuagggaagaa

SEQ ID NO: 1133337 - RNA, 19 nt, Artificial Sequence
  Description of Artificial Sequence: Synthetic oligonucleotide
  Antisense strand to SEQ ID NO: 1133336
uucuucccuaaagauccua

SEQ ID NO: 1133338 - RNA, 19 nt, Artificial Sequence
  Description of Artificial Sequence: Synthetic oligonucleotide
  Sense strand starting at position 291 of SEQ ID NO: 916137
caugaaaucuuaguugaag

SEQ ID NO: 1133339 - RNA, 19 nt, Artificial Sequence
  Description of Artificial Sequence: Synthetic oligonucleotide
  Antisense strand to SEQ ID NO: 1133338
cuucaacuaagauuucaug

SEQ ID NO: 1133340 - RNA, 19 nt, Artificial Sequence
  Description of Artificial Sequence: Synthetic oligonucleotide
  Sense strand starting at position 347 of SEQ ID NO: 916137
uugguauucuauuaucucu

SEQ ID NO: 1133341 - RNA, 19 nt, Artificial Sequence
  Description of Artificial Sequence: Synthetic oligonucleotide
  Antisense strand to SEQ ID NO: 1133340
agagauaauagaauaccaa

SEQ ID NO: 1133342 - RNA, 19 nt, Artificial Sequence
  Description of Artificial Sequence: Synthetic oligonucleotide
  Sense strand starting at position 417 of SEQ ID NO: 916137
uuguguuucuaccuccgaa

SEQ ID NO: 1133343 - RNA, 19 nt, Artificial Sequence
  Description of Artificial Sequence: Synthetic oligonucleotide
  Antisense strand to SEQ ID NO: 1133342
uucggagguagaaacacaa

SEQ ID NO: 1133344 - RNA, 19 nt, Artificial Sequence
  Description of Artificial Sequence: Synthetic oligonucleotide
  Sense strand starting at position 420 of SEQ ID NO: 916137
uguuucuaccuccgaagaa

SEQ ID NO: 1133345 - RNA, 19 nt, Artificial Sequence
  Description of Artificial Sequence: Synthetic oligonucleotide
  Antisense strand to SEQ ID NO: 1133344
uucuucggagguagaaaca

SEQ ID NO: 1133346 - RNA, 19 nt, Artificial Sequence
  Description of Artificial Sequence: Synthetic oligonucleotide
  Sense strand starting at position 421 of SEQ ID NO: 916137
guuucuaccuccgaagaau

SEQ ID NO: 1133347 - RNA, 19 nt, Artificial Sequence
  Description of Artificial Sequence: Synthetic oligonucleotide
  Antisense strand to SEQ ID NO: 1133346
auucuucggagguagaaac

SEQ ID NO: 1133348 - RNA, 19 nt, Artificial Sequence
  Description of Artificial Sequence: Synthetic oligonucleotide
  Sense strand starting at position 459 of SEQ ID NO: 916137
uugcucugaagcugaguua

SEQ ID NO: 1133349 - RNA, 19 nt, Artificial Sequence
  Description of Artificial Sequence: Synthetic oligonucleotide
  Antisense strand to SEQ ID NO: 1133348
uaacucagcuucagagcaa

SEQ ID NO: 1133350 - RNA, 19 nt, Artificial Sequence
  Description of Artificial Sequence: Synthetic oligonucleotide
  Sense strand starting at position 462 of SEQ ID NO: 916137
cucugaagcugaguuaaga

SEQ ID NO: 1133351 - RNA, 19 nt, Artificial Sequence
  Description of Artificial Sequence: Synthetic oligonucleotide
  Antisense strand to SEQ ID NO: 1133350
ucuuaacucagcuucagag

SEQ ID NO: 1133352 - RNA, 19 nt, Artificial Sequence
  Description of Artificial Sequence: Synthetic oligonucleotide
  Sense strand starting at position 604 of SEQ ID NO: 916137
aaauuuacguuagugcaau

SEQ ID NO: 1133353 - RNA, 19 nt, Artificial Sequence
  Description of Artificial Sequence: Synthetic oligonucleotide
  Antisense strand to SEQ ID NO: 1133352
auugcacuaacguaaauuu

SEQ ID NO: 1133354 - RNA, 19 nt, Artificial Sequence
  Description of Artificial Sequence: Synthetic oligonucleotide
  Sense strand starting at position 617 of SEQ ID NO: 916137
ugcaaucaauaaggaauua

SEQ ID NO: 1133355 - RNA, 19 nt, Artificial Sequence
  Description of Artificial Sequence: Synthetic oligonucleotide
  Antisense strand to SEQ ID NO: 1133354
uaauuccuuauugauugca

SEQ ID NO: 1133356 - RNA, 19 nt, Artificial Sequence
  Description of Artificial Sequence: Synthetic oligonucleotide
  Sense strand starting at position 643 of SEQ ID NO: 916137
aaaggaaguuguucugaaa

SEQ ID NO: 1133357 - RNA, 19 nt, Artificial Sequence
  Description of Artificial Sequence: Synthetic oligonucleotide
  Antisense strand to SEQ ID NO: 1133356
uuucagaacaacuuccuuu

SEQ ID NO: 1133358 - RNA, 19 nt, Artificial Sequence
  Description of Artificial Sequence: Synthetic oligonucleotide
  Sense strand starting at position 655 of SEQ ID NO: 916137
ucugaaaggcuaugaccua

SEQ ID NO: 1133359 - RNA, 19 nt, Artificial Sequence
  Description of Artificial Sequence: Synthetic oligonucleotide
  Antisense strand to SEQ ID NO: 1133358
uaggucauagccuuucaga

SEQ ID NO: 1133360 - RNA, 19 nt, Artificial Sequence
  Description of Artificial Sequence: Synthetic oligonucleotide
  Sense strand starting at position 1441 of SEQ ID NO: 916137
ccgcgccuguuauuaauaa

SEQ ID NO: 1133361 - RNA, 19 nt, Artificial Sequence
  Description of Artificial Sequence: Synthetic oligonucleotide
  Antisense strand to SEQ ID NO: 1133360
uuauuaauaacaggcgcgg

SEQ ID NO: 1133362 - RNA, 19 nt, Artificial Sequence
  Description of Artificial Sequence: Synthetic oligonucleotide
  Sense strand starting at position 1547 of SEQ ID NO: 916137
gcgccaguucggccagaaa

SEQ ID NO: 1133363 - RNA, 19 nt, Artificial Sequence
  Description of Artificial Sequence: Synthetic oligonucleotide
  Antisense strand to SEQ ID NO: 1133362
uuucuggccgaacuggcgc

SEQ ID NO: 1133364 - RNA, 19 nt, Artificial Sequence
  Description of Artificial Sequence: Synthetic oligonucleotide
  Sense strand starting at position 2472 of SEQ ID NO: 916137
cugagaucauuucgcauaa

SEQ ID NO: 1133365 - RNA, 19 nt, Artificial Sequence
  Description of Artificial Sequence: Synthetic oligonucleotide
  Antisense strand to SEQ ID NO: 1133364
uuaugcgaaaugaucucag

SEQ ID NO: 1133366 - RNA, 19 nt, Artificial Sequence
  Description of Artificial Sequence: Synthetic oligonucleotide
  Sense strand starting at position 2592 of SEQ ID NO: 916137
cuuagugacuuagugacaa

SEQ ID NO: 1133367 - RNA, 19 nt, Artificial Sequence
  Description of Artificial Sequence: Synthetic oligonucleotide
  Antisense strand to SEQ ID NO: 1133366
uugucacuaagucacuaag

SEQ ID NO: 1133368 - RNA, 19 nt, Artificial Sequence
  Description of Artificial Sequence: Synthetic oligonucleotide
  Sense strand starting at position 2596 of SEQ ID NO: 916137
gugacuuagugacaaguca

SEQ ID NO: 1133369 - RNA, 19 nt, Artificial Sequence
  Description of Artificial Sequence: Synthetic oligonucleotide
  Antisense strand to SEQ ID NO: 1133368
ugacuugucacuaagucac

SEQ ID NO: 1133370 - RNA, 19 nt, Artificial Sequence
  Description of Artificial Sequence: Synthetic oligonucleotide
  Sense strand starting at position 2645 of SEQ ID NO: 916137
cccacaaagcguugagacu

SEQ ID NO: 1133371 - RNA, 19 nt, Artificial Sequence
  Description of Artificial Sequence: Synthetic oligonucleotide
  Antisense strand to SEQ ID NO: 1133370
agucucaacgcuuuguggg

SEQ ID NO: 1133372 - RNA, 19 nt, Artificial Sequence
  Description of Artificial Sequence: Synthetic oligonucleotide
  Sense strand starting at position 2646 of SEQ ID NO: 916137
ccacaaagcguugagacuu

SEQ ID NO: 1133373 - RNA, 19 nt, Artificial Sequence
  Description of Artificial Sequence: Synthetic oligonucleotide
  Antisense strand to SEQ ID NO: 1133372
aagucucaacgcuuugugg

SEQ ID NO: 1133374 - RNA, 19 nt, Artificial Sequence
  Description of Artificial Sequence: Synthetic oligonucleotide
  Sense strand starting at position 2654 of SEQ ID NO: 916137
cguugagacuucuagaagg

SEQ ID NO: 1133375 - RNA, 19 nt, Artificial Sequence
  Description of Artificial Sequence: Synthetic oligonucleotide
  Antisense strand to SEQ ID NO: 1133374
ccuucuagaagucucaacg

SEQ ID NO: 1133376 - RNA, 19 nt, Artificial Sequence
  Description of Artificial Sequence: Synthetic oligonucleotide
  Sense strand starting at position 2689 of SEQ ID NO: 916137
cccgccuucugucauuuau

SEQ ID NO: 1133377 - RNA, 19 nt, Artificial Sequence
  Description of Artificial Sequence: Synthetic oligonucleotide
  Antisense strand to SEQ ID NO: 1133376
auaaaugacagaaggcggg

SEQ ID NO: 1133378 - RNA, 19 nt, Artificial Sequence
  Description of Artificial Sequence: Synthetic oligonucleotide
  Sense strand starting at position 2698 of SEQ ID NO: 916137
ugucauuuauccugacauu

SEQ ID NO: 1133379 - RNA, 19 nt, Artificial Sequence
  Description of Artificial Sequence: Synthetic oligonucleotide
  Antisense strand to SEQ ID NO: 1133378
aaugucaggauaaaugaca

SEQ ID NO: 1133380 - RNA, 19 nt, Artificial Sequence
  Description of Artificial Sequence: Synthetic oligonucleotide
  Sense strand starting at position 2716 of SEQ ID NO: 916137
uuuccaggucaguguaaau

SEQ ID NO: 1133381 - RNA, 19 nt, Artificial Sequence
  Description of Artificial Sequence: Synthetic oligonucleotide
  Antisense strand to SEQ ID NO: 1133380
auuuacacugaccuggaaa

SEQ ID NO: 1133382 - RNA, 19 nt, Artificial Sequence
  Description of Artificial Sequence: Synthetic oligonucleotide
  Sense strand starting at position 2763 of SEQ ID NO: 916137
guacccauccgauguuauc

SEQ ID NO: 1133383 - RNA, 19 nt, Artificial Sequence
  Description of Artificial Sequence: Synthetic oligonucleotide
  Antisense strand to SEQ ID NO: 1133382
gauaacaucggauggguac

SEQ ID NO: 1133384 - RNA, 19 nt, Artificial Sequence
  Description of Artificial Sequence: Synthetic oligonucleotide
  Sense strand starting at position 2796 of SEQ ID NO: 916137
guaacaaucggaggcuaaa

SEQ ID NO: 1133385 - RNA, 19 nt, Artificial Sequence
  Description of Artificial Sequence: Synthetic oligonucleotide
  Antisense strand to SEQ ID NO: 1133384
uuuagccuccgauuguuac

SEQ ID NO: 1133386 - RNA, 19 nt, Artificial Sequence
  Description of Artificial Sequence: Synthetic oligonucleotide
  Sense strand starting at position 2884 of SEQ ID NO: 916137
uuugccuucucggaaggaa

SEQ ID NO: 1133387 - RNA, 19 nt, Artificial Sequence
  Description of Artificial Sequence: Synthetic oligonucleotide
  Antisense strand to SEQ ID NO: 1133386
uuccuuccgagaaggcaaa

SEQ ID NO: 1133388 - RNA, 19 nt, Artificial Sequence
  Description of Artificial Sequence: Synthetic oligonucleotide
  Sense strand starting at position 2993 of SEQ ID NO: 916137
guaggaagaucacaugaga

SEQ ID NO: 1133389 - RNA, 19 nt, Artificial Sequence
  Description of Artificial Sequence: Synthetic oligonucleotide
  Antisense strand to SEQ ID NO: 1133388
ucucaugugaucuuccuac

SEQ ID NO: 1133390 - RNA, 19 nt, Artificial Sequence
  Description of Artificial Sequence: Synthetic oligonucleotide
  Sense strand starting at position 3330 of SEQ ID NO: 916137
ggcaucuaccacuagacau

SEQ ID NO: 1133391 - RNA, 19 nt, Artificial Sequence
  Description of Artificial Sequence: Synthetic oligonucleotide
  Antisense strand to SEQ ID NO: 1133390
augucuagugguagaugcc

SEQ ID NO: 1133392 - RNA, 19 nt, Artificial Sequence
  Description of Artificial Sequence: Synthetic oligonucleotide
  Sense strand starting at position 3375 of SEQ ID NO: 916137
cugagagaaccucgauuau

SEQ ID NO: 1133393 - RNA, 19 nt, Artificial Sequence
  Description of Artificial Sequence: Synthetic oligonucleotide
  Antisense strand to SEQ ID NO: 1133392
auaaucgagguucucucag

SEQ ID NO: 1133394 - RNA, 19 nt, Artificial Sequence
  Description of Artificial Sequence: Synthetic oligonucleotide
  Sense strand starting at position 3384 of SEQ ID NO: 916137
ccucgauuauuugacugaa

SEQ ID NO: 1133395 - RNA, 19 nt, Artificial Sequence
  Description of Artificial Sequence: Synthetic oligonucleotide
  Antisense strand to SEQ ID NO: 1133394
uucagucaaauaaucgagg

SEQ ID NO: 1133396 - RNA, 19 nt, Artificial Sequence
  Description of Artificial Sequence: Synthetic oligonucleotide
  Sense strand starting at position 3399 of SEQ ID NO: 916137
ugaauaauguucuuccuag

SEQ ID NO: 1133397 - RNA, 19 nt, Artificial Sequence
  Description of Artificial Sequence: Synthetic oligonucleotide
  Antisense strand to SEQ ID NO: 1133396
cuaggaagaacauuauuca

SEQ ID NO: 1133398 - RNA, 19 nt, Artificial Sequence
  Description of Artificial Sequence: Synthetic oligonucleotide
  Sense strand starting at position 3419 of SEQ ID NO: 916137
agauacaugugcgugcaua

SEQ ID NO: 1133399 - RNA, 19 nt, Artificial Sequence
  Description of Artificial Sequence: Synthetic oligonucleotide
  Antisense strand to SEQ ID NO: 1133398
uaugcacgcacauguaucu

SEQ ID NO: 1133400 - RNA, 19 nt, Artificial Sequence
  Description of Artificial Sequence: Synthetic oligonucleotide
  Sense strand starting at position 3420 of SEQ ID NO: 916137
gauacaugugcgugcauac

SEQ ID NO: 1133401 - RNA, 19 nt, Artificial Sequence
  Description of Artificial Sequence: Synthetic oligonucleotide
  Antisense strand to SEQ ID NO: 1133400
guaugcacgcacauguauc

SEQ ID NO: 1133402 - RNA, 19 nt, Artificial Sequence
  Description of Artificial Sequence: Synthetic oligonucleotide
  Sense strand starting at position 3802 of SEQ ID NO: 916137
gaagaauuggccgggugca

SEQ ID NO: 1133403 - RNA, 19 nt, Artificial Sequence
  Description of Artificial Sequence: Synthetic oligonucleotide
  Antisense strand to SEQ ID NO: 1133402
ugcacccggccaauucuuc

SEQ ID NO: 1133404 - RNA, 19 nt, Artificial Sequence
  Description of Artificial Sequence: Synthetic oligonucleotide
  Sense strand starting at position 90 of SEQ ID NO: 916138
aaaugauuagguuggugca

SEQ ID NO: 1133405 - RNA, 19 nt, Artificial Sequence
  Description of Artificial Sequence: Synthetic oligonucleotide
  Antisense strand to SEQ ID NO: 1133404
ugcaccaaccuaaucauuu

SEQ ID NO: 1133406 - RNA, 19 nt, Artificial Sequence
  Description of Artificial Sequence: Synthetic oligonucleotide
  Sense strand starting at position 91 of SEQ ID NO: 916138
aaugauuagguuggugcaa

SEQ ID NO: 1133407 - RNA, 19 nt, Artificial Sequence
  Description of Artificial Sequence: Synthetic oligonucleotide
  Antisense strand to SEQ ID NO: 1133406
uugcaccaaccuaaucauu

SEQ ID NO: 1133408 - RNA, 19 nt, Artificial Sequence
  Description of Artificial Sequence: Synthetic oligonucleotide
  Sense strand starting at position 168 of SEQ ID NO: 916138
acgguacuuaaaugucaga

SEQ ID NO: 1133409 - RNA, 19 nt, Artificial Sequence
  Description of Artificial Sequence: Synthetic oligonucleotide
  Antisense strand to SEQ ID NO: 1133408
ucugacauuuaaguaccgu

SEQ ID NO: 1133410 - RNA, 19 nt, Artificial Sequence
  Description of Artificial Sequence: Synthetic oligonucleotide
  Sense strand starting at position 175 of SEQ ID NO: 916138
uuaaaugucagaugugguc

SEQ ID NO: 1133411 - RNA, 19 nt, Artificial Sequence
  Description of Artificial Sequence: Synthetic oligonucleotide
  Antisense strand to SEQ ID NO: 1133410
gaccacaucugacauuuaa

SEQ ID NO: 1133412 - RNA, 19 nt, Artificial Sequence
  Description of Artificial Sequence: Synthetic oligonucleotide
  Sense strand starting at position 184 of SEQ ID NO: 916138
agauguggucucuacugca

SEQ ID NO: 1133413 - RNA, 19 nt, Artificial Sequence
  Description of Artificial Sequence: Synthetic oligonucleotide
  Antisense strand to SEQ ID NO: 1133412
ugcaguagagaccacaucu

SEQ ID NO: 1133414 - RNA, 19 nt, Artificial Sequence
  Description of Artificial Sequence: Synthetic oligonucleotide
  Sense strand starting at position 209 of SEQ ID NO: 916138
gaauguaagguccacguga

SEQ ID NO: 1133415 - RNA, 19 nt, Artificial Sequence
  Description of Artificial Sequence: Synthetic oligonucleotide
  Antisense strand to SEQ ID NO: 1133414
ucacguggaccuuacauuc

SEQ ID NO: 1133416 - RNA, 19 nt, Artificial Sequence
  Description of Artificial Sequence: Synthetic oligonucleotide
  Sense strand starting at position 211 of SEQ ID NO: 916138
auguaagguccacgugaac

SEQ ID NO: 1133417 - RNA, 19 nt, Artificial Sequence
  Description of Artificial Sequence: Synthetic oligonucleotide
  Antisense strand to SEQ ID NO: 1133416
guucacguggaccuuacau

SEQ ID NO: 1133418 - RNA, 19 nt, Artificial Sequence
  Description of Artificial Sequence: Synthetic oligonucleotide
  Sense strand starting at position 231 of SEQ ID NO: 916138
aggaucuucugacuuauuc

SEQ ID NO: 1133419 - RNA, 19 nt, Artificial Sequence
  Description of Artificial Sequence: Synthetic oligonucleotide
  Antisense strand to SEQ ID NO: 1133418
gaauaagucagaagauccu

SEQ ID NO: 1133420 - RNA, 19 nt, Artificial Sequence
  Description of Artificial Sequence: Synthetic oligonucleotide
  Sense strand starting at position 287 of SEQ ID NO: 916138
cacaguaaguucugagaaa

SEQ ID NO: 1133421 - RNA, 19 nt, Artificial Sequence
  Description of Artificial Sequence: Synthetic oligonucleotide
  Antisense strand to SEQ ID NO: 1133420
uuucucagaacuuacugug

SEQ ID NO: 1133422 - RNA, 19 nt, Artificial Sequence
  Description of Artificial Sequence: Synthetic oligonucleotide
  Sense strand starting at position 288 of SEQ ID NO: 916138
acaguaaguucugagaaau

SEQ ID NO: 1133423 - RNA, 19 nt, Artificial Sequence
  Description of Artificial Sequence: Synthetic oligonucleotide
  Antisense strand to SEQ ID NO: 1133422
auuucucagaacuuacugu

SEQ ID NO: 1133424 - RNA, 19 nt, Artificial Sequence
  Description of Artificial Sequence: Synthetic oligonucleotide
  Sense strand starting at position 364 of SEQ ID NO: 916138
gaaaguuuccaagaugcga

SEQ ID NO: 1133425 - RNA, 19 nt, Artificial Sequence
  Description of Artificial Sequence: Synthetic oligonucleotide
  Antisense strand to SEQ ID NO: 1133424
ucgcaucuuggaaacuuuc

SEQ ID NO: 1133426 - RNA, 19 nt, Artificial Sequence
  Description of Artificial Sequence: Synthetic oligonucleotide
  Sense strand starting at position 495 of SEQ ID NO: 916138
agaagacuuuccucacugu

SEQ ID NO: 1133427 - RNA, 19 nt, Artificial Sequence
  Description of Artificial Sequence: Synthetic oligonucleotide
  Antisense strand to SEQ ID NO: 1133426
acagugaggaaagucuucu

SEQ ID NO: 1133428 - RNA, 19 nt, Artificial Sequence
  Description of Artificial Sequence: Synthetic oligonucleotide
  Sense strand starting at position 948 of SEQ ID NO: 916138
augucaaacuguuauuaca

SEQ ID NO: 1133429 - RNA, 19 nt, Artificial Sequence
  Description of Artificial Sequence: Synthetic oligonucleotide
  Antisense strand to SEQ ID NO: 1133428
uguaauaacaguuugacau

SEQ ID NO: 1133430 - RNA, 19 nt, Artificial Sequence
  Description of Artificial Sequence: Synthetic oligonucleotide
  Sense strand starting at position 950 of SEQ ID NO: 916138
gucaaacuguuauuacaau

SEQ ID NO: 1133431 - RNA, 19 nt, Artificial Sequence
  Description of Artificial Sequence: Synthetic oligonucleotide
  Antisense strand to SEQ ID NO: 1133430
auuguaauaacaguuugac

SEQ ID NO: 1133432 - RNA, 19 nt, Artificial Sequence
  Description of Artificial Sequence: Synthetic oligonucleotide
  Sense strand starting at position 992 of SEQ ID NO: 916138
gucauucuguggcuaccaa

SEQ ID NO: 1133433 - RNA, 19 nt, Artificial Sequence
  Description of Artificial Sequence: Synthetic oligonucleotide
  Antisense strand to SEQ ID NO: 1133432
uugguagccacagaaugac

SEQ ID NO: 1133434 - RNA, 19 nt, Artificial Sequence
  Description of Artificial Sequence: Synthetic oligonucleotide
  Sense strand starting at position 1186 of SEQ ID NO: 916138
agagcaguguuccucucaa

SEQ ID NO: 1133435 - RNA, 19 nt, Artificial Sequence
  Description of Artificial Sequence: Synthetic oligonucleotide
  Antisense strand to SEQ ID NO: 1133434
uugagaggaacacugcucu

SEQ ID NO: 1133436 - RNA, 19 nt, Artificial Sequence
  Description of Artificial Sequence: Synthetic oligonucleotide
  Sense strand starting at position 1283 of SEQ ID NO: 916138
ugagcaaucccaggcacaa

SEQ ID NO: 1133437 - RNA, 19 nt, Artificial Sequence
  Description of Artificial Sequence: Synthetic oligonucleotide
  Antisense strand to SEQ ID NO: 1133436
uugugccugggauugcuca

SEQ ID NO: 1133438 - RNA, 19 nt, Artificial Sequence
  Description of Artificial Sequence: Synthetic oligonucleotide
  Sense strand starting at position 1451 of SEQ ID NO: 916138
agggugaucugggagggau

SEQ ID NO: 1133439 - RNA, 19 nt, Artificial Sequence
  Description of Artificial Sequence: Synthetic oligonucleotide
  Antisense strand to SEQ ID NO: 1133438
aucccucccagaucacccu

SEQ ID NO: 1133440 - RNA, 19 nt, Artificial Sequence
  Description of Artificial Sequence: Synthetic oligonucleotide
  Sense strand starting at position 1579 of SEQ ID NO: 916138
gcaacuaaacgccaugaga

SEQ ID NO: 1133441 - RNA, 19 nt, Artificial Sequence
  Description of Artificial Sequence: Synthetic oligonucleotide
  Antisense strand to SEQ ID NO: 1133440
ucucauggcguuuaguugc

SEQ ID NO: 1133442 - RNA, 19 nt, Artificial Sequence
  Description of Artificial Sequence: Synthetic oligonucleotide
  Sense strand starting at position 2006 of SEQ ID NO: 916138
agccuuuaucgcgagauuc

SEQ ID NO: 1133443 - RNA, 19 nt, Artificial Sequence
  Description of Artificial Sequence: Synthetic oligonucleotide
  Antisense strand to SEQ ID NO: 1133442
gaaucucgcgauaaaggcu

SEQ ID NO: 1133444 - RNA, 19 nt, Artificial Sequence
  Description of Artificial Sequence: Synthetic oligonucleotide
  Sense strand starting at position 2227 of SEQ ID NO: 916138
gcgcaccugagucacaaau

SEQ ID NO: 1133445 - RNA, 19 nt, Artificial Sequence
  Description of Artificial Sequence: Synthetic oligonucleotide
  Antisense strand to SEQ ID NO: 1133444
auuugugacucaggugcgc

SEQ ID NO: 1133446 - RNA, 19 nt, Artificial Sequence
  Description of Artificial Sequence: Synthetic oligonucleotide
  Sense strand starting at position 2229 of SEQ ID NO: 916138
gcaccugagucacaaauga

SEQ ID NO: 1133447 - RNA, 19 nt, Artificial Sequence
  Description of Artificial Sequence: Synthetic oligonucleotide
  Antisense strand to SEQ ID NO: 1133446
ucauuugugacucaggugc

SEQ ID NO: 1133448 - RNA, 19 nt, Artificial Sequence
  Description of Artificial Sequence: Synthetic oligonucleotide
  Sense strand starting at position 2253 of SEQ ID NO: 916138
uauuaaugaguccgaggau

SEQ ID NO: 1133449 - RNA, 19 nt, Artificial Sequence
  Description of Artificial Sequence: Synthetic oligonucleotide
  Antisense strand to SEQ ID NO: 1133448
auccucggacucauuaaua

SEQ ID NO: 1133450 - RNA, 19 nt, Artificial Sequence
  Description of Artificial Sequence: Synthetic oligonucleotide
  Sense strand starting at position 2254 of SEQ ID NO: 916138
auuaaugaguccgaggauc

SEQ ID NO: 1133451 - RNA, 19 nt, Artificial Sequence
  Description of Artificial Sequence: Synthetic oligonucleotide
  Antisense strand to SEQ ID NO: 1133450
gauccucggacucauuaau

SEQ ID NO: 1133452 - RNA, 19 nt, Artificial Sequence
  Description of Artificial Sequence: Synthetic oligonucleotide
  Sense strand starting at position 2256 of SEQ ID NO: 916138
uaaugaguccgaggaucau

SEQ ID NO: 1133453 - RNA, 19 nt, Artificial Sequence
  Description of Artificial Sequence: Synthetic oligonucleotide
  Antisense strand to SEQ ID NO: 1133452
augauccucggacucauua

SEQ ID NO: 1133454 - RNA, 19 nt, Artificial Sequence
  Description of Artificial Sequence: Synthetic oligonucleotide
  Sense strand starting at position 2348 of SEQ ID NO: 916138
gagauugcagccggauaga

SEQ ID NO: 1133455 - RNA, 19 nt, Artificial Sequence
  Description of Artificial Sequence: Synthetic oligonucleotide
  Antisense strand to SEQ ID NO: 1133454
ucuauccggcugcaaucuc

SEQ ID NO: 1133456 - RNA, 19 nt, Artificial Sequence
  Description of Artificial Sequence: Synthetic oligonucleotide
  Sense strand starting at position 2975 of SEQ ID NO: 916138
auguaagaguaugggaaua

SEQ ID NO: 1133457 - RNA, 19 nt, Artificial Sequence
  Description of Artificial Sequence: Synthetic oligonucleotide
  Antisense strand to SEQ ID NO: 1133456
uauucccauacucuuacau

SEQ ID NO: 1133458 - RNA, 19 nt, Artificial Sequence
  Description of Artificial Sequence: Synthetic oligonucleotide
  Sense strand starting at position 2977 of SEQ ID NO: 916138
guaagaguaugggaauaua

SEQ ID NO: 1133459 - RNA, 19 nt, Artificial Sequence
  Description of Artificial Sequence: Synthetic oligonucleotide
  Antisense strand to SEQ ID NO: 1133458
uauauucccauacucuuac

SEQ ID NO: 1133460 - RNA, 19 nt, Artificial Sequence
  Description of Artificial Sequence: Synthetic oligonucleotide
  Sense strand starting at position 3152 of SEQ ID NO: 916138
gugucaacugaggguuaaa

SEQ ID NO: 1133461 - RNA, 19 nt, Artificial Sequence
  Description of Artificial Sequence: Synthetic oligonucleotide
  Antisense strand to SEQ ID NO: 1133460
uuuaacccucaguugacac

SEQ ID NO: 1133462 - RNA, 19 nt, Artificial Sequence
  Description of Artificial Sequence: Synthetic oligonucleotide
  Sense strand starting at position 3220 of SEQ ID NO: 916138
cagcaugcgccuuaagaau

SEQ ID NO: 1133463 - RNA, 19 nt, Artificial Sequence
  Description of Artificial Sequence: Synthetic oligonucleotide
  Antisense strand to SEQ ID NO: 1133462
auucuuaaggcgcaugcug

SEQ ID NO: 1133464 - RNA, 19 nt, Artificial Sequence
  Description of Artificial Sequence: Synthetic oligonucleotide
  Sense strand starting at position 3296 of SEQ ID NO: 916138
gggaccucuuccuaggaaa

SEQ ID NO: 1133465 - RNA, 19 nt, Artificial Sequence
  Description of Artificial Sequence: Synthetic oligonucleotide
  Antisense strand to SEQ ID NO: 1133464
uuuccuaggaagagguccc

SEQ ID NO: 1133466 - RNA, 19 nt, Artificial Sequence
  Description of Artificial Sequence: Synthetic oligonucleotide
  Sense strand starting at position 3447 of SEQ ID NO: 916138
ggaacaccucugugcaguu

SEQ ID NO: 1133467 - RNA, 19 nt, Artificial Sequence
  Description of Artificial Sequence: Synthetic oligonucleotide
  Antisense strand to SEQ ID NO: 1133466
aacugcacagagguguucc

SEQ ID NO: 1133468 - RNA, 19 nt, Artificial Sequence
  Description of Artificial Sequence: Synthetic oligonucleotide
  Sense strand starting at position 3585 of SEQ ID NO: 916138
gggacauacuggcagcaau

SEQ ID NO: 1133469 - RNA, 19 nt, Artificial Sequence
  Description of Artificial Sequence: Synthetic oligonucleotide
  Antisense strand to SEQ ID NO: 1133468
auugcugccaguauguccc

SEQ ID NO: 1133470 - RNA, 19 nt, Artificial Sequence
  Description of Artificial Sequence: Synthetic oligonucleotide
  Sense strand starting at position 3664 of SEQ ID NO: 916138
ucuuuaccauguuuaugau

SEQ ID NO: 1133471 - RNA, 19 nt, Artificial Sequence
  Description of Artificial Sequence: Synthetic oligonucleotide
  Antisense strand to SEQ ID NO: 1133470
aucauaaacaugguaaaga

SEQ ID NO: 1133472 - RNA, 19 nt, Artificial Sequence
  Description of Artificial Sequence: Synthetic oligonucleotide
  Sense strand starting at position 3762 of SEQ ID NO: 916138
ccgggaaaugccugcuaau

SEQ ID NO: 1133473 - RNA, 19 nt, Artificial Sequence
  Description of Artificial Sequence: Synthetic oligonucleotide
  Antisense strand to SEQ ID NO: 1133472
auuagcaggcauuucccgg

SEQ ID NO: 1133474 - RNA, 19 nt, Artificial Sequence
  Description of Artificial Sequence: Synthetic oligonucleotide
  Sense strand starting at position 3765 of SEQ ID NO: 916138
ggaaaugccugcuaaugau

SEQ ID NO: 1133475 - RNA, 19 nt, Artificial Sequence
  Description of Artificial Sequence: Synthetic oligonucleotide
  Antisense strand to SEQ ID NO: 1133474
aucauuagcaggcauuucc

SEQ ID NO: 1133476 - RNA, 19 nt, Artificial Sequence
  Description of Artificial Sequence: Synthetic oligonucleotide
  Sense strand starting at position 3771 of SEQ ID NO: 916138
gccugcuaaugaucaauaa

SEQ ID NO: 1133477 - RNA, 19 nt, Artificial Sequence
  Description of Artificial Sequence: Synthetic oligonucleotide
  Antisense strand to SEQ ID NO: 1133476
uuauugaucauuagcaggc

SEQ ID NO: 1133478 - RNA, 19 nt, Artificial Sequence
  Description of Artificial Sequence: Synthetic oligonucleotide
  Sense strand starting at position 3874 of SEQ ID NO: 916138
acaauuugucucugugucu

SEQ ID NO: 1133479 - RNA, 19 nt, Artificial Sequence
  Description of Artificial Sequence: Synthetic oligonucleotide
  Antisense strand to SEQ ID NO: 1133478
agacacagagacaaauugu

SEQ ID NO: 1133480 - RNA, 19 nt, Artificial Sequence
  Description of Artificial Sequence: Synthetic oligonucleotide
  Sense strand starting at position 3965 of SEQ ID NO: 916138
aggaauagaucuugguuuc

SEQ ID NO: 1133481 - RNA, 19 nt, Artificial Sequence
  Description of Artificial Sequence: Synthetic oligonucleotide
  Antisense strand to SEQ ID NO: 1133480
gaaaccaagaucuauuccu

SEQ ID NO: 1133482 - RNA, 19 nt, Artificial Sequence
  Description of Artificial Sequence: Synthetic oligonucleotide
  Sense strand starting at position 3982 of SEQ ID NO: 916138
ucaagaauaguuggauccu

SEQ ID NO: 1133483 - RNA, 19 nt, Artificial Sequence
  Description of Artificial Sequence: Synthetic oligonucleotide
  Antisense strand to SEQ ID NO: 1133482
aggauccaacuauucuuga

SEQ ID NO: 1133484 - RNA, 19 nt, Artificial Sequence
  Description of Artificial Sequence: Synthetic oligonucleotide
  Sense strand starting at position 545 of SEQ ID NO: 916139
gguauacccuuacuauaga

SEQ ID NO: 1133485 - RNA, 19 nt, Artificial Sequence
  Description of Artificial Sequence: Synthetic oligonucleotide
  Antisense strand to SEQ ID NO: 1133484
ucuauaguaaggguauacc

SEQ ID NO: 1133486 - RNA, 19 nt, Artificial Sequence
  Description of Artificial Sequence: Synthetic oligonucleotide
  Sense strand starting at position 602 of SEQ ID NO: 916139
guuuauagugugcaaggau

SEQ ID NO: 1133487 - RNA, 19 nt, Artificial Sequence
  Description of Artificial Sequence: Synthetic oligonucleotide
  Antisense strand to SEQ ID NO: 1133486
auccuugcacacuauaaac

SEQ ID NO: 1133488 - RNA, 19 nt, Artificial Sequence
  Description of Artificial Sequence: Synthetic oligonucleotide
  Sense strand starting at position 695 of SEQ ID NO: 916139
uuauuauccuacuuaggua

SEQ ID NO: 1133489 - RNA, 19 nt, Artificial Sequence
  Description of Artificial Sequence: Synthetic oligonucleotide
  Antisense strand to SEQ ID NO: 1133488
uaccuaaguaggauaauaa

SEQ ID NO: 1133490 - RNA, 19 nt, Artificial Sequence
  Description of Artificial Sequence: Synthetic oligonucleotide
  Sense strand starting at position 808 of SEQ ID NO: 916139
uguaaugguggcugaugaa

SEQ ID NO: 1133491 - RNA, 19 nt, Artificial Sequence
  Description of Artificial Sequence: Synthetic oligonucleotide
  Antisense strand to SEQ ID NO: 1133490
uucaucagccaccauuaca

SEQ ID NO: 1133492 - RNA, 19 nt, Artificial Sequence
  Description of Artificial Sequence: Synthetic oligonucleotide
  Sense strand starting at position 1153 of SEQ ID NO: 916139
cuauacauauguuuacgau

SEQ ID NO: 1133493 - RNA, 19 nt, Artificial Sequence
  Description of Artificial Sequence: Synthetic oligonucleotide
  Antisense strand to SEQ ID NO: 1133492
aucguaaacauauguauag

SEQ ID NO: 1133494 - RNA, 19 nt, Artificial Sequence
  Description of Artificial Sequence: Synthetic oligonucleotide
  Sense strand starting at position 1216 of SEQ ID NO: 916139
aacagaaguuacccgucua

SEQ ID NO: 1133495 - RNA, 19 nt, Artificial Sequence
  Description of Artificial Sequence: Synthetic oligonucleotide
  Antisense strand to SEQ ID NO: 1133494
uagacggguaacuucuguu

SEQ ID NO: 1133496 - RNA, 19 nt, Artificial Sequence
  Description of Artificial Sequence: Synthetic oligonucleotide
  Sense strand starting at position 1227 of SEQ ID NO: 916139
cccgucuaaucacucaaga

SEQ ID NO: 1133497 - RNA, 19 nt, Artificial Sequence
  Description of Artificial Sequence: Synthetic oligonucleotide
  Antisense strand to SEQ ID NO: 1133496
ucuugagugauuagacggg

SEQ ID NO: 1133498 - RNA, 19 nt, Artificial Sequence
  Description of Artificial Sequence: Synthetic oligonucleotide
  Sense strand starting at position 1511 of SEQ ID NO: 916139
gugccaucuggacauguau

SEQ ID NO: 1133499 - RNA, 19 nt, Artificial Sequence
  Description of Artificial Sequence: Synthetic oligonucleotide
  Antisense strand to SEQ ID NO: 1133498
auacauguccagauggcac

SEQ ID NO: 1133500 - RNA, 19 nt, Artificial Sequence
  Description of Artificial Sequence: Synthetic oligonucleotide
  Sense strand starting at position 1524 of SEQ ID NO: 916139
auguauuagaaacgcagau

SEQ ID NO: 1133501 - RNA, 19 nt, Artificial Sequence
  Description of Artificial Sequence: Synthetic oligonucleotide
  Antisense strand to SEQ ID NO: 1133500
aucugcguuucuaauacau

SEQ ID NO: 1133502 - RNA, 19 nt, Artificial Sequence
  Description of Artificial Sequence: Synthetic oligonucleotide
  Sense strand starting at position 1526 of SEQ ID NO: 916139
guauuagaaacgcagauua

SEQ ID NO: 1133503 - RNA, 19 nt, Artificial Sequence
  Description of Artificial Sequence: Synthetic oligonucleotide
  Antisense strand to SEQ ID NO: 1133502
uaaucugcguuucuaauac

SEQ ID NO: 1133504 - RNA, 19 nt, Artificial Sequence
  Description of Artificial Sequence: Synthetic oligonucleotide
  Sense strand starting at position 1528 of SEQ ID NO: 916139
auuagaaacgcagauuauc

SEQ ID NO: 1133505 - RNA, 19 nt, Artificial Sequence
  Description of Artificial Sequence: Synthetic oligonucleotide
  Antisense strand to SEQ ID NO: 1133504
gauaaucugcguuucuaau

SEQ ID NO: 1133506 - RNA, 19 nt, Artificial Sequence
  Description of Artificial Sequence: Synthetic oligonucleotide
  Sense strand starting at position 1591 of SEQ ID NO: 916139
gggauucguauguauauua

SEQ ID NO: 1133507 - RNA, 19 nt, Artificial Sequence
  Description of Artificial Sequence: Synthetic oligonucleotide
  Antisense strand to SEQ ID NO: 1133506
uaauauacauacgaauccc

SEQ ID NO: 1133508 - RNA, 19 nt, Artificial Sequence
  Description of Artificial Sequence: Synthetic oligonucleotide
  Sense strand starting at position 1914 of SEQ ID NO: 916139
cucguucugacugacaagu

SEQ ID NO: 1133509 - RNA, 19 nt, Artificial Sequence
  Description of Artificial Sequence: Synthetic oligonucleotide
  Antisense strand to SEQ ID NO: 1133508
acuugucagucagaacgag

SEQ ID NO: 1133510 - RNA, 19 nt, Artificial Sequence
  Description of Artificial Sequence: Synthetic oligonucleotide
  Sense strand starting at position 2559 of SEQ ID NO: 916139
ggccgaguccucgaaagag

SEQ ID NO: 1133511 - RNA, 19 nt, Artificial Sequence
  Description of Artificial Sequence: Synthetic oligonucleotide
  Antisense strand to SEQ ID NO: 1133510
cucuuucgaggacucggcc

SEQ ID NO: 1133512 - RNA, 19 nt, Artificial Sequence
  Description of Artificial Sequence: Synthetic oligonucleotide
  Sense strand starting at position 2806 of SEQ ID NO: 916139
gcuuuaguucuggaaugga

SEQ ID NO: 1133513 - RNA, 19 nt, Artificial Sequence
  Description of Artificial Sequence: Synthetic oligonucleotide
  Antisense strand to SEQ ID NO: 1133512
uccauuccagaacuaaagc

SEQ ID NO: 1133514 - RNA, 19 nt, Artificial Sequence
  Description of Artificial Sequence: Synthetic oligonucleotide
  Sense strand starting at position 2930 of SEQ ID NO: 916139
gaggguuuagaccgauaaa

SEQ ID NO: 1133515 - RNA, 19 nt, Artificial Sequence
  Description of Artificial Sequence: Synthetic oligonucleotide
  Antisense strand to SEQ ID NO: 1133514
uuuaucggucuaaacccuc

SEQ ID NO: 1133516 - RNA, 19 nt, Artificial Sequence
  Description of Artificial Sequence: Synthetic oligonucleotide
  Sense strand starting at position 2933 of SEQ ID NO: 916139
gguuuagaccgauaaagcu

SEQ ID NO: 1133517 - RNA, 19 nt, Artificial Sequence
  Description of Artificial Sequence: Synthetic oligonucleotide
  Antisense strand to SEQ ID NO: 1133516
agcuuuaucggucuaaacc

SEQ ID NO: 1133518 - RNA, 19 nt, Artificial Sequence
  Description of Artificial Sequence: Synthetic oligonucleotide
  Sense strand starting at position 2963 of SEQ ID NO: 916139
auuggacuuugagcacaua

SEQ ID NO: 1133519 - RNA, 19 nt, Artificial Sequence
  Description of Artificial Sequence: Synthetic oligonucleotide
  Antisense strand to SEQ ID NO: 1133518
uaugugcucaaaguccaau

SEQ ID NO: 1133520 - RNA, 19 nt, Artificial Sequence
  Description of Artificial Sequence: Synthetic oligonucleotide
  Sense strand starting at position 2981 of SEQ ID NO: 916139
accugugauccguaauuaa

SEQ ID NO: 1133521 - RNA, 19 nt, Artificial Sequence
  Description of Artificial Sequence: Synthetic oligonucleotide
  Antisense strand to SEQ ID NO: 1133520
uuaauuacggaucacaggu

SEQ ID NO: 1133522 - RNA, 19 nt, Artificial Sequence
  Description of Artificial Sequence: Synthetic oligonucleotide
  Sense strand starting at position 2984 of SEQ ID NO: 916139
ugugauccguaauuaagga

SEQ ID NO: 1133523 - RNA, 19 nt, Artificial Sequence
  Description of Artificial Sequence: Synthetic oligonucleotide
  Antisense strand to SEQ ID NO: 1133522
uccuuaauuacggaucaca

SEQ ID NO: 1133524 - RNA, 19 nt, Artificial Sequence
  Description of Artificial Sequence: Synthetic oligonucleotide
  Sense strand starting at position 2991 of SEQ ID NO: 916139
cguaauuaaggaggccaua

SEQ ID NO: 1133525 - RNA, 19 nt, Artificial Sequence
  Description of Artificial Sequence: Synthetic oligonucleotide
  Antisense strand to SEQ ID NO: 1133524
uauggccuccuuaauuacg

SEQ ID NO: 1133526 - RNA, 19 nt, Artificial Sequence
  Description of Artificial Sequence: Synthetic oligonucleotide
  Sense strand starting at position 3064 of SEQ ID NO: 916139
agcgcuaugccuguaguga

SEQ ID NO: 1133527 - RNA, 19 nt, Artificial Sequence
  Description of Artificial Sequence: Synthetic oligonucleotide
  Antisense strand to SEQ ID NO: 1133526
ucacuacaggcauagcgcu

SEQ ID NO: 1133528 - RNA, 19 nt, Artificial Sequence
  Description of Artificial Sequence: Synthetic oligonucleotide
  Sense strand starting at position 3112 of SEQ ID NO: 916139
guacgucaaacucaggaau

SEQ ID NO: 1133529 - RNA, 19 nt, Artificial Sequence
  Description of Artificial Sequence: Synthetic oligonucleotide
  Antisense strand to SEQ ID NO: 1133528
auuccugaguuugacguac

SEQ ID NO: 1133530 - RNA, 19 nt, Artificial Sequence
  Description of Artificial Sequence: Synthetic oligonucleotide
  Sense strand starting at position 3115 of SEQ ID NO: 916139
cgucaaacucaggaauuau

SEQ ID NO: 1133531 - RNA, 19 nt, Artificial Sequence
  Description of Artificial Sequence: Synthetic oligonucleotide
  Antisense strand to SEQ ID NO: 1133530
auaauuccugaguuugacg

SEQ ID NO: 1133532 - RNA, 19 nt, Artificial Sequence
  Description of Artificial Sequence: Synthetic oligonucleotide
  Sense strand starting at position 3126 of SEQ ID NO: 916139
ggaauuauuugugaugaca

SEQ ID NO: 1133533 - RNA, 19 nt, Artificial Sequence
  Description of Artificial Sequence: Synthetic oligonucleotide
  Antisense strand to SEQ ID NO: 1133532
ugucaucacaaauaauucc

SEQ ID NO: 1133534 - RNA, 19 nt, Artificial Sequence
  Description of Artificial Sequence: Synthetic oligonucleotide
  Sense strand starting at position 3159 of SEQ ID NO: 916139
uggauacuaugagugaguu

SEQ ID NO: 1133535 - RNA, 19 nt, Artificial Sequence
  Description of Artificial Sequence: Synthetic oligonucleotide
  Antisense strand to SEQ ID NO: 1133534
aacucacucauaguaucca

SEQ ID NO: 1133536 - RNA, 19 nt, Artificial Sequence
  Description of Artificial Sequence: Synthetic oligonucleotide
  Sense strand starting at position 3160 of SEQ ID NO: 916139
ggauacuaugagugaguuu

SEQ ID NO: 1133537 - RNA, 19 nt, Artificial Sequence
  Description of Artificial Sequence: Synthetic oligonucleotide
  Antisense strand to SEQ ID NO: 1133536
aaacucacucauaguaucc

SEQ ID NO: 1133538 - RNA, 19 nt, Artificial Sequence
  Description of Artificial Sequence: Synthetic oligonucleotide
  Sense strand starting at position 3267 of SEQ ID NO: 916139
uggugauggcuugaaaguc

SEQ ID NO: 1133539 - RNA, 19 nt, Artificial Sequence
  Description of Artificial Sequence: Synthetic oligonucleotide
  Antisense strand to SEQ ID NO: 1133538
gacuuucaagccaucacca

SEQ ID NO: 1133540 - RNA, 19 nt, Artificial Sequence
  Description of Artificial Sequence: Synthetic oligonucleotide
  Sense strand starting at position 3280 of SEQ ID NO: 916139
aaagucaggugcuugaaga

SEQ ID NO: 1133541 - RNA, 19 nt, Artificial Sequence
  Description of Artificial Sequence: Synthetic oligonucleotide
  Antisense strand to SEQ ID NO: 1133540
ucuucaagcaccugacuuu

SEQ ID NO: 1133542 - RNA, 19 nt, Artificial Sequence
  Description of Artificial Sequence: Synthetic oligonucleotide
  Sense strand starting at position 3281 of SEQ ID NO: 916139
aagucaggugcuugaagau

SEQ ID NO: 1133543 - RNA, 19 nt, Artificial Sequence
  Description of Artificial Sequence: Synthetic oligonucleotide
  Antisense strand to SEQ ID NO: 1133542
aucuucaagcaccugacuu

SEQ ID NO: 1133544 - RNA, 19 nt, Artificial Sequence
  Description of Artificial Sequence: Synthetic oligonucleotide
  Sense strand starting at position 3339 of SEQ ID NO: 916139
ugucuuauucuuuagcaca

SEQ ID NO: 1133545 - RNA, 19 nt, Artificial Sequence
  Description of Artificial Sequence: Synthetic oligonucleotide
  Antisense strand to SEQ ID NO: 1133544
ugugcuaaagaauaagaca

SEQ ID NO: 1133546 - RNA, 19 nt, Artificial Sequence
  Description of Artificial Sequence: Synthetic oligonucleotide
  Sense strand starting at position 3382 of SEQ ID NO: 916139
gaaaucagcugaguauaua

SEQ ID NO: 1133547 - RNA, 19 nt, Artificial Sequence
  Description of Artificial Sequence: Synthetic oligonucleotide
  Antisense strand to SEQ ID NO: 1133546
uauauacucagcugauuuc

SEQ ID NO: 1133548 - RNA, 19 nt, Artificial Sequence
  Description of Artificial Sequence: Synthetic oligonucleotide
  Sense strand starting at position 3385 of SEQ ID NO: 916139
aucagcugaguauauaaau

SEQ ID NO: 1133549 - RNA, 19 nt, Artificial Sequence
  Description of Artificial Sequence: Synthetic oligonucleotide
  Antisense strand to SEQ ID NO: 1133548
auuuauauacucagcugau

SEQ ID NO: 1133550 - RNA, 19 nt, Artificial Sequence
  Description of Artificial Sequence: Synthetic oligonucleotide
  Sense strand starting at position 3587 of SEQ ID NO: 916139
acuucuauacuguggaaua

SEQ ID NO: 1133551 - RNA, 19 nt, Artificial Sequence
  Description of Artificial Sequence: Synthetic oligonucleotide
  Antisense strand to SEQ ID NO: 1133550
uauuccacaguauagaagu

SEQ ID NO: 1133552 - RNA, 19 nt, Artificial Sequence
  Description of Artificial Sequence: Synthetic oligonucleotide
  Sense strand starting at position 3589 of SEQ ID NO: 916139
uucuauacuguggaauacu

SEQ ID NO: 1133553 - RNA, 19 nt, Artificial Sequence
  Description of Artificial Sequence: Synthetic oligonucleotide
  Antisense strand to SEQ ID NO: 1133552
aguauuccacaguauagaa

SEQ ID NO: 1133554 - RNA, 19 nt, Artificial Sequence
  Description of Artificial Sequence: Synthetic oligonucleotide
  Sense strand starting at position 3598 of SEQ ID NO: 916139
guggaauacuuucuagaca

SEQ ID NO: 1133555 - RNA, 19 nt, Artificial Sequence
  Description of Artificial Sequence: Synthetic oligonucleotide
  Antisense strand to SEQ ID NO: 1133554
ugucuagaaaguauuccac

SEQ ID NO: 1133556 - RNA, 19 nt, Artificial Sequence
  Description of Artificial Sequence: Synthetic oligonucleotide
  Sense strand starting at position 3746 of SEQ ID NO: 916139
auccauuccuuuguauaga

SEQ ID NO: 1133557 - RNA, 19 nt, Artificial Sequence
  Description of Artificial Sequence: Synthetic oligonucleotide
  Antisense strand to SEQ ID NO: 1133556
ucuauacaaaggaauggau

SEQ ID NO: 1133558 - RNA, 19 nt, Artificial Sequence
  Description of Artificial Sequence: Synthetic oligonucleotide
  Sense strand starting at position 3756 of SEQ ID NO: 916139
uuguauagaaguugaaguu

SEQ ID NO: 1133559 - RNA, 19 nt, Artificial Sequence
  Description of Artificial Sequence: Synthetic oligonucleotide
  Antisense strand to SEQ ID NO: 1133558
aacuucaacuucuauacaa

SEQ ID NO: 1133560 - RNA, 19 nt, Artificial Sequence
  Description of Artificial Sequence: Synthetic oligonucleotide
  Sense strand starting at position 3757 of SEQ ID NO: 916139
uguauagaaguugaaguuu

SEQ ID NO: 1133561 - RNA, 19 nt, Artificial Sequence
  Description of Artificial Sequence: Synthetic oligonucleotide
  Antisense strand to SEQ ID NO: 1133560
aaacuucaacuucuauaca

SEQ ID NO: 1133562 - RNA, 19 nt, Artificial Sequence
  Description of Artificial Sequence: Synthetic oligonucleotide
  Sense strand starting at position 3763 of SEQ ID NO: 916139
gaaguugaaguuugacaau

SEQ ID NO: 1133563 - RNA, 19 nt, Artificial Sequence
  Description of Artificial Sequence: Synthetic oligonucleotide
  Antisense strand to SEQ ID NO: 1133562
auugucaaacuucaacuuc

SEQ ID NO: 1133564 - RNA, 19 nt, Artificial Sequence
  Description of Artificial Sequence: Synthetic oligonucleotide
  Sense strand starting at position 82 of SEQ ID NO: 916140
agggcacauccuugaugua

SEQ ID NO: 1133565 - RNA, 19 nt, Artificial Sequence
  Description of Artificial Sequence: Synthetic oligonucleotide
  Antisense strand to SEQ ID NO: 1133564
uacaucaaggaugugcccu

SEQ ID NO: 1133566 - RNA, 19 nt, Artificial Sequence
  Description of Artificial Sequence: Synthetic oligonucleotide
  Sense strand starting at position 83 of SEQ ID NO: 916140
gggcacauccuugauguau

SEQ ID NO: 1133567 - RNA, 19 nt, Artificial Sequence
  Description of Artificial Sequence: Synthetic oligonucleotide
  Antisense strand to SEQ ID NO: 1133566
auacaucaaggaugugccc

SEQ ID NO: 1133568 - RNA, 19 nt, Artificial Sequence
  Description of Artificial Sequence: Synthetic oligonucleotide
  Sense strand starting at position 104 of SEQ ID NO: 916140
auagucacauggucauauu

SEQ ID NO: 1133569 - RNA, 19 nt, Artificial Sequence
  Description of Artificial Sequence: Synthetic oligonucleotide
  Antisense strand to SEQ ID NO: 1133568
aauaugaccaugugacuau

SEQ ID NO: 1133570 - RNA, 19 nt, Artificial Sequence
  Description of Artificial Sequence: Synthetic oligonucleotide
  Sense strand starting at position 112 of SEQ ID NO: 916140
auggucauauuccugggaa

SEQ ID NO: 1133571 - RNA, 19 nt, Artificial Sequence
  Description of Artificial Sequence: Synthetic oligonucleotide
  Antisense strand to SEQ ID NO: 1133570
uucccaggaauaugaccau

SEQ ID NO: 1133572 - RNA, 19 nt, Artificial Sequence
  Description of Artificial Sequence: Synthetic oligonucleotide
  Sense strand starting at position 114 of SEQ ID NO: 916140
ggucauauuccugggaaua

SEQ ID NO: 1133573 - RNA, 19 nt, Artificial Sequence
  Description of Artificial Sequence: Synthetic oligonucleotide
  Antisense strand to SEQ ID NO: 1133572
uauucccaggaauaugacc

SEQ ID NO: 1133574 - RNA, 19 nt, Artificial Sequence
  Description of Artificial Sequence: Synthetic oligonucleotide
  Sense strand starting at position 115 of SEQ ID NO: 916140
gucauauuccugggaauac

SEQ ID NO: 1133575 - RNA, 19 nt, Artificial Sequence
  Description of Artificial Sequence: Synthetic oligonucleotide
  Antisense strand to SEQ ID NO: 1133574
guauucccaggaauaugac

SEQ ID NO: 1133576 - RNA, 19 nt, Artificial Sequence
  Description of Artificial Sequence: Synthetic oligonucleotide
  Sense strand starting at position 370 of SEQ ID NO: 916140
ggaagugcagacuguuuaa

SEQ ID NO: 1133577 - RNA, 19 nt, Artificial Sequence
  Description of Artificial Sequence: Synthetic oligonucleotide
  Antisense strand to SEQ ID NO: 1133576
uuaaacagucugcacuucc

SEQ ID NO: 1133578 - RNA, 19 nt, Artificial Sequence
  Description of Artificial Sequence: Synthetic oligonucleotide
  Sense strand starting at position 517 of SEQ ID NO: 916140
cuuacuagguguccacaau

SEQ ID NO: 1133579 - RNA, 19 nt, Artificial Sequence
  Description of Artificial Sequence: Synthetic oligonucleotide
  Antisense strand to SEQ ID NO: 1133578
auuguggacaccuaguaag

SEQ ID NO: 1133580 - RNA, 19 nt, Artificial Sequence
  Description of Artificial Sequence: Synthetic oligonucleotide
  Sense strand starting at position 518 of SEQ ID NO: 916140
uuacuagguguccacaaua

SEQ ID NO: 1133581 - RNA, 19 nt, Artificial Sequence
  Description of Artificial Sequence: Synthetic oligonucleotide
  Antisense strand to SEQ ID NO: 1133580
uauuguggacaccuaguaa

SEQ ID NO: 1133582 - RNA, 19 nt, Artificial Sequence
  Description of Artificial Sequence: Synthetic oligonucleotide
  Sense strand starting at position 623 of SEQ ID NO: 916140
gaaacuuaagcgcaaaguu

SEQ ID NO: 1133583 - RNA, 19 nt, Artificial Sequence
  Description of Artificial Sequence: Synthetic oligonucleotide
  Antisense strand to SEQ ID NO: 1133582
aacuuugcgcuuaaguuuc

SEQ ID NO: 1133584 - RNA, 19 nt, Artificial Sequence
  Description of Artificial Sequence: Synthetic oligonucleotide
  Sense strand starting at position 631 of SEQ ID NO: 916140
agcgcaaaguuauuaauuu

SEQ ID NO: 1133585 - RNA, 19 nt, Artificial Sequence
  Description of Artificial Sequence: Synthetic oligonucleotide
  Antisense strand to SEQ ID NO: 1133584
aaauuaauaacuuugcgcu

SEQ ID NO: 1133586 - RNA, 19 nt, Artificial Sequence
  Description of Artificial Sequence: Synthetic oligonucleotide
  Sense strand starting at position 640 of SEQ ID NO: 916140
uuauuaauuuguccgaagu

SEQ ID NO: 1133587 - RNA, 19 nt, Artificial Sequence
  Description of Artificial Sequence: Synthetic oligonucleotide
  Antisense strand to SEQ ID NO: 1133586
acuucggacaaauuaauaa

SEQ ID NO: 1133588 - RNA, 19 nt, Artificial Sequence
  Description of Artificial Sequence: Synthetic oligonucleotide
  Sense strand starting at position 641 of SEQ ID NO: 916140
uauuaauuuguccgaaguc

SEQ ID NO: 1133589 - RNA, 19 nt, Artificial Sequence
  Description of Artificial Sequence: Synthetic oligonucleotide
  Antisense strand to SEQ ID NO: 1133588
gacuucggacaaauuaaua

SEQ ID NO: 1133590 - RNA, 19 nt, Artificial Sequence
  Description of Artificial Sequence: Synthetic oligonucleotide
  Sense strand starting at position 653 of SEQ ID NO: 916140
cgaagucacacagguaaga

SEQ ID NO: 1133591 - RNA, 19 nt, Artificial Sequence
  Description of Artificial Sequence: Synthetic oligonucleotide
  Antisense strand to SEQ ID NO: 1133590
ucuuaccugugugacuucg

SEQ ID NO: 1133592 - RNA, 19 nt, Artificial Sequence
  Description of Artificial Sequence: Synthetic oligonucleotide
  Sense strand starting at position 673 of SEQ ID NO: 916140
guuaaagauccuggauaca

SEQ ID NO: 1133593 - RNA, 19 nt, Artificial Sequence
  Description of Artificial Sequence: Synthetic oligonucleotide
  Antisense strand to SEQ ID NO: 1133592
uguauccaggaucuuuaac

SEQ ID NO: 1133594 - RNA, 19 nt, Artificial Sequence
  Description of Artificial Sequence: Synthetic oligonucleotide
  Sense strand starting at position 1160 of SEQ ID NO: 916140
gaacuaagguuucuugcca

SEQ ID NO: 1133595 - RNA, 19 nt, Artificial Sequence
  Description of Artificial Sequence: Synthetic oligonucleotide
  Antisense strand to SEQ ID NO: 1133594
uggcaagaaaccuuaguuc

SEQ ID NO: 1133596 - RNA, 19 nt, Artificial Sequence
  Description of Artificial Sequence: Synthetic oligonucleotide
  Sense strand starting at position 1529 of SEQ ID NO: 916140
acuccuuccgcauacaaga

SEQ ID NO: 1133597 - RNA, 19 nt, Artificial Sequence
  Description of Artificial Sequence: Synthetic oligonucleotide
  Antisense strand to SEQ ID NO: 1133596
ucuuguaugcggaaggagu

SEQ ID NO: 1133598 - RNA, 19 nt, Artificial Sequence
  Description of Artificial Sequence: Synthetic oligonucleotide
  Sense strand starting at position 2014 of SEQ ID NO: 916140
uaaguagcucccggaaaua

SEQ ID NO: 1133599 - RNA, 19 nt, Artificial Sequence
  Description of Artificial Sequence: Synthetic oligonucleotide
  Antisense strand to SEQ ID NO: 1133598
uauuuccgggagcuacuua

SEQ ID NO: 1133600 - RNA, 19 nt, Artificial Sequence
  Description of Artificial Sequence: Synthetic oligonucleotide
  Sense strand starting at position 2166 of SEQ ID NO: 916140
ucugaaaugucagcaggga

SEQ ID NO: 1133601 - RNA, 19 nt, Artificial Sequence
  Description of Artificial Sequence: Synthetic oligonucleotide
  Antisense strand to SEQ ID NO: 1133600
ucccugcugacauuucaga

SEQ ID NO: 1133602 - RNA, 19 nt, Artificial Sequence
  Description of Artificial Sequence: Synthetic oligonucleotide
  Sense strand starting at position 2186 of SEQ ID NO: 916140
cccauauccuuguuaggga

SEQ ID NO: 1133603 - RNA, 19 nt, Artificial Sequence
  Description of Artificial Sequence: Synthetic oligonucleotide
  Antisense strand to SEQ ID NO: 1133602
ucccuaacaaggauauggg

SEQ ID NO: 1133604 - RNA, 19 nt, Artificial Sequence
  Description of Artificial Sequence: Synthetic oligonucleotide
  Sense strand starting at position 2330 of SEQ ID NO: 916140
aagcucgggcaauaauuaa

SEQ ID NO: 1133605 - RNA, 19 nt, Artificial Sequence
  Description of Artificial Sequence: Synthetic oligonucleotide
  Antisense strand to SEQ ID NO: 1133604
uuaauuauugcccgagcuu

SEQ ID NO: 1133606 - RNA, 19 nt, Artificial Sequence
  Description of Artificial Sequence: Synthetic oligonucleotide
  Sense strand starting at position 2469 of SEQ ID NO: 916140
cagccugauuucucuguga

SEQ ID NO: 1133607 - RNA, 19 nt, Artificial Sequence
  Description of Artificial Sequence: Synthetic oligonucleotide
  Antisense strand to SEQ ID NO: 1133606
ucacagagaaaucaggcug

SEQ ID NO: 1133608 - RNA, 19 nt, Artificial Sequence
  Description of Artificial Sequence: Synthetic oligonucleotide
  Sense strand starting at position 2471 of SEQ ID NO: 916140
gccugauuucucugugacc

SEQ ID NO: 1133609 - RNA, 19 nt, Artificial Sequence
  Description of Artificial Sequence: Synthetic oligonucleotide
  Antisense strand to SEQ ID NO: 1133608
ggucacagagaaaucaggc

SEQ ID NO: 1133610 - RNA, 19 nt, Artificial Sequence
  Description of Artificial Sequence: Synthetic oligonucleotide
  Sense strand starting at position 2480 of SEQ ID NO: 916140
cucugugaccaagagguua

SEQ ID NO: 1133611 - RNA, 19 nt, Artificial Sequence
  Description of Artificial Sequence: Synthetic oligonucleotide
  Antisense strand to SEQ ID NO: 1133610
uaaccucuuggucacagag

SEQ ID NO: 1133612 - RNA, 19 nt, Artificial Sequence
  Description of Artificial Sequence: Synthetic oligonucleotide
  Sense strand starting at position 2482 of SEQ ID NO: 916140
cugugaccaagagguuaaa

SEQ ID NO: 1133613 - RNA, 19 nt, Artificial Sequence
  Description of Artificial Sequence: Synthetic oligonucleotide
  Antisense strand to SEQ ID NO: 1133612
uuuaaccucuuggucacag

SEQ ID NO: 1133614 - RNA, 19 nt, Artificial Sequence
  Description of Artificial Sequence: Synthetic oligonucleotide
  Sense strand starting at position 2528 of SEQ ID NO: 916140
auaguuaacuuaucuguac

SEQ ID NO: 1133615 - RNA, 19 nt, Artificial Sequence
  Description of Artificial Sequence: Synthetic oligonucleotide
  Antisense strand to SEQ ID NO: 1133614
guacagauaaguuaacuau

SEQ ID NO: 1133616 - RNA, 19 nt, Artificial Sequence
  Description of Artificial Sequence: Synthetic oligonucleotide
  Sense strand starting at position 2577 of SEQ ID NO: 916140
caguacaguuaguuaugau

SEQ ID NO: 1133617 - RNA, 19 nt, Artificial Sequence
  Description of Artificial Sequence: Synthetic oligonucleotide
  Antisense strand to SEQ ID NO: 1133616
aucauaacuaacuguacug

SEQ ID NO: 1133618 - RNA, 19 nt, Artificial Sequence
  Description of Artificial Sequence: Synthetic oligonucleotide
  Sense strand starting at position 2578 of SEQ ID NO: 916140
aguacaguuaguuaugauu

SEQ ID NO: 1133619 - RNA, 19 nt, Artificial Sequence
  Description of Artificial Sequence: Synthetic oligonucleotide
  Antisense strand to SEQ ID NO: 1133618
aaucauaacuaacuguacu

SEQ ID NO: 1133620 - RNA, 19 nt, Artificial Sequence
  Description of Artificial Sequence: Synthetic oligonucleotide
  Sense strand starting at position 2603 of SEQ ID NO: 916140
ccaugagccaguuauugug

SEQ ID NO: 1133621 - RNA, 19 nt, Artificial Sequence
  Description of Artificial Sequence: Synthetic oligonucleotide
  Antisense strand to SEQ ID NO: 1133620
cacaauaacuggcucaugg

SEQ ID NO: 1133622 - RNA, 19 nt, Artificial Sequence
  Description of Artificial Sequence: Synthetic oligonucleotide
  Sense strand starting at position 2661 of SEQ ID NO: 916140
auuugagucucugaacaau

SEQ ID NO: 1133623 - RNA, 19 nt, Artificial Sequence
  Description of Artificial Sequence: Synthetic oligonucleotide
  Antisense strand to SEQ ID NO: 1133622
auuguucagagacucaaau

SEQ ID NO: 1133624 - RNA, 19 nt, Artificial Sequence
  Description of Artificial Sequence: Synthetic oligonucleotide
  Sense strand starting at position 2760 of SEQ ID NO: 916140
gaaauacagugagcucaaa

SEQ ID NO: 1133625 - RNA, 19 nt, Artificial Sequence
  Description of Artificial Sequence: Synthetic oligonucleotide
  Antisense strand to SEQ ID NO: 1133624
uuugagcucacuguauuuc

SEQ ID NO: 1133626 - RNA, 19 nt, Artificial Sequence
  Description of Artificial Sequence: Synthetic oligonucleotide
  Sense strand starting at position 2828 of SEQ ID NO: 916140
uuggcaguucuggaaauaa

SEQ ID NO: 1133627 - RNA, 19 nt, Artificial Sequence
  Description of Artificial Sequence: Synthetic oligonucleotide
  Antisense strand to SEQ ID NO: 1133626
uuauuuccagaacugccaa

SEQ ID NO: 1133628 - RNA, 19 nt, Artificial Sequence
  Description of Artificial Sequence: Synthetic oligonucleotide
  Sense strand starting at position 2838 of SEQ ID NO: 916140
uggaaauaauagucugucu

SEQ ID NO: 1133629 - RNA, 19 nt, Artificial Sequence
  Description of Artificial Sequence: Synthetic oligonucleotide
  Antisense strand to SEQ ID NO: 1133628
agacagacuauuauuucca

SEQ ID NO: 1133630 - RNA, 19 nt, Artificial Sequence
  Description of Artificial Sequence: Synthetic oligonucleotide
  Sense strand starting at position 2843 of SEQ ID NO: 916140
auaauagucugucuacuua

SEQ ID NO: 1133631 - RNA, 19 nt, Artificial Sequence
  Description of Artificial Sequence: Synthetic oligonucleotide
  Antisense strand to SEQ ID NO: 1133630
uaaguagacagacuauuau

SEQ ID NO: 1133632 - RNA, 19 nt, Artificial Sequence
  Description of Artificial Sequence: Synthetic oligonucleotide
  Sense strand starting at position 3036 of SEQ ID NO: 916140
uguauacuccucuacauug

SEQ ID NO: 1133633 - RNA, 19 nt, Artificial Sequence
  Description of Artificial Sequence: Synthetic oligonucleotide
  Antisense strand to SEQ ID NO: 1133632
caauguagaggaguauaca

SEQ ID NO: 1133634 - RNA, 19 nt, Artificial Sequence
  Description of Artificial Sequence: Synthetic oligonucleotide
  Sense strand starting at position 3104 of SEQ ID NO: 916140
uguagaucuuacucauaca

SEQ ID NO: 1133635 - RNA, 19 nt, Artificial Sequence
  Description of Artificial Sequence: Synthetic oligonucleotide
  Antisense strand to SEQ ID NO: 1133634
uguaugaguaagaucuaca

SEQ ID NO: 1133636 - RNA, 19 nt, Artificial Sequence
  Description of Artificial Sequence: Synthetic oligonucleotide
  Sense strand starting at position 3226 of SEQ ID NO: 916140
ugguuaaacguauacaauu

SEQ ID NO: 1133637 - RNA, 19 nt, Artificial Sequence
  Description of Artificial Sequence: Synthetic oligonucleotide
  Antisense strand to SEQ ID NO: 1133636
aauuguauacguuuaacca

SEQ ID NO: 1133638 - RNA, 19 nt, Artificial Sequence
  Description of Artificial Sequence: Synthetic oligonucleotide
  Sense strand starting at position 3265 of SEQ ID NO: 916140
aggccauugugaccacaau

SEQ ID NO: 1133639 - RNA, 19 nt, Artificial Sequence
  Description of Artificial Sequence: Synthetic oligonucleotide
  Antisense strand to SEQ ID NO: 1133638
auuguggucacaauggccu

SEQ ID NO: 1133640 - RNA, 19 nt, Artificial Sequence
  Description of Artificial Sequence: Synthetic oligonucleotide
  Sense strand starting at position 3271 of SEQ ID NO: 916140
uugugaccacaaugaauca

SEQ ID NO: 1133641 - RNA, 19 nt, Artificial Sequence
  Description of Artificial Sequence: Synthetic oligonucleotide
  Antisense strand to SEQ ID NO: 1133640
ugauucauuguggucacaa

SEQ ID NO: 1133642 - RNA, 19 nt, Artificial Sequence
  Description of Artificial Sequence: Synthetic oligonucleotide
  Sense strand starting at position 3876 of SEQ ID NO: 916140
ggaccuguugaauguauua

SEQ ID NO: 1133643 - RNA, 19 nt, Artificial Sequence
  Description of Artificial Sequence: Synthetic oligonucleotide
  Antisense strand to SEQ ID NO: 1133642
uaauacauucaacaggucc

SEQ ID NO: 1133644 - RNA, 19 nt, Artificial Sequence
  Description of Artificial Sequence: Synthetic oligonucleotide
  Sense strand starting at position 88 of SEQ ID NO: 916141
aagccuguguuaguauuua

SEQ ID NO: 1133645 - RNA, 19 nt, Artificial Sequence
  Description of Artificial Sequence: Synthetic oligonucleotide
  Antisense strand to SEQ ID NO: 1133644
uaaauacuaacacaggcuu

SEQ ID NO: 1133646 - RNA, 19 nt, Artificial Sequence
  Description of Artificial Sequence: Synthetic oligonucleotide
  Sense strand starting at position 92 of SEQ ID NO: 916141
cuguguuaguauuuaaagu

SEQ ID NO: 1133647 - RNA, 19 nt, Artificial Sequence
  Description of Artificial Sequence: Synthetic oligonucleotide
  Antisense strand to SEQ ID NO: 1133646
acuuuaaauacuaacacag

SEQ ID NO: 1133648 - RNA, 19 nt, Artificial Sequence
  Description of Artificial Sequence: Synthetic oligonucleotide
  Sense strand starting at position 153 of SEQ ID NO: 916141
cuuuaagucgaccauuacu

SEQ ID NO: 1133649 - RNA, 19 nt, Artificial Sequence
  Description of Artificial Sequence: Synthetic oligonucleotide
  Antisense strand to SEQ ID NO: 1133648
aguaauggucgacuuaaag

SEQ ID NO: 1133650 - RNA, 19 nt, Artificial Sequence
  Description of Artificial Sequence: Synthetic oligonucleotide
  Sense strand starting at position 174 of SEQ ID NO: 916141
ggaaauagcuaugucucca

SEQ ID NO: 1133651 - RNA, 19 nt, Artificial Sequence
  Description of Artificial Sequence: Synthetic oligonucleotide
  Antisense strand to SEQ ID NO: 1133650
uggagacauagcuauuucc

SEQ ID NO: 1133652 - RNA, 19 nt, Artificial Sequence
  Description of Artificial Sequence: Synthetic oligonucleotide
  Sense strand starting at position 178 of SEQ ID NO: 916141
auagcuaugucuccagaau

SEQ ID NO: 1133653 - RNA, 19 nt, Artificial Sequence
  Description of Artificial Sequence: Synthetic oligonucleotide
  Antisense strand to SEQ ID NO: 1133652
auucuggagacauagcuau

SEQ ID NO: 1133654 - RNA, 19 nt, Artificial Sequence
  Description of Artificial Sequence: Synthetic oligonucleotide
  Sense strand starting at position 472 of SEQ ID NO: 916141
gagggugucauugcguagu

SEQ ID NO: 1133655 - RNA, 19 nt, Artificial Sequence
  Description of Artificial Sequence: Synthetic oligonucleotide
  Antisense strand to SEQ ID NO: 1133654
acuacgcaaugacacccuc

SEQ ID NO: 1133656 - RNA, 19 nt, Artificial Sequence
  Description of Artificial Sequence: Synthetic oligonucleotide
  Sense strand starting at position 476 of SEQ ID NO: 916141
gugucauugcguaguauag

SEQ ID NO: 1133657 - RNA, 19 nt, Artificial Sequence
  Description of Artificial Sequence: Synthetic oligonucleotide
  Antisense strand to SEQ ID NO: 1133656
cuauacuacgcaaugacac

SEQ ID NO: 1133658 - RNA, 19 nt, Artificial Sequence
  Description of Artificial Sequence: Synthetic oligonucleotide
  Sense strand starting at position 553 of SEQ ID NO: 916141
agagaugcccaguaauauu

SEQ ID NO: 1133659 - RNA, 19 nt, Artificial Sequence
  Description of Artificial Sequence: Synthetic oligonucleotide
  Antisense strand to SEQ ID NO: 1133658
aauauuacugggcaucucu

SEQ ID NO: 1133660 - RNA, 19 nt, Artificial Sequence
  Description of Artificial Sequence: Synthetic oligonucleotide
  Sense strand starting at position 572 of SEQ ID NO: 916141
ugccauucuuccucaggaa

SEQ ID NO: 1133661 - RNA, 19 nt, Artificial Sequence
  Description of Artificial Sequence: Synthetic oligonucleotide
  Antisense strand to SEQ ID NO: 1133660
uuccugaggaagaauggca

SEQ ID NO: 1133662 - RNA, 19 nt, Artificial Sequence
  Description of Artificial Sequence: Synthetic oligonucleotide
  Sense strand starting at position 573 of SEQ ID NO: 916141
gccauucuuccucaggaag

SEQ ID NO: 1133663 - RNA, 19 nt, Artificial Sequence
  Description of Artificial Sequence: Synthetic oligonucleotide
  Antisense strand to SEQ ID NO: 1133662
cuuccugaggaagaauggc

SEQ ID NO: 1133664 - RNA, 19 nt, Artificial Sequence
  Description of Artificial Sequence: Synthetic oligonucleotide
  Sense strand starting at position 598 of SEQ ID NO: 916141
uucuccuaucaaggugaaa

SEQ ID NO: 1133665 - RNA, 19 nt, Artificial Sequence
  Description of Artificial Sequence: Synthetic oligonucleotide
  Antisense strand to SEQ ID NO: 1133664
uuucaccuugauaggagaa

SEQ ID NO: 1133666 - RNA, 19 nt, Artificial Sequence
  Description of Artificial Sequence: Synthetic oligonucleotide
  Sense strand starting at position 787 of SEQ ID NO: 916141
ucaccaucccuccgaauga

SEQ ID NO: 1133667 - RNA, 19 nt, Artificial Sequence
  Description of Artificial Sequence: Synthetic oligonucleotide
  Antisense strand to SEQ ID NO: 1133666
ucauucggagggaugguga

SEQ ID NO: 1133668 - RNA, 19 nt, Artificial Sequence
  Description of Artificial Sequence: Synthetic oligonucleotide
  Sense strand starting at position 1358 of SEQ ID NO: 916141
gcggcagcucugcuucuau

SEQ ID NO: 1133669 - RNA, 19 nt, Artificial Sequence
  Description of Artificial Sequence: Synthetic oligonucleotide
  Antisense strand to SEQ ID NO: 1133668
auagaagcagagcugccgc

SEQ ID NO: 1133670 - RNA, 19 nt, Artificial Sequence
  Description of Artificial Sequence: Synthetic oligonucleotide
  Sense strand starting at position 1743 of SEQ ID NO: 916141
uccuuaauucuagggugga

SEQ ID NO: 1133671 - RNA, 19 nt, Artificial Sequence
  Description of Artificial Sequence: Synthetic oligonucleotide
  Antisense strand to SEQ ID NO: 1133670
uccacccuagaauuaagga

SEQ ID NO: 1133672 - RNA, 19 nt, Artificial Sequence
  Description of Artificial Sequence: Synthetic oligonucleotide
  Sense strand starting at position 1746 of SEQ ID NO: 916141
uuaauucuaggguggaguu

SEQ ID NO: 1133673 - RNA, 19 nt, Artificial Sequence
  Description of Artificial Sequence: Synthetic oligonucleotide
  Antisense strand to SEQ ID NO: 1133672
aacuccacccuagaauuaa

SEQ ID NO: 1133674 - RNA, 19 nt, Artificial Sequence
  Description of Artificial Sequence: Synthetic oligonucleotide
  Sense strand starting at position 2153 of SEQ ID NO: 916141
cucugacuagaaggguaua

SEQ ID NO: 1133675 - RNA, 19 nt, Artificial Sequence
  Description of Artificial Sequence: Synthetic oligonucleotide
  Antisense strand to SEQ ID NO: 1133674
uauacccuucuagucagag

SEQ ID NO: 1133676 - RNA, 19 nt, Artificial Sequence
  Description of Artificial Sequence: Synthetic oligonucleotide
  Sense strand starting at position 2154 of SEQ ID NO: 916141
ucugacuagaaggguauau

SEQ ID NO: 1133677 - RNA, 19 nt, Artificial Sequence
  Description of Artificial Sequence: Synthetic oligonucleotide
  Antisense strand to SEQ ID NO: 1133676
auauacccuucuagucaga

SEQ ID NO: 1133678 - RNA, 19 nt, Artificial Sequence
  Description of Artificial Sequence: Synthetic oligonucleotide
  Sense strand starting at position 2278 of SEQ ID NO: 916141
gggauaucuaagcaguucu

SEQ ID NO: 1133679 - RNA, 19 nt, Artificial Sequence
  Description of Artificial Sequence: Synthetic oligonucleotide
  Antisense strand to SEQ ID NO: 1133678
agaacugcuuagauauccc

SEQ ID NO: 1133680 - RNA, 19 nt, Artificial Sequence
  Description of Artificial Sequence: Synthetic oligonucleotide
  Sense strand starting at position 2343 of SEQ ID NO: 916141
ccagaaauauagcugcuga

SEQ ID NO: 1133681 - RNA, 19 nt, Artificial Sequence
  Description of Artificial Sequence: Synthetic oligonucleotide
  Antisense strand to SEQ ID NO: 1133680
ucagcagcuauauuucugg

SEQ ID NO: 1133682 - RNA, 19 nt, Artificial Sequence
  Description of Artificial Sequence: Synthetic oligonucleotide
  Sense strand starting at position 2348 of SEQ ID NO: 916141
aauauagcugcugaguaau

SEQ ID NO: 1133683 - RNA, 19 nt, Artificial Sequence
  Description of Artificial Sequence: Synthetic oligonucleotide
  Antisense strand to SEQ ID NO: 1133682
auuacucagcagcuauauu

SEQ ID NO: 1133684 - RNA, 19 nt, Artificial Sequence
  Description of Artificial Sequence: Synthetic oligonucleotide
  Sense strand starting at position 2361 of SEQ ID NO: 916141
aguaauaggguuugggagu

SEQ ID NO: 1133685 - RNA, 19 nt, Artificial Sequence
  Description of Artificial Sequence: Synthetic oligonucleotide
  Antisense strand to SEQ ID NO: 1133684
acucccaaacccuauuacu

SEQ ID NO: 1133686 - RNA, 19 nt, Artificial Sequence
  Description of Artificial Sequence: Synthetic oligonucleotide
  Sense strand starting at position 2367 of SEQ ID NO: 916141
aggguuugggaguauuguu

SEQ ID NO: 1133687 - RNA, 19 nt, Artificial Sequence
  Description of Artificial Sequence: Synthetic oligonucleotide
  Antisense strand to SEQ ID NO: 1133686
aacaauacucccaaacccu

SEQ ID NO: 1133688 - RNA, 19 nt, Artificial Sequence
  Description of Artificial Sequence: Synthetic oligonucleotide
  Sense strand starting at position 2824 of SEQ ID NO: 916141
ccauccugucuuuacagua

SEQ ID NO: 1133689 - RNA, 19 nt, Artificial Sequence
  Description of Artificial Sequence: Synthetic oligonucleotide
  Antisense strand to SEQ ID NO: 1133688
uacuguaaagacaggaugg

SEQ ID NO: 1133690 - RNA, 19 nt, Artificial Sequence
  Description of Artificial Sequence: Synthetic oligonucleotide
  Sense strand starting at position 2881 of SEQ ID NO: 916141
cuaugaccuccuuagucau

SEQ ID NO: 1133691 - RNA, 19 nt, Artificial Sequence
  Description of Artificial Sequence: Synthetic oligonucleotide
  Antisense strand to SEQ ID NO: 1133690
augacuaaggaggucauag

SEQ ID NO: 1133692 - RNA, 19 nt, Artificial Sequence
  Description of Artificial Sequence: Synthetic oligonucleotide
  Sense strand starting at position 2990 of SEQ ID NO: 916141
auaucaaugaguggugcaa

SEQ ID NO: 1133693 - RNA, 19 nt, Artificial Sequence
  Description of Artificial Sequence: Synthetic oligonucleotide
  Antisense strand to SEQ ID NO: 1133692
uugcaccacucauugauau

SEQ ID NO: 1133694 - RNA, 19 nt, Artificial Sequence
  Description of Artificial Sequence: Synthetic oligonucleotide
  Sense strand starting at position 3114 of SEQ ID NO: 916141
uuuagaaaucuuggaacga

SEQ ID NO: 1133695 - RNA, 19 nt, Artificial Sequence
  Description of Artificial Sequence: Synthetic oligonucleotide
  Antisense strand to SEQ ID NO: 1133694
ucguuccaagauuucuaaa

SEQ ID NO: 1133696 - RNA, 19 nt, Artificial Sequence
  Description of Artificial Sequence: Synthetic oligonucleotide
  Sense strand starting at position 3118 of SEQ ID NO: 916141
gaaaucuuggaacgauauu

SEQ ID NO: 1133697 - RNA, 19 nt, Artificial Sequence
  Description of Artificial Sequence: Synthetic oligonucleotide
  Antisense strand to SEQ ID NO: 1133696
aauaucguuccaagauuuc

SEQ ID NO: 1133698 - RNA, 19 nt, Artificial Sequence
  Description of Artificial Sequence: Synthetic oligonucleotide
  Sense strand starting at position 3162 of SEQ ID NO: 916141
ugcaaagaaugcucaaagu

SEQ ID NO: 1133699 - RNA, 19 nt, Artificial Sequence
  Description of Artificial Sequence: Synthetic oligonucleotide
  Antisense strand to SEQ ID NO: 1133698
acuuugagcauucuuugca

SEQ ID NO: 1133700 - RNA, 19 nt, Artificial Sequence
  Description of Artificial Sequence: Synthetic oligonucleotide
  Sense strand starting at position 3213 of SEQ ID NO: 916141
cucuaucgucuuuagauau

SEQ ID NO: 1133701 - RNA, 19 nt, Artificial Sequence
  Description of Artificial Sequence: Synthetic oligonucleotide
  Antisense strand to SEQ ID NO: 1133700
auaucuaaagacgauagag

SEQ ID NO: 1133702 - RNA, 19 nt, Artificial Sequence
  Description of Artificial Sequence: Synthetic oligonucleotide
  Sense strand starting at position 3296 of SEQ ID NO: 916141
auguuaucucucgaauaag

SEQ ID NO: 1133703 - RNA, 19 nt, Artificial Sequence
  Description of Artificial Sequence: Synthetic oligonucleotide
  Antisense strand to SEQ ID NO: 1133702
cuuauucgagagauaacau

SEQ ID NO: 1133704 - RNA, 19 nt, Artificial Sequence
  Description of Artificial Sequence: Synthetic oligonucleotide
  Sense strand starting at position 3328 of SEQ ID NO: 916141
ucagucuuacucuagacuu

SEQ ID NO: 1133705 - RNA, 19 nt, Artificial Sequence
  Description of Artificial Sequence: Synthetic oligonucleotide
  Antisense strand to SEQ ID NO: 1133704
aagucuagaguaagacuga

SEQ ID NO: 1133706 - RNA, 19 nt, Artificial Sequence
  Description of Artificial Sequence: Synthetic oligonucleotide
  Sense strand starting at position 3330 of SEQ ID NO: 916141
agucuuacucuagacuucu

SEQ ID NO: 1133707 - RNA, 19 nt, Artificial Sequence
  Description of Artificial Sequence: Synthetic oligonucleotide
  Antisense strand to SEQ ID NO: 1133706
agaagucuagaguaagacu

SEQ ID NO: 1133708 - RNA, 19 nt, Artificial Sequence
  Description of Artificial Sequence: Synthetic oligonucleotide
  Sense strand starting at position 3349 of SEQ ID NO: 916141
uugugucuucuuuaggauc

SEQ ID NO: 1133709 - RNA, 19 nt, Artificial Sequence
  Description of Artificial Sequence: Synthetic oligonucleotide
  Antisense strand to SEQ ID NO: 1133708
gauccuaaagaagacacaa

SEQ ID NO: 1133710 - RNA, 19 nt, Artificial Sequence
  Description of Artificial Sequence: Synthetic oligonucleotide
  Sense strand starting at position 3363 of SEQ ID NO: 916141
ggaucugugcuccaucaua

SEQ ID NO: 1133711 - RNA, 19 nt, Artificial Sequence
  Description of Artificial Sequence: Synthetic oligonucleotide
  Antisense strand to SEQ ID NO: 1133710
uaugauggagcacagaucc

SEQ ID NO: 1133712 - RNA, 19 nt, Artificial Sequence
  Description of Artificial Sequence: Synthetic oligonucleotide
  Sense strand starting at position 3435 of SEQ ID NO: 916141
cuaagaaggaggcguuuaa

SEQ ID NO: 1133713 - RNA, 19 nt, Artificial Sequence
  Description of Artificial Sequence: Synthetic oligonucleotide
  Antisense strand to SEQ ID NO: 1133712
uuaaacgccuccuucuuag

SEQ ID NO: 1133714 - RNA, 19 nt, Artificial Sequence
  Description of Artificial Sequence: Synthetic oligonucleotide
  Sense strand starting at position 3467 of SEQ ID NO: 916141
aggugcucauuucuuuaau

SEQ ID NO: 1133715 - RNA, 19 nt, Artificial Sequence
  Description of Artificial Sequence: Synthetic oligonucleotide
  Antisense strand to SEQ ID NO: 1133714
auuaaagaaaugagcaccu

SEQ ID NO: 1133716 - RNA, 19 nt, Artificial Sequence
  Description of Artificial Sequence: Synthetic oligonucleotide
  Sense strand starting at position 3468 of SEQ ID NO: 916141
ggugcucauuucuuuaauc

SEQ ID NO: 1133717 - RNA, 19 nt, Artificial Sequence
  Description of Artificial Sequence: Synthetic oligonucleotide
  Antisense strand to SEQ ID NO: 1133716
gauuaaagaaaugagcacc

SEQ ID NO: 1133718 - RNA, 19 nt, Artificial Sequence
  Description of Artificial Sequence: Synthetic oligonucleotide
  Sense strand starting at position 3634 of SEQ ID NO: 916141
gucuacuaagcagacaauu

SEQ ID NO: 1133719 - RNA, 19 nt, Artificial Sequence
  Description of Artificial Sequence: Synthetic oligonucleotide
  Antisense strand to SEQ ID NO: 1133718
aauugucugcuuaguagac

SEQ ID NO: 1133720 - RNA, 19 nt, Artificial Sequence
  Description of Artificial Sequence: Synthetic oligonucleotide
  Sense strand starting at position 3803 of SEQ ID NO: 916141
ugagguaguucagucaaga

SEQ ID NO: 1133721 - RNA, 19 nt, Artificial Sequence
  Description of Artificial Sequence: Synthetic oligonucleotide
  Antisense strand to SEQ ID NO: 1133720
ucuugacugaacuaccuca

SEQ ID NO: 1133722 - RNA, 19 nt, Artificial Sequence
  Description of Artificial Sequence: Synthetic oligonucleotide
  Sense strand starting at position 3915 of SEQ ID NO: 916141
ugaaguacaaucggugaaa

SEQ ID NO: 1133723 - RNA, 19 nt, Artificial Sequence
  Description of Artificial Sequence: Synthetic oligonucleotide
  Antisense strand to SEQ ID NO: 1133722
uuucaccgauuguacuuca

SEQ ID NO: 1133724 - RNA, 19 nt, Artificial Sequence
  Description of Artificial Sequence: Synthetic oligonucleotide
  Sense strand starting at position 51 of SEQ ID NO: 916142
acagaaaucagucgcaaug

SEQ ID NO: 1133725 - RNA, 19 nt, Artificial Sequence
  Description of Artificial Sequence: Synthetic oligonucleotide
  Antisense strand to SEQ ID NO: 1133724
cauugcgacugauuucugu

SEQ ID NO: 1133726 - RNA, 19 nt, Artificial Sequence
  Description of Artificial Sequence: Synthetic oligonucleotide
  Sense strand starting at position 86 of SEQ ID NO: 916142
ugauauaugcaauguacuu

SEQ ID NO: 1133727 - RNA, 19 nt, Artificial Sequence
  Description of Artificial Sequence: Synthetic oligonucleotide
  Antisense strand to SEQ ID NO: 1133726
aaguacauugcauauauca

SEQ ID NO: 1133728 - RNA, 19 nt, Artificial Sequence
  Description of Artificial Sequence: Synthetic oligonucleotide
  Sense strand starting at position 179 of SEQ ID NO: 916142
gagaaacauuucuggagau

SEQ ID NO: 1133729 - RNA, 19 nt, Artificial Sequence
  Description of Artificial Sequence: Synthetic oligonucleotide
  Antisense strand to SEQ ID NO: 1133728
aucuccagaaauguuucuc

SEQ ID NO: 1133730 - RNA, 19 nt, Artificial Sequence
  Description of Artificial Sequence: Synthetic oligonucleotide
  Sense strand starting at position 180 of SEQ ID NO: 916142
agaaacauuucuggagauu

SEQ ID NO: 1133731 - RNA, 19 nt, Artificial Sequence
  Description of Artificial Sequence: Synthetic oligonucleotide
  Antisense strand to SEQ ID NO: 1133730
aaucuccagaaauguuucu

SEQ ID NO: 1133732 - RNA, 19 nt, Artificial Sequence
  Description of Artificial Sequence: Synthetic oligonucleotide
  Sense strand starting at position 288 of SEQ ID NO: 916142
auuaauauaucugucaggu

SEQ ID NO: 1133733 - RNA, 19 nt, Artificial Sequence
  Description of Artificial Sequence: Synthetic oligonucleotide
  Antisense strand to SEQ ID NO: 1133732
accugacagauauauuaau

SEQ ID NO: 1133734 - RNA, 19 nt, Artificial Sequence
  Description of Artificial Sequence: Synthetic oligonucleotide
  Sense strand starting at position 296 of SEQ ID NO: 916142
aucugucaggugcaaacau

SEQ ID NO: 1133735 - RNA, 19 nt, Artificial Sequence
  Description of Artificial Sequence: Synthetic oligonucleotide
  Antisense strand to SEQ ID NO: 1133734
auguuugcaccugacagau

SEQ ID NO: 1133736 - RNA, 19 nt, Artificial Sequence
  Description of Artificial Sequence: Synthetic oligonucleotide
  Sense strand starting at position 304 of SEQ ID NO: 916142
ggugcaaacauguaguauc

SEQ ID NO: 1133737 - RNA, 19 nt, Artificial Sequence
  Description of Artificial Sequence: Synthetic oligonucleotide
  Antisense strand to SEQ ID NO: 1133736
gauacuacauguuugcacc

SEQ ID NO: 1133738 - RNA, 19 nt, Artificial Sequence
  Description of Artificial Sequence: Synthetic oligonucleotide
  Sense strand starting at position 445 of SEQ ID NO: 916142
ucuugacuucucugacuga

SEQ ID NO: 1133739 - RNA, 19 nt, Artificial Sequence
  Description of Artificial Sequence: Synthetic oligonucleotide
  Antisense strand to SEQ ID NO: 1133738
ucagucagagaagucaaga

SEQ ID NO: 1133740 - RNA, 19 nt, Artificial Sequence
  Description of Artificial Sequence: Synthetic oligonucleotide
  Sense strand starting at position 448 of SEQ ID NO: 916142
ugacuucucugacugaaag

SEQ ID NO: 1133741 - RNA, 19 nt, Artificial Sequence
  Description of Artificial Sequence: Synthetic oligonucleotide
  Antisense strand to SEQ ID NO: 1133740
cuuucagucagagaaguca

SEQ ID NO: 1133742 - RNA, 19 nt, Artificial Sequence
  Description of Artificial Sequence: Synthetic oligonucleotide
  Sense strand starting at position 449 of SEQ ID NO: 916142
gacuucucugacugaaagu

SEQ ID NO: 1133743 - RNA, 19 nt, Artificial Sequence
  Description of Artificial Sequence: Synthetic oligonucleotide
  Antisense strand to SEQ ID NO: 1133742
acuuucagucagagaaguc

SEQ ID NO: 1133744 - RNA, 19 nt, Artificial Sequence
  Description of Artificial Sequence: Synthetic oligonucleotide
  Sense strand starting at position 469 of SEQ ID NO: 916142
uagcuaucccuggagcuga

SEQ ID NO: 1133745 - RNA, 19 nt, Artificial Sequence
  Description of Artificial Sequence: Synthetic oligonucleotide
  Antisense strand to SEQ ID NO: 1133744
ucagcuccagggauagcua

SEQ ID NO: 1133746 - RNA, 19 nt, Artificial Sequence
  Description of Artificial Sequence: Synthetic oligonucleotide
  Sense strand starting at position 763 of SEQ ID NO: 916142
gucaccaacccucguauuu

SEQ ID NO: 1133747 - RNA, 19 nt, Artificial Sequence
  Description of Artificial Sequence: Synthetic oligonucleotide
  Antisense strand to SEQ ID NO: 1133746
aaauacgaggguuggugac

SEQ ID NO: 1133748 - RNA, 19 nt, Artificial Sequence
  Description of Artificial Sequence: Synthetic oligonucleotide
  Sense strand starting at position 954 of SEQ ID NO: 916142
aagccuguguuaguauuua

SEQ ID NO: 1133749 - RNA, 19 nt, Artificial Sequence
  Description of Artificial Sequence: Synthetic oligonucleotide
  Antisense strand to SEQ ID NO: 1133748
uaaauacuaacacaggcuu

SEQ ID NO: 1133750 - RNA, 19 nt, Artificial Sequence
  Description of Artificial Sequence: Synthetic oligonucleotide
  Sense strand starting at position 958 of SEQ ID NO: 916142
cuguguuaguauuuaaagu

SEQ ID NO: 1133751 - RNA, 19 nt, Artificial Sequence
  Description of Artificial Sequence: Synthetic oligonucleotide
  Antisense strand to SEQ ID NO: 1133750
acuuuaaauacuaacacag

SEQ ID NO: 1133752 - RNA, 19 nt, Artificial Sequence
  Description of Artificial Sequence: Synthetic oligonucleotide
  Sense strand starting at position 1019 of SEQ ID NO: 916142
cuuuaagucgaccauuacu

SEQ ID NO: 1133753 - RNA, 19 nt, Artificial Sequence
  Description of Artificial Sequence: Synthetic oligonucleotide
  Antisense strand to SEQ ID NO: 1133752
aguaauggucgacuuaaag

SEQ ID NO: 1133754 - RNA, 19 nt, Artificial Sequence
  Description of Artificial Sequence: Synthetic oligonucleotide
  Sense strand starting at position 1040 of SEQ ID NO: 916142
ggaaauagcuaugucucca

SEQ ID NO: 1133755 - RNA, 19 nt, Artificial Sequence
  Description of Artificial Sequence: Synthetic oligonucleotide
  Antisense strand to SEQ ID NO: 1133754
uggagacauagcuauuucc

SEQ ID NO: 1133756 - RNA, 19 nt, Artificial Sequence
  Description of Artificial Sequence: Synthetic oligonucleotide
  Sense strand starting at position 1044 of SEQ ID NO: 916142
auagcuaugucuccagaau

SEQ ID NO: 1133757 - RNA, 19 nt, Artificial Sequence
  Description of Artificial Sequence: Synthetic oligonucleotide
  Antisense strand to SEQ ID NO: 1133756
auucuggagacauagcuau

SEQ ID NO: 1133758 - RNA, 19 nt, Artificial Sequence
  Description of Artificial Sequence: Synthetic oligonucleotide
  Sense strand starting at position 1338 of SEQ ID NO: 916142
gagggugucauugcguagu

SEQ ID NO: 1133759 - RNA, 19 nt, Artificial Sequence
  Description of Artificial Sequence: Synthetic oligonucleotide
  Antisense strand to SEQ ID NO: 1133758
acuacgcaaugacacccuc

SEQ ID NO: 1133760 - RNA, 19 nt, Artificial Sequence
  Description of Artificial Sequence: Synthetic oligonucleotide
  Sense strand starting at position 1342 of SEQ ID NO: 916142
gugucauugcguaguauag

SEQ ID NO: 1133761 - RNA, 19 nt, Artificial Sequence
  Description of Artificial Sequence: Synthetic oligonucleotide
  Antisense strand to SEQ ID NO: 1133760
cuauacuacgcaaugacac

SEQ ID NO: 1133762 - RNA, 19 nt, Artificial Sequence
  Description of Artificial Sequence: Synthetic oligonucleotide
  Sense strand starting at position 1351 of SEQ ID NO: 916142
cguaguauaggaggaaguu

SEQ ID NO: 1133763 - RNA, 19 nt, Artificial Sequence
  Description of Artificial Sequence: Synthetic oligonucleotide
  Antisense strand to SEQ ID NO: 1133762
aacuuccuccuauacuacg

SEQ ID NO: 1133764 - RNA, 19 nt, Artificial Sequence
  Description of Artificial Sequence: Synthetic oligonucleotide
  Sense strand starting at position 1419 of SEQ ID NO: 916142
agagaugcccaguaauauu

SEQ ID NO: 1133765 - RNA, 19 nt, Artificial Sequence
  Description of Artificial Sequence: Synthetic oligonucleotide
  Antisense strand to SEQ ID NO: 1133764
aauauuacugggcaucucu

SEQ ID NO: 1133766 - RNA, 19 nt, Artificial Sequence
  Description of Artificial Sequence: Synthetic oligonucleotide
  Sense strand starting at position 1438 of SEQ ID NO: 916142
ugccauucuuccucaggaa

SEQ ID NO: 1133767 - RNA, 19 nt, Artificial Sequence
  Description of Artificial Sequence: Synthetic oligonucleotide
  Antisense strand to SEQ ID NO: 1133766
uuccugaggaagaauggca

SEQ ID NO: 1133768 - RNA, 19 nt, Artificial Sequence
  Description of Artificial Sequence: Synthetic oligonucleotide
  Sense strand starting at position 1439 of SEQ ID NO: 916142
gccauucuuccucaggaag

SEQ ID NO: 1133769 - RNA, 19 nt, Artificial Sequence
  Description of Artificial Sequence: Synthetic oligonucleotide
  Antisense strand to SEQ ID NO: 1133768
cuuccugaggaagaauggc

SEQ ID NO: 1133770 - RNA, 19 nt, Artificial Sequence
  Description of Artificial Sequence: Synthetic oligonucleotide
  Sense strand starting at position 1464 of SEQ ID NO: 916142
uucuccuaucaaggugaaa

SEQ ID NO: 1133771 - RNA, 19 nt, Artificial Sequence
  Description of Artificial Sequence: Synthetic oligonucleotide
  Antisense strand to SEQ ID NO: 1133770
uuucaccuugauaggagaa

SEQ ID NO: 1133772 - RNA, 19 nt, Artificial Sequence
  Description of Artificial Sequence: Synthetic oligonucleotide
  Sense strand starting at position 1653 of SEQ ID NO: 916142
ucaccaucccuccgaauga

SEQ ID NO: 1133773 - RNA, 19 nt, Artificial Sequence
  Description of Artificial Sequence: Synthetic oligonucleotide
  Antisense strand to SEQ ID NO: 1133772
ucauucggagggaugguga

SEQ ID NO: 1133774 - RNA, 19 nt, Artificial Sequence
  Description of Artificial Sequence: Synthetic oligonucleotide
  Sense strand starting at position 2224 of SEQ ID NO: 916142
gcggcagcucugcuucuau

SEQ ID NO: 1133775 - RNA, 19 nt, Artificial Sequence
  Description of Artificial Sequence: Synthetic oligonucleotide
  Antisense strand to SEQ ID NO: 1133774
auagaagcagagcugccgc

SEQ ID NO: 1133776 - RNA, 19 nt, Artificial Sequence
  Description of Artificial Sequence: Synthetic oligonucleotide
  Sense strand starting at position 2609 of SEQ ID NO: 916142
uccuuaauucuagggugga

SEQ ID NO: 1133777 - RNA, 19 nt, Artificial Sequence
  Description of Artificial Sequence: Synthetic oligonucleotide
  Antisense strand to SEQ ID NO: 1133776
uccacccuagaauuaagga

SEQ ID NO: 1133778 - RNA, 19 nt, Artificial Sequence
  Description of Artificial Sequence: Synthetic oligonucleotide
  Sense strand starting at position 2612 of SEQ ID NO: 916142
uuaauucuaggguggaguu

SEQ ID NO: 1133779 - RNA, 19 nt, Artificial Sequence
  Description of Artificial Sequence: Synthetic oligonucleotide
  Antisense strand to SEQ ID NO: 1133778
aacuccacccuagaauuaa

SEQ ID NO: 1133780 - RNA, 19 nt, Artificial Sequence
  Description of Artificial Sequence: Synthetic oligonucleotide
  Sense strand starting at position 2956 of SEQ ID NO: 916142
agccuuagguuccuggaau

SEQ ID NO: 1133781 - RNA, 19 nt, Artificial Sequence
  Description of Artificial Sequence: Synthetic oligonucleotide
  Antisense strand to SEQ ID NO: 1133780
auuccaggaaccuaaggcu

SEQ ID NO: 1133782 - RNA, 19 nt, Artificial Sequence
  Description of Artificial Sequence: Synthetic oligonucleotide
  Sense strand starting at position 3019 of SEQ ID NO: 916142
cucugacuagaaggguaua

SEQ ID NO: 1133783 - RNA, 19 nt, Artificial Sequence
  Description of Artificial Sequence: Synthetic oligonucleotide
  Antisense strand to SEQ ID NO: 1133782
uauacccuucuagucagag

SEQ ID NO: 1133784 - RNA, 19 nt, Artificial Sequence
  Description of Artificial Sequence: Synthetic oligonucleotide
  Sense strand starting at position 3020 of SEQ ID NO: 916142
ucugacuagaaggguauau

SEQ ID NO: 1133785 - RNA, 19 nt, Artificial Sequence
  Description of Artificial Sequence: Synthetic oligonucleotide
  Antisense strand to SEQ ID NO: 1133784
auauacccuucuagucaga

SEQ ID NO: 1133786 - RNA, 19 nt, Artificial Sequence
  Description of Artificial Sequence: Synthetic oligonucleotide
  Sense strand starting at position 3144 of SEQ ID NO: 916142
gggauaucuaagcaguucu

SEQ ID NO: 1133787 - RNA, 19 nt, Artificial Sequence
  Description of Artificial Sequence: Synthetic oligonucleotide
  Antisense strand to SEQ ID NO: 1133786
agaacugcuuagauauccc

SEQ ID NO: 1133788 - RNA, 19 nt, Artificial Sequence
  Description of Artificial Sequence: Synthetic oligonucleotide
  Sense strand starting at position 3209 of SEQ ID NO: 916142
ccagaaauauagcugcuga

SEQ ID NO: 1133789 - RNA, 19 nt, Artificial Sequence
  Description of Artificial Sequence: Synthetic oligonucleotide
  Antisense strand to SEQ ID NO: 1133788
ucagcagcuauauuucugg

SEQ ID NO: 1133790 - RNA, 19 nt, Artificial Sequence
  Description of Artificial Sequence: Synthetic oligonucleotide
  Sense strand starting at position 3214 of SEQ ID NO: 916142
aauauagcugcugaguaau

SEQ ID NO: 1133791 - RNA, 19 nt, Artificial Sequence
  Description of Artificial Sequence: Synthetic oligonucleotide
  Antisense strand to SEQ ID NO: 1133790
auuacucagcagcuauauu

SEQ ID NO: 1133792 - RNA, 19 nt, Artificial Sequence
  Description of Artificial Sequence: Synthetic oligonucleotide
  Sense strand starting at position 3227 of SEQ ID NO: 916142
aguaauaggguuugggagu

SEQ ID NO: 1133793 - RNA, 19 nt, Artificial Sequence
  Description of Artificial Sequence: Synthetic oligonucleotide
  Antisense strand to SEQ ID NO: 1133792
acucccaaacccuauuacu

SEQ ID NO: 1133794 - RNA, 19 nt, Artificial Sequence
  Description of Artificial Sequence: Synthetic oligonucleotide
  Sense strand starting at position 3233 of SEQ ID NO: 916142
aggguuugggaguauuguu

SEQ ID NO: 1133795 - RNA, 19 nt, Artificial Sequence
  Description of Artificial Sequence: Synthetic oligonucleotide
  Antisense strand to SEQ ID NO: 1133794
aacaauacucccaaacccu

SEQ ID NO: 1133796 - RNA, 19 nt, Artificial Sequence
  Description of Artificial Sequence: Synthetic oligonucleotide
  Sense strand starting at position 3690 of SEQ ID NO: 916142
ccauccugucuuuacagua

SEQ ID NO: 1133797 - RNA, 19 nt, Artificial Sequence
  Description of Artificial Sequence: Synthetic oligonucleotide
  Antisense strand to SEQ ID NO: 1133796
uacuguaaagacaggaugg

SEQ ID NO: 1133798 - RNA, 19 nt, Artificial Sequence
  Description of Artificial Sequence: Synthetic oligonucleotide
  Sense strand starting at position 3747 of SEQ ID NO: 916142
cuaugaccuccuuagucau

SEQ ID NO: 1133799 - RNA, 19 nt, Artificial Sequence
  Description of Artificial Sequence: Synthetic oligonucleotide
  Antisense strand to SEQ ID NO: 1133798
augacuaaggaggucauag

SEQ ID NO: 1133800 - RNA, 19 nt, Artificial Sequence
  Description of Artificial Sequence: Synthetic oligonucleotide
  Sense strand starting at position 3856 of SEQ ID NO: 916142
auaucaaugaguggugcaa

SEQ ID NO: 1133801 - RNA, 19 nt, Artificial Sequence
  Description of Artificial Sequence: Synthetic oligonucleotide
  Antisense strand to SEQ ID NO: 1133800
uugcaccacucauugauau

SEQ ID NO: 1133802 - RNA, 19 nt, Artificial Sequence
  Description of Artificial Sequence: Synthetic oligonucleotide
  Sense strand starting at position 3980 of SEQ ID NO: 916142
uuuagaaaucuuggaacga

SEQ ID NO: 1133803 - RNA, 19 nt, Artificial Sequence
  Description of Artificial Sequence: Synthetic oligonucleotide
  Antisense strand to SEQ ID NO: 1133802
ucguuccaagauuucuaaa

SEQ ID NO: 1133804 - RNA, 19 nt, Artificial Sequence
  Description of Artificial Sequence: Synthetic oligonucleotide
  Sense strand starting at position 229 of SEQ ID NO: 916143
acacaauuaggugguguaa

SEQ ID NO: 1133805 - RNA, 19 nt, Artificial Sequence
  Description of Artificial Sequence: Synthetic oligonucleotide
  Antisense strand to SEQ ID NO: 1133804
uuacaccaccuaauugugu

SEQ ID NO: 1133806 - RNA, 19 nt, Artificial Sequence
  Description of Artificial Sequence: Synthetic oligonucleotide
  Sense strand starting at position 238 of SEQ ID NO: 916143
ggugguguaauggaaagua

SEQ ID NO: 1133807 - RNA, 19 nt, Artificial Sequence
  Description of Artificial Sequence: Synthetic oligonucleotide
  Antisense strand to SEQ ID NO: 1133806
uacuuuccauuacaccacc

SEQ ID NO: 1133808 - RNA, 19 nt, Artificial Sequence
  Description of Artificial Sequence: Synthetic oligonucleotide
  Sense strand starting at position 254 of SEQ ID NO: 916143
guauauagggcuuagaauc

SEQ ID NO: 1133809 - RNA, 19 nt, Artificial Sequence
  Description of Artificial Sequence: Synthetic oligonucleotide
  Antisense strand to SEQ ID NO: 1133808
gauucuaagcccuauauac

SEQ ID NO: 1133810 - RNA, 19 nt, Artificial Sequence
  Description of Artificial Sequence: Synthetic oligonucleotide
  Sense strand starting at position 398 of SEQ ID NO: 916143
ggaggaaugucaucucuca

SEQ ID NO: 1133811 - RNA, 19 nt, Artificial Sequence
  Description of Artificial Sequence: Synthetic oligonucleotide
  Antisense strand to SEQ ID NO: 1133810
ugagagaugacauuccucc

SEQ ID NO: 1133812 - RNA, 19 nt, Artificial Sequence
  Description of Artificial Sequence: Synthetic oligonucleotide
  Sense strand starting at position 674 of SEQ ID NO: 916143
auguaauuccaaggaaagc

SEQ ID NO: 1133813 - RNA, 19 nt, Artificial Sequence
  Description of Artificial Sequence: Synthetic oligonucleotide
  Antisense strand to SEQ ID NO: 1133812
gcuuuccuuggaauuacau

SEQ ID NO: 1133814 - RNA, 19 nt, Artificial Sequence
  Description of Artificial Sequence: Synthetic oligonucleotide
  Sense strand starting at position 752 of SEQ ID NO: 916143
cuguuauucucacugagga

SEQ ID NO: 1133815 - RNA, 19 nt, Artificial Sequence
  Description of Artificial Sequence: Synthetic oligonucleotide
  Antisense strand to SEQ ID NO: 1133814
uccucagugagaauaacag

SEQ ID NO: 1133816 - RNA, 19 nt, Artificial Sequence
  Description of Artificial Sequence: Synthetic oligonucleotide
  Sense strand starting at position 753 of SEQ ID NO: 916143
uguuauucucacugaggau

SEQ ID NO: 1133817 - RNA, 19 nt, Artificial Sequence
  Description of Artificial Sequence: Synthetic oligonucleotide
  Antisense strand to SEQ ID NO: 1133816
auccucagugagaauaaca

SEQ ID NO: 1133818 - RNA, 19 nt, Artificial Sequence
  Description of Artificial Sequence: Synthetic oligonucleotide
  Sense strand starting at position 784 of SEQ ID NO: 916143
ccaagauuaucguuuagac

SEQ ID NO: 1133819 - RNA, 19 nt, Artificial Sequence
  Description of Artificial Sequence: Synthetic oligonucleotide
  Antisense strand to SEQ ID NO: 1133818
gucuaaacgauaaucuugg

SEQ ID NO: 1133820 - RNA, 19 nt, Artificial Sequence
  Description of Artificial Sequence: Synthetic oligonucleotide
  Sense strand starting at position 793 of SEQ ID NO: 916143
ucguuuagacccuaggaua

SEQ ID NO: 1133821 - RNA, 19 nt, Artificial Sequence
  Description of Artificial Sequence: Synthetic oligonucleotide
  Antisense strand to SEQ ID NO: 1133820
uauccuagggucuaaacga

SEQ ID NO: 1133822 - RNA, 19 nt, Artificial Sequence
  Description of Artificial Sequence: Synthetic oligonucleotide
  Sense strand starting at position 1194 of SEQ ID NO: 916143
agacuauucuagucgggag

SEQ ID NO: 1133823 - RNA, 19 nt, Artificial Sequence
  Description of Artificial Sequence: Synthetic oligonucleotide
  Antisense strand to SEQ ID NO: 1133822
cucccgacuagaauagucu

SEQ ID NO: 1133824 - RNA, 19 nt, Artificial Sequence
  Description of Artificial Sequence: Synthetic oligonucleotide
  Sense strand starting at position 1288 of SEQ ID NO: 916143
cuaaacucucuguagguga

SEQ ID NO: 1133825 - RNA, 19 nt, Artificial Sequence
  Description of Artificial Sequence: Synthetic oligonucleotide
  Antisense strand to SEQ ID NO: 1133824
ucaccuacagagaguuuag

SEQ ID NO: 1133826 - RNA, 19 nt, Artificial Sequence
  Description of Artificial Sequence: Synthetic oligonucleotide
  Sense strand starting at position 1668 of SEQ ID NO: 916143
ggcaguagauuggucagga

SEQ ID NO: 1133827 - RNA, 19 nt, Artificial Sequence
  Description of Artificial Sequence: Synthetic oligonucleotide
  Antisense strand to SEQ ID NO: 1133826
uccugaccaaucuacugcc

SEQ ID NO: 1133828 - RNA, 19 nt, Artificial Sequence
  Description of Artificial Sequence: Synthetic oligonucleotide
  Sense strand starting at position 1669 of SEQ ID NO: 916143
gcaguagauuggucaggag

SEQ ID NO: 1133829 - RNA, 19 nt, Artificial Sequence
  Description of Artificial Sequence: Synthetic oligonucleotide
  Antisense strand to SEQ ID NO: 1133828
cuccugaccaaucuacugc

SEQ ID NO: 1133830 - RNA, 19 nt, Artificial Sequence
  Description of Artificial Sequence: Synthetic oligonucleotide
  Sense strand starting at position 2297 of SEQ ID NO: 916143
gcugucauccaggaaguau

SEQ ID NO: 1133831 - RNA, 19 nt, Artificial Sequence
  Description of Artificial Sequence: Synthetic oligonucleotide
  Antisense strand to SEQ ID NO: 1133830
auacuuccuggaugacagc

SEQ ID NO: 1133832 - RNA, 19 nt, Artificial Sequence
  Description of Artificial Sequence: Synthetic oligonucleotide
  Sense strand starting at position 2306 of SEQ ID NO: 916143
caggaaguauggguuccaa

SEQ ID NO: 1133833 - RNA, 19 nt, Artificial Sequence
  Description of Artificial Sequence: Synthetic oligonucleotide
  Antisense strand to SEQ ID NO: 1133832
uuggaacccauacuuccug

SEQ ID NO: 1133834 - RNA, 19 nt, Artificial Sequence
  Description of Artificial Sequence: Synthetic oligonucleotide
  Sense strand starting at position 2513 of SEQ ID NO: 916143
ggaacagagcuugguacuu

SEQ ID NO: 1133835 - RNA, 19 nt, Artificial Sequence
  Description of Artificial Sequence: Synthetic oligonucleotide
  Antisense strand to SEQ ID NO: 1133834
aaguaccaagcucuguucc

SEQ ID NO: 1133836 - RNA, 19 nt, Artificial Sequence
  Description of Artificial Sequence: Synthetic oligonucleotide
  Sense strand starting at position 2525 of SEQ ID NO: 916143
gguacuuauugucucauuu

SEQ ID NO: 1133837 - RNA, 19 nt, Artificial Sequence
  Description of Artificial Sequence: Synthetic oligonucleotide
  Antisense strand to SEQ ID NO: 1133836
aaaugagacaauaaguacc

SEQ ID NO: 1133838 - RNA, 19 nt, Artificial Sequence
  Description of Artificial Sequence: Synthetic oligonucleotide
  Sense strand starting at position 2607 of SEQ ID NO: 916143
augaaugacuucucaguug

SEQ ID NO: 1133839 - RNA, 19 nt, Artificial Sequence
  Description of Artificial Sequence: Synthetic oligonucleotide
  Antisense strand to SEQ ID NO: 1133838
caacugagaagucauucau

SEQ ID NO: 1133840 - RNA, 19 nt, Artificial Sequence
  Description of Artificial Sequence: Synthetic oligonucleotide
  Sense strand starting at position 2610 of SEQ ID NO: 916143
aaugacuucucaguuggaa

SEQ ID NO: 1133841 - RNA, 19 nt, Artificial Sequence
  Description of Artificial Sequence: Synthetic oligonucleotide
  Antisense strand to SEQ ID NO: 1133840
uuccaacugagaagucauu

SEQ ID NO: 1133842 - RNA, 19 nt, Artificial Sequence
  Description of Artificial Sequence: Synthetic oligonucleotide
  Sense strand starting at position 2659 of SEQ ID NO: 916143
cuuuguaagaggugaggau

SEQ ID NO: 1133843 - RNA, 19 nt, Artificial Sequence
  Description of Artificial Sequence: Synthetic oligonucleotide
  Antisense strand to SEQ ID NO: 1133842
auccucaccucuuacaaag

SEQ ID NO: 1133844 - RNA, 19 nt, Artificial Sequence
  Description of Artificial Sequence: Synthetic oligonucleotide
  Sense strand starting at position 2851 of SEQ ID NO: 916143
guguucccucgagaaccau

SEQ ID NO: 1133845 - RNA, 19 nt, Artificial Sequence
  Description of Artificial Sequence: Synthetic oligonucleotide
  Antisense strand to SEQ ID NO: 1133844
augguucucgagggaacac

SEQ ID NO: 1133846 - RNA, 19 nt, Artificial Sequence
  Description of Artificial Sequence: Synthetic oligonucleotide
  Sense strand starting at position 2860 of SEQ ID NO: 916143
cgagaaccauuacuuaacu

SEQ ID NO: 1133847 - RNA, 19 nt, Artificial Sequence
  Description of Artificial Sequence: Synthetic oligonucleotide
  Antisense strand to SEQ ID NO: 1133846
aguuaaguaaugguucucg

SEQ ID NO: 1133848 - RNA, 19 nt, Artificial Sequence
  Description of Artificial Sequence: Synthetic oligonucleotide
  Sense strand starting at position 2882 of SEQ ID NO: 916143
guguuagaacaguauuaga

SEQ ID NO: 1133849 - RNA, 19 nt, Artificial Sequence
  Description of Artificial Sequence: Synthetic oligonucleotide
  Antisense strand to SEQ ID NO: 1133848
ucuaauacuguucuaacac

SEQ ID NO: 1133850 - RNA, 19 nt, Artificial Sequence
  Description of Artificial Sequence: Synthetic oligonucleotide
  Sense strand starting at position 2893 of SEQ ID NO: 916143
guauuagaauuaucuggca

SEQ ID NO: 1133851 - RNA, 19 nt, Artificial Sequence
  Description of Artificial Sequence: Synthetic oligonucleotide
  Antisense strand to SEQ ID NO: 1133850
ugccagauaauucuaauac

SEQ ID NO: 1133852 - RNA, 19 nt, Artificial Sequence
  Description of Artificial Sequence: Synthetic oligonucleotide
  Sense strand starting at position 2953 of SEQ ID NO: 916143
auguaucuccaagguuaag

SEQ ID NO: 1133853 - RNA, 19 nt, Artificial Sequence
  Description of Artificial Sequence: Synthetic oligonucleotide
  Antisense strand to SEQ ID NO: 1133852
cuuaaccuuggagauacau

SEQ ID NO: 1133854 - RNA, 19 nt, Artificial Sequence
  Description of Artificial Sequence: Synthetic oligonucleotide
  Sense strand starting at position 2994 of SEQ ID NO: 916143
uuugcaagcauuuguggaa

SEQ ID NO: 1133855 - RNA, 19 nt, Artificial Sequence
  Description of Artificial Sequence: Synthetic oligonucleotide
  Antisense strand to SEQ ID NO: 1133854
uuccacaaaugcuugcaaa

SEQ ID NO: 1133856 - RNA, 19 nt, Artificial Sequence
  Description of Artificial Sequence: Synthetic oligonucleotide
  Sense strand starting at position 2995 of SEQ ID NO: 916143
uugcaagcauuuguggaau

SEQ ID NO: 1133857 - RNA, 19 nt, Artificial Sequence
  Description of Artificial Sequence: Synthetic oligonucleotide
  Antisense strand to SEQ ID NO: 1133856
auuccacaaaugcuugcaa

SEQ ID NO: 1133858 - RNA, 19 nt, Artificial Sequence
  Description of Artificial Sequence: Synthetic oligonucleotide
  Sense strand starting at position 3072 of SEQ ID NO: 916143
agcaacuuuguguacauca

SEQ ID NO: 1133859 - RNA, 19 nt, Artificial Sequence
  Description of Artificial Sequence: Synthetic oligonucleotide
  Antisense strand to SEQ ID NO: 1133858
ugauguacacaaaguugcu

SEQ ID NO: 1133860 - RNA, 19 nt, Artificial Sequence
  Description of Artificial Sequence: Synthetic oligonucleotide
  Sense strand starting at position 3159 of SEQ ID NO: 916143
gcuugaggccaugaguuga

SEQ ID NO: 1133861 - RNA, 19 nt, Artificial Sequence
  Description of Artificial Sequence: Synthetic oligonucleotide
  Antisense strand to SEQ ID NO: 1133860
ucaacucauggccucaagc

SEQ ID NO: 1133862 - RNA, 19 nt, Artificial Sequence
  Description of Artificial Sequence: Synthetic oligonucleotide
  Sense strand starting at position 3223 of SEQ ID NO: 916143
aauuaauuagugggaggua

SEQ ID NO: 1133863 - RNA, 19 nt, Artificial Sequence
  Description of Artificial Sequence: Synthetic oligonucleotide
  Antisense strand to SEQ ID NO: 1133862
uaccucccacuaauuaauu

SEQ ID NO: 1133864 - RNA, 19 nt, Artificial Sequence
  Description of Artificial Sequence: Synthetic oligonucleotide
  Sense strand starting at position 3288 of SEQ ID NO: 916143
ggaucacuugggugcaaga

SEQ ID NO: 1133865 - RNA, 19 nt, Artificial Sequence
  Description of Artificial Sequence: Synthetic oligonucleotide
  Antisense strand to SEQ ID NO: 1133864
ucuugcacccaagugaucc

SEQ ID NO: 1133866 - RNA, 19 nt, Artificial Sequence
  Description of Artificial Sequence: Synthetic oligonucleotide
  Sense strand starting at position 3316 of SEQ ID NO: 916143
uguagagugagcuaagauc

SEQ ID NO: 1133867 - RNA, 19 nt, Artificial Sequence
  Description of Artificial Sequence: Synthetic oligonucleotide
  Antisense strand to SEQ ID NO: 1133866
gaucuuagcucacucuaca

SEQ ID NO: 1133868 - RNA, 19 nt, Artificial Sequence
  Description of Artificial Sequence: Synthetic oligonucleotide
  Sense strand starting at position 3571 of SEQ ID NO: 916143
gagccugagcuggaagaau

SEQ ID NO: 1133869 - RNA, 19 nt, Artificial Sequence
  Description of Artificial Sequence: Synthetic oligonucleotide
  Antisense strand to SEQ ID NO: 1133868
auucuuccagcucaggcuc

SEQ ID NO: 1133870 - RNA, 19 nt, Artificial Sequence
  Description of Artificial Sequence: Synthetic oligonucleotide
  Sense strand starting at position 3730 of SEQ ID NO: 916143
ccucaagaugacugacauu

SEQ ID NO: 1133871 - RNA, 19 nt, Artificial Sequence
  Description of Artificial Sequence: Synthetic oligonucleotide
  Antisense strand to SEQ ID NO: 1133870
aaugucagucaucuugagg

SEQ ID NO: 1133872 - RNA, 19 nt, Artificial Sequence
  Description of Artificial Sequence: Synthetic oligonucleotide
  Sense strand starting at position 3828 of SEQ ID NO: 916143
ucuguauaagccuaaguuu

SEQ ID NO: 1133873 - RNA, 19 nt, Artificial Sequence
  Description of Artificial Sequence: Synthetic oligonucleotide
  Antisense strand to SEQ ID NO: 1133872
aaacuuaggcuuauacaga

SEQ ID NO: 1133874 - RNA, 19 nt, Artificial Sequence
  Description of Artificial Sequence: Synthetic oligonucleotide
  Sense strand starting at position 3888 of SEQ ID NO: 916143
acugauggccucuaguaaa

SEQ ID NO: 1133875 - RNA, 19 nt, Artificial Sequence
  Description of Artificial Sequence: Synthetic oligonucleotide
  Antisense strand to SEQ ID NO: 1133874
uuuacuagaggccaucagu

SEQ ID NO: 1133876 - RNA, 19 nt, Artificial Sequence
  Description of Artificial Sequence: Synthetic oligonucleotide
  Sense strand starting at position 3909 of SEQ ID NO: 916143
gcuagauucuucucucagg

SEQ ID NO: 1133877 - RNA, 19 nt, Artificial Sequence
  Description of Artificial Sequence: Synthetic oligonucleotide
  Antisense strand to SEQ ID NO: 1133876
ccugagagaagaaucuagc

SEQ ID NO: 1133878 - RNA, 19 nt, Artificial Sequence
  Description of Artificial Sequence: Synthetic oligonucleotide
  Sense strand starting at position 3910 of SEQ ID NO: 916143
cuagauucuucucucaggu

SEQ ID NO: 1133879 - RNA, 19 nt, Artificial Sequence
  Description of Artificial Sequence: Synthetic oligonucleotide
  Antisense strand to SEQ ID NO: 1133878
accugagagaagaaucuag

SEQ ID NO: 1133880 - RNA, 19 nt, Artificial Sequence
  Description of Artificial Sequence: Synthetic oligonucleotide
  Sense strand starting at position 3978 of SEQ ID NO: 916143
auaguuaagccagggagga

SEQ ID NO: 1133881 - RNA, 19 nt, Artificial Sequence
  Description of Artificial Sequence: Synthetic oligonucleotide
  Antisense strand to SEQ ID NO: 1133880
uccucccuggcuuaacuau

SEQ ID NO: 1133882 - RNA, 19 nt, Artificial Sequence
  Description of Artificial Sequence: Synthetic oligonucleotide
  Sense strand starting at position 3979 of SEQ ID NO: 916143
uaguuaagccagggaggau

SEQ ID NO: 1133883 - RNA, 19 nt, Artificial Sequence
  Description of Artificial Sequence: Synthetic oligonucleotide
  Antisense strand to SEQ ID NO: 1133882
auccucccuggcuuaacua

SEQ ID NO: 1133884 - RNA, 19 nt, Artificial Sequence
  Description of Artificial Sequence: Synthetic oligonucleotide
  Sense strand starting at position 243 of SEQ ID NO: 916144
aagguaaucugagucaugu

SEQ ID NO: 1133885 - RNA, 19 nt, Artificial Sequence
  Description of Artificial Sequence: Synthetic oligonucleotide
  Antisense strand to SEQ ID NO: 1133884
acaugacucagauuaccuu

SEQ ID NO: 1133886 - RNA, 19 nt, Artificial Sequence
  Description of Artificial Sequence: Synthetic oligonucleotide
  Sense strand starting at position 245 of SEQ ID NO: 916144
gguaaucugagucauguuc

SEQ ID NO: 1133887 - RNA, 19 nt, Artificial Sequence
  Description of Artificial Sequence: Synthetic oligonucleotide
  Antisense strand to SEQ ID NO: 1133886
gaacaugacucagauuacc

SEQ ID NO: 1133888 - RNA, 19 nt, Artificial Sequence
  Description of Artificial Sequence: Synthetic oligonucleotide
  Sense strand starting at position 252 of SEQ ID NO: 916144
ugagucauguucuuaugag

SEQ ID NO: 1133889 - RNA, 19 nt, Artificial Sequence
  Description of Artificial Sequence: Synthetic oligonucleotide
  Antisense strand to SEQ ID NO: 1133888
cucauaagaacaugacuca

SEQ ID NO: 1133890 - RNA, 19 nt, Artificial Sequence
  Description of Artificial Sequence: Synthetic oligonucleotide
  Sense strand starting at position 313 of SEQ ID NO: 916144
ccuguucugaugugagaaa

SEQ ID NO: 1133891 - RNA, 19 nt, Artificial Sequence
  Description of Artificial Sequence: Synthetic oligonucleotide
  Antisense strand to SEQ ID NO: 1133890
uuucucacaucagaacagg

SEQ ID NO: 1133892 - RNA, 19 nt, Artificial Sequence
  Description of Artificial Sequence: Synthetic oligonucleotide
  Sense strand starting at position 340 of SEQ ID NO: 916144
cccaaaucucugggucuga

SEQ ID NO: 1133893 - RNA, 19 nt, Artificial Sequence
  Description of Artificial Sequence: Synthetic oligonucleotide
  Antisense strand to SEQ ID NO: 1133892
ucagacccagagauuuggg

SEQ ID NO: 1133894 - RNA, 19 nt, Artificial Sequence
  Description of Artificial Sequence: Synthetic oligonucleotide
  Sense strand starting at position 344 of SEQ ID NO: 916144
aaucucugggucugagaga

SEQ ID NO: 1133895 - RNA, 19 nt, Artificial Sequence
  Description of Artificial Sequence: Synthetic oligonucleotide
  Antisense strand to SEQ ID NO: 1133894
ucucucagacccagagauu

SEQ ID NO: 1133896 - RNA, 19 nt, Artificial Sequence
  Description of Artificial Sequence: Synthetic oligonucleotide
  Sense strand starting at position 427 of SEQ ID NO: 916144
aggugccauccugaauugu

SEQ ID NO: 1133897 - RNA, 19 nt, Artificial Sequence
  Description of Artificial Sequence: Synthetic oligonucleotide
  Antisense strand to SEQ ID NO: 1133896
acaauucaggauggcaccu

SEQ ID NO: 1133898 - RNA, 19 nt, Artificial Sequence
  Description of Artificial Sequence: Synthetic oligonucleotide
  Sense strand starting at position 466 of SEQ ID NO: 916144
ucaccuguccugggacaca

SEQ ID NO: 1133899 - RNA, 19 nt, Artificial Sequence
  Description of Artificial Sequence: Synthetic oligonucleotide
  Antisense strand to SEQ ID NO: 1133898
ugugucccaggacagguga

SEQ ID NO: 1133900 - RNA, 19 nt, Artificial Sequence
  Description of Artificial Sequence: Synthetic oligonucleotide
  Sense strand starting at position 568 of SEQ ID NO: 916144
acggcuacuacagguuaaa

SEQ ID NO: 1133901 - RNA, 19 nt, Artificial Sequence
  Description of Artificial Sequence: Synthetic oligonucleotide
  Antisense strand to SEQ ID NO: 1133900
uuuaaccuguaguagccgu

SEQ ID NO: 1133902 - RNA, 19 nt, Artificial Sequence
  Description of Artificial Sequence: Synthetic oligonucleotide
  Sense strand starting at position 571 of SEQ ID NO: 916144
gcuacuacagguuaaauau

SEQ ID NO: 1133903 - RNA, 19 nt, Artificial Sequence
  Description of Artificial Sequence: Synthetic oligonucleotide
  Antisense strand to SEQ ID NO: 1133902
auauuuaaccuguaguagc

SEQ ID NO: 1133904 - RNA, 19 nt, Artificial Sequence
  Description of Artificial Sequence: Synthetic oligonucleotide
  Sense strand starting at position 629 of SEQ ID NO: 916144
uuaggaacaucuguauucu

SEQ ID NO: 1133905 - RNA, 19 nt, Artificial Sequence
  Description of Artificial Sequence: Synthetic oligonucleotide
  Antisense strand to SEQ ID NO: 1133904
agaauacagauguuccuaa

SEQ ID NO: 1133906 - RNA, 19 nt, Artificial Sequence
  Description of Artificial Sequence: Synthetic oligonucleotide
  Sense strand starting at position 704 of SEQ ID NO: 916144
gcauuuccuuaagugucau

SEQ ID NO: 1133907 - RNA, 19 nt, Artificial Sequence
  Description of Artificial Sequence: Synthetic oligonucleotide
  Antisense strand to SEQ ID NO: 1133906
augacacuuaaggaaaugc

SEQ ID NO: 1133908 - RNA, 19 nt, Artificial Sequence
  Description of Artificial Sequence: Synthetic oligonucleotide
  Sense strand starting at position 758 of SEQ ID NO: 916144
uuggauuaaggcugcucaa

SEQ ID NO: 1133909 - RNA, 19 nt, Artificial Sequence
  Description of Artificial Sequence: Synthetic oligonucleotide
  Antisense strand to SEQ ID NO: 1133908
uugagcagccuuaauccaa

SEQ ID NO: 1133910 - RNA, 19 nt, Artificial Sequence
  Description of Artificial Sequence: Synthetic oligonucleotide
  Sense strand starting at position 790 of SEQ ID NO: 916144
ucccauucugcagauguga

SEQ ID NO: 1133911 - RNA, 19 nt, Artificial Sequence
  Description of Artificial Sequence: Synthetic oligonucleotide
  Antisense strand to SEQ ID NO: 1133910
ucacaucugcagaauggga

SEQ ID NO: 1133912 - RNA, 19 nt, Artificial Sequence
  Description of Artificial Sequence: Synthetic oligonucleotide
  Sense strand starting at position 1059 of SEQ ID NO: 916144
ugcccucucccguagagaa

SEQ ID NO: 1133913 - RNA, 19 nt, Artificial Sequence
  Description of Artificial Sequence: Synthetic oligonucleotide
  Antisense strand to SEQ ID NO: 1133912
uucucuacgggagagggca

SEQ ID NO: 1133914 - RNA, 19 nt, Artificial Sequence
  Description of Artificial Sequence: Synthetic oligonucleotide
  Sense strand starting at position 1194 of SEQ ID NO: 916144
ugaugucuucuccagcaac

SEQ ID NO: 1133915 - RNA, 19 nt, Artificial Sequence
  Description of Artificial Sequence: Synthetic oligonucleotide
  Antisense strand to SEQ ID NO: 1133914
guugcuggagaagacauca

SEQ ID NO: 1133916 - RNA, 19 nt, Artificial Sequence
  Description of Artificial Sequence: Synthetic oligonucleotide
  Sense strand starting at position 1261 of SEQ ID NO: 916144
ucacuauagccgcauaaau

SEQ ID NO: 1133917 - RNA, 19 nt, Artificial Sequence
  Description of Artificial Sequence: Synthetic oligonucleotide
  Antisense strand to SEQ ID NO: 1133916
auuuaugcggcuauaguga

SEQ ID NO: 1133918 - RNA, 19 nt, Artificial Sequence
  Description of Artificial Sequence: Synthetic oligonucleotide
  Sense strand starting at position 1319 of SEQ ID NO: 916144
cagguaaacucagggauuu

SEQ ID NO: 1133919 - RNA, 19 nt, Artificial Sequence
  Description of Artificial Sequence: Synthetic oligonucleotide
  Antisense strand to SEQ ID NO: 1133918
aaaucccugaguuuaccug

SEQ ID NO: 1133920 - RNA, 19 nt, Artificial Sequence
  Description of Artificial Sequence: Synthetic oligonucleotide
  Sense strand starting at position 1503 of SEQ ID NO: 916144
agagauuauaaucgaaguc

SEQ ID NO: 1133921 - RNA, 19 nt, Artificial Sequence
  Description of Artificial Sequence: Synthetic oligonucleotide
  Antisense strand to SEQ ID NO: 1133920
gacuucgauuauaaucucu

SEQ ID NO: 1133922 - RNA, 19 nt, Artificial Sequence
  Description of Artificial Sequence: Synthetic oligonucleotide
  Sense strand starting at position 1585 of SEQ ID NO: 916144
gagagaaaucccggguauu

SEQ ID NO: 1133923 - RNA, 19 nt, Artificial Sequence
  Description of Artificial Sequence: Synthetic oligonucleotide
  Antisense strand to SEQ ID NO: 1133922
aauacccgggauuucucuc

SEQ ID NO: 1133924 - RNA, 19 nt, Artificial Sequence
  Description of Artificial Sequence: Synthetic oligonucleotide
  Sense strand starting at position 1586 of SEQ ID NO: 916144
agagaaaucccggguauuc

SEQ ID NO: 1133925 - RNA, 19 nt, Artificial Sequence
  Description of Artificial Sequence: Synthetic oligonucleotide
  Antisense strand to SEQ ID NO: 1133924
gaauacccgggauuucucu

SEQ ID NO: 1133926 - RNA, 19 nt, Artificial Sequence
  Description of Artificial Sequence: Synthetic oligonucleotide
  Sense strand starting at position 1588 of SEQ ID NO: 916144
agaaaucccggguauucca

SEQ ID NO: 1133927 - RNA, 19 nt, Artificial Sequence
  Description of Artificial Sequence: Synthetic oligonucleotide
  Antisense strand to SEQ ID NO: 1133926
uggaauacccgggauuucu

SEQ ID NO: 1133928 - RNA, 19 nt, Artificial Sequence
  Description of Artificial Sequence: Synthetic oligonucleotide
  Sense strand starting at position 1595 of SEQ ID NO: 916144
ccggguauuccauauacac

SEQ ID NO: 1133929 - RNA, 19 nt, Artificial Sequence
  Description of Artificial Sequence: Synthetic oligonucleotide
  Antisense strand to SEQ ID NO: 1133928
guguauauggaauacccgg

SEQ ID NO: 1133930 - RNA, 19 nt, Artificial Sequence
  Description of Artificial Sequence: Synthetic oligonucleotide
  Sense strand starting at position 1644 of SEQ ID NO: 916144
uccuuuggaucaucuggaa

SEQ ID NO: 1133931 - RNA, 19 nt, Artificial Sequence
  Description of Artificial Sequence: Synthetic oligonucleotide
  Antisense strand to SEQ ID NO: 1133930
uuccagaugauccaaagga

SEQ ID NO: 1133932 - RNA, 19 nt, Artificial Sequence
  Description of Artificial Sequence: Synthetic oligonucleotide
  Sense strand starting at position 1752 of SEQ ID NO: 916144
cugggaaaucuccgaaauc

SEQ ID NO: 1133933 - RNA, 19 nt, Artificial Sequence
  Description of Artificial Sequence: Synthetic oligonucleotide
  Antisense strand to SEQ ID NO: 1133932
gauuucggagauuucccag

SEQ ID NO: 1133934 - RNA, 19 nt, Artificial Sequence
  Description of Artificial Sequence: Synthetic oligonucleotide
  Sense strand starting at position 2007 of SEQ ID NO: 916144
gguuguguuaucgcgagaa

SEQ ID NO: 1133935 - RNA, 19 nt, Artificial Sequence
  Description of Artificial Sequence: Synthetic oligonucleotide
  Antisense strand to SEQ ID NO: 1133934
uucucgcgauaacacaacc

SEQ ID NO: 1133936 - RNA, 19 nt, Artificial Sequence
  Description of Artificial Sequence: Synthetic oligonucleotide
  Sense strand starting at position 2010 of SEQ ID NO: 916144
uguguuaucgcgagaacug

SEQ ID NO: 1133937 - RNA, 19 nt, Artificial Sequence
  Description of Artificial Sequence: Synthetic oligonucleotide
  Antisense strand to SEQ ID NO: 1133936
caguucucgcgauaacaca

SEQ ID NO: 1133938 - RNA, 19 nt, Artificial Sequence
  Description of Artificial Sequence: Synthetic oligonucleotide
  Sense strand starting at position 2017 of SEQ ID NO: 916144
ucgcgagaacuguaacuga

SEQ ID NO: 1133939 - RNA, 19 nt, Artificial Sequence
  Description of Artificial Sequence: Synthetic oligonucleotide
  Antisense strand to SEQ ID NO: 1133938
ucaguuacaguucucgcga

SEQ ID NO: 1133940 - RNA, 19 nt, Artificial Sequence
  Description of Artificial Sequence: Synthetic oligonucleotide
  Sense strand starting at position 2020 of SEQ ID NO: 916144
cgagaacuguaacugacuu

SEQ ID NO: 1133941 - RNA, 19 nt, Artificial Sequence
  Description of Artificial Sequence: Synthetic oligonucleotide
  Antisense strand to SEQ ID NO: 1133940
aagucaguuacaguucucg

SEQ ID NO: 1133942 - RNA, 19 nt, Artificial Sequence
  Description of Artificial Sequence: Synthetic oligonucleotide
  Sense strand starting at position 2109 of SEQ ID NO: 916144
cgggacuauuuagagaagu

SEQ ID NO: 1133943 - RNA, 19 nt, Artificial Sequence
  Description of Artificial Sequence: Synthetic oligonucleotide
  Antisense strand to SEQ ID NO: 1133942
acuucucuaaauagucccg

SEQ ID NO: 1133944 - RNA, 19 nt, Artificial Sequence
  Description of Artificial Sequence: Synthetic oligonucleotide
  Sense strand starting at position 2189 of SEQ ID NO: 916144
guagucuggguuuaaauau

SEQ ID NO: 1133945 - RNA, 19 nt, Artificial Sequence
  Description of Artificial Sequence: Synthetic oligonucleotide
  Antisense strand to SEQ ID NO: 1133944
auauuuaaacccagacuac

SEQ ID NO: 1133946 - RNA, 19 nt, Artificial Sequence
  Description of Artificial Sequence: Synthetic oligonucleotide
  Sense strand starting at position 2313 of SEQ ID NO: 916144
cugguuugcgcaucuguau

SEQ ID NO: 1133947 - RNA, 19 nt, Artificial Sequence
  Description of Artificial Sequence: Synthetic oligonucleotide
  Antisense strand to SEQ ID NO: 1133946
auacagaugcgcaaaccag

SEQ ID NO: 1133948 - RNA, 19 nt, Artificial Sequence
  Description of Artificial Sequence: Synthetic oligonucleotide
  Sense strand starting at position 2314 of SEQ ID NO: 916144
ugguuugcgcaucuguauu

SEQ ID NO: 1133949 - RNA, 19 nt, Artificial Sequence
  Description of Artificial Sequence: Synthetic oligonucleotide
  Antisense strand to SEQ ID NO: 1133948
aauacagaugcgcaaacca

SEQ ID NO: 1133950 - RNA, 19 nt, Artificial Sequence
  Description of Artificial Sequence: Synthetic oligonucleotide
  Sense strand starting at position 2352 of SEQ ID NO: 916144
aacguauuagucguguacu

SEQ ID NO: 1133951 - RNA, 19 nt, Artificial Sequence
  Description of Artificial Sequence: Synthetic oligonucleotide
  Antisense strand to SEQ ID NO: 1133950
aguacacgacuaauacguu

SEQ ID NO: 1133952 - RNA, 19 nt, Artificial Sequence
  Description of Artificial Sequence: Synthetic oligonucleotide
  Sense strand starting at position 2354 of SEQ ID NO: 916144
cguauuagucguguacuuu

SEQ ID NO: 1133953 - RNA, 19 nt, Artificial Sequence
  Description of Artificial Sequence: Synthetic oligonucleotide
  Antisense strand to SEQ ID NO: 1133952
aaaguacacgacuaauacg

SEQ ID NO: 1133954 - RNA, 19 nt, Artificial Sequence
  Description of Artificial Sequence: Synthetic oligonucleotide
  Sense strand starting at position 3357 of SEQ ID NO: 916144
ggcauaagccacugugaag

SEQ ID NO: 1133955 - RNA, 19 nt, Artificial Sequence
  Description of Artificial Sequence: Synthetic oligonucleotide
  Antisense strand to SEQ ID NO: 1133954
cuucacaguggcuuaugcc

SEQ ID NO: 1133956 - RNA, 19 nt, Artificial Sequence
  Description of Artificial Sequence: Synthetic oligonucleotide
  Sense strand starting at position 3368 of SEQ ID NO: 916144
cugugaaggccuuaaugaa

SEQ ID NO: 1133957 - RNA, 19 nt, Artificial Sequence
  Description of Artificial Sequence: Synthetic oligonucleotide
  Antisense strand to SEQ ID NO: 1133956
uucauuaaggccuucacag

SEQ ID NO: 1133958 - RNA, 19 nt, Artificial Sequence
  Description of Artificial Sequence: Synthetic oligonucleotide
  Sense strand starting at position 3376 of SEQ ID NO: 916144
gccuuaaugaaugacguuu

SEQ ID NO: 1133959 - RNA, 19 nt, Artificial Sequence
  Description of Artificial Sequence: Synthetic oligonucleotide
  Antisense strand to SEQ ID NO: 1133958
aaacgucauucauuaaggc

SEQ ID NO: 1133960 - RNA, 19 nt, Artificial Sequence
  Description of Artificial Sequence: Synthetic oligonucleotide
  Sense strand starting at position 3402 of SEQ ID NO: 916144
ucauaauuagcguaucaaa

SEQ ID NO: 1133961 - RNA, 19 nt, Artificial Sequence
  Description of Artificial Sequence: Synthetic oligonucleotide
  Antisense strand to SEQ ID NO: 1133960
uuugauacgcuaauuauga

SEQ ID NO: 1133962 - RNA, 19 nt, Artificial Sequence
  Description of Artificial Sequence: Synthetic oligonucleotide
  Sense strand starting at position 3852 of SEQ ID NO: 916144
aaauguuaaguagguagua

SEQ ID NO: 1133963 - RNA, 19 nt, Artificial Sequence
  Description of Artificial Sequence: Synthetic oligonucleotide
  Antisense strand to SEQ ID NO: 1133962
uacuaccuacuuaacauuu

SEQ ID NO: 1133964 - RNA, 19 nt, Artificial Sequence
  Description of Artificial Sequence: Synthetic oligonucleotide
  Sense strand starting at position 67 of SEQ ID NO: 916145
cugucuguaccuggaagua

SEQ ID NO: 1133965 - RNA, 19 nt, Artificial Sequence
  Description of Artificial Sequence: Synthetic oligonucleotide
  Antisense strand to SEQ ID NO: 1133964
uacuuccagguacagacag

SEQ ID NO: 1133966 - RNA, 19 nt, Artificial Sequence
  Description of Artificial Sequence: Synthetic oligonucleotide
  Sense strand starting at position 120 of SEQ ID NO: 916145
guaacaggcucuuggauuu

SEQ ID NO: 1133967 - RNA, 19 nt, Artificial Sequence
  Description of Artificial Sequence: Synthetic oligonucleotide
  Antisense strand to SEQ ID NO: 1133966
aaauccaagagccuguuac

SEQ ID NO: 1133968 - RNA, 19 nt, Artificial Sequence
  Description of Artificial Sequence: Synthetic oligonucleotide
  Sense strand starting at position 440 of SEQ ID NO: 916145
uucgaaaucugccugacca

SEQ ID NO: 1133969 - RNA, 19 nt, Artificial Sequence
  Description of Artificial Sequence: Synthetic oligonucleotide
  Antisense strand to SEQ ID NO: 1133968
uggucaggcagauuucgaa

SEQ ID NO: 1133970 - RNA, 19 nt, Artificial Sequence
  Description of Artificial Sequence: Synthetic oligonucleotide
  Sense strand starting at position 441 of SEQ ID NO: 916145
ucgaaaucugccugaccaa

SEQ ID NO: 1133971 - RNA, 19 nt, Artificial Sequence
  Description of Artificial Sequence: Synthetic oligonucleotide
  Antisense strand to SEQ ID NO: 1133970
uuggucaggcagauuucga

SEQ ID NO: 1133972 - RNA, 19 nt, Artificial Sequence
  Description of Artificial Sequence: Synthetic oligonucleotide
  Sense strand starting at position 442 of SEQ ID NO: 916145
cgaaaucugccugaccaac

SEQ ID NO: 1133973 - RNA, 19 nt, Artificial Sequence
  Description of Artificial Sequence: Synthetic oligonucleotide
  Antisense strand to SEQ ID NO: 1133972
guuggucaggcagauuucg

SEQ ID NO: 1133974 - RNA, 19 nt, Artificial Sequence
  Description of Artificial Sequence: Synthetic oligonucleotide
  Sense strand starting at position 723 of SEQ ID NO: 916145
ggcugagaaucgcuugaag

SEQ ID NO: 1133975 - RNA, 19 nt, Artificial Sequence
  Description of Artificial Sequence: Synthetic oligonucleotide
  Antisense strand to SEQ ID NO: 1133974
cuucaagcgauucucagcc

SEQ ID NO: 1133976 - RNA, 19 nt, Artificial Sequence
  Description of Artificial Sequence: Synthetic oligonucleotide
  Sense strand starting at position 1169 of SEQ ID NO: 916145
gggacucguuucuagaaga

SEQ ID NO: 1133977 - RNA, 19 nt, Artificial Sequence
  Description of Artificial Sequence: Synthetic oligonucleotide
  Antisense strand to SEQ ID NO: 1133976
ucuucuagaaacgaguccc

SEQ ID NO: 1133978 - RNA, 19 nt, Artificial Sequence
  Description of Artificial Sequence: Synthetic oligonucleotide
  Sense strand starting at position 1390 of SEQ ID NO: 916145
gcgguaccugaagaaugaa

SEQ ID NO: 1133979 - RNA, 19 nt, Artificial Sequence
  Description of Artificial Sequence: Synthetic oligonucleotide
  Antisense strand to SEQ ID NO: 1133978
uucauucuucagguaccgc

SEQ ID NO: 1133980 - RNA, 19 nt, Artificial Sequence
  Description of Artificial Sequence: Synthetic oligonucleotide
  Sense strand starting at position 1393 of SEQ ID NO: 916145
guaccugaagaaugaaguu

SEQ ID NO: 1133981 - RNA, 19 nt, Artificial Sequence
  Description of Artificial Sequence: Synthetic oligonucleotide
  Antisense strand to SEQ ID NO: 1133980
aacuucauucuucagguac

SEQ ID NO: 1133982 - RNA, 19 nt, Artificial Sequence
  Description of Artificial Sequence: Synthetic oligonucleotide
  Sense strand starting at position 1560 of SEQ ID NO: 916145
caaggaagcagucgggauu

SEQ ID NO: 1133983 - RNA, 19 nt, Artificial Sequence
  Description of Artificial Sequence: Synthetic oligonucleotide
  Antisense strand to SEQ ID NO: 1133982
aaucccgacugcuuccuug

SEQ ID NO: 1133984 - RNA, 19 nt, Artificial Sequence
  Description of Artificial Sequence: Synthetic oligonucleotide
  Sense strand starting at position 1774 of SEQ ID NO: 916145
aagggaauuuccuggugag

SEQ ID NO: 1133985 - RNA, 19 nt, Artificial Sequence
  Description of Artificial Sequence: Synthetic oligonucleotide
  Antisense strand to SEQ ID NO: 1133984
cucaccaggaaauucccuu

SEQ ID NO: 1133986 - RNA, 19 nt, Artificial Sequence
  Description of Artificial Sequence: Synthetic oligonucleotide
  Sense strand starting at position 1777 of SEQ ID NO: 916145
ggaauuuccuggugaguua

SEQ ID NO: 1133987 - RNA, 19 nt, Artificial Sequence
  Description of Artificial Sequence: Synthetic oligonucleotide
  Antisense strand to SEQ ID NO: 1133986
uaacucaccaggaaauucc

SEQ ID NO: 1133988 - RNA, 19 nt, Artificial Sequence
  Description of Artificial Sequence: Synthetic oligonucleotide
  Sense strand starting at position 74 of SEQ ID NO: 916146
cugaguaguugccacuaga

SEQ ID NO: 1133989 - RNA, 19 nt, Artificial Sequence
  Description of Artificial Sequence: Synthetic oligonucleotide
  Antisense strand to SEQ ID NO: 1133988
ucuaguggcaacuacucag

SEQ ID NO: 1133990 - RNA, 19 nt, Artificial Sequence
  Description of Artificial Sequence: Synthetic oligonucleotide
  Sense strand starting at position 77 of SEQ ID NO: 916146
aguaguugccacuagaagu

SEQ ID NO: 1133991 - RNA, 19 nt, Artificial Sequence
  Description of Artificial Sequence: Synthetic oligonucleotide
  Antisense strand to SEQ ID NO: 1133990
acuucuaguggcaacuacu

SEQ ID NO: 1133992 - RNA, 19 nt, Artificial Sequence
  Description of Artificial Sequence: Synthetic oligonucleotide
  Sense strand starting at position 343 of SEQ ID NO: 916146
cuuacauucucagugucuu

SEQ ID NO: 1133993 - RNA, 19 nt, Artificial Sequence
  Description of Artificial Sequence: Synthetic oligonucleotide
  Antisense strand to SEQ ID NO: 1133992
aagacacugagaauguaag

SEQ ID NO: 1133994 - RNA, 19 nt, Artificial Sequence
  Description of Artificial Sequence: Synthetic oligonucleotide
  Sense strand starting at position 349 of SEQ ID NO: 916146
uucucagugucuugcacau

SEQ ID NO: 1133995 - RNA, 19 nt, Artificial Sequence
  Description of Artificial Sequence: Synthetic oligonucleotide
  Antisense strand to SEQ ID NO: 1133994
augugcaagacacugagaa

SEQ ID NO: 1133996 - RNA, 19 nt, Artificial Sequence
  Description of Artificial Sequence: Synthetic oligonucleotide
  Sense strand starting at position 351 of SEQ ID NO: 916146
cucagugucuugcacauaa

SEQ ID NO: 1133997 - RNA, 19 nt, Artificial Sequence
  Description of Artificial Sequence: Synthetic oligonucleotide
  Antisense strand to SEQ ID NO: 1133996
uuaugugcaagacacugag

SEQ ID NO: 1133998 - RNA, 19 nt, Artificial Sequence
  Description of Artificial Sequence: Synthetic oligonucleotide
  Sense strand starting at position 400 of SEQ ID NO: 916146
agacuacuuuguugauaga

SEQ ID NO: 1133999 - RNA, 19 nt, Artificial Sequence
  Description of Artificial Sequence: Synthetic oligonucleotide
  Antisense strand to SEQ ID NO: 1133998
ucuaucaacaaaguagucu

SEQ ID NO: 1134000 - RNA, 19 nt, Artificial Sequence
  Description of Artificial Sequence: Synthetic oligonucleotide
  Sense strand starting at position 410 of SEQ ID NO: 916146
guugauagacuguaauauc

SEQ ID NO: 1134001 - RNA, 19 nt, Artificial Sequence
  Description of Artificial Sequence: Synthetic oligonucleotide
  Antisense strand to SEQ ID NO: 1134000
gauauuacagucuaucaac

SEQ ID NO: 1134002 - RNA, 19 nt, Artificial Sequence
  Description of Artificial Sequence: Synthetic oligonucleotide
  Sense strand starting at position 463 of SEQ ID NO: 916146
augugcuguuccuaccaaa

SEQ ID NO: 1134003 - RNA, 19 nt, Artificial Sequence
  Description of Artificial Sequence: Synthetic oligonucleotide
  Antisense strand to SEQ ID NO: 1134002
uuugguaggaacagcacau

SEQ ID NO: 1134004 - RNA, 19 nt, Artificial Sequence
  Description of Artificial Sequence: Synthetic oligonucleotide
  Sense strand starting at position 466 of SEQ ID NO: 916146
ugcuguuccuaccaaauga

SEQ ID NO: 1134005 - RNA, 19 nt, Artificial Sequence
  Description of Artificial Sequence: Synthetic oligonucleotide
  Antisense strand to SEQ ID NO: 1134004
ucauuugguaggaacagca

SEQ ID NO: 1134006 - RNA, 19 nt, Artificial Sequence
  Description of Artificial Sequence: Synthetic oligonucleotide
  Sense strand starting at position 574 of SEQ ID NO: 916146
uaugguagcuugucuaaug

SEQ ID NO: 1134007 - RNA, 19 nt, Artificial Sequence
  Description of Artificial Sequence: Synthetic oligonucleotide
  Antisense strand to SEQ ID NO: 1134006
cauuagacaagcuaccaua

SEQ ID NO: 1134008 - RNA, 19 nt, Artificial Sequence
  Description of Artificial Sequence: Synthetic oligonucleotide
  Sense strand starting at position 716 of SEQ ID NO: 916146
gugccauggucuuaucaau

SEQ ID NO: 1134009 - RNA, 19 nt, Artificial Sequence
  Description of Artificial Sequence: Synthetic oligonucleotide
  Antisense strand to SEQ ID NO: 1134008
auugauaagaccauggcac

SEQ ID NO: 1134010 - RNA, 19 nt, Artificial Sequence
  Description of Artificial Sequence: Synthetic oligonucleotide
  Sense strand starting at position 785 of SEQ ID NO: 916146
cugucuguaccuggaagua

SEQ ID NO: 1134011 - RNA, 19 nt, Artificial Sequence
  Description of Artificial Sequence: Synthetic oligonucleotide
  Antisense strand to SEQ ID NO: 1134010
uacuuccagguacagacag

SEQ ID NO: 1134012 - RNA, 19 nt, Artificial Sequence
  Description of Artificial Sequence: Synthetic oligonucleotide
  Sense strand starting at position 838 of SEQ ID NO: 916146
guaacaggcucuuggauuu

SEQ ID NO: 1134013 - RNA, 19 nt, Artificial Sequence
  Description of Artificial Sequence: Synthetic oligonucleotide
  Antisense strand to SEQ ID NO: 1134012
aaauccaagagccuguuac

SEQ ID NO: 1134014 - RNA, 19 nt, Artificial Sequence
  Description of Artificial Sequence: Synthetic oligonucleotide
  Sense strand starting at position 1158 of SEQ ID NO: 916146
uucgaaaucugccugacca

SEQ ID NO: 1134015 - RNA, 19 nt, Artificial Sequence
  Description of Artificial Sequence: Synthetic oligonucleotide
  Antisense strand to SEQ ID NO: 1134014
uggucaggcagauuucgaa

SEQ ID NO: 1134016 - RNA, 19 nt, Artificial Sequence
  Description of Artificial Sequence: Synthetic oligonucleotide
  Sense strand starting at position 1159 of SEQ ID NO: 916146
ucgaaaucugccugaccaa

SEQ ID NO: 1134017 - RNA, 19 nt, Artificial Sequence
  Description of Artificial Sequence: Synthetic oligonucleotide
  Antisense strand to SEQ ID NO: 1134016
uuggucaggcagauuucga

SEQ ID NO: 1134018 - RNA, 19 nt, Artificial Sequence
  Description of Artificial Sequence: Synthetic oligonucleotide
  Sense strand starting at position 1160 of SEQ ID NO: 916146
cgaaaucugccugaccaac

SEQ ID NO: 1134019 - RNA, 19 nt, Artificial Sequence
  Description of Artificial Sequence: Synthetic oligonucleotide
  Antisense strand to SEQ ID NO: 1134018
guuggucaggcagauuucg

SEQ ID NO: 1134020 - RNA, 19 nt, Artificial Sequence
  Description of Artificial Sequence: Synthetic oligonucleotide
  Sense strand starting at position 1441 of SEQ ID NO: 916146
ggcugagaaucgcuugaag

SEQ ID NO: 1134021 - RNA, 19 nt, Artificial Sequence
  Description of Artificial Sequence: Synthetic oligonucleotide
  Antisense strand to SEQ ID NO: 1134020
cuucaagcgauucucagcc

SEQ ID NO: 1134022 - RNA, 19 nt, Artificial Sequence
  Description of Artificial Sequence: Synthetic oligonucleotide
  Sense strand starting at position 1887 of SEQ ID NO: 916146
gggacucguuucuagaaga

SEQ ID NO: 1134023 - RNA, 19 nt, Artificial Sequence
  Description of Artificial Sequence: Synthetic oligonucleotide
  Antisense strand to SEQ ID NO: 1134022
ucuucuagaaacgaguccc

SEQ ID NO: 1134024 - RNA, 19 nt, Artificial Sequence
  Description of Artificial Sequence: Synthetic oligonucleotide
  Sense strand starting at position 2108 of SEQ ID NO: 916146
gcgguaccugaagaaugaa

SEQ ID NO: 1134025 - RNA, 19 nt, Artificial Sequence
  Description of Artificial Sequence: Synthetic oligonucleotide
  Antisense strand to SEQ ID NO: 1134024
uucauucuucagguaccgc

SEQ ID NO: 1134026 - RNA, 19 nt, Artificial Sequence
  Description of Artificial Sequence: Synthetic oligonucleotide
  Sense strand starting at position 2111 of SEQ ID NO: 916146
guaccugaagaaugaaguu

SEQ ID NO: 1134027 - RNA, 19 nt, Artificial Sequence
  Description of Artificial Sequence: Synthetic oligonucleotide
  Antisense strand to SEQ ID NO: 1134026
aacuucauucuucagguac

SEQ ID NO: 1134028 - RNA, 19 nt, Artificial Sequence
  Description of Artificial Sequence: Synthetic oligonucleotide
  Sense strand starting at position 2278 of SEQ ID NO: 916146
caaggaagcagucgggauu

SEQ ID NO: 1134029 - RNA, 19 nt, Artificial Sequence
  Description of Artificial Sequence: Synthetic oligonucleotide
  Antisense strand to SEQ ID NO: 1134028
aaucccgacugcuuccuug

SEQ ID NO: 1134030 - RNA, 19 nt, Artificial Sequence
  Description of Artificial Sequence: Synthetic oligonucleotide
  Sense strand starting at position 2492 of SEQ ID NO: 916146
aagggaauuuccuggugag

SEQ ID NO: 1134031 - RNA, 19 nt, Artificial Sequence
  Description of Artificial Sequence: Synthetic oligonucleotide
  Antisense strand to SEQ ID NO: 1134030
cucaccaggaaauucccuu

SEQ ID NO: 1134032 - RNA, 19 nt, Artificial Sequence
  Description of Artificial Sequence: Synthetic oligonucleotide
  Sense strand starting at position 2495 of SEQ ID NO: 916146
ggaauuuccuggugaguua

SEQ ID NO: 1134033 - RNA, 19 nt, Artificial Sequence
  Description of Artificial Sequence: Synthetic oligonucleotide
  Antisense strand to SEQ ID NO: 1134032
uaacucaccaggaaauucc

SEQ ID NO: 1134034 - RNA, 19 nt, Artificial Sequence
  Description of Artificial Sequence: Synthetic oligonucleotide
  Sense strand starting at position 203 of SEQ ID NO: 916147
gggacucguuucuagaaga

SEQ ID NO: 1134035 - RNA, 19 nt, Artificial Sequence
  Description of Artificial Sequence: Synthetic oligonucleotide
  Antisense strand to SEQ ID NO: 1134034
ucuucuagaaacgaguccc

SEQ ID NO: 1134036 - RNA, 19 nt, Artificial Sequence
  Description of Artificial Sequence: Synthetic oligonucleotide
  Sense strand starting at position 424 of SEQ ID NO: 916147
gcgguaccugaagaaugaa

SEQ ID NO: 1134037 - RNA, 19 nt, Artificial Sequence
  Description of Artificial Sequence: Synthetic oligonucleotide
  Antisense strand to SEQ ID NO: 1134036
uucauucuucagguaccgc

SEQ ID NO: 1134038 - RNA, 19 nt, Artificial Sequence
  Description of Artificial Sequence: Synthetic oligonucleotide
  Sense strand starting at position 427 of SEQ ID NO: 916147
guaccugaagaaugaaguu

SEQ ID NO: 1134039 - RNA, 19 nt, Artificial Sequence
  Description of Artificial Sequence: Synthetic oligonucleotide
  Antisense strand to SEQ ID NO: 1134038
aacuucauucuucagguac

SEQ ID NO: 1134040 - RNA, 19 nt, Artificial Sequence
  Description of Artificial Sequence: Synthetic oligonucleotide
  Sense strand starting at position 594 of SEQ ID NO: 916147
caaggaagcagucgggauu

SEQ ID NO: 1134041 - RNA, 19 nt, Artificial Sequence
  Description of Artificial Sequence: Synthetic oligonucleotide
  Antisense strand to SEQ ID NO: 1134040
aaucccgacugcuuccuug

SEQ ID NO: 1134042 - RNA, 19 nt, Artificial Sequence
  Description of Artificial Sequence: Synthetic oligonucleotide
  Sense strand starting at position 808 of SEQ ID NO: 916147
aagggaauuuccuggugag

SEQ ID NO: 1134043 - RNA, 19 nt, Artificial Sequence
  Description of Artificial Sequence: Synthetic oligonucleotide
  Antisense strand to SEQ ID NO: 1134042
cucaccaggaaauucccuu

SEQ ID NO: 1134044 - RNA, 19 nt, Artificial Sequence
  Description of Artificial Sequence: Synthetic oligonucleotide
  Sense strand starting at position 811 of SEQ ID NO: 916147
ggaauuuccuggugaguua

SEQ ID NO: 1134045 - RNA, 19 nt, Artificial Sequence
  Description of Artificial Sequence: Synthetic oligonucleotide
  Antisense strand to SEQ ID NO: 1134044
uaacucaccaggaaauucc

SEQ ID NO: 1134046 - RNA, 19 nt, Artificial Sequence
  Description of Artificial Sequence: Synthetic oligonucleotide
  Sense strand starting at position 3251 of SEQ ID NO: 916147
gaagaucaucuaugugaug

SEQ ID NO: 1134047 - RNA, 19 nt, Artificial Sequence
  Description of Artificial Sequence: Synthetic oligonucleotide
  Antisense strand to SEQ ID NO: 1134046
caucacauagaugaucuuc

SEQ ID NO: 1134048 - RNA, 19 nt, Artificial Sequence
  Description of Artificial Sequence: Synthetic oligonucleotide
  Sense strand starting at position 3252 of SEQ ID NO: 916147
aagaucaucuaugugaugu

SEQ ID NO: 1134049 - RNA, 19 nt, Artificial Sequence
  Description of Artificial Sequence: Synthetic oligonucleotide
  Antisense strand to SEQ ID NO: 1134048
acaucacauagaugaucuu

SEQ ID NO: 1134050 - RNA, 19 nt, Artificial Sequence
  Description of Artificial Sequence: Synthetic oligonucleotide
  Sense strand starting at position 3260 of SEQ ID NO: 916147
cuaugugaugucugcauuu

SEQ ID NO: 1134051 - RNA, 19 nt, Artificial Sequence
  Description of Artificial Sequence: Synthetic oligonucleotide
  Antisense strand to SEQ ID NO: 1134050
aaaugcagacaucacauag

SEQ ID NO: 1134052 - RNA, 19 nt, Artificial Sequence
  Description of Artificial Sequence: Synthetic oligonucleotide
  Sense strand starting at position 3306 of SEQ ID NO: 916147
ccucuuacugucugcuuua

SEQ ID NO: 1134053 - RNA, 19 nt, Artificial Sequence
  Description of Artificial Sequence: Synthetic oligonucleotide
  Antisense strand to SEQ ID NO: 1134052
uaaagcagacaguaagagg

SEQ ID NO: 1134054 - RNA, 19 nt, Artificial Sequence
  Description of Artificial Sequence: Synthetic oligonucleotide
  Sense strand starting at position 3422 of SEQ ID NO: 916147
gcugcuuaaagcuaggagu

SEQ ID NO: 1134055 - RNA, 19 nt, Artificial Sequence
  Description of Artificial Sequence: Synthetic oligonucleotide
  Antisense strand to SEQ ID NO: 1134054
acuccuagcuuuaagcagc

SEQ ID NO: 1134056 - RNA, 19 nt, Artificial Sequence
  Description of Artificial Sequence: Synthetic oligonucleotide
  Sense strand starting at position 3521 of SEQ ID NO: 916147
ccaggaguuugagcaacaa

SEQ ID NO: 1134057 - RNA, 19 nt, Artificial Sequence
  Description of Artificial Sequence: Synthetic oligonucleotide
  Antisense strand to SEQ ID NO: 1134056
uuguugcucaaacuccugg

SEQ ID NO: 1134058 - RNA, 19 nt, Artificial Sequence
  Description of Artificial Sequence: Synthetic oligonucleotide
  Sense strand starting at position 3582 of SEQ ID NO: 916147
gguggugcuuugcuauagu

SEQ ID NO: 1134059 - RNA, 19 nt, Artificial Sequence
  Description of Artificial Sequence: Synthetic oligonucleotide
  Antisense strand to SEQ ID NO: 1134058
acuauagcaaagcaccacc

SEQ ID NO: 1134060 - RNA, 19 nt, Artificial Sequence
  Description of Artificial Sequence: Synthetic oligonucleotide
  Sense strand starting at position 3761 of SEQ ID NO: 916147
acacuuccuccuggugaca

SEQ ID NO: 1134061 - RNA, 19 nt, Artificial Sequence
  Description of Artificial Sequence: Synthetic oligonucleotide
  Antisense strand to SEQ ID NO: 1134060
ugucaccaggaggaagugu

SEQ ID NO: 1134062 - RNA, 19 nt, Artificial Sequence
  Description of Artificial Sequence: Synthetic oligonucleotide
  Sense strand starting at position 3778 of SEQ ID NO: 916147
caggcuggucuuuagugua

SEQ ID NO: 1134063 - RNA, 19 nt, Artificial Sequence
  Description of Artificial Sequence: Synthetic oligonucleotide
  Antisense strand to SEQ ID NO: 1134062
uacacuaaagaccagccug

SEQ ID NO: 1134064 - RNA, 19 nt, Artificial Sequence
  Description of Artificial Sequence: Synthetic oligonucleotide
  Sense strand starting at position 3781 of SEQ ID NO: 916147
gcuggucuuuaguguacaa

SEQ ID NO: 1134065 - RNA, 19 nt, Artificial Sequence
  Description of Artificial Sequence: Synthetic oligonucleotide
  Antisense strand to SEQ ID NO: 1134064
uuguacacuaaagaccagc

SEQ ID NO: 1134066 - RNA, 19 nt, Artificial Sequence
  Description of Artificial Sequence: Synthetic oligonucleotide
  Sense strand starting at position 3783 of SEQ ID NO: 916147
uggucuuuaguguacaacu

SEQ ID NO: 1134067 - RNA, 19 nt, Artificial Sequence
  Description of Artificial Sequence: Synthetic oligonucleotide
  Antisense strand to SEQ ID NO: 1134066
aguuguacacuaaagacca

SEQ ID NO: 1134068 - RNA, 19 nt, Artificial Sequence
  Description of Artificial Sequence: Synthetic oligonucleotide
  Sense strand starting at position 3785 of SEQ ID NO: 916147
gucuuuaguguacaacuga

SEQ ID NO: 1134069 - RNA, 19 nt, Artificial Sequence
  Description of Artificial Sequence: Synthetic oligonucleotide
  Antisense strand to SEQ ID NO: 1134068
ucaguuguacacuaaagac

SEQ ID NO: 1134070 - RNA, 19 nt, Artificial Sequence
  Description of Artificial Sequence: Synthetic oligonucleotide
  Sense strand starting at position 3856 of SEQ ID NO: 916147
gcagaucugaaucgaauag

SEQ ID NO: 1134071 - RNA, 19 nt, Artificial Sequence
  Description of Artificial Sequence: Synthetic oligonucleotide
  Antisense strand to SEQ ID NO: 1134070
cuauucgauucagaucugc

SEQ ID NO: 1134072 - RNA, 19 nt, Artificial Sequence
  Description of Artificial Sequence: Synthetic oligonucleotide
  Sense strand starting at position 3881 of SEQ ID NO: 916147
caaugagacugucccaguu

SEQ ID NO: 1134073 - RNA, 19 nt, Artificial Sequence
  Description of Artificial Sequence: Synthetic oligonucleotide
  Antisense strand to SEQ ID NO: 1134072
aacugggacagucucauug

SEQ ID NO: 1134074 - RNA, 19 nt, Artificial Sequence
  Description of Artificial Sequence: Synthetic oligonucleotide
  Sense strand starting at position 3907 of SEQ ID NO: 916147
agaauuaaaugugcuguuu

SEQ ID NO: 1134075 - RNA, 19 nt, Artificial Sequence
  Description of Artificial Sequence: Synthetic oligonucleotide
  Antisense strand to SEQ ID NO: 1134074
aaacagcacauuuaauucu

SEQ ID NO: 1134076 - RNA, 19 nt, Artificial Sequence
  Description of Artificial Sequence: Synthetic oligonucleotide
  Sense strand starting at position 3977 of SEQ ID NO: 916147
acuuaauucucuguugguu

SEQ ID NO: 1134077 - RNA, 19 nt, Artificial Sequence
  Description of Artificial Sequence: Synthetic oligonucleotide
  Antisense strand to SEQ ID NO: 1134076
aaccaacagagaauuaagu

SEQ ID NO: 1134078 - RNA, 19 nt, Artificial Sequence
  Description of Artificial Sequence: Synthetic oligonucleotide
  Sense strand starting at position 3980 of SEQ ID NO: 916147
uaauucucuguugguuaga

SEQ ID NO: 1134079 - RNA, 19 nt, Artificial Sequence
  Description of Artificial Sequence: Synthetic oligonucleotide
  Antisense strand to SEQ ID NO: 1134078
ucuaaccaacagagaauua

SEQ ID NO: 1134080 - RNA, 19 nt, Artificial Sequence
  Description of Artificial Sequence: Synthetic oligonucleotide
  Sense strand starting at position 3981 of SEQ ID NO: 916147
aauucucuguugguuagaa

SEQ ID NO: 1134081 - RNA, 19 nt, Artificial Sequence
  Description of Artificial Sequence: Synthetic oligonucleotide
  Antisense strand to SEQ ID NO: 1134080
uucuaaccaacagagaauu

SEQ ID NO: 1134082 - RNA, 19 nt, Artificial Sequence
  Description of Artificial Sequence: Synthetic oligonucleotide
  Sense strand starting at position 3982 of SEQ ID NO: 916147
auucucuguugguuagaau

SEQ ID NO: 1134083 - RNA, 19 nt, Artificial Sequence
  Description of Artificial Sequence: Synthetic oligonucleotide
  Antisense strand to SEQ ID NO: 1134082
auucuaaccaacagagaau

SEQ ID NO: 1134084 - RNA, 19 nt, Artificial Sequence
  Description of Artificial Sequence: Synthetic oligonucleotide
  Sense strand starting at position 3983 of SEQ ID NO: 916147
uucucuguugguuagaauu

SEQ ID NO: 1134085 - RNA, 19 nt, Artificial Sequence
  Description of Artificial Sequence: Synthetic oligonucleotide
  Antisense strand to SEQ ID NO: 1134084
aauucuaaccaacagagaa

SEQ ID NO: 1134086 - RNA, 19 nt, Artificial Sequence
  Description of Artificial Sequence: Synthetic oligonucleotide
  Sense strand starting at position 36 of SEQ ID NO: 916148
uuucccucuccgugugaaa

SEQ ID NO: 1134087 - RNA, 19 nt, Artificial Sequence
  Description of Artificial Sequence: Synthetic oligonucleotide
  Antisense strand to SEQ ID NO: 1134086
uuucacacggagagggaaa

SEQ ID NO: 1134088 - RNA, 19 nt, Artificial Sequence
  Description of Artificial Sequence: Synthetic oligonucleotide
  Sense strand starting at position 191 of SEQ ID NO: 916148
augucaaugcuuuagucua

SEQ ID NO: 1134089 - RNA, 19 nt, Artificial Sequence
  Description of Artificial Sequence: Synthetic oligonucleotide
  Antisense strand to SEQ ID NO: 1134088
uagacuaaagcauugacau

SEQ ID NO: 1134090 - RNA, 19 nt, Artificial Sequence
  Description of Artificial Sequence: Synthetic oligonucleotide
  Sense strand starting at position 196 of SEQ ID NO: 916148
aaugcuuuagucuaggaga

SEQ ID NO: 1134091 - RNA, 19 nt, Artificial Sequence
  Description of Artificial Sequence: Synthetic oligonucleotide
  Antisense strand to SEQ ID NO: 1134090
ucuccuagacuaaagcauu

SEQ ID NO: 1134092 - RNA, 19 nt, Artificial Sequence
  Description of Artificial Sequence: Synthetic oligonucleotide
  Sense strand starting at position 198 of SEQ ID NO: 916148
ugcuuuagucuaggagaag

SEQ ID NO: 1134093 - RNA, 19 nt, Artificial Sequence
  Description of Artificial Sequence: Synthetic oligonucleotide
  Antisense strand to SEQ ID NO: 1134092
cuucuccuagacuaaagca

SEQ ID NO: 1134094 - RNA, 19 nt, Artificial Sequence
  Description of Artificial Sequence: Synthetic oligonucleotide
  Sense strand starting at position 199 of SEQ ID NO: 916148
gcuuuagucuaggagaaga

SEQ ID NO: 1134095 - RNA, 19 nt, Artificial Sequence
  Description of Artificial Sequence: Synthetic oligonucleotide
  Antisense strand to SEQ ID NO: 1134094
ucuucuccuagacuaaagc

SEQ ID NO: 1134096 - RNA, 19 nt, Artificial Sequence
  Description of Artificial Sequence: Synthetic oligonucleotide
  Sense strand starting at position 220 of SEQ ID NO: 916148
gaguuaucuugagagacag

SEQ ID NO: 1134097 - RNA, 19 nt, Artificial Sequence
  Description of Artificial Sequence: Synthetic oligonucleotide
  Antisense strand to SEQ ID NO: 1134096
cugucucucaagauaacuc

SEQ ID NO: 1134098 - RNA, 19 nt, Artificial Sequence
  Description of Artificial Sequence: Synthetic oligonucleotide
  Sense strand starting at position 236 of SEQ ID NO: 916148
cagaauugaugguaaugca

SEQ ID NO: 1134099 - RNA, 19 nt, Artificial Sequence
  Description of Artificial Sequence: Synthetic oligonucleotide
  Antisense strand to SEQ ID NO: 1134098
ugcauuaccaucaauucug

SEQ ID NO: 1134100 - RNA, 19 nt, Artificial Sequence
  Description of Artificial Sequence: Synthetic oligonucleotide
  Sense strand starting at position 290 of SEQ ID NO: 916148
agguauaacugggcagaca

SEQ ID NO: 1134101 - RNA, 19 nt, Artificial Sequence
  Description of Artificial Sequence: Synthetic oligonucleotide
  Antisense strand to SEQ ID NO: 1134100
ugucugcccaguuauaccu

SEQ ID NO: 1134102 - RNA, 19 nt, Artificial Sequence
  Description of Artificial Sequence: Synthetic oligonucleotide
  Sense strand starting at position 311 of SEQ ID NO: 916148
cccagaggauuccuaucuu

SEQ ID NO: 1134103 - RNA, 19 nt, Artificial Sequence
  Description of Artificial Sequence: Synthetic oligonucleotide
  Antisense strand to SEQ ID NO: 1134102
aagauaggaauccucuggg

SEQ ID NO: 1134104 - RNA, 19 nt, Artificial Sequence
  Description of Artificial Sequence: Synthetic oligonucleotide
  Sense strand starting at position 374 of SEQ ID NO: 916148
ccgggacuggccgaagaau

SEQ ID NO: 1134105 - RNA, 19 nt, Artificial Sequence
  Description of Artificial Sequence: Synthetic oligonucleotide
  Antisense strand to SEQ ID NO: 1134104
auucuucggccagucccgg

SEQ ID NO: 1134106 - RNA, 19 nt, Artificial Sequence
  Description of Artificial Sequence: Synthetic oligonucleotide
  Sense strand starting at position 383 of SEQ ID NO: 916148
gccgaagaauaacuugaaa

SEQ ID NO: 1134107 - RNA, 19 nt, Artificial Sequence
  Description of Artificial Sequence: Synthetic oligonucleotide
  Antisense strand to SEQ ID NO: 1134106
uuucaaguuauucuucggc

SEQ ID NO: 1134108 - RNA, 19 nt, Artificial Sequence
  Description of Artificial Sequence: Synthetic oligonucleotide
  Sense strand starting at position 422 of SEQ ID NO: 916148
acauguugauaguuaagua

SEQ ID NO: 1134109 - RNA, 19 nt, Artificial Sequence
  Description of Artificial Sequence: Synthetic oligonucleotide
  Antisense strand to SEQ ID NO: 1134108
uacuuaacuaucaacaugu

SEQ ID NO: 1134110 - RNA, 19 nt, Artificial Sequence
  Description of Artificial Sequence: Synthetic oligonucleotide
  Sense strand starting at position 460 of SEQ ID NO: 916148
ccuacacauuggguuauua

SEQ ID NO: 1134111 - RNA, 19 nt, Artificial Sequence
  Description of Artificial Sequence: Synthetic oligonucleotide
  Antisense strand to SEQ ID NO: 1134110
uaauaacccaauguguagg

SEQ ID NO: 1134112 - RNA, 19 nt, Artificial Sequence
  Description of Artificial Sequence: Synthetic oligonucleotide
  Sense strand starting at position 620 of SEQ ID NO: 916148
uaauaagcuccugggaguu

SEQ ID NO: 1134113 - RNA, 19 nt, Artificial Sequence
  Description of Artificial Sequence: Synthetic oligonucleotide
  Antisense strand to SEQ ID NO: 1134112
aacucccaggagcuuauua

SEQ ID NO: 1134114 - RNA, 19 nt, Artificial Sequence
  Description of Artificial Sequence: Synthetic oligonucleotide
  Sense strand starting at position 712 of SEQ ID NO: 916148
ggaacucaguaagaauaug

SEQ ID NO: 1134115 - RNA, 19 nt, Artificial Sequence
  Description of Artificial Sequence: Synthetic oligonucleotide
  Antisense strand to SEQ ID NO: 1134114
cauauucuuacugaguucc

SEQ ID NO: 1134116 - RNA, 19 nt, Artificial Sequence
  Description of Artificial Sequence: Synthetic oligonucleotide
  Sense strand starting at position 757 of SEQ ID NO: 916148
ugguaucaagcuuggagaa

SEQ ID NO: 1134117 - RNA, 19 nt, Artificial Sequence
  Description of Artificial Sequence: Synthetic oligonucleotide
  Antisense strand to SEQ ID NO: 1134116
uucuccaagcuugauacca

SEQ ID NO: 1134118 - RNA, 19 nt, Artificial Sequence
  Description of Artificial Sequence: Synthetic oligonucleotide
  Sense strand starting at position 758 of SEQ ID NO: 916148
gguaucaagcuuggagaaa

SEQ ID NO: 1134119 - RNA, 19 nt, Artificial Sequence
  Description of Artificial Sequence: Synthetic oligonucleotide
  Antisense strand to SEQ ID NO: 1134118
uuucuccaagcuugauacc

SEQ ID NO: 1134120 - RNA, 19 nt, Artificial Sequence
  Description of Artificial Sequence: Synthetic oligonucleotide
  Sense strand starting at position 847 of SEQ ID NO: 916148
ccagaagccugaucacaug

SEQ ID NO: 1134121 - RNA, 19 nt, Artificial Sequence
  Description of Artificial Sequence: Synthetic oligonucleotide
  Antisense strand to SEQ ID NO: 1134120
caugugaucaggcuucugg

SEQ ID NO: 1134122 - RNA, 19 nt, Artificial Sequence
  Description of Artificial Sequence: Synthetic oligonucleotide
  Sense strand starting at position 883 of SEQ ID NO: 916148
uguuucucucauuguugua

SEQ ID NO: 1134123 - RNA, 19 nt, Artificial Sequence
  Description of Artificial Sequence: Synthetic oligonucleotide
  Antisense strand to SEQ ID NO: 1134122
uacaacaaugagagaaaca

SEQ ID NO: 1134124 - RNA, 19 nt, Artificial Sequence
  Description of Artificial Sequence: Synthetic oligonucleotide
  Sense strand starting at position 980 of SEQ ID NO: 916148
gucccaauccauugucaaa

SEQ ID NO: 1134125 - RNA, 19 nt, Artificial Sequence
  Description of Artificial Sequence: Synthetic oligonucleotide
  Antisense strand to SEQ ID NO: 1134124
uuugacaauggauugggac

SEQ ID NO: 1134126 - RNA, 19 nt, Artificial Sequence
  Description of Artificial Sequence: Synthetic oligonucleotide
  Sense strand starting at position 1129 of SEQ ID NO: 916148
uuaugacaaagguggucua

SEQ ID NO: 1134127 - RNA, 19 nt, Artificial Sequence
  Description of Artificial Sequence: Synthetic oligonucleotide
  Antisense strand to SEQ ID NO: 1134126
uagaccaccuuugucauaa

SEQ ID NO: 1134128 - RNA, 19 nt, Artificial Sequence
  Description of Artificial Sequence: Synthetic oligonucleotide
  Sense strand starting at position 1160 of SEQ ID NO: 916148
ugugucucucuggguuaau

SEQ ID NO: 1134129 - RNA, 19 nt, Artificial Sequence
  Description of Artificial Sequence: Synthetic oligonucleotide
  Antisense strand to SEQ ID NO: 1134128
auuaacccagagagacaca

SEQ ID NO: 1134130 - RNA, 19 nt, Artificial Sequence
  Description of Artificial Sequence: Synthetic oligonucleotide
  Sense strand starting at position 1161 of SEQ ID NO: 916148
gugucucucuggguuaaug

SEQ ID NO: 1134131 - RNA, 19 nt, Artificial Sequence
  Description of Artificial Sequence: Synthetic oligonucleotide
  Antisense strand to SEQ ID NO: 1134130
cauuaacccagagagacac

SEQ ID NO: 1134132 - RNA, 19 nt, Artificial Sequence
  Description of Artificial Sequence: Synthetic oligonucleotide
  Sense strand starting at position 1172 of SEQ ID NO: 916148
gguuaaugccauugcuucu

SEQ ID NO: 1134133 - RNA, 19 nt, Artificial Sequence
  Description of Artificial Sequence: Synthetic oligonucleotide
  Antisense strand to SEQ ID NO: 1134132
agaagcaauggcauuaacc

SEQ ID NO: 1134134 - RNA, 19 nt, Artificial Sequence
  Description of Artificial Sequence: Synthetic oligonucleotide
  Sense strand starting at position 1248 of SEQ ID NO: 916148
aggcaucgcgcauuguuaa

SEQ ID NO: 1134135 - RNA, 19 nt, Artificial Sequence
  Description of Artificial Sequence: Synthetic oligonucleotide
  Antisense strand to SEQ ID NO: 1134134
uuaacaaugcgcgaugccu

SEQ ID NO: 1134136 - RNA, 19 nt, Artificial Sequence
  Description of Artificial Sequence: Synthetic oligonucleotide
  Sense strand starting at position 1256 of SEQ ID NO: 916148
cgcauuguuaaaggaaaga

SEQ ID NO: 1134137 - RNA, 19 nt, Artificial Sequence
  Description of Artificial Sequence: Synthetic oligonucleotide
  Antisense strand to SEQ ID NO: 1134136
ucuuuccuuuaacaaugcg

SEQ ID NO: 1134138 - RNA, 19 nt, Artificial Sequence
  Description of Artificial Sequence: Synthetic oligonucleotide
  Sense strand starting at position 1289 of SEQ ID NO: 916148
gcggauuucccaugugucu

SEQ ID NO: 1134139 - RNA, 19 nt, Artificial Sequence
  Description of Artificial Sequence: Synthetic oligonucleotide
  Antisense strand to SEQ ID NO: 1134138
agacacaugggaaauccgc

SEQ ID NO: 1134140 - RNA, 19 nt, Artificial Sequence
  Description of Artificial Sequence: Synthetic oligonucleotide
  Sense strand starting at position 1343 of SEQ ID NO: 916148
cguggagcccuccacgaaa

SEQ ID NO: 1134141 - RNA, 19 nt, Artificial Sequence
  Description of Artificial Sequence: Synthetic oligonucleotide
  Antisense strand to SEQ ID NO: 1134140
uuucguggagggcuccacg

SEQ ID NO: 1134142 - RNA, 19 nt, Artificial Sequence
  Description of Artificial Sequence: Synthetic oligonucleotide
  Sense strand starting at position 2061 of SEQ ID NO: 916148
gcugaagacgcauaugcuu

SEQ ID NO: 1134143 - RNA, 19 nt, Artificial Sequence
  Description of Artificial Sequence: Synthetic oligonucleotide
  Antisense strand to SEQ ID NO: 1134142
aagcauaugcgucuucagc

SEQ ID NO: 1134144 - RNA, 19 nt, Artificial Sequence
  Description of Artificial Sequence: Synthetic oligonucleotide
  Sense strand starting at position 2130 of SEQ ID NO: 916148
cucgaauuucccugcgcga

SEQ ID NO: 1134145 - RNA, 19 nt, Artificial Sequence
  Description of Artificial Sequence: Synthetic oligonucleotide
  Antisense strand to SEQ ID NO: 1134144
ucgcgcagggaaauucgag

SEQ ID NO: 1134146 - RNA, 19 nt, Artificial Sequence
  Description of Artificial Sequence: Synthetic oligonucleotide
  Sense strand starting at position 2132 of SEQ ID NO: 916148
cgaauuucccugcgcgaaa

SEQ ID NO: 1134147 - RNA, 19 nt, Artificial Sequence
  Description of Artificial Sequence: Synthetic oligonucleotide
  Antisense strand to SEQ ID NO: 1134146
uuucgcgcagggaaauucg

SEQ ID NO: 1134148 - RNA, 19 nt, Artificial Sequence
  Description of Artificial Sequence: Synthetic oligonucleotide
  Sense strand starting at position 2133 of SEQ ID NO: 916148
gaauuucccugcgcgaaau

SEQ ID NO: 1134149 - RNA, 19 nt, Artificial Sequence
  Description of Artificial Sequence: Synthetic oligonucleotide
  Antisense strand to SEQ ID NO: 1134148
auuucgcgcagggaaauuc

SEQ ID NO: 1134150 - RNA, 19 nt, Artificial Sequence
  Description of Artificial Sequence: Synthetic oligonucleotide
  Sense strand starting at position 2145 of SEQ ID NO: 916148
gcgaaaugggcucauggua

SEQ ID NO: 1134151 - RNA, 19 nt, Artificial Sequence
  Description of Artificial Sequence: Synthetic oligonucleotide
  Antisense strand to SEQ ID NO: 1134150
uaccaugagcccauuucgc

SEQ ID NO: 1134152 - RNA, 19 nt, Artificial Sequence
  Description of Artificial Sequence: Synthetic oligonucleotide
  Sense strand starting at position 2258 of SEQ ID NO: 916148
auacuagacuuagcaaugu

SEQ ID NO: 1134153 - RNA, 19 nt, Artificial Sequence
  Description of Artificial Sequence: Synthetic oligonucleotide
  Antisense strand to SEQ ID NO: 1134152
acauugcuaagucuaguau

SEQ ID NO: 1134154 - RNA, 19 nt, Artificial Sequence
  Description of Artificial Sequence: Synthetic oligonucleotide
  Sense strand starting at position 2262 of SEQ ID NO: 916148
uagacuuagcaauguaugu

SEQ ID NO: 1134155 - RNA, 19 nt, Artificial Sequence
  Description of Artificial Sequence: Synthetic oligonucleotide
  Antisense strand to SEQ ID NO: 1134154
acauacauugcuaagucua

SEQ ID NO: 1134156 - RNA, 19 nt, Artificial Sequence
  Description of Artificial Sequence: Synthetic oligonucleotide
  Sense strand starting at position 2266 of SEQ ID NO: 916148
cuuagcaauguaugucuau

SEQ ID NO: 1134157 - RNA, 19 nt, Artificial Sequence
  Description of Artificial Sequence: Synthetic oligonucleotide
  Antisense strand to SEQ ID NO: 1134156
auagacauacauugcuaag

SEQ ID NO: 1134158 - RNA, 19 nt, Artificial Sequence
  Description of Artificial Sequence: Synthetic oligonucleotide
  Sense strand starting at position 2998 of SEQ ID NO: 916148
gagcaaacacuccgucuaa

SEQ ID NO: 1134159 - RNA, 19 nt, Artificial Sequence
  Description of Artificial Sequence: Synthetic oligonucleotide
  Antisense strand to SEQ ID NO: 1134158
uuagacggaguguuugcuc

SEQ ID NO: 1134160 - RNA, 19 nt, Artificial Sequence
  Description of Artificial Sequence: Synthetic oligonucleotide
  Sense strand starting at position 2999 of SEQ ID NO: 916148
agcaaacacuccgucuaaa

SEQ ID NO: 1134161 - RNA, 19 nt, Artificial Sequence
  Description of Artificial Sequence: Synthetic oligonucleotide
  Antisense strand to SEQ ID NO: 1134160
uuuagacggaguguuugcu

SEQ ID NO: 1134162 - RNA, 19 nt, Artificial Sequence
  Description of Artificial Sequence: Synthetic oligonucleotide
  Sense strand starting at position 3109 of SEQ ID NO: 916148
cucacucuguggccuaaua

SEQ ID NO: 1134163 - RNA, 19 nt, Artificial Sequence
  Description of Artificial Sequence: Synthetic oligonucleotide
  Antisense strand to SEQ ID NO: 1134162
uauuaggccacagagugag

SEQ ID NO: 1134164 - RNA, 19 nt, Artificial Sequence
  Description of Artificial Sequence: Synthetic oligonucleotide
  Sense strand starting at position 3118 of SEQ ID NO: 916148
uggccuaauagguguucca

SEQ ID NO: 1134165 - RNA, 19 nt, Artificial Sequence
  Description of Artificial Sequence: Synthetic oligonucleotide
  Antisense strand to SEQ ID NO: 1134164
uggaacaccuauuaggcca

SEQ ID NO: 1134166 - RNA, 19 nt, Artificial Sequence
  Description of Artificial Sequence: Synthetic oligonucleotide
  Sense strand starting at position 29 of SEQ ID NO: 916149
aguggugguacauguuaaa

SEQ ID NO: 1134167 - RNA, 19 nt, Artificial Sequence
  Description of Artificial Sequence: Synthetic oligonucleotide
  Antisense strand to SEQ ID NO: 1134166
uuuaacauguaccaccacu

SEQ ID NO: 1134168 - RNA, 19 nt, Artificial Sequence
  Description of Artificial Sequence: Synthetic oligonucleotide
  Sense strand starting at position 36 of SEQ ID NO: 916149
guacauguuaaacggucaa

SEQ ID NO: 1134169 - RNA, 19 nt, Artificial Sequence
  Description of Artificial Sequence: Synthetic oligonucleotide
  Antisense strand to SEQ ID NO: 1134168
uugaccguuuaacauguac

SEQ ID NO: 1134170 - RNA, 19 nt, Artificial Sequence
  Description of Artificial Sequence: Synthetic oligonucleotide
  Sense strand starting at position 48 of SEQ ID NO: 916149
cggucaauccugcgagugu

SEQ ID NO: 1134171 - RNA, 19 nt, Artificial Sequence
  Description of Artificial Sequence: Synthetic oligonucleotide
  Antisense strand to SEQ ID NO: 1134170
acacucgcaggauugaccg

SEQ ID NO: 1134172 - RNA, 19 nt, Artificial Sequence
  Description of Artificial Sequence: Synthetic oligonucleotide
  Sense strand starting at position 49 of SEQ ID NO: 916149
ggucaauccugcgagugug

SEQ ID NO: 1134173 - RNA, 19 nt, Artificial Sequence
  Description of Artificial Sequence: Synthetic oligonucleotide
  Antisense strand to SEQ ID NO: 1134172
cacacucgcaggauugacc

SEQ ID NO: 1134174 - RNA, 19 nt, Artificial Sequence
  Description of Artificial Sequence: Synthetic oligonucleotide
  Sense strand starting at position 50 of SEQ ID NO: 916149
gucaauccugcgagugugu

SEQ ID NO: 1134175 - RNA, 19 nt, Artificial Sequence
  Description of Artificial Sequence: Synthetic oligonucleotide
  Antisense strand to SEQ ID NO: 1134174
acacacucgcaggauugac

SEQ ID NO: 1134176 - RNA, 19 nt, Artificial Sequence
  Description of Artificial Sequence: Synthetic oligonucleotide
  Sense strand starting at position 52 of SEQ ID NO: 916149
caauccugcgaguguguuu

SEQ ID NO: 1134177 - RNA, 19 nt, Artificial Sequence
  Description of Artificial Sequence: Synthetic oligonucleotide
  Antisense strand to SEQ ID NO: 1134176
aaacacacucgcaggauug

SEQ ID NO: 1134178 - RNA, 19 nt, Artificial Sequence
  Description of Artificial Sequence: Synthetic oligonucleotide
  Sense strand starting at position 117 of SEQ ID NO: 916149
gagguccaguuauaaucua

SEQ ID NO: 1134179 - RNA, 19 nt, Artificial Sequence
  Description of Artificial Sequence: Synthetic oligonucleotide
  Antisense strand to SEQ ID NO: 1134178
uagauuauaacuggaccuc

SEQ ID NO: 1134180 - RNA, 19 nt, Artificial Sequence
  Description of Artificial Sequence: Synthetic oligonucleotide
  Sense strand starting at position 295 of SEQ ID NO: 916149
gcaagcaaauaaugaauau

SEQ ID NO: 1134181 - RNA, 19 nt, Artificial Sequence
  Description of Artificial Sequence: Synthetic oligonucleotide
  Antisense strand to SEQ ID NO: 1134180
auauucauuauuugcuugc

SEQ ID NO: 1134182 - RNA, 19 nt, Artificial Sequence
  Description of Artificial Sequence: Synthetic oligonucleotide
  Sense strand starting at position 699 of SEQ ID NO: 916149
ugaccucaguaguuugaga

SEQ ID NO: 1134183 - RNA, 19 nt, Artificial Sequence
  Description of Artificial Sequence: Synthetic oligonucleotide
  Antisense strand to SEQ ID NO: 1134182
ucucaaacuacugagguca

SEQ ID NO: 1134184 - RNA, 19 nt, Artificial Sequence
  Description of Artificial Sequence: Synthetic oligonucleotide
  Sense strand starting at position 953 of SEQ ID NO: 916149
aaaugaaucugccugguac

SEQ ID NO: 1134185 - RNA, 19 nt, Artificial Sequence
  Description of Artificial Sequence: Synthetic oligonucleotide
  Antisense strand to SEQ ID NO: 1134184
guaccaggcagauucauuu

SEQ ID NO: 1134186 - RNA, 19 nt, Artificial Sequence
  Description of Artificial Sequence: Synthetic oligonucleotide
  Sense strand starting at position 960 of SEQ ID NO: 916149
ucugccugguaccuuuaaa

SEQ ID NO: 1134187 - RNA, 19 nt, Artificial Sequence
  Description of Artificial Sequence: Synthetic oligonucleotide
  Antisense strand to SEQ ID NO: 1134186
uuuaaagguaccaggcaga

SEQ ID NO: 1134188 - RNA, 19 nt, Artificial Sequence
  Description of Artificial Sequence: Synthetic oligonucleotide
  Sense strand starting at position 1160 of SEQ ID NO: 916149
ccuucuagcuguuucugaa

SEQ ID NO: 1134189 - RNA, 19 nt, Artificial Sequence
  Description of Artificial Sequence: Synthetic oligonucleotide
  Antisense strand to SEQ ID NO: 1134188
uucagaaacagcuagaagg

SEQ ID NO: 1134190 - RNA, 19 nt, Artificial Sequence
  Description of Artificial Sequence: Synthetic oligonucleotide
  Sense strand starting at position 1164 of SEQ ID NO: 916149
cuagcuguuucugaagcga

SEQ ID NO: 1134191 - RNA, 19 nt, Artificial Sequence
  Description of Artificial Sequence: Synthetic oligonucleotide
  Antisense strand to SEQ ID NO: 1134190
ucgcuucagaaacagcuag

SEQ ID NO: 1134192 - RNA, 19 nt, Artificial Sequence
  Description of Artificial Sequence: Synthetic oligonucleotide
  Sense strand starting at position 1167 of SEQ ID NO: 916149
gcuguuucugaagcgaguu

SEQ ID NO: 1134193 - RNA, 19 nt, Artificial Sequence
  Description of Artificial Sequence: Synthetic oligonucleotide
  Antisense strand to SEQ ID NO: 1134192
aacucgcuucagaaacagc

SEQ ID NO: 1134194 - RNA, 19 nt, Artificial Sequence
  Description of Artificial Sequence: Synthetic oligonucleotide
  Sense strand starting at position 1313 of SEQ ID NO: 916149
uuguauuugcgaugcuaau

SEQ ID NO: 1134195 - RNA, 19 nt, Artificial Sequence
  Description of Artificial Sequence: Synthetic oligonucleotide
  Antisense strand to SEQ ID NO: 1134194
auuagcaucgcaaauacaa

SEQ ID NO: 1134196 - RNA, 19 nt, Artificial Sequence
  Description of Artificial Sequence: Synthetic oligonucleotide
  Sense strand starting at position 1348 of SEQ ID NO: 916149
uuuaaagucuacuguaguu

SEQ ID NO: 1134197 - RNA, 19 nt, Artificial Sequence
  Description of Artificial Sequence: Synthetic oligonucleotide
  Antisense strand to SEQ ID NO: 1134196
aacuacaguagacuuuaaa

SEQ ID NO: 1134198 - RNA, 19 nt, Artificial Sequence
  Description of Artificial Sequence: Synthetic oligonucleotide
  Sense strand starting at position 1529 of SEQ ID NO: 916149
cggauuauugcacagugga

SEQ ID NO: 1134199 - RNA, 19 nt, Artificial Sequence
  Description of Artificial Sequence: Synthetic oligonucleotide
  Antisense strand to SEQ ID NO: 1134198
uccacugugcaauaauccg

SEQ ID NO: 1134200 - RNA, 19 nt, Artificial Sequence
  Description of Artificial Sequence: Synthetic oligonucleotide
  Sense strand starting at position 1643 of SEQ ID NO: 916149
ggguuaaggaguugauaca

SEQ ID NO: 1134201 - RNA, 19 nt, Artificial Sequence
  Description of Artificial Sequence: Synthetic oligonucleotide
  Antisense strand to SEQ ID NO: 1134200
uguaucaacuccuuaaccc

SEQ ID NO: 1134202 - RNA, 19 nt, Artificial Sequence
  Description of Artificial Sequence: Synthetic oligonucleotide
  Sense strand starting at position 1652 of SEQ ID NO: 916149
aguugauacaagcguugga

SEQ ID NO: 1134203 - RNA, 19 nt, Artificial Sequence
  Description of Artificial Sequence: Synthetic oligonucleotide
  Antisense strand to SEQ ID NO: 1134202
uccaacgcuuguaucaacu

SEQ ID NO: 1134204 - RNA, 19 nt, Artificial Sequence
  Description of Artificial Sequence: Synthetic oligonucleotide
  Sense strand starting at position 1690 of SEQ ID NO: 916149
gcgggcuaagucaguguuu

SEQ ID NO: 1134205 - RNA, 19 nt, Artificial Sequence
  Description of Artificial Sequence: Synthetic oligonucleotide
  Antisense strand to SEQ ID NO: 1134204
aaacacugacuuagcccgc

SEQ ID NO: 1134206 - RNA, 19 nt, Artificial Sequence
  Description of Artificial Sequence: Synthetic oligonucleotide
  Sense strand starting at position 1693 of SEQ ID NO: 916149
ggcuaagucaguguuugcu

SEQ ID NO: 1134207 - RNA, 19 nt, Artificial Sequence
  Description of Artificial Sequence: Synthetic oligonucleotide
  Antisense strand to SEQ ID NO: 1134206
agcaaacacugacuuagcc

SEQ ID NO: 1134208 - RNA, 19 nt, Artificial Sequence
  Description of Artificial Sequence: Synthetic oligonucleotide
  Sense strand starting at position 1699 of SEQ ID NO: 916149
gucaguguuugcugugauu

SEQ ID NO: 1134209 - RNA, 19 nt, Artificial Sequence
  Description of Artificial Sequence: Synthetic oligonucleotide
  Antisense strand to SEQ ID NO: 1134208
aaucacagcaaacacugac

SEQ ID NO: 1134210 - RNA, 19 nt, Artificial Sequence
  Description of Artificial Sequence: Synthetic oligonucleotide
  Sense strand starting at position 1720 of SEQ ID NO: 916149
ucaaucaaggccugacuuu

SEQ ID NO: 1134211 - RNA, 19 nt, Artificial Sequence
  Description of Artificial Sequence: Synthetic oligonucleotide
  Antisense strand to SEQ ID NO: 1134210
aaagucaggccuugauuga

SEQ ID NO: 1134212 - RNA, 19 nt, Artificial Sequence
  Description of Artificial Sequence: Synthetic oligonucleotide
  Sense strand starting at position 2650 of SEQ ID NO: 916149
acgaguuccucauggccua

SEQ ID NO: 1134213 - RNA, 19 nt, Artificial Sequence
  Description of Artificial Sequence: Synthetic oligonucleotide
  Antisense strand to SEQ ID NO: 1134212
uaggccaugaggaacucgu

SEQ ID NO: 1134214 - RNA, 19 nt, Artificial Sequence
  Description of Artificial Sequence: Synthetic oligonucleotide
  Sense strand starting at position 2682 of SEQ ID NO: 916149
ggagcagaguucuuuagcu

SEQ ID NO: 1134215 - RNA, 19 nt, Artificial Sequence
  Description of Artificial Sequence: Synthetic oligonucleotide
  Antisense strand to SEQ ID NO: 1134214
agcuaaagaacucugcucc

SEQ ID NO: 1134216 - RNA, 19 nt, Artificial Sequence
  Description of Artificial Sequence: Synthetic oligonucleotide
  Sense strand starting at position 2684 of SEQ ID NO: 916149
agcagaguucuuuagcuuu

SEQ ID NO: 1134217 - RNA, 19 nt, Artificial Sequence
  Description of Artificial Sequence: Synthetic oligonucleotide
  Antisense strand to SEQ ID NO: 1134216
aaagcuaaagaacucugcu

SEQ ID NO: 1134218 - RNA, 19 nt, Artificial Sequence
  Description of Artificial Sequence: Synthetic oligonucleotide
  Sense strand starting at position 2687 of SEQ ID NO: 916149
agaguucuuuagcuuucuu

SEQ ID NO: 1134219 - RNA, 19 nt, Artificial Sequence
  Description of Artificial Sequence: Synthetic oligonucleotide
  Antisense strand to SEQ ID NO: 1134218
aagaaagcuaaagaacucu

SEQ ID NO: 1134220 - RNA, 19 nt, Artificial Sequence
  Description of Artificial Sequence: Synthetic oligonucleotide
  Sense strand starting at position 67 of SEQ ID NO: 916150
aguccuacuccacaguaaa

SEQ ID NO: 1134221 - RNA, 19 nt, Artificial Sequence
  Description of Artificial Sequence: Synthetic oligonucleotide
  Antisense strand to SEQ ID NO: 1134220
uuuacuguggaguaggacu

SEQ ID NO: 1134222 - RNA, 19 nt, Artificial Sequence
  Description of Artificial Sequence: Synthetic oligonucleotide
  Sense strand starting at position 205 of SEQ ID NO: 916150
augagauggccacaaguuu

SEQ ID NO: 1134223 - RNA, 19 nt, Artificial Sequence
  Description of Artificial Sequence: Synthetic oligonucleotide
  Antisense strand to SEQ ID NO: 1134222
aaacuuguggccaucucau

SEQ ID NO: 1134224 - RNA, 19 nt, Artificial Sequence
  Description of Artificial Sequence: Synthetic oligonucleotide
  Sense strand starting at position 212 of SEQ ID NO: 916150
ggccacaaguuucuacgua

SEQ ID NO: 1134225 - RNA, 19 nt, Artificial Sequence
  Description of Artificial Sequence: Synthetic oligonucleotide
  Antisense strand to SEQ ID NO: 1134224
uacguagaaacuuguggcc

SEQ ID NO: 1134226 - RNA, 19 nt, Artificial Sequence
  Description of Artificial Sequence: Synthetic oligonucleotide
  Sense strand starting at position 399 of SEQ ID NO: 916150
ccgaguauccuccuucguu

SEQ ID NO: 1134227 - RNA, 19 nt, Artificial Sequence
  Description of Artificial Sequence: Synthetic oligonucleotide
  Antisense strand to SEQ ID NO: 1134226
aacgaaggaggauacucgg

SEQ ID NO: 1134228 - RNA, 19 nt, Artificial Sequence
  Description of Artificial Sequence: Synthetic oligonucleotide
  Sense strand starting at position 403 of SEQ ID NO: 916150
guauccuccuucguuggaa

SEQ ID NO: 1134229 - RNA, 19 nt, Artificial Sequence
  Description of Artificial Sequence: Synthetic oligonucleotide
  Antisense strand to SEQ ID NO: 1134228
uuccaacgaaggaggauac

SEQ ID NO: 1134230 - RNA, 19 nt, Artificial Sequence
  Description of Artificial Sequence: Synthetic oligonucleotide
  Sense strand starting at position 404 of SEQ ID NO: 916150
uauccuccuucguuggaaa

SEQ ID NO: 1134231 - RNA, 19 nt, Artificial Sequence
  Description of Artificial Sequence: Synthetic oligonucleotide
  Antisense strand to SEQ ID NO: 1134230
uuuccaacgaaggaggaua

SEQ ID NO: 1134232 - RNA, 19 nt, Artificial Sequence
  Description of Artificial Sequence: Synthetic oligonucleotide
  Sense strand starting at position 450 of SEQ ID NO: 916150
uuucuuuccgcuggacaca

SEQ ID NO: 1134233 - RNA, 19 nt, Artificial Sequence
  Description of Artificial Sequence: Synthetic oligonucleotide
  Antisense strand to SEQ ID NO: 1134232
uguguccagcggaaagaaa

SEQ ID NO: 1134234 - RNA, 19 nt, Artificial Sequence
  Description of Artificial Sequence: Synthetic oligonucleotide
  Sense strand starting at position 607 of SEQ ID NO: 916150
ucuggaauuccagguguuc

SEQ ID NO: 1134235 - RNA, 19 nt, Artificial Sequence
  Description of Artificial Sequence: Synthetic oligonucleotide
  Antisense strand to SEQ ID NO: 1134234
gaacaccuggaauuccaga

SEQ ID NO: 1134236 - RNA, 19 nt, Artificial Sequence
  Description of Artificial Sequence: Synthetic oligonucleotide
  Sense strand starting at position 616 of SEQ ID NO: 916150
ccagguguucccuggcagu

SEQ ID NO: 1134237 - RNA, 19 nt, Artificial Sequence
  Description of Artificial Sequence: Synthetic oligonucleotide
  Antisense strand to SEQ ID NO: 1134236
acugccagggaacaccugg

SEQ ID NO: 1134238 - RNA, 19 nt, Artificial Sequence
  Description of Artificial Sequence: Synthetic oligonucleotide
  Sense strand starting at position 698 of SEQ ID NO: 916150
uugagaguuccugguccac

SEQ ID NO: 1134239 - RNA, 19 nt, Artificial Sequence
  Description of Artificial Sequence: Synthetic oligonucleotide
  Antisense strand to SEQ ID NO: 1134238
guggaccaggaacucucaa

SEQ ID NO: 1134240 - RNA, 19 nt, Artificial Sequence
  Description of Artificial Sequence: Synthetic oligonucleotide
  Sense strand starting at position 700 of SEQ ID NO: 916150
gagaguuccugguccacuc

SEQ ID NO: 1134241 - RNA, 19 nt, Artificial Sequence
  Description of Artificial Sequence: Synthetic oligonucleotide
  Antisense strand to SEQ ID NO: 1134240
gaguggaccaggaacucuc

SEQ ID NO: 1134242 - RNA, 19 nt, Artificial Sequence
  Description of Artificial Sequence: Synthetic oligonucleotide
  Sense strand starting at position 718 of SEQ ID NO: 916150
ccugauucuucuucugaag

SEQ ID NO: 1134243 - RNA, 19 nt, Artificial Sequence
  Description of Artificial Sequence: Synthetic oligonucleotide
  Antisense strand to SEQ ID NO: 1134242
cuucagaagaagaaucagg

SEQ ID NO: 1134244 - RNA, 19 nt, Artificial Sequence
  Description of Artificial Sequence: Synthetic oligonucleotide
  Sense strand starting at position 733 of SEQ ID NO: 916150
gaagacgucucacucugau

SEQ ID NO: 1134245 - RNA, 19 nt, Artificial Sequence
  Description of Artificial Sequence: Synthetic oligonucleotide
  Antisense strand to SEQ ID NO: 1134244
aucagagugagacgucuuc

SEQ ID NO: 1134246 - RNA, 19 nt, Artificial Sequence
  Description of Artificial Sequence: Synthetic oligonucleotide
  Sense strand starting at position 847 of SEQ ID NO: 916150
ggaccagagugcucuguga

SEQ ID NO: 1134247 - RNA, 19 nt, Artificial Sequence
  Description of Artificial Sequence: Synthetic oligonucleotide
  Antisense strand to SEQ ID NO: 1134246
ucacagagcacucuggucc

SEQ ID NO: 1134248 - RNA, 19 nt, Artificial Sequence
  Description of Artificial Sequence: Synthetic oligonucleotide
  Sense strand starting at position 906 of SEQ ID NO: 916150
gaguccugagaaugaaggu

SEQ ID NO: 1134249 - RNA, 19 nt, Artificial Sequence
  Description of Artificial Sequence: Synthetic oligonucleotide
  Antisense strand to SEQ ID NO: 1134248
accuucauucucaggacuc

SEQ ID NO: 1134250 - RNA, 19 nt, Artificial Sequence
  Description of Artificial Sequence: Synthetic oligonucleotide
  Sense strand starting at position 974 of SEQ ID NO: 916150
uguggugggcuccauacaa

SEQ ID NO: 1134251 - RNA, 19 nt, Artificial Sequence
  Description of Artificial Sequence: Synthetic oligonucleotide
  Antisense strand to SEQ ID NO: 1134250
uuguauggagcccaccaca

SEQ ID NO: 1134252 - RNA, 19 nt, Artificial Sequence
  Description of Artificial Sequence: Synthetic oligonucleotide
  Sense strand starting at position 1030 of SEQ ID NO: 916150
gggcuuccugagggucuua

SEQ ID NO: 1134253 - RNA, 19 nt, Artificial Sequence
  Description of Artificial Sequence: Synthetic oligonucleotide
  Antisense strand to SEQ ID NO: 1134252
uaagacccucaggaagccc

SEQ ID NO: 1134254 - RNA, 19 nt, Artificial Sequence
  Description of Artificial Sequence: Synthetic oligonucleotide
  Sense strand starting at position 1057 of SEQ ID NO: 916150
ccaucaugguguguucuga

SEQ ID NO: 1134255 - RNA, 19 nt, Artificial Sequence
  Description of Artificial Sequence: Synthetic oligonucleotide
  Antisense strand to SEQ ID NO: 1134254
ucagaacacaccaugaugg

SEQ ID NO: 1134256 - RNA, 19 nt, Artificial Sequence
  Description of Artificial Sequence: Synthetic oligonucleotide
  Sense strand starting at position 1065 of SEQ ID NO: 916150
guguguucugaugccugua

SEQ ID NO: 1134257 - RNA, 19 nt, Artificial Sequence
  Description of Artificial Sequence: Synthetic oligonucleotide
  Antisense strand to SEQ ID NO: 1134256
uacaggcaucagaacacac

SEQ ID NO: 1134258 - RNA, 19 nt, Artificial Sequence
  Description of Artificial Sequence: Synthetic oligonucleotide
  Sense strand starting at position 1068 of SEQ ID NO: 916150
uguucugaugccuguaaca

SEQ ID NO: 1134259 - RNA, 19 nt, Artificial Sequence
  Description of Artificial Sequence: Synthetic oligonucleotide
  Antisense strand to SEQ ID NO: 1134258
uguuacaggcaucagaaca

SEQ ID NO: 1134260 - RNA, 19 nt, Artificial Sequence
  Description of Artificial Sequence: Synthetic oligonucleotide
  Sense strand starting at position 1070 of SEQ ID NO: 916150
uucugaugccuguaacaga

SEQ ID NO: 1134261 - RNA, 19 nt, Artificial Sequence
  Description of Artificial Sequence: Synthetic oligonucleotide
  Antisense strand to SEQ ID NO: 1134260
ucuguuacaggcaucagaa

SEQ ID NO: 1134262 - RNA, 19 nt, Artificial Sequence
  Description of Artificial Sequence: Synthetic oligonucleotide
  Sense strand starting at position 2223 of SEQ ID NO: 916150
agggcagacucucaggauu

SEQ ID NO: 1134263 - RNA, 19 nt, Artificial Sequence
  Description of Artificial Sequence: Synthetic oligonucleotide
  Antisense strand to SEQ ID NO: 1134262
aauccugagagucugcccu

SEQ ID NO: 1134264 - RNA, 19 nt, Artificial Sequence
  Description of Artificial Sequence: Synthetic oligonucleotide
  Sense strand starting at position 2234 of SEQ ID NO: 916150
ucaggauugcucugggugu

SEQ ID NO: 1134265 - RNA, 19 nt, Artificial Sequence
  Description of Artificial Sequence: Synthetic oligonucleotide
  Antisense strand to SEQ ID NO: 1134264
acacccagagcaauccuga

SEQ ID NO: 1134266 - RNA, 19 nt, Artificial Sequence
  Description of Artificial Sequence: Synthetic oligonucleotide
  Sense strand starting at position 2236 of SEQ ID NO: 916150
aggauugcucuggguguau

SEQ ID NO: 1134267 - RNA, 19 nt, Artificial Sequence
  Description of Artificial Sequence: Synthetic oligonucleotide
  Antisense strand to SEQ ID NO: 1134266
auacacccagagcaauccu

SEQ ID NO: 1134268 - RNA, 19 nt, Artificial Sequence
  Description of Artificial Sequence: Synthetic oligonucleotide
  Sense strand starting at position 2248 of SEQ ID NO: 916150
gguguauuccuaggcuuug

SEQ ID NO: 1134269 - RNA, 19 nt, Artificial Sequence
  Description of Artificial Sequence: Synthetic oligonucleotide
  Antisense strand to SEQ ID NO: 1134268
caaagccuaggaauacacc

SEQ ID NO: 1134270 - RNA, 19 nt, Artificial Sequence
  Description of Artificial Sequence: Synthetic oligonucleotide
  Sense strand starting at position 2249 of SEQ ID NO: 916150
guguauuccuaggcuuugu

SEQ ID NO: 1134271 - RNA, 19 nt, Artificial Sequence
  Description of Artificial Sequence: Synthetic oligonucleotide
  Antisense strand to SEQ ID NO: 1134270
acaaagccuaggaauacac

SEQ ID NO: 1134272 - RNA, 19 nt, Artificial Sequence
  Description of Artificial Sequence: Synthetic oligonucleotide
  Sense strand starting at position 2262 of SEQ ID NO: 916150
cuuuguauuccugggagau

SEQ ID NO: 1134273 - RNA, 19 nt, Artificial Sequence
  Description of Artificial Sequence: Synthetic oligonucleotide
  Antisense strand to SEQ ID NO: 1134272
aucucccaggaauacaaag

SEQ ID NO: 1134274 - RNA, 19 nt, Artificial Sequence
  Description of Artificial Sequence: Synthetic oligonucleotide
  Sense strand starting at position 2263 of SEQ ID NO: 916150
uuuguauuccugggagaug

SEQ ID NO: 1134275 - RNA, 19 nt, Artificial Sequence
  Description of Artificial Sequence: Synthetic oligonucleotide
  Antisense strand to SEQ ID NO: 1134274
caucucccaggaauacaaa

SEQ ID NO: 1134276 - RNA, 19 nt, Artificial Sequence
  Description of Artificial Sequence: Synthetic oligonucleotide
  Sense strand starting at position 3440 of SEQ ID NO: 916150
gcaggauggugaguaguua

SEQ ID NO: 1134277 - RNA, 19 nt, Artificial Sequence
  Description of Artificial Sequence: Synthetic oligonucleotide
  Antisense strand to SEQ ID NO: 1134276
uaacuacucaccauccugc

SEQ ID NO: 1134278 - RNA, 19 nt, Artificial Sequence
  Description of Artificial Sequence: Synthetic oligonucleotide
  Sense strand starting at position 3441 of SEQ ID NO: 916150
caggauggugaguaguuaa

SEQ ID NO: 1134279 - RNA, 19 nt, Artificial Sequence
  Description of Artificial Sequence: Synthetic oligonucleotide
  Antisense strand to SEQ ID NO: 1134278
uuaacuacucaccauccug

SEQ ID NO: 1134280 - RNA, 19 nt, Artificial Sequence
  Description of Artificial Sequence: Synthetic oligonucleotide
  Sense strand starting at position 3444 of SEQ ID NO: 916150
gauggugaguaguuaacau

SEQ ID NO: 1134281 - RNA, 19 nt, Artificial Sequence
  Description of Artificial Sequence: Synthetic oligonucleotide
  Antisense strand to SEQ ID NO: 1134280
auguuaacuacucaccauc

SEQ ID NO: 1134282 - RNA, 19 nt, Artificial Sequence
  Description of Artificial Sequence: Synthetic oligonucleotide
  Sense strand starting at position 3546 of SEQ ID NO: 916150
cuguaaggaccuugauauc

SEQ ID NO: 1134283 - RNA, 19 nt, Artificial Sequence
  Description of Artificial Sequence: Synthetic oligonucleotide
  Antisense strand to SEQ ID NO: 1134282
gauaucaagguccuuacag

SEQ ID NO: 1134284 - RNA, 19 nt, Artificial Sequence
  Description of Artificial Sequence: Synthetic oligonucleotide
  Sense strand starting at position 3581 of SEQ ID NO: 916150
aaaguaaugugccugcauu

SEQ ID NO: 1134285 - RNA, 19 nt, Artificial Sequence
  Description of Artificial Sequence: Synthetic oligonucleotide
  Antisense strand to SEQ ID NO: 1134284
aaugcaggcacauuacuuu

SEQ ID NO: 1134286 - RNA, 19 nt, Artificial Sequence
  Description of Artificial Sequence: Synthetic oligonucleotide
  Sense strand starting at position 3582 of SEQ ID NO: 916150
aaguaaugugccugcauuu

SEQ ID NO: 1134287 - RNA, 19 nt, Artificial Sequence
  Description of Artificial Sequence: Synthetic oligonucleotide
  Antisense strand to SEQ ID NO: 1134286
aaaugcaggcacauuacuu

SEQ ID NO: 1134288 - RNA, 19 nt, Artificial Sequence
  Description of Artificial Sequence: Synthetic oligonucleotide
  Sense strand starting at position 3767 of SEQ ID NO: 916150
gugagaugucugugggcaa

SEQ ID NO: 1134289 - RNA, 19 nt, Artificial Sequence
  Description of Artificial Sequence: Synthetic oligonucleotide
  Antisense strand to SEQ ID NO: 1134288
uugcccacagacaucucac

SEQ ID NO: 1134290 - RNA, 19 nt, Artificial Sequence
  Description of Artificial Sequence: Synthetic oligonucleotide
  Sense strand starting at position 3770 of SEQ ID NO: 916150
agaugucugugggcaaagu

SEQ ID NO: 1134291 - RNA, 19 nt, Artificial Sequence
  Description of Artificial Sequence: Synthetic oligonucleotide
  Antisense strand to SEQ ID NO: 1134290
acuuugcccacagacaucu

SEQ ID NO: 1134292 - RNA, 19 nt, Artificial Sequence
  Description of Artificial Sequence: Synthetic oligonucleotide
  Sense strand starting at position 3779 of SEQ ID NO: 916150
ugggcaaagucccugcuua

SEQ ID NO: 1134293 - RNA, 19 nt, Artificial Sequence
  Description of Artificial Sequence: Synthetic oligonucleotide
  Antisense strand to SEQ ID NO: 1134292
uaagcagggacuuugccca

SEQ ID NO: 1134294 - RNA, 19 nt, Artificial Sequence
  Description of Artificial Sequence: Synthetic oligonucleotide
  Sense strand starting at position 3780 of SEQ ID NO: 916150
gggcaaagucccugcuuau

SEQ ID NO: 1134295 - RNA, 19 nt, Artificial Sequence
  Description of Artificial Sequence: Synthetic oligonucleotide
  Antisense strand to SEQ ID NO: 1134294
auaagcagggacuuugccc

SEQ ID NO: 1134296 - RNA, 19 nt, Artificial Sequence
  Description of Artificial Sequence: Synthetic oligonucleotide
  Sense strand starting at position 3899 of SEQ ID NO: 916150
gggugacugucucuacuua

SEQ ID NO: 1134297 - RNA, 19 nt, Artificial Sequence
  Description of Artificial Sequence: Synthetic oligonucleotide
  Antisense strand to SEQ ID NO: 1134296
uaaguagagacagucaccc

SEQ ID NO: 1134298 - RNA, 19 nt, Artificial Sequence
  Description of Artificial Sequence: Synthetic oligonucleotide
  Sense strand starting at position 3900 of SEQ ID NO: 916150
ggugacugucucuacuuaa

SEQ ID NO: 1134299 - RNA, 19 nt, Artificial Sequence
  Description of Artificial Sequence: Synthetic oligonucleotide
  Antisense strand to SEQ ID NO: 1134298
uuaaguagagacagucacc

SEQ ID NO: 1134300 - RNA, 19 nt, Artificial Sequence
  Description of Artificial Sequence: Synthetic oligonucleotide
  Sense strand starting at position 508 of SEQ ID NO: 916151
aaaguagagucauaagaug

SEQ ID NO: 1134301 - RNA, 19 nt, Artificial Sequence
  Description of Artificial Sequence: Synthetic oligonucleotide
  Antisense strand to SEQ ID NO: 1134300
caucuuaugacucuacuuu

SEQ ID NO: 1134302 - RNA, 19 nt, Artificial Sequence
  Description of Artificial Sequence: Synthetic oligonucleotide
  Sense strand starting at position 671 of SEQ ID NO: 916151
agaggagaaagcuguuuaa

SEQ ID NO: 1134303 - RNA, 19 nt, Artificial Sequence
  Description of Artificial Sequence: Synthetic oligonucleotide
  Antisense strand to SEQ ID NO: 1134302
uuaaacagcuuucuccucu

SEQ ID NO: 1134304 - RNA, 19 nt, Artificial Sequence
  Description of Artificial Sequence: Synthetic oligonucleotide
  Sense strand starting at position 790 of SEQ ID NO: 916151
uuugaaagccucugccuua

SEQ ID NO: 1134305 - RNA, 19 nt, Artificial Sequence
  Description of Artificial Sequence: Synthetic oligonucleotide
  Antisense strand to SEQ ID NO: 1134304
uaaggcagaggcuuucaaa

SEQ ID NO: 1134306 - RNA, 19 nt, Artificial Sequence
  Description of Artificial Sequence: Synthetic oligonucleotide
  Sense strand starting at position 883 of SEQ ID NO: 916151
cucuccaggccaugagauu

SEQ ID NO: 1134307 - RNA, 19 nt, Artificial Sequence
  Description of Artificial Sequence: Synthetic oligonucleotide
  Antisense strand to SEQ ID NO: 1134306
aaucucauggccuggagag

SEQ ID NO: 1134308 - RNA, 19 nt, Artificial Sequence
  Description of Artificial Sequence: Synthetic oligonucleotide
  Sense strand starting at position 926 of SEQ ID NO: 916151
gguccugaauucccuuuau

SEQ ID NO: 1134309 - RNA, 19 nt, Artificial Sequence
  Description of Artificial Sequence: Synthetic oligonucleotide
  Antisense strand to SEQ ID NO: 1134308
auaaagggaauucaggacc

SEQ ID NO: 1134310 - RNA, 19 nt, Artificial Sequence
  Description of Artificial Sequence: Synthetic oligonucleotide
  Sense strand starting at position 1187 of SEQ ID NO: 916151
gucauuuccuuugaccaca

SEQ ID NO: 1134311 - RNA, 19 nt, Artificial Sequence
  Description of Artificial Sequence: Synthetic oligonucleotide
  Antisense strand to SEQ ID NO: 1134310
uguggucaaaggaaaugac

SEQ ID NO: 1134312 - RNA, 19 nt, Artificial Sequence
  Description of Artificial Sequence: Synthetic oligonucleotide
  Sense strand starting at position 1265 of SEQ ID NO: 916151
gugucuguugugucacgga

SEQ ID NO: 1134313 - RNA, 19 nt, Artificial Sequence
  Description of Artificial Sequence: Synthetic oligonucleotide
  Antisense strand to SEQ ID NO: 1134312
uccgugacacaacagacac

SEQ ID NO: 1134314 - RNA, 19 nt, Artificial Sequence
  Description of Artificial Sequence: Synthetic oligonucleotide
  Sense strand starting at position 1268 of SEQ ID NO: 916151
ucuguugugucacggaagu

SEQ ID NO: 1134315 - RNA, 19 nt, Artificial Sequence
  Description of Artificial Sequence: Synthetic oligonucleotide
  Antisense strand to SEQ ID NO: 1134314
acuuccgugacacaacaga

SEQ ID NO: 1134316 - RNA, 19 nt, Artificial Sequence
  Description of Artificial Sequence: Synthetic oligonucleotide
  Sense strand starting at position 1602 of SEQ ID NO: 916151
uccuaucuguagugcuaaa

SEQ ID NO: 1134317 - RNA, 19 nt, Artificial Sequence
  Description of Artificial Sequence: Synthetic oligonucleotide
  Antisense strand to SEQ ID NO: 1134316
uuuagcacuacagauagga

SEQ ID NO: 1134318 - RNA, 19 nt, Artificial Sequence
  Description of Artificial Sequence: Synthetic oligonucleotide
  Sense strand starting at position 1625 of SEQ ID NO: 916151
aggauaaacuccuguaaau

SEQ ID NO: 1134319 - RNA, 19 nt, Artificial Sequence
  Description of Artificial Sequence: Synthetic oligonucleotide
  Antisense strand to SEQ ID NO: 1134318
auuuacaggaguuuauccu

SEQ ID NO: 1134320 - RNA, 19 nt, Artificial Sequence
  Description of Artificial Sequence: Synthetic oligonucleotide
  Sense strand starting at position 1646 of SEQ ID NO: 916151
aagaauacguccuugauua

SEQ ID NO: 1134321 - RNA, 19 nt, Artificial Sequence
  Description of Artificial Sequence: Synthetic oligonucleotide
  Antisense strand to SEQ ID NO: 1134320
uaaucaaggacguauucuu

SEQ ID NO: 1134322 - RNA, 19 nt, Artificial Sequence
  Description of Artificial Sequence: Synthetic oligonucleotide
  Sense strand starting at position 1647 of SEQ ID NO: 916151
agaauacguccuugauuac

SEQ ID NO: 1134323 - RNA, 19 nt, Artificial Sequence
  Description of Artificial Sequence: Synthetic oligonucleotide
  Antisense strand to SEQ ID NO: 1134322
guaaucaaggacguauucu

SEQ ID NO: 1134324 - RNA, 19 nt, Artificial Sequence
  Description of Artificial Sequence: Synthetic oligonucleotide
  Sense strand starting at position 2121 of SEQ ID NO: 916151
gcuccaaucccggguucua

SEQ ID NO: 1134325 - RNA, 19 nt, Artificial Sequence
  Description of Artificial Sequence: Synthetic oligonucleotide
  Antisense strand to SEQ ID NO: 1134324
uagaacccgggauuggagc

SEQ ID NO: 1134326 - RNA, 19 nt, Artificial Sequence
  Description of Artificial Sequence: Synthetic oligonucleotide
  Sense strand starting at position 2131 of SEQ ID NO: 916151
cggguucuacuccgugaac

SEQ ID NO: 1134327 - RNA, 19 nt, Artificial Sequence
  Description of Artificial Sequence: Synthetic oligonucleotide
  Antisense strand to SEQ ID NO: 1134326
guucacggaguagaacccg

SEQ ID NO: 1134328 - RNA, 19 nt, Artificial Sequence
  Description of Artificial Sequence: Synthetic oligonucleotide
  Sense strand starting at position 2132 of SEQ ID NO: 916151
ggguucuacuccgugaacu

SEQ ID NO: 1134329 - RNA, 19 nt, Artificial Sequence
  Description of Artificial Sequence: Synthetic oligonucleotide
  Antisense strand to SEQ ID NO: 1134328
aguucacggaguagaaccc

SEQ ID NO: 1134330 - RNA, 19 nt, Artificial Sequence
  Description of Artificial Sequence: Synthetic oligonucleotide
  Sense strand starting at position 2133 of SEQ ID NO: 916151
gguucuacuccgugaacuu

SEQ ID NO: 1134331 - RNA, 19 nt, Artificial Sequence
  Description of Artificial Sequence: Synthetic oligonucleotide
  Antisense strand to SEQ ID NO: 1134330
aaguucacggaguagaacc

SEQ ID NO: 1134332 - RNA, 19 nt, Artificial Sequence
  Description of Artificial Sequence: Synthetic oligonucleotide
  Sense strand starting at position 2134 of SEQ ID NO: 916151
guucuacuccgugaacuug

SEQ ID NO: 1134333 - RNA, 19 nt, Artificial Sequence
  Description of Artificial Sequence: Synthetic oligonucleotide
  Antisense strand to SEQ ID NO: 1134332
caaguucacggaguagaac

SEQ ID NO: 1134334 - RNA, 19 nt, Artificial Sequence
  Description of Artificial Sequence: Synthetic oligonucleotide
  Sense strand starting at position 2143 of SEQ ID NO: 916151
cgugaacuuggcuaaguca

SEQ ID NO: 1134335 - RNA, 19 nt, Artificial Sequence
  Description of Artificial Sequence: Synthetic oligonucleotide
  Antisense strand to SEQ ID NO: 1134334
ugacuuagccaaguucacg

SEQ ID NO: 1134336 - RNA, 19 nt, Artificial Sequence
  Description of Artificial Sequence: Synthetic oligonucleotide
  Sense strand starting at position 2191 of SEQ ID NO: 916151
cuggcaaucucguggaucu

SEQ ID NO: 1134337 - RNA, 19 nt, Artificial Sequence
  Description of Artificial Sequence: Synthetic oligonucleotide
  Antisense strand to SEQ ID NO: 1134336
agauccacgagauugccag

SEQ ID NO: 1134338 - RNA, 19 nt, Artificial Sequence
  Description of Artificial Sequence: Synthetic oligonucleotide
  Sense strand starting at position 2333 of SEQ ID NO: 916151
aggaaaugcugcucucuau

SEQ ID NO: 1134339 - RNA, 19 nt, Artificial Sequence
  Description of Artificial Sequence: Synthetic oligonucleotide
  Antisense strand to SEQ ID NO: 1134338
auagagagcagcauuuccu

SEQ ID NO: 1134340 - RNA, 19 nt, Artificial Sequence
  Description of Artificial Sequence: Synthetic oligonucleotide
  Sense strand starting at position 2486 of SEQ ID NO: 916151
gcgcgcuaagcuuugcaaa

SEQ ID NO: 1134341 - RNA, 19 nt, Artificial Sequence
  Description of Artificial Sequence: Synthetic oligonucleotide
  Antisense strand to SEQ ID NO: 1134340
uuugcaaagcuuagcgcgc

SEQ ID NO: 1134342 - RNA, 19 nt, Artificial Sequence
  Description of Artificial Sequence: Synthetic oligonucleotide
  Sense strand starting at position 2488 of SEQ ID NO: 916151
gcgcuaagcuuugcaaaca

SEQ ID NO: 1134343 - RNA, 19 nt, Artificial Sequence
  Description of Artificial Sequence: Synthetic oligonucleotide
  Antisense strand to SEQ ID NO: 1134342
uguuugcaaagcuuagcgc

SEQ ID NO: 1134344 - RNA, 19 nt, Artificial Sequence
  Description of Artificial Sequence: Synthetic oligonucleotide
  Sense strand starting at position 2638 of SEQ ID NO: 916151
cagguuuacuucccgagga

SEQ ID NO: 1134345 - RNA, 19 nt, Artificial Sequence
  Description of Artificial Sequence: Synthetic oligonucleotide
  Antisense strand to SEQ ID NO: 1134344
uccucgggaaguaaaccug

SEQ ID NO: 1134346 - RNA, 19 nt, Artificial Sequence
  Description of Artificial Sequence: Synthetic oligonucleotide
  Sense strand starting at position 2639 of SEQ ID NO: 916151
agguuuacuucccgaggaa

SEQ ID NO: 1134347 - RNA, 19 nt, Artificial Sequence
  Description of Artificial Sequence: Synthetic oligonucleotide
  Antisense strand to SEQ ID NO: 1134346
uuccucgggaaguaaaccu

SEQ ID NO: 1134348 - RNA, 19 nt, Artificial Sequence
  Description of Artificial Sequence: Synthetic oligonucleotide
  Sense strand starting at position 2640 of SEQ ID NO: 916151
gguuuacuucccgaggaac

SEQ ID NO: 1134349 - RNA, 19 nt, Artificial Sequence
  Description of Artificial Sequence: Synthetic oligonucleotide
  Antisense strand to SEQ ID NO: 1134348
guuccucgggaaguaaacc

SEQ ID NO: 1134350 - RNA, 19 nt, Artificial Sequence
  Description of Artificial Sequence: Synthetic oligonucleotide
  Sense strand starting at position 2789 of SEQ ID NO: 916151
caauguaagcgcgaggaaa

SEQ ID NO: 1134351 - RNA, 19 nt, Artificial Sequence
  Description of Artificial Sequence: Synthetic oligonucleotide
  Antisense strand to SEQ ID NO: 1134350
uuuccucgcgcuuacauug

SEQ ID NO: 1134352 - RNA, 19 nt, Artificial Sequence
  Description of Artificial Sequence: Synthetic oligonucleotide
  Sense strand starting at position 2903 of SEQ ID NO: 916151
agagcuguuaccgggagga

SEQ ID NO: 1134353 - RNA, 19 nt, Artificial Sequence
  Description of Artificial Sequence: Synthetic oligonucleotide
  Antisense strand to SEQ ID NO: 1134352
uccucccgguaacagcucu

SEQ ID NO: 1134354 - RNA, 19 nt, Artificial Sequence
  Description of Artificial Sequence: Synthetic oligonucleotide
  Sense strand starting at position 2905 of SEQ ID NO: 916151
agcuguuaccgggaggaaa

SEQ ID NO: 1134355 - RNA, 19 nt, Artificial Sequence
  Description of Artificial Sequence: Synthetic oligonucleotide
  Antisense strand to SEQ ID NO: 1134354
uuuccucccgguaacagcu

SEQ ID NO: 1134356 - RNA, 19 nt, Artificial Sequence
  Description of Artificial Sequence: Synthetic oligonucleotide
  Sense strand starting at position 3108 of SEQ ID NO: 916151
cgcacucacuuugucacaa

SEQ ID NO: 1134357 - RNA, 19 nt, Artificial Sequence
  Description of Artificial Sequence: Synthetic oligonucleotide
  Antisense strand to SEQ ID NO: 1134356
uugugacaaagugagugcg

SEQ ID NO: 1134358 - RNA, 19 nt, Artificial Sequence
  Description of Artificial Sequence: Synthetic oligonucleotide
  Sense strand starting at position 3160 of SEQ ID NO: 916151
cccaaauuguuguucuaua

SEQ ID NO: 1134359 - RNA, 19 nt, Artificial Sequence
  Description of Artificial Sequence: Synthetic oligonucleotide
  Antisense strand to SEQ ID NO: 1134358
uauagaacaacaauuuggg

SEQ ID NO: 1134360 - RNA, 19 nt, Artificial Sequence
  Description of Artificial Sequence: Synthetic oligonucleotide
  Sense strand starting at position 3165 of SEQ ID NO: 916151
auuguuguucuauaaacug

SEQ ID NO: 1134361 - RNA, 19 nt, Artificial Sequence
  Description of Artificial Sequence: Synthetic oligonucleotide
  Antisense strand to SEQ ID NO: 1134360
caguuuauagaacaacaau

SEQ ID NO: 1134362 - RNA, 19 nt, Artificial Sequence
  Description of Artificial Sequence: Synthetic oligonucleotide
  Sense strand starting at position 3483 of SEQ ID NO: 916151
ucugucuuguucuuuacua

SEQ ID NO: 1134363 - RNA, 19 nt, Artificial Sequence
  Description of Artificial Sequence: Synthetic oligonucleotide
  Antisense strand to SEQ ID NO: 1134362
uaguaaagaacaagacaga

SEQ ID NO: 1134364 - RNA, 19 nt, Artificial Sequence
  Description of Artificial Sequence: Synthetic oligonucleotide
  Sense strand starting at position 31 of SEQ ID NO: 916152
auauaacugucaguacuag

SEQ ID NO: 1134365 - RNA, 19 nt, Artificial Sequence
  Description of Artificial Sequence: Synthetic oligonucleotide
  Antisense strand to SEQ ID NO: 1134364
cuaguacugacaguuauau

SEQ ID NO: 1134366 - RNA, 19 nt, Artificial Sequence
  Description of Artificial Sequence: Synthetic oligonucleotide
  Sense strand starting at position 77 of SEQ ID NO: 916152
ucagaaggaugggaucuuu

SEQ ID NO: 1134367 - RNA, 19 nt, Artificial Sequence
  Description of Artificial Sequence: Synthetic oligonucleotide
  Antisense strand to SEQ ID NO: 1134366
aaagaucccauccuucuga

SEQ ID NO: 1134368 - RNA, 19 nt, Artificial Sequence
  Description of Artificial Sequence: Synthetic oligonucleotide
  Sense strand starting at position 275 of SEQ ID NO: 916152
uguggaaaguuucuagugu

SEQ ID NO: 1134369 - RNA, 19 nt, Artificial Sequence
  Description of Artificial Sequence: Synthetic oligonucleotide
  Antisense strand to SEQ ID NO: 1134368
acacuagaaacuuuccaca

SEQ ID NO: 1134370 - RNA, 19 nt, Artificial Sequence
  Description of Artificial Sequence: Synthetic oligonucleotide
  Sense strand starting at position 409 of SEQ ID NO: 916152
ugugguuagagugagcaau

SEQ ID NO: 1134371 - RNA, 19 nt, Artificial Sequence
  Description of Artificial Sequence: Synthetic oligonucleotide
  Antisense strand to SEQ ID NO: 1134370
auugcucacucuaaccaca

SEQ ID NO: 1134372 - RNA, 19 nt, Artificial Sequence
  Description of Artificial Sequence: Synthetic oligonucleotide
  Sense strand starting at position 411 of SEQ ID NO: 916152
ugguuagagugagcaauau

SEQ ID NO: 1134373 - RNA, 19 nt, Artificial Sequence
  Description of Artificial Sequence: Synthetic oligonucleotide
  Antisense strand to SEQ ID NO: 1134372
auauugcucacucuaacca

SEQ ID NO: 1134374 - RNA, 19 nt, Artificial Sequence
  Description of Artificial Sequence: Synthetic oligonucleotide
  Sense strand starting at position 502 of SEQ ID NO: 916152
ccucguaauuuguuugaug

SEQ ID NO: 1134375 - RNA, 19 nt, Artificial Sequence
  Description of Artificial Sequence: Synthetic oligonucleotide
  Antisense strand to SEQ ID NO: 1134374
caucaaacaaauuacgagg

SEQ ID NO: 1134376 - RNA, 19 nt, Artificial Sequence
  Description of Artificial Sequence: Synthetic oligonucleotide
  Sense strand starting at position 504 of SEQ ID NO: 916152
ucguaauuuguuugaugcu

SEQ ID NO: 1134377 - RNA, 19 nt, Artificial Sequence
  Description of Artificial Sequence: Synthetic oligonucleotide
  Antisense strand to SEQ ID NO: 1134376
agcaucaaacaaauuacga

SEQ ID NO: 1134378 - RNA, 19 nt, Artificial Sequence
  Description of Artificial Sequence: Synthetic oligonucleotide
  Sense strand starting at position 520 of SEQ ID NO: 916152
gcuucugagucuccaaaca

SEQ ID NO: 1134379 - RNA, 19 nt, Artificial Sequence
  Description of Artificial Sequence: Synthetic oligonucleotide
  Antisense strand to SEQ ID NO: 1134378
uguuuggagacucagaagc

SEQ ID NO: 1134380 - RNA, 19 nt, Artificial Sequence
  Description of Artificial Sequence: Synthetic oligonucleotide
  Sense strand starting at position 560 of SEQ ID NO: 916152
cuagaauacguaggcaaga

SEQ ID NO: 1134381 - RNA, 19 nt, Artificial Sequence
  Description of Artificial Sequence: Synthetic oligonucleotide
  Antisense strand to SEQ ID NO: 1134380
ucuugccuacguauucuag

SEQ ID NO: 1134382 - RNA, 19 nt, Artificial Sequence
  Description of Artificial Sequence: Synthetic oligonucleotide
  Sense strand starting at position 561 of SEQ ID NO: 916152
uagaauacguaggcaagau

SEQ ID NO: 1134383 - RNA, 19 nt, Artificial Sequence
  Description of Artificial Sequence: Synthetic oligonucleotide
  Antisense strand to SEQ ID NO: 1134382
aucuugccuacguauucua

SEQ ID NO: 1134384 - RNA, 19 nt, Artificial Sequence
  Description of Artificial Sequence: Synthetic oligonucleotide
  Sense strand starting at position 562 of SEQ ID NO: 916152
agaauacguaggcaagauu

SEQ ID NO: 1134385 - RNA, 19 nt, Artificial Sequence
  Description of Artificial Sequence: Synthetic oligonucleotide
  Antisense strand to SEQ ID NO: 1134384
aaucuugccuacguauucu

SEQ ID NO: 1134386 - RNA, 19 nt, Artificial Sequence
  Description of Artificial Sequence: Synthetic oligonucleotide
  Sense strand starting at position 571 of SEQ ID NO: 916152
aggcaagauugagcagaau

SEQ ID NO: 1134387 - RNA, 19 nt, Artificial Sequence
  Description of Artificial Sequence: Synthetic oligonucleotide
  Antisense strand to SEQ ID NO: 1134386
auucugcucaaucuugccu

SEQ ID NO: 1134388 - RNA, 19 nt, Artificial Sequence
  Description of Artificial Sequence: Synthetic oligonucleotide
  Sense strand starting at position 580 of SEQ ID NO: 916152
ugagcagaaucuuucccaa

SEQ ID NO: 1134389 - RNA, 19 nt, Artificial Sequence
  Description of Artificial Sequence: Synthetic oligonucleotide
  Antisense strand to SEQ ID NO: 1134388
uugggaaagauucugcuca

SEQ ID NO: 1134390 - RNA, 19 nt, Artificial Sequence
  Description of Artificial Sequence: Synthetic oligonucleotide
  Sense strand starting at position 608 of SEQ ID NO: 916152
agaccaaggaaauguguuu

SEQ ID NO: 1134391 - RNA, 19 nt, Artificial Sequence
  Description of Artificial Sequence: Synthetic oligonucleotide
  Antisense strand to SEQ ID NO: 1134390
aaacacauuuccuuggucu

SEQ ID NO: 1134392 - RNA, 19 nt, Artificial Sequence
  Description of Artificial Sequence: Synthetic oligonucleotide
  Sense strand starting at position 613 of SEQ ID NO: 916152
aaggaaauguguuucuaaa

SEQ ID NO: 1134393 - RNA, 19 nt, Artificial Sequence
  Description of Artificial Sequence: Synthetic oligonucleotide
  Antisense strand to SEQ ID NO: 1134392
uuuagaaacacauuuccuu

SEQ ID NO: 1134394 - RNA, 19 nt, Artificial Sequence
  Description of Artificial Sequence: Synthetic oligonucleotide
  Sense strand starting at position 705 of SEQ ID NO: 916152
aguuuccaguguuuggaua

SEQ ID NO: 1134395 - RNA, 19 nt, Artificial Sequence
  Description of Artificial Sequence: Synthetic oligonucleotide
  Antisense strand to SEQ ID NO: 1134394
uauccaaacacuggaaacu

SEQ ID NO: 1134396 - RNA, 19 nt, Artificial Sequence
  Description of Artificial Sequence: Synthetic oligonucleotide
  Sense strand starting at position 713 of SEQ ID NO: 916152
guguuuggauagccacuaa

SEQ ID NO: 1134397 - RNA, 19 nt, Artificial Sequence
  Description of Artificial Sequence: Synthetic oligonucleotide
  Antisense strand to SEQ ID NO: 1134396
uuaguggcuauccaaacac

SEQ ID NO: 1134398 - RNA, 19 nt, Artificial Sequence
  Description of Artificial Sequence: Synthetic oligonucleotide
  Sense strand starting at position 717 of SEQ ID NO: 916152
uuggauagccacuaauacu

SEQ ID NO: 1134399 - RNA, 19 nt, Artificial Sequence
  Description of Artificial Sequence: Synthetic oligonucleotide
  Antisense strand to SEQ ID NO: 1134398
aguauuaguggcuauccaa

SEQ ID NO: 1134400 - RNA, 19 nt, Artificial Sequence
  Description of Artificial Sequence: Synthetic oligonucleotide
  Sense strand starting at position 740 of SEQ ID NO: 916152
acaguaaguuccuucugau

SEQ ID NO: 1134401 - RNA, 19 nt, Artificial Sequence
  Description of Artificial Sequence: Synthetic oligonucleotide
  Antisense strand to SEQ ID NO: 1134400
aucagaaggaacuuacugu

SEQ ID NO: 1134402 - RNA, 19 nt, Artificial Sequence
  Description of Artificial Sequence: Synthetic oligonucleotide
  Sense strand starting at position 883 of SEQ ID NO: 916152
uucucugaacucuaaucga

SEQ ID NO: 1134403 - RNA, 19 nt, Artificial Sequence
  Description of Artificial Sequence: Synthetic oligonucleotide
  Antisense strand to SEQ ID NO: 1134402
ucgauuagaguucagagaa

SEQ ID NO: 1134404 - RNA, 19 nt, Artificial Sequence
  Description of Artificial Sequence: Synthetic oligonucleotide
  Sense strand starting at position 886 of SEQ ID NO: 916152
ucugaacucuaaucgaagu

SEQ ID NO: 1134405 - RNA, 19 nt, Artificial Sequence
  Description of Artificial Sequence: Synthetic oligonucleotide
  Antisense strand to SEQ ID NO: 1134404
acuucgauuagaguucaga

SEQ ID NO: 1134406 - RNA, 19 nt, Artificial Sequence
  Description of Artificial Sequence: Synthetic oligonucleotide
  Sense strand starting at position 892 of SEQ ID NO: 916152
cucuaaucgaaguagcaga

SEQ ID NO: 1134407 - RNA, 19 nt, Artificial Sequence
  Description of Artificial Sequence: Synthetic oligonucleotide
  Antisense strand to SEQ ID NO: 1134406
ucugcuacuucgauuagag

SEQ ID NO: 1134408 - RNA, 19 nt, Artificial Sequence
  Description of Artificial Sequence: Synthetic oligonucleotide
  Sense strand starting at position 989 of SEQ ID NO: 916152
augaguuagcuaugagaag

SEQ ID NO: 1134409 - RNA, 19 nt, Artificial Sequence
  Description of Artificial Sequence: Synthetic oligonucleotide
  Antisense strand to SEQ ID NO: 1134408
cuucucauagcuaacucau

SEQ ID NO: 1134410 - RNA, 19 nt, Artificial Sequence
  Description of Artificial Sequence: Synthetic oligonucleotide
  Sense strand starting at position 1084 of SEQ ID NO: 916152
aucggauauuccuucccaa

SEQ ID NO: 1134411 - RNA, 19 nt, Artificial Sequence
  Description of Artificial Sequence: Synthetic oligonucleotide
  Antisense strand to SEQ ID NO: 1134410
uugggaaggaauauccgau

SEQ ID NO: 1134412 - RNA, 19 nt, Artificial Sequence
  Description of Artificial Sequence: Synthetic oligonucleotide
  Sense strand starting at position 1107 of SEQ ID NO: 916152
cgcagaacucuagauacac

SEQ ID NO: 1134413 - RNA, 19 nt, Artificial Sequence
  Description of Artificial Sequence: Synthetic oligonucleotide
  Antisense strand to SEQ ID NO: 1134412
guguaucuagaguucugcg

SEQ ID NO: 1134414 - RNA, 19 nt, Artificial Sequence
  Description of Artificial Sequence: Synthetic oligonucleotide
  Sense strand starting at position 1165 of SEQ ID NO: 916152
ucgaaaccugguggaauua

SEQ ID NO: 1134415 - RNA, 19 nt, Artificial Sequence
  Description of Artificial Sequence: Synthetic oligonucleotide
  Antisense strand to SEQ ID NO: 1134414
uaauuccaccagguuucga

SEQ ID NO: 1134416 - RNA, 19 nt, Artificial Sequence
  Description of Artificial Sequence: Synthetic oligonucleotide
  Sense strand starting at position 2024 of SEQ ID NO: 916152
aggccugcugggaguugua

SEQ ID NO: 1134417 - RNA, 19 nt, Artificial Sequence
  Description of Artificial Sequence: Synthetic oligonucleotide
  Antisense strand to SEQ ID NO: 1134416
uacaacucccagcaggccu

SEQ ID NO: 1134418 - RNA, 19 nt, Artificial Sequence
  Description of Artificial Sequence: Synthetic oligonucleotide
  Sense strand starting at position 2203 of SEQ ID NO: 916152
gcacgauggaugugacagu

SEQ ID NO: 1134419 - RNA, 19 nt, Artificial Sequence
  Description of Artificial Sequence: Synthetic oligonucleotide
  Antisense strand to SEQ ID NO: 1134418
acugucacauccaucgugc

SEQ ID NO: 1134420 - RNA, 19 nt, Artificial Sequence
  Description of Artificial Sequence: Synthetic oligonucleotide
  Sense strand starting at position 2216 of SEQ ID NO: 916152
gacagugcugggugugaau

SEQ ID NO: 1134421 - RNA, 19 nt, Artificial Sequence
  Description of Artificial Sequence: Synthetic oligonucleotide
  Antisense strand to SEQ ID NO: 1134420
auucacacccagcacuguc

SEQ ID NO: 1134422 - RNA, 19 nt, Artificial Sequence
  Description of Artificial Sequence: Synthetic oligonucleotide
  Sense strand starting at position 2225 of SEQ ID NO: 916152
gggugugaauauguguuaa

SEQ ID NO: 1134423 - RNA, 19 nt, Artificial Sequence
  Description of Artificial Sequence: Synthetic oligonucleotide
  Antisense strand to SEQ ID NO: 1134422
uuaacacauauucacaccc

SEQ ID NO: 1134424 - RNA, 19 nt, Artificial Sequence
  Description of Artificial Sequence: Synthetic oligonucleotide
  Sense strand starting at position 2227 of SEQ ID NO: 916152
gugugaauauguguuaaag

SEQ ID NO: 1134425 - RNA, 19 nt, Artificial Sequence
  Description of Artificial Sequence: Synthetic oligonucleotide
  Antisense strand to SEQ ID NO: 1134424
cuuuaacacauauucacac

SEQ ID NO: 1134426 - RNA, 19 nt, Artificial Sequence
  Description of Artificial Sequence: Synthetic oligonucleotide
  Sense strand starting at position 2247 of SEQ ID NO: 916152
cgcaauggugugucucuua

SEQ ID NO: 1134427 - RNA, 19 nt, Artificial Sequence
  Description of Artificial Sequence: Synthetic oligonucleotide
  Antisense strand to SEQ ID NO: 1134426
uaagagacacaccauugcg

SEQ ID NO: 1134428 - RNA, 19 nt, Artificial Sequence
  Description of Artificial Sequence: Synthetic oligonucleotide
  Sense strand starting at position 2250 of SEQ ID NO: 916152
aauggugugucucuuaauu

SEQ ID NO: 1134429 - RNA, 19 nt, Artificial Sequence
  Description of Artificial Sequence: Synthetic oligonucleotide
  Antisense strand to SEQ ID NO: 1134428
aauuaagagacacaccauu

SEQ ID NO: 1134430 - RNA, 19 nt, Artificial Sequence
  Description of Artificial Sequence: Synthetic oligonucleotide
  Sense strand starting at position 2255 of SEQ ID NO: 916152
ugugucucuuaauuaucca

SEQ ID NO: 1134431 - RNA, 19 nt, Artificial Sequence
  Description of Artificial Sequence: Synthetic oligonucleotide
  Antisense strand to SEQ ID NO: 1134430
uggauaauuaagagacaca

SEQ ID NO: 1134432 - RNA, 19 nt, Artificial Sequence
  Description of Artificial Sequence: Synthetic oligonucleotide
  Sense strand starting at position 2259 of SEQ ID NO: 916152
ucucuuaauuauccagugu

SEQ ID NO: 1134433 - RNA, 19 nt, Artificial Sequence
  Description of Artificial Sequence: Synthetic oligonucleotide
  Antisense strand to SEQ ID NO: 1134432
acacuggauaauuaagaga

SEQ ID NO: 1134434 - RNA, 19 nt, Artificial Sequence
  Description of Artificial Sequence: Synthetic oligonucleotide
  Sense strand starting at position 2263 of SEQ ID NO: 916152
uuaauuauccagugucacu

SEQ ID NO: 1134435 - RNA, 19 nt, Artificial Sequence
  Description of Artificial Sequence: Synthetic oligonucleotide
  Antisense strand to SEQ ID NO: 1134434
agugacacuggauaauuaa

SEQ ID NO: 1134436 - RNA, 19 nt, Artificial Sequence
  Description of Artificial Sequence: Synthetic oligonucleotide
  Sense strand starting at position 2591 of SEQ ID NO: 916152
cagugugacuuccuuauga

SEQ ID NO: 1134437 - RNA, 19 nt, Artificial Sequence
  Description of Artificial Sequence: Synthetic oligonucleotide
  Antisense strand to SEQ ID NO: 1134436
ucauaaggaagucacacug

SEQ ID NO: 1134438 - RNA, 19 nt, Artificial Sequence
  Description of Artificial Sequence: Synthetic oligonucleotide
  Sense strand starting at position 2593 of SEQ ID NO: 916152
gugugacuuccuuaugaag

SEQ ID NO: 1134439 - RNA, 19 nt, Artificial Sequence
  Description of Artificial Sequence: Synthetic oligonucleotide
  Antisense strand to SEQ ID NO: 1134438
cuucauaaggaagucacac

SEQ ID NO: 1134440 - RNA, 19 nt, Artificial Sequence
  Description of Artificial Sequence: Synthetic oligonucleotide
  Sense strand starting at position 2653 of SEQ ID NO: 916152
agcuuauggccgcaaacaa

SEQ ID NO: 1134441 - RNA, 19 nt, Artificial Sequence
  Description of Artificial Sequence: Synthetic oligonucleotide
  Antisense strand to SEQ ID NO: 1134440
uuguuugcggccauaagcu

SEQ ID NO: 1134442 - RNA, 19 nt, Artificial Sequence
  Description of Artificial Sequence: Synthetic oligonucleotide
  Sense strand starting at position 3028 of SEQ ID NO: 916152
cugggcauuuauuaucaau

SEQ ID NO: 1134443 - RNA, 19 nt, Artificial Sequence
  Description of Artificial Sequence: Synthetic oligonucleotide
  Antisense strand to SEQ ID NO: 1134442
auugauaauaaaugcccag

SEQ ID NO: 1134444 - RNA, 19 nt, Artificial Sequence
  Description of Artificial Sequence: Synthetic oligonucleotide
  Sense strand starting at position 29 of SEQ ID NO: 916153
aucaaaguucgagaucgau

SEQ ID NO: 1134445 - RNA, 19 nt, Artificial Sequence
  Description of Artificial Sequence: Synthetic oligonucleotide
  Antisense strand to SEQ ID NO: 1134444
aucgaucucgaacuuugau

SEQ ID NO: 1134446 - RNA, 19 nt, Artificial Sequence
  Description of Artificial Sequence: Synthetic oligonucleotide
  Sense strand starting at position 38 of SEQ ID NO: 916153
cgagaucgauucucaaagu

SEQ ID NO: 1134447 - RNA, 19 nt, Artificial Sequence
  Description of Artificial Sequence: Synthetic oligonucleotide
  Antisense strand to SEQ ID NO: 1134446
acuuugagaaucgaucucg

SEQ ID NO: 1134448 - RNA, 19 nt, Artificial Sequence
  Description of Artificial Sequence: Synthetic oligonucleotide
  Sense strand starting at position 80 of SEQ ID NO: 916153
cgaggauccuuuguggaac

SEQ ID NO: 1134449 - RNA, 19 nt, Artificial Sequence
  Description of Artificial Sequence: Synthetic oligonucleotide
  Antisense strand to SEQ ID NO: 1134448
guuccacaaaggauccucg

SEQ ID NO: 1134450 - RNA, 19 nt, Artificial Sequence
  Description of Artificial Sequence: Synthetic oligonucleotide
  Sense strand starting at position 155 of SEQ ID NO: 916153
ucuuucccacucggauaua

SEQ ID NO: 1134451 - RNA, 19 nt, Artificial Sequence
  Description of Artificial Sequence: Synthetic oligonucleotide
  Antisense strand to SEQ ID NO: 1134450
uauauccgagugggaaaga

SEQ ID NO: 1134452 - RNA, 19 nt, Artificial Sequence
  Description of Artificial Sequence: Synthetic oligonucleotide
  Sense strand starting at position 333 of SEQ ID NO: 916153
cgcugucagggucauaaau

SEQ ID NO: 1134453 - RNA, 19 nt, Artificial Sequence
  Description of Artificial Sequence: Synthetic oligonucleotide
  Antisense strand to SEQ ID NO: 1134452
auuuaugacccugacagcg

SEQ ID NO: 1134454 - RNA, 19 nt, Artificial Sequence
  Description of Artificial Sequence: Synthetic oligonucleotide
  Sense strand starting at position 416 of SEQ ID NO: 916153
ggaguucuccaccggaaga

SEQ ID NO: 1134455 - RNA, 19 nt, Artificial Sequence
  Description of Artificial Sequence: Synthetic oligonucleotide
  Antisense strand to SEQ ID NO: 1134454
ucuuccgguggagaacucc

SEQ ID NO: 1134456 - RNA, 19 nt, Artificial Sequence
  Description of Artificial Sequence: Synthetic oligonucleotide
  Sense strand starting at position 1044 of SEQ ID NO: 916153
aauaauguuggcgagagau

SEQ ID NO: 1134457 - RNA, 19 nt, Artificial Sequence
  Description of Artificial Sequence: Synthetic oligonucleotide
  Antisense strand to SEQ ID NO: 1134456
aucucucgccaacauuauu

SEQ ID NO: 1134458 - RNA, 19 nt, Artificial Sequence
  Description of Artificial Sequence: Synthetic oligonucleotide
  Sense strand starting at position 1046 of SEQ ID NO: 916153
uaauguuggcgagagauua

SEQ ID NO: 1134459 - RNA, 19 nt, Artificial Sequence
  Description of Artificial Sequence: Synthetic oligonucleotide
  Antisense strand to SEQ ID NO: 1134458
uaaucucucgccaacauua

SEQ ID NO: 1134460 - RNA, 19 nt, Artificial Sequence
  Description of Artificial Sequence: Synthetic oligonucleotide
  Sense strand starting at position 1133 of SEQ ID NO: 916153
uuuauuuggucucuguauu

SEQ ID NO: 1134461 - RNA, 19 nt, Artificial Sequence
  Description of Artificial Sequence: Synthetic oligonucleotide
  Antisense strand to SEQ ID NO: 1134460
aauacagagaccaaauaaa

SEQ ID NO: 1134462 - RNA, 19 nt, Artificial Sequence
  Description of Artificial Sequence: Synthetic oligonucleotide
  Sense strand starting at position 1248 of SEQ ID NO: 916153
cccagaaacuggucuuaga

SEQ ID NO: 1134463 - RNA, 19 nt, Artificial Sequence
  Description of Artificial Sequence: Synthetic oligonucleotide
  Antisense strand to SEQ ID NO: 1134462
ucuaagaccaguuucuggg

SEQ ID NO: 1134464 - RNA, 19 nt, Artificial Sequence
  Description of Artificial Sequence: Synthetic oligonucleotide
  Sense strand starting at position 1692 of SEQ ID NO: 916153
ugguuugagguuuaccuaa

SEQ ID NO: 1134465 - RNA, 19 nt, Artificial Sequence
  Description of Artificial Sequence: Synthetic oligonucleotide
  Antisense strand to SEQ ID NO: 1134464
uuagguaaaccucaaacca

SEQ ID NO: 1134466 - RNA, 19 nt, Artificial Sequence
  Description of Artificial Sequence: Synthetic oligonucleotide
  Sense strand starting at position 1694 of SEQ ID NO: 916153
guuugagguuuaccuaaau

SEQ ID NO: 1134467 - RNA, 19 nt, Artificial Sequence
  Description of Artificial Sequence: Synthetic oligonucleotide
  Antisense strand to SEQ ID NO: 1134466
auuuagguaaaccucaaac

SEQ ID NO: 1134468 - RNA, 19 nt, Artificial Sequence
  Description of Artificial Sequence: Synthetic oligonucleotide
  Sense strand starting at position 1829 of SEQ ID NO: 916153
uuaucuggcuuaccugaau

SEQ ID NO: 1134469 - RNA, 19 nt, Artificial Sequence
  Description of Artificial Sequence: Synthetic oligonucleotide
  Antisense strand to SEQ ID NO: 1134468
auucagguaagccagauaa

SEQ ID NO: 1134470 - RNA, 19 nt, Artificial Sequence
  Description of Artificial Sequence: Synthetic oligonucleotide
  Sense strand starting at position 2035 of SEQ ID NO: 916153
gcuccaacgaauggucaaa

SEQ ID NO: 1134471 - RNA, 19 nt, Artificial Sequence
  Description of Artificial Sequence: Synthetic oligonucleotide
  Antisense strand to SEQ ID NO: 1134470
uuugaccauucguuggagc

SEQ ID NO: 1134472 - RNA, 19 nt, Artificial Sequence
  Description of Artificial Sequence: Synthetic oligonucleotide
  Sense strand starting at position 2037 of SEQ ID NO: 916153
uccaacgaauggucaaaga

SEQ ID NO: 1134473 - RNA, 19 nt, Artificial Sequence
  Description of Artificial Sequence: Synthetic oligonucleotide
  Antisense strand to SEQ ID NO: 1134472
ucuuugaccauucguugga

SEQ ID NO: 1134474 - RNA, 19 nt, Artificial Sequence
  Description of Artificial Sequence: Synthetic oligonucleotide
  Sense strand starting at position 2046 of SEQ ID NO: 916153
uggucaaagaacugacgua

SEQ ID NO: 1134475 - RNA, 19 nt, Artificial Sequence
  Description of Artificial Sequence: Synthetic oligonucleotide
  Antisense strand to SEQ ID NO: 1134474
uacgucaguucuuugacca

SEQ ID NO: 1134476 - RNA, 19 nt, Artificial Sequence
  Description of Artificial Sequence: Synthetic oligonucleotide
  Sense strand starting at position 2101 of SEQ ID NO: 916153
gccaaucuuccaggauauu

SEQ ID NO: 1134477 - RNA, 19 nt, Artificial Sequence
  Description of Artificial Sequence: Synthetic oligonucleotide
  Antisense strand to SEQ ID NO: 1134476
aauauccuggaagauuggc

SEQ ID NO: 1134478 - RNA, 19 nt, Artificial Sequence
  Description of Artificial Sequence: Synthetic oligonucleotide
  Sense strand starting at position 2121 of SEQ ID NO: 916153
gaauguuaaugaucccaug

SEQ ID NO: 1134479 - RNA, 19 nt, Artificial Sequence
  Description of Artificial Sequence: Synthetic oligonucleotide
  Antisense strand to SEQ ID NO: 1134478
caugggaucauuaacauuc

SEQ ID NO: 1134480 - RNA, 19 nt, Artificial Sequence
  Description of Artificial Sequence: Synthetic oligonucleotide
  Sense strand starting at position 2171 of SEQ ID NO: 916153
ggugaauggguguaguuua

SEQ ID NO: 1134481 - RNA, 19 nt, Artificial Sequence
  Description of Artificial Sequence: Synthetic oligonucleotide
  Antisense strand to SEQ ID NO: 1134480
uaaacuacacccauucacc

SEQ ID NO: 1134482 - RNA, 19 nt, Artificial Sequence
  Description of Artificial Sequence: Synthetic oligonucleotide
  Sense strand starting at position 2186 of SEQ ID NO: 916153
uuuagacucauaggguagu

SEQ ID NO: 1134483 - RNA, 19 nt, Artificial Sequence
  Description of Artificial Sequence: Synthetic oligonucleotide
  Antisense strand to SEQ ID NO: 1134482
acuacccuaugagucuaaa

SEQ ID NO: 1134484 - RNA, 19 nt, Artificial Sequence
  Description of Artificial Sequence: Synthetic oligonucleotide
  Sense strand starting at position 2225 of SEQ ID NO: 916153
aaauaaucugucggauguc

SEQ ID NO: 1134485 - RNA, 19 nt, Artificial Sequence
  Description of Artificial Sequence: Synthetic oligonucleotide
  Antisense strand to SEQ ID NO: 1134484
gacauccgacagauuauuu

SEQ ID NO: 1134486 - RNA, 19 nt, Artificial Sequence
  Description of Artificial Sequence: Synthetic oligonucleotide
  Sense strand starting at position 2237 of SEQ ID NO: 916153
ggaugucauaucugcuaga

SEQ ID NO: 1134487 - RNA, 19 nt, Artificial Sequence
  Description of Artificial Sequence: Synthetic oligonucleotide
  Antisense strand to SEQ ID NO: 1134486
ucuagcagauaugacaucc

SEQ ID NO: 1134488 - RNA, 19 nt, Artificial Sequence
  Description of Artificial Sequence: Synthetic oligonucleotide
  Sense strand starting at position 2238 of SEQ ID NO: 916153
gaugucauaucugcuagaa

SEQ ID NO: 1134489 - RNA, 19 nt, Artificial Sequence
  Description of Artificial Sequence: Synthetic oligonucleotide
  Antisense strand to SEQ ID NO: 1134488
uucuagcagauaugacauc

SEQ ID NO: 1134490 - RNA, 19 nt, Artificial Sequence
  Description of Artificial Sequence: Synthetic oligonucleotide
  Sense strand starting at position 2384 of SEQ ID NO: 916153
gugaacugggcuuaagugu

SEQ ID NO: 1134491 - RNA, 19 nt, Artificial Sequence
  Description of Artificial Sequence: Synthetic oligonucleotide
  Antisense strand to SEQ ID NO: 1134490
acacuuaagcccaguucac

SEQ ID NO: 1134492 - RNA, 19 nt, Artificial Sequence
  Description of Artificial Sequence: Synthetic oligonucleotide
  Sense strand starting at position 2478 of SEQ ID NO: 916153
cugagaaaguuuccuuuaa

SEQ ID NO: 1134493 - RNA, 19 nt, Artificial Sequence
  Description of Artificial Sequence: Synthetic oligonucleotide
  Antisense strand to SEQ ID NO: 1134492
uuaaaggaaacuuucucag

SEQ ID NO: 1134494 - RNA, 19 nt, Artificial Sequence
  Description of Artificial Sequence: Synthetic oligonucleotide
  Sense strand starting at position 2479 of SEQ ID NO: 916153
ugagaaaguuuccuuuaag

SEQ ID NO: 1134495 - RNA, 19 nt, Artificial Sequence
  Description of Artificial Sequence: Synthetic oligonucleotide
  Antisense strand to SEQ ID NO: 1134494
cuuaaaggaaacuuucuca

SEQ ID NO: 1134496 - RNA, 19 nt, Artificial Sequence
  Description of Artificial Sequence: Synthetic oligonucleotide
  Sense strand starting at position 2480 of SEQ ID NO: 916153
gagaaaguuuccuuuaagu

SEQ ID NO: 1134497 - RNA, 19 nt, Artificial Sequence
  Description of Artificial Sequence: Synthetic oligonucleotide
  Antisense strand to SEQ ID NO: 1134496
acuuaaaggaaacuuucuc

SEQ ID NO: 1134498 - RNA, 19 nt, Artificial Sequence
  Description of Artificial Sequence: Synthetic oligonucleotide
  Sense strand starting at position 2553 of SEQ ID NO: 916153
ugaagaaguaucuguuaug

SEQ ID NO: 1134499 - RNA, 19 nt, Artificial Sequence
  Description of Artificial Sequence: Synthetic oligonucleotide
  Antisense strand to SEQ ID NO: 1134498
cauaacagauacuucuuca

SEQ ID NO: 1134500 - RNA, 19 nt, Artificial Sequence
  Description of Artificial Sequence: Synthetic oligonucleotide
  Sense strand starting at position 2554 of SEQ ID NO: 916153
gaagaaguaucuguuauga

SEQ ID NO: 1134501 - RNA, 19 nt, Artificial Sequence
  Description of Artificial Sequence: Synthetic oligonucleotide
  Antisense strand to SEQ ID NO: 1134500
ucauaacagauacuucuuc

SEQ ID NO: 1134502 - RNA, 19 nt, Artificial Sequence
  Description of Artificial Sequence: Synthetic oligonucleotide
  Sense strand starting at position 2655 of SEQ ID NO: 916153
uucugagcagcugaaauua

SEQ ID NO: 1134503 - RNA, 19 nt, Artificial Sequence
  Description of Artificial Sequence: Synthetic oligonucleotide
  Antisense strand to SEQ ID NO: 1134502
uaauuucagcugcucagaa

SEQ ID NO: 1134504 - RNA, 19 nt, Artificial Sequence
  Description of Artificial Sequence: Synthetic oligonucleotide
  Sense strand starting at position 2712 of SEQ ID NO: 916153
augcuuguauuuguagcaa

SEQ ID NO: 1134505 - RNA, 19 nt, Artificial Sequence
  Description of Artificial Sequence: Synthetic oligonucleotide
  Antisense strand to SEQ ID NO: 1134504
uugcuacaaauacaagcau

SEQ ID NO: 1134506 - RNA, 19 nt, Artificial Sequence
  Description of Artificial Sequence: Synthetic oligonucleotide
  Sense strand starting at position 2749 of SEQ ID NO: 916153
cacugauugucugcaggag

SEQ ID NO: 1134507 - RNA, 19 nt, Artificial Sequence
  Description of Artificial Sequence: Synthetic oligonucleotide
  Antisense strand to SEQ ID NO: 1134506
cuccugcagacaaucagug

SEQ ID NO: 1134508 - RNA, 19 nt, Artificial Sequence
  Description of Artificial Sequence: Synthetic oligonucleotide
  Sense strand starting at position 2949 of SEQ ID NO: 916153
cagccauaggcauagauca

SEQ ID NO: 1134509 - RNA, 19 nt, Artificial Sequence
  Description of Artificial Sequence: Synthetic oligonucleotide
  Antisense strand to SEQ ID NO: 1134508
ugaucuaugccuauggcug

SEQ ID NO: 1134510 - RNA, 19 nt, Artificial Sequence
  Description of Artificial Sequence: Synthetic oligonucleotide
  Sense strand starting at position 2980 of SEQ ID NO: 916153
uuaugcaagugauucucaa

SEQ ID NO: 1134511 - RNA, 19 nt, Artificial Sequence
  Description of Artificial Sequence: Synthetic oligonucleotide
  Antisense strand to SEQ ID NO: 1134510
uugagaaucacuugcauaa

SEQ ID NO: 1134512 - RNA, 19 nt, Artificial Sequence
  Description of Artificial Sequence: Synthetic oligonucleotide
  Sense strand starting at position 3138 of SEQ ID NO: 916153
gcaccuaguuaacuuagau

SEQ ID NO: 1134513 - RNA, 19 nt, Artificial Sequence
  Description of Artificial Sequence: Synthetic oligonucleotide
  Antisense strand to SEQ ID NO: 1134512
aucuaaguuaacuaggugc

SEQ ID NO: 1134514 - RNA, 19 nt, Artificial Sequence
  Description of Artificial Sequence: Synthetic oligonucleotide
  Sense strand starting at position 3209 of SEQ ID NO: 916153
gugguaaugcuuuaacaag

SEQ ID NO: 1134515 - RNA, 19 nt, Artificial Sequence
  Description of Artificial Sequence: Synthetic oligonucleotide
  Antisense strand to SEQ ID NO: 1134514
cuuguuaaagcauuaccac

SEQ ID NO: 1134516 - RNA, 19 nt, Artificial Sequence
  Description of Artificial Sequence: Synthetic oligonucleotide
  Sense strand starting at position 3280 of SEQ ID NO: 916153
gauucugaugggugcucaa

SEQ ID NO: 1134517 - RNA, 19 nt, Artificial Sequence
  Description of Artificial Sequence: Synthetic oligonucleotide
  Antisense strand to SEQ ID NO: 1134516
uugagcacccaucagaauc

SEQ ID NO: 1134518 - RNA, 19 nt, Artificial Sequence
  Description of Artificial Sequence: Synthetic oligonucleotide
  Sense strand starting at position 3386 of SEQ ID NO: 916153
ugauaaucaguccgcaaga

SEQ ID NO: 1134519 - RNA, 19 nt, Artificial Sequence
  Description of Artificial Sequence: Synthetic oligonucleotide
  Antisense strand to SEQ ID NO: 1134518
ucuugcggacugauuauca

SEQ ID NO: 1134520 - RNA, 19 nt, Artificial Sequence
  Description of Artificial Sequence: Synthetic oligonucleotide
  Sense strand starting at position 3387 of SEQ ID NO: 916153
gauaaucaguccgcaagaa

SEQ ID NO: 1134521 - RNA, 19 nt, Artificial Sequence
  Description of Artificial Sequence: Synthetic oligonucleotide
  Antisense strand to SEQ ID NO: 1134520
uucuugcggacugauuauc

SEQ ID NO: 1134522 - RNA, 19 nt, Artificial Sequence
  Description of Artificial Sequence: Synthetic oligonucleotide
  Sense strand starting at position 3388 of SEQ ID NO: 916153
auaaucaguccgcaagaau

SEQ ID NO: 1134523 - RNA, 19 nt, Artificial Sequence
  Description of Artificial Sequence: Synthetic oligonucleotide
  Antisense strand to SEQ ID NO: 1134522
auucuugcggacugauuau

SEQ ID NO: 1134524 - RNA, 19 nt, Artificial Sequence
  Description of Artificial Sequence: Synthetic oligonucleotide
  Sense strand starting at position 1 of SEQ ID NO: 916154
aagaguggguaauagaaca

SEQ ID NO: 1134525 - RNA, 19 nt, Artificial Sequence
  Description of Artificial Sequence: Synthetic oligonucleotide
  Antisense strand to SEQ ID NO: 1134524
uguucuauuacccacucuu

SEQ ID NO: 1134526 - RNA, 19 nt, Artificial Sequence
  Description of Artificial Sequence: Synthetic oligonucleotide
  Sense strand starting at position 1585 of SEQ ID NO: 916154
gaagaaaggucuuggccac

SEQ ID NO: 1134527 - RNA, 19 nt, Artificial Sequence
  Description of Artificial Sequence: Synthetic oligonucleotide
  Antisense strand to SEQ ID NO: 1134526
guggccaagaccuuucuuc

SEQ ID NO: 1134528 - RNA, 19 nt, Artificial Sequence
  Description of Artificial Sequence: Synthetic oligonucleotide
  Sense strand starting at position 1814 of SEQ ID NO: 916154
ucucauaaucaaggaguau

SEQ ID NO: 1134529 - RNA, 19 nt, Artificial Sequence
  Description of Artificial Sequence: Synthetic oligonucleotide
  Antisense strand to SEQ ID NO: 1134528
auacuccuugauuaugaga

SEQ ID NO: 1134530 - RNA, 19 nt, Artificial Sequence
  Description of Artificial Sequence: Synthetic oligonucleotide
  Sense strand starting at position 2459 of SEQ ID NO: 916154
cggguuuagucuuagcugu

SEQ ID NO: 1134531 - RNA, 19 nt, Artificial Sequence
  Description of Artificial Sequence: Synthetic oligonucleotide
  Antisense strand to SEQ ID NO: 1134530
acagcuaagacuaaacccg

SEQ ID NO: 1134532 - RNA, 19 nt, Artificial Sequence
  Description of Artificial Sequence: Synthetic oligonucleotide
  Sense strand starting at position 2461 of SEQ ID NO: 916154
gguuuagucuuagcuguga

SEQ ID NO: 1134533 - RNA, 19 nt, Artificial Sequence
  Description of Artificial Sequence: Synthetic oligonucleotide
  Antisense strand to SEQ ID NO: 1134532
ucacagcuaagacuaaacc

SEQ ID NO: 1134534 - RNA, 19 nt, Artificial Sequence
  Description of Artificial Sequence: Synthetic oligonucleotide
  Sense strand starting at position 2522 of SEQ ID NO: 916154
agggaaagaucucagcuga

SEQ ID NO: 1134535 - RNA, 19 nt, Artificial Sequence
  Description of Artificial Sequence: Synthetic oligonucleotide
  Antisense strand to SEQ ID NO: 1134534
ucagcugagaucuuucccu

SEQ ID NO: 1134536 - RNA, 19 nt, Artificial Sequence
  Description of Artificial Sequence: Synthetic oligonucleotide
  Sense strand starting at position 2629 of SEQ ID NO: 916154
cccuacgaucgcugaggua

SEQ ID NO: 1134537 - RNA, 19 nt, Artificial Sequence
  Description of Artificial Sequence: Synthetic oligonucleotide
  Antisense strand to SEQ ID NO: 1134536
uaccucagcgaucguaggg

SEQ ID NO: 1134538 - RNA, 19 nt, Artificial Sequence
  Description of Artificial Sequence: Synthetic oligonucleotide
  Sense strand starting at position 3025 of SEQ ID NO: 916154
cuucccaucuguuugauga

SEQ ID NO: 1134539 - RNA, 19 nt, Artificial Sequence
  Description of Artificial Sequence: Synthetic oligonucleotide
  Antisense strand to SEQ ID NO: 1134538
ucaucaaacagaugggaag

SEQ ID NO: 1134540 - RNA, 19 nt, Artificial Sequence
  Description of Artificial Sequence: Synthetic oligonucleotide
  Sense strand starting at position 3026 of SEQ ID NO: 916154
uucccaucuguuugaugau

SEQ ID NO: 1134541 - RNA, 19 nt, Artificial Sequence
  Description of Artificial Sequence: Synthetic oligonucleotide
  Antisense strand to SEQ ID NO: 1134540
aucaucaaacagaugggaa

SEQ ID NO: 1134542 - RNA, 19 nt, Artificial Sequence
  Description of Artificial Sequence: Synthetic oligonucleotide
  Sense strand starting at position 3588 of SEQ ID NO: 916154
augcaaugacuguaugcaa

SEQ ID NO: 1134543 - RNA, 19 nt, Artificial Sequence
  Description of Artificial Sequence: Synthetic oligonucleotide
  Antisense strand to SEQ ID NO: 1134542
uugcauacagucauugcau

SEQ ID NO: 1134544 - RNA, 19 nt, Artificial Sequence
  Description of Artificial Sequence: Synthetic oligonucleotide
  Sense strand starting at position 3694 of SEQ ID NO: 916154
caaaguauuuacggugguu

SEQ ID NO: 1134545 - RNA, 19 nt, Artificial Sequence
  Description of Artificial Sequence: Synthetic oligonucleotide
  Antisense strand to SEQ ID NO: 1134544
aaccaccguaaauacuuug

SEQ ID NO: 1134546 - RNA, 19 nt, Artificial Sequence
  Description of Artificial Sequence: Synthetic oligonucleotide
  Sense strand starting at position 3697 of SEQ ID NO: 916154
aguauuuacggugguuaag

SEQ ID NO: 1134547 - RNA, 19 nt, Artificial Sequence
  Description of Artificial Sequence: Synthetic oligonucleotide
  Antisense strand to SEQ ID NO: 1134546
cuuaaccaccguaaauacu

SEQ ID NO: 1134548 - RNA, 19 nt, Artificial Sequence
  Description of Artificial Sequence: Synthetic oligonucleotide
  Sense strand starting at position 3703 of SEQ ID NO: 916154
uacggugguuaagaagaau

SEQ ID NO: 1134549 - RNA, 19 nt, Artificial Sequence
  Description of Artificial Sequence: Synthetic oligonucleotide
  Antisense strand to SEQ ID NO: 1134548
auucuucuuaaccaccgua

SEQ ID NO: 1134550 - RNA, 19 nt, Artificial Sequence
  Description of Artificial Sequence: Synthetic oligonucleotide
  Sense strand starting at position 3875 of SEQ ID NO: 916154
guguccugaugggauacaa

SEQ ID NO: 1134551 - RNA, 19 nt, Artificial Sequence
  Description of Artificial Sequence: Synthetic oligonucleotide
  Antisense strand to SEQ ID NO: 1134550
uuguaucccaucaggacac

SEQ ID NO: 1134552 - RNA, 19 nt, Artificial Sequence
  Description of Artificial Sequence: Synthetic oligonucleotide
  Sense strand starting at position 3908 of SEQ ID NO: 916154
uggucuagcccuugaaagu

SEQ ID NO: 1134553 - RNA, 19 nt, Artificial Sequence
  Description of Artificial Sequence: Synthetic oligonucleotide
  Antisense strand to SEQ ID NO: 1134552
acuuucaagggcuagacca

SEQ ID NO: 1134554 - RNA, 19 nt, Artificial Sequence
  Description of Artificial Sequence: Synthetic oligonucleotide
  Sense strand starting at position 3909 of SEQ ID NO: 916154
ggucuagcccuugaaagua

SEQ ID NO: 1134555 - RNA, 19 nt, Artificial Sequence
  Description of Artificial Sequence: Synthetic oligonucleotide
  Antisense strand to SEQ ID NO: 1134554
uacuuucaagggcuagacc

SEQ ID NO: 1134556 - RNA, 19 nt, Artificial Sequence
  Description of Artificial Sequence: Synthetic oligonucleotide
  Sense strand starting at position 21 of SEQ ID NO: 916155
aaugcugguucccugggaa

SEQ ID NO: 1134557 - RNA, 19 nt, Artificial Sequence
  Description of Artificial Sequence: Synthetic oligonucleotide
  Antisense strand to SEQ ID NO: 1134556
uucccagggaaccagcauu

SEQ ID NO: 1134558 - RNA, 19 nt, Artificial Sequence
  Description of Artificial Sequence: Synthetic oligonucleotide
  Sense strand starting at position 569 of SEQ ID NO: 916155
gggucacacuacuuagaua

SEQ ID NO: 1134559 - RNA, 19 nt, Artificial Sequence
  Description of Artificial Sequence: Synthetic oligonucleotide
  Antisense strand to SEQ ID NO: 1134558
uaucuaaguagugugaccc

SEQ ID NO: 1134560 - RNA, 19 nt, Artificial Sequence
  Description of Artificial Sequence: Synthetic oligonucleotide
  Sense strand starting at position 597 of SEQ ID NO: 916155
gguucuaacguuuaaagaa

SEQ ID NO: 1134561 - RNA, 19 nt, Artificial Sequence
  Description of Artificial Sequence: Synthetic oligonucleotide
  Antisense strand to SEQ ID NO: 1134560
uucuuuaaacguuagaacc

SEQ ID NO: 1134562 - RNA, 19 nt, Artificial Sequence
  Description of Artificial Sequence: Synthetic oligonucleotide
  Sense strand starting at position 754 of SEQ ID NO: 916155
ucacaaguuguugacaagu

SEQ ID NO: 1134563 - RNA, 19 nt, Artificial Sequence
  Description of Artificial Sequence: Synthetic oligonucleotide
  Antisense strand to SEQ ID NO: 1134562
acuugucaacaacuuguga

SEQ ID NO: 1134564 - RNA, 19 nt, Artificial Sequence
  Description of Artificial Sequence: Synthetic oligonucleotide
  Sense strand starting at position 920 of SEQ ID NO: 916155
cagugucacguugaugaua

SEQ ID NO: 1134565 - RNA, 19 nt, Artificial Sequence
  Description of Artificial Sequence: Synthetic oligonucleotide
  Antisense strand to SEQ ID NO: 1134564
uaucaucaacgugacacug

SEQ ID NO: 1134566 - RNA, 19 nt, Artificial Sequence
  Description of Artificial Sequence: Synthetic oligonucleotide
  Sense strand starting at position 960 of SEQ ID NO: 916155
gcucgcuugcgggaauaau

SEQ ID NO: 1134567 - RNA, 19 nt, Artificial Sequence
  Description of Artificial Sequence: Synthetic oligonucleotide
  Antisense strand to SEQ ID NO: 1134566
auuauucccgcaagcgagc

SEQ ID NO: 1134568 - RNA, 19 nt, Artificial Sequence
  Description of Artificial Sequence: Synthetic oligonucleotide
  Sense strand starting at position 969 of SEQ ID NO: 916155
cgggaauaauaagcccaaa

SEQ ID NO: 1134569 - RNA, 19 nt, Artificial Sequence
  Description of Artificial Sequence: Synthetic oligonucleotide
  Antisense strand to SEQ ID NO: 1134568
uuugggcuuauuauucccg

SEQ ID NO: 1134570 - RNA, 19 nt, Artificial Sequence
  Description of Artificial Sequence: Synthetic oligonucleotide
  Sense strand starting at position 1024 of SEQ ID NO: 916155
aauaguggcuguuuagcau

SEQ ID NO: 1134571 - RNA, 19 nt, Artificial Sequence
  Description of Artificial Sequence: Synthetic oligonucleotide
  Antisense strand to SEQ ID NO: 1134570
augcuaaacagccacuauu

SEQ ID NO: 1134572 - RNA, 19 nt, Artificial Sequence
  Description of Artificial Sequence: Synthetic oligonucleotide
  Sense strand starting at position 1027 of SEQ ID NO: 916155
aguggcuguuuagcauaua

SEQ ID NO: 1134573 - RNA, 19 nt, Artificial Sequence
  Description of Artificial Sequence: Synthetic oligonucleotide
  Antisense strand to SEQ ID NO: 1134572
uauaugcuaaacagccacu

SEQ ID NO: 1134574 - RNA, 19 nt, Artificial Sequence
  Description of Artificial Sequence: Synthetic oligonucleotide
  Sense strand starting at position 1120 of SEQ ID NO: 916155
ugcugagauucugucccau

SEQ ID NO: 1134575 - RNA, 19 nt, Artificial Sequence
  Description of Artificial Sequence: Synthetic oligonucleotide
  Antisense strand to SEQ ID NO: 1134574
augggacagaaucucagca

SEQ ID NO: 1134576 - RNA, 19 nt, Artificial Sequence
  Description of Artificial Sequence: Synthetic oligonucleotide
  Sense strand starting at position 1122 of SEQ ID NO: 916155
cugagauucugucccauac

SEQ ID NO: 1134577 - RNA, 19 nt, Artificial Sequence
  Description of Artificial Sequence: Synthetic oligonucleotide
  Antisense strand to SEQ ID NO: 1134576
guaugggacagaaucucag

SEQ ID NO: 1134578 - RNA, 19 nt, Artificial Sequence
  Description of Artificial Sequence: Synthetic oligonucleotide
  Sense strand starting at position 2190 of SEQ ID NO: 916155
ggcagaaguguucaaugag

SEQ ID NO: 1134579 - RNA, 19 nt, Artificial Sequence
  Description of Artificial Sequence: Synthetic oligonucleotide
  Antisense strand to SEQ ID NO: 1134578
cucauugaacacuucugcc

SEQ ID NO: 1134580 - RNA, 19 nt, Artificial Sequence
  Description of Artificial Sequence: Synthetic oligonucleotide
  Sense strand starting at position 2193 of SEQ ID NO: 916155
agaaguguucaaugagguu

SEQ ID NO: 1134581 - RNA, 19 nt, Artificial Sequence
  Description of Artificial Sequence: Synthetic oligonucleotide
  Antisense strand to SEQ ID NO: 1134580
aaccucauugaacacuucu

SEQ ID NO: 1134582 - RNA, 19 nt, Artificial Sequence
  Description of Artificial Sequence: Synthetic oligonucleotide
  Sense strand starting at position 2380 of SEQ ID NO: 916155
agcgcaacuggagaauauu

SEQ ID NO: 1134583 - RNA, 19 nt, Artificial Sequence
  Description of Artificial Sequence: Synthetic oligonucleotide
  Antisense strand to SEQ ID NO: 1134582
aauauucuccaguugcgcu

SEQ ID NO: 1134584 - RNA, 19 nt, Artificial Sequence
  Description of Artificial Sequence: Synthetic oligonucleotide
  Sense strand starting at position 2439 of SEQ ID NO: 916155
ccaucacuuugggaggcau

SEQ ID NO: 1134585 - RNA, 19 nt, Artificial Sequence
  Description of Artificial Sequence: Synthetic oligonucleotide
  Antisense strand to SEQ ID NO: 1134584
augccucccaaagugaugg

SEQ ID NO: 1134586 - RNA, 19 nt, Artificial Sequence
  Description of Artificial Sequence: Synthetic oligonucleotide
  Sense strand starting at position 2623 of SEQ ID NO: 916155
gagacugaguugggaugau

SEQ ID NO: 1134587 - RNA, 19 nt, Artificial Sequence
  Description of Artificial Sequence: Synthetic oligonucleotide
  Antisense strand to SEQ ID NO: 1134586
aucaucccaacucagucuc

SEQ ID NO: 1134588 - RNA, 19 nt, Artificial Sequence
  Description of Artificial Sequence: Synthetic oligonucleotide
  Sense strand starting at position 2793 of SEQ ID NO: 916155
ggagccuuggccuaagaug

SEQ ID NO: 1134589 - RNA, 19 nt, Artificial Sequence
  Description of Artificial Sequence: Synthetic oligonucleotide
  Antisense strand to SEQ ID NO: 1134588
caucuuaggccaaggcucc

SEQ ID NO: 1134590 - RNA, 19 nt, Artificial Sequence
  Description of Artificial Sequence: Synthetic oligonucleotide
  Sense strand starting at position 2801 of SEQ ID NO: 916155
ggccuaagaugauuaauag

SEQ ID NO: 1134591 - RNA, 19 nt, Artificial Sequence
  Description of Artificial Sequence: Synthetic oligonucleotide
  Antisense strand to SEQ ID NO: 1134590
cuauuaaucaucuuaggcc

SEQ ID NO: 1134592 - RNA, 19 nt, Artificial Sequence
  Description of Artificial Sequence: Synthetic oligonucleotide
  Sense strand starting at position 2802 of SEQ ID NO: 916155
gccuaagaugauuaauagu

SEQ ID NO: 1134593 - RNA, 19 nt, Artificial Sequence
  Description of Artificial Sequence: Synthetic oligonucleotide
  Antisense strand to SEQ ID NO: 1134592
acuauuaaucaucuuaggc

SEQ ID NO: 1134594 - RNA, 19 nt, Artificial Sequence
  Description of Artificial Sequence: Synthetic oligonucleotide
  Sense strand starting at position 2808 of SEQ ID NO: 916155
gaugauuaauagugacuug

SEQ ID NO: 1134595 - RNA, 19 nt, Artificial Sequence
  Description of Artificial Sequence: Synthetic oligonucleotide
  Antisense strand to SEQ ID NO: 1134594
caagucacuauuaaucauc

SEQ ID NO: 1134596 - RNA, 19 nt, Artificial Sequence
  Description of Artificial Sequence: Synthetic oligonucleotide
  Sense strand starting at position 2811 of SEQ ID NO: 916155
gauuaauagugacuugaua

SEQ ID NO: 1134597 - RNA, 19 nt, Artificial Sequence
  Description of Artificial Sequence: Synthetic oligonucleotide
  Antisense strand to SEQ ID NO: 1134596
uaucaagucacuauuaauc

SEQ ID NO: 1134598 - RNA, 19 nt, Artificial Sequence
  Description of Artificial Sequence: Synthetic oligonucleotide
  Sense strand starting at position 2856 of SEQ ID NO: 916155
guguucuggaggcacuuau

SEQ ID NO: 1134599 - RNA, 19 nt, Artificial Sequence
  Description of Artificial Sequence: Synthetic oligonucleotide
  Antisense strand to SEQ ID NO: 1134598
auaagugccuccagaacac

SEQ ID NO: 1134600 - RNA, 19 nt, Artificial Sequence
  Description of Artificial Sequence: Synthetic oligonucleotide
  Sense strand starting at position 2904 of SEQ ID NO: 916155
ggagucugagcccaacaua

SEQ ID NO: 1134601 - RNA, 19 nt, Artificial Sequence
  Description of Artificial Sequence: Synthetic oligonucleotide
  Antisense strand to SEQ ID NO: 1134600
uauguugggcucagacucc

SEQ ID NO: 1134602 - RNA, 19 nt, Artificial Sequence
  Description of Artificial Sequence: Synthetic oligonucleotide
  Sense strand starting at position 2933 of SEQ ID NO: 916155
auuguugggucauugguga

SEQ ID NO: 1134603 - RNA, 19 nt, Artificial Sequence
  Description of Artificial Sequence: Synthetic oligonucleotide
  Antisense strand to SEQ ID NO: 1134602
ucaccaaugacccaacaau

SEQ ID NO: 1134604 - RNA, 19 nt, Artificial Sequence
  Description of Artificial Sequence: Synthetic oligonucleotide
  Sense strand starting at position 2938 of SEQ ID NO: 916155
ugggucauuggugaccaaa

SEQ ID NO: 1134605 - RNA, 19 nt, Artificial Sequence
  Description of Artificial Sequence: Synthetic oligonucleotide
  Antisense strand to SEQ ID NO: 1134604
uuuggucaccaaugaccca

SEQ ID NO: 1134606 - RNA, 19 nt, Artificial Sequence
  Description of Artificial Sequence: Synthetic oligonucleotide
  Sense strand starting at position 2940 of SEQ ID NO: 916155
ggucauuggugaccaaaga

SEQ ID NO: 1134607 - RNA, 19 nt, Artificial Sequence
  Description of Artificial Sequence: Synthetic oligonucleotide
  Antisense strand to SEQ ID NO: 1134606
ucuuuggucaccaaugacc

SEQ ID NO: 1134608 - RNA, 19 nt, Artificial Sequence
  Description of Artificial Sequence: Synthetic oligonucleotide
  Sense strand starting at position 3039 of SEQ ID NO: 916155
cgaggacacucauagauca

SEQ ID NO: 1134609 - RNA, 19 nt, Artificial Sequence
  Description of Artificial Sequence: Synthetic oligonucleotide
  Antisense strand to SEQ ID NO: 1134608
ugaucuaugaguguccucg

SEQ ID NO: 1134610 - RNA, 19 nt, Artificial Sequence
  Description of Artificial Sequence: Synthetic oligonucleotide
  Sense strand starting at position 3432 of SEQ ID NO: 916155
gagacaugcccagagcuga

SEQ ID NO: 1134611 - RNA, 19 nt, Artificial Sequence
  Description of Artificial Sequence: Synthetic oligonucleotide
  Antisense strand to SEQ ID NO: 1134610
ucagcucugggcaugucuc

SEQ ID NO: 1134612 - RNA, 19 nt, Artificial Sequence
  Description of Artificial Sequence: Synthetic oligonucleotide
  Sense strand starting at position 3521 of SEQ ID NO: 916155
ggaaguaauuacuaaccag

SEQ ID NO: 1134613 - RNA, 19 nt, Artificial Sequence
  Description of Artificial Sequence: Synthetic oligonucleotide
  Antisense strand to SEQ ID NO: 1134612
cugguuaguaauuacuucc

SEQ ID NO: 1134614 - RNA, 19 nt, Artificial Sequence
  Description of Artificial Sequence: Synthetic oligonucleotide
  Sense strand starting at position 3603 of SEQ ID NO: 916155
gcuugcuucccugggacua

SEQ ID NO: 1134615 - RNA, 19 nt, Artificial Sequence
  Description of Artificial Sequence: Synthetic oligonucleotide
  Antisense strand to SEQ ID NO: 1134614
uagucccagggaagcaagc

SEQ ID NO: 1134616 - RNA, 19 nt, Artificial Sequence
  Description of Artificial Sequence: Synthetic oligonucleotide
  Sense strand starting at position 3604 of SEQ ID NO: 916155
cuugcuucccugggacuau

SEQ ID NO: 1134617 - RNA, 19 nt, Artificial Sequence
  Description of Artificial Sequence: Synthetic oligonucleotide
  Antisense strand to SEQ ID NO: 1134616
auagucccagggaagcaag

SEQ ID NO: 1134618 - RNA, 19 nt, Artificial Sequence
  Description of Artificial Sequence: Synthetic oligonucleotide
  Sense strand starting at position 3630 of SEQ ID NO: 916155
cuuaaauaagugugaggca

SEQ ID NO: 1134619 - RNA, 19 nt, Artificial Sequence
  Description of Artificial Sequence: Synthetic oligonucleotide
  Antisense strand to SEQ ID NO: 1134618
ugccucacacuuauuuaag

SEQ ID NO: 1134620 - RNA, 19 nt, Artificial Sequence
  Description of Artificial Sequence: Synthetic oligonucleotide
  Sense strand starting at position 3635 of SEQ ID NO: 916155
auaagugugaggcagcaaa

SEQ ID NO: 1134621 - RNA, 19 nt, Artificial Sequence
  Description of Artificial Sequence: Synthetic oligonucleotide
  Antisense strand to SEQ ID NO: 1134620
uuugcugccucacacuuau

SEQ ID NO: 1134622 - RNA, 19 nt, Artificial Sequence
  Description of Artificial Sequence: Synthetic oligonucleotide
  Sense strand starting at position 3683 of SEQ ID NO: 916155
cagaguccugcugagaauc

SEQ ID NO: 1134623 - RNA, 19 nt, Artificial Sequence
  Description of Artificial Sequence: Synthetic oligonucleotide
  Antisense strand to SEQ ID NO: 1134622
gauucucagcaggacucug

SEQ ID NO: 1134624 - RNA, 19 nt, Artificial Sequence
  Description of Artificial Sequence: Synthetic oligonucleotide
  Sense strand starting at position 3693 of SEQ ID NO: 916155
cugagaaucuuggauuauu

SEQ ID NO: 1134625 - RNA, 19 nt, Artificial Sequence
  Description of Artificial Sequence: Synthetic oligonucleotide
  Antisense strand to SEQ ID NO: 1134624
aauaauccaagauucucag

SEQ ID NO: 1134626 - RNA, 19 nt, Artificial Sequence
  Description of Artificial Sequence: Synthetic oligonucleotide
  Sense strand starting at position 3779 of SEQ ID NO: 916155
gugagugcccgccauacaa

SEQ ID NO: 1134627 - RNA, 19 nt, Artificial Sequence
  Description of Artificial Sequence: Synthetic oligonucleotide
  Antisense strand to SEQ ID NO: 1134626
uuguauggcgggcacucac

SEQ ID NO: 1134628 - RNA, 19 nt, Artificial Sequence
  Description of Artificial Sequence: Synthetic oligonucleotide
  Sense strand starting at position 3869 of SEQ ID NO: 916155
ucuguaaucccggcgcuuu

SEQ ID NO: 1134629 - RNA, 19 nt, Artificial Sequence
  Description of Artificial Sequence: Synthetic oligonucleotide
  Antisense strand to SEQ ID NO: 1134628
aaagcgccgggauuacaga

SEQ ID NO: 1134630 - RNA, 19 nt, Artificial Sequence
  Description of Artificial Sequence: Synthetic oligonucleotide
  Sense strand starting at position 3892 of SEQ ID NO: 916155
ggccgaagccuggacaaua

SEQ ID NO: 1134631 - RNA, 19 nt, Artificial Sequence
  Description of Artificial Sequence: Synthetic oligonucleotide
  Antisense strand to SEQ ID NO: 1134630
uauuguccaggcuucggcc

SEQ ID NO: 1134632 - RNA, 19 nt, Artificial Sequence
  Description of Artificial Sequence: Synthetic oligonucleotide
  Sense strand starting at position 3911 of SEQ ID NO: 916155
uagugagacccgcaaccau

SEQ ID NO: 1134633 - RNA, 19 nt, Artificial Sequence
  Description of Artificial Sequence: Synthetic oligonucleotide
  Antisense strand to SEQ ID NO: 1134632
augguugcgggucucacua

SEQ ID NO: 1134634 - RNA, 19 nt, Artificial Sequence
  Description of Artificial Sequence: Synthetic oligonucleotide
  Sense strand starting at position 3976 of SEQ ID NO: 916155
ugugguuccagcuacauga

SEQ ID NO: 1134635 - RNA, 19 nt, Artificial Sequence
  Description of Artificial Sequence: Synthetic oligonucleotide
  Antisense strand to SEQ ID NO: 1134634
ucauguagcuggaaccaca

SEQ ID NO: 1134636 - RNA, 19 nt, Artificial Sequence
  Description of Artificial Sequence: Synthetic oligonucleotide
  Sense strand starting at position 55 of SEQ ID NO: 916156
ugugguugguggcuaacau

SEQ ID NO: 1134637 - RNA, 19 nt, Artificial Sequence
  Description of Artificial Sequence: Synthetic oligonucleotide
  Antisense strand to SEQ ID NO: 1134636
auguuagccaccaaccaca

SEQ ID NO: 1134638 - RNA, 19 nt, Artificial Sequence
  Description of Artificial Sequence: Synthetic oligonucleotide
  Sense strand starting at position 56 of SEQ ID NO: 916156
gugguugguggcuaacaua

SEQ ID NO: 1134639 - RNA, 19 nt, Artificial Sequence
  Description of Artificial Sequence: Synthetic oligonucleotide
  Antisense strand to SEQ ID NO: 1134638
uauguuagccaccaaccac

SEQ ID NO: 1134640 - RNA, 19 nt, Artificial Sequence
  Description of Artificial Sequence: Synthetic oligonucleotide
  Sense strand starting at position 68 of SEQ ID NO: 916156
uaacauauugguuggcaca

SEQ ID NO: 1134641 - RNA, 19 nt, Artificial Sequence
  Description of Artificial Sequence: Synthetic oligonucleotide
  Antisense strand to SEQ ID NO: 1134640
ugugccaaccaauauguua

SEQ ID NO: 1134642 - RNA, 19 nt, Artificial Sequence
  Description of Artificial Sequence: Synthetic oligonucleotide
  Sense strand starting at position 122 of SEQ ID NO: 916156
gguuauuacgugugguucu

SEQ ID NO: 1134643 - RNA, 19 nt, Artificial Sequence
  Description of Artificial Sequence: Synthetic oligonucleotide
  Antisense strand to SEQ ID NO: 1134642
agaaccacacguaauaacc

SEQ ID NO: 1134644 - RNA, 19 nt, Artificial Sequence
  Description of Artificial Sequence: Synthetic oligonucleotide
  Sense strand starting at position 127 of SEQ ID NO: 916156
uuacgugugguucugucau

SEQ ID NO: 1134645 - RNA, 19 nt, Artificial Sequence
  Description of Artificial Sequence: Synthetic oligonucleotide
  Antisense strand to SEQ ID NO: 1134644
augacagaaccacacguaa

SEQ ID NO: 1134646 - RNA, 19 nt, Artificial Sequence
  Description of Artificial Sequence: Synthetic oligonucleotide
  Sense strand starting at position 135 of SEQ ID NO: 916156
gguucugucauccagggau

SEQ ID NO: 1134647 - RNA, 19 nt, Artificial Sequence
  Description of Artificial Sequence: Synthetic oligonucleotide
  Antisense strand to SEQ ID NO: 1134646
aucccuggaugacagaacc

SEQ ID NO: 1134648 - RNA, 19 nt, Artificial Sequence
  Description of Artificial Sequence: Synthetic oligonucleotide
  Sense strand starting at position 195 of SEQ ID NO: 916156
ggucaaacaugccaaggau

SEQ ID NO: 1134649 - RNA, 19 nt, Artificial Sequence
  Description of Artificial Sequence: Synthetic oligonucleotide
  Antisense strand to SEQ ID NO: 1134648
auccuuggcauguuugacc

SEQ ID NO: 1134650 - RNA, 19 nt, Artificial Sequence
  Description of Artificial Sequence: Synthetic oligonucleotide
  Sense strand starting at position 257 of SEQ ID NO: 916156
gcccauggagcuugucaca

SEQ ID NO: 1134651 - RNA, 19 nt, Artificial Sequence
  Description of Artificial Sequence: Synthetic oligonucleotide
  Antisense strand to SEQ ID NO: 1134650
ugugacaagcuccaugggc

SEQ ID NO: 1134652 - RNA, 19 nt, Artificial Sequence
  Description of Artificial Sequence: Synthetic oligonucleotide
  Sense strand starting at position 260 of SEQ ID NO: 916156
cauggagcuugucacagau

SEQ ID NO: 1134653 - RNA, 19 nt, Artificial Sequence
  Description of Artificial Sequence: Synthetic oligonucleotide
  Antisense strand to SEQ ID NO: 1134652
aucugugacaagcuccaug

SEQ ID NO: 1134654 - RNA, 19 nt, Artificial Sequence
  Description of Artificial Sequence: Synthetic oligonucleotide
  Sense strand starting at position 262 of SEQ ID NO: 916156
uggagcuugucacagauac

SEQ ID NO: 1134655 - RNA, 19 nt, Artificial Sequence
  Description of Artificial Sequence: Synthetic oligonucleotide
  Antisense strand to SEQ ID NO: 1134654
guaucugugacaagcucca

SEQ ID NO: 1134656 - RNA, 19 nt, Artificial Sequence
  Description of Artificial Sequence: Synthetic oligonucleotide
  Sense strand starting at position 286 of SEQ ID NO: 916156
ggcaaugacucagggagau

SEQ ID NO: 1134657 - RNA, 19 nt, Artificial Sequence
  Description of Artificial Sequence: Synthetic oligonucleotide
  Antisense strand to SEQ ID NO: 1134656
aucucccugagucauugcc

SEQ ID NO: 1134658 - RNA, 19 nt, Artificial Sequence
  Description of Artificial Sequence: Synthetic oligonucleotide
  Sense strand starting at position 606 of SEQ ID NO: 916156
acugaaucccaugguuaac

SEQ ID NO: 1134659 - RNA, 19 nt, Artificial Sequence
  Description of Artificial Sequence: Synthetic oligonucleotide
  Antisense strand to SEQ ID NO: 1134658
guuaaccaugggauucagu

SEQ ID NO: 1134660 - RNA, 19 nt, Artificial Sequence
  Description of Artificial Sequence: Synthetic oligonucleotide
  Sense strand starting at position 615 of SEQ ID NO: 916156
caugguuaacgcuaucacu

SEQ ID NO: 1134661 - RNA, 19 nt, Artificial Sequence
  Description of Artificial Sequence: Synthetic oligonucleotide
  Antisense strand to SEQ ID NO: 1134660
agugauagcguuaaccaug

SEQ ID NO: 1134662 - RNA, 19 nt, Artificial Sequence
  Description of Artificial Sequence: Synthetic oligonucleotide
  Sense strand starting at position 854 of SEQ ID NO: 916156
aguauaggauaccaguuaa

SEQ ID NO: 1134663 - RNA, 19 nt, Artificial Sequence
  Description of Artificial Sequence: Synthetic oligonucleotide
  Antisense strand to SEQ ID NO: 1134662
uuaacugguauccuauacu

SEQ ID NO: 1134664 - RNA, 19 nt, Artificial Sequence
  Description of Artificial Sequence: Synthetic oligonucleotide
  Sense strand starting at position 870 of SEQ ID NO: 916156
uaagaacuuugguucugga

SEQ ID NO: 1134665 - RNA, 19 nt, Artificial Sequence
  Description of Artificial Sequence: Synthetic oligonucleotide
  Antisense strand to SEQ ID NO: 1134664
uccagaaccaaaguucuua

SEQ ID NO: 1134666 - RNA, 19 nt, Artificial Sequence
  Description of Artificial Sequence: Synthetic oligonucleotide
  Sense strand starting at position 873 of SEQ ID NO: 916156
gaacuuugguucuggaacu

SEQ ID NO: 1134667 - RNA, 19 nt, Artificial Sequence
  Description of Artificial Sequence: Synthetic oligonucleotide
  Antisense strand to SEQ ID NO: 1134666
aguuccagaaccaaaguuc

SEQ ID NO: 1134668 - RNA, 19 nt, Artificial Sequence
  Description of Artificial Sequence: Synthetic oligonucleotide
  Sense strand starting at position 940 of SEQ ID NO: 916156
cugggagacucgguuucuu

SEQ ID NO: 1134669 - RNA, 19 nt, Artificial Sequence
  Description of Artificial Sequence: Synthetic oligonucleotide
  Antisense strand to SEQ ID NO: 1134668
aagaaaccgagucucccag

SEQ ID NO: 1134670 - RNA, 19 nt, Artificial Sequence
  Description of Artificial Sequence: Synthetic oligonucleotide
  Sense strand starting at position 970 of SEQ ID NO: 916156
ugggacucauaauaauaca

SEQ ID NO: 1134671 - RNA, 19 nt, Artificial Sequence
  Description of Artificial Sequence: Synthetic oligonucleotide
  Antisense strand to SEQ ID NO: 1134670
uguauuauuaugaguccca

SEQ ID NO: 1134672 - RNA, 19 nt, Artificial Sequence
  Description of Artificial Sequence: Synthetic oligonucleotide
  Sense strand starting at position 997 of SEQ ID NO: 916156
cagacuuacugccugugau

SEQ ID NO: 1134673 - RNA, 19 nt, Artificial Sequence
  Description of Artificial Sequence: Synthetic oligonucleotide
  Antisense strand to SEQ ID NO: 1134672
aucacaggcaguaagucug

SEQ ID NO: 1134674 - RNA, 19 nt, Artificial Sequence
  Description of Artificial Sequence: Synthetic oligonucleotide
  Sense strand starting at position 998 of SEQ ID NO: 916156
agacuuacugccugugauu

SEQ ID NO: 1134675 - RNA, 19 nt, Artificial Sequence
  Description of Artificial Sequence: Synthetic oligonucleotide
  Antisense strand to SEQ ID NO: 1134674
aaucacaggcaguaagucu

SEQ ID NO: 1134676 - RNA, 19 nt, Artificial Sequence
  Description of Artificial Sequence: Synthetic oligonucleotide
  Sense strand starting at position 1000 of SEQ ID NO: 916156
acuuacugccugugauucu

SEQ ID NO: 1134677 - RNA, 19 nt, Artificial Sequence
  Description of Artificial Sequence: Synthetic oligonucleotide
  Antisense strand to SEQ ID NO: 1134676
agaaucacaggcaguaagu

SEQ ID NO: 1134678 - RNA, 19 nt, Artificial Sequence
  Description of Artificial Sequence: Synthetic oligonucleotide
  Sense strand starting at position 1033 of SEQ ID NO: 916156
ugaggaagugcauguaaag

SEQ ID NO: 1134679 - RNA, 19 nt, Artificial Sequence
  Description of Artificial Sequence: Synthetic oligonucleotide
  Antisense strand to SEQ ID NO: 1134678
cuuuacaugcacuuccuca

SEQ ID NO: 1134680 - RNA, 19 nt, Artificial Sequence
  Description of Artificial Sequence: Synthetic oligonucleotide
  Sense strand starting at position 1085 of SEQ ID NO: 916156
uagguucugugcucaguga

SEQ ID NO: 1134681 - RNA, 19 nt, Artificial Sequence
  Description of Artificial Sequence: Synthetic oligonucleotide
  Antisense strand to SEQ ID NO: 1134680
ucacugagcacagaaccua

SEQ ID NO: 1134682 - RNA, 19 nt, Artificial Sequence
  Description of Artificial Sequence: Synthetic oligonucleotide
  Sense strand starting at position 1092 of SEQ ID NO: 916156
ugugcucagugagcacaau

SEQ ID NO: 1134683 - RNA, 19 nt, Artificial Sequence
  Description of Artificial Sequence: Synthetic oligonucleotide
  Antisense strand to SEQ ID NO: 1134682
auugugcucacugagcaca

SEQ ID NO: 1134684 - RNA, 19 nt, Artificial Sequence
  Description of Artificial Sequence: Synthetic oligonucleotide
  Sense strand starting at position 1093 of SEQ ID NO: 916156
gugcucagugagcacaauu

SEQ ID NO: 1134685 - RNA, 19 nt, Artificial Sequence
  Description of Artificial Sequence: Synthetic oligonucleotide
  Antisense strand to SEQ ID NO: 1134684
aauugugcucacugagcac

SEQ ID NO: 1134686 - RNA, 19 nt, Artificial Sequence
  Description of Artificial Sequence: Synthetic oligonucleotide
  Sense strand starting at position 1122 of SEQ ID NO: 916156
cucacucagcugugagaga

SEQ ID NO: 1134687 - RNA, 19 nt, Artificial Sequence
  Description of Artificial Sequence: Synthetic oligonucleotide
  Antisense strand to SEQ ID NO: 1134686
ucucucacagcugagugag

SEQ ID NO: 1134688 - RNA, 19 nt, Artificial Sequence
  Description of Artificial Sequence: Synthetic oligonucleotide
  Sense strand starting at position 1123 of SEQ ID NO: 916156
ucacucagcugugagagau

SEQ ID NO: 1134689 - RNA, 19 nt, Artificial Sequence
  Description of Artificial Sequence: Synthetic oligonucleotide
  Antisense strand to SEQ ID NO: 1134688
aucucucacagcugaguga

SEQ ID NO: 1134690 - RNA, 19 nt, Artificial Sequence
  Description of Artificial Sequence: Synthetic oligonucleotide
  Sense strand starting at position 2479 of SEQ ID NO: 916156
agagcauucggcugagaac

SEQ ID NO: 1134691 - RNA, 19 nt, Artificial Sequence
  Description of Artificial Sequence: Synthetic oligonucleotide
  Antisense strand to SEQ ID NO: 1134690
guucucagccgaaugcucu

SEQ ID NO: 1134692 - RNA, 19 nt, Artificial Sequence
  Description of Artificial Sequence: Synthetic oligonucleotide
  Sense strand starting at position 2480 of SEQ ID NO: 916156
gagcauucggcugagaaca

SEQ ID NO: 1134693 - RNA, 19 nt, Artificial Sequence
  Description of Artificial Sequence: Synthetic oligonucleotide
  Antisense strand to SEQ ID NO: 1134692
uguucucagccgaaugcuc

SEQ ID NO: 1134694 - RNA, 19 nt, Artificial Sequence
  Description of Artificial Sequence: Synthetic oligonucleotide
  Sense strand starting at position 3333 of SEQ ID NO: 916156
gagucaccggcuugaaucu

SEQ ID NO: 1134695 - RNA, 19 nt, Artificial Sequence
  Description of Artificial Sequence: Synthetic oligonucleotide
  Antisense strand to SEQ ID NO: 1134694
agauucaagccggugacuc

SEQ ID NO: 1134696 - RNA, 19 nt, Artificial Sequence
  Description of Artificial Sequence: Synthetic oligonucleotide
  Sense strand starting at position 3340 of SEQ ID NO: 916156
cggcuugaaucuuugucau

SEQ ID NO: 1134697 - RNA, 19 nt, Artificial Sequence
  Description of Artificial Sequence: Synthetic oligonucleotide
  Antisense strand to SEQ ID NO: 1134696
augacaaagauucaagccg

SEQ ID NO: 1134698 - RNA, 19 nt, Artificial Sequence
  Description of Artificial Sequence: Synthetic oligonucleotide
  Sense strand starting at position 3342 of SEQ ID NO: 916156
gcuugaaucuuugucaucu

SEQ ID NO: 1134699 - RNA, 19 nt, Artificial Sequence
  Description of Artificial Sequence: Synthetic oligonucleotide
  Antisense strand to SEQ ID NO: 1134698
agaugacaaagauucaagc

SEQ ID NO: 1134700 - RNA, 19 nt, Artificial Sequence
  Description of Artificial Sequence: Synthetic oligonucleotide
  Sense strand starting at position 3393 of SEQ ID NO: 916156
cugaauaggugcucaauaa

SEQ ID NO: 1134701 - RNA, 19 nt, Artificial Sequence
  Description of Artificial Sequence: Synthetic oligonucleotide
  Antisense strand to SEQ ID NO: 1134700
uuauugagcaccuauucag

SEQ ID NO: 1134702 - RNA, 19 nt, Artificial Sequence
  Description of Artificial Sequence: Synthetic oligonucleotide
  Sense strand starting at position 3434 of SEQ ID NO: 916156
uccagagacugucuaaaga

SEQ ID NO: 1134703 - RNA, 19 nt, Artificial Sequence
  Description of Artificial Sequence: Synthetic oligonucleotide
  Antisense strand to SEQ ID NO: 1134702
ucuuuagacagucucugga

SEQ ID NO: 1134704 - RNA, 19 nt, Artificial Sequence
  Description of Artificial Sequence: Synthetic oligonucleotide
  Sense strand starting at position 3765 of SEQ ID NO: 916156
gugagauccuggaggaaga

SEQ ID NO: 1134705 - RNA, 19 nt, Artificial Sequence
  Description of Artificial Sequence: Synthetic oligonucleotide
  Antisense strand to SEQ ID NO: 1134704
ucuuccuccaggaucucac

SEQ ID NO: 1134706 - RNA, 19 nt, Artificial Sequence
  Description of Artificial Sequence: Synthetic oligonucleotide
  Sense strand starting at position 3792 of SEQ ID NO: 916156
ggcccucugccaugucauu

SEQ ID NO: 1134707 - RNA, 19 nt, Artificial Sequence
  Description of Artificial Sequence: Synthetic oligonucleotide
  Antisense strand to SEQ ID NO: 1134706
aaugacauggcagagggcc

SEQ ID NO: 1134708 - RNA, 19 nt, Artificial Sequence
  Description of Artificial Sequence: Synthetic oligonucleotide
  Sense strand starting at position 3826 of SEQ ID NO: 916156
acaacuggugcucaauaaa

SEQ ID NO: 1134709 - RNA, 19 nt, Artificial Sequence
  Description of Artificial Sequence: Synthetic oligonucleotide
  Antisense strand to SEQ ID NO: 1134708
uuuauugagcaccaguugu

SEQ ID NO: 1134710 - RNA, 19 nt, Artificial Sequence
  Description of Artificial Sequence: Synthetic oligonucleotide
  Sense strand starting at position 3849 of SEQ ID NO: 916156
gggugagcauugguuggau

SEQ ID NO: 1134711 - RNA, 19 nt, Artificial Sequence
  Description of Artificial Sequence: Synthetic oligonucleotide
  Antisense strand to SEQ ID NO: 1134710
auccaaccaaugcucaccc

SEQ ID NO: 1134712 - RNA, 19 nt, Artificial Sequence
  Description of Artificial Sequence: Synthetic oligonucleotide
  Sense strand starting at position 3853 of SEQ ID NO: 916156
gagcauugguuggauggaa

SEQ ID NO: 1134713 - RNA, 19 nt, Artificial Sequence
  Description of Artificial Sequence: Synthetic oligonucleotide
  Antisense strand to SEQ ID NO: 1134712
uuccauccaaccaaugcuc

SEQ ID NO: 1134714 - RNA, 19 nt, Artificial Sequence
  Description of Artificial Sequence: Synthetic oligonucleotide
  Sense strand starting at position 3938 of SEQ ID NO: 916156
gcuggaugcggcugagaca

SEQ ID NO: 1134715 - RNA, 19 nt, Artificial Sequence
  Description of Artificial Sequence: Synthetic oligonucleotide
  Antisense strand to SEQ ID NO: 1134714
ugucucagccgcauccagc

SEQ ID NO: 1134716 - RNA, 19 nt, Artificial Sequence
  Description of Artificial Sequence: Synthetic oligonucleotide
  Sense strand starting at position 98 of SEQ ID NO: 916157
ugcuuacuuugauccugaa

SEQ ID NO: 1134717 - RNA, 19 nt, Artificial Sequence
  Description of Artificial Sequence: Synthetic oligonucleotide
  Antisense strand to SEQ ID NO: 1134716
uucaggaucaaaguaagca

SEQ ID NO: 1134718 - RNA, 19 nt, Artificial Sequence
  Description of Artificial Sequence: Synthetic oligonucleotide
  Sense strand starting at position 277 of SEQ ID NO: 916157
ggguauagguuacuaagaa

SEQ ID NO: 1134719 - RNA, 19 nt, Artificial Sequence
  Description of Artificial Sequence: Synthetic oligonucleotide
  Antisense strand to SEQ ID NO: 1134718
uucuuaguaaccuauaccc

SEQ ID NO: 1134720 - RNA, 19 nt, Artificial Sequence
  Description of Artificial Sequence: Synthetic oligonucleotide
  Sense strand starting at position 278 of SEQ ID NO: 916157
gguauagguuacuaagaau

SEQ ID NO: 1134721 - RNA, 19 nt, Artificial Sequence
  Description of Artificial Sequence: Synthetic oligonucleotide
  Antisense strand to SEQ ID NO: 1134720
auucuuaguaaccuauacc

SEQ ID NO: 1134722 - RNA, 19 nt, Artificial Sequence
  Description of Artificial Sequence: Synthetic oligonucleotide
  Sense strand starting at position 284 of SEQ ID NO: 916157
gguuacuaagaauggcauu

SEQ ID NO: 1134723 - RNA, 19 nt, Artificial Sequence
  Description of Artificial Sequence: Synthetic oligonucleotide
  Antisense strand to SEQ ID NO: 1134722
aaugccauucuuaguaacc

SEQ ID NO: 1134724 - RNA, 19 nt, Artificial Sequence
  Description of Artificial Sequence: Synthetic oligonucleotide
  Sense strand starting at position 295 of SEQ ID NO: 916157
auggcauuacuuggaacau

SEQ ID NO: 1134725 - RNA, 19 nt, Artificial Sequence
  Description of Artificial Sequence: Synthetic oligonucleotide
  Antisense strand to SEQ ID NO: 1134724
auguuccaaguaaugccau

SEQ ID NO: 1134726 - RNA, 19 nt, Artificial Sequence
  Description of Artificial Sequence: Synthetic oligonucleotide
  Sense strand starting at position 534 of SEQ ID NO: 916157
gcagaauuccauuaucagc

SEQ ID NO: 1134727 - RNA, 19 nt, Artificial Sequence
  Description of Artificial Sequence: Synthetic oligonucleotide
  Antisense strand to SEQ ID NO: 1134726
gcugauaauggaauucugc

SEQ ID NO: 1134728 - RNA, 19 nt, Artificial Sequence
  Description of Artificial Sequence: Synthetic oligonucleotide
  Sense strand starting at position 708 of SEQ ID NO: 916157
aucacauggaccggaauau

SEQ ID NO: 1134729 - RNA, 19 nt, Artificial Sequence
  Description of Artificial Sequence: Synthetic oligonucleotide
  Antisense strand to SEQ ID NO: 1134728
auauuccgguccaugugau

SEQ ID NO: 1134730 - RNA, 19 nt, Artificial Sequence
  Description of Artificial Sequence: Synthetic oligonucleotide
  Sense strand starting at position 718 of SEQ ID NO: 916157
ccggaauauuuccuaugcu

SEQ ID NO: 1134731 - RNA, 19 nt, Artificial Sequence
  Description of Artificial Sequence: Synthetic oligonucleotide
  Antisense strand to SEQ ID NO: 1134730
agcauaggaaauauuccgg

SEQ ID NO: 1134732 - RNA, 19 nt, Artificial Sequence
  Description of Artificial Sequence: Synthetic oligonucleotide
  Sense strand starting at position 719 of SEQ ID NO: 916157
cggaauauuuccuaugcuc

SEQ ID NO: 1134733 - RNA, 19 nt, Artificial Sequence
  Description of Artificial Sequence: Synthetic oligonucleotide
  Antisense strand to SEQ ID NO: 1134732
gagcauaggaaauauuccg

SEQ ID NO: 1134734 - RNA, 19 nt, Artificial Sequence
  Description of Artificial Sequence: Synthetic oligonucleotide
  Sense strand starting at position 787 of SEQ ID NO: 916157
cagggagccuuccuugaga

SEQ ID NO: 1134735 - RNA, 19 nt, Artificial Sequence
  Description of Artificial Sequence: Synthetic oligonucleotide
  Antisense strand to SEQ ID NO: 1134734
ucucaaggaaggcucccug

SEQ ID NO: 1134736 - RNA, 19 nt, Artificial Sequence
  Description of Artificial Sequence: Synthetic oligonucleotide
  Sense strand starting at position 790 of SEQ ID NO: 916157
ggagccuuccuugagagcu

SEQ ID NO: 1134737 - RNA, 19 nt, Artificial Sequence
  Description of Artificial Sequence: Synthetic oligonucleotide
  Antisense strand to SEQ ID NO: 1134736
agcucucaaggaaggcucc

SEQ ID NO: 1134738 - RNA, 19 nt, Artificial Sequence
  Description of Artificial Sequence: Synthetic oligonucleotide
  Sense strand starting at position 828 of SEQ ID NO: 916157
aagucuguuaaggauguga

SEQ ID NO: 1134739 - RNA, 19 nt, Artificial Sequence
  Description of Artificial Sequence: Synthetic oligonucleotide
  Antisense strand to SEQ ID NO: 1134738
ucacauccuuaacagacuu

SEQ ID NO: 1134740 - RNA, 19 nt, Artificial Sequence
  Description of Artificial Sequence: Synthetic oligonucleotide
  Sense strand starting at position 830 of SEQ ID NO: 916157
gucuguuaaggaugugaac

SEQ ID NO: 1134741 - RNA, 19 nt, Artificial Sequence
  Description of Artificial Sequence: Synthetic oligonucleotide
  Antisense strand to SEQ ID NO: 1134740
guucacauccuuaacagac

SEQ ID NO: 1134742 - RNA, 19 nt, Artificial Sequence
  Description of Artificial Sequence: Synthetic oligonucleotide
  Sense strand starting at position 832 of SEQ ID NO: 916157
cuguuaaggaugugaacaa

SEQ ID NO: 1134743 - RNA, 19 nt, Artificial Sequence
  Description of Artificial Sequence: Synthetic oligonucleotide
  Antisense strand to SEQ ID NO: 1134742
uuguucacauccuuaacag

SEQ ID NO: 1134744 - RNA, 19 nt, Artificial Sequence
  Description of Artificial Sequence: Synthetic oligonucleotide
  Sense strand starting at position 833 of SEQ ID NO: 916157
uguuaaggaugugaacaaa

SEQ ID NO: 1134745 - RNA, 19 nt, Artificial Sequence
  Description of Artificial Sequence: Synthetic oligonucleotide
  Antisense strand to SEQ ID NO: 1134744
uuuguucacauccuuaaca

SEQ ID NO: 1134746 - RNA, 19 nt, Artificial Sequence
  Description of Artificial Sequence: Synthetic oligonucleotide
  Sense strand starting at position 870 of SEQ ID NO: 916157
auaacaaaguucucauugu

SEQ ID NO: 1134747 - RNA, 19 nt, Artificial Sequence
  Description of Artificial Sequence: Synthetic oligonucleotide
  Antisense strand to SEQ ID NO: 1134746
acaaugagaacuuuguuau

SEQ ID NO: 1134748 - RNA, 19 nt, Artificial Sequence
  Description of Artificial Sequence: Synthetic oligonucleotide
  Sense strand starting at position 1071 of SEQ ID NO: 916157
ccauuagugugaccuccau

SEQ ID NO: 1134749 - RNA, 19 nt, Artificial Sequence
  Description of Artificial Sequence: Synthetic oligonucleotide
  Antisense strand to SEQ ID NO: 1134748
auggaggucacacuaaugg

SEQ ID NO: 1134750 - RNA, 19 nt, Artificial Sequence
  Description of Artificial Sequence: Synthetic oligonucleotide
  Sense strand starting at position 1151 of SEQ ID NO: 916157
ccagaugcaccucgagauu

SEQ ID NO: 1134751 - RNA, 19 nt, Artificial Sequence
  Description of Artificial Sequence: Synthetic oligonucleotide
  Antisense strand to SEQ ID NO: 1134750
aaucucgaggugcaucugg

SEQ ID NO: 1134752 - RNA, 19 nt, Artificial Sequence
  Description of Artificial Sequence: Synthetic oligonucleotide
  Sense strand starting at position 1188 of SEQ ID NO: 916157
ccuagagucucagcccaua

SEQ ID NO: 1134753 - RNA, 19 nt, Artificial Sequence
  Description of Artificial Sequence: Synthetic oligonucleotide
  Antisense strand to SEQ ID NO: 1134752
uaugggcugagacucuagg

SEQ ID NO: 1134754 - RNA, 19 nt, Artificial Sequence
  Description of Artificial Sequence: Synthetic oligonucleotide
  Sense strand starting at position 1206 of SEQ ID NO: 916157
acagucuauccgcgaugca

SEQ ID NO: 1134755 - RNA, 19 nt, Artificial Sequence
  Description of Artificial Sequence: Synthetic oligonucleotide
  Antisense strand to SEQ ID NO: 1134754
ugcaucgcggauagacugu

SEQ ID NO: 1134756 - RNA, 19 nt, Artificial Sequence
  Description of Artificial Sequence: Synthetic oligonucleotide
  Sense strand starting at position 1207 of SEQ ID NO: 916157
cagucuauccgcgaugcaa

SEQ ID NO: 1134757 - RNA, 19 nt, Artificial Sequence
  Description of Artificial Sequence: Synthetic oligonucleotide
  Antisense strand to SEQ ID NO: 1134756
uugcaucgcggauagacug

SEQ ID NO: 1134758 - RNA, 19 nt, Artificial Sequence
  Description of Artificial Sequence: Synthetic oligonucleotide
  Sense strand starting at position 1209 of SEQ ID NO: 916157
gucuauccgcgaugcaaca

SEQ ID NO: 1134759 - RNA, 19 nt, Artificial Sequence
  Description of Artificial Sequence: Synthetic oligonucleotide
  Antisense strand to SEQ ID NO: 1134758
uguugcaucgcggauagac

SEQ ID NO: 1134760 - RNA, 19 nt, Artificial Sequence
  Description of Artificial Sequence: Synthetic oligonucleotide
  Sense strand starting at position 1258 of SEQ ID NO: 916157
cuagguguccuagguccaa

SEQ ID NO: 1134761 - RNA, 19 nt, Artificial Sequence
  Description of Artificial Sequence: Synthetic oligonucleotide
  Antisense strand to SEQ ID NO: 1134760
uuggaccuaggacaccuag

SEQ ID NO: 1134762 - RNA, 19 nt, Artificial Sequence
  Description of Artificial Sequence: Synthetic oligonucleotide
  Sense strand starting at position 1325 of SEQ ID NO: 916157
cugugauuccucuguggca

SEQ ID NO: 1134763 - RNA, 19 nt, Artificial Sequence
  Description of Artificial Sequence: Synthetic oligonucleotide
  Antisense strand to SEQ ID NO: 1134762
ugccacagaggaaucacag

SEQ ID NO: 1134764 - RNA, 19 nt, Artificial Sequence
  Description of Artificial Sequence: Synthetic oligonucleotide
  Sense strand starting at position 1326 of SEQ ID NO: 916157
ugugauuccucuguggcaa

SEQ ID NO: 1134765 - RNA, 19 nt, Artificial Sequence
  Description of Artificial Sequence: Synthetic oligonucleotide
  Antisense strand to SEQ ID NO: 1134764
uugccacagaggaaucaca

SEQ ID NO: 1134766 - RNA, 19 nt, Artificial Sequence
  Description of Artificial Sequence: Synthetic oligonucleotide
  Sense strand starting at position 1327 of SEQ ID NO: 916157
gugauuccucuguggcaac

SEQ ID NO: 1134767 - RNA, 19 nt, Artificial Sequence
  Description of Artificial Sequence: Synthetic oligonucleotide
  Antisense strand to SEQ ID NO: 1134766
guugccacagaggaaucac

SEQ ID NO: 1134768 - RNA, 19 nt, Artificial Sequence
  Description of Artificial Sequence: Synthetic oligonucleotide
  Sense strand starting at position 2058 of SEQ ID NO: 916157
agguuaaaucccuggagac

SEQ ID NO: 1134769 - RNA, 19 nt, Artificial Sequence
  Description of Artificial Sequence: Synthetic oligonucleotide
  Antisense strand to SEQ ID NO: 1134768
gucuccagggauuuaaccu

SEQ ID NO: 1134770 - RNA, 19 nt, Artificial Sequence
  Description of Artificial Sequence: Synthetic oligonucleotide
  Sense strand starting at position 2059 of SEQ ID NO: 916157
gguuaaaucccuggagacg

SEQ ID NO: 1134771 - RNA, 19 nt, Artificial Sequence
  Description of Artificial Sequence: Synthetic oligonucleotide
  Antisense strand to SEQ ID NO: 1134770
cgucuccagggauuuaacc

SEQ ID NO: 1134772 - RNA, 19 nt, Artificial Sequence
  Description of Artificial Sequence: Synthetic oligonucleotide
  Sense strand starting at position 2173 of SEQ ID NO: 916157
ggugaaguguuggugggua

SEQ ID NO: 1134773 - RNA, 19 nt, Artificial Sequence
  Description of Artificial Sequence: Synthetic oligonucleotide
  Antisense strand to SEQ ID NO: 1134772
uacccaccaacacuucacc

SEQ ID NO: 1134774 - RNA, 19 nt, Artificial Sequence
  Description of Artificial Sequence: Synthetic oligonucleotide
  Sense strand starting at position 2175 of SEQ ID NO: 916157
ugaaguguugguggguaua

SEQ ID NO: 1134775 - RNA, 19 nt, Artificial Sequence
  Description of Artificial Sequence: Synthetic oligonucleotide
  Antisense strand to SEQ ID NO: 1134774
uauacccaccaacacuuca

SEQ ID NO: 1134776 - RNA, 19 nt, Artificial Sequence
  Description of Artificial Sequence: Synthetic oligonucleotide
  Sense strand starting at position 2309 of SEQ ID NO: 916157
uaaacaaauccggguacua

SEQ ID NO: 1134777 - RNA, 19 nt, Artificial Sequence
  Description of Artificial Sequence: Synthetic oligonucleotide
  Antisense strand to SEQ ID NO: 1134776
uaguacccggauuuguuua

SEQ ID NO: 1134778 - RNA, 19 nt, Artificial Sequence
  Description of Artificial Sequence: Synthetic oligonucleotide
  Sense strand starting at position 2356 of SEQ ID NO: 916157
ugccucuuucuagauuguu

SEQ ID NO: 1134779 - RNA, 19 nt, Artificial Sequence
  Description of Artificial Sequence: Synthetic oligonucleotide
  Antisense strand to SEQ ID NO: 1134778
aacaaucuagaaagaggca

SEQ ID NO: 1134780 - RNA, 19 nt, Artificial Sequence
  Description of Artificial Sequence: Synthetic oligonucleotide
  Sense strand starting at position 2364 of SEQ ID NO: 916157
ucuagauuguuaccuccua

SEQ ID NO: 1134781 - RNA, 19 nt, Artificial Sequence
  Description of Artificial Sequence: Synthetic oligonucleotide
  Antisense strand to SEQ ID NO: 1134780
uaggagguaacaaucuaga

SEQ ID NO: 1134782 - RNA, 19 nt, Artificial Sequence
  Description of Artificial Sequence: Synthetic oligonucleotide
  Sense strand starting at position 2365 of SEQ ID NO: 916157
cuagauuguuaccuccuau

SEQ ID NO: 1134783 - RNA, 19 nt, Artificial Sequence
  Description of Artificial Sequence: Synthetic oligonucleotide
  Antisense strand to SEQ ID NO: 1134782
auaggagguaacaaucuag

SEQ ID NO: 1134784 - RNA, 19 nt, Artificial Sequence
  Description of Artificial Sequence: Synthetic oligonucleotide
  Sense strand starting at position 2401 of SEQ ID NO: 916157
cucagaugaucauugguca

SEQ ID NO: 1134785 - RNA, 19 nt, Artificial Sequence
  Description of Artificial Sequence: Synthetic oligonucleotide
  Antisense strand to SEQ ID NO: 1134784
ugaccaaugaucaucugag

SEQ ID NO: 1134786 - RNA, 19 nt, Artificial Sequence
  Description of Artificial Sequence: Synthetic oligonucleotide
  Sense strand starting at position 2516 of SEQ ID NO: 916157
gugucaaguguaugguuca

SEQ ID NO: 1134787 - RNA, 19 nt, Artificial Sequence
  Description of Artificial Sequence: Synthetic oligonucleotide
  Antisense strand to SEQ ID NO: 1134786
ugaaccauacacuugacac

SEQ ID NO: 1134788 - RNA, 19 nt, Artificial Sequence
  Description of Artificial Sequence: Synthetic oligonucleotide
  Sense strand starting at position 2593 of SEQ ID NO: 916157
caagcagucuccgcccaau

SEQ ID NO: 1134789 - RNA, 19 nt, Artificial Sequence
  Description of Artificial Sequence: Synthetic oligonucleotide
  Antisense strand to SEQ ID NO: 1134788
auugggcggagacugcuug

SEQ ID NO: 1134790 - RNA, 19 nt, Artificial Sequence
  Description of Artificial Sequence: Synthetic oligonucleotide
  Sense strand starting at position 2684 of SEQ ID NO: 916157
gcaggaaucucccaaacug

SEQ ID NO: 1134791 - RNA, 19 nt, Artificial Sequence
  Description of Artificial Sequence: Synthetic oligonucleotide
  Antisense strand to SEQ ID NO: 1134790
caguuugggagauuccugc

SEQ ID NO: 1134792 - RNA, 19 nt, Artificial Sequence
  Description of Artificial Sequence: Synthetic oligonucleotide
  Sense strand starting at position 2752 of SEQ ID NO: 916157
gagggcuagucacuuucuu

SEQ ID NO: 1134793 - RNA, 19 nt, Artificial Sequence
  Description of Artificial Sequence: Synthetic oligonucleotide
  Antisense strand to SEQ ID NO: 1134792
aagaaagugacuagcccuc

SEQ ID NO: 1134794 - RNA, 19 nt, Artificial Sequence
  Description of Artificial Sequence: Synthetic oligonucleotide
  Sense strand starting at position 3053 of SEQ ID NO: 916157
acagccaucugucuagaaa

SEQ ID NO: 1134795 - RNA, 19 nt, Artificial Sequence
  Description of Artificial Sequence: Synthetic oligonucleotide
  Antisense strand to SEQ ID NO: 1134794
uuucuagacagauggcugu

SEQ ID NO: 1134796 - RNA, 19 nt, Artificial Sequence
  Description of Artificial Sequence: Synthetic oligonucleotide
  Sense strand starting at position 156 of SEQ ID NO: 916158
agugguauccaccaauaua

SEQ ID NO: 1134797 - RNA, 19 nt, Artificial Sequence
  Description of Artificial Sequence: Synthetic oligonucleotide
  Antisense strand to SEQ ID NO: 1134796
uauauugguggauaccacu

SEQ ID NO: 1134798 - RNA, 19 nt, Artificial Sequence
  Description of Artificial Sequence: Synthetic oligonucleotide
  Sense strand starting at position 159 of SEQ ID NO: 916158
gguauccaccaauauaugu

SEQ ID NO: 1134799 - RNA, 19 nt, Artificial Sequence
  Description of Artificial Sequence: Synthetic oligonucleotide
  Antisense strand to SEQ ID NO: 1134798
acauauauugguggauacc

SEQ ID NO: 1134800 - RNA, 19 nt, Artificial Sequence
  Description of Artificial Sequence: Synthetic oligonucleotide
  Sense strand starting at position 292 of SEQ ID NO: 916158
gcauaaauccuuugaggaa

SEQ ID NO: 1134801 - RNA, 19 nt, Artificial Sequence
  Description of Artificial Sequence: Synthetic oligonucleotide
  Antisense strand to SEQ ID NO: 1134800
uuccucaaaggauuuaugc

SEQ ID NO: 1134802 - RNA, 19 nt, Artificial Sequence
  Description of Artificial Sequence: Synthetic oligonucleotide
  Sense strand starting at position 304 of SEQ ID NO: 916158
ugaggaaacgguuauccuu

SEQ ID NO: 1134803 - RNA, 19 nt, Artificial Sequence
  Description of Artificial Sequence: Synthetic oligonucleotide
  Antisense strand to SEQ ID NO: 1134802
aaggauaaccguuuccuca

SEQ ID NO: 1134804 - RNA, 19 nt, Artificial Sequence
  Description of Artificial Sequence: Synthetic oligonucleotide
  Sense strand starting at position 306 of SEQ ID NO: 916158
aggaaacgguuauccuuua

SEQ ID NO: 1134805 - RNA, 19 nt, Artificial Sequence
  Description of Artificial Sequence: Synthetic oligonucleotide
  Antisense strand to SEQ ID NO: 1134804
uaaaggauaaccguuuccu

SEQ ID NO: 1134806 - RNA, 19 nt, Artificial Sequence
  Description of Artificial Sequence: Synthetic oligonucleotide
  Sense strand starting at position 344 of SEQ ID NO: 916158
ccauaaggugaguggcaua

SEQ ID NO: 1134807 - RNA, 19 nt, Artificial Sequence
  Description of Artificial Sequence: Synthetic oligonucleotide
  Antisense strand to SEQ ID NO: 1134806
uaugccacucaccuuaugg

SEQ ID NO: 1134808 - RNA, 19 nt, Artificial Sequence
  Description of Artificial Sequence: Synthetic oligonucleotide
  Sense strand starting at position 476 of SEQ ID NO: 916158
agaaacauaccugguuuau

SEQ ID NO: 1134809 - RNA, 19 nt, Artificial Sequence
  Description of Artificial Sequence: Synthetic oligonucleotide
  Antisense strand to SEQ ID NO: 1134808
auaaaccagguauguuucu

SEQ ID NO: 1134810 - RNA, 19 nt, Artificial Sequence
  Description of Artificial Sequence: Synthetic oligonucleotide
  Sense strand starting at position 576 of SEQ ID NO: 916158
cagagcgcuggguaaauaa

SEQ ID NO: 1134811 - RNA, 19 nt, Artificial Sequence
  Description of Artificial Sequence: Synthetic oligonucleotide
  Antisense strand to SEQ ID NO: 1134810
uuauuuacccagcgcucug

SEQ ID NO: 1134812 - RNA, 19 nt, Artificial Sequence
  Description of Artificial Sequence: Synthetic oligonucleotide
  Sense strand starting at position 679 of SEQ ID NO: 916158
gagauuaugcaacagguuu

SEQ ID NO: 1134813 - RNA, 19 nt, Artificial Sequence
  Description of Artificial Sequence: Synthetic oligonucleotide
  Antisense strand to SEQ ID NO: 1134812
aaaccuguugcauaaucuc

SEQ ID NO: 1134814 - RNA, 19 nt, Artificial Sequence
  Description of Artificial Sequence: Synthetic oligonucleotide
  Sense strand starting at position 791 of SEQ ID NO: 916158
aguugauguuuccuaaacu

SEQ ID NO: 1134815 - RNA, 19 nt, Artificial Sequence
  Description of Artificial Sequence: Synthetic oligonucleotide
  Antisense strand to SEQ ID NO: 1134814
aguuuaggaaacaucaacu

SEQ ID NO: 1134816 - RNA, 19 nt, Artificial Sequence
  Description of Artificial Sequence: Synthetic oligonucleotide
  Sense strand starting at position 1073 of SEQ ID NO: 916158
cgguugguugguugaagaa

SEQ ID NO: 1134817 - RNA, 19 nt, Artificial Sequence
  Description of Artificial Sequence: Synthetic oligonucleotide
  Antisense strand to SEQ ID NO: 1134816
uucuucaaccaaccaaccg

SEQ ID NO: 1134818 - RNA, 19 nt, Artificial Sequence
  Description of Artificial Sequence: Synthetic oligonucleotide
  Sense strand starting at position 1075 of SEQ ID NO: 916158
guugguugguugaagaaag

SEQ ID NO: 1134819 - RNA, 19 nt, Artificial Sequence
  Description of Artificial Sequence: Synthetic oligonucleotide
  Antisense strand to SEQ ID NO: 1134818
cuuucuucaaccaaccaac

SEQ ID NO: 1134820 - RNA, 19 nt, Artificial Sequence
  Description of Artificial Sequence: Synthetic oligonucleotide
  Sense strand starting at position 1978 of SEQ ID NO: 916158
ggugguaauaaucguuuaa

SEQ ID NO: 1134821 - RNA, 19 nt, Artificial Sequence
  Description of Artificial Sequence: Synthetic oligonucleotide
  Antisense strand to SEQ ID NO: 1134820
uuaaacgauuauuaccacc

SEQ ID NO: 1134822 - RNA, 19 nt, Artificial Sequence
  Description of Artificial Sequence: Synthetic oligonucleotide
  Sense strand starting at position 2077 of SEQ ID NO: 916158
gagaaagagucgcugguca

SEQ ID NO: 1134823 - RNA, 19 nt, Artificial Sequence
  Description of Artificial Sequence: Synthetic oligonucleotide
  Antisense strand to SEQ ID NO: 1134822
ugaccagcgacucuuucuc

SEQ ID NO: 1134824 - RNA, 19 nt, Artificial Sequence
  Description of Artificial Sequence: Synthetic oligonucleotide
  Sense strand starting at position 2081 of SEQ ID NO: 916158
aagagucgcuggucaggaa

SEQ ID NO: 1134825 - RNA, 19 nt, Artificial Sequence
  Description of Artificial Sequence: Synthetic oligonucleotide
  Antisense strand to SEQ ID NO: 1134824
uuccugaccagcgacucuu

SEQ ID NO: 1134826 - RNA, 19 nt, Artificial Sequence
  Description of Artificial Sequence: Synthetic oligonucleotide
  Sense strand starting at position 2085 of SEQ ID NO: 916158
gucgcuggucaggaaacuu

SEQ ID NO: 1134827 - RNA, 19 nt, Artificial Sequence
  Description of Artificial Sequence: Synthetic oligonucleotide
  Antisense strand to SEQ ID NO: 1134826
aaguuuccugaccagcgac

SEQ ID NO: 1134828 - RNA, 19 nt, Artificial Sequence
  Description of Artificial Sequence: Synthetic oligonucleotide
  Sense strand starting at position 2111 of SEQ ID NO: 916158
ggaugaggucauugguuua

SEQ ID NO: 1134829 - RNA, 19 nt, Artificial Sequence
  Description of Artificial Sequence: Synthetic oligonucleotide
  Antisense strand to SEQ ID NO: 1134828
uaaaccaaugaccucaucc

SEQ ID NO: 1134830 - RNA, 19 nt, Artificial Sequence
  Description of Artificial Sequence: Synthetic oligonucleotide
  Sense strand starting at position 2136 of SEQ ID NO: 916158
aagagauggcgucacuuga

SEQ ID NO: 1134831 - RNA, 19 nt, Artificial Sequence
  Description of Artificial Sequence: Synthetic oligonucleotide
  Antisense strand to SEQ ID NO: 1134830
ucaagugacgccaucucuu

SEQ ID NO: 1134832 - RNA, 19 nt, Artificial Sequence
  Description of Artificial Sequence: Synthetic oligonucleotide
  Sense strand starting at position 2707 of SEQ ID NO: 916158
agagaaguuacagguacuu

SEQ ID NO: 1134833 - RNA, 19 nt, Artificial Sequence
  Description of Artificial Sequence: Synthetic oligonucleotide
  Antisense strand to SEQ ID NO: 1134832
aaguaccuguaacuucucu

SEQ ID NO: 1134834 - RNA, 19 nt, Artificial Sequence
  Description of Artificial Sequence: Synthetic oligonucleotide
  Sense strand starting at position 2767 of SEQ ID NO: 916158
auauguuuaugguugaaag

SEQ ID NO: 1134835 - RNA, 19 nt, Artificial Sequence
  Description of Artificial Sequence: Synthetic oligonucleotide
  Antisense strand to SEQ ID NO: 1134834
cuuucaaccauaaacauau

SEQ ID NO: 1134836 - RNA, 19 nt, Artificial Sequence
  Description of Artificial Sequence: Synthetic oligonucleotide
  Sense strand starting at position 2923 of SEQ ID NO: 916158
cgccucuugagagguacaa

SEQ ID NO: 1134837 - RNA, 19 nt, Artificial Sequence
  Description of Artificial Sequence: Synthetic oligonucleotide
  Antisense strand to SEQ ID NO: 1134836
uuguaccucucaagaggcg

SEQ ID NO: 1134838 - RNA, 19 nt, Artificial Sequence
  Description of Artificial Sequence: Synthetic oligonucleotide
  Sense strand starting at position 3089 of SEQ ID NO: 916158
aucggagcuuuauuccaau

SEQ ID NO: 1134839 - RNA, 19 nt, Artificial Sequence
  Description of Artificial Sequence: Synthetic oligonucleotide
  Antisense strand to SEQ ID NO: 1134838
auuggaauaaagcuccgau

SEQ ID NO: 1134840 - RNA, 19 nt, Artificial Sequence
  Description of Artificial Sequence: Synthetic oligonucleotide
  Sense strand starting at position 3101 of SEQ ID NO: 916158
uuccaauguucuuugagca

SEQ ID NO: 1134841 - RNA, 19 nt, Artificial Sequence
  Description of Artificial Sequence: Synthetic oligonucleotide
  Antisense strand to SEQ ID NO: 1134840
ugcucaaagaacauuggaa

SEQ ID NO: 1134842 - RNA, 19 nt, Artificial Sequence
  Description of Artificial Sequence: Synthetic oligonucleotide
  Sense strand starting at position 3132 of SEQ ID NO: 916158
gcugcuucuacugagaagu

SEQ ID NO: 1134843 - RNA, 19 nt, Artificial Sequence
  Description of Artificial Sequence: Synthetic oligonucleotide
  Antisense strand to SEQ ID NO: 1134842
acuucucaguagaagcagc

SEQ ID NO: 1134844 - RNA, 19 nt, Artificial Sequence
  Description of Artificial Sequence: Synthetic oligonucleotide
  Sense strand starting at position 3146 of SEQ ID NO: 916158
gaaguacucacguggauau

SEQ ID NO: 1134845 - RNA, 19 nt, Artificial Sequence
  Description of Artificial Sequence: Synthetic oligonucleotide
  Antisense strand to SEQ ID NO: 1134844
auauccacgugaguacuuc

SEQ ID NO: 1134846 - RNA, 19 nt, Artificial Sequence
  Description of Artificial Sequence: Synthetic oligonucleotide
  Sense strand starting at position 3148 of SEQ ID NO: 916158
aguacucacguggauauca

SEQ ID NO: 1134847 - RNA, 19 nt, Artificial Sequence
  Description of Artificial Sequence: Synthetic oligonucleotide
  Antisense strand to SEQ ID NO: 1134846
ugauauccacgugaguacu

SEQ ID NO: 1134848 - RNA, 19 nt, Artificial Sequence
  Description of Artificial Sequence: Synthetic oligonucleotide
  Sense strand starting at position 3209 of SEQ ID NO: 916158
uggacugcuccaugagcca

SEQ ID NO: 1134849 - RNA, 19 nt, Artificial Sequence
  Description of Artificial Sequence: Synthetic oligonucleotide
  Antisense strand to SEQ ID NO: 1134848
uggcucauggagcagucca

SEQ ID NO: 1134850 - RNA, 19 nt, Artificial Sequence
  Description of Artificial Sequence: Synthetic oligonucleotide
  Sense strand starting at position 3279 of SEQ ID NO: 916158
gccggauugggacacuaga

SEQ ID NO: 1134851 - RNA, 19 nt, Artificial Sequence
  Description of Artificial Sequence: Synthetic oligonucleotide
  Antisense strand to SEQ ID NO: 1134850
ucuagugucccaauccggc

SEQ ID NO: 1134852 - RNA, 19 nt, Artificial Sequence
  Description of Artificial Sequence: Synthetic oligonucleotide
  Sense strand starting at position 3384 of SEQ ID NO: 916158
uuuggguggguucgaaaga

SEQ ID NO: 1134853 - RNA, 19 nt, Artificial Sequence
  Description of Artificial Sequence: Synthetic oligonucleotide
  Antisense strand to SEQ ID NO: 1134852
ucuuucgaacccacccaaa

SEQ ID NO: 1134854 - RNA, 19 nt, Artificial Sequence
  Description of Artificial Sequence: Synthetic oligonucleotide
  Sense strand starting at position 3389 of SEQ ID NO: 916158
guggguucgaaagauaaua

SEQ ID NO: 1134855 - RNA, 19 nt, Artificial Sequence
  Description of Artificial Sequence: Synthetic oligonucleotide
  Antisense strand to SEQ ID NO: 1134854
uauuaucuuucgaacccac

SEQ ID NO: 1134856 - RNA, 19 nt, Artificial Sequence
  Description of Artificial Sequence: Synthetic oligonucleotide
  Sense strand starting at position 3454 of SEQ ID NO: 916158
auuccuuaugauugguaau

SEQ ID NO: 1134857 - RNA, 19 nt, Artificial Sequence
  Description of Artificial Sequence: Synthetic oligonucleotide
  Antisense strand to SEQ ID NO: 1134856
auuaccaaucauaaggaau

SEQ ID NO: 1134858 - RNA, 19 nt, Artificial Sequence
  Description of Artificial Sequence: Synthetic oligonucleotide
  Sense strand starting at position 3456 of SEQ ID NO: 916158
uccuuaugauugguaauca

SEQ ID NO: 1134859 - RNA, 19 nt, Artificial Sequence
  Description of Artificial Sequence: Synthetic oligonucleotide
  Antisense strand to SEQ ID NO: 1134858
ugauuaccaaucauaagga

SEQ ID NO: 1134860 - RNA, 19 nt, Artificial Sequence
  Description of Artificial Sequence: Synthetic oligonucleotide
  Sense strand starting at position 3460 of SEQ ID NO: 916158
uaugauugguaaucauuga

SEQ ID NO: 1134861 - RNA, 19 nt, Artificial Sequence
  Description of Artificial Sequence: Synthetic oligonucleotide
  Antisense strand to SEQ ID NO: 1134860
ucaaugauuaccaaucaua

SEQ ID NO: 1134862 - RNA, 19 nt, Artificial Sequence
  Description of Artificial Sequence: Synthetic oligonucleotide
  Sense strand starting at position 3464 of SEQ ID NO: 916158
auugguaaucauugaaggu

SEQ ID NO: 1134863 - RNA, 19 nt, Artificial Sequence
  Description of Artificial Sequence: Synthetic oligonucleotide
  Antisense strand to SEQ ID NO: 1134862
accuucaaugauuaccaau

SEQ ID NO: 1134864 - RNA, 19 nt, Artificial Sequence
  Description of Artificial Sequence: Synthetic oligonucleotide
  Sense strand starting at position 3465 of SEQ ID NO: 916158
uugguaaucauugaagguu

SEQ ID NO: 1134865 - RNA, 19 nt, Artificial Sequence
  Description of Artificial Sequence: Synthetic oligonucleotide
  Antisense strand to SEQ ID NO: 1134864
aaccuucaaugauuaccaa

SEQ ID NO: 1134866 - RNA, 19 nt, Artificial Sequence
  Description of Artificial Sequence: Synthetic oligonucleotide
  Sense strand starting at position 3468 of SEQ ID NO: 916158
guaaucauugaagguuagu

SEQ ID NO: 1134867 - RNA, 19 nt, Artificial Sequence
  Description of Artificial Sequence: Synthetic oligonucleotide
  Antisense strand to SEQ ID NO: 1134866
acuaaccuucaaugauuac

SEQ ID NO: 1134868 - RNA, 19 nt, Artificial Sequence
  Description of Artificial Sequence: Synthetic oligonucleotide
  Sense strand starting at position 3846 of SEQ ID NO: 916158
auggaucuugccuggagga

SEQ ID NO: 1134869 - RNA, 19 nt, Artificial Sequence
  Description of Artificial Sequence: Synthetic oligonucleotide
  Antisense strand to SEQ ID NO: 1134868
uccuccaggcaagauccau

SEQ ID NO: 1134870 - RNA, 19 nt, Artificial Sequence
  Description of Artificial Sequence: Synthetic oligonucleotide
  Sense strand starting at position 3847 of SEQ ID NO: 916158
uggaucuugccuggaggaa

SEQ ID NO: 1134871 - RNA, 19 nt, Artificial Sequence
  Description of Artificial Sequence: Synthetic oligonucleotide
  Antisense strand to SEQ ID NO: 1134870
uuccuccaggcaagaucca

SEQ ID NO: 1134872 - RNA, 19 nt, Artificial Sequence
  Description of Artificial Sequence: Synthetic oligonucleotide
  Sense strand starting at position 3912 of SEQ ID NO: 916158
guaaccuugcuuuaacuga

SEQ ID NO: 1134873 - RNA, 19 nt, Artificial Sequence
  Description of Artificial Sequence: Synthetic oligonucleotide
  Antisense strand to SEQ ID NO: 1134872
ucaguuaaagcaagguuac

SEQ ID NO: 1134874 - RNA, 19 nt, Artificial Sequence
  Description of Artificial Sequence: Synthetic oligonucleotide
  Sense strand starting at position 3927 of SEQ ID NO: 916158
cugacauggcuugaaacgu

SEQ ID NO: 1134875 - RNA, 19 nt, Artificial Sequence
  Description of Artificial Sequence: Synthetic oligonucleotide
  Antisense strand to SEQ ID NO: 1134874
acguuucaagccaugucag

SEQ ID NO: 1134876 - RNA, 19 nt, Artificial Sequence
  Description of Artificial Sequence: Synthetic oligonucleotide
  Sense strand starting at position 25 of SEQ ID NO: 916159
ucgauguccgaggaagagu

SEQ ID NO: 1134877 - RNA, 19 nt, Artificial Sequence
  Description of Artificial Sequence: Synthetic oligonucleotide
  Antisense strand to SEQ ID NO: 1134876
acucuuccucggacaucga

SEQ ID NO: 1134878 - RNA, 19 nt, Artificial Sequence
  Description of Artificial Sequence: Synthetic oligonucleotide
  Sense strand starting at position 136 of SEQ ID NO: 916159
gagaacucggcuuggaacu

SEQ ID NO: 1134879 - RNA, 19 nt, Artificial Sequence
  Description of Artificial Sequence: Synthetic oligonucleotide
  Antisense strand to SEQ ID NO: 1134878
aguuccaagccgaguucuc

SEQ ID NO: 1134880 - RNA, 19 nt, Artificial Sequence
  Description of Artificial Sequence: Synthetic oligonucleotide
  Sense strand starting at position 184 of SEQ ID NO: 916159
gcaaucaucuaaccugaga

SEQ ID NO: 1134881 - RNA, 19 nt, Artificial Sequence
  Description of Artificial Sequence: Synthetic oligonucleotide
  Antisense strand to SEQ ID NO: 1134880
ucucagguuagaugauugc

SEQ ID NO: 1134882 - RNA, 19 nt, Artificial Sequence
  Description of Artificial Sequence: Synthetic oligonucleotide
  Sense strand starting at position 368 of SEQ ID NO: 916159
uucgcuugaauccggaaau

SEQ ID NO: 1134883 - RNA, 19 nt, Artificial Sequence
  Description of Artificial Sequence: Synthetic oligonucleotide
  Antisense strand to SEQ ID NO: 1134882
auuuccggauucaagcgaa

SEQ ID NO: 1134884 - RNA, 19 nt, Artificial Sequence
  Description of Artificial Sequence: Synthetic oligonucleotide
  Sense strand starting at position 418 of SEQ ID NO: 916159
agagcuaagaugugccaau

SEQ ID NO: 1134885 - RNA, 19 nt, Artificial Sequence
  Description of Artificial Sequence: Synthetic oligonucleotide
  Antisense strand to SEQ ID NO: 1134884
auuggcacaucuuagcucu

SEQ ID NO: 1134886 - RNA, 19 nt, Artificial Sequence
  Description of Artificial Sequence: Synthetic oligonucleotide
  Sense strand starting at position 419 of SEQ ID NO: 916159
gagcuaagaugugccaauu

SEQ ID NO: 1134887 - RNA, 19 nt, Artificial Sequence
  Description of Artificial Sequence: Synthetic oligonucleotide
  Antisense strand to SEQ ID NO: 1134886
aauuggcacaucuuagcuc

SEQ ID NO: 1134888 - RNA, 19 nt, Artificial Sequence
  Description of Artificial Sequence: Synthetic oligonucleotide
  Sense strand starting at position 533 of SEQ ID NO: 916159
cgcagaacccguuagaaag

SEQ ID NO: 1134889 - RNA, 19 nt, Artificial Sequence
  Description of Artificial Sequence: Synthetic oligonucleotide
  Antisense strand to SEQ ID NO: 1134888
cuuucuaacggguucugcg

SEQ ID NO: 1134890 - RNA, 19 nt, Artificial Sequence
  Description of Artificial Sequence: Synthetic oligonucleotide
  Sense strand starting at position 775 of SEQ ID NO: 916159
gcguaccuuccagguagaa

SEQ ID NO: 1134891 - RNA, 19 nt, Artificial Sequence
  Description of Artificial Sequence: Synthetic oligonucleotide
  Antisense strand to SEQ ID NO: 1134890
uucuaccuggaagguacgc

SEQ ID NO: 1134892 - RNA, 19 nt, Artificial Sequence
  Description of Artificial Sequence: Synthetic oligonucleotide
  Sense strand starting at position 1003 of SEQ ID NO: 916159
ccgggauggccacguugau

SEQ ID NO: 1134893 - RNA, 19 nt, Artificial Sequence
  Description of Artificial Sequence: Synthetic oligonucleotide
  Antisense strand to SEQ ID NO: 1134892
aucaacguggccaucccgg

SEQ ID NO: 1134894 - RNA, 19 nt, Artificial Sequence
  Description of Artificial Sequence: Synthetic oligonucleotide
  Sense strand starting at position 1032 of SEQ ID NO: 916159
augugcgacgacucguaua

SEQ ID NO: 1134895 - RNA, 19 nt, Artificial Sequence
  Description of Artificial Sequence: Synthetic oligonucleotide
  Antisense strand to SEQ ID NO: 1134894
uauacgagucgucgcacau

SEQ ID NO: 1134896 - RNA, 19 nt, Artificial Sequence
  Description of Artificial Sequence: Synthetic oligonucleotide
  Sense strand starting at position 1159 of SEQ ID NO: 916159
cgggucugagcguaucuau

SEQ ID NO: 1134897 - RNA, 19 nt, Artificial Sequence
  Description of Artificial Sequence: Synthetic oligonucleotide
  Antisense strand to SEQ ID NO: 1134896
auagauacgcucagacccg

SEQ ID NO: 1134898 - RNA, 19 nt, Artificial Sequence
  Description of Artificial Sequence: Synthetic oligonucleotide
  Sense strand starting at position 1411 of SEQ ID NO: 916159
ugaagcugcccagauaguu

SEQ ID NO: 1134899 - RNA, 19 nt, Artificial Sequence
  Description of Artificial Sequence: Synthetic oligonucleotide
  Antisense strand to SEQ ID NO: 1134898
aacuaucugggcagcuuca

SEQ ID NO: 1134900 - RNA, 19 nt, Artificial Sequence
  Description of Artificial Sequence: Synthetic oligonucleotide
  Sense strand starting at position 1564 of SEQ ID NO: 916159
cggauuauuuaagacucga

SEQ ID NO: 1134901 - RNA, 19 nt, Artificial Sequence
  Description of Artificial Sequence: Synthetic oligonucleotide
  Antisense strand to SEQ ID NO: 1134900
ucgagucuuaaauaauccg

SEQ ID NO: 1134902 - RNA, 19 nt, Artificial Sequence
  Description of Artificial Sequence: Synthetic oligonucleotide
  Sense strand starting at position 1584 of SEQ ID NO: 916159
uugcuaucucuuggacuca

SEQ ID NO: 1134903 - RNA, 19 nt, Artificial Sequence
  Description of Artificial Sequence: Synthetic oligonucleotide
  Antisense strand to SEQ ID NO: 1134902
ugaguccaagagauagcaa

SEQ ID NO: 1134904 - RNA, 19 nt, Artificial Sequence
  Description of Artificial Sequence: Synthetic oligonucleotide
  Sense strand starting at position 1650 of SEQ ID NO: 916159
gcgagcgucucaauggaua

SEQ ID NO: 1134905 - RNA, 19 nt, Artificial Sequence
  Description of Artificial Sequence: Synthetic oligonucleotide
  Antisense strand to SEQ ID NO: 1134904
uauccauugagacgcucgc

SEQ ID NO: 1134906 - RNA, 19 nt, Artificial Sequence
  Description of Artificial Sequence: Synthetic oligonucleotide
  Sense strand starting at position 1653 of SEQ ID NO: 916159
agcgucucaauggauacau

SEQ ID NO: 1134907 - RNA, 19 nt, Artificial Sequence
  Description of Artificial Sequence: Synthetic oligonucleotide
  Antisense strand to SEQ ID NO: 1134906
auguauccauugagacgcu

SEQ ID NO: 1134908 - RNA, 19 nt, Artificial Sequence
  Description of Artificial Sequence: Synthetic oligonucleotide
  Sense strand starting at position 1736 of SEQ ID NO: 916159
acagguuguguugaugaau

SEQ ID NO: 1134909 - RNA, 19 nt, Artificial Sequence
  Description of Artificial Sequence: Synthetic oligonucleotide
  Antisense strand to SEQ ID NO: 1134908
auucaucaacacaaccugu

SEQ ID NO: 1134910 - RNA, 19 nt, Artificial Sequence
  Description of Artificial Sequence: Synthetic oligonucleotide
  Sense strand starting at position 1739 of SEQ ID NO: 916159
gguuguguugaugaauugu

SEQ ID NO: 1134911 - RNA, 19 nt, Artificial Sequence
  Description of Artificial Sequence: Synthetic oligonucleotide
  Antisense strand to SEQ ID NO: 1134910
acaauucaucaacacaacc

SEQ ID NO: 1134912 - RNA, 19 nt, Artificial Sequence
  Description of Artificial Sequence: Synthetic oligonucleotide
  Sense strand starting at position 1745 of SEQ ID NO: 916159
guugaugaauuguuaauga

SEQ ID NO: 1134913 - RNA, 19 nt, Artificial Sequence
  Description of Artificial Sequence: Synthetic oligonucleotide
  Antisense strand to SEQ ID NO: 1134912
ucauuaacaauucaucaac

SEQ ID NO: 1134914 - RNA, 19 nt, Artificial Sequence
  Description of Artificial Sequence: Synthetic oligonucleotide
  Sense strand starting at position 1755 of SEQ ID NO: 916159
uguuaaugaguuugucauu

SEQ ID NO: 1134915 - RNA, 19 nt, Artificial Sequence
  Description of Artificial Sequence: Synthetic oligonucleotide
  Antisense strand to SEQ ID NO: 1134914
aaugacaaacucauuaaca

SEQ ID NO: 1134916 - RNA, 19 nt, Artificial Sequence
  Description of Artificial Sequence: Synthetic oligonucleotide
  Sense strand starting at position 1756 of SEQ ID NO: 916159
guuaaugaguuugucauuc

SEQ ID NO: 1134917 - RNA, 19 nt, Artificial Sequence
  Description of Artificial Sequence: Synthetic oligonucleotide
  Antisense strand to SEQ ID NO: 1134916
gaaugacaaacucauuaac

SEQ ID NO: 1134918 - RNA, 19 nt, Artificial Sequence
  Description of Artificial Sequence: Synthetic oligonucleotide
  Sense strand starting at position 1789 of SEQ ID NO: 916159
gaauuuccgcuccggauaa

SEQ ID NO: 1134919 - RNA, 19 nt, Artificial Sequence
  Description of Artificial Sequence: Synthetic oligonucleotide
  Antisense strand to SEQ ID NO: 1134918
uuauccggagcggaaauuc

SEQ ID NO: 1134920 - RNA, 19 nt, Artificial Sequence
  Description of Artificial Sequence: Synthetic oligonucleotide
  Sense strand starting at position 1920 of SEQ ID NO: 916159
auguuuccuucuguugaga

SEQ ID NO: 1134921 - RNA, 19 nt, Artificial Sequence
  Description of Artificial Sequence: Synthetic oligonucleotide
  Antisense strand to SEQ ID NO: 1134920
ucucaacagaaggaaacau

SEQ ID NO: 1134922 - RNA, 19 nt, Artificial Sequence
  Description of Artificial Sequence: Synthetic oligonucleotide
  Sense strand starting at position 1923 of SEQ ID NO: 916159
uuuccuucuguugagaguu

SEQ ID NO: 1134923 - RNA, 19 nt, Artificial Sequence
  Description of Artificial Sequence: Synthetic oligonucleotide
  Antisense strand to SEQ ID NO: 1134922
aacucucaacagaaggaaa

SEQ ID NO: 1134924 - RNA, 19 nt, Artificial Sequence
  Description of Artificial Sequence: Synthetic oligonucleotide
  Sense strand starting at position 2019 of SEQ ID NO: 916159
ucgcgagcuagcuuuagga

SEQ ID NO: 1134925 - RNA, 19 nt, Artificial Sequence
  Description of Artificial Sequence: Synthetic oligonucleotide
  Antisense strand to SEQ ID NO: 1134924
uccuaaagcuagcucgcga

SEQ ID NO: 1134926 - RNA, 19 nt, Artificial Sequence
  Description of Artificial Sequence: Synthetic oligonucleotide
  Sense strand starting at position 2021 of SEQ ID NO: 916159
gcgagcuagcuuuaggaaa

SEQ ID NO: 1134927 - RNA, 19 nt, Artificial Sequence
  Description of Artificial Sequence: Synthetic oligonucleotide
  Antisense strand to SEQ ID NO: 1134926
uuuccuaaagcuagcucgc

SEQ ID NO: 1134928 - RNA, 19 nt, Artificial Sequence
  Description of Artificial Sequence: Synthetic oligonucleotide
  Sense strand starting at position 2141 of SEQ ID NO: 916159
guggcauuuguuugccacu

SEQ ID NO: 1134929 - RNA, 19 nt, Artificial Sequence
  Description of Artificial Sequence: Synthetic oligonucleotide
  Antisense strand to SEQ ID NO: 1134928
aguggcaaacaaaugccac

SEQ ID NO: 1134930 - RNA, 19 nt, Artificial Sequence
  Description of Artificial Sequence: Synthetic oligonucleotide
  Sense strand starting at position 2143 of SEQ ID NO: 916159
ggcauuuguuugccacuuu

SEQ ID NO: 1134931 - RNA, 19 nt, Artificial Sequence
  Description of Artificial Sequence: Synthetic oligonucleotide
  Antisense strand to SEQ ID NO: 1134930
aaaguggcaaacaaaugcc

SEQ ID NO: 1134932 - RNA, 19 nt, Artificial Sequence
  Description of Artificial Sequence: Synthetic oligonucleotide
  Sense strand starting at position 2230 of SEQ ID NO: 916159
gggcuuuagugaccgauga

SEQ ID NO: 1134933 - RNA, 19 nt, Artificial Sequence
  Description of Artificial Sequence: Synthetic oligonucleotide
  Antisense strand to SEQ ID NO: 1134932
ucaucggucacuaaagccc

SEQ ID NO: 1134934 - RNA, 19 nt, Artificial Sequence
  Description of Artificial Sequence: Synthetic oligonucleotide
  Sense strand starting at position 2231 of SEQ ID NO: 916159
ggcuuuagugaccgaugag

SEQ ID NO: 1134935 - RNA, 19 nt, Artificial Sequence
  Description of Artificial Sequence: Synthetic oligonucleotide
  Antisense strand to SEQ ID NO: 1134934
cucaucggucacuaaagcc

SEQ ID NO: 1134936 - RNA, 19 nt, Artificial Sequence
  Description of Artificial Sequence: Synthetic oligonucleotide
  Sense strand starting at position 2246 of SEQ ID NO: 916159
ugagguguuaaaugcuaau

SEQ ID NO: 1134937 - RNA, 19 nt, Artificial Sequence
  Description of Artificial Sequence: Synthetic oligonucleotide
  Antisense strand to SEQ ID NO: 1134936
auuagcauuuaacaccuca

SEQ ID NO: 1134938 - RNA, 19 nt, Artificial Sequence
  Description of Artificial Sequence: Synthetic oligonucleotide
  Sense strand starting at position 3197 of SEQ ID NO: 916159
agagcucuauuguuauaua

SEQ ID NO: 1134939 - RNA, 19 nt, Artificial Sequence
  Description of Artificial Sequence: Synthetic oligonucleotide
  Antisense strand to SEQ ID NO: 1134938
uauauaacaauagagcucu

SEQ ID NO: 1134940 - RNA, 19 nt, Artificial Sequence
  Description of Artificial Sequence: Synthetic oligonucleotide
  Sense strand starting at position 3570 of SEQ ID NO: 916159
uugggaaauguaggcuaaa

SEQ ID NO: 1134941 - RNA, 19 nt, Artificial Sequence
  Description of Artificial Sequence: Synthetic oligonucleotide
  Antisense strand to SEQ ID NO: 1134940
uuuagccuacauuucccaa

SEQ ID NO: 1134942 - RNA, 19 nt, Artificial Sequence
  Description of Artificial Sequence: Synthetic oligonucleotide
  Sense strand starting at position 3651 of SEQ ID NO: 916159
ggaggagcguguucgacaa

SEQ ID NO: 1134943 - RNA, 19 nt, Artificial Sequence
  Description of Artificial Sequence: Synthetic oligonucleotide
  Antisense strand to SEQ ID NO: 1134942
uugucgaacacgcuccucc

SEQ ID NO: 1134944 - RNA, 19 nt, Artificial Sequence
  Description of Artificial Sequence: Synthetic oligonucleotide
  Sense strand starting at position 3655 of SEQ ID NO: 916159
gagcguguucgacaaaggu

SEQ ID NO: 1134945 - RNA, 19 nt, Artificial Sequence
  Description of Artificial Sequence: Synthetic oligonucleotide
  Antisense strand to SEQ ID NO: 1134944
accuuugucgaacacgcuc

SEQ ID NO: 1134946 - RNA, 19 nt, Artificial Sequence
  Description of Artificial Sequence: Synthetic oligonucleotide
  Sense strand starting at position 3705 of SEQ ID NO: 916159
uugggcaguccuuggaaca

SEQ ID NO: 1134947 - RNA, 19 nt, Artificial Sequence
  Description of Artificial Sequence: Synthetic oligonucleotide
  Antisense strand to SEQ ID NO: 1134946
uguuccaaggacugcccaa

SEQ ID NO: 1134948 - RNA, 19 nt, Artificial Sequence
  Description of Artificial Sequence: Synthetic oligonucleotide
  Sense strand starting at position 3706 of SEQ ID NO: 916159
ugggcaguccuuggaacaa

SEQ ID NO: 1134949 - RNA, 19 nt, Artificial Sequence
  Description of Artificial Sequence: Synthetic oligonucleotide
  Antisense strand to SEQ ID NO: 1134948
uuguuccaaggacugccca

SEQ ID NO: 1134950 - RNA, 19 nt, Artificial Sequence
  Description of Artificial Sequence: Synthetic oligonucleotide
  Sense strand starting at position 3803 of SEQ ID NO: 916159
cgaucugucacagaaguuc

SEQ ID NO: 1134951 - RNA, 19 nt, Artificial Sequence
  Description of Artificial Sequence: Synthetic oligonucleotide
  Antisense strand to SEQ ID NO: 1134950
gaacuucugugacagaucg

SEQ ID NO: 1134952 - RNA, 19 nt, Artificial Sequence
  Description of Artificial Sequence: Synthetic oligonucleotide
  Sense strand starting at position 3950 of SEQ ID NO: 916159
gagggaaguuggguuucua

SEQ ID NO: 1134953 - RNA, 19 nt, Artificial Sequence
  Description of Artificial Sequence: Synthetic oligonucleotide
  Antisense strand to SEQ ID NO: 1134952
uagaaacccaacuucccuc

SEQ ID NO: 1134954 - RNA, 19 nt, Artificial Sequence
  Description of Artificial Sequence: Synthetic oligonucleotide
  Sense strand starting at position 3954 of SEQ ID NO: 916159
gaaguuggguuucuacuuu

SEQ ID NO: 1134955 - RNA, 19 nt, Artificial Sequence
  Description of Artificial Sequence: Synthetic oligonucleotide
  Antisense strand to SEQ ID NO: 1134954
aaaguagaaacccaacuuc

SEQ ID NO: 1134956 - RNA, 19 nt, Artificial Sequence
  Description of Artificial Sequence: Synthetic oligonucleotide
  Sense strand starting at position 265 of SEQ ID NO: 916160
acaagaucgaaggguauau

SEQ ID NO: 1134957 - RNA, 19 nt, Artificial Sequence
  Description of Artificial Sequence: Synthetic oligonucleotide
  Antisense strand to SEQ ID NO: 1134956
auauacccuucgaucuugu

SEQ ID NO: 1134958 - RNA, 19 nt, Artificial Sequence
  Description of Artificial Sequence: Synthetic oligonucleotide
  Sense strand starting at position 269 of SEQ ID NO: 916160
gaucgaaggguauauguau

SEQ ID NO: 1134959 - RNA, 19 nt, Artificial Sequence
  Description of Artificial Sequence: Synthetic oligonucleotide
  Antisense strand to SEQ ID NO: 1134958
auacauauacccuucgauc

SEQ ID NO: 1134960 - RNA, 19 nt, Artificial Sequence
  Description of Artificial Sequence: Synthetic oligonucleotide
  Sense strand starting at position 289 of SEQ ID NO: 916160
uuaugaaagccugauguau

SEQ ID NO: 1134961 - RNA, 19 nt, Artificial Sequence
  Description of Artificial Sequence: Synthetic oligonucleotide
  Antisense strand to SEQ ID NO: 1134960
auacaucaggcuuucauaa

SEQ ID NO: 1134962 - RNA, 19 nt, Artificial Sequence
  Description of Artificial Sequence: Synthetic oligonucleotide
  Sense strand starting at position 345 of SEQ ID NO: 916160
uaguauaugugggugucua

SEQ ID NO: 1134963 - RNA, 19 nt, Artificial Sequence
  Description of Artificial Sequence: Synthetic oligonucleotide
  Antisense strand to SEQ ID NO: 1134962
uagacacccacauauacua

SEQ ID NO: 1134964 - RNA, 19 nt, Artificial Sequence
  Description of Artificial Sequence: Synthetic oligonucleotide
  Sense strand starting at position 346 of SEQ ID NO: 916160
aguauaugugggugucuag

SEQ ID NO: 1134965 - RNA, 19 nt, Artificial Sequence
  Description of Artificial Sequence: Synthetic oligonucleotide
  Antisense strand to SEQ ID NO: 1134964
cuagacacccacauauacu

SEQ ID NO: 1134966 - RNA, 19 nt, Artificial Sequence
  Description of Artificial Sequence: Synthetic oligonucleotide
  Sense strand starting at position 387 of SEQ ID NO: 916160
aaaugcucagaugguauaa

SEQ ID NO: 1134967 - RNA, 19 nt, Artificial Sequence
  Description of Artificial Sequence: Synthetic oligonucleotide
  Antisense strand to SEQ ID NO: 1134966
uuauaccaucugagcauuu

SEQ ID NO: 1134968 - RNA, 19 nt, Artificial Sequence
  Description of Artificial Sequence: Synthetic oligonucleotide
  Sense strand starting at position 423 of SEQ ID NO: 916160
ucugauuaaaugugugguu

SEQ ID NO: 1134969 - RNA, 19 nt, Artificial Sequence
  Description of Artificial Sequence: Synthetic oligonucleotide
  Antisense strand to SEQ ID NO: 1134968
aaccacacauuuaaucaga

SEQ ID NO: 1134970 - RNA, 19 nt, Artificial Sequence
  Description of Artificial Sequence: Synthetic oligonucleotide
  Sense strand starting at position 424 of SEQ ID NO: 916160
cugauuaaaugugugguuu

SEQ ID NO: 1134971 - RNA, 19 nt, Artificial Sequence
  Description of Artificial Sequence: Synthetic oligonucleotide
  Antisense strand to SEQ ID NO: 1134970
aaaccacacauuuaaucag

SEQ ID NO: 1134972 - RNA, 19 nt, Artificial Sequence
  Description of Artificial Sequence: Synthetic oligonucleotide
  Sense strand starting at position 1094 of SEQ ID NO: 916160
ccugaacaaucuuuagguu

SEQ ID NO: 1134973 - RNA, 19 nt, Artificial Sequence
  Description of Artificial Sequence: Synthetic oligonucleotide
  Antisense strand to SEQ ID NO: 1134972
aaccuaaagauuguucagg

SEQ ID NO: 1134974 - RNA, 19 nt, Artificial Sequence
  Description of Artificial Sequence: Synthetic oligonucleotide
  Sense strand starting at position 1100 of SEQ ID NO: 916160
caaucuuuagguuaggagu

SEQ ID NO: 1134975 - RNA, 19 nt, Artificial Sequence
  Description of Artificial Sequence: Synthetic oligonucleotide
  Antisense strand to SEQ ID NO: 1134974
acuccuaaccuaaagauug

SEQ ID NO: 1134976 - RNA, 19 nt, Artificial Sequence
  Description of Artificial Sequence: Synthetic oligonucleotide
  Sense strand starting at position 1106 of SEQ ID NO: 916160
uuagguuaggaguauucca

SEQ ID NO: 1134977 - RNA, 19 nt, Artificial Sequence
  Description of Artificial Sequence: Synthetic oligonucleotide
  Antisense strand to SEQ ID NO: 1134976
uggaauacuccuaaccuaa

SEQ ID NO: 1134978 - RNA, 19 nt, Artificial Sequence
  Description of Artificial Sequence: Synthetic oligonucleotide
  Sense strand starting at position 1288 of SEQ ID NO: 916160
accugaguccagcgagauc

SEQ ID NO: 1134979 - RNA, 19 nt, Artificial Sequence
  Description of Artificial Sequence: Synthetic oligonucleotide
  Antisense strand to SEQ ID NO: 1134978
gaucucgcuggacucaggu

SEQ ID NO: 1134980 - RNA, 19 nt, Artificial Sequence
  Description of Artificial Sequence: Synthetic oligonucleotide
  Sense strand starting at position 1438 of SEQ ID NO: 916160
cguucugggaugugaaugu

SEQ ID NO: 1134981 - RNA, 19 nt, Artificial Sequence
  Description of Artificial Sequence: Synthetic oligonucleotide
  Antisense strand to SEQ ID NO: 1134980
acauucacaucccagaacg

SEQ ID NO: 1134982 - RNA, 19 nt, Artificial Sequence
  Description of Artificial Sequence: Synthetic oligonucleotide
  Sense strand starting at position 1442 of SEQ ID NO: 916160
cugggaugugaauguggaa

SEQ ID NO: 1134983 - RNA, 19 nt, Artificial Sequence
  Description of Artificial Sequence: Synthetic oligonucleotide
  Antisense strand to SEQ ID NO: 1134982
uuccacauucacaucccag

SEQ ID NO: 1134984 - RNA, 19 nt, Artificial Sequence
  Description of Artificial Sequence: Synthetic oligonucleotide
  Sense strand starting at position 1597 of SEQ ID NO: 916160
ggaugcacucuauagugau

SEQ ID NO: 1134985 - RNA, 19 nt, Artificial Sequence
  Description of Artificial Sequence: Synthetic oligonucleotide
  Antisense strand to SEQ ID NO: 1134984
aucacuauagagugcaucc

SEQ ID NO: 1134986 - RNA, 19 nt, Artificial Sequence
  Description of Artificial Sequence: Synthetic oligonucleotide
  Sense strand starting at position 1616 of SEQ ID NO: 916160
cgcugugauacucauuaag

SEQ ID NO: 1134987 - RNA, 19 nt, Artificial Sequence
  Description of Artificial Sequence: Synthetic oligonucleotide
  Antisense strand to SEQ ID NO: 1134986
cuuaaugaguaucacagcg

SEQ ID NO: 1134988 - RNA, 19 nt, Artificial Sequence
  Description of Artificial Sequence: Synthetic oligonucleotide
  Sense strand starting at position 1618 of SEQ ID NO: 916160
cugugauacucauuaagag

SEQ ID NO: 1134989 - RNA, 19 nt, Artificial Sequence
  Description of Artificial Sequence: Synthetic oligonucleotide
  Antisense strand to SEQ ID NO: 1134988
cucuuaaugaguaucacag

SEQ ID NO: 1134990 - RNA, 19 nt, Artificial Sequence
  Description of Artificial Sequence: Synthetic oligonucleotide
  Sense strand starting at position 1619 of SEQ ID NO: 916160
ugugauacucauuaagagu

SEQ ID NO: 1134991 - RNA, 19 nt, Artificial Sequence
  Description of Artificial Sequence: Synthetic oligonucleotide
  Antisense strand to SEQ ID NO: 1134990
acucuuaaugaguaucaca

SEQ ID NO: 1134992 - RNA, 19 nt, Artificial Sequence
  Description of Artificial Sequence: Synthetic oligonucleotide
  Sense strand starting at position 1634 of SEQ ID NO: 916160
gagucuuacucccucgacu

SEQ ID NO: 1134993 - RNA, 19 nt, Artificial Sequence
  Description of Artificial Sequence: Synthetic oligonucleotide
  Antisense strand to SEQ ID NO: 1134992
agucgagggaguaagacuc

SEQ ID NO: 1134994 - RNA, 19 nt, Artificial Sequence
  Description of Artificial Sequence: Synthetic oligonucleotide
  Sense strand starting at position 1700 of SEQ ID NO: 916160
gucaguucugagcaacugu

SEQ ID NO: 1134995 - RNA, 19 nt, Artificial Sequence
  Description of Artificial Sequence: Synthetic oligonucleotide
  Antisense strand to SEQ ID NO: 1134994
acaguugcucagaacugac

SEQ ID NO: 1134996 - RNA, 19 nt, Artificial Sequence
  Description of Artificial Sequence: Synthetic oligonucleotide
  Sense strand starting at position 2068 of SEQ ID NO: 916160
agccgcguucucuuuaaga

SEQ ID NO: 1134997 - RNA, 19 nt, Artificial Sequence
  Description of Artificial Sequence: Synthetic oligonucleotide
  Antisense strand to SEQ ID NO: 1134996
ucuuaaagagaacgcggcu

SEQ ID NO: 1134998 - RNA, 19 nt, Artificial Sequence
  Description of Artificial Sequence: Synthetic oligonucleotide
  Sense strand starting at position 2070 of SEQ ID NO: 916160
ccgcguucucuuuaagagg

SEQ ID NO: 1134999 - RNA, 19 nt, Artificial Sequence
  Description of Artificial Sequence: Synthetic oligonucleotide
  Antisense strand to SEQ ID NO: 1134998
ccucuuaaagagaacgcgg

SEQ ID NO: 1135000 - RNA, 19 nt, Artificial Sequence
  Description of Artificial Sequence: Synthetic oligonucleotide
  Sense strand starting at position 2629 of SEQ ID NO: 916160
gucgucacuuccuuuauuu

SEQ ID NO: 1135001 - RNA, 19 nt, Artificial Sequence
  Description of Artificial Sequence: Synthetic oligonucleotide
  Antisense strand to SEQ ID NO: 1135000
aaauaaaggaagugacgac

SEQ ID NO: 1135002 - RNA, 19 nt, Artificial Sequence
  Description of Artificial Sequence: Synthetic oligonucleotide
  Sense strand starting at position 2899 of SEQ ID NO: 916160
gggaucucugguggaauag

SEQ ID NO: 1135003 - RNA, 19 nt, Artificial Sequence
  Description of Artificial Sequence: Synthetic oligonucleotide
  Antisense strand to SEQ ID NO: 1135002
cuauuccaccagagauccc

SEQ ID NO: 1135004 - RNA, 19 nt, Artificial Sequence
  Description of Artificial Sequence: Synthetic oligonucleotide
  Sense strand starting at position 2956 of SEQ ID NO: 916160
gggcuuuguaaagggauca

SEQ ID NO: 1135005 - RNA, 19 nt, Artificial Sequence
  Description of Artificial Sequence: Synthetic oligonucleotide
  Antisense strand to SEQ ID NO: 1135004
ugaucccuuuacaaagccc

SEQ ID NO: 1135006 - RNA, 19 nt, Artificial Sequence
  Description of Artificial Sequence: Synthetic oligonucleotide
  Sense strand starting at position 2969 of SEQ ID NO: 916160
ggaucacggauucgggaaa

SEQ ID NO: 1135007 - RNA, 19 nt, Artificial Sequence
  Description of Artificial Sequence: Synthetic oligonucleotide
  Antisense strand to SEQ ID NO: 1135006
uuucccgaauccgugaucc

SEQ ID NO: 1135008 - RNA, 19 nt, Artificial Sequence
  Description of Artificial Sequence: Synthetic oligonucleotide
  Sense strand starting at position 3042 of SEQ ID NO: 916160
gaggcuuggcgagaugcua

SEQ ID NO: 1135009 - RNA, 19 nt, Artificial Sequence
  Description of Artificial Sequence: Synthetic oligonucleotide
  Antisense strand to SEQ ID NO: 1135008
uagcaucucgccaagccuc

SEQ ID NO: 1135010 - RNA, 19 nt, Artificial Sequence
  Description of Artificial Sequence: Synthetic oligonucleotide
  Sense strand starting at position 3280 of SEQ ID NO: 916160
cggaauguucguagggugu

SEQ ID NO: 1135011 - RNA, 19 nt, Artificial Sequence
  Description of Artificial Sequence: Synthetic oligonucleotide
  Antisense strand to SEQ ID NO: 1135010
acacccuacgaacauuccg

SEQ ID NO: 1135012 - RNA, 19 nt, Artificial Sequence
  Description of Artificial Sequence: Synthetic oligonucleotide
  Sense strand starting at position 3316 of SEQ ID NO: 916160
gacguauugauagggcaag

SEQ ID NO: 1135013 - RNA, 19 nt, Artificial Sequence
  Description of Artificial Sequence: Synthetic oligonucleotide
  Antisense strand to SEQ ID NO: 1135012
cuugcccuaucaauacguc

SEQ ID NO: 1135014 - RNA, 19 nt, Artificial Sequence
  Description of Artificial Sequence: Synthetic oligonucleotide
  Sense strand starting at position 3372 of SEQ ID NO: 916160
aggcguugauggcugaaga

SEQ ID NO: 1135015 - RNA, 19 nt, Artificial Sequence
  Description of Artificial Sequence: Synthetic oligonucleotide
  Antisense strand to SEQ ID NO: 1135014
ucuucagccaucaacgccu

SEQ ID NO: 1135016 - RNA, 19 nt, Artificial Sequence
  Description of Artificial Sequence: Synthetic oligonucleotide
  Sense strand starting at position 3374 of SEQ ID NO: 916160
gcguugauggcugaagagu

SEQ ID NO: 1135017 - RNA, 19 nt, Artificial Sequence
  Description of Artificial Sequence: Synthetic oligonucleotide
  Antisense strand to SEQ ID NO: 1135016
acucuucagccaucaacgc

SEQ ID NO: 1135018 - RNA, 19 nt, Artificial Sequence
  Description of Artificial Sequence: Synthetic oligonucleotide
  Sense strand starting at position 3472 of SEQ ID NO: 916160
aggcuaugccucgcuuauu

SEQ ID NO: 1135019 - RNA, 19 nt, Artificial Sequence
  Description of Artificial Sequence: Synthetic oligonucleotide
  Antisense strand to SEQ ID NO: 1135018
aauaagcgaggcauagccu

SEQ ID NO: 1135020 - RNA, 19 nt, Artificial Sequence
  Description of Artificial Sequence: Synthetic oligonucleotide
  Sense strand starting at position 3473 of SEQ ID NO: 916160
ggcuaugccucgcuuauuu

SEQ ID NO: 1135021 - RNA, 19 nt, Artificial Sequence
  Description of Artificial Sequence: Synthetic oligonucleotide
  Antisense strand to SEQ ID NO: 1135020
aaauaagcgaggcauagcc

SEQ ID NO: 1135022 - RNA, 19 nt, Artificial Sequence
  Description of Artificial Sequence: Synthetic oligonucleotide
  Sense strand starting at position 3477 of SEQ ID NO: 916160
augccucgcuuauuuagua

SEQ ID NO: 1135023 - RNA, 19 nt, Artificial Sequence
  Description of Artificial Sequence: Synthetic oligonucleotide
  Antisense strand to SEQ ID NO: 1135022
uacuaaauaagcgaggcau

SEQ ID NO: 1135024 - RNA, 19 nt, Artificial Sequence
  Description of Artificial Sequence: Synthetic oligonucleotide
  Sense strand starting at position 3478 of SEQ ID NO: 916160
ugccucgcuuauuuaguaa

SEQ ID NO: 1135025 - RNA, 19 nt, Artificial Sequence
  Description of Artificial Sequence: Synthetic oligonucleotide
  Antisense strand to SEQ ID NO: 1135024
uuacuaaauaagcgaggca

SEQ ID NO: 1135026 - RNA, 19 nt, Artificial Sequence
  Description of Artificial Sequence: Synthetic oligonucleotide
  Sense strand starting at position 3490 of SEQ ID NO: 916160
uuaguaaccgugccauugu

SEQ ID NO: 1135027 - RNA, 19 nt, Artificial Sequence
  Description of Artificial Sequence: Synthetic oligonucleotide
  Antisense strand to SEQ ID NO: 1135026
acaauggcacgguuacuaa

SEQ ID NO: 1135028 - RNA, 19 nt, Artificial Sequence
  Description of Artificial Sequence: Synthetic oligonucleotide
  Sense strand starting at position 3536 of SEQ ID NO: 916160
gugccaugguguguauuua

SEQ ID NO: 1135029 - RNA, 19 nt, Artificial Sequence
  Description of Artificial Sequence: Synthetic oligonucleotide
  Antisense strand to SEQ ID NO: 1135028
uaaauacacaccauggcac

SEQ ID NO: 1135030 - RNA, 19 nt, Artificial Sequence
  Description of Artificial Sequence: Synthetic oligonucleotide
  Sense strand starting at position 3652 of SEQ ID NO: 916160
cccgucucagcggaucaaa

SEQ ID NO: 1135031 - RNA, 19 nt, Artificial Sequence
  Description of Artificial Sequence: Synthetic oligonucleotide
  Antisense strand to SEQ ID NO: 1135030
uuugauccgcugagacggg

SEQ ID NO: 1135032 - RNA, 19 nt, Artificial Sequence
  Description of Artificial Sequence: Synthetic oligonucleotide
  Sense strand starting at position 3662 of SEQ ID NO: 916160
cggaucaaauuguuaggau

SEQ ID NO: 1135033 - RNA, 19 nt, Artificial Sequence
  Description of Artificial Sequence: Synthetic oligonucleotide
  Antisense strand to SEQ ID NO: 1135032
auccuaacaauuugauccg

SEQ ID NO: 1135034 - RNA, 19 nt, Artificial Sequence
  Description of Artificial Sequence: Synthetic oligonucleotide
  Sense strand starting at position 3729 of SEQ ID NO: 916160
uuaugagguguagguacua

SEQ ID NO: 1135035 - RNA, 19 nt, Artificial Sequence
  Description of Artificial Sequence: Synthetic oligonucleotide
  Antisense strand to SEQ ID NO: 1135034
uaguaccuacaccucauaa

SEQ ID NO: 1135036 - RNA, 19 nt, Artificial Sequence
  Description of Artificial Sequence: Synthetic oligonucleotide
  Sense strand starting at position 208 of SEQ ID NO: 916161
gacgaaaggucagcccuaa

SEQ ID NO: 1135037 - RNA, 19 nt, Artificial Sequence
  Description of Artificial Sequence: Synthetic oligonucleotide
  Antisense strand to SEQ ID NO: 1135036
uuagggcugaccuuucguc

SEQ ID NO: 1135038 - RNA, 19 nt, Artificial Sequence
  Description of Artificial Sequence: Synthetic oligonucleotide
  Sense strand starting at position 313 of SEQ ID NO: 916161
uuaucauguucuguguaga

SEQ ID NO: 1135039 - RNA, 19 nt, Artificial Sequence
  Description of Artificial Sequence: Synthetic oligonucleotide
  Antisense strand to SEQ ID NO: 1135038
ucuacacagaacaugauaa

SEQ ID NO: 1135040 - RNA, 19 nt, Artificial Sequence
  Description of Artificial Sequence: Synthetic oligonucleotide
  Sense strand starting at position 314 of SEQ ID NO: 916161
uaucauguucuguguagag

SEQ ID NO: 1135041 - RNA, 19 nt, Artificial Sequence
  Description of Artificial Sequence: Synthetic oligonucleotide
  Antisense strand to SEQ ID NO: 1135040
cucuacacagaacaugaua

SEQ ID NO: 1135042 - RNA, 19 nt, Artificial Sequence
  Description of Artificial Sequence: Synthetic oligonucleotide
  Sense strand starting at position 316 of SEQ ID NO: 916161
ucauguucuguguagagaa

SEQ ID NO: 1135043 - RNA, 19 nt, Artificial Sequence
  Description of Artificial Sequence: Synthetic oligonucleotide
  Antisense strand to SEQ ID NO: 1135042
uucucuacacagaacauga

SEQ ID NO: 1135044 - RNA, 19 nt, Artificial Sequence
  Description of Artificial Sequence: Synthetic oligonucleotide
  Sense strand starting at position 318 of SEQ ID NO: 916161
auguucuguguagagaacu

SEQ ID NO: 1135045 - RNA, 19 nt, Artificial Sequence
  Description of Artificial Sequence: Synthetic oligonucleotide
  Antisense strand to SEQ ID NO: 1135044
aguucucuacacagaacau

SEQ ID NO: 1135046 - RNA, 19 nt, Artificial Sequence
  Description of Artificial Sequence: Synthetic oligonucleotide
  Sense strand starting at position 481 of SEQ ID NO: 916161
auaccaaaugauugcggau

SEQ ID NO: 1135047 - RNA, 19 nt, Artificial Sequence
  Description of Artificial Sequence: Synthetic oligonucleotide
  Antisense strand to SEQ ID NO: 1135046
auccgcaaucauuugguau

SEQ ID NO: 1135048 - RNA, 19 nt, Artificial Sequence
  Description of Artificial Sequence: Synthetic oligonucleotide
  Sense strand starting at position 570 of SEQ ID NO: 916161
ucugucaacuggccaaauu

SEQ ID NO: 1135049 - RNA, 19 nt, Artificial Sequence
  Description of Artificial Sequence: Synthetic oligonucleotide
  Antisense strand to SEQ ID NO: 1135048
aauuuggccaguugacaga

SEQ ID NO: 1135050 - RNA, 19 nt, Artificial Sequence
  Description of Artificial Sequence: Synthetic oligonucleotide
  Sense strand starting at position 626 of SEQ ID NO: 916161
caucuauccggaugaugcu

SEQ ID NO: 1135051 - RNA, 19 nt, Artificial Sequence
  Description of Artificial Sequence: Synthetic oligonucleotide
  Antisense strand to SEQ ID NO: 1135050
agcaucauccggauagaug

SEQ ID NO: 1135052 - RNA, 19 nt, Artificial Sequence
  Description of Artificial Sequence: Synthetic oligonucleotide
  Sense strand starting at position 635 of SEQ ID NO: 916161
ggaugaugcuaaucuacua

SEQ ID NO: 1135053 - RNA, 19 nt, Artificial Sequence
  Description of Artificial Sequence: Synthetic oligonucleotide
  Antisense strand to SEQ ID NO: 1135052
uaguagauuagcaucaucc

SEQ ID NO: 1135054 - RNA, 19 nt, Artificial Sequence
  Description of Artificial Sequence: Synthetic oligonucleotide
  Sense strand starting at position 669 of SEQ ID NO: 916161
uagcaaguuguaggaacaa

SEQ ID NO: 1135055 - RNA, 19 nt, Artificial Sequence
  Description of Artificial Sequence: Synthetic oligonucleotide
  Antisense strand to SEQ ID NO: 1135054
uuguuccuacaacuugcua

SEQ ID NO: 1135056 - RNA, 19 nt, Artificial Sequence
  Description of Artificial Sequence: Synthetic oligonucleotide
  Sense strand starting at position 750 of SEQ ID NO: 916161
gguggcaacgguuaucuuu

SEQ ID NO: 1135057 - RNA, 19 nt, Artificial Sequence
  Description of Artificial Sequence: Synthetic oligonucleotide
  Antisense strand to SEQ ID NO: 1135056
aaagauaaccguugccacc

SEQ ID NO: 1135058 - RNA, 19 nt, Artificial Sequence
  Description of Artificial Sequence: Synthetic oligonucleotide
  Sense strand starting at position 759 of SEQ ID NO: 916161
gguuaucuuucucugcaaa

SEQ ID NO: 1135059 - RNA, 19 nt, Artificial Sequence
  Description of Artificial Sequence: Synthetic oligonucleotide
  Antisense strand to SEQ ID NO: 1135058
uuugcagagaaagauaacc

SEQ ID NO: 1135060 - RNA, 19 nt, Artificial Sequence
  Description of Artificial Sequence: Synthetic oligonucleotide
  Sense strand starting at position 795 of SEQ ID NO: 916161
uggagcgucacacaagauu

SEQ ID NO: 1135061 - RNA, 19 nt, Artificial Sequence
  Description of Artificial Sequence: Synthetic oligonucleotide
  Antisense strand to SEQ ID NO: 1135060
aaucuugugugacgcucca

SEQ ID NO: 1135062 - RNA, 19 nt, Artificial Sequence
  Description of Artificial Sequence: Synthetic oligonucleotide
  Sense strand starting at position 915 of SEQ ID NO: 916161
ggcauuuauuucuguucca

SEQ ID NO: 1135063 - RNA, 19 nt, Artificial Sequence
  Description of Artificial Sequence: Synthetic oligonucleotide
  Antisense strand to SEQ ID NO: 1135062
uggaacagaaauaaaugcc

SEQ ID NO: 1135064 - RNA, 19 nt, Artificial Sequence
  Description of Artificial Sequence: Synthetic oligonucleotide
  Sense strand starting at position 1280 of SEQ ID NO: 916161
cgcggagcuggguaauuaa

SEQ ID NO: 1135065 - RNA, 19 nt, Artificial Sequence
  Description of Artificial Sequence: Synthetic oligonucleotide
  Antisense strand to SEQ ID NO: 1135064
uuaauuacccagcuccgcg

SEQ ID NO: 1135066 - RNA, 19 nt, Artificial Sequence
  Description of Artificial Sequence: Synthetic oligonucleotide
  Sense strand starting at position 1831 of SEQ ID NO: 916161
aguuucucaccguggagaa

SEQ ID NO: 1135067 - RNA, 19 nt, Artificial Sequence
  Description of Artificial Sequence: Synthetic oligonucleotide
  Antisense strand to SEQ ID NO: 1135066
uucuccacggugagaaacu

SEQ ID NO: 1135068 - RNA, 19 nt, Artificial Sequence
  Description of Artificial Sequence: Synthetic oligonucleotide
  Sense strand starting at position 1832 of SEQ ID NO: 916161
guuucucaccguggagaag

SEQ ID NO: 1135069 - RNA, 19 nt, Artificial Sequence
  Description of Artificial Sequence: Synthetic oligonucleotide
  Antisense strand to SEQ ID NO: 1135068
cuucuccacggugagaaac

SEQ ID NO: 1135070 - RNA, 19 nt, Artificial Sequence
  Description of Artificial Sequence: Synthetic oligonucleotide
  Sense strand starting at position 2297 of SEQ ID NO: 916161
ggguguguucucgaacaac

SEQ ID NO: 1135071 - RNA, 19 nt, Artificial Sequence
  Description of Artificial Sequence: Synthetic oligonucleotide
  Antisense strand to SEQ ID NO: 1135070
guuguucgagaacacaccc

SEQ ID NO: 1135072 - RNA, 19 nt, Artificial Sequence
  Description of Artificial Sequence: Synthetic oligonucleotide
  Sense strand starting at position 2300 of SEQ ID NO: 916161
uguguucucgaacaacagu

SEQ ID NO: 1135073 - RNA, 19 nt, Artificial Sequence
  Description of Artificial Sequence: Synthetic oligonucleotide
  Antisense strand to SEQ ID NO: 1135072
acuguuguucgagaacaca

SEQ ID NO: 1135074 - RNA, 19 nt, Artificial Sequence
  Description of Artificial Sequence: Synthetic oligonucleotide
  Sense strand starting at position 2321 of SEQ ID NO: 916161
cuagaaguugguggccauu

SEQ ID NO: 1135075 - RNA, 19 nt, Artificial Sequence
  Description of Artificial Sequence: Synthetic oligonucleotide
  Antisense strand to SEQ ID NO: 1135074
aauggccaccaacuucuag

SEQ ID NO: 1135076 - RNA, 19 nt, Artificial Sequence
  Description of Artificial Sequence: Synthetic oligonucleotide
  Sense strand starting at position 2401 of SEQ ID NO: 916161
gcaggauuacgacagaggu

SEQ ID NO: 1135077 - RNA, 19 nt, Artificial Sequence
  Description of Artificial Sequence: Synthetic oligonucleotide
  Antisense strand to SEQ ID NO: 1135076
accucugucguaauccugc

SEQ ID NO: 1135078 - RNA, 19 nt, Artificial Sequence
  Description of Artificial Sequence: Synthetic oligonucleotide
  Sense strand starting at position 2420 of SEQ ID NO: 916161
ggccucucccuuuacugaa

SEQ ID NO: 1135079 - RNA, 19 nt, Artificial Sequence
  Description of Artificial Sequence: Synthetic oligonucleotide
  Antisense strand to SEQ ID NO: 1135078
uucaguaaagggagaggcc

SEQ ID NO: 1135080 - RNA, 19 nt, Artificial Sequence
  Description of Artificial Sequence: Synthetic oligonucleotide
  Sense strand starting at position 2434 of SEQ ID NO: 916161
cugaaaggguaucucugaa

SEQ ID NO: 1135081 - RNA, 19 nt, Artificial Sequence
  Description of Artificial Sequence: Synthetic oligonucleotide
  Antisense strand to SEQ ID NO: 1135080
uucagagauacccuuucag

SEQ ID NO: 1135082 - RNA, 19 nt, Artificial Sequence
  Description of Artificial Sequence: Synthetic oligonucleotide
  Sense strand starting at position 2600 of SEQ ID NO: 916161
gagggaggguguuuccuua

SEQ ID NO: 1135083 - RNA, 19 nt, Artificial Sequence
  Description of Artificial Sequence: Synthetic oligonucleotide
  Antisense strand to SEQ ID NO: 1135082
uaaggaaacacccucccuc

SEQ ID NO: 1135084 - RNA, 19 nt, Artificial Sequence
  Description of Artificial Sequence: Synthetic oligonucleotide
  Sense strand starting at position 2604 of SEQ ID NO: 916161
gaggguguuuccuuacgaa

SEQ ID NO: 1135085 - RNA, 19 nt, Artificial Sequence
  Description of Artificial Sequence: Synthetic oligonucleotide
  Antisense strand to SEQ ID NO: 1135084
uucguaaggaaacacccuc

SEQ ID NO: 1135086 - RNA, 19 nt, Artificial Sequence
  Description of Artificial Sequence: Synthetic oligonucleotide
  Sense strand starting at position 2782 of SEQ ID NO: 916161
gagagauucuugguuggga

SEQ ID NO: 1135087 - RNA, 19 nt, Artificial Sequence
  Description of Artificial Sequence: Synthetic oligonucleotide
  Antisense strand to SEQ ID NO: 1135086
ucccaaccaagaaucucuc

SEQ ID NO: 1135088 - RNA, 19 nt, Artificial Sequence
  Description of Artificial Sequence: Synthetic oligonucleotide
  Sense strand starting at position 2783 of SEQ ID NO: 916161
agagauucuugguugggau

SEQ ID NO: 1135089 - RNA, 19 nt, Artificial Sequence
  Description of Artificial Sequence: Synthetic oligonucleotide
  Antisense strand to SEQ ID NO: 1135088
aucccaaccaagaaucucu

SEQ ID NO: 1135090 - RNA, 19 nt, Artificial Sequence
  Description of Artificial Sequence: Synthetic oligonucleotide
  Sense strand starting at position 2784 of SEQ ID NO: 916161
gagauucuugguugggauu

SEQ ID NO: 1135091 - RNA, 19 nt, Artificial Sequence
  Description of Artificial Sequence: Synthetic oligonucleotide
  Antisense strand to SEQ ID NO: 1135090
aaucccaaccaagaaucuc

SEQ ID NO: 1135092 - RNA, 19 nt, Artificial Sequence
  Description of Artificial Sequence: Synthetic oligonucleotide
  Sense strand starting at position 2798 of SEQ ID NO: 916161
ggauuuaucucugaggagg

SEQ ID NO: 1135093 - RNA, 19 nt, Artificial Sequence
  Description of Artificial Sequence: Synthetic oligonucleotide
  Antisense strand to SEQ ID NO: 1135092
ccuccucagagauaaaucc

SEQ ID NO: 1135094 - RNA, 19 nt, Artificial Sequence
  Description of Artificial Sequence: Synthetic oligonucleotide
  Sense strand starting at position 2817 of SEQ ID NO: 916161
agguauucuaauggacgaa

SEQ ID NO: 1135095 - RNA, 19 nt, Artificial Sequence
  Description of Artificial Sequence: Synthetic oligonucleotide
  Antisense strand to SEQ ID NO: 1135094
uucguccauuagaauaccu

SEQ ID NO: 1135096 - RNA, 19 nt, Artificial Sequence
  Description of Artificial Sequence: Synthetic oligonucleotide
  Sense strand starting at position 2879 of SEQ ID NO: 916161
gagacacgaagugguuaaa

SEQ ID NO: 1135097 - RNA, 19 nt, Artificial Sequence
  Description of Artificial Sequence: Synthetic oligonucleotide
  Antisense strand to SEQ ID NO: 1135096
uuuaaccacuucgugucuc

SEQ ID NO: 1135098 - RNA, 19 nt, Artificial Sequence
  Description of Artificial Sequence: Synthetic oligonucleotide
  Sense strand starting at position 2926 of SEQ ID NO: 916161
caagucagaucuggauuua

SEQ ID NO: 1135099 - RNA, 19 nt, Artificial Sequence
  Description of Artificial Sequence: Synthetic oligonucleotide
  Antisense strand to SEQ ID NO: 1135098
uaaauccagaucugacuug

SEQ ID NO: 1135100 - RNA, 19 nt, Artificial Sequence
  Description of Artificial Sequence: Synthetic oligonucleotide
  Sense strand starting at position 3029 of SEQ ID NO: 916161
gcuuguuagcaguauuaaa

SEQ ID NO: 1135101 - RNA, 19 nt, Artificial Sequence
  Description of Artificial Sequence: Synthetic oligonucleotide
  Antisense strand to SEQ ID NO: 1135100
uuuaauacugcuaacaagc

SEQ ID NO: 1135102 - RNA, 19 nt, Artificial Sequence
  Description of Artificial Sequence: Synthetic oligonucleotide
  Sense strand starting at position 3165 of SEQ ID NO: 916161
cucugaaaugccuauaaug

SEQ ID NO: 1135103 - RNA, 19 nt, Artificial Sequence
  Description of Artificial Sequence: Synthetic oligonucleotide
  Antisense strand to SEQ ID NO: 1135102
cauuauaggcauuucagag

SEQ ID NO: 1135104 - RNA, 19 nt, Artificial Sequence
  Description of Artificial Sequence: Synthetic oligonucleotide
  Sense strand starting at position 3167 of SEQ ID NO: 916161
cugaaaugccuauaaugua

SEQ ID NO: 1135105 - RNA, 19 nt, Artificial Sequence
  Description of Artificial Sequence: Synthetic oligonucleotide
  Antisense strand to SEQ ID NO: 1135104
uacauuauaggcauuucag

SEQ ID NO: 1135106 - RNA, 19 nt, Artificial Sequence
  Description of Artificial Sequence: Synthetic oligonucleotide
  Sense strand starting at position 3209 of SEQ ID NO: 916161
uuaucagguuaaucaugua

SEQ ID NO: 1135107 - RNA, 19 nt, Artificial Sequence
  Description of Artificial Sequence: Synthetic oligonucleotide
  Antisense strand to SEQ ID NO: 1135106
uacaugauuaaccugauaa

SEQ ID NO: 1135108 - RNA, 19 nt, Artificial Sequence
  Description of Artificial Sequence: Synthetic oligonucleotide
  Sense strand starting at position 3338 of SEQ ID NO: 916161
cuuugagaagccgagucaa

SEQ ID NO: 1135109 - RNA, 19 nt, Artificial Sequence
  Description of Artificial Sequence: Synthetic oligonucleotide
  Antisense strand to SEQ ID NO: 1135108
uugacucggcuucucaaag

SEQ ID NO: 1135110 - RNA, 19 nt, Artificial Sequence
  Description of Artificial Sequence: Synthetic oligonucleotide
  Sense strand starting at position 3838 of SEQ ID NO: 916161
ccaguuccauguuucuaau

SEQ ID NO: 1135111 - RNA, 19 nt, Artificial Sequence
  Description of Artificial Sequence: Synthetic oligonucleotide
  Antisense strand to SEQ ID NO: 1135110
auuagaaacauggaacugg

SEQ ID NO: 1135112 - RNA, 19 nt, Artificial Sequence
  Description of Artificial Sequence: Synthetic oligonucleotide
  Sense strand starting at position 3840 of SEQ ID NO: 916161
aguuccauguuucuaauga

SEQ ID NO: 1135113 - RNA, 19 nt, Artificial Sequence
  Description of Artificial Sequence: Synthetic oligonucleotide
  Antisense strand to SEQ ID NO: 1135112
ucauuagaaacauggaacu

SEQ ID NO: 1135114 - RNA, 19 nt, Artificial Sequence
  Description of Artificial Sequence: Synthetic oligonucleotide
  Sense strand starting at position 3972 of SEQ ID NO: 916161
cggugacuccacuaaguag

SEQ ID NO: 1135115 - RNA, 19 nt, Artificial Sequence
  Description of Artificial Sequence: Synthetic oligonucleotide
  Antisense strand to SEQ ID NO: 1135114
cuacuuaguggagucaccg

SEQ ID NO: 1135116 - RNA, 19 nt, Artificial Sequence
  Description of Artificial Sequence: Synthetic oligonucleotide
  Sense strand starting at position 10 of SEQ ID NO: 916162
guacaugcuuuagucgaau

SEQ ID NO: 1135117 - RNA, 19 nt, Artificial Sequence
  Description of Artificial Sequence: Synthetic oligonucleotide
  Antisense strand to SEQ ID NO: 1135116
auucgacuaaagcauguac

SEQ ID NO: 1135118 - RNA, 19 nt, Artificial Sequence
  Description of Artificial Sequence: Synthetic oligonucleotide
  Sense strand starting at position 13 of SEQ ID NO: 916162
caugcuuuagucgaaucca

SEQ ID NO: 1135119 - RNA, 19 nt, Artificial Sequence
  Description of Artificial Sequence: Synthetic oligonucleotide
  Antisense strand to SEQ ID NO: 1135118
uggauucgacuaaagcaug

SEQ ID NO: 1135120 - RNA, 19 nt, Artificial Sequence
  Description of Artificial Sequence: Synthetic oligonucleotide
  Sense strand starting at position 388 of SEQ ID NO: 916162
acacguaucuguuucuaua

SEQ ID NO: 1135121 - RNA, 19 nt, Artificial Sequence
  Description of Artificial Sequence: Synthetic oligonucleotide
  Antisense strand to SEQ ID NO: 1135120
uauagaaacagauacgugu

SEQ ID NO: 1135122 - RNA, 19 nt, Artificial Sequence
  Description of Artificial Sequence: Synthetic oligonucleotide
  Sense strand starting at position 390 of SEQ ID NO: 916162
acguaucuguuucuauaaa

SEQ ID NO: 1135123 - RNA, 19 nt, Artificial Sequence
  Description of Artificial Sequence: Synthetic oligonucleotide
  Antisense strand to SEQ ID NO: 1135122
uuuauagaaacagauacgu

SEQ ID NO: 1135124 - RNA, 19 nt, Artificial Sequence
  Description of Artificial Sequence: Synthetic oligonucleotide
  Sense strand starting at position 391 of SEQ ID NO: 916162
cguaucuguuucuauaaau

SEQ ID NO: 1135125 - RNA, 19 nt, Artificial Sequence
  Description of Artificial Sequence: Synthetic oligonucleotide
  Antisense strand to SEQ ID NO: 1135124
auuuauagaaacagauacg

SEQ ID NO: 1135126 - RNA, 19 nt, Artificial Sequence
  Description of Artificial Sequence: Synthetic oligonucleotide
  Sense strand starting at position 442 of SEQ ID NO: 916162
agagauguuuaccggguca

SEQ ID NO: 1135127 - RNA, 19 nt, Artificial Sequence
  Description of Artificial Sequence: Synthetic oligonucleotide
  Antisense strand to SEQ ID NO: 1135126
ugacccgguaaacaucucu

SEQ ID NO: 1135128 - RNA, 19 nt, Artificial Sequence
  Description of Artificial Sequence: Synthetic oligonucleotide
  Sense strand starting at position 517 of SEQ ID NO: 916162
ggaggaaguuccuaggaag

SEQ ID NO: 1135129 - RNA, 19 nt, Artificial Sequence
  Description of Artificial Sequence: Synthetic oligonucleotide
  Antisense strand to SEQ ID NO: 1135128
cuuccuaggaacuuccucc

SEQ ID NO: 1135130 - RNA, 19 nt, Artificial Sequence
  Description of Artificial Sequence: Synthetic oligonucleotide
  Sense strand starting at position 2407 of SEQ ID NO: 916162
cugaauggcugcucacaga

SEQ ID NO: 1135131 - RNA, 19 nt, Artificial Sequence
  Description of Artificial Sequence: Synthetic oligonucleotide
  Antisense strand to SEQ ID NO: 1135130
ucugugagcagccauucag

SEQ ID NO: 1135132 - RNA, 19 nt, Artificial Sequence
  Description of Artificial Sequence: Synthetic oligonucleotide
  Sense strand starting at position 2499 of SEQ ID NO: 916162
agauaacuuaguugugcga

SEQ ID NO: 1135133 - RNA, 19 nt, Artificial Sequence
  Description of Artificial Sequence: Synthetic oligonucleotide
  Antisense strand to SEQ ID NO: 1135132
ucgcacaacuaaguuaucu

SEQ ID NO: 1135134 - RNA, 19 nt, Artificial Sequence
  Description of Artificial Sequence: Synthetic oligonucleotide
  Sense strand starting at position 2505 of SEQ ID NO: 916162
cuuaguugugcgaggguca

SEQ ID NO: 1135135 - RNA, 19 nt, Artificial Sequence
  Description of Artificial Sequence: Synthetic oligonucleotide
  Antisense strand to SEQ ID NO: 1135134
ugacccucgcacaacuaag

SEQ ID NO: 1135136 - RNA, 19 nt, Artificial Sequence
  Description of Artificial Sequence: Synthetic oligonucleotide
  Sense strand starting at position 3073 of SEQ ID NO: 916162
gugggaaagcccgacaaau

SEQ ID NO: 1135137 - RNA, 19 nt, Artificial Sequence
  Description of Artificial Sequence: Synthetic oligonucleotide
  Antisense strand to SEQ ID NO: 1135136
auuugucgggcuuucccac

SEQ ID NO: 1135138 - RNA, 19 nt, Artificial Sequence
  Description of Artificial Sequence: Synthetic oligonucleotide
  Sense strand starting at position 3107 of SEQ ID NO: 916162
agaguuaugccaugcacuu

SEQ ID NO: 1135139 - RNA, 19 nt, Artificial Sequence
  Description of Artificial Sequence: Synthetic oligonucleotide
  Antisense strand to SEQ ID NO: 1135138
aagugcauggcauaacucu

SEQ ID NO: 1135140 - RNA, 19 nt, Artificial Sequence
  Description of Artificial Sequence: Synthetic oligonucleotide
  Sense strand starting at position 3134 of SEQ ID NO: 916162
agaggugccuaguuucuga

SEQ ID NO: 1135141 - RNA, 19 nt, Artificial Sequence
  Description of Artificial Sequence: Synthetic oligonucleotide
  Antisense strand to SEQ ID NO: 1135140
ucagaaacuaggcaccucu

SEQ ID NO: 1135142 - RNA, 19 nt, Artificial Sequence
  Description of Artificial Sequence: Synthetic oligonucleotide
  Sense strand starting at position 3138 of SEQ ID NO: 916162
gugccuaguuucugaaguu

SEQ ID NO: 1135143 - RNA, 19 nt, Artificial Sequence
  Description of Artificial Sequence: Synthetic oligonucleotide
  Antisense strand to SEQ ID NO: 1135142
aacuucagaaacuaggcac

SEQ ID NO: 1135144 - RNA, 19 nt, Artificial Sequence
  Description of Artificial Sequence: Synthetic oligonucleotide
  Sense strand starting at position 3328 of SEQ ID NO: 916162
gcgcauccgcagcuuuaua

SEQ ID NO: 1135145 - RNA, 19 nt, Artificial Sequence
  Description of Artificial Sequence: Synthetic oligonucleotide
  Antisense strand to SEQ ID NO: 1135144
uauaaagcugcggaugcgc

SEQ ID NO: 1135146 - RNA, 19 nt, Artificial Sequence
  Description of Artificial Sequence: Synthetic oligonucleotide
  Sense strand starting at position 3405 of SEQ ID NO: 916162
uaaagaggccuccaaguua

SEQ ID NO: 1135147 - RNA, 19 nt, Artificial Sequence
  Description of Artificial Sequence: Synthetic oligonucleotide
  Antisense strand to SEQ ID NO: 1135146
uaacuuggaggccucuuua

SEQ ID NO: 1135148 - RNA, 19 nt, Artificial Sequence
  Description of Artificial Sequence: Synthetic oligonucleotide
  Sense strand starting at position 3467 of SEQ ID NO: 916162
aguauuacgucccuccaaa

SEQ ID NO: 1135149 - RNA, 19 nt, Artificial Sequence
  Description of Artificial Sequence: Synthetic oligonucleotide
  Antisense strand to SEQ ID NO: 1135148
uuuggagggacguaauacu

SEQ ID NO: 1135150 - RNA, 19 nt, Artificial Sequence
  Description of Artificial Sequence: Synthetic oligonucleotide
  Sense strand starting at position 3637 of SEQ ID NO: 916162
uggcgaccaucacauuuaa

SEQ ID NO: 1135151 - RNA, 19 nt, Artificial Sequence
  Description of Artificial Sequence: Synthetic oligonucleotide
  Antisense strand to SEQ ID NO: 1135150
uuaaaugugauggucgcca

SEQ ID NO: 1135152 - RNA, 19 nt, Artificial Sequence
  Description of Artificial Sequence: Synthetic oligonucleotide
  Sense strand starting at position 3668 of SEQ ID NO: 916162
aagcauauuuaguguuuag

SEQ ID NO: 1135153 - RNA, 19 nt, Artificial Sequence
  Description of Artificial Sequence: Synthetic oligonucleotide
  Antisense strand to SEQ ID NO: 1135152
cuaaacacuaaauaugcuu

SEQ ID NO: 1135154 - RNA, 19 nt, Artificial Sequence
  Description of Artificial Sequence: Synthetic oligonucleotide
  Sense strand starting at position 3678 of SEQ ID NO: 916162
aguguuuagaaucgacuaa

SEQ ID NO: 1135155 - RNA, 19 nt, Artificial Sequence
  Description of Artificial Sequence: Synthetic oligonucleotide
  Antisense strand to SEQ ID NO: 1135154
uuagucgauucuaaacacu

SEQ ID NO: 1135156 - RNA, 19 nt, Artificial Sequence
  Description of Artificial Sequence: Synthetic oligonucleotide
  Sense strand starting at position 3679 of SEQ ID NO: 916162
guguuuagaaucgacuaaa

SEQ ID NO: 1135157 - RNA, 19 nt, Artificial Sequence
  Description of Artificial Sequence: Synthetic oligonucleotide
  Antisense strand to SEQ ID NO: 1135156
uuuagucgauucuaaacac

SEQ ID NO: 1135158 - RNA, 19 nt, Artificial Sequence
  Description of Artificial Sequence: Synthetic oligonucleotide
  Sense strand starting at position 3706 of SEQ ID NO: 916162
gcuacuaaguagcagagau

SEQ ID NO: 1135159 - RNA, 19 nt, Artificial Sequence
  Description of Artificial Sequence: Synthetic oligonucleotide
  Antisense strand to SEQ ID NO: 1135158
aucucugcuacuuaguagc

SEQ ID NO: 1135160 - RNA, 19 nt, Artificial Sequence
  Description of Artificial Sequence: Synthetic oligonucleotide
  Sense strand starting at position 3946 of SEQ ID NO: 916162
ugcuuaaguuauucguaca

SEQ ID NO: 1135161 - RNA, 19 nt, Artificial Sequence
  Description of Artificial Sequence: Synthetic oligonucleotide
  Antisense strand to SEQ ID NO: 1135160
uguacgaauaacuuaagca

SEQ ID NO: 1135162 - RNA, 19 nt, Artificial Sequence
  Description of Artificial Sequence: Synthetic oligonucleotide
  Sense strand starting at position 35 of SEQ ID NO: 916163
gaaauuacaguguggguca

SEQ ID NO: 1135163 - RNA, 19 nt, Artificial Sequence
  Description of Artificial Sequence: Synthetic oligonucleotide
  Antisense strand to SEQ ID NO: 1135162
ugacccacacuguaauuuc

SEQ ID NO: 1135164 - RNA, 19 nt, Artificial Sequence
  Description of Artificial Sequence: Synthetic oligonucleotide
  Sense strand starting at position 297 of SEQ ID NO: 916163
cugggaaaugccuagucaa

SEQ ID NO: 1135165 - RNA, 19 nt, Artificial Sequence
  Description of Artificial Sequence: Synthetic oligonucleotide
  Antisense strand to SEQ ID NO: 1135164
uugacuaggcauuucccag

SEQ ID NO: 1135166 - RNA, 19 nt, Artificial Sequence
  Description of Artificial Sequence: Synthetic oligonucleotide
  Sense strand starting at position 415 of SEQ ID NO: 916163
auuaguuucgaucaugaaa

SEQ ID NO: 1135167 - RNA, 19 nt, Artificial Sequence
  Description of Artificial Sequence: Synthetic oligonucleotide
  Antisense strand to SEQ ID NO: 1135166
uuucaugaucgaaacuaau

SEQ ID NO: 1135168 - RNA, 19 nt, Artificial Sequence
  Description of Artificial Sequence: Synthetic oligonucleotide
  Sense strand starting at position 464 of SEQ ID NO: 916163
gcuauauguguuucucugu

SEQ ID NO: 1135169 - RNA, 19 nt, Artificial Sequence
  Description of Artificial Sequence: Synthetic oligonucleotide
  Antisense strand to SEQ ID NO: 1135168
acagagaaacacauauagc

SEQ ID NO: 1135170 - RNA, 19 nt, Artificial Sequence
  Description of Artificial Sequence: Synthetic oligonucleotide
  Sense strand starting at position 504 of SEQ ID NO: 916163
auagaaauuuggcaaagau

SEQ ID NO: 1135171 - RNA, 19 nt, Artificial Sequence
  Description of Artificial Sequence: Synthetic oligonucleotide
  Antisense strand to SEQ ID NO: 1135170
aucuuugccaaauuucuau

SEQ ID NO: 1135172 - RNA, 19 nt, Artificial Sequence
  Description of Artificial Sequence: Synthetic oligonucleotide
  Sense strand starting at position 761 of SEQ ID NO: 916163
uugcuauuaggagauaguu

SEQ ID NO: 1135173 - RNA, 19 nt, Artificial Sequence
  Description of Artificial Sequence: Synthetic oligonucleotide
  Antisense strand to SEQ ID NO: 1135172
aacuaucuccuaauagcaa

SEQ ID NO: 1135174 - RNA, 19 nt, Artificial Sequence
  Description of Artificial Sequence: Synthetic oligonucleotide
  Sense strand starting at position 810 of SEQ ID NO: 916163
augacuaaugccugaacaa

SEQ ID NO: 1135175 - RNA, 19 nt, Artificial Sequence
  Description of Artificial Sequence: Synthetic oligonucleotide
  Antisense strand to SEQ ID NO: 1135174
uuguucaggcauuagucau

SEQ ID NO: 1135176 - RNA, 19 nt, Artificial Sequence
  Description of Artificial Sequence: Synthetic oligonucleotide
  Sense strand starting at position 1059 of SEQ ID NO: 916163
gcauucuagcaagaagcau

SEQ ID NO: 1135177 - RNA, 19 nt, Artificial Sequence
  Description of Artificial Sequence: Synthetic oligonucleotide
  Antisense strand to SEQ ID NO: 1135176
augcuucuugcuagaaugc

SEQ ID NO: 1135178 - RNA, 19 nt, Artificial Sequence
  Description of Artificial Sequence: Synthetic oligonucleotide
  Sense strand starting at position 1161 of SEQ ID NO: 916163
cuguaugcccaauaagauu

SEQ ID NO: 1135179 - RNA, 19 nt, Artificial Sequence
  Description of Artificial Sequence: Synthetic oligonucleotide
  Antisense strand to SEQ ID NO: 1135178
aaucuuauugggcauacag

SEQ ID NO: 1135180 - RNA, 19 nt, Artificial Sequence
  Description of Artificial Sequence: Synthetic oligonucleotide
  Sense strand starting at position 1258 of SEQ ID NO: 916163
acacaugaggcuuacggua

SEQ ID NO: 1135181 - RNA, 19 nt, Artificial Sequence
  Description of Artificial Sequence: Synthetic oligonucleotide
  Antisense strand to SEQ ID NO: 1135180
uaccguaagccucaugugu

SEQ ID NO: 1135182 - RNA, 19 nt, Artificial Sequence
  Description of Artificial Sequence: Synthetic oligonucleotide
  Sense strand starting at position 1292 of SEQ ID NO: 916163
agcuauaaugauugauaga

SEQ ID NO: 1135183 - RNA, 19 nt, Artificial Sequence
  Description of Artificial Sequence: Synthetic oligonucleotide
  Antisense strand to SEQ ID NO: 1135182
ucuaucaaucauuauagcu

SEQ ID NO: 1135184 - RNA, 19 nt, Artificial Sequence
  Description of Artificial Sequence: Synthetic oligonucleotide
  Sense strand starting at position 1462 of SEQ ID NO: 916163
gugucauguccgucugguu

SEQ ID NO: 1135185 - RNA, 19 nt, Artificial Sequence
  Description of Artificial Sequence: Synthetic oligonucleotide
  Antisense strand to SEQ ID NO: 1135184
aaccagacggacaugacac

SEQ ID NO: 1135186 - RNA, 19 nt, Artificial Sequence
  Description of Artificial Sequence: Synthetic oligonucleotide
  Sense strand starting at position 1463 of SEQ ID NO: 916163
ugucauguccgucugguuu

SEQ ID NO: 1135187 - RNA, 19 nt, Artificial Sequence
  Description of Artificial Sequence: Synthetic oligonucleotide
  Antisense strand to SEQ ID NO: 1135186
aaaccagacggacaugaca

SEQ ID NO: 1135188 - RNA, 19 nt, Artificial Sequence
  Description of Artificial Sequence: Synthetic oligonucleotide
  Sense strand starting at position 1597 of SEQ ID NO: 916163
agaugucgacuugacaagu

SEQ ID NO: 1135189 - RNA, 19 nt, Artificial Sequence
  Description of Artificial Sequence: Synthetic oligonucleotide
  Antisense strand to SEQ ID NO: 1135188
acuugucaagucgacaucu

SEQ ID NO: 1135190 - RNA, 19 nt, Artificial Sequence
  Description of Artificial Sequence: Synthetic oligonucleotide
  Sense strand starting at position 2128 of SEQ ID NO: 916163
gauuauaaaggagguguga

SEQ ID NO: 1135191 - RNA, 19 nt, Artificial Sequence
  Description of Artificial Sequence: Synthetic oligonucleotide
  Antisense strand to SEQ ID NO: 1135190
ucacaccuccuuuauaauc

SEQ ID NO: 1135192 - RNA, 19 nt, Artificial Sequence
  Description of Artificial Sequence: Synthetic oligonucleotide
  Sense strand starting at position 2130 of SEQ ID NO: 916163
uuauaaaggaggugugacu

SEQ ID NO: 1135193 - RNA, 19 nt, Artificial Sequence
  Description of Artificial Sequence: Synthetic oligonucleotide
  Antisense strand to SEQ ID NO: 1135192
agucacaccuccuuuauaa

SEQ ID NO: 1135194 - RNA, 19 nt, Artificial Sequence
  Description of Artificial Sequence: Synthetic oligonucleotide
  Sense strand starting at position 2198 of SEQ ID NO: 916163
agugaaucuaagugagcca

SEQ ID NO: 1135195 - RNA, 19 nt, Artificial Sequence
  Description of Artificial Sequence: Synthetic oligonucleotide
  Antisense strand to SEQ ID NO: 1135194
uggcucacuuagauucacu

SEQ ID NO: 1135196 - RNA, 19 nt, Artificial Sequence
  Description of Artificial Sequence: Synthetic oligonucleotide
  Sense strand starting at position 2199 of SEQ ID NO: 916163
gugaaucuaagugagccaa

SEQ ID NO: 1135197 - RNA, 19 nt, Artificial Sequence
  Description of Artificial Sequence: Synthetic oligonucleotide
  Antisense strand to SEQ ID NO: 1135196
uuggcucacuuagauucac

SEQ ID NO: 1135198 - RNA, 19 nt, Artificial Sequence
  Description of Artificial Sequence: Synthetic oligonucleotide
  Sense strand starting at position 2209 of SEQ ID NO: 916163
gugagccaaguuuauaaca

SEQ ID NO: 1135199 - RNA, 19 nt, Artificial Sequence
  Description of Artificial Sequence: Synthetic oligonucleotide
  Antisense strand to SEQ ID NO: 1135198
uguuauaaacuuggcucac

SEQ ID NO: 1135200 - RNA, 19 nt, Artificial Sequence
  Description of Artificial Sequence: Synthetic oligonucleotide
  Sense strand starting at position 2308 of SEQ ID NO: 916163
gugacuuggcaagagaguu

SEQ ID NO: 1135201 - RNA, 19 nt, Artificial Sequence
  Description of Artificial Sequence: Synthetic oligonucleotide
  Antisense strand to SEQ ID NO: 1135200
aacucucuugccaagucac

SEQ ID NO: 1135202 - RNA, 19 nt, Artificial Sequence
  Description of Artificial Sequence: Synthetic oligonucleotide
  Sense strand starting at position 2316 of SEQ ID NO: 916163
gcaagagaguuaucaaguu

SEQ ID NO: 1135203 - RNA, 19 nt, Artificial Sequence
  Description of Artificial Sequence: Synthetic oligonucleotide
  Antisense strand to SEQ ID NO: 1135202
aacuugauaacucucuugc

SEQ ID NO: 1135204 - RNA, 19 nt, Artificial Sequence
  Description of Artificial Sequence: Synthetic oligonucleotide
  Sense strand starting at position 2396 of SEQ ID NO: 916163
gcacuuauuguauagaaag

SEQ ID NO: 1135205 - RNA, 19 nt, Artificial Sequence
  Description of Artificial Sequence: Synthetic oligonucleotide
  Antisense strand to SEQ ID NO: 1135204
cuuucuauacaauaagugc

SEQ ID NO: 1135206 - RNA, 19 nt, Artificial Sequence
  Description of Artificial Sequence: Synthetic oligonucleotide
  Sense strand starting at position 2457 of SEQ ID NO: 916163
aauggaacacgguaguuau

SEQ ID NO: 1135207 - RNA, 19 nt, Artificial Sequence
  Description of Artificial Sequence: Synthetic oligonucleotide
  Antisense strand to SEQ ID NO: 1135206
auaacuaccguguuccauu

SEQ ID NO: 1135208 - RNA, 19 nt, Artificial Sequence
  Description of Artificial Sequence: Synthetic oligonucleotide
  Sense strand starting at position 2468 of SEQ ID NO: 916163
guaguuauuuccgcauaac

SEQ ID NO: 1135209 - RNA, 19 nt, Artificial Sequence
  Description of Artificial Sequence: Synthetic oligonucleotide
  Antisense strand to SEQ ID NO: 1135208
guuaugcggaaauaacuac

SEQ ID NO: 1135210 - RNA, 19 nt, Artificial Sequence
  Description of Artificial Sequence: Synthetic oligonucleotide
  Sense strand starting at position 2516 of SEQ ID NO: 916163
gggauucuguaaccacuuu

SEQ ID NO: 1135211 - RNA, 19 nt, Artificial Sequence
  Description of Artificial Sequence: Synthetic oligonucleotide
  Antisense strand to SEQ ID NO: 1135210
aaagugguuacagaauccc

SEQ ID NO: 1135212 - RNA, 19 nt, Artificial Sequence
  Description of Artificial Sequence: Synthetic oligonucleotide
  Sense strand starting at position 2768 of SEQ ID NO: 916163
acauuaauucugugaagca

SEQ ID NO: 1135213 - RNA, 19 nt, Artificial Sequence
  Description of Artificial Sequence: Synthetic oligonucleotide
  Antisense strand to SEQ ID NO: 1135212
ugcuucacagaauuaaugu

SEQ ID NO: 1135214 - RNA, 19 nt, Artificial Sequence
  Description of Artificial Sequence: Synthetic oligonucleotide
  Sense strand starting at position 2852 of SEQ ID NO: 916163
guuacucagcuauaaguga

SEQ ID NO: 1135215 - RNA, 19 nt, Artificial Sequence
  Description of Artificial Sequence: Synthetic oligonucleotide
  Antisense strand to SEQ ID NO: 1135214
ucacuuauagcugaguaac

SEQ ID NO: 1135216 - RNA, 19 nt, Artificial Sequence
  Description of Artificial Sequence: Synthetic oligonucleotide
  Sense strand starting at position 3031 of SEQ ID NO: 916163
cuuggcagccaagauaaau

SEQ ID NO: 1135217 - RNA, 19 nt, Artificial Sequence
  Description of Artificial Sequence: Synthetic oligonucleotide
  Antisense strand to SEQ ID NO: 1135216
auuuaucuuggcugccaag

SEQ ID NO: 1135218 - RNA, 19 nt, Artificial Sequence
  Description of Artificial Sequence: Synthetic oligonucleotide
  Sense strand starting at position 3096 of SEQ ID NO: 916163
auacaaguucuuuguggga

SEQ ID NO: 1135219 - RNA, 19 nt, Artificial Sequence
  Description of Artificial Sequence: Synthetic oligonucleotide
  Antisense strand to SEQ ID NO: 1135218
ucccacaaagaacuuguau

SEQ ID NO: 1135220 - RNA, 19 nt, Artificial Sequence
  Description of Artificial Sequence: Synthetic oligonucleotide
  Sense strand starting at position 3131 of SEQ ID NO: 916163
uggaauuucuuauaggauu

SEQ ID NO: 1135221 - RNA, 19 nt, Artificial Sequence
  Description of Artificial Sequence: Synthetic oligonucleotide
  Antisense strand to SEQ ID NO: 1135220
aauccuauaagaaauucca

SEQ ID NO: 1135222 - RNA, 19 nt, Artificial Sequence
  Description of Artificial Sequence: Synthetic oligonucleotide
  Sense strand starting at position 3288 of SEQ ID NO: 916163
ccucgaugugaagagcuua

SEQ ID NO: 1135223 - RNA, 19 nt, Artificial Sequence
  Description of Artificial Sequence: Synthetic oligonucleotide
  Antisense strand to SEQ ID NO: 1135222
uaagcucuucacaucgagg

SEQ ID NO: 1135224 - RNA, 19 nt, Artificial Sequence
  Description of Artificial Sequence: Synthetic oligonucleotide
  Sense strand starting at position 3403 of SEQ ID NO: 916163
gacgguguggaguagaaau

SEQ ID NO: 1135225 - RNA, 19 nt, Artificial Sequence
  Description of Artificial Sequence: Synthetic oligonucleotide
  Antisense strand to SEQ ID NO: 1135224
auuucuacuccacaccguc

SEQ ID NO: 1135226 - RNA, 19 nt, Artificial Sequence
  Description of Artificial Sequence: Synthetic oligonucleotide
  Sense strand starting at position 3405 of SEQ ID NO: 916163
cgguguggaguagaaauau

SEQ ID NO: 1135227 - RNA, 19 nt, Artificial Sequence
  Description of Artificial Sequence: Synthetic oligonucleotide
  Antisense strand to SEQ ID NO: 1135226
auauuucuacuccacaccg

SEQ ID NO: 1135228 - RNA, 19 nt, Artificial Sequence
  Description of Artificial Sequence: Synthetic oligonucleotide
  Sense strand starting at position 3550 of SEQ ID NO: 916163
gcauaauagagauggcuug

SEQ ID NO: 1135229 - RNA, 19 nt, Artificial Sequence
  Description of Artificial Sequence: Synthetic oligonucleotide
  Antisense strand to SEQ ID NO: 1135228
caagccaucucuauuaugc

SEQ ID NO: 1135230 - RNA, 19 nt, Artificial Sequence
  Description of Artificial Sequence: Synthetic oligonucleotide
  Sense strand starting at position 3866 of SEQ ID NO: 916163
agaacccgugaaugauaaa

SEQ ID NO: 1135231 - RNA, 19 nt, Artificial Sequence
  Description of Artificial Sequence: Synthetic oligonucleotide
  Antisense strand to SEQ ID NO: 1135230
uuuaucauucacggguucu

SEQ ID NO: 1135232 - RNA, 19 nt, Artificial Sequence
  Description of Artificial Sequence: Synthetic oligonucleotide
  Sense strand starting at position 3907 of SEQ ID NO: 916163
aggacaaauuaguugaucu

SEQ ID NO: 1135233 - RNA, 19 nt, Artificial Sequence
  Description of Artificial Sequence: Synthetic oligonucleotide
  Antisense strand to SEQ ID NO: 1135232
agaucaacuaauuuguccu

SEQ ID NO: 1135234 - RNA, 19 nt, Artificial Sequence
  Description of Artificial Sequence: Synthetic oligonucleotide
  Sense strand starting at position 3908 of SEQ ID NO: 916163
ggacaaauuaguugaucug

SEQ ID NO: 1135235 - RNA, 19 nt, Artificial Sequence
  Description of Artificial Sequence: Synthetic oligonucleotide
  Antisense strand to SEQ ID NO: 1135234
cagaucaacuaauuugucc

SEQ ID NO: 1135236 - RNA, 19 nt, Artificial Sequence
  Description of Artificial Sequence: Synthetic oligonucleotide
  Sense strand starting at position 3911 of SEQ ID NO: 916163
caaauuaguugaucuggaa

SEQ ID NO: 1135237 - RNA, 19 nt, Artificial Sequence
  Description of Artificial Sequence: Synthetic oligonucleotide
  Antisense strand to SEQ ID NO: 1135236
uuccagaucaacuaauuug

SEQ ID NO: 1135238 - RNA, 19 nt, Artificial Sequence
  Description of Artificial Sequence: Synthetic oligonucleotide
  Sense strand starting at position 3923 of SEQ ID NO: 916163
ucuggaaguuccuccacua

SEQ ID NO: 1135239 - RNA, 19 nt, Artificial Sequence
  Description of Artificial Sequence: Synthetic oligonucleotide
  Antisense strand to SEQ ID NO: 1135238
uaguggaggaacuuccaga

SEQ ID NO: 1135240 - RNA, 19 nt, Artificial Sequence
  Description of Artificial Sequence: Synthetic oligonucleotide
  Sense strand starting at position 3981 of SEQ ID NO: 916163
agaaauauauuugggaaac

SEQ ID NO: 1135241 - RNA, 19 nt, Artificial Sequence
  Description of Artificial Sequence: Synthetic oligonucleotide
  Antisense strand to SEQ ID NO: 1135240
guuucccaaauauauuucu

SEQ ID NO: 1135242 - RNA, 19 nt, Artificial Sequence
  Description of Artificial Sequence: Synthetic oligonucleotide
  Sense strand starting at position 4 of SEQ ID NO: 916164
cuguaaagugucugaugau

SEQ ID NO: 1135243 - RNA, 19 nt, Artificial Sequence
  Description of Artificial Sequence: Synthetic oligonucleotide
  Antisense strand to SEQ ID NO: 1135242
aucaucagacacuuuacag

SEQ ID NO: 1135244 - RNA, 19 nt, Artificial Sequence
  Description of Artificial Sequence: Synthetic oligonucleotide
  Sense strand starting at position 33 of SEQ ID NO: 916164
guggaugcucgguggauuu

SEQ ID NO: 1135245 - RNA, 19 nt, Artificial Sequence
  Description of Artificial Sequence: Synthetic oligonucleotide
  Antisense strand to SEQ ID NO: 1135244
aaauccaccgagcauccac

SEQ ID NO: 1135246 - RNA, 19 nt, Artificial Sequence
  Description of Artificial Sequence: Synthetic oligonucleotide
  Sense strand starting at position 67 of SEQ ID NO: 916164
gcauccuaauagguuauga

SEQ ID NO: 1135247 - RNA, 19 nt, Artificial Sequence
  Description of Artificial Sequence: Synthetic oligonucleotide
  Antisense strand to SEQ ID NO: 1135246
ucauaaccuauuaggaugc

SEQ ID NO: 1135248 - RNA, 19 nt, Artificial Sequence
  Description of Artificial Sequence: Synthetic oligonucleotide
  Sense strand starting at position 69 of SEQ ID NO: 916164
auccuaauagguuaugagu

SEQ ID NO: 1135249 - RNA, 19 nt, Artificial Sequence
  Description of Artificial Sequence: Synthetic oligonucleotide
  Antisense strand to SEQ ID NO: 1135248
acucauaaccuauuaggau

SEQ ID NO: 1135250 - RNA, 19 nt, Artificial Sequence
  Description of Artificial Sequence: Synthetic oligonucleotide
  Sense strand starting at position 78 of SEQ ID NO: 916164
gguuaugagucucugaauc

SEQ ID NO: 1135251 - RNA, 19 nt, Artificial Sequence
  Description of Artificial Sequence: Synthetic oligonucleotide
  Antisense strand to SEQ ID NO: 1135250
gauucagagacucauaacc

SEQ ID NO: 1135252 - RNA, 19 nt, Artificial Sequence
  Description of Artificial Sequence: Synthetic oligonucleotide
  Sense strand starting at position 237 of SEQ ID NO: 916164
cauugcaaucucuggagga

SEQ ID NO: 1135253 - RNA, 19 nt, Artificial Sequence
  Description of Artificial Sequence: Synthetic oligonucleotide
  Antisense strand to SEQ ID NO: 1135252
uccuccagagauugcaaug

SEQ ID NO: 1135254 - RNA, 19 nt, Artificial Sequence
  Description of Artificial Sequence: Synthetic oligonucleotide
  Sense strand starting at position 906 of SEQ ID NO: 916164
ugauucuccuguccaggaa

SEQ ID NO: 1135255 - RNA, 19 nt, Artificial Sequence
  Description of Artificial Sequence: Synthetic oligonucleotide
  Antisense strand to SEQ ID NO: 1135254
uuccuggacaggagaauca

SEQ ID NO: 1135256 - RNA, 19 nt, Artificial Sequence
  Description of Artificial Sequence: Synthetic oligonucleotide
  Sense strand starting at position 1083 of SEQ ID NO: 916164
gaagcaucugucugacuga

SEQ ID NO: 1135257 - RNA, 19 nt, Artificial Sequence
  Description of Artificial Sequence: Synthetic oligonucleotide
  Antisense strand to SEQ ID NO: 1135256
ucagucagacagaugcuuc

SEQ ID NO: 1135258 - RNA, 19 nt, Artificial Sequence
  Description of Artificial Sequence: Synthetic oligonucleotide
  Sense strand starting at position 1211 of SEQ ID NO: 916164
gugagcucccaacaagaca

SEQ ID NO: 1135259 - RNA, 19 nt, Artificial Sequence
  Description of Artificial Sequence: Synthetic oligonucleotide
  Antisense strand to SEQ ID NO: 1135258
ugucuuguugggagcucac

SEQ ID NO: 1135260 - RNA, 19 nt, Artificial Sequence
  Description of Artificial Sequence: Synthetic oligonucleotide
  Sense strand starting at position 1263 of SEQ ID NO: 916164
gugugugacgccucuuuca

SEQ ID NO: 1135261 - RNA, 19 nt, Artificial Sequence
  Description of Artificial Sequence: Synthetic oligonucleotide
  Antisense strand to SEQ ID NO: 1135260
ugaaagaggcgucacacac

SEQ ID NO: 1135262 - RNA, 19 nt, Artificial Sequence
  Description of Artificial Sequence: Synthetic oligonucleotide
  Sense strand starting at position 1265 of SEQ ID NO: 916164
gugugacgccucuuucagu

SEQ ID NO: 1135263 - RNA, 19 nt, Artificial Sequence
  Description of Artificial Sequence: Synthetic oligonucleotide
  Antisense strand to SEQ ID NO: 1135262
acugaaagaggcgucacac

SEQ ID NO: 1135264 - RNA, 19 nt, Artificial Sequence
  Description of Artificial Sequence: Synthetic oligonucleotide
  Sense strand starting at position 1460 of SEQ ID NO: 916164
ggacuuauuugcucaagcu

SEQ ID NO: 1135265 - RNA, 19 nt, Artificial Sequence
  Description of Artificial Sequence: Synthetic oligonucleotide
  Antisense strand to SEQ ID NO: 1135264
agcuugagcaaauaagucc

SEQ ID NO: 1135266 - RNA, 19 nt, Artificial Sequence
  Description of Artificial Sequence: Synthetic oligonucleotide
  Sense strand starting at position 1475 of SEQ ID NO: 916164
agcuuauagucauuguaaa

SEQ ID NO: 1135267 - RNA, 19 nt, Artificial Sequence
  Description of Artificial Sequence: Synthetic oligonucleotide
  Antisense strand to SEQ ID NO: 1135266
uuuacaaugacuauaagcu

SEQ ID NO: 1135268 - RNA, 19 nt, Artificial Sequence
  Description of Artificial Sequence: Synthetic oligonucleotide
  Sense strand starting at position 1476 of SEQ ID NO: 916164
gcuuauagucauuguaaag

SEQ ID NO: 1135269 - RNA, 19 nt, Artificial Sequence
  Description of Artificial Sequence: Synthetic oligonucleotide
  Antisense strand to SEQ ID NO: 1135268
cuuuacaaugacuauaagc

SEQ ID NO: 1135270 - RNA, 19 nt, Artificial Sequence
  Description of Artificial Sequence: Synthetic oligonucleotide
  Sense strand starting at position 1738 of SEQ ID NO: 916164
gguguucuguagaaggaga

SEQ ID NO: 1135271 - RNA, 19 nt, Artificial Sequence
  Description of Artificial Sequence: Synthetic oligonucleotide
  Antisense strand to SEQ ID NO: 1135270
ucuccuucuacagaacacc

SEQ ID NO: 1135272 - RNA, 19 nt, Artificial Sequence
  Description of Artificial Sequence: Synthetic oligonucleotide
  Sense strand starting at position 1752 of SEQ ID NO: 916164
ggagaaauugcauguguua

SEQ ID NO: 1135273 - RNA, 19 nt, Artificial Sequence
  Description of Artificial Sequence: Synthetic oligonucleotide
  Antisense strand to SEQ ID NO: 1135272
uaacacaugcaauuucucc

SEQ ID NO: 1135274 - RNA, 19 nt, Artificial Sequence
  Description of Artificial Sequence: Synthetic oligonucleotide
  Sense strand starting at position 1755 of SEQ ID NO: 916164
gaaauugcauguguuacaa

SEQ ID NO: 1135275 - RNA, 19 nt, Artificial Sequence
  Description of Artificial Sequence: Synthetic oligonucleotide
  Antisense strand to SEQ ID NO: 1135274
uuguaacacaugcaauuuc

SEQ ID NO: 1135276 - RNA, 19 nt, Artificial Sequence
  Description of Artificial Sequence: Synthetic oligonucleotide
  Sense strand starting at position 1995 of SEQ ID NO: 916164
ugacucuuucucgaaaccu

SEQ ID NO: 1135277 - RNA, 19 nt, Artificial Sequence
  Description of Artificial Sequence: Synthetic oligonucleotide
  Antisense strand to SEQ ID NO: 1135276
agguuucgagaaagaguca

SEQ ID NO: 1135278 - RNA, 19 nt, Artificial Sequence
  Description of Artificial Sequence: Synthetic oligonucleotide
  Sense strand starting at position 2068 of SEQ ID NO: 916164
uugugagguaaaugaguca

SEQ ID NO: 1135279 - RNA, 19 nt, Artificial Sequence
  Description of Artificial Sequence: Synthetic oligonucleotide
  Antisense strand to SEQ ID NO: 1135278
ugacucauuuaccucacaa

SEQ ID NO: 1135280 - RNA, 19 nt, Artificial Sequence
  Description of Artificial Sequence: Synthetic oligonucleotide
  Sense strand starting at position 2071 of SEQ ID NO: 916164
ugagguaaaugagucaaua

SEQ ID NO: 1135281 - RNA, 19 nt, Artificial Sequence
  Description of Artificial Sequence: Synthetic oligonucleotide
  Antisense strand to SEQ ID NO: 1135280
uauugacucauuuaccuca

SEQ ID NO: 1135282 - RNA, 19 nt, Artificial Sequence
  Description of Artificial Sequence: Synthetic oligonucleotide
  Sense strand starting at position 2090 of SEQ ID NO: 916164
uauagagaguauucuguaa

SEQ ID NO: 1135283 - RNA, 19 nt, Artificial Sequence
  Description of Artificial Sequence: Synthetic oligonucleotide
  Antisense strand to SEQ ID NO: 1135282
uuacagaauacucucuaua

SEQ ID NO: 1135284 - RNA, 19 nt, Artificial Sequence
  Description of Artificial Sequence: Synthetic oligonucleotide
  Sense strand starting at position 2094 of SEQ ID NO: 916164
gagaguauucuguaagugc

SEQ ID NO: 1135285 - RNA, 19 nt, Artificial Sequence
  Description of Artificial Sequence: Synthetic oligonucleotide
  Antisense strand to SEQ ID NO: 1135284
gcacuuacagaauacucuc

SEQ ID NO: 1135286 - RNA, 19 nt, Artificial Sequence
  Description of Artificial Sequence: Synthetic oligonucleotide
  Sense strand starting at position 2108 of SEQ ID NO: 916164
agugcuggccauuauuauu

SEQ ID NO: 1135287 - RNA, 19 nt, Artificial Sequence
  Description of Artificial Sequence: Synthetic oligonucleotide
  Antisense strand to SEQ ID NO: 1135286
aauaauaauggccagcacu

SEQ ID NO: 1135288 - RNA, 19 nt, Artificial Sequence
  Description of Artificial Sequence: Synthetic oligonucleotide
  Sense strand starting at position 2155 of SEQ ID NO: 916164
cagggaaguucuuccuguu

SEQ ID NO: 1135289 - RNA, 19 nt, Artificial Sequence
  Description of Artificial Sequence: Synthetic oligonucleotide
  Antisense strand to SEQ ID NO: 1135288
aacaggaagaacuucccug

SEQ ID NO: 1135290 - RNA, 19 nt, Artificial Sequence
  Description of Artificial Sequence: Synthetic oligonucleotide
  Sense strand starting at position 2448 of SEQ ID NO: 916164
agagaucauuaugcuaagu

SEQ ID NO: 1135291 - RNA, 19 nt, Artificial Sequence
  Description of Artificial Sequence: Synthetic oligonucleotide
  Antisense strand to SEQ ID NO: 1135290
acuuagcauaaugaucucu

SEQ ID NO: 1135292 - RNA, 19 nt, Artificial Sequence
  Description of Artificial Sequence: Synthetic oligonucleotide
  Sense strand starting at position 3057 of SEQ ID NO: 916164
uuaugaaagacuuggguca

SEQ ID NO: 1135293 - RNA, 19 nt, Artificial Sequence
  Description of Artificial Sequence: Synthetic oligonucleotide
  Antisense strand to SEQ ID NO: 1135292
ugacccaagucuuucauaa

SEQ ID NO: 1135294 - RNA, 19 nt, Artificial Sequence
  Description of Artificial Sequence: Synthetic oligonucleotide
  Sense strand starting at position 3058 of SEQ ID NO: 916164
uaugaaagacuugggucau

SEQ ID NO: 1135295 - RNA, 19 nt, Artificial Sequence
  Description of Artificial Sequence: Synthetic oligonucleotide
  Antisense strand to SEQ ID NO: 1135294
augacccaagucuuucaua

SEQ ID NO: 1135296 - RNA, 19 nt, Artificial Sequence
  Description of Artificial Sequence: Synthetic oligonucleotide
  Sense strand starting at position 3064 of SEQ ID NO: 916164
agacuugggucauucugga

SEQ ID NO: 1135297 - RNA, 19 nt, Artificial Sequence
  Description of Artificial Sequence: Synthetic oligonucleotide
  Antisense strand to SEQ ID NO: 1135296
uccagaaugacccaagucu

SEQ ID NO: 1135298 - RNA, 19 nt, Artificial Sequence
  Description of Artificial Sequence: Synthetic oligonucleotide
  Sense strand starting at position 3077 of SEQ ID NO: 916164
ucuggaguucuugauauug

SEQ ID NO: 1135299 - RNA, 19 nt, Artificial Sequence
  Description of Artificial Sequence: Synthetic oligonucleotide
  Antisense strand to SEQ ID NO: 1135298
caauaucaagaacuccaga

SEQ ID NO: 1135300 - RNA, 19 nt, Artificial Sequence
  Description of Artificial Sequence: Synthetic oligonucleotide
  Sense strand starting at position 3083 of SEQ ID NO: 916164
guucuugauauuggaaggu

SEQ ID NO: 1135301 - RNA, 19 nt, Artificial Sequence
  Description of Artificial Sequence: Synthetic oligonucleotide
  Antisense strand to SEQ ID NO: 1135300
accuuccaauaucaagaac

SEQ ID NO: 1135302 - RNA, 19 nt, Artificial Sequence
  Description of Artificial Sequence: Synthetic oligonucleotide
  Sense strand starting at position 3118 of SEQ ID NO: 916164
ccgaaaguuuacuuccaac

SEQ ID NO: 1135303 - RNA, 19 nt, Artificial Sequence
  Description of Artificial Sequence: Synthetic oligonucleotide
  Antisense strand to SEQ ID NO: 1135302
guuggaaguaaacuuucgg

SEQ ID NO: 1135304 - RNA, 19 nt, Artificial Sequence
  Description of Artificial Sequence: Synthetic oligonucleotide
  Sense strand starting at position 3176 of SEQ ID NO: 916164
ggcuuuaucccacacugua

SEQ ID NO: 1135305 - RNA, 19 nt, Artificial Sequence
  Description of Artificial Sequence: Synthetic oligonucleotide
  Antisense strand to SEQ ID NO: 1135304
uacagugugggauaaagcc

SEQ ID NO: 1135306 - RNA, 19 nt, Artificial Sequence
  Description of Artificial Sequence: Synthetic oligonucleotide
  Sense strand starting at position 3230 of SEQ ID NO: 916164
gaggccagcucuccugaau

SEQ ID NO: 1135307 - RNA, 19 nt, Artificial Sequence
  Description of Artificial Sequence: Synthetic oligonucleotide
  Antisense strand to SEQ ID NO: 1135306
auucaggagagcuggccuc

SEQ ID NO: 1135308 - RNA, 19 nt, Artificial Sequence
  Description of Artificial Sequence: Synthetic oligonucleotide
  Sense strand starting at position 3245 of SEQ ID NO: 916164
gaauccuuagcugggaaga

SEQ ID NO: 1135309 - RNA, 19 nt, Artificial Sequence
  Description of Artificial Sequence: Synthetic oligonucleotide
  Antisense strand to SEQ ID NO: 1135308
ucuucccagcuaaggauuc

SEQ ID NO: 1135310 - RNA, 19 nt, Artificial Sequence
  Description of Artificial Sequence: Synthetic oligonucleotide
  Sense strand starting at position 3284 of SEQ ID NO: 916164
guacucaaugaauguauga

SEQ ID NO: 1135311 - RNA, 19 nt, Artificial Sequence
  Description of Artificial Sequence: Synthetic oligonucleotide
  Antisense strand to SEQ ID NO: 1135310
ucauacauucauugaguac

SEQ ID NO: 1135312 - RNA, 19 nt, Artificial Sequence
  Description of Artificial Sequence: Synthetic oligonucleotide
  Sense strand starting at position 3691 of SEQ ID NO: 916164
ggacguaauguguacagua

SEQ ID NO: 1135313 - RNA, 19 nt, Artificial Sequence
  Description of Artificial Sequence: Synthetic oligonucleotide
  Antisense strand to SEQ ID NO: 1135312
uacuguacacauuacgucc

SEQ ID NO: 1135314 - RNA, 19 nt, Artificial Sequence
  Description of Artificial Sequence: Synthetic oligonucleotide
  Sense strand starting at position 3722 of SEQ ID NO: 916164
gcuaucuaauggguaugga

SEQ ID NO: 1135315 - RNA, 19 nt, Artificial Sequence
  Description of Artificial Sequence: Synthetic oligonucleotide
  Antisense strand to SEQ ID NO: 1135314
uccauacccauuagauagc

SEQ ID NO: 1135316 - RNA, 19 nt, Artificial Sequence
  Description of Artificial Sequence: Synthetic oligonucleotide
  Sense strand starting at position 3798 of SEQ ID NO: 916164
gguuguuauuauguaggau

SEQ ID NO: 1135317 - RNA, 19 nt, Artificial Sequence
  Description of Artificial Sequence: Synthetic oligonucleotide
  Antisense strand to SEQ ID NO: 1135316
auccuacauaauaacaacc

SEQ ID NO: 1135318 - RNA, 19 nt, Artificial Sequence
  Description of Artificial Sequence: Synthetic oligonucleotide
  Sense strand starting at position 3799 of SEQ ID NO: 916164
guuguuauuauguaggaug

SEQ ID NO: 1135319 - RNA, 19 nt, Artificial Sequence
  Description of Artificial Sequence: Synthetic oligonucleotide
  Antisense strand to SEQ ID NO: 1135318
cauccuacauaauaacaac

SEQ ID NO: 1135320 - RNA, 19 nt, Artificial Sequence
  Description of Artificial Sequence: Synthetic oligonucleotide
  Sense strand starting at position 3804 of SEQ ID NO: 916164
uauuauguaggaugagauu

SEQ ID NO: 1135321 - RNA, 19 nt, Artificial Sequence
  Description of Artificial Sequence: Synthetic oligonucleotide
  Antisense strand to SEQ ID NO: 1135320
aaucucauccuacauaaua

SEQ ID NO: 1135322 - RNA, 19 nt, Artificial Sequence
  Description of Artificial Sequence: Synthetic oligonucleotide
  Sense strand starting at position 98 of SEQ ID NO: 916165
gcauacaauuucgcaucua

SEQ ID NO: 1135323 - RNA, 19 nt, Artificial Sequence
  Description of Artificial Sequence: Synthetic oligonucleotide
  Antisense strand to SEQ ID NO: 1135322
uagaugcgaaauuguaugc

SEQ ID NO: 1135324 - RNA, 19 nt, Artificial Sequence
  Description of Artificial Sequence: Synthetic oligonucleotide
  Sense strand starting at position 244 of SEQ ID NO: 916165
ccaaguugcuacucacaga

SEQ ID NO: 1135325 - RNA, 19 nt, Artificial Sequence
  Description of Artificial Sequence: Synthetic oligonucleotide
  Antisense strand to SEQ ID NO: 1135324
ucugugaguagcaacuugg

SEQ ID NO: 1135326 - RNA, 19 nt, Artificial Sequence
  Description of Artificial Sequence: Synthetic oligonucleotide
  Sense strand starting at position 285 of SEQ ID NO: 916165
cuugguuuguuauuucuau

SEQ ID NO: 1135327 - RNA, 19 nt, Artificial Sequence
  Description of Artificial Sequence: Synthetic oligonucleotide
  Antisense strand to SEQ ID NO: 1135326
auagaaauaacaaaccaag

SEQ ID NO: 1135328 - RNA, 19 nt, Artificial Sequence
  Description of Artificial Sequence: Synthetic oligonucleotide
  Sense strand starting at position 299 of SEQ ID NO: 916165
ucuauuugccugugccuaa

SEQ ID NO: 1135329 - RNA, 19 nt, Artificial Sequence
  Description of Artificial Sequence: Synthetic oligonucleotide
  Antisense strand to SEQ ID NO: 1135328
uuaggcacaggcaaauaga

SEQ ID NO: 1135330 - RNA, 19 nt, Artificial Sequence
  Description of Artificial Sequence: Synthetic oligonucleotide
  Sense strand starting at position 300 of SEQ ID NO: 916165
cuauuugccugugccuaaa

SEQ ID NO: 1135331 - RNA, 19 nt, Artificial Sequence
  Description of Artificial Sequence: Synthetic oligonucleotide
  Antisense strand to SEQ ID NO: 1135330
uuuaggcacaggcaaauag

SEQ ID NO: 1135332 - RNA, 19 nt, Artificial Sequence
  Description of Artificial Sequence: Synthetic oligonucleotide
  Sense strand starting at position 329 of SEQ ID NO: 916165
uaguuuagacauuguuaug

SEQ ID NO: 1135333 - RNA, 19 nt, Artificial Sequence
  Description of Artificial Sequence: Synthetic oligonucleotide
  Antisense strand to SEQ ID NO: 1135332
cauaacaaugucuaaacua

SEQ ID NO: 1135334 - RNA, 19 nt, Artificial Sequence
  Description of Artificial Sequence: Synthetic oligonucleotide
  Sense strand starting at position 338 of SEQ ID NO: 916165
cauuguuauggccaguuua

SEQ ID NO: 1135335 - RNA, 19 nt, Artificial Sequence
  Description of Artificial Sequence: Synthetic oligonucleotide
  Antisense strand to SEQ ID NO: 1135334
uaaacuggccauaacaaug

SEQ ID NO: 1135336 - RNA, 19 nt, Artificial Sequence
  Description of Artificial Sequence: Synthetic oligonucleotide
  Sense strand starting at position 419 of SEQ ID NO: 916165
gggaauggcucagugcaaa

SEQ ID NO: 1135337 - RNA, 19 nt, Artificial Sequence
  Description of Artificial Sequence: Synthetic oligonucleotide
  Antisense strand to SEQ ID NO: 1135336
uuugcacugagccauuccc

SEQ ID NO: 1135338 - RNA, 19 nt, Artificial Sequence
  Description of Artificial Sequence: Synthetic oligonucleotide
  Sense strand starting at position 439 of SEQ ID NO: 916165
cuagcaacaguaugguaaa

SEQ ID NO: 1135339 - RNA, 19 nt, Artificial Sequence
  Description of Artificial Sequence: Synthetic oligonucleotide
  Antisense strand to SEQ ID NO: 1135338
uuuaccauacuguugcuag

SEQ ID NO: 1135340 - RNA, 19 nt, Artificial Sequence
  Description of Artificial Sequence: Synthetic oligonucleotide
  Sense strand starting at position 513 of SEQ ID NO: 916165
aggucuacucuugggugaa

SEQ ID NO: 1135341 - RNA, 19 nt, Artificial Sequence
  Description of Artificial Sequence: Synthetic oligonucleotide
  Antisense strand to SEQ ID NO: 1135340
uucacccaagaguagaccu

SEQ ID NO: 1135342 - RNA, 19 nt, Artificial Sequence
  Description of Artificial Sequence: Synthetic oligonucleotide
  Sense strand starting at position 515 of SEQ ID NO: 916165
gucuacucuugggugaaug

SEQ ID NO: 1135343 - RNA, 19 nt, Artificial Sequence
  Description of Artificial Sequence: Synthetic oligonucleotide
  Antisense strand to SEQ ID NO: 1135342
cauucacccaagaguagac

SEQ ID NO: 1135344 - RNA, 19 nt, Artificial Sequence
  Description of Artificial Sequence: Synthetic oligonucleotide
  Sense strand starting at position 594 of SEQ ID NO: 916165
agcauuuaugccugcaaag

SEQ ID NO: 1135345 - RNA, 19 nt, Artificial Sequence
  Description of Artificial Sequence: Synthetic oligonucleotide
  Antisense strand to SEQ ID NO: 1135344
cuuugcaggcauaaaugcu

SEQ ID NO: 1135346 - RNA, 19 nt, Artificial Sequence
  Description of Artificial Sequence: Synthetic oligonucleotide
  Sense strand starting at position 626 of SEQ ID NO: 916165
ggaacugaggcuuagcauu

SEQ ID NO: 1135347 - RNA, 19 nt, Artificial Sequence
  Description of Artificial Sequence: Synthetic oligonucleotide
  Antisense strand to SEQ ID NO: 1135346
aaugcuaagccucaguucc

SEQ ID NO: 1135348 - RNA, 19 nt, Artificial Sequence
  Description of Artificial Sequence: Synthetic oligonucleotide
  Sense strand starting at position 634 of SEQ ID NO: 916165
ggcuuagcauuccuacaga

SEQ ID NO: 1135349 - RNA, 19 nt, Artificial Sequence
  Description of Artificial Sequence: Synthetic oligonucleotide
  Antisense strand to SEQ ID NO: 1135348
ucuguaggaaugcuaagcc

SEQ ID NO: 1135350 - RNA, 19 nt, Artificial Sequence
  Description of Artificial Sequence: Synthetic oligonucleotide
  Sense strand starting at position 637 of SEQ ID NO: 916165
uuagcauuccuacagagca

SEQ ID NO: 1135351 - RNA, 19 nt, Artificial Sequence
  Description of Artificial Sequence: Synthetic oligonucleotide
  Antisense strand to SEQ ID NO: 1135350
ugcucuguaggaaugcuaa

SEQ ID NO: 1135352 - RNA, 19 nt, Artificial Sequence
  Description of Artificial Sequence: Synthetic oligonucleotide
  Sense strand starting at position 685 of SEQ ID NO: 916165
auaaacuuugauugcugua

SEQ ID NO: 1135353 - RNA, 19 nt, Artificial Sequence
  Description of Artificial Sequence: Synthetic oligonucleotide
  Antisense strand to SEQ ID NO: 1135352
uacagcaaucaaaguuuau

SEQ ID NO: 1135354 - RNA, 19 nt, Artificial Sequence
  Description of Artificial Sequence: Synthetic oligonucleotide
  Sense strand starting at position 697 of SEQ ID NO: 916165
ugcuguagccagcauauuu

SEQ ID NO: 1135355 - RNA, 19 nt, Artificial Sequence
  Description of Artificial Sequence: Synthetic oligonucleotide
  Antisense strand to SEQ ID NO: 1135354
aaauaugcuggcuacagca

SEQ ID NO: 1135356 - RNA, 19 nt, Artificial Sequence
  Description of Artificial Sequence: Synthetic oligonucleotide
  Sense strand starting at position 877 of SEQ ID NO: 916165
auacaaauggcauguugga

SEQ ID NO: 1135357 - RNA, 19 nt, Artificial Sequence
  Description of Artificial Sequence: Synthetic oligonucleotide
  Antisense strand to SEQ ID NO: 1135356
uccaacaugccauuuguau

SEQ ID NO: 1135358 - RNA, 19 nt, Artificial Sequence
  Description of Artificial Sequence: Synthetic oligonucleotide
  Sense strand starting at position 937 of SEQ ID NO: 916165
aaacuaagguguuuauguu

SEQ ID NO: 1135359 - RNA, 19 nt, Artificial Sequence
  Description of Artificial Sequence: Synthetic oligonucleotide
  Antisense strand to SEQ ID NO: 1135358
aacauaaacaccuuaguuu

SEQ ID NO: 1135360 - RNA, 19 nt, Artificial Sequence
  Description of Artificial Sequence: Synthetic oligonucleotide
  Sense strand starting at position 938 of SEQ ID NO: 916165
aacuaagguguuuauguuu

SEQ ID NO: 1135361 - RNA, 19 nt, Artificial Sequence
  Description of Artificial Sequence: Synthetic oligonucleotide
  Antisense strand to SEQ ID NO: 1135360
aaacauaaacaccuuaguu

SEQ ID NO: 1135362 - RNA, 19 nt, Artificial Sequence
  Description of Artificial Sequence: Synthetic oligonucleotide
  Sense strand starting at position 1136 of SEQ ID NO: 916165
cuuguuugucaauaugaaa

SEQ ID NO: 1135363 - RNA, 19 nt, Artificial Sequence
  Description of Artificial Sequence: Synthetic oligonucleotide
  Antisense strand to SEQ ID NO: 1135362
uuucauauugacaaacaag

SEQ ID NO: 1135364 - RNA, 19 nt, Artificial Sequence
  Description of Artificial Sequence: Synthetic oligonucleotide
  Sense strand starting at position 1353 of SEQ ID NO: 916165
uugggcaaaucugucagaa

SEQ ID NO: 1135365 - RNA, 19 nt, Artificial Sequence
  Description of Artificial Sequence: Synthetic oligonucleotide
  Antisense strand to SEQ ID NO: 1135364
uucugacagauuugcccaa

SEQ ID NO: 1135366 - RNA, 19 nt, Artificial Sequence
  Description of Artificial Sequence: Synthetic oligonucleotide
  Sense strand starting at position 1414 of SEQ ID NO: 916165
cugagaggaauucggcuuu

SEQ ID NO: 1135367 - RNA, 19 nt, Artificial Sequence
  Description of Artificial Sequence: Synthetic oligonucleotide
  Antisense strand to SEQ ID NO: 1135366
aaagccgaauuccucucag

SEQ ID NO: 1135368 - RNA, 19 nt, Artificial Sequence
  Description of Artificial Sequence: Synthetic oligonucleotide
  Sense strand starting at position 1459 of SEQ ID NO: 916165
acccgaucgcuagaccaaa

SEQ ID NO: 1135369 - RNA, 19 nt, Artificial Sequence
  Description of Artificial Sequence: Synthetic oligonucleotide
  Antisense strand to SEQ ID NO: 1135368
uuuggucuagcgaucgggu

SEQ ID NO: 1135370 - RNA, 19 nt, Artificial Sequence
  Description of Artificial Sequence: Synthetic oligonucleotide
  Sense strand starting at position 2011 of SEQ ID NO: 916165
gcgccuugagaccgaauuu

SEQ ID NO: 1135371 - RNA, 19 nt, Artificial Sequence
  Description of Artificial Sequence: Synthetic oligonucleotide
  Antisense strand to SEQ ID NO: 1135370
aaauucggucucaaggcgc

SEQ ID NO: 1135372 - RNA, 19 nt, Artificial Sequence
  Description of Artificial Sequence: Synthetic oligonucleotide
  Sense strand starting at position 2020 of SEQ ID NO: 916165
gaccgaauuugagaaucca

SEQ ID NO: 1135373 - RNA, 19 nt, Artificial Sequence
  Description of Artificial Sequence: Synthetic oligonucleotide
  Antisense strand to SEQ ID NO: 1135372
uggauucucaaauucgguc

SEQ ID NO: 1135374 - RNA, 19 nt, Artificial Sequence
  Description of Artificial Sequence: Synthetic oligonucleotide
  Sense strand starting at position 2530 of SEQ ID NO: 916165
gcuggugugacacaugaac

SEQ ID NO: 1135375 - RNA, 19 nt, Artificial Sequence
  Description of Artificial Sequence: Synthetic oligonucleotide
  Antisense strand to SEQ ID NO: 1135374
guucaugugucacaccagc

SEQ ID NO: 1135376 - RNA, 19 nt, Artificial Sequence
  Description of Artificial Sequence: Synthetic oligonucleotide
  Sense strand starting at position 2532 of SEQ ID NO: 916165
uggugugacacaugaacca

SEQ ID NO: 1135377 - RNA, 19 nt, Artificial Sequence
  Description of Artificial Sequence: Synthetic oligonucleotide
  Antisense strand to SEQ ID NO: 1135376
ugguucaugugucacacca

SEQ ID NO: 1135378 - RNA, 19 nt, Artificial Sequence
  Description of Artificial Sequence: Synthetic oligonucleotide
  Sense strand starting at position 2583 of SEQ ID NO: 916165
ccaguuagcccuggagaca

SEQ ID NO: 1135379 - RNA, 19 nt, Artificial Sequence
  Description of Artificial Sequence: Synthetic oligonucleotide
  Antisense strand to SEQ ID NO: 1135378
ugucuccagggcuaacugg

SEQ ID NO: 1135380 - RNA, 19 nt, Artificial Sequence
  Description of Artificial Sequence: Synthetic oligonucleotide
  Sense strand starting at position 2584 of SEQ ID NO: 916165
caguuagcccuggagacaa

SEQ ID NO: 1135381 - RNA, 19 nt, Artificial Sequence
  Description of Artificial Sequence: Synthetic oligonucleotide
  Antisense strand to SEQ ID NO: 1135380
uugucuccagggcuaacug

SEQ ID NO: 1135382 - RNA, 19 nt, Artificial Sequence
  Description of Artificial Sequence: Synthetic oligonucleotide
  Sense strand starting at position 2661 of SEQ ID NO: 916165
guggcaaauccggaaaugu

SEQ ID NO: 1135383 - RNA, 19 nt, Artificial Sequence
  Description of Artificial Sequence: Synthetic oligonucleotide
  Antisense strand to SEQ ID NO: 1135382
acauuuccggauuugccac

SEQ ID NO: 1135384 - RNA, 19 nt, Artificial Sequence
  Description of Artificial Sequence: Synthetic oligonucleotide
  Sense strand starting at position 2763 of SEQ ID NO: 916165
acuagcauucugggagaca

SEQ ID NO: 1135385 - RNA, 19 nt, Artificial Sequence
  Description of Artificial Sequence: Synthetic oligonucleotide
  Antisense strand to SEQ ID NO: 1135384
ugucucccagaaugcuagu

SEQ ID NO: 1135386 - RNA, 19 nt, Artificial Sequence
  Description of Artificial Sequence: Synthetic oligonucleotide
  Sense strand starting at position 2858 of SEQ ID NO: 916165
auaugaauguugguagaga

SEQ ID NO: 1135387 - RNA, 19 nt, Artificial Sequence
  Description of Artificial Sequence: Synthetic oligonucleotide
  Antisense strand to SEQ ID NO: 1135386
ucucuaccaacauucauau

SEQ ID NO: 1135388 - RNA, 19 nt, Artificial Sequence
  Description of Artificial Sequence: Synthetic oligonucleotide
  Sense strand starting at position 2866 of SEQ ID NO: 916165
guugguagagauggacuuu

SEQ ID NO: 1135389 - RNA, 19 nt, Artificial Sequence
  Description of Artificial Sequence: Synthetic oligonucleotide
  Antisense strand to SEQ ID NO: 1135388
aaaguccaucucuaccaac

SEQ ID NO: 1135390 - RNA, 19 nt, Artificial Sequence
  Description of Artificial Sequence: Synthetic oligonucleotide
  Sense strand starting at position 2894 of SEQ ID NO: 916165
agacuuuauuguuuagaag

SEQ ID NO: 1135391 - RNA, 19 nt, Artificial Sequence
  Description of Artificial Sequence: Synthetic oligonucleotide
  Antisense strand to SEQ ID NO: 1135390
cuucuaaacaauaaagucu

SEQ ID NO: 1135392 - RNA, 19 nt, Artificial Sequence
  Description of Artificial Sequence: Synthetic oligonucleotide
  Sense strand starting at position 2895 of SEQ ID NO: 916165
gacuuuauuguuuagaagu

SEQ ID NO: 1135393 - RNA, 19 nt, Artificial Sequence
  Description of Artificial Sequence: Synthetic oligonucleotide
  Antisense strand to SEQ ID NO: 1135392
acuucuaaacaauaaaguc

SEQ ID NO: 1135394 - RNA, 19 nt, Artificial Sequence
  Description of Artificial Sequence: Synthetic oligonucleotide
  Sense strand starting at position 3039 of SEQ ID NO: 916165
acauucuucugagcucaag

SEQ ID NO: 1135395 - RNA, 19 nt, Artificial Sequence
  Description of Artificial Sequence: Synthetic oligonucleotide
  Antisense strand to SEQ ID NO: 1135394
cuugagcucagaagaaugu

SEQ ID NO: 1135396 - RNA, 19 nt, Artificial Sequence
  Description of Artificial Sequence: Synthetic oligonucleotide
  Sense strand starting at position 3207 of SEQ ID NO: 916165
uugaguaguauuggucaag

SEQ ID NO: 1135397 - RNA, 19 nt, Artificial Sequence
  Description of Artificial Sequence: Synthetic oligonucleotide
  Antisense strand to SEQ ID NO: 1135396
cuugaccaauacuacucaa

SEQ ID NO: 1135398 - RNA, 19 nt, Artificial Sequence
  Description of Artificial Sequence: Synthetic oligonucleotide
  Sense strand starting at position 3210 of SEQ ID NO: 916165
aguaguauuggucaaguau

SEQ ID NO: 1135399 - RNA, 19 nt, Artificial Sequence
  Description of Artificial Sequence: Synthetic oligonucleotide
  Antisense strand to SEQ ID NO: 1135398
auacuugaccaauacuacu

SEQ ID NO: 1135400 - RNA, 19 nt, Artificial Sequence
  Description of Artificial Sequence: Synthetic oligonucleotide
  Sense strand starting at position 3764 of SEQ ID NO: 916165
uacucuagauugcugguaa

SEQ ID NO: 1135401 - RNA, 19 nt, Artificial Sequence
  Description of Artificial Sequence: Synthetic oligonucleotide
  Antisense strand to SEQ ID NO: 1135400
uuaccagcaaucuagagua

SEQ ID NO: 1135402 - RNA, 19 nt, Artificial Sequence
  Description of Artificial Sequence: Synthetic oligonucleotide
  Sense strand starting at position 89 of SEQ ID NO: 916166
acagaagcuucuuuaacag

SEQ ID NO: 1135403 - RNA, 19 nt, Artificial Sequence
  Description of Artificial Sequence: Synthetic oligonucleotide
  Antisense strand to SEQ ID NO: 1135402
cuguuaaagaagcuucugu

SEQ ID NO: 1135404 - RNA, 19 nt, Artificial Sequence
  Description of Artificial Sequence: Synthetic oligonucleotide
  Sense strand starting at position 111 of SEQ ID NO: 916166
auagguaugcaccaacauu

SEQ ID NO: 1135405 - RNA, 19 nt, Artificial Sequence
  Description of Artificial Sequence: Synthetic oligonucleotide
  Antisense strand to SEQ ID NO: 1135404
aauguuggugcauaccuau

SEQ ID NO: 1135406 - RNA, 19 nt, Artificial Sequence
  Description of Artificial Sequence: Synthetic oligonucleotide
  Sense strand starting at position 141 of SEQ ID NO: 916166
ucauauaaucucgauguuu

SEQ ID NO: 1135407 - RNA, 19 nt, Artificial Sequence
  Description of Artificial Sequence: Synthetic oligonucleotide
  Antisense strand to SEQ ID NO: 1135406
aaacaucgagauuauauga

SEQ ID NO: 1135408 - RNA, 19 nt, Artificial Sequence
  Description of Artificial Sequence: Synthetic oligonucleotide
  Sense strand starting at position 150 of SEQ ID NO: 916166
cucgauguuuaacuuuaaa

SEQ ID NO: 1135409 - RNA, 19 nt, Artificial Sequence
  Description of Artificial Sequence: Synthetic oligonucleotide
  Antisense strand to SEQ ID NO: 1135408
uuuaaaguuaaacaucgag

SEQ ID NO: 1135410 - RNA, 19 nt, Artificial Sequence
  Description of Artificial Sequence: Synthetic oligonucleotide
  Sense strand starting at position 295 of SEQ ID NO: 916166
cuugcagaacuaugacaga

SEQ ID NO: 1135411 - RNA, 19 nt, Artificial Sequence
  Description of Artificial Sequence: Synthetic oligonucleotide
  Antisense strand to SEQ ID NO: 1135410
ucugucauaguucugcaag

SEQ ID NO: 1135412 - RNA, 19 nt, Artificial Sequence
  Description of Artificial Sequence: Synthetic oligonucleotide
  Sense strand starting at position 334 of SEQ ID NO: 916166
guaaucaguuccuccaggu

SEQ ID NO: 1135413 - RNA, 19 nt, Artificial Sequence
  Description of Artificial Sequence: Synthetic oligonucleotide
  Antisense strand to SEQ ID NO: 1135412
accuggaggaacugauuac

SEQ ID NO: 1135414 - RNA, 19 nt, Artificial Sequence
  Description of Artificial Sequence: Synthetic oligonucleotide
  Sense strand starting at position 368 of SEQ ID NO: 916166
ucuccuaaagccugaaagu

SEQ ID NO: 1135415 - RNA, 19 nt, Artificial Sequence
  Description of Artificial Sequence: Synthetic oligonucleotide
  Antisense strand to SEQ ID NO: 1135414
acuuucaggcuuuaggaga

SEQ ID NO: 1135416 - RNA, 19 nt, Artificial Sequence
  Description of Artificial Sequence: Synthetic oligonucleotide
  Sense strand starting at position 369 of SEQ ID NO: 916166
cuccuaaagccugaaagua

SEQ ID NO: 1135417 - RNA, 19 nt, Artificial Sequence
  Description of Artificial Sequence: Synthetic oligonucleotide
  Antisense strand to SEQ ID NO: 1135416
uacuuucaggcuuuaggag

SEQ ID NO: 1135418 - RNA, 19 nt, Artificial Sequence
  Description of Artificial Sequence: Synthetic oligonucleotide
  Sense strand starting at position 385 of SEQ ID NO: 916166
guaaaucaugcacagaugu

SEQ ID NO: 1135419 - RNA, 19 nt, Artificial Sequence
  Description of Artificial Sequence: Synthetic oligonucleotide
  Antisense strand to SEQ ID NO: 1135418
acaucugugcaugauuuac

SEQ ID NO: 1135420 - RNA, 19 nt, Artificial Sequence
  Description of Artificial Sequence: Synthetic oligonucleotide
  Sense strand starting at position 402 of SEQ ID NO: 916166
gucuuuacugcugaacuaa

SEQ ID NO: 1135421 - RNA, 19 nt, Artificial Sequence
  Description of Artificial Sequence: Synthetic oligonucleotide
  Antisense strand to SEQ ID NO: 1135420
uuaguucagcaguaaagac

SEQ ID NO: 1135422 - RNA, 19 nt, Artificial Sequence
  Description of Artificial Sequence: Synthetic oligonucleotide
  Sense strand starting at position 441 of SEQ ID NO: 916166
aggacaugcccuuguuacu

SEQ ID NO: 1135423 - RNA, 19 nt, Artificial Sequence
  Description of Artificial Sequence: Synthetic oligonucleotide
  Antisense strand to SEQ ID NO: 1135422
aguaacaagggcauguccu

SEQ ID NO: 1135424 - RNA, 19 nt, Artificial Sequence
  Description of Artificial Sequence: Synthetic oligonucleotide
  Sense strand starting at position 523 of SEQ ID NO: 916166
caacacagguugucagaua

SEQ ID NO: 1135425 - RNA, 19 nt, Artificial Sequence
  Description of Artificial Sequence: Synthetic oligonucleotide
  Antisense strand to SEQ ID NO: 1135424
uaucugacaaccuguguug

SEQ ID NO: 1135426 - RNA, 19 nt, Artificial Sequence
  Description of Artificial Sequence: Synthetic oligonucleotide
  Sense strand starting at position 678 of SEQ ID NO: 916166
ggcugaauccuacaaauuc

SEQ ID NO: 1135427 - RNA, 19 nt, Artificial Sequence
  Description of Artificial Sequence: Synthetic oligonucleotide
  Antisense strand to SEQ ID NO: 1135426
gaauuuguaggauucagcc

SEQ ID NO: 1135428 - RNA, 19 nt, Artificial Sequence
  Description of Artificial Sequence: Synthetic oligonucleotide
  Sense strand starting at position 726 of SEQ ID NO: 916166
auccuacucccucgguaaa

SEQ ID NO: 1135429 - RNA, 19 nt, Artificial Sequence
  Description of Artificial Sequence: Synthetic oligonucleotide
  Antisense strand to SEQ ID NO: 1135428
uuuaccgagggaguaggau

SEQ ID NO: 1135430 - RNA, 19 nt, Artificial Sequence
  Description of Artificial Sequence: Synthetic oligonucleotide
  Sense strand starting at position 728 of SEQ ID NO: 916166
ccuacucccucgguaaaga

SEQ ID NO: 1135431 - RNA, 19 nt, Artificial Sequence
  Description of Artificial Sequence: Synthetic oligonucleotide
  Antisense strand to SEQ ID NO: 1135430
ucuuuaccgagggaguagg

SEQ ID NO: 1135432 - RNA, 19 nt, Artificial Sequence
  Description of Artificial Sequence: Synthetic oligonucleotide
  Sense strand starting at position 729 of SEQ ID NO: 916166
cuacucccucgguaaagaa

SEQ ID NO: 1135433 - RNA, 19 nt, Artificial Sequence
  Description of Artificial Sequence: Synthetic oligonucleotide
  Antisense strand to SEQ ID NO: 1135432
uucuuuaccgagggaguag

SEQ ID NO: 1135434 - RNA, 19 nt, Artificial Sequence
  Description of Artificial Sequence: Synthetic oligonucleotide
  Sense strand starting at position 906 of SEQ ID NO: 916166
aguaacugauucuuaaaug

SEQ ID NO: 1135435 - RNA, 19 nt, Artificial Sequence
  Description of Artificial Sequence: Synthetic oligonucleotide
  Antisense strand to SEQ ID NO: 1135434
cauuuaagaaucaguuacu

SEQ ID NO: 1135436 - RNA, 19 nt, Artificial Sequence
  Description of Artificial Sequence: Synthetic oligonucleotide
  Sense strand starting at position 995 of SEQ ID NO: 916166
ggcagaaacuaaguguaua

SEQ ID NO: 1135437 - RNA, 19 nt, Artificial Sequence
  Description of Artificial Sequence: Synthetic oligonucleotide
  Antisense strand to SEQ ID NO: 1135436
uauacacuuaguuucugcc

SEQ ID NO: 1135438 - RNA, 19 nt, Artificial Sequence
  Description of Artificial Sequence: Synthetic oligonucleotide
  Sense strand starting at position 1036 of SEQ ID NO: 916166
cggauuuauucuuggauag

SEQ ID NO: 1135439 - RNA, 19 nt, Artificial Sequence
  Description of Artificial Sequence: Synthetic oligonucleotide
  Antisense strand to SEQ ID NO: 1135438
cuauccaagaauaaauccg

SEQ ID NO: 1135440 - RNA, 19 nt, Artificial Sequence
  Description of Artificial Sequence: Synthetic oligonucleotide
  Sense strand starting at position 1108 of SEQ ID NO: 916166
aguuuccaacagugaguaa

SEQ ID NO: 1135441 - RNA, 19 nt, Artificial Sequence
  Description of Artificial Sequence: Synthetic oligonucleotide
  Antisense strand to SEQ ID NO: 1135440
uuacucacuguuggaaacu

SEQ ID NO: 1135442 - RNA, 19 nt, Artificial Sequence
  Description of Artificial Sequence: Synthetic oligonucleotide
  Sense strand starting at position 1248 of SEQ ID NO: 916166
gugcgcaucgugucaaauu

SEQ ID NO: 1135443 - RNA, 19 nt, Artificial Sequence
  Description of Artificial Sequence: Synthetic oligonucleotide
  Antisense strand to SEQ ID NO: 1135442
aauuugacacgaugcgcac

SEQ ID NO: 1135444 - RNA, 19 nt, Artificial Sequence
  Description of Artificial Sequence: Synthetic oligonucleotide
  Sense strand starting at position 2392 of SEQ ID NO: 916166
ugguauugagccugagcua

SEQ ID NO: 1135445 - RNA, 19 nt, Artificial Sequence
  Description of Artificial Sequence: Synthetic oligonucleotide
  Antisense strand to SEQ ID NO: 1135444
uagcucaggcucaauacca

SEQ ID NO: 1135446 - RNA, 19 nt, Artificial Sequence
  Description of Artificial Sequence: Synthetic oligonucleotide
  Sense strand starting at position 2393 of SEQ ID NO: 916166
gguauugagccugagcuau

SEQ ID NO: 1135447 - RNA, 19 nt, Artificial Sequence
  Description of Artificial Sequence: Synthetic oligonucleotide
  Antisense strand to SEQ ID NO: 1135446
auagcucaggcucaauacc

SEQ ID NO: 1135448 - RNA, 19 nt, Artificial Sequence
  Description of Artificial Sequence: Synthetic oligonucleotide
  Sense strand starting at position 2399 of SEQ ID NO: 916166
gagccugagcuauaugcua

SEQ ID NO: 1135449 - RNA, 19 nt, Artificial Sequence
  Description of Artificial Sequence: Synthetic oligonucleotide
  Antisense strand to SEQ ID NO: 1135448
uagcauauagcucaggcuc

SEQ ID NO: 1135450 - RNA, 19 nt, Artificial Sequence
  Description of Artificial Sequence: Synthetic oligonucleotide
  Sense strand starting at position 2601 of SEQ ID NO: 916166
guaggaagaagcuggaauu

SEQ ID NO: 1135451 - RNA, 19 nt, Artificial Sequence
  Description of Artificial Sequence: Synthetic oligonucleotide
  Antisense strand to SEQ ID NO: 1135450
aauuccagcuucuuccuac

SEQ ID NO: 1135452 - RNA, 19 nt, Artificial Sequence
  Description of Artificial Sequence: Synthetic oligonucleotide
  Sense strand starting at position 2627 of SEQ ID NO: 916166
gcaagagaaguuugagguu

SEQ ID NO: 1135453 - RNA, 19 nt, Artificial Sequence
  Description of Artificial Sequence: Synthetic oligonucleotide
  Antisense strand to SEQ ID NO: 1135452
aaccucaaacuucucuugc

SEQ ID NO: 1135454 - RNA, 19 nt, Artificial Sequence
  Description of Artificial Sequence: Synthetic oligonucleotide
  Sense strand starting at position 2633 of SEQ ID NO: 916166
gaaguuugagguugucuuu

SEQ ID NO: 1135455 - RNA, 19 nt, Artificial Sequence
  Description of Artificial Sequence: Synthetic oligonucleotide
  Antisense strand to SEQ ID NO: 1135454
aaagacaaccucaaacuuc

SEQ ID NO: 1135456 - RNA, 19 nt, Artificial Sequence
  Description of Artificial Sequence: Synthetic oligonucleotide
  Sense strand starting at position 2714 of SEQ ID NO: 916166
uugaccuccuaaggaauuu

SEQ ID NO: 1135457 - RNA, 19 nt, Artificial Sequence
  Description of Artificial Sequence: Synthetic oligonucleotide
  Antisense strand to SEQ ID NO: 1135456
aaauuccuuaggaggucaa

SEQ ID NO: 1135458 - RNA, 19 nt, Artificial Sequence
  Description of Artificial Sequence: Synthetic oligonucleotide
  Sense strand starting at position 2943 of SEQ ID NO: 916166
acuuaacacccugguagaa

SEQ ID NO: 1135459 - RNA, 19 nt, Artificial Sequence
  Description of Artificial Sequence: Synthetic oligonucleotide
  Antisense strand to SEQ ID NO: 1135458
uucuaccaggguguuaagu

SEQ ID NO: 1135460 - RNA, 19 nt, Artificial Sequence
  Description of Artificial Sequence: Synthetic oligonucleotide
  Sense strand starting at position 3067 of SEQ ID NO: 916166
gaaugaagccuaugaagca

SEQ ID NO: 1135461 - RNA, 19 nt, Artificial Sequence
  Description of Artificial Sequence: Synthetic oligonucleotide
  Antisense strand to SEQ ID NO: 1135460
ugcuucauaggcuucauuc

SEQ ID NO: 1135462 - RNA, 19 nt, Artificial Sequence
  Description of Artificial Sequence: Synthetic oligonucleotide
  Sense strand starting at position 3286 of SEQ ID NO: 916166
cggucaugccuacagcuaa

SEQ ID NO: 1135463 - RNA, 19 nt, Artificial Sequence
  Description of Artificial Sequence: Synthetic oligonucleotide
  Antisense strand to SEQ ID NO: 1135462
uuagcuguaggcaugaccg

SEQ ID NO: 1135464 - RNA, 19 nt, Artificial Sequence
  Description of Artificial Sequence: Synthetic oligonucleotide
  Sense strand starting at position 3300 of SEQ ID NO: 916166
gcuaauauaugaguaauca

SEQ ID NO: 1135465 - RNA, 19 nt, Artificial Sequence
  Description of Artificial Sequence: Synthetic oligonucleotide
  Antisense strand to SEQ ID NO: 1135464
ugauuacucauauauuagc

SEQ ID NO: 1135466 - RNA, 19 nt, Artificial Sequence
  Description of Artificial Sequence: Synthetic oligonucleotide
  Sense strand starting at position 3393 of SEQ ID NO: 916166
ugggaaacauucucagcga

SEQ ID NO: 1135467 - RNA, 19 nt, Artificial Sequence
  Description of Artificial Sequence: Synthetic oligonucleotide
  Antisense strand to SEQ ID NO: 1135466
ucgcugagaauguuuccca

SEQ ID NO: 1135468 - RNA, 19 nt, Artificial Sequence
  Description of Artificial Sequence: Synthetic oligonucleotide
  Sense strand starting at position 3796 of SEQ ID NO: 916166
agaccuucuuuacuggaau

SEQ ID NO: 1135469 - RNA, 19 nt, Artificial Sequence
  Description of Artificial Sequence: Synthetic oligonucleotide
  Antisense strand to SEQ ID NO: 1135468
auuccaguaaagaaggucu

SEQ ID NO: 1135470 - RNA, 19 nt, Artificial Sequence
  Description of Artificial Sequence: Synthetic oligonucleotide
  Sense strand starting at position 3820 of SEQ ID NO: 916166
uguagaauccuuugaauaa

SEQ ID NO: 1135471 - RNA, 19 nt, Artificial Sequence
  Description of Artificial Sequence: Synthetic oligonucleotide
  Antisense strand to SEQ ID NO: 1135470
uuauucaaaggauucuaca

SEQ ID NO: 1135472 - RNA, 19 nt, Artificial Sequence
  Description of Artificial Sequence: Synthetic oligonucleotide
  Sense strand starting at position 3859 of SEQ ID NO: 916166
agcugagcuagauggauua

SEQ ID NO: 1135473 - RNA, 19 nt, Artificial Sequence
  Description of Artificial Sequence: Synthetic oligonucleotide
  Antisense strand to SEQ ID NO: 1135472
uaauccaucuagcucagcu

SEQ ID NO: 1135474 - RNA, 19 nt, Artificial Sequence
  Description of Artificial Sequence: Synthetic oligonucleotide
  Sense strand starting at position 3916 of SEQ ID NO: 916166
acuccaucacugggauaau

SEQ ID NO: 1135475 - RNA, 19 nt, Artificial Sequence
  Description of Artificial Sequence: Synthetic oligonucleotide
  Antisense strand to SEQ ID NO: 1135474
auuaucccagugauggagu

SEQ ID NO: 1135476 - RNA, 19 nt, Artificial Sequence
  Description of Artificial Sequence: Synthetic oligonucleotide
  Sense strand starting at position 3973 of SEQ ID NO: 916166
gugggugagagcuaaccau

SEQ ID NO: 1135477 - RNA, 19 nt, Artificial Sequence
  Description of Artificial Sequence: Synthetic oligonucleotide
  Antisense strand to SEQ ID NO: 1135476
augguuagcucucacccac

SEQ ID NO: 1135478 - RNA, 19 nt, Artificial Sequence
  Description of Artificial Sequence: Synthetic oligonucleotide
  Sense strand starting at position 3977 of SEQ ID NO: 916166
gugagagcuaaccauguaa

SEQ ID NO: 1135479 - RNA, 19 nt, Artificial Sequence
  Description of Artificial Sequence: Synthetic oligonucleotide
  Antisense strand to SEQ ID NO: 1135478
uuacaugguuagcucucac

SEQ ID NO: 1135480 - RNA, 19 nt, Artificial Sequence
  Description of Artificial Sequence: Synthetic oligonucleotide
  Sense strand starting at position 3979 of SEQ ID NO: 916166
gagagcuaaccauguaaga

SEQ ID NO: 1135481 - RNA, 19 nt, Artificial Sequence
  Description of Artificial Sequence: Synthetic oligonucleotide
  Antisense strand to SEQ ID NO: 1135480
ucuuacaugguuagcucuc

SEQ ID NO: 1135482 - RNA, 19 nt, Artificial Sequence
  Description of Artificial Sequence: Synthetic oligonucleotide
  Sense strand starting at position 24 of SEQ ID NO: 916167
uucucaggauauuaauaga

SEQ ID NO: 1135483 - RNA, 19 nt, Artificial Sequence
  Description of Artificial Sequence: Synthetic oligonucleotide
  Antisense strand to SEQ ID NO: 1135482
ucuauuaauauccugagaa

SEQ ID NO: 1135484 - RNA, 19 nt, Artificial Sequence
  Description of Artificial Sequence: Synthetic oligonucleotide
  Sense strand starting at position 27 of SEQ ID NO: 916167
ucaggauauuaauagauga

SEQ ID NO: 1135485 - RNA, 19 nt, Artificial Sequence
  Description of Artificial Sequence: Synthetic oligonucleotide
  Antisense strand to SEQ ID NO: 1135484
ucaucuauuaauauccuga

SEQ ID NO: 1135486 - RNA, 19 nt, Artificial Sequence
  Description of Artificial Sequence: Synthetic oligonucleotide
  Sense strand starting at position 52 of SEQ ID NO: 916167
ucaauuguugcccagcuua

SEQ ID NO: 1135487 - RNA, 19 nt, Artificial Sequence
  Description of Artificial Sequence: Synthetic oligonucleotide
  Antisense strand to SEQ ID NO: 1135486
uaagcugggcaacaauuga

SEQ ID NO: 1135488 - RNA, 19 nt, Artificial Sequence
  Description of Artificial Sequence: Synthetic oligonucleotide
  Sense strand starting at position 134 of SEQ ID NO: 916167
ugcauuugaccuugcuauu

SEQ ID NO: 1135489 - RNA, 19 nt, Artificial Sequence
  Description of Artificial Sequence: Synthetic oligonucleotide
  Antisense strand to SEQ ID NO: 1135488
aauagcaaggucaaaugca

SEQ ID NO: 1135490 - RNA, 19 nt, Artificial Sequence
  Description of Artificial Sequence: Synthetic oligonucleotide
  Sense strand starting at position 248 of SEQ ID NO: 916167
ugaguacaauaacagaaau

SEQ ID NO: 1135491 - RNA, 19 nt, Artificial Sequence
  Description of Artificial Sequence: Synthetic oligonucleotide
  Antisense strand to SEQ ID NO: 1135490
auuucuguuauuguacuca

SEQ ID NO: 1135492 - RNA, 19 nt, Artificial Sequence
  Description of Artificial Sequence: Synthetic oligonucleotide
  Sense strand starting at position 298 of SEQ ID NO: 916167
cuaagucuuccuugcaaug

SEQ ID NO: 1135493 - RNA, 19 nt, Artificial Sequence
  Description of Artificial Sequence: Synthetic oligonucleotide
  Antisense strand to SEQ ID NO: 1135492
cauugcaaggaagacuuag

SEQ ID NO: 1135494 - RNA, 19 nt, Artificial Sequence
  Description of Artificial Sequence: Synthetic oligonucleotide
  Sense strand starting at position 425 of SEQ ID NO: 916167
ggauucucuugguucccua

SEQ ID NO: 1135495 - RNA, 19 nt, Artificial Sequence
  Description of Artificial Sequence: Synthetic oligonucleotide
  Antisense strand to SEQ ID NO: 1135494
uagggaaccaagagaaucc

SEQ ID NO: 1135496 - RNA, 19 nt, Artificial Sequence
  Description of Artificial Sequence: Synthetic oligonucleotide
  Sense strand starting at position 432 of SEQ ID NO: 916167
cuugguucccuaugacaga

SEQ ID NO: 1135497 - RNA, 19 nt, Artificial Sequence
  Description of Artificial Sequence: Synthetic oligonucleotide
  Antisense strand to SEQ ID NO: 1135496
ucugucauagggaaccaag

SEQ ID NO: 1135498 - RNA, 19 nt, Artificial Sequence
  Description of Artificial Sequence: Synthetic oligonucleotide
  Sense strand starting at position 2399 of SEQ ID NO: 916167
cuccauuaagcaggcuaaa

SEQ ID NO: 1135499 - RNA, 19 nt, Artificial Sequence
  Description of Artificial Sequence: Synthetic oligonucleotide
  Antisense strand to SEQ ID NO: 1135498
uuuagccugcuuaauggag

SEQ ID NO: 1135500 - RNA, 19 nt, Artificial Sequence
  Description of Artificial Sequence: Synthetic oligonucleotide
  Sense strand starting at position 2439 of SEQ ID NO: 916167
gguguuuggacucauuaua

SEQ ID NO: 1135501 - RNA, 19 nt, Artificial Sequence
  Description of Artificial Sequence: Synthetic oligonucleotide
  Antisense strand to SEQ ID NO: 1135500
uauaaugaguccaaacacc

SEQ ID NO: 1135502 - RNA, 19 nt, Artificial Sequence
  Description of Artificial Sequence: Synthetic oligonucleotide
  Sense strand starting at position 2457 of SEQ ID NO: 916167
acaaauguaaaucggguua

SEQ ID NO: 1135503 - RNA, 19 nt, Artificial Sequence
  Description of Artificial Sequence: Synthetic oligonucleotide
  Antisense strand to SEQ ID NO: 1135502
uaacccgauuuacauuugu

SEQ ID NO: 1135504 - RNA, 19 nt, Artificial Sequence
  Description of Artificial Sequence: Synthetic oligonucleotide
  Sense strand starting at position 2462 of SEQ ID NO: 916167
uguaaaucggguuaauuac

SEQ ID NO: 1135505 - RNA, 19 nt, Artificial Sequence
  Description of Artificial Sequence: Synthetic oligonucleotide
  Antisense strand to SEQ ID NO: 1135504
guaauuaacccgauuuaca

SEQ ID NO: 1135506 - RNA, 19 nt, Artificial Sequence
  Description of Artificial Sequence: Synthetic oligonucleotide
  Sense strand starting at position 2523 of SEQ ID NO: 916167
uccugaguaucugugggau

SEQ ID NO: 1135507 - RNA, 19 nt, Artificial Sequence
  Description of Artificial Sequence: Synthetic oligonucleotide
  Antisense strand to SEQ ID NO: 1135506
aucccacagauacucagga

SEQ ID NO: 1135508 - RNA, 19 nt, Artificial Sequence
  Description of Artificial Sequence: Synthetic oligonucleotide
  Sense strand starting at position 2550 of SEQ ID NO: 916167
ccuccaauauccgugcuaa

SEQ ID NO: 1135509 - RNA, 19 nt, Artificial Sequence
  Description of Artificial Sequence: Synthetic oligonucleotide
  Antisense strand to SEQ ID NO: 1135508
uuagcacggauauuggagg

SEQ ID NO: 1135510 - RNA, 19 nt, Artificial Sequence
  Description of Artificial Sequence: Synthetic oligonucleotide
  Sense strand starting at position 2551 of SEQ ID NO: 916167
cuccaauauccgugcuaac

SEQ ID NO: 1135511 - RNA, 19 nt, Artificial Sequence
  Description of Artificial Sequence: Synthetic oligonucleotide
  Antisense strand to SEQ ID NO: 1135510
guuagcacggauauuggag

SEQ ID NO: 1135512 - RNA, 19 nt, Artificial Sequence
  Description of Artificial Sequence: Synthetic oligonucleotide
  Sense strand starting at position 2609 of SEQ ID NO: 916167
ggugaacuuugguucucca

SEQ ID NO: 1135513 - RNA, 19 nt, Artificial Sequence
  Description of Artificial Sequence: Synthetic oligonucleotide
  Antisense strand to SEQ ID NO: 1135512
uggagaaccaaaguucacc

SEQ ID NO: 1135514 - RNA, 19 nt, Artificial Sequence
  Description of Artificial Sequence: Synthetic oligonucleotide
  Sense strand starting at position 2789 of SEQ ID NO: 916167
augaaagcuuaaucuguaa

SEQ ID NO: 1135515 - RNA, 19 nt, Artificial Sequence
  Description of Artificial Sequence: Synthetic oligonucleotide
  Antisense strand to SEQ ID NO: 1135514
uuacagauuaagcuuucau

SEQ ID NO: 1135516 - RNA, 19 nt, Artificial Sequence
  Description of Artificial Sequence: Synthetic oligonucleotide
  Sense strand starting at position 2800 of SEQ ID NO: 916167
aucuguaaacugggugagu

SEQ ID NO: 1135517 - RNA, 19 nt, Artificial Sequence
  Description of Artificial Sequence: Synthetic oligonucleotide
  Antisense strand to SEQ ID NO: 1135516
acucacccaguuuacagau

SEQ ID NO: 1135518 - RNA, 19 nt, Artificial Sequence
  Description of Artificial Sequence: Synthetic oligonucleotide
  Sense strand starting at position 2801 of SEQ ID NO: 916167
ucuguaaacugggugagua

SEQ ID NO: 1135519 - RNA, 19 nt, Artificial Sequence
  Description of Artificial Sequence: Synthetic oligonucleotide
  Antisense strand to SEQ ID NO: 1135518
uacucacccaguuuacaga

SEQ ID NO: 1135520 - RNA, 19 nt, Artificial Sequence
  Description of Artificial Sequence: Synthetic oligonucleotide
  Sense strand starting at position 2802 of SEQ ID NO: 916167
cuguaaacugggugaguaa

SEQ ID NO: 1135521 - RNA, 19 nt, Artificial Sequence
  Description of Artificial Sequence: Synthetic oligonucleotide
  Antisense strand to SEQ ID NO: 1135520
uuacucacccaguuuacag

SEQ ID NO: 1135522 - RNA, 19 nt, Artificial Sequence
  Description of Artificial Sequence: Synthetic oligonucleotide
  Sense strand starting at position 2803 of SEQ ID NO: 916167
uguaaacugggugaguaau

SEQ ID NO: 1135523 - RNA, 19 nt, Artificial Sequence
  Description of Artificial Sequence: Synthetic oligonucleotide
  Antisense strand to SEQ ID NO: 1135522
auuacucacccaguuuaca

SEQ ID NO: 1135524 - RNA, 19 nt, Artificial Sequence
  Description of Artificial Sequence: Synthetic oligonucleotide
  Sense strand starting at position 2814 of SEQ ID NO: 916167
ugaguaaucugcgugggaa

SEQ ID NO: 1135525 - RNA, 19 nt, Artificial Sequence
  Description of Artificial Sequence: Synthetic oligonucleotide
  Antisense strand to SEQ ID NO: 1135524
uucccacgcagauuacuca

SEQ ID NO: 1135526 - RNA, 19 nt, Artificial Sequence
  Description of Artificial Sequence: Synthetic oligonucleotide
  Sense strand starting at position 2815 of SEQ ID NO: 916167
gaguaaucugcgugggaaa

SEQ ID NO: 1135527 - RNA, 19 nt, Artificial Sequence
  Description of Artificial Sequence: Synthetic oligonucleotide
  Antisense strand to SEQ ID NO: 1135526
uuucccacgcagauuacuc

SEQ ID NO: 1135528 - RNA, 19 nt, Artificial Sequence
  Description of Artificial Sequence: Synthetic oligonucleotide
  Sense strand starting at position 2883 of SEQ ID NO: 916167
agacgugacuccuuaucug

SEQ ID NO: 1135529 - RNA, 19 nt, Artificial Sequence
  Description of Artificial Sequence: Synthetic oligonucleotide
  Antisense strand to SEQ ID NO: 1135528
cagauaaggagucacgucu

SEQ ID NO: 1135530 - RNA, 19 nt, Artificial Sequence
  Description of Artificial Sequence: Synthetic oligonucleotide
  Sense strand starting at position 3427 of SEQ ID NO: 916167
auagacuuguucuauuucu

SEQ ID NO: 1135531 - RNA, 19 nt, Artificial Sequence
  Description of Artificial Sequence: Synthetic oligonucleotide
  Antisense strand to SEQ ID NO: 1135530
agaaauagaacaagucuau

SEQ ID NO: 1135532 - RNA, 19 nt, Artificial Sequence
  Description of Artificial Sequence: Synthetic oligonucleotide
  Sense strand starting at position 3434 of SEQ ID NO: 916167
uguucuauuucuuuagcau

SEQ ID NO: 1135533 - RNA, 19 nt, Artificial Sequence
  Description of Artificial Sequence: Synthetic oligonucleotide
  Antisense strand to SEQ ID NO: 1135532
augcuaaagaaauagaaca

SEQ ID NO: 1135534 - RNA, 19 nt, Artificial Sequence
  Description of Artificial Sequence: Synthetic oligonucleotide
  Sense strand starting at position 3441 of SEQ ID NO: 916167
uuucuuuagcauuagcaga

SEQ ID NO: 1135535 - RNA, 19 nt, Artificial Sequence
  Description of Artificial Sequence: Synthetic oligonucleotide
  Antisense strand to SEQ ID NO: 1135534
ucugcuaaugcuaaagaaa

SEQ ID NO: 1135536 - RNA, 19 nt, Artificial Sequence
  Description of Artificial Sequence: Synthetic oligonucleotide
  Sense strand starting at position 3443 of SEQ ID NO: 916167
ucuuuagcauuagcagaaa

SEQ ID NO: 1135537 - RNA, 19 nt, Artificial Sequence
  Description of Artificial Sequence: Synthetic oligonucleotide
  Antisense strand to SEQ ID NO: 1135536
uuucugcuaaugcuaaaga

SEQ ID NO: 1135538 - RNA, 19 nt, Artificial Sequence
  Description of Artificial Sequence: Synthetic oligonucleotide
  Sense strand starting at position 3446 of SEQ ID NO: 916167
uuagcauuagcagaaaguu

SEQ ID NO: 1135539 - RNA, 19 nt, Artificial Sequence
  Description of Artificial Sequence: Synthetic oligonucleotide
  Antisense strand to SEQ ID NO: 1135538
aacuuucugcuaaugcuaa

SEQ ID NO: 1135540 - RNA, 19 nt, Artificial Sequence
  Description of Artificial Sequence: Synthetic oligonucleotide
  Sense strand starting at position 3496 of SEQ ID NO: 916167
aguauuaaguuacuccaaa

SEQ ID NO: 1135541 - RNA, 19 nt, Artificial Sequence
  Description of Artificial Sequence: Synthetic oligonucleotide
  Antisense strand to SEQ ID NO: 1135540
uuuggaguaacuuaauacu

SEQ ID NO: 1135542 - RNA, 19 nt, Artificial Sequence
  Description of Artificial Sequence: Synthetic oligonucleotide
  Sense strand starting at position 3559 of SEQ ID NO: 916167
guaauucagggagauacgu

SEQ ID NO: 1135543 - RNA, 19 nt, Artificial Sequence
  Description of Artificial Sequence: Synthetic oligonucleotide
  Antisense strand to SEQ ID NO: 1135542
acguaucucccugaauuac

SEQ ID NO: 1135544 - RNA, 19 nt, Artificial Sequence
  Description of Artificial Sequence: Synthetic oligonucleotide
  Sense strand starting at position 3603 of SEQ ID NO: 916167
cgguuaguuguacauauau

SEQ ID NO: 1135545 - RNA, 19 nt, Artificial Sequence
  Description of Artificial Sequence: Synthetic oligonucleotide
  Antisense strand to SEQ ID NO: 1135544
auauauguacaacuaaccg

SEQ ID NO: 1135546 - RNA, 19 nt, Artificial Sequence
  Description of Artificial Sequence: Synthetic oligonucleotide
  Sense strand starting at position 3632 of SEQ ID NO: 916167
ccuauuagauuguuggcuu

SEQ ID NO: 1135547 - RNA, 19 nt, Artificial Sequence
  Description of Artificial Sequence: Synthetic oligonucleotide
  Antisense strand to SEQ ID NO: 1135546
aagccaacaaucuaauagg

SEQ ID NO: 1135548 - RNA, 19 nt, Artificial Sequence
  Description of Artificial Sequence: Synthetic oligonucleotide
  Sense strand starting at position 3636 of SEQ ID NO: 916167
uuagauuguuggcuucuca

SEQ ID NO: 1135549 - RNA, 19 nt, Artificial Sequence
  Description of Artificial Sequence: Synthetic oligonucleotide
  Antisense strand to SEQ ID NO: 1135548
ugagaagccaacaaucuaa

SEQ ID NO: 1135550 - RNA, 19 nt, Artificial Sequence
  Description of Artificial Sequence: Synthetic oligonucleotide
  Sense strand starting at position 3702 of SEQ ID NO: 916167
cggagaugcacuuauguac

SEQ ID NO: 1135551 - RNA, 19 nt, Artificial Sequence
  Description of Artificial Sequence: Synthetic oligonucleotide
  Antisense strand to SEQ ID NO: 1135550
guacauaagugcaucuccg

SEQ ID NO: 1135552 - RNA, 19 nt, Artificial Sequence
  Description of Artificial Sequence: Synthetic oligonucleotide
  Sense strand starting at position 3767 of SEQ ID NO: 916167
gcaaguuauuuggcagcaa

SEQ ID NO: 1135553 - RNA, 19 nt, Artificial Sequence
  Description of Artificial Sequence: Synthetic oligonucleotide
  Antisense strand to SEQ ID NO: 1135552
uugcugccaaauaacuugc

SEQ ID NO: 1135554 - RNA, 19 nt, Artificial Sequence
  Description of Artificial Sequence: Synthetic oligonucleotide
  Sense strand starting at position 3768 of SEQ ID NO: 916167
caaguuauuuggcagcaaa

SEQ ID NO: 1135555 - RNA, 19 nt, Artificial Sequence
  Description of Artificial Sequence: Synthetic oligonucleotide
  Antisense strand to SEQ ID NO: 1135554
uuugcugccaaauaacuug

SEQ ID NO: 1135556 - RNA, 19 nt, Artificial Sequence
  Description of Artificial Sequence: Synthetic oligonucleotide
  Sense strand starting at position 3794 of SEQ ID NO: 916167
guucacagauucguggaau

SEQ ID NO: 1135557 - RNA, 19 nt, Artificial Sequence
  Description of Artificial Sequence: Synthetic oligonucleotide
  Antisense strand to SEQ ID NO: 1135556
auuccacgaaucugugaac

SEQ ID NO: 1135558 - RNA, 19 nt, Artificial Sequence
  Description of Artificial Sequence: Synthetic oligonucleotide
  Sense strand starting at position 3903 of SEQ ID NO: 916167
aguugagacccaggaucau

SEQ ID NO: 1135559 - RNA, 19 nt, Artificial Sequence
  Description of Artificial Sequence: Synthetic oligonucleotide
  Antisense strand to SEQ ID NO: 1135558
augauccugggucucaacu

SEQ ID NO: 1135560 - RNA, 19 nt, Artificial Sequence
  Description of Artificial Sequence: Synthetic oligonucleotide
  Sense strand starting at position 3938 of SEQ ID NO: 916167
ucccuagucuggccaauua

SEQ ID NO: 1135561 - RNA, 19 nt, Artificial Sequence
  Description of Artificial Sequence: Synthetic oligonucleotide
  Antisense strand to SEQ ID NO: 1135560
uaauuggccagacuaggga

SEQ ID NO: 1135562 - RNA, 19 nt, Artificial Sequence
  Description of Artificial Sequence: Synthetic oligonucleotide
  Sense strand starting at position 529 of SEQ ID NO: 916168
uccuaagucccagaguguu

SEQ ID NO: 1135563 - RNA, 19 nt, Artificial Sequence
  Description of Artificial Sequence: Synthetic oligonucleotide
  Antisense strand to SEQ ID NO: 1135562
aacacucugggacuuagga

SEQ ID NO: 1135564 - RNA, 19 nt, Artificial Sequence
  Description of Artificial Sequence: Synthetic oligonucleotide
  Sense strand starting at position 730 of SEQ ID NO: 916168
gcuuguuaaugacuguuga

SEQ ID NO: 1135565 - RNA, 19 nt, Artificial Sequence
  Description of Artificial Sequence: Synthetic oligonucleotide
  Antisense strand to SEQ ID NO: 1135564
ucaacagucauuaacaagc

SEQ ID NO: 1135566 - RNA, 19 nt, Artificial Sequence
  Description of Artificial Sequence: Synthetic oligonucleotide
  Sense strand starting at position 789 of SEQ ID NO: 916168
gguauuugguuucagggau

SEQ ID NO: 1135567 - RNA, 19 nt, Artificial Sequence
  Description of Artificial Sequence: Synthetic oligonucleotide
  Antisense strand to SEQ ID NO: 1135566
aucccugaaaccaaauacc

SEQ ID NO: 1135568 - RNA, 19 nt, Artificial Sequence
  Description of Artificial Sequence: Synthetic oligonucleotide
  Sense strand starting at position 795 of SEQ ID NO: 916168
ugguuucagggaugcaaua

SEQ ID NO: 1135569 - RNA, 19 nt, Artificial Sequence
  Description of Artificial Sequence: Synthetic oligonucleotide
  Antisense strand to SEQ ID NO: 1135568
uauugcaucccugaaacca

SEQ ID NO: 1135570 - RNA, 19 nt, Artificial Sequence
  Description of Artificial Sequence: Synthetic oligonucleotide
  Sense strand starting at position 804 of SEQ ID NO: 916168
ggaugcaauaaauguugau

SEQ ID NO: 1135571 - RNA, 19 nt, Artificial Sequence
  Description of Artificial Sequence: Synthetic oligonucleotide
  Antisense strand to SEQ ID NO: 1135570
aucaacauuuauugcaucc

SEQ ID NO: 1135572 - RNA, 19 nt, Artificial Sequence
  Description of Artificial Sequence: Synthetic oligonucleotide
  Sense strand starting at position 813 of SEQ ID NO: 916168
aaauguugaugggaauaga

SEQ ID NO: 1135573 - RNA, 19 nt, Artificial Sequence
  Description of Artificial Sequence: Synthetic oligonucleotide
  Antisense strand to SEQ ID NO: 1135572
ucuauucccaucaacauuu

SEQ ID NO: 1135574 - RNA, 19 nt, Artificial Sequence
  Description of Artificial Sequence: Synthetic oligonucleotide
  Sense strand starting at position 1323 of SEQ ID NO: 916168
ccagacagucuaugcuaau

SEQ ID NO: 1135575 - RNA, 19 nt, Artificial Sequence
  Description of Artificial Sequence: Synthetic oligonucleotide
  Antisense strand to SEQ ID NO: 1135574
auuagcauagacugucugg

SEQ ID NO: 1135576 - RNA, 19 nt, Artificial Sequence
  Description of Artificial Sequence: Synthetic oligonucleotide
  Sense strand starting at position 1563 of SEQ ID NO: 916168
gagggaugccugcagauac

SEQ ID NO: 1135577 - RNA, 19 nt, Artificial Sequence
  Description of Artificial Sequence: Synthetic oligonucleotide
  Antisense strand to SEQ ID NO: 1135576
guaucugcaggcaucccuc

SEQ ID NO: 1135578 - RNA, 19 nt, Artificial Sequence
  Description of Artificial Sequence: Synthetic oligonucleotide
  Sense strand starting at position 1614 of SEQ ID NO: 916168
gcgagggauuuaguuguga

SEQ ID NO: 1135579 - RNA, 19 nt, Artificial Sequence
  Description of Artificial Sequence: Synthetic oligonucleotide
  Antisense strand to SEQ ID NO: 1135578
ucacaacuaaaucccucgc

SEQ ID NO: 1135580 - RNA, 19 nt, Artificial Sequence
  Description of Artificial Sequence: Synthetic oligonucleotide
  Sense strand starting at position 1944 of SEQ ID NO: 916168
acuccacuuccgcagauua

SEQ ID NO: 1135581 - RNA, 19 nt, Artificial Sequence
  Description of Artificial Sequence: Synthetic oligonucleotide
  Antisense strand to SEQ ID NO: 1135580
uaaucugcggaaguggagu

SEQ ID NO: 1135582 - RNA, 19 nt, Artificial Sequence
  Description of Artificial Sequence: Synthetic oligonucleotide
  Sense strand starting at position 2162 of SEQ ID NO: 916168
ccagauggaaugugucuuu

SEQ ID NO: 1135583 - RNA, 19 nt, Artificial Sequence
  Description of Artificial Sequence: Synthetic oligonucleotide
  Antisense strand to SEQ ID NO: 1135582
aaagacacauuccaucugg

SEQ ID NO: 1135584 - RNA, 19 nt, Artificial Sequence
  Description of Artificial Sequence: Synthetic oligonucleotide
  Sense strand starting at position 2186 of SEQ ID NO: 916168
uggauagaauccguuuggu

SEQ ID NO: 1135585 - RNA, 19 nt, Artificial Sequence
  Description of Artificial Sequence: Synthetic oligonucleotide
  Antisense strand to SEQ ID NO: 1135584
accaaacggauucuaucca

SEQ ID NO: 1135586 - RNA, 19 nt, Artificial Sequence
  Description of Artificial Sequence: Synthetic oligonucleotide
  Sense strand starting at position 2189 of SEQ ID NO: 916168
auagaauccguuuggucuu

SEQ ID NO: 1135587 - RNA, 19 nt, Artificial Sequence
  Description of Artificial Sequence: Synthetic oligonucleotide
  Antisense strand to SEQ ID NO: 1135586
aagaccaaacggauucuau

SEQ ID NO: 1135588 - RNA, 19 nt, Artificial Sequence
  Description of Artificial Sequence: Synthetic oligonucleotide
  Sense strand starting at position 2196 of SEQ ID NO: 916168
ccguuuggucuuuagagga

SEQ ID NO: 1135589 - RNA, 19 nt, Artificial Sequence
  Description of Artificial Sequence: Synthetic oligonucleotide
  Antisense strand to SEQ ID NO: 1135588
uccucuaaagaccaaacgg

SEQ ID NO: 1135590 - RNA, 19 nt, Artificial Sequence
  Description of Artificial Sequence: Synthetic oligonucleotide
  Sense strand starting at position 2331 of SEQ ID NO: 916168
uacagucuacugggugaaa

SEQ ID NO: 1135591 - RNA, 19 nt, Artificial Sequence
  Description of Artificial Sequence: Synthetic oligonucleotide
  Antisense strand to SEQ ID NO: 1135590
uuucacccaguagacugua

SEQ ID NO: 1135592 - RNA, 19 nt, Artificial Sequence
  Description of Artificial Sequence: Synthetic oligonucleotide
  Sense strand starting at position 2333 of SEQ ID NO: 916168
cagucuacugggugaaaca

SEQ ID NO: 1135593 - RNA, 19 nt, Artificial Sequence
  Description of Artificial Sequence: Synthetic oligonucleotide
  Antisense strand to SEQ ID NO: 1135592
uguuucacccaguagacug

SEQ ID NO: 1135594 - RNA, 19 nt, Artificial Sequence
  Description of Artificial Sequence: Synthetic oligonucleotide
  Sense strand starting at position 2345 of SEQ ID NO: 916168
ugaaacagaugacaauaaa

SEQ ID NO: 1135595 - RNA, 19 nt, Artificial Sequence
  Description of Artificial Sequence: Synthetic oligonucleotide
  Antisense strand to SEQ ID NO: 1135594
uuuauugucaucuguuuca

SEQ ID NO: 1135596 - RNA, 19 nt, Artificial Sequence
  Description of Artificial Sequence: Synthetic oligonucleotide
  Sense strand starting at position 2647 of SEQ ID NO: 916168
agggcaugaccucgucaau

SEQ ID NO: 1135597 - RNA, 19 nt, Artificial Sequence
  Description of Artificial Sequence: Synthetic oligonucleotide
  Antisense strand to SEQ ID NO: 1135596
auugacgaggucaugcccu

SEQ ID NO: 1135598 - RNA, 19 nt, Artificial Sequence
  Description of Artificial Sequence: Synthetic oligonucleotide
  Sense strand starting at position 2650 of SEQ ID NO: 916168
gcaugaccucgucaauaaa

SEQ ID NO: 1135599 - RNA, 19 nt, Artificial Sequence
  Description of Artificial Sequence: Synthetic oligonucleotide
  Antisense strand to SEQ ID NO: 1135598
uuuauugacgaggucaugc

SEQ ID NO: 1135600 - RNA, 19 nt, Artificial Sequence
  Description of Artificial Sequence: Synthetic oligonucleotide
  Sense strand starting at position 2741 of SEQ ID NO: 916168
acaauaguacauugugacu

SEQ ID NO: 1135601 - RNA, 19 nt, Artificial Sequence
  Description of Artificial Sequence: Synthetic oligonucleotide
  Antisense strand to SEQ ID NO: 1135600
agucacaauguacuauugu

SEQ ID NO: 1135602 - RNA, 19 nt, Artificial Sequence
  Description of Artificial Sequence: Synthetic oligonucleotide
  Sense strand starting at position 2746 of SEQ ID NO: 916168
aguacauugugacuaggau

SEQ ID NO: 1135603 - RNA, 19 nt, Artificial Sequence
  Description of Artificial Sequence: Synthetic oligonucleotide
  Antisense strand to SEQ ID NO: 1135602
auccuagucacaauguacu

SEQ ID NO: 1135604 - RNA, 19 nt, Artificial Sequence
  Description of Artificial Sequence: Synthetic oligonucleotide
  Sense strand starting at position 2747 of SEQ ID NO: 916168
guacauugugacuaggauu

SEQ ID NO: 1135605 - RNA, 19 nt, Artificial Sequence
  Description of Artificial Sequence: Synthetic oligonucleotide
  Antisense strand to SEQ ID NO: 1135604
aauccuagucacaauguac

SEQ ID NO: 1135606 - RNA, 19 nt, Artificial Sequence
  Description of Artificial Sequence: Synthetic oligonucleotide
  Sense strand starting at position 2822 of SEQ ID NO: 916168
uugaaugauuaugugaagu

SEQ ID NO: 1135607 - RNA, 19 nt, Artificial Sequence
  Description of Artificial Sequence: Synthetic oligonucleotide
  Antisense strand to SEQ ID NO: 1135606
acuucacauaaucauucaa

SEQ ID NO: 1135608 - RNA, 19 nt, Artificial Sequence
  Description of Artificial Sequence: Synthetic oligonucleotide
  Sense strand starting at position 2977 of SEQ ID NO: 916168
agagucagaugucuugaag

SEQ ID NO: 1135609 - RNA, 19 nt, Artificial Sequence
  Description of Artificial Sequence: Synthetic oligonucleotide
  Antisense strand to SEQ ID NO: 1135608
cuucaagacaucugacucu

SEQ ID NO: 1135610 - RNA, 19 nt, Artificial Sequence
  Description of Artificial Sequence: Synthetic oligonucleotide
  Sense strand starting at position 2980 of SEQ ID NO: 916168
gucagaugucuugaagauu

SEQ ID NO: 1135611 - RNA, 19 nt, Artificial Sequence
  Description of Artificial Sequence: Synthetic oligonucleotide
  Antisense strand to SEQ ID NO: 1135610
aaucuucaagacaucugac

SEQ ID NO: 1135612 - RNA, 19 nt, Artificial Sequence
  Description of Artificial Sequence: Synthetic oligonucleotide
  Sense strand starting at position 3056 of SEQ ID NO: 916168
ccuuauuggccgugauaga

SEQ ID NO: 1135613 - RNA, 19 nt, Artificial Sequence
  Description of Artificial Sequence: Synthetic oligonucleotide
  Antisense strand to SEQ ID NO: 1135612
ucuaucacggccaauaagg

SEQ ID NO: 1135614 - RNA, 19 nt, Artificial Sequence
  Description of Artificial Sequence: Synthetic oligonucleotide
  Sense strand starting at position 3057 of SEQ ID NO: 916168
cuuauuggccgugauagag

SEQ ID NO: 1135615 - RNA, 19 nt, Artificial Sequence
  Description of Artificial Sequence: Synthetic oligonucleotide
  Antisense strand to SEQ ID NO: 1135614
cucuaucacggccaauaag

SEQ ID NO: 1135616 - RNA, 19 nt, Artificial Sequence
  Description of Artificial Sequence: Synthetic oligonucleotide
  Sense strand starting at position 3071 of SEQ ID NO: 916168
uagagaaguuggccuuuau

SEQ ID NO: 1135617 - RNA, 19 nt, Artificial Sequence
  Description of Artificial Sequence: Synthetic oligonucleotide
  Antisense strand to SEQ ID NO: 1135616
auaaaggccaacuucucua

SEQ ID NO: 1135618 - RNA, 19 nt, Artificial Sequence
  Description of Artificial Sequence: Synthetic oligonucleotide
  Sense strand starting at position 3133 of SEQ ID NO: 916168
aguguuaugaucugguuug

SEQ ID NO: 1135619 - RNA, 19 nt, Artificial Sequence
  Description of Artificial Sequence: Synthetic oligonucleotide
  Antisense strand to SEQ ID NO: 1135618
caaaccagaucauaacacu

SEQ ID NO: 1135620 - RNA, 19 nt, Artificial Sequence
  Description of Artificial Sequence: Synthetic oligonucleotide
  Sense strand starting at position 3138 of SEQ ID NO: 916168
uaugaucugguuugcaauu

SEQ ID NO: 1135621 - RNA, 19 nt, Artificial Sequence
  Description of Artificial Sequence: Synthetic oligonucleotide
  Antisense strand to SEQ ID NO: 1135620
aauugcaaaccagaucaua

SEQ ID NO: 1135622 - RNA, 19 nt, Artificial Sequence
  Description of Artificial Sequence: Synthetic oligonucleotide
  Sense strand starting at position 3310 of SEQ ID NO: 916168
ugcuccugucuacaaauga

SEQ ID NO: 1135623 - RNA, 19 nt, Artificial Sequence
  Description of Artificial Sequence: Synthetic oligonucleotide
  Antisense strand to SEQ ID NO: 1135622
ucauuuguagacaggagca

SEQ ID NO: 1135624 - RNA, 19 nt, Artificial Sequence
  Description of Artificial Sequence: Synthetic oligonucleotide
  Sense strand starting at position 3359 of SEQ ID NO: 916168
gucauugcauguguauaga

SEQ ID NO: 1135625 - RNA, 19 nt, Artificial Sequence
  Description of Artificial Sequence: Synthetic oligonucleotide
  Antisense strand to SEQ ID NO: 1135624
ucuauacacaugcaaugac

SEQ ID NO: 1135626 - RNA, 19 nt, Artificial Sequence
  Description of Artificial Sequence: Synthetic oligonucleotide
  Sense strand starting at position 3415 of SEQ ID NO: 916168
ggcagacacaguuguauua

SEQ ID NO: 1135627 - RNA, 19 nt, Artificial Sequence
  Description of Artificial Sequence: Synthetic oligonucleotide
  Antisense strand to SEQ ID NO: 1135626
uaauacaacugugucugcc

SEQ ID NO: 1135628 - RNA, 19 nt, Artificial Sequence
  Description of Artificial Sequence: Synthetic oligonucleotide
  Sense strand starting at position 3448 of SEQ ID NO: 916168
aggugcuuuguugugugau

SEQ ID NO: 1135629 - RNA, 19 nt, Artificial Sequence
  Description of Artificial Sequence: Synthetic oligonucleotide
  Antisense strand to SEQ ID NO: 1135628
aucacacaacaaagcaccu

SEQ ID NO: 1135630 - RNA, 19 nt, Artificial Sequence
  Description of Artificial Sequence: Synthetic oligonucleotide
  Sense strand starting at position 3450 of SEQ ID NO: 916168
gugcuuuguugugugauuu

SEQ ID NO: 1135631 - RNA, 19 nt, Artificial Sequence
  Description of Artificial Sequence: Synthetic oligonucleotide
  Antisense strand to SEQ ID NO: 1135630
aaaucacacaacaaagcac

SEQ ID NO: 1135632 - RNA, 19 nt, Artificial Sequence
  Description of Artificial Sequence: Synthetic oligonucleotide
  Sense strand starting at position 3451 of SEQ ID NO: 916168
ugcuuuguugugugauuua

SEQ ID NO: 1135633 - RNA, 19 nt, Artificial Sequence
  Description of Artificial Sequence: Synthetic oligonucleotide
  Antisense strand to SEQ ID NO: 1135632
uaaaucacacaacaaagca

SEQ ID NO: 1135634 - RNA, 19 nt, Artificial Sequence
  Description of Artificial Sequence: Synthetic oligonucleotide
  Sense strand starting at position 3454 of SEQ ID NO: 916168
uuuguugugugauuuacac

SEQ ID NO: 1135635 - RNA, 19 nt, Artificial Sequence
  Description of Artificial Sequence: Synthetic oligonucleotide
  Antisense strand to SEQ ID NO: 1135634
guguaaaucacacaacaaa

SEQ ID NO: 1135636 - RNA, 19 nt, Artificial Sequence
  Description of Artificial Sequence: Synthetic oligonucleotide
  Sense strand starting at position 3458 of SEQ ID NO: 916168
uugugugauuuacacauuu

SEQ ID NO: 1135637 - RNA, 19 nt, Artificial Sequence
  Description of Artificial Sequence: Synthetic oligonucleotide
  Antisense strand to SEQ ID NO: 1135636
aaauguguaaaucacacaa

SEQ ID NO: 1135638 - RNA, 19 nt, Artificial Sequence
  Description of Artificial Sequence: Synthetic oligonucleotide
  Sense strand starting at position 3932 of SEQ ID NO: 916168
aguucugauuuacacacau

SEQ ID NO: 1135639 - RNA, 19 nt, Artificial Sequence
  Description of Artificial Sequence: Synthetic oligonucleotide
  Antisense strand to SEQ ID NO: 1135638
auguguguaaaucagaacu

SEQ ID NO: 1135640 - RNA, 19 nt, Artificial Sequence
  Description of Artificial Sequence: Synthetic oligonucleotide
  Sense strand starting at position 3957 of SEQ ID NO: 916168
auccuaggauuagcaaauu

SEQ ID NO: 1135641 - RNA, 19 nt, Artificial Sequence
  Description of Artificial Sequence: Synthetic oligonucleotide
  Antisense strand to SEQ ID NO: 1135640
aauuugcuaauccuaggau

SEQ ID NO: 1135642 - RNA, 19 nt, Artificial Sequence
  Description of Artificial Sequence: Synthetic oligonucleotide
  Sense strand starting at position 113 of SEQ ID NO: 916169
aacuguuaagguggcaaau

SEQ ID NO: 1135643 - RNA, 19 nt, Artificial Sequence
  Description of Artificial Sequence: Synthetic oligonucleotide
  Antisense strand to SEQ ID NO: 1135642
auuugccaccuuaacaguu

SEQ ID NO: 1135644 - RNA, 19 nt, Artificial Sequence
  Description of Artificial Sequence: Synthetic oligonucleotide
  Sense strand starting at position 150 of SEQ ID NO: 916169
uuaagcaaugguuaguuua

SEQ ID NO: 1135645 - RNA, 19 nt, Artificial Sequence
  Description of Artificial Sequence: Synthetic oligonucleotide
  Antisense strand to SEQ ID NO: 1135644
uaaacuaaccauugcuuaa

SEQ ID NO: 1135646 - RNA, 19 nt, Artificial Sequence
  Description of Artificial Sequence: Synthetic oligonucleotide
  Sense strand starting at position 152 of SEQ ID NO: 916169
aagcaaugguuaguuuaaa

SEQ ID NO: 1135647 - RNA, 19 nt, Artificial Sequence
  Description of Artificial Sequence: Synthetic oligonucleotide
  Antisense strand to SEQ ID NO: 1135646
uuuaaacuaaccauugcuu

SEQ ID NO: 1135648 - RNA, 19 nt, Artificial Sequence
  Description of Artificial Sequence: Synthetic oligonucleotide
  Sense strand starting at position 440 of SEQ ID NO: 916169
gcguuacaccaaugaaaga

SEQ ID NO: 1135649 - RNA, 19 nt, Artificial Sequence
  Description of Artificial Sequence: Synthetic oligonucleotide
  Antisense strand to SEQ ID NO: 1135648
ucuuucauugguguaacgc

SEQ ID NO: 1135650 - RNA, 19 nt, Artificial Sequence
  Description of Artificial Sequence: Synthetic oligonucleotide
  Sense strand starting at position 520 of SEQ ID NO: 916169
uuguaauagagacgaugaa

SEQ ID NO: 1135651 - RNA, 19 nt, Artificial Sequence
  Description of Artificial Sequence: Synthetic oligonucleotide
  Antisense strand to SEQ ID NO: 1135650
uucaucgucucuauuacaa

SEQ ID NO: 1135652 - RNA, 19 nt, Artificial Sequence
  Description of Artificial Sequence: Synthetic oligonucleotide
  Sense strand starting at position 530 of SEQ ID NO: 916169
gacgaugaauuacuaggua

SEQ ID NO: 1135653 - RNA, 19 nt, Artificial Sequence
  Description of Artificial Sequence: Synthetic oligonucleotide
  Antisense strand to SEQ ID NO: 1135652
uaccuaguaauucaucguc

SEQ ID NO: 1135654 - RNA, 19 nt, Artificial Sequence
  Description of Artificial Sequence: Synthetic oligonucleotide
  Sense strand starting at position 647 of SEQ ID NO: 916169
cuacaagauguugggucau

SEQ ID NO: 1135655 - RNA, 19 nt, Artificial Sequence
  Description of Artificial Sequence: Synthetic oligonucleotide
  Antisense strand to SEQ ID NO: 1135654
augacccaacaucuuguag

SEQ ID NO: 1135656 - RNA, 19 nt, Artificial Sequence
  Description of Artificial Sequence: Synthetic oligonucleotide
  Sense strand starting at position 649 of SEQ ID NO: 916169
acaagauguugggucauca

SEQ ID NO: 1135657 - RNA, 19 nt, Artificial Sequence
  Description of Artificial Sequence: Synthetic oligonucleotide
  Antisense strand to SEQ ID NO: 1135656
ugaugacccaacaucuugu

SEQ ID NO: 1135658 - RNA, 19 nt, Artificial Sequence
  Description of Artificial Sequence: Synthetic oligonucleotide
  Sense strand starting at position 724 of SEQ ID NO: 916169
cuccaagguugucuaaaga

SEQ ID NO: 1135659 - RNA, 19 nt, Artificial Sequence
  Description of Artificial Sequence: Synthetic oligonucleotide
  Antisense strand to SEQ ID NO: 1135658
ucuuuagacaaccuuggag

SEQ ID NO: 1135660 - RNA, 19 nt, Artificial Sequence
  Description of Artificial Sequence: Synthetic oligonucleotide
  Sense strand starting at position 911 of SEQ ID NO: 916169
cauauagcugcgcugagua

SEQ ID NO: 1135661 - RNA, 19 nt, Artificial Sequence
  Description of Artificial Sequence: Synthetic oligonucleotide
  Antisense strand to SEQ ID NO: 1135660
uacucagcgcagcuauaug

SEQ ID NO: 1135662 - RNA, 19 nt, Artificial Sequence
  Description of Artificial Sequence: Synthetic oligonucleotide
  Sense strand starting at position 1137 of SEQ ID NO: 916169
gacauaagugcgcaacaca

SEQ ID NO: 1135663 - RNA, 19 nt, Artificial Sequence
  Description of Artificial Sequence: Synthetic oligonucleotide
  Antisense strand to SEQ ID NO: 1135662
uguguugcgcacuuauguc

SEQ ID NO: 1135664 - RNA, 19 nt, Artificial Sequence
  Description of Artificial Sequence: Synthetic oligonucleotide
  Sense strand starting at position 1434 of SEQ ID NO: 916169
gugauucacgucuacgaaa

SEQ ID NO: 1135665 - RNA, 19 nt, Artificial Sequence
  Description of Artificial Sequence: Synthetic oligonucleotide
  Antisense strand to SEQ ID NO: 1135664
uuucguagacgugaaucac

SEQ ID NO: 1135666 - RNA, 19 nt, Artificial Sequence
  Description of Artificial Sequence: Synthetic oligonucleotide
  Sense strand starting at position 2085 of SEQ ID NO: 916169
gacuuccugccggaagagu

SEQ ID NO: 1135667 - RNA, 19 nt, Artificial Sequence
  Description of Artificial Sequence: Synthetic oligonucleotide
  Antisense strand to SEQ ID NO: 1135666
acucuuccggcaggaaguc

SEQ ID NO: 1135668 - RNA, 19 nt, Artificial Sequence
  Description of Artificial Sequence: Synthetic oligonucleotide
  Sense strand starting at position 2169 of SEQ ID NO: 916169
cgaaauggaugugcugaaa

SEQ ID NO: 1135669 - RNA, 19 nt, Artificial Sequence
  Description of Artificial Sequence: Synthetic oligonucleotide
  Antisense strand to SEQ ID NO: 1135668
uuucagcacauccauuucg

SEQ ID NO: 1135670 - RNA, 19 nt, Artificial Sequence
  Description of Artificial Sequence: Synthetic oligonucleotide
  Sense strand starting at position 2189 of SEQ ID NO: 916169
ggaagauucugaguuuaau

SEQ ID NO: 1135671 - RNA, 19 nt, Artificial Sequence
  Description of Artificial Sequence: Synthetic oligonucleotide
  Antisense strand to SEQ ID NO: 1135670
auuaaacucagaaucuucc

SEQ ID NO: 1135672 - RNA, 19 nt, Artificial Sequence
  Description of Artificial Sequence: Synthetic oligonucleotide
  Sense strand starting at position 2192 of SEQ ID NO: 916169
agauucugaguuuaaugua

SEQ ID NO: 1135673 - RNA, 19 nt, Artificial Sequence
  Description of Artificial Sequence: Synthetic oligonucleotide
  Antisense strand to SEQ ID NO: 1135672
uacauuaaacucagaaucu

SEQ ID NO: 1135674 - RNA, 19 nt, Artificial Sequence
  Description of Artificial Sequence: Synthetic oligonucleotide
  Sense strand starting at position 2384 of SEQ ID NO: 916169
uuaguagaaacgggauauu

SEQ ID NO: 1135675 - RNA, 19 nt, Artificial Sequence
  Description of Artificial Sequence: Synthetic oligonucleotide
  Antisense strand to SEQ ID NO: 1135674
aauaucccguuucuacuaa

SEQ ID NO: 1135676 - RNA, 19 nt, Artificial Sequence
  Description of Artificial Sequence: Synthetic oligonucleotide
  Sense strand starting at position 2844 of SEQ ID NO: 916169
cgggauuacaggcaucaac

SEQ ID NO: 1135677 - RNA, 19 nt, Artificial Sequence
  Description of Artificial Sequence: Synthetic oligonucleotide
  Antisense strand to SEQ ID NO: 1135676
guugaugccuguaaucccg

SEQ ID NO: 1135678 - RNA, 19 nt, Artificial Sequence
  Description of Artificial Sequence: Synthetic oligonucleotide
  Sense strand starting at position 2907 of SEQ ID NO: 916169
gaacgucuuguguaagaau

SEQ ID NO: 1135679 - RNA, 19 nt, Artificial Sequence
  Description of Artificial Sequence: Synthetic oligonucleotide
  Antisense strand to SEQ ID NO: 1135678
auucuuacacaagacguuc

SEQ ID NO: 1135680 - RNA, 19 nt, Artificial Sequence
  Description of Artificial Sequence: Synthetic oligonucleotide
  Sense strand starting at position 2935 of SEQ ID NO: 916169
gaggcauauuuagacggaa

SEQ ID NO: 1135681 - RNA, 19 nt, Artificial Sequence
  Description of Artificial Sequence: Synthetic oligonucleotide
  Antisense strand to SEQ ID NO: 1135680
uuccgucuaaauaugccuc

SEQ ID NO: 1135682 - RNA, 19 nt, Artificial Sequence
  Description of Artificial Sequence: Synthetic oligonucleotide
  Sense strand starting at position 2961 of SEQ ID NO: 916169
guaacaaaugcugaacacu

SEQ ID NO: 1135683 - RNA, 19 nt, Artificial Sequence
  Description of Artificial Sequence: Synthetic oligonucleotide
  Antisense strand to SEQ ID NO: 1135682
aguguucagcauuuguuac

SEQ ID NO: 1135684 - RNA, 19 nt, Artificial Sequence
  Description of Artificial Sequence: Synthetic oligonucleotide
  Sense strand starting at position 3025 of SEQ ID NO: 916169
cuagguuuaguccaacuua

SEQ ID NO: 1135685 - RNA, 19 nt, Artificial Sequence
  Description of Artificial Sequence: Synthetic oligonucleotide
  Antisense strand to SEQ ID NO: 1135684
uaaguuggacuaaaccuag

SEQ ID NO: 1135686 - RNA, 19 nt, Artificial Sequence
  Description of Artificial Sequence: Synthetic oligonucleotide
  Sense strand starting at position 3156 of SEQ ID NO: 916169
gcggguacaacauggaaua

SEQ ID NO: 1135687 - RNA, 19 nt, Artificial Sequence
  Description of Artificial Sequence: Synthetic oligonucleotide
  Antisense strand to SEQ ID NO: 1135686
uauuccauguuguacccgc

SEQ ID NO: 1135688 - RNA, 19 nt, Artificial Sequence
  Description of Artificial Sequence: Synthetic oligonucleotide
  Sense strand starting at position 3245 of SEQ ID NO: 916169
acaaguauucugugaguaa

SEQ ID NO: 1135689 - RNA, 19 nt, Artificial Sequence
  Description of Artificial Sequence: Synthetic oligonucleotide
  Antisense strand to SEQ ID NO: 1135688
uuacucacagaauacuugu

SEQ ID NO: 1135690 - RNA, 19 nt, Artificial Sequence
  Description of Artificial Sequence: Synthetic oligonucleotide
  Sense strand starting at position 3248 of SEQ ID NO: 916169
aguauucugugaguaauua

SEQ ID NO: 1135691 - RNA, 19 nt, Artificial Sequence
  Description of Artificial Sequence: Synthetic oligonucleotide
  Antisense strand to SEQ ID NO: 1135690
uaauuacucacagaauacu

SEQ ID NO: 1135692 - RNA, 19 nt, Artificial Sequence
  Description of Artificial Sequence: Synthetic oligonucleotide
  Sense strand starting at position 3249 of SEQ ID NO: 916169
guauucugugaguaauuaa

SEQ ID NO: 1135693 - RNA, 19 nt, Artificial Sequence
  Description of Artificial Sequence: Synthetic oligonucleotide
  Antisense strand to SEQ ID NO: 1135692
uuaauuacucacagaauac

SEQ ID NO: 1135694 - RNA, 19 nt, Artificial Sequence
  Description of Artificial Sequence: Synthetic oligonucleotide
  Sense strand starting at position 3285 of SEQ ID NO: 916169
aguuauuaggugcaacuuu

SEQ ID NO: 1135695 - RNA, 19 nt, Artificial Sequence
  Description of Artificial Sequence: Synthetic oligonucleotide
  Antisense strand to SEQ ID NO: 1135694
aaaguugcaccuaauaacu

SEQ ID NO: 1135696 - RNA, 19 nt, Artificial Sequence
  Description of Artificial Sequence: Synthetic oligonucleotide
  Sense strand starting at position 3375 of SEQ ID NO: 916169
cugggaaugucuucugaag

SEQ ID NO: 1135697 - RNA, 19 nt, Artificial Sequence
  Description of Artificial Sequence: Synthetic oligonucleotide
  Antisense strand to SEQ ID NO: 1135696
cuucagaagacauucccag

SEQ ID NO: 1135698 - RNA, 19 nt, Artificial Sequence
  Description of Artificial Sequence: Synthetic oligonucleotide
  Sense strand starting at position 3381 of SEQ ID NO: 916169
augucuucugaagagguuu

SEQ ID NO: 1135699 - RNA, 19 nt, Artificial Sequence
  Description of Artificial Sequence: Synthetic oligonucleotide
  Antisense strand to SEQ ID NO: 1135698
aaaccucuucagaagacau

SEQ ID NO: 1135700 - RNA, 19 nt, Artificial Sequence
  Description of Artificial Sequence: Synthetic oligonucleotide
  Sense strand starting at position 3526 of SEQ ID NO: 916169
gggaaaguguggaaugauu

SEQ ID NO: 1135701 - RNA, 19 nt, Artificial Sequence
  Description of Artificial Sequence: Synthetic oligonucleotide
  Antisense strand to SEQ ID NO: 1135700
aaucauuccacacuuuccc

SEQ ID NO: 1135702 - RNA, 19 nt, Artificial Sequence
  Description of Artificial Sequence: Synthetic oligonucleotide
  Sense strand starting at position 3617 of SEQ ID NO: 916169
guuacauggguguauaucu

SEQ ID NO: 1135703 - RNA, 19 nt, Artificial Sequence
  Description of Artificial Sequence: Synthetic oligonucleotide
  Antisense strand to SEQ ID NO: 1135702
agauauacacccauguaac

SEQ ID NO: 1135704 - RNA, 19 nt, Artificial Sequence
  Description of Artificial Sequence: Synthetic oligonucleotide
  Sense strand starting at position 3622 of SEQ ID NO: 916169
auggguguauaucuagaau

SEQ ID NO: 1135705 - RNA, 19 nt, Artificial Sequence
  Description of Artificial Sequence: Synthetic oligonucleotide
  Antisense strand to SEQ ID NO: 1135704
auucuagauauacacccau

SEQ ID NO: 1135706 - RNA, 19 nt, Artificial Sequence
  Description of Artificial Sequence: Synthetic oligonucleotide
  Sense strand starting at position 3634 of SEQ ID NO: 916169
cuagaauucguauacuuaa

SEQ ID NO: 1135707 - RNA, 19 nt, Artificial Sequence
  Description of Artificial Sequence: Synthetic oligonucleotide
  Antisense strand to SEQ ID NO: 1135706
uuaaguauacgaauucuag

SEQ ID NO: 1135708 - RNA, 19 nt, Artificial Sequence
  Description of Artificial Sequence: Synthetic oligonucleotide
  Sense strand starting at position 3637 of SEQ ID NO: 916169
gaauucguauacuuaagau

SEQ ID NO: 1135709 - RNA, 19 nt, Artificial Sequence
  Description of Artificial Sequence: Synthetic oligonucleotide
  Antisense strand to SEQ ID NO: 1135708
aucuuaaguauacgaauuc

SEQ ID NO: 1135710 - RNA, 19 nt, Artificial Sequence
  Description of Artificial Sequence: Synthetic oligonucleotide
  Sense strand starting at position 3683 of SEQ ID NO: 916169
uauguaagucacgcguuaa

SEQ ID NO: 1135711 - RNA, 19 nt, Artificial Sequence
  Description of Artificial Sequence: Synthetic oligonucleotide
  Antisense strand to SEQ ID NO: 1135710
uuaacgcgugacuuacaua

SEQ ID NO: 1135712 - RNA, 19 nt, Artificial Sequence
  Description of Artificial Sequence: Synthetic oligonucleotide
  Sense strand starting at position 3686 of SEQ ID NO: 916169
guaagucacgcguuaauua

SEQ ID NO: 1135713 - RNA, 19 nt, Artificial Sequence
  Description of Artificial Sequence: Synthetic oligonucleotide
  Antisense strand to SEQ ID NO: 1135712
uaauuaacgcgugacuuac

SEQ ID NO: 1135714 - RNA, 19 nt, Artificial Sequence
  Description of Artificial Sequence: Synthetic oligonucleotide
  Sense strand starting at position 3729 of SEQ ID NO: 916169
cugaauggagagugcaauu

SEQ ID NO: 1135715 - RNA, 19 nt, Artificial Sequence
  Description of Artificial Sequence: Synthetic oligonucleotide
  Antisense strand to SEQ ID NO: 1135714
aauugcacucuccauucag

SEQ ID NO: 1135716 - RNA, 19 nt, Artificial Sequence
  Description of Artificial Sequence: Synthetic oligonucleotide
  Sense strand starting at position 3765 of SEQ ID NO: 916169
cggagcaacuccuugaaua

SEQ ID NO: 1135717 - RNA, 19 nt, Artificial Sequence
  Description of Artificial Sequence: Synthetic oligonucleotide
  Antisense strand to SEQ ID NO: 1135716
uauucaaggaguugcuccg

SEQ ID NO: 1135718 - RNA, 19 nt, Artificial Sequence
  Description of Artificial Sequence: Synthetic oligonucleotide
  Sense strand starting at position 3766 of SEQ ID NO: 916169
ggagcaacuccuugaauag

SEQ ID NO: 1135719 - RNA, 19 nt, Artificial Sequence
  Description of Artificial Sequence: Synthetic oligonucleotide
  Antisense strand to SEQ ID NO: 1135718
cuauucaaggaguugcucc

SEQ ID NO: 1135720 - RNA, 19 nt, Artificial Sequence
  Description of Artificial Sequence: Synthetic oligonucleotide
  Sense strand starting at position 3825 of SEQ ID NO: 916169
ccagaauguuaggcauucu

SEQ ID NO: 1135721 - RNA, 19 nt, Artificial Sequence
  Description of Artificial Sequence: Synthetic oligonucleotide
  Antisense strand to SEQ ID NO: 1135720
agaaugccuaacauucugg

SEQ ID NO: 1135722 - RNA, 19 nt, Artificial Sequence
  Description of Artificial Sequence: Synthetic oligonucleotide
  Sense strand starting at position 44 of SEQ ID NO: 916170
gugugugagcugcuuaucu

SEQ ID NO: 1135723 - RNA, 19 nt, Artificial Sequence
  Description of Artificial Sequence: Synthetic oligonucleotide
  Antisense strand to SEQ ID NO: 1135722
agauaagcagcucacacac

SEQ ID NO: 1135724 - RNA, 19 nt, Artificial Sequence
  Description of Artificial Sequence: Synthetic oligonucleotide
  Sense strand starting at position 280 of SEQ ID NO: 916170
agcggaaacuccuaaugag

SEQ ID NO: 1135725 - RNA, 19 nt, Artificial Sequence
  Description of Artificial Sequence: Synthetic oligonucleotide
  Antisense strand to SEQ ID NO: 1135724
cucauuaggaguuuccgcu

SEQ ID NO: 1135726 - RNA, 19 nt, Artificial Sequence
  Description of Artificial Sequence: Synthetic oligonucleotide
  Sense strand starting at position 283 of SEQ ID NO: 916170
ggaaacuccuaaugagauu

SEQ ID NO: 1135727 - RNA, 19 nt, Artificial Sequence
  Description of Artificial Sequence: Synthetic oligonucleotide
  Antisense strand to SEQ ID NO: 1135726
aaucucauuaggaguuucc

SEQ ID NO: 1135728 - RNA, 19 nt, Artificial Sequence
  Description of Artificial Sequence: Synthetic oligonucleotide
  Sense strand starting at position 292 of SEQ ID NO: 916170
uaaugagauuaguuggugu

SEQ ID NO: 1135729 - RNA, 19 nt, Artificial Sequence
  Description of Artificial Sequence: Synthetic oligonucleotide
  Antisense strand to SEQ ID NO: 1135728
acaccaacuaaucucauua

SEQ ID NO: 1135730 - RNA, 19 nt, Artificial Sequence
  Description of Artificial Sequence: Synthetic oligonucleotide
  Sense strand starting at position 294 of SEQ ID NO: 916170
augagauuaguuggugugu

SEQ ID NO: 1135731 - RNA, 19 nt, Artificial Sequence
  Description of Artificial Sequence: Synthetic oligonucleotide
  Antisense strand to SEQ ID NO: 1135730
acacaccaacuaaucucau

SEQ ID NO: 1135732 - RNA, 19 nt, Artificial Sequence
  Description of Artificial Sequence: Synthetic oligonucleotide
  Sense strand starting at position 314 of SEQ ID NO: 916170
ugcagacauuacuuagcaa

SEQ ID NO: 1135733 - RNA, 19 nt, Artificial Sequence
  Description of Artificial Sequence: Synthetic oligonucleotide
  Antisense strand to SEQ ID NO: 1135732
uugcuaaguaaugucugca

SEQ ID NO: 1135734 - RNA, 19 nt, Artificial Sequence
  Description of Artificial Sequence: Synthetic oligonucleotide
  Sense strand starting at position 317 of SEQ ID NO: 916170
agacauuacuuagcaauga

SEQ ID NO: 1135735 - RNA, 19 nt, Artificial Sequence
  Description of Artificial Sequence: Synthetic oligonucleotide
  Antisense strand to SEQ ID NO: 1135734
ucauugcuaaguaaugucu

SEQ ID NO: 1135736 - RNA, 19 nt, Artificial Sequence
  Description of Artificial Sequence: Synthetic oligonucleotide
  Sense strand starting at position 399 of SEQ ID NO: 916170
gcagcagaaucccuuuaac

SEQ ID NO: 1135737 - RNA, 19 nt, Artificial Sequence
  Description of Artificial Sequence: Synthetic oligonucleotide
  Antisense strand to SEQ ID NO: 1135736
guuaaagggauucugcugc

SEQ ID NO: 1135738 - RNA, 19 nt, Artificial Sequence
  Description of Artificial Sequence: Synthetic oligonucleotide
  Sense strand starting at position 645 of SEQ ID NO: 916170
gagcuccucuagugaguca

SEQ ID NO: 1135739 - RNA, 19 nt, Artificial Sequence
  Description of Artificial Sequence: Synthetic oligonucleotide
  Antisense strand to SEQ ID NO: 1135738
ugacucacuagaggagcuc

SEQ ID NO: 1135740 - RNA, 19 nt, Artificial Sequence
  Description of Artificial Sequence: Synthetic oligonucleotide
  Sense strand starting at position 648 of SEQ ID NO: 916170
cuccucuagugagucauuu

SEQ ID NO: 1135741 - RNA, 19 nt, Artificial Sequence
  Description of Artificial Sequence: Synthetic oligonucleotide
  Antisense strand to SEQ ID NO: 1135740
aaaugacucacuagaggag

SEQ ID NO: 1135742 - RNA, 19 nt, Artificial Sequence
  Description of Artificial Sequence: Synthetic oligonucleotide
  Sense strand starting at position 709 of SEQ ID NO: 916170
gcaauuagucuugccguuu

SEQ ID NO: 1135743 - RNA, 19 nt, Artificial Sequence
  Description of Artificial Sequence: Synthetic oligonucleotide
  Antisense strand to SEQ ID NO: 1135742
aaacggcaagacuaauugc

SEQ ID NO: 1135744 - RNA, 19 nt, Artificial Sequence
  Description of Artificial Sequence: Synthetic oligonucleotide
  Sense strand starting at position 736 of SEQ ID NO: 916170
gccagaaacucucccgaca

SEQ ID NO: 1135745 - RNA, 19 nt, Artificial Sequence
  Description of Artificial Sequence: Synthetic oligonucleotide
  Antisense strand to SEQ ID NO: 1135744
ugucgggagaguuucuggc

SEQ ID NO: 1135746 - RNA, 19 nt, Artificial Sequence
  Description of Artificial Sequence: Synthetic oligonucleotide
  Sense strand starting at position 838 of SEQ ID NO: 916170
ugcagcuugucccuaggau

SEQ ID NO: 1135747 - RNA, 19 nt, Artificial Sequence
  Description of Artificial Sequence: Synthetic oligonucleotide
  Antisense strand to SEQ ID NO: 1135746
auccuagggacaagcugca

SEQ ID NO: 1135748 - RNA, 19 nt, Artificial Sequence
  Description of Artificial Sequence: Synthetic oligonucleotide
  Sense strand starting at position 839 of SEQ ID NO: 916170
gcagcuugucccuaggaug

SEQ ID NO: 1135749 - RNA, 19 nt, Artificial Sequence
  Description of Artificial Sequence: Synthetic oligonucleotide
  Antisense strand to SEQ ID NO: 1135748
cauccuagggacaagcugc

SEQ ID NO: 1135750 - RNA, 19 nt, Artificial Sequence
  Description of Artificial Sequence: Synthetic oligonucleotide
  Sense strand starting at position 842 of SEQ ID NO: 916170
gcuugucccuaggaugauu

SEQ ID NO: 1135751 - RNA, 19 nt, Artificial Sequence
  Description of Artificial Sequence: Synthetic oligonucleotide
  Antisense strand to SEQ ID NO: 1135750
aaucauccuagggacaagc

SEQ ID NO: 1135752 - RNA, 19 nt, Artificial Sequence
  Description of Artificial Sequence: Synthetic oligonucleotide
  Sense strand starting at position 960 of SEQ ID NO: 916170
ggccaacguugaguucgaa

SEQ ID NO: 1135753 - RNA, 19 nt, Artificial Sequence
  Description of Artificial Sequence: Synthetic oligonucleotide
  Antisense strand to SEQ ID NO: 1135752
uucgaacucaacguuggcc

SEQ ID NO: 1135754 - RNA, 19 nt, Artificial Sequence
  Description of Artificial Sequence: Synthetic oligonucleotide
  Sense strand starting at position 963 of SEQ ID NO: 916170
caacguugaguucgaaggu

SEQ ID NO: 1135755 - RNA, 19 nt, Artificial Sequence
  Description of Artificial Sequence: Synthetic oligonucleotide
  Antisense strand to SEQ ID NO: 1135754
accuucgaacucaacguug

SEQ ID NO: 1135756 - RNA, 19 nt, Artificial Sequence
  Description of Artificial Sequence: Synthetic oligonucleotide
  Sense strand starting at position 964 of SEQ ID NO: 916170
aacguugaguucgaaggua

SEQ ID NO: 1135757 - RNA, 19 nt, Artificial Sequence
  Description of Artificial Sequence: Synthetic oligonucleotide
  Antisense strand to SEQ ID NO: 1135756
uaccuucgaacucaacguu

SEQ ID NO: 1135758 - RNA, 19 nt, Artificial Sequence
  Description of Artificial Sequence: Synthetic oligonucleotide
  Sense strand starting at position 2420 of SEQ ID NO: 916170
uuugguugcucugggcaaa

SEQ ID NO: 1135759 - RNA, 19 nt, Artificial Sequence
  Description of Artificial Sequence: Synthetic oligonucleotide
  Antisense strand to SEQ ID NO: 1135758
uuugcccagagcaaccaaa

SEQ ID NO: 1135760 - RNA, 19 nt, Artificial Sequence
  Description of Artificial Sequence: Synthetic oligonucleotide
  Sense strand starting at position 3283 of SEQ ID NO: 916170
cggcuaaugucagaaucac

SEQ ID NO: 1135761 - RNA, 19 nt, Artificial Sequence
  Description of Artificial Sequence: Synthetic oligonucleotide
  Antisense strand to SEQ ID NO: 1135760
gugauucugacauuagccg

SEQ ID NO: 1135762 - RNA, 19 nt, Artificial Sequence
  Description of Artificial Sequence: Synthetic oligonucleotide
  Sense strand starting at position 3373 of SEQ ID NO: 916170
gggugugaguccuuucaaa

SEQ ID NO: 1135763 - RNA, 19 nt, Artificial Sequence
  Description of Artificial Sequence: Synthetic oligonucleotide
  Antisense strand to SEQ ID NO: 1135762
uuugaaaggacucacaccc

SEQ ID NO: 1135764 - RNA, 19 nt, Artificial Sequence
  Description of Artificial Sequence: Synthetic oligonucleotide
  Sense strand starting at position 3418 of SEQ ID NO: 916170
cuacguuuguuucuaguuu

SEQ ID NO: 1135765 - RNA, 19 nt, Artificial Sequence
  Description of Artificial Sequence: Synthetic oligonucleotide
  Antisense strand to SEQ ID NO: 1135764
aaacuagaaacaaacguag

SEQ ID NO: 1135766 - RNA, 19 nt, Artificial Sequence
  Description of Artificial Sequence: Synthetic oligonucleotide
  Sense strand starting at position 3437 of SEQ ID NO: 916170
ugcagucucuccugaaaga

SEQ ID NO: 1135767 - RNA, 19 nt, Artificial Sequence
  Description of Artificial Sequence: Synthetic oligonucleotide
  Antisense strand to SEQ ID NO: 1135766
ucuuucaggagagacugca

SEQ ID NO: 1135768 - RNA, 19 nt, Artificial Sequence
  Description of Artificial Sequence: Synthetic oligonucleotide
  Sense strand starting at position 3438 of SEQ ID NO: 916170
gcagucucuccugaaagau

SEQ ID NO: 1135769 - RNA, 19 nt, Artificial Sequence
  Description of Artificial Sequence: Synthetic oligonucleotide
  Antisense strand to SEQ ID NO: 1135768
aucuuucaggagagacugc

SEQ ID NO: 1135770 - RNA, 19 nt, Artificial Sequence
  Description of Artificial Sequence: Synthetic oligonucleotide
  Sense strand starting at position 3543 of SEQ ID NO: 916170
gcuccaagugccuaucaga

SEQ ID NO: 1135771 - RNA, 19 nt, Artificial Sequence
  Description of Artificial Sequence: Synthetic oligonucleotide
  Antisense strand to SEQ ID NO: 1135770
ucugauaggcacuuggagc

SEQ ID NO: 1135772 - RNA, 19 nt, Artificial Sequence
  Description of Artificial Sequence: Synthetic oligonucleotide
  Sense strand starting at position 3562 of SEQ ID NO: 916170
gcacacaggugauaggaau

SEQ ID NO: 1135773 - RNA, 19 nt, Artificial Sequence
  Description of Artificial Sequence: Synthetic oligonucleotide
  Antisense strand to SEQ ID NO: 1135772
auuccuaucaccugugugc

SEQ ID NO: 1135774 - RNA, 19 nt, Artificial Sequence
  Description of Artificial Sequence: Synthetic oligonucleotide
  Sense strand starting at position 3576 of SEQ ID NO: 916170
ggaauuuccuucgggcauu

SEQ ID NO: 1135775 - RNA, 19 nt, Artificial Sequence
  Description of Artificial Sequence: Synthetic oligonucleotide
  Antisense strand to SEQ ID NO: 1135774
aaugcccgaaggaaauucc

SEQ ID NO: 1135776 - RNA, 19 nt, Artificial Sequence
  Description of Artificial Sequence: Synthetic oligonucleotide
  Sense strand starting at position 3577 of SEQ ID NO: 916170
gaauuuccuucgggcauuu

SEQ ID NO: 1135777 - RNA, 19 nt, Artificial Sequence
  Description of Artificial Sequence: Synthetic oligonucleotide
  Antisense strand to SEQ ID NO: 1135776
aaaugcccgaaggaaauuc

SEQ ID NO: 1135778 - RNA, 19 nt, Artificial Sequence
  Description of Artificial Sequence: Synthetic oligonucleotide
  Sense strand starting at position 3611 of SEQ ID NO: 916170
uggguaguccacuggaaag

SEQ ID NO: 1135779 - RNA, 19 nt, Artificial Sequence
  Description of Artificial Sequence: Synthetic oligonucleotide
  Antisense strand to SEQ ID NO: 1135778
cuuuccaguggacuaccca

SEQ ID NO: 1135780 - RNA, 19 nt, Artificial Sequence
  Description of Artificial Sequence: Synthetic oligonucleotide
  Sense strand starting at position 3643 of SEQ ID NO: 916170
ccuccagaccucugagaag

SEQ ID NO: 1135781 - RNA, 19 nt, Artificial Sequence
  Description of Artificial Sequence: Synthetic oligonucleotide
  Antisense strand to SEQ ID NO: 1135780
cuucucagaggucuggagg

SEQ ID NO: 1135782 - RNA, 19 nt, Artificial Sequence
  Description of Artificial Sequence: Synthetic oligonucleotide
  Sense strand starting at position 3773 of SEQ ID NO: 916170
uuccaauuaggguauuauu

SEQ ID NO: 1135783 - RNA, 19 nt, Artificial Sequence
  Description of Artificial Sequence: Synthetic oligonucleotide
  Antisense strand to SEQ ID NO: 1135782
aauaauacccuaauuggaa

SEQ ID NO: 1135784 - RNA, 19 nt, Artificial Sequence
  Description of Artificial Sequence: Synthetic oligonucleotide
  Sense strand starting at position 3776 of SEQ ID NO: 916170
caauuaggguauuauuguu

SEQ ID NO: 1135785 - RNA, 19 nt, Artificial Sequence
  Description of Artificial Sequence: Synthetic oligonucleotide
  Antisense strand to SEQ ID NO: 1135784
aacaauaauacccuaauug

SEQ ID NO: 1135786 - RNA, 19 nt, Artificial Sequence
  Description of Artificial Sequence: Synthetic oligonucleotide
  Sense strand starting at position 3805 of SEQ ID NO: 916170
gucaucuucuucugucacu

SEQ ID NO: 1135787 - RNA, 19 nt, Artificial Sequence
  Description of Artificial Sequence: Synthetic oligonucleotide
  Antisense strand to SEQ ID NO: 1135786
agugacagaagaagaugac

SEQ ID NO: 1135788 - RNA, 19 nt, Artificial Sequence
  Description of Artificial Sequence: Synthetic oligonucleotide
  Sense strand starting at position 3810 of SEQ ID NO: 916170
cuucuucugucacucagua

SEQ ID NO: 1135789 - RNA, 19 nt, Artificial Sequence
  Description of Artificial Sequence: Synthetic oligonucleotide
  Antisense strand to SEQ ID NO: 1135788
uacugagugacagaagaag

SEQ ID NO: 1135790 - RNA, 19 nt, Artificial Sequence
  Description of Artificial Sequence: Synthetic oligonucleotide
  Sense strand starting at position 3815 of SEQ ID NO: 916170
ucugucacucaguagaaca

SEQ ID NO: 1135791 - RNA, 19 nt, Artificial Sequence
  Description of Artificial Sequence: Synthetic oligonucleotide
  Antisense strand to SEQ ID NO: 1135790
uguucuacugagugacaga

SEQ ID NO: 1135792 - RNA, 19 nt, Artificial Sequence
  Description of Artificial Sequence: Synthetic oligonucleotide
  Sense strand starting at position 3848 of SEQ ID NO: 916170
auaugauccagcuguugga

SEQ ID NO: 1135793 - RNA, 19 nt, Artificial Sequence
  Description of Artificial Sequence: Synthetic oligonucleotide
  Antisense strand to SEQ ID NO: 1135792
uccaacagcuggaucauau

SEQ ID NO: 1135794 - RNA, 19 nt, Artificial Sequence
  Description of Artificial Sequence: Synthetic oligonucleotide
  Sense strand starting at position 3931 of SEQ ID NO: 916170
guugcuuugcuuuaggaga

SEQ ID NO: 1135795 - RNA, 19 nt, Artificial Sequence
  Description of Artificial Sequence: Synthetic oligonucleotide
  Antisense strand to SEQ ID NO: 1135794
ucuccuaaagcaaagcaac

SEQ ID NO: 1135796 - RNA, 19 nt, Artificial Sequence
  Description of Artificial Sequence: Synthetic oligonucleotide
  Sense strand starting at position 3933 of SEQ ID NO: 916170
ugcuuugcuuuaggagaua

SEQ ID NO: 1135797 - RNA, 19 nt, Artificial Sequence
  Description of Artificial Sequence: Synthetic oligonucleotide
  Antisense strand to SEQ ID NO: 1135796
uaucuccuaaagcaaagca

SEQ ID NO: 1135798 - RNA, 19 nt, Artificial Sequence
  Description of Artificial Sequence: Synthetic oligonucleotide
  Sense strand starting at position 3936 of SEQ ID NO: 916170
uuugcuuuaggagauauau

SEQ ID NO: 1135799 - RNA, 19 nt, Artificial Sequence
  Description of Artificial Sequence: Synthetic oligonucleotide
  Antisense strand to SEQ ID NO: 1135798
auauaucuccuaaagcaaa

SEQ ID NO: 1135800 - RNA, 19 nt, Artificial Sequence
  Description of Artificial Sequence: Synthetic oligonucleotide
  Sense strand starting at position 3942 of SEQ ID NO: 916170
uuaggagauauaugccuga

SEQ ID NO: 1135801 - RNA, 19 nt, Artificial Sequence
  Description of Artificial Sequence: Synthetic oligonucleotide
  Antisense strand to SEQ ID NO: 1135800
ucaggcauauaucuccuaa

SEQ ID NO: 1135802 - RNA, 19 nt, Artificial Sequence
  Description of Artificial Sequence: Synthetic oligonucleotide
  Sense strand starting at position 147 of SEQ ID NO: 916171
acaucagaaguuugauguu

SEQ ID NO: 1135803 - RNA, 19 nt, Artificial Sequence
  Description of Artificial Sequence: Synthetic oligonucleotide
  Antisense strand to SEQ ID NO: 1135802
aacaucaaacuucugaugu

SEQ ID NO: 1135804 - RNA, 19 nt, Artificial Sequence
  Description of Artificial Sequence: Synthetic oligonucleotide
  Sense strand starting at position 161 of SEQ ID NO: 916171
auguuaaagaaguggacua

SEQ ID NO: 1135805 - RNA, 19 nt, Artificial Sequence
  Description of Artificial Sequence: Synthetic oligonucleotide
  Antisense strand to SEQ ID NO: 1135804
uaguccacuucuuuaacau

SEQ ID NO: 1135806 - RNA, 19 nt, Artificial Sequence
  Description of Artificial Sequence: Synthetic oligonucleotide
  Sense strand starting at position 308 of SEQ ID NO: 916171
uauguaucacuggaaugua

SEQ ID NO: 1135807 - RNA, 19 nt, Artificial Sequence
  Description of Artificial Sequence: Synthetic oligonucleotide
  Antisense strand to SEQ ID NO: 1135806
uacauuccagugauacaua

SEQ ID NO: 1135808 - RNA, 19 nt, Artificial Sequence
  Description of Artificial Sequence: Synthetic oligonucleotide
  Sense strand starting at position 311 of SEQ ID NO: 916171
guaucacuggaauguauau

SEQ ID NO: 1135809 - RNA, 19 nt, Artificial Sequence
  Description of Artificial Sequence: Synthetic oligonucleotide
  Antisense strand to SEQ ID NO: 1135808
auauacauuccagugauac

SEQ ID NO: 1135810 - RNA, 19 nt, Artificial Sequence
  Description of Artificial Sequence: Synthetic oligonucleotide
  Sense strand starting at position 320 of SEQ ID NO: 916171
gaauguauaugucuagcaa

SEQ ID NO: 1135811 - RNA, 19 nt, Artificial Sequence
  Description of Artificial Sequence: Synthetic oligonucleotide
  Antisense strand to SEQ ID NO: 1135810
uugcuagacauauacauuc

SEQ ID NO: 1135812 - RNA, 19 nt, Artificial Sequence
  Description of Artificial Sequence: Synthetic oligonucleotide
  Sense strand starting at position 332 of SEQ ID NO: 916171
cuagcaacauucuugagau

SEQ ID NO: 1135813 - RNA, 19 nt, Artificial Sequence
  Description of Artificial Sequence: Synthetic oligonucleotide
  Antisense strand to SEQ ID NO: 1135812
aucucaagaauguugcuag

SEQ ID NO: 1135814 - RNA, 19 nt, Artificial Sequence
  Description of Artificial Sequence: Synthetic oligonucleotide
  Sense strand starting at position 345 of SEQ ID NO: 916171
ugagauauauggcuccaaa

SEQ ID NO: 1135815 - RNA, 19 nt, Artificial Sequence
  Description of Artificial Sequence: Synthetic oligonucleotide
  Antisense strand to SEQ ID NO: 1135814
uuuggagccauauaucuca

SEQ ID NO: 1135816 - RNA, 19 nt, Artificial Sequence
  Description of Artificial Sequence: Synthetic oligonucleotide
  Sense strand starting at position 393 of SEQ ID NO: 916171
gaaauugaauaguugaagu

SEQ ID NO: 1135817 - RNA, 19 nt, Artificial Sequence
  Description of Artificial Sequence: Synthetic oligonucleotide
  Antisense strand to SEQ ID NO: 1135816
acuucaacuauucaauuuc

SEQ ID NO: 1135818 - RNA, 19 nt, Artificial Sequence
  Description of Artificial Sequence: Synthetic oligonucleotide
  Sense strand starting at position 409 of SEQ ID NO: 916171
aguaaugucacagagagca

SEQ ID NO: 1135819 - RNA, 19 nt, Artificial Sequence
  Description of Artificial Sequence: Synthetic oligonucleotide
  Antisense strand to SEQ ID NO: 1135818
ugcucucugugacauuacu

SEQ ID NO: 1135820 - RNA, 19 nt, Artificial Sequence
  Description of Artificial Sequence: Synthetic oligonucleotide
  Sense strand starting at position 459 of SEQ ID NO: 916171
gagacacccuuaguuauag

SEQ ID NO: 1135821 - RNA, 19 nt, Artificial Sequence
  Description of Artificial Sequence: Synthetic oligonucleotide
  Antisense strand to SEQ ID NO: 1135820
cuauaacuaagggugucuc

SEQ ID NO: 1135822 - RNA, 19 nt, Artificial Sequence
  Description of Artificial Sequence: Synthetic oligonucleotide
  Sense strand starting at position 460 of SEQ ID NO: 916171
agacacccuuaguuauaga

SEQ ID NO: 1135823 - RNA, 19 nt, Artificial Sequence
  Description of Artificial Sequence: Synthetic oligonucleotide
  Antisense strand to SEQ ID NO: 1135822
ucuauaacuaagggugucu

SEQ ID NO: 1135824 - RNA, 19 nt, Artificial Sequence
  Description of Artificial Sequence: Synthetic oligonucleotide
  Sense strand starting at position 751 of SEQ ID NO: 916171
cuucuaaaccaaugcgauu

SEQ ID NO: 1135825 - RNA, 19 nt, Artificial Sequence
  Description of Artificial Sequence: Synthetic oligonucleotide
  Antisense strand to SEQ ID NO: 1135824
aaucgcauugguuuagaag

SEQ ID NO: 1135826 - RNA, 19 nt, Artificial Sequence
  Description of Artificial Sequence: Synthetic oligonucleotide
  Sense strand starting at position 765 of SEQ ID NO: 916171
cgauuucuucugggccuau

SEQ ID NO: 1135827 - RNA, 19 nt, Artificial Sequence
  Description of Artificial Sequence: Synthetic oligonucleotide
  Antisense strand to SEQ ID NO: 1135826
auaggcccagaagaaaucg

SEQ ID NO: 1135828 - RNA, 19 nt, Artificial Sequence
  Description of Artificial Sequence: Synthetic oligonucleotide
  Sense strand starting at position 787 of SEQ ID NO: 916171
auuaguucuaacggguaag

SEQ ID NO: 1135829 - RNA, 19 nt, Artificial Sequence
  Description of Artificial Sequence: Synthetic oligonucleotide
  Antisense strand to SEQ ID NO: 1135828
cuuacccguuagaacuaau

SEQ ID NO: 1135830 - RNA, 19 nt, Artificial Sequence
  Description of Artificial Sequence: Synthetic oligonucleotide
  Sense strand starting at position 788 of SEQ ID NO: 916171
uuaguucuaacggguaaga

SEQ ID NO: 1135831 - RNA, 19 nt, Artificial Sequence
  Description of Artificial Sequence: Synthetic oligonucleotide
  Antisense strand to SEQ ID NO: 1135830
ucuuacccguuagaacuaa

SEQ ID NO: 1135832 - RNA, 19 nt, Artificial Sequence
  Description of Artificial Sequence: Synthetic oligonucleotide
  Sense strand starting at position 790 of SEQ ID NO: 916171
aguucuaacggguaagaga

SEQ ID NO: 1135833 - RNA, 19 nt, Artificial Sequence
  Description of Artificial Sequence: Synthetic oligonucleotide
  Antisense strand to SEQ ID NO: 1135832
ucucuuacccguuagaacu

SEQ ID NO: 1135834 - RNA, 19 nt, Artificial Sequence
  Description of Artificial Sequence: Synthetic oligonucleotide
  Sense strand starting at position 827 of SEQ ID NO: 916171
ugcccaaggcuuuaagaua

SEQ ID NO: 1135835 - RNA, 19 nt, Artificial Sequence
  Description of Artificial Sequence: Synthetic oligonucleotide
  Antisense strand to SEQ ID NO: 1135834
uaucuuaaagccuugggca

SEQ ID NO: 1135836 - RNA, 19 nt, Artificial Sequence
  Description of Artificial Sequence: Synthetic oligonucleotide
  Sense strand starting at position 844 of SEQ ID NO: 916171
uagagaacugcugguucua

SEQ ID NO: 1135837 - RNA, 19 nt, Artificial Sequence
  Description of Artificial Sequence: Synthetic oligonucleotide
  Antisense strand to SEQ ID NO: 1135836
uagaaccagcaguucucua

SEQ ID NO: 1135838 - RNA, 19 nt, Artificial Sequence
  Description of Artificial Sequence: Synthetic oligonucleotide
  Sense strand starting at position 846 of SEQ ID NO: 916171
gagaacugcugguucuauu

SEQ ID NO: 1135839 - RNA, 19 nt, Artificial Sequence
  Description of Artificial Sequence: Synthetic oligonucleotide
  Antisense strand to SEQ ID NO: 1135838
aauagaaccagcaguucuc

SEQ ID NO: 1135840 - RNA, 19 nt, Artificial Sequence
  Description of Artificial Sequence: Synthetic oligonucleotide
  Sense strand starting at position 877 of SEQ ID NO: 916171
agagaugaaugauagauaa

SEQ ID NO: 1135841 - RNA, 19 nt, Artificial Sequence
  Description of Artificial Sequence: Synthetic oligonucleotide
  Antisense strand to SEQ ID NO: 1135840
uuaucuaucauucaucucu

SEQ ID NO: 1135842 - RNA, 19 nt, Artificial Sequence
  Description of Artificial Sequence: Synthetic oligonucleotide
  Sense strand starting at position 937 of SEQ ID NO: 916171
caguguaucauagguggau

SEQ ID NO: 1135843 - RNA, 19 nt, Artificial Sequence
  Description of Artificial Sequence: Synthetic oligonucleotide
  Antisense strand to SEQ ID NO: 1135842
auccaccuaugauacacug

SEQ ID NO: 1135844 - RNA, 19 nt, Artificial Sequence
  Description of Artificial Sequence: Synthetic oligonucleotide
  Sense strand starting at position 938 of SEQ ID NO: 916171
aguguaucauagguggaua

SEQ ID NO: 1135845 - RNA, 19 nt, Artificial Sequence
  Description of Artificial Sequence: Synthetic oligonucleotide
  Antisense strand to SEQ ID NO: 1135844
uauccaccuaugauacacu

SEQ ID NO: 1135846 - RNA, 19 nt, Artificial Sequence
  Description of Artificial Sequence: Synthetic oligonucleotide
  Sense strand starting at position 939 of SEQ ID NO: 916171
guguaucauagguggauau

SEQ ID NO: 1135847 - RNA, 19 nt, Artificial Sequence
  Description of Artificial Sequence: Synthetic oligonucleotide
  Antisense strand to SEQ ID NO: 1135846
auauccaccuaugauacac

SEQ ID NO: 1135848 - RNA, 19 nt, Artificial Sequence
  Description of Artificial Sequence: Synthetic oligonucleotide
  Sense strand starting at position 940 of SEQ ID NO: 916171
uguaucauagguggauauu

SEQ ID NO: 1135849 - RNA, 19 nt, Artificial Sequence
  Description of Artificial Sequence: Synthetic oligonucleotide
  Antisense strand to SEQ ID NO: 1135848
aauauccaccuaugauaca

SEQ ID NO: 1135850 - RNA, 19 nt, Artificial Sequence
  Description of Artificial Sequence: Synthetic oligonucleotide
  Sense strand starting at position 1018 of SEQ ID NO: 916171
ggcagacuaggcuacauaa

SEQ ID NO: 1135851 - RNA, 19 nt, Artificial Sequence
  Description of Artificial Sequence: Synthetic oligonucleotide
  Antisense strand to SEQ ID NO: 1135850
uuauguagccuagucugcc

SEQ ID NO: 1135852 - RNA, 19 nt, Artificial Sequence
  Description of Artificial Sequence: Synthetic oligonucleotide
  Sense strand starting at position 1054 of SEQ ID NO: 916171
ccaguaacuugucuuggga

SEQ ID NO: 1135853 - RNA, 19 nt, Artificial Sequence
  Description of Artificial Sequence: Synthetic oligonucleotide
  Antisense strand to SEQ ID NO: 1135852
ucccaagacaaguuacugg

SEQ ID NO: 1135854 - RNA, 19 nt, Artificial Sequence
  Description of Artificial Sequence: Synthetic oligonucleotide
  Sense strand starting at position 1061 of SEQ ID NO: 916171
cuugucuugggauguggaa

SEQ ID NO: 1135855 - RNA, 19 nt, Artificial Sequence
  Description of Artificial Sequence: Synthetic oligonucleotide
  Antisense strand to SEQ ID NO: 1135854
uuccacaucccaagacaag

SEQ ID NO: 1135856 - RNA, 19 nt, Artificial Sequence
  Description of Artificial Sequence: Synthetic oligonucleotide
  Sense strand starting at position 1073 of SEQ ID NO: 916171
uguggaaugacgcaaggaa

SEQ ID NO: 1135857 - RNA, 19 nt, Artificial Sequence
  Description of Artificial Sequence: Synthetic oligonucleotide
  Antisense strand to SEQ ID NO: 1135856
uuccuugcgucauuccaca

SEQ ID NO: 1135858 - RNA, 19 nt, Artificial Sequence
  Description of Artificial Sequence: Synthetic oligonucleotide
  Sense strand starting at position 2449 of SEQ ID NO: 916171
uagcauuuccucugagcag

SEQ ID NO: 1135859 - RNA, 19 nt, Artificial Sequence
  Description of Artificial Sequence: Synthetic oligonucleotide
  Antisense strand to SEQ ID NO: 1135858
cugcucagaggaaaugcua

SEQ ID NO: 1135860 - RNA, 19 nt, Artificial Sequence
  Description of Artificial Sequence: Synthetic oligonucleotide
  Sense strand starting at position 3393 of SEQ ID NO: 916171
cugcaagagcuguaacaaa

SEQ ID NO: 1135861 - RNA, 19 nt, Artificial Sequence
  Description of Artificial Sequence: Synthetic oligonucleotide
  Antisense strand to SEQ ID NO: 1135860
uuuguuacagcucuugcag

SEQ ID NO: 1135862 - RNA, 19 nt, Artificial Sequence
  Description of Artificial Sequence: Synthetic oligonucleotide
  Sense strand starting at position 3595 of SEQ ID NO: 916171
aguuacauccacuaguaca

SEQ ID NO: 1135863 - RNA, 19 nt, Artificial Sequence
  Description of Artificial Sequence: Synthetic oligonucleotide
  Antisense strand to SEQ ID NO: 1135862
uguacuaguggauguaacu

SEQ ID NO: 1135864 - RNA, 19 nt, Artificial Sequence
  Description of Artificial Sequence: Synthetic oligonucleotide
  Sense strand starting at position 3612 of SEQ ID NO: 916171
cacucuguucuggagaagu

SEQ ID NO: 1135865 - RNA, 19 nt, Artificial Sequence
  Description of Artificial Sequence: Synthetic oligonucleotide
  Antisense strand to SEQ ID NO: 1135864
acuucuccagaacagagug

SEQ ID NO: 1135866 - RNA, 19 nt, Artificial Sequence
  Description of Artificial Sequence: Synthetic oligonucleotide
  Sense strand starting at position 3614 of SEQ ID NO: 916171
cucuguucuggagaaguuu

SEQ ID NO: 1135867 - RNA, 19 nt, Artificial Sequence
  Description of Artificial Sequence: Synthetic oligonucleotide
  Antisense strand to SEQ ID NO: 1135866
aaacuucuccagaacagag

SEQ ID NO: 1135868 - RNA, 19 nt, Artificial Sequence
  Description of Artificial Sequence: Synthetic oligonucleotide
  Sense strand starting at position 3622 of SEQ ID NO: 916171
uggagaaguuugucccuaa

SEQ ID NO: 1135869 - RNA, 19 nt, Artificial Sequence
  Description of Artificial Sequence: Synthetic oligonucleotide
  Antisense strand to SEQ ID NO: 1135868
uuagggacaaacuucucca

SEQ ID NO: 1135870 - RNA, 19 nt, Artificial Sequence
  Description of Artificial Sequence: Synthetic oligonucleotide
  Sense strand starting at position 3623 of SEQ ID NO: 916171
ggagaaguuugucccuaag

SEQ ID NO: 1135871 - RNA, 19 nt, Artificial Sequence
  Description of Artificial Sequence: Synthetic oligonucleotide
  Antisense strand to SEQ ID NO: 1135870
cuuagggacaaacuucucc

SEQ ID NO: 1135872 - RNA, 19 nt, Artificial Sequence
  Description of Artificial Sequence: Synthetic oligonucleotide
  Sense strand starting at position 3626 of SEQ ID NO: 916171
gaaguuugucccuaagcuu

SEQ ID NO: 1135873 - RNA, 19 nt, Artificial Sequence
  Description of Artificial Sequence: Synthetic oligonucleotide
  Antisense strand to SEQ ID NO: 1135872
aagcuuagggacaaacuuc

SEQ ID NO: 1135874 - RNA, 19 nt, Artificial Sequence
  Description of Artificial Sequence: Synthetic oligonucleotide
  Sense strand starting at position 3655 of SEQ ID NO: 916171
ccuguucucuccuucuaga

SEQ ID NO: 1135875 - RNA, 19 nt, Artificial Sequence
  Description of Artificial Sequence: Synthetic oligonucleotide
  Antisense strand to SEQ ID NO: 1135874
ucuagaaggagagaacagg

SEQ ID NO: 1135876 - RNA, 19 nt, Artificial Sequence
  Description of Artificial Sequence: Synthetic oligonucleotide
  Sense strand starting at position 3762 of SEQ ID NO: 916171
accuguaaccuguaaugua

SEQ ID NO: 1135877 - RNA, 19 nt, Artificial Sequence
  Description of Artificial Sequence: Synthetic oligonucleotide
  Antisense strand to SEQ ID NO: 1135876
uacauuacagguuacaggu

SEQ ID NO: 1135878 - RNA, 19 nt, Artificial Sequence
  Description of Artificial Sequence: Synthetic oligonucleotide
  Sense strand starting at position 3889 of SEQ ID NO: 916171
acaugauuacgguacagca

SEQ ID NO: 1135879 - RNA, 19 nt, Artificial Sequence
  Description of Artificial Sequence: Synthetic oligonucleotide
  Antisense strand to SEQ ID NO: 1135878
ugcuguaccguaaucaugu

SEQ ID NO: 1135880 - RNA, 19 nt, Artificial Sequence
  Description of Artificial Sequence: Synthetic oligonucleotide
  Sense strand starting at position 3924 of SEQ ID NO: 916171
agagguugcacagaguaca

SEQ ID NO: 1135881 - RNA, 19 nt, Artificial Sequence
  Description of Artificial Sequence: Synthetic oligonucleotide
  Antisense strand to SEQ ID NO: 1135880
uguacucugugcaaccucu

SEQ ID NO: 1135882 - RNA, 19 nt, Artificial Sequence
  Description of Artificial Sequence: Synthetic oligonucleotide
  Sense strand starting at position 146 of SEQ ID NO: 916172
ugcccugaugccuacucaa

SEQ ID NO: 1135883 - RNA, 19 nt, Artificial Sequence
  Description of Artificial Sequence: Synthetic oligonucleotide
  Antisense strand to SEQ ID NO: 1135882
uugaguaggcaucagggca

SEQ ID NO: 1135884 - RNA, 19 nt, Artificial Sequence
  Description of Artificial Sequence: Synthetic oligonucleotide
  Sense strand starting at position 264 of SEQ ID NO: 916172
agccuaacuuugucagaca

SEQ ID NO: 1135885 - RNA, 19 nt, Artificial Sequence
  Description of Artificial Sequence: Synthetic oligonucleotide
  Antisense strand to SEQ ID NO: 1135884
ugucugacaaaguuaggcu

SEQ ID NO: 1135886 - RNA, 19 nt, Artificial Sequence
  Description of Artificial Sequence: Synthetic oligonucleotide
  Sense strand starting at position 329 of SEQ ID NO: 916172
accagugucuauguugaaa

SEQ ID NO: 1135887 - RNA, 19 nt, Artificial Sequence
  Description of Artificial Sequence: Synthetic oligonucleotide
  Antisense strand to SEQ ID NO: 1135886
uuucaacauagacacuggu

SEQ ID NO: 1135888 - RNA, 19 nt, Artificial Sequence
  Description of Artificial Sequence: Synthetic oligonucleotide
  Sense strand starting at position 444 of SEQ ID NO: 916172
ucaugauuagcaugagugu

SEQ ID NO: 1135889 - RNA, 19 nt, Artificial Sequence
  Description of Artificial Sequence: Synthetic oligonucleotide
  Antisense strand to SEQ ID NO: 1135888
acacucaugcuaaucauga

SEQ ID NO: 1135890 - RNA, 19 nt, Artificial Sequence
  Description of Artificial Sequence: Synthetic oligonucleotide
  Sense strand starting at position 445 of SEQ ID NO: 916172
caugauuagcaugaguguu

SEQ ID NO: 1135891 - RNA, 19 nt, Artificial Sequence
  Description of Artificial Sequence: Synthetic oligonucleotide
  Antisense strand to SEQ ID NO: 1135890
aacacucaugcuaaucaug

SEQ ID NO: 1135892 - RNA, 19 nt, Artificial Sequence
  Description of Artificial Sequence: Synthetic oligonucleotide
  Sense strand starting at position 453 of SEQ ID NO: 916172
gcaugaguguuugcauuua

SEQ ID NO: 1135893 - RNA, 19 nt, Artificial Sequence
  Description of Artificial Sequence: Synthetic oligonucleotide
  Antisense strand to SEQ ID NO: 1135892
uaaaugcaaacacucaugc

SEQ ID NO: 1135894 - RNA, 19 nt, Artificial Sequence
  Description of Artificial Sequence: Synthetic oligonucleotide
  Sense strand starting at position 1417 of SEQ ID NO: 916172
uggccaguucccgauguca

SEQ ID NO: 1135895 - RNA, 19 nt, Artificial Sequence
  Description of Artificial Sequence: Synthetic oligonucleotide
  Antisense strand to SEQ ID NO: 1135894
ugacaucgggaacuggcca

SEQ ID NO: 1135896 - RNA, 19 nt, Artificial Sequence
  Description of Artificial Sequence: Synthetic oligonucleotide
  Sense strand starting at position 1431 of SEQ ID NO: 916172
ugucauuuccaaggugugu

SEQ ID NO: 1135897 - RNA, 19 nt, Artificial Sequence
  Description of Artificial Sequence: Synthetic oligonucleotide
  Antisense strand to SEQ ID NO: 1135896
acacaccuuggaaaugaca

SEQ ID NO: 1135898 - RNA, 19 nt, Artificial Sequence
  Description of Artificial Sequence: Synthetic oligonucleotide
  Sense strand starting at position 1447 of SEQ ID NO: 916172
ugugguguuuccuccauaa

SEQ ID NO: 1135899 - RNA, 19 nt, Artificial Sequence
  Description of Artificial Sequence: Synthetic oligonucleotide
  Antisense strand to SEQ ID NO: 1135898
uuauggaggaaacaccaca

SEQ ID NO: 1135900 - RNA, 19 nt, Artificial Sequence
  Description of Artificial Sequence: Synthetic oligonucleotide
  Sense strand starting at position 1449 of SEQ ID NO: 916172
ugguguuuccuccauaaac

SEQ ID NO: 1135901 - RNA, 19 nt, Artificial Sequence
  Description of Artificial Sequence: Synthetic oligonucleotide
  Antisense strand to SEQ ID NO: 1135900
guuuauggaggaaacacca

SEQ ID NO: 1135902 - RNA, 19 nt, Artificial Sequence
  Description of Artificial Sequence: Synthetic oligonucleotide
  Sense strand starting at position 1451 of SEQ ID NO: 916172
guguuuccuccauaaacag

SEQ ID NO: 1135903 - RNA, 19 nt, Artificial Sequence
  Description of Artificial Sequence: Synthetic oligonucleotide
  Antisense strand to SEQ ID NO: 1135902
cuguuuauggaggaaacac

SEQ ID NO: 1135904 - RNA, 19 nt, Artificial Sequence
  Description of Artificial Sequence: Synthetic oligonucleotide
  Sense strand starting at position 1658 of SEQ ID NO: 916172
uugguucuuagaggaucau

SEQ ID NO: 1135905 - RNA, 19 nt, Artificial Sequence
  Description of Artificial Sequence: Synthetic oligonucleotide
  Antisense strand to SEQ ID NO: 1135904
augauccucuaagaaccaa

SEQ ID NO: 1135906 - RNA, 19 nt, Artificial Sequence
  Description of Artificial Sequence: Synthetic oligonucleotide
  Sense strand starting at position 1986 of SEQ ID NO: 916172
gaaucagucuggcuuuaaa

SEQ ID NO: 1135907 - RNA, 19 nt, Artificial Sequence
  Description of Artificial Sequence: Synthetic oligonucleotide
  Antisense strand to SEQ ID NO: 1135906
uuuaaagccagacugauuc

SEQ ID NO: 1135908 - RNA, 19 nt, Artificial Sequence
  Description of Artificial Sequence: Synthetic oligonucleotide
  Sense strand starting at position 2014 of SEQ ID NO: 916172
aagauuuguugguaagcua

SEQ ID NO: 1135909 - RNA, 19 nt, Artificial Sequence
  Description of Artificial Sequence: Synthetic oligonucleotide
  Antisense strand to SEQ ID NO: 1135908
uagcuuaccaacaaaucuu

SEQ ID NO: 1135910 - RNA, 19 nt, Artificial Sequence
  Description of Artificial Sequence: Synthetic oligonucleotide
  Sense strand starting at position 2045 of SEQ ID NO: 916172
cuggcagucagucaagagu

SEQ ID NO: 1135911 - RNA, 19 nt, Artificial Sequence
  Description of Artificial Sequence: Synthetic oligonucleotide
  Antisense strand to SEQ ID NO: 1135910
acucuugacugacugccag

SEQ ID NO: 1135912 - RNA, 19 nt, Artificial Sequence
  Description of Artificial Sequence: Synthetic oligonucleotide
  Sense strand starting at position 2066 of SEQ ID NO: 916172
cugggagugagccaucaau

SEQ ID NO: 1135913 - RNA, 19 nt, Artificial Sequence
  Description of Artificial Sequence: Synthetic oligonucleotide
  Antisense strand to SEQ ID NO: 1135912
auugauggcucacucccag

SEQ ID NO: 1135914 - RNA, 19 nt, Artificial Sequence
  Description of Artificial Sequence: Synthetic oligonucleotide
  Sense strand starting at position 2166 of SEQ ID NO: 916172
guaacaggaucacacaaau

SEQ ID NO: 1135915 - RNA, 19 nt, Artificial Sequence
  Description of Artificial Sequence: Synthetic oligonucleotide
  Antisense strand to SEQ ID NO: 1135914
auuugugugauccuguuac

SEQ ID NO: 1135916 - RNA, 19 nt, Artificial Sequence
  Description of Artificial Sequence: Synthetic oligonucleotide
  Sense strand starting at position 2224 of SEQ ID NO: 916172
gagacuugguuaccaugga

SEQ ID NO: 1135917 - RNA, 19 nt, Artificial Sequence
  Description of Artificial Sequence: Synthetic oligonucleotide
  Antisense strand to SEQ ID NO: 1135916
uccaugguaaccaagucuc

SEQ ID NO: 1135918 - RNA, 19 nt, Artificial Sequence
  Description of Artificial Sequence: Synthetic oligonucleotide
  Sense strand starting at position 2228 of SEQ ID NO: 916172
cuugguuaccauggacaua

SEQ ID NO: 1135919 - RNA, 19 nt, Artificial Sequence
  Description of Artificial Sequence: Synthetic oligonucleotide
  Antisense strand to SEQ ID NO: 1135918
uauguccaugguaaccaag

SEQ ID NO: 1135920 - RNA, 19 nt, Artificial Sequence
  Description of Artificial Sequence: Synthetic oligonucleotide
  Sense strand starting at position 2291 of SEQ ID NO: 916172
caguguccugcugacugaa

SEQ ID NO: 1135921 - RNA, 19 nt, Artificial Sequence
  Description of Artificial Sequence: Synthetic oligonucleotide
  Antisense strand to SEQ ID NO: 1135920
uucagucagcaggacacug

SEQ ID NO: 1135922 - RNA, 19 nt, Artificial Sequence
  Description of Artificial Sequence: Synthetic oligonucleotide
  Sense strand starting at position 2304 of SEQ ID NO: 916172
acugaaguccuaggucauc

SEQ ID NO: 1135923 - RNA, 19 nt, Artificial Sequence
  Description of Artificial Sequence: Synthetic oligonucleotide
  Antisense strand to SEQ ID NO: 1135922
gaugaccuaggacuucagu

SEQ ID NO: 1135924 - RNA, 19 nt, Artificial Sequence
  Description of Artificial Sequence: Synthetic oligonucleotide
  Sense strand starting at position 2309 of SEQ ID NO: 916172
aguccuaggucaucaucaa

SEQ ID NO: 1135925 - RNA, 19 nt, Artificial Sequence
  Description of Artificial Sequence: Synthetic oligonucleotide
  Antisense strand to SEQ ID NO: 1135924
uugaugaugaccuaggacu

SEQ ID NO: 1135926 - RNA, 19 nt, Artificial Sequence
  Description of Artificial Sequence: Synthetic oligonucleotide
  Sense strand starting at position 2317 of SEQ ID NO: 916172
gucaucaucaagcgagauu

SEQ ID NO: 1135927 - RNA, 19 nt, Artificial Sequence
  Description of Artificial Sequence: Synthetic oligonucleotide
  Antisense strand to SEQ ID NO: 1135926
aaucucgcuugaugaugac

SEQ ID NO: 1135928 - RNA, 19 nt, Artificial Sequence
  Description of Artificial Sequence: Synthetic oligonucleotide
  Sense strand starting at position 2372 of SEQ ID NO: 916172
gcucacugucaggaauuau

SEQ ID NO: 1135929 - RNA, 19 nt, Artificial Sequence
  Description of Artificial Sequence: Synthetic oligonucleotide
  Antisense strand to SEQ ID NO: 1135928
auaauuccugacagugagc

SEQ ID NO: 1135930 - RNA, 19 nt, Artificial Sequence
  Description of Artificial Sequence: Synthetic oligonucleotide
  Sense strand starting at position 2535 of SEQ ID NO: 916172
cagagaauuccuggucuuu

SEQ ID NO: 1135931 - RNA, 19 nt, Artificial Sequence
  Description of Artificial Sequence: Synthetic oligonucleotide
  Antisense strand to SEQ ID NO: 1135930
aaagaccaggaauucucug

SEQ ID NO: 1135932 - RNA, 19 nt, Artificial Sequence
  Description of Artificial Sequence: Synthetic oligonucleotide
  Sense strand starting at position 2600 of SEQ ID NO: 916172
gaaguccucuaguuaagaa

SEQ ID NO: 1135933 - RNA, 19 nt, Artificial Sequence
  Description of Artificial Sequence: Synthetic oligonucleotide
  Antisense strand to SEQ ID NO: 1135932
uucuuaacuagaggacuuc

SEQ ID NO: 1135934 - RNA, 19 nt, Artificial Sequence
  Description of Artificial Sequence: Synthetic oligonucleotide
  Sense strand starting at position 2640 of SEQ ID NO: 916172
gcuggaccuuguucuacaa

SEQ ID NO: 1135935 - RNA, 19 nt, Artificial Sequence
  Description of Artificial Sequence: Synthetic oligonucleotide
  Antisense strand to SEQ ID NO: 1135934
uuguagaacaagguccagc

SEQ ID NO: 1135936 - RNA, 19 nt, Artificial Sequence
  Description of Artificial Sequence: Synthetic oligonucleotide
  Sense strand starting at position 2670 of SEQ ID NO: 916172
gaacuuggccaguagcaua

SEQ ID NO: 1135937 - RNA, 19 nt, Artificial Sequence
  Description of Artificial Sequence: Synthetic oligonucleotide
  Antisense strand to SEQ ID NO: 1135936
uaugcuacuggccaaguuc

SEQ ID NO: 1135938 - RNA, 19 nt, Artificial Sequence
  Description of Artificial Sequence: Synthetic oligonucleotide
  Sense strand starting at position 2675 of SEQ ID NO: 916172
uggccaguagcauaaucau

SEQ ID NO: 1135939 - RNA, 19 nt, Artificial Sequence
  Description of Artificial Sequence: Synthetic oligonucleotide
  Antisense strand to SEQ ID NO: 1135938
augauuaugcuacuggcca

SEQ ID NO: 1135940 - RNA, 19 nt, Artificial Sequence
  Description of Artificial Sequence: Synthetic oligonucleotide
  Sense strand starting at position 2779 of SEQ ID NO: 916172
aggcauuccacuggagaga

SEQ ID NO: 1135941 - RNA, 19 nt, Artificial Sequence
  Description of Artificial Sequence: Synthetic oligonucleotide
  Antisense strand to SEQ ID NO: 1135940
ucucuccaguggaaugccu

SEQ ID NO: 1135942 - RNA, 19 nt, Artificial Sequence
  Description of Artificial Sequence: Synthetic oligonucleotide
  Sense strand starting at position 2836 of SEQ ID NO: 916172
acaaauuugcugugugacu

SEQ ID NO: 1135943 - RNA, 19 nt, Artificial Sequence
  Description of Artificial Sequence: Synthetic oligonucleotide
  Antisense strand to SEQ ID NO: 1135942
agucacacagcaaauuugu

SEQ ID NO: 1135944 - RNA, 19 nt, Artificial Sequence
  Description of Artificial Sequence: Synthetic oligonucleotide
  Sense strand starting at position 2904 of SEQ ID NO: 916172
ggagauggcagguauguaa

SEQ ID NO: 1135945 - RNA, 19 nt, Artificial Sequence
  Description of Artificial Sequence: Synthetic oligonucleotide
  Antisense strand to SEQ ID NO: 1135944
uuacauaccugccaucucc

SEQ ID NO: 1135946 - RNA, 19 nt, Artificial Sequence
  Description of Artificial Sequence: Synthetic oligonucleotide
  Sense strand starting at position 2923 of SEQ ID NO: 916172
cucauagagcuaugaugag

SEQ ID NO: 1135947 - RNA, 19 nt, Artificial Sequence
  Description of Artificial Sequence: Synthetic oligonucleotide
  Antisense strand to SEQ ID NO: 1135946
cucaucauagcucuaugag

SEQ ID NO: 1135948 - RNA, 19 nt, Artificial Sequence
  Description of Artificial Sequence: Synthetic oligonucleotide
  Sense strand starting at position 3337 of SEQ ID NO: 916172
guugaucaaauucgaugau

SEQ ID NO: 1135949 - RNA, 19 nt, Artificial Sequence
  Description of Artificial Sequence: Synthetic oligonucleotide
  Antisense strand to SEQ ID NO: 1135948
aucaucgaauuugaucaac

SEQ ID NO: 1135950 - RNA, 19 nt, Artificial Sequence
  Description of Artificial Sequence: Synthetic oligonucleotide
  Sense strand starting at position 3376 of SEQ ID NO: 916172
guuuguucuggucacaauu

SEQ ID NO: 1135951 - RNA, 19 nt, Artificial Sequence
  Description of Artificial Sequence: Synthetic oligonucleotide
  Antisense strand to SEQ ID NO: 1135950
aauugugaccagaacaaac

SEQ ID NO: 1135952 - RNA, 19 nt, Artificial Sequence
  Description of Artificial Sequence: Synthetic oligonucleotide
  Sense strand starting at position 3426 of SEQ ID NO: 916172
auauuacugucuuuaggau

SEQ ID NO: 1135953 - RNA, 19 nt, Artificial Sequence
  Description of Artificial Sequence: Synthetic oligonucleotide
  Antisense strand to SEQ ID NO: 1135952
auccuaaagacaguaauau

SEQ ID NO: 1135954 - RNA, 19 nt, Artificial Sequence
  Description of Artificial Sequence: Synthetic oligonucleotide
  Sense strand starting at position 3669 of SEQ ID NO: 916172
acugcauguuucucauaga

SEQ ID NO: 1135955 - RNA, 19 nt, Artificial Sequence
  Description of Artificial Sequence: Synthetic oligonucleotide
  Antisense strand to SEQ ID NO: 1135954
ucuaugagaaacaugcagu

SEQ ID NO: 1135956 - RNA, 19 nt, Artificial Sequence
  Description of Artificial Sequence: Synthetic oligonucleotide
  Sense strand starting at position 3765 of SEQ ID NO: 916172
gguugagagucccugugau

SEQ ID NO: 1135957 - RNA, 19 nt, Artificial Sequence
  Description of Artificial Sequence: Synthetic oligonucleotide
  Antisense strand to SEQ ID NO: 1135956
aucacagggacucucaacc

SEQ ID NO: 1135958 - RNA, 19 nt, Artificial Sequence
  Description of Artificial Sequence: Synthetic oligonucleotide
  Sense strand starting at position 3771 of SEQ ID NO: 916172
gagucccugugaucucuga

SEQ ID NO: 1135959 - RNA, 19 nt, Artificial Sequence
  Description of Artificial Sequence: Synthetic oligonucleotide
  Antisense strand to SEQ ID NO: 1135958
ucagagaucacagggacuc

SEQ ID NO: 1135960 - RNA, 19 nt, Artificial Sequence
  Description of Artificial Sequence: Synthetic oligonucleotide
  Sense strand starting at position 3775 of SEQ ID NO: 916172
cccugugaucucugagcau

SEQ ID NO: 1135961 - RNA, 19 nt, Artificial Sequence
  Description of Artificial Sequence: Synthetic oligonucleotide
  Antisense strand to SEQ ID NO: 1135960
augcucagagaucacaggg

SEQ ID NO: 1135962 - RNA, 19 nt, Artificial Sequence
  Description of Artificial Sequence: Synthetic oligonucleotide
  Sense strand starting at position 146 of SEQ ID NO: 916173
cucugaugacugggacauc

SEQ ID NO: 1135963 - RNA, 19 nt, Artificial Sequence
  Description of Artificial Sequence: Synthetic oligonucleotide
  Antisense strand to SEQ ID NO: 1135962
gaugucccagucaucagag

SEQ ID NO: 1135964 - RNA, 19 nt, Artificial Sequence
  Description of Artificial Sequence: Synthetic oligonucleotide
  Sense strand starting at position 378 of SEQ ID NO: 916173
uugggauaguaucaacaag

SEQ ID NO: 1135965 - RNA, 19 nt, Artificial Sequence
  Description of Artificial Sequence: Synthetic oligonucleotide
  Antisense strand to SEQ ID NO: 1135964
cuuguugauacuaucccaa

SEQ ID NO: 1135966 - RNA, 19 nt, Artificial Sequence
  Description of Artificial Sequence: Synthetic oligonucleotide
  Sense strand starting at position 573 of SEQ ID NO: 916173
uucccuaaggcuggaauau

SEQ ID NO: 1135967 - RNA, 19 nt, Artificial Sequence
  Description of Artificial Sequence: Synthetic oligonucleotide
  Antisense strand to SEQ ID NO: 1135966
auauuccagccuuagggaa

SEQ ID NO: 1135968 - RNA, 19 nt, Artificial Sequence
  Description of Artificial Sequence: Synthetic oligonucleotide
  Sense strand starting at position 726 of SEQ ID NO: 916173
cagagcugguuucugguaa

SEQ ID NO: 1135969 - RNA, 19 nt, Artificial Sequence
  Description of Artificial Sequence: Synthetic oligonucleotide
  Antisense strand to SEQ ID NO: 1135968
uuaccagaaaccagcucug

SEQ ID NO: 1135970 - RNA, 19 nt, Artificial Sequence
  Description of Artificial Sequence: Synthetic oligonucleotide
  Sense strand starting at position 856 of SEQ ID NO: 916173
gcggaaguuucucccaaga

SEQ ID NO: 1135971 - RNA, 19 nt, Artificial Sequence
  Description of Artificial Sequence: Synthetic oligonucleotide
  Antisense strand to SEQ ID NO: 1135970
ucuugggagaaacuuccgc

SEQ ID NO: 1135972 - RNA, 19 nt, Artificial Sequence
  Description of Artificial Sequence: Synthetic oligonucleotide
  Sense strand starting at position 858 of SEQ ID NO: 916173
ggaaguuucucccaagaaa

SEQ ID NO: 1135973 - RNA, 19 nt, Artificial Sequence
  Description of Artificial Sequence: Synthetic oligonucleotide
  Antisense strand to SEQ ID NO: 1135972
uuucuugggagaaacuucc

SEQ ID NO: 1135974 - RNA, 19 nt, Artificial Sequence
  Description of Artificial Sequence: Synthetic oligonucleotide
  Sense strand starting at position 996 of SEQ ID NO: 916173
gaaggauucuuucuccugu

SEQ ID NO: 1135975 - RNA, 19 nt, Artificial Sequence
  Description of Artificial Sequence: Synthetic oligonucleotide
  Antisense strand to SEQ ID NO: 1135974
acaggagaaagaauccuuc

SEQ ID NO: 1135976 - RNA, 19 nt, Artificial Sequence
  Description of Artificial Sequence: Synthetic oligonucleotide
  Sense strand starting at position 1445 of SEQ ID NO: 916173
agcuuuauuccuuacagug

SEQ ID NO: 1135977 - RNA, 19 nt, Artificial Sequence
  Description of Artificial Sequence: Synthetic oligonucleotide
  Antisense strand to SEQ ID NO: 1135976
cacuguaaggaauaaagcu

SEQ ID NO: 1135978 - RNA, 19 nt, Artificial Sequence
  Description of Artificial Sequence: Synthetic oligonucleotide
  Sense strand starting at position 1536 of SEQ ID NO: 916173
aggugucaagaagggaauu

SEQ ID NO: 1135979 - RNA, 19 nt, Artificial Sequence
  Description of Artificial Sequence: Synthetic oligonucleotide
  Antisense strand to SEQ ID NO: 1135978
aauucccuucuugacaccu

SEQ ID NO: 1135980 - RNA, 19 nt, Artificial Sequence
  Description of Artificial Sequence: Synthetic oligonucleotide
  Sense strand starting at position 1725 of SEQ ID NO: 916173
cugcuucuuuaggcaagau

SEQ ID NO: 1135981 - RNA, 19 nt, Artificial Sequence
  Description of Artificial Sequence: Synthetic oligonucleotide
  Antisense strand to SEQ ID NO: 1135980
aucuugccuaaagaagcag

SEQ ID NO: 1135982 - RNA, 19 nt, Artificial Sequence
  Description of Artificial Sequence: Synthetic oligonucleotide
  Sense strand starting at position 1770 of SEQ ID NO: 916173
gccagauagugacuuacca

SEQ ID NO: 1135983 - RNA, 19 nt, Artificial Sequence
  Description of Artificial Sequence: Synthetic oligonucleotide
  Antisense strand to SEQ ID NO: 1135982
ugguaagucacuaucuggc

SEQ ID NO: 1135984 - RNA, 19 nt, Artificial Sequence
  Description of Artificial Sequence: Synthetic oligonucleotide
  Sense strand starting at position 1884 of SEQ ID NO: 916173
ucacuagagucagaugaau

SEQ ID NO: 1135985 - RNA, 19 nt, Artificial Sequence
  Description of Artificial Sequence: Synthetic oligonucleotide
  Antisense strand to SEQ ID NO: 1135984
auucaucugacucuaguga

SEQ ID NO: 1135986 - RNA, 19 nt, Artificial Sequence
  Description of Artificial Sequence: Synthetic oligonucleotide
  Sense strand starting at position 1886 of SEQ ID NO: 916173
acuagagucagaugaaugu

SEQ ID NO: 1135987 - RNA, 19 nt, Artificial Sequence
  Description of Artificial Sequence: Synthetic oligonucleotide
  Antisense strand to SEQ ID NO: 1135986
acauucaucugacucuagu

SEQ ID NO: 1135988 - RNA, 19 nt, Artificial Sequence
  Description of Artificial Sequence: Synthetic oligonucleotide
  Sense strand starting at position 1890 of SEQ ID NO: 916173
gagucagaugaaugucaca

SEQ ID NO: 1135989 - RNA, 19 nt, Artificial Sequence
  Description of Artificial Sequence: Synthetic oligonucleotide
  Antisense strand to SEQ ID NO: 1135988
ugugacauucaucugacuc

SEQ ID NO: 1135990 - RNA, 19 nt, Artificial Sequence
  Description of Artificial Sequence: Synthetic oligonucleotide
  Sense strand starting at position 2045 of SEQ ID NO: 916173
cuguuugaagccugaggga

SEQ ID NO: 1135991 - RNA, 19 nt, Artificial Sequence
  Description of Artificial Sequence: Synthetic oligonucleotide
  Antisense strand to SEQ ID NO: 1135990
ucccucaggcuucaaacag

SEQ ID NO: 1135992 - RNA, 19 nt, Artificial Sequence
  Description of Artificial Sequence: Synthetic oligonucleotide
  Sense strand starting at position 2062 of SEQ ID NO: 916173
gaaggugacuaagaaggua

SEQ ID NO: 1135993 - RNA, 19 nt, Artificial Sequence
  Description of Artificial Sequence: Synthetic oligonucleotide
  Antisense strand to SEQ ID NO: 1135992
uaccuucuuagucaccuuc

SEQ ID NO: 1135994 - RNA, 19 nt, Artificial Sequence
  Description of Artificial Sequence: Synthetic oligonucleotide
  Sense strand starting at position 2079 of SEQ ID NO: 916173
uagguaaugccagauguug

SEQ ID NO: 1135995 - RNA, 19 nt, Artificial Sequence
  Description of Artificial Sequence: Synthetic oligonucleotide
  Antisense strand to SEQ ID NO: 1135994
caacaucuggcauuaccua

SEQ ID NO: 1135996 - RNA, 19 nt, Artificial Sequence
  Description of Artificial Sequence: Synthetic oligonucleotide
  Sense strand starting at position 2081 of SEQ ID NO: 916173
gguaaugccagauguugag

SEQ ID NO: 1135997 - RNA, 19 nt, Artificial Sequence
  Description of Artificial Sequence: Synthetic oligonucleotide
  Antisense strand to SEQ ID NO: 1135996
cucaacaucuggcauuacc

SEQ ID NO: 1135998 - RNA, 19 nt, Artificial Sequence
  Description of Artificial Sequence: Synthetic oligonucleotide
  Sense strand starting at position 2174 of SEQ ID NO: 916173
gaggguucuuuguccaaau

SEQ ID NO: 1135999 - RNA, 19 nt, Artificial Sequence
  Description of Artificial Sequence: Synthetic oligonucleotide
  Antisense strand to SEQ ID NO: 1135998
auuuggacaaagaacccuc

SEQ ID NO: 1136000 - RNA, 19 nt, Artificial Sequence
  Description of Artificial Sequence: Synthetic oligonucleotide
  Sense strand starting at position 2175 of SEQ ID NO: 916173
aggguucuuuguccaaauu

SEQ ID NO: 1136001 - RNA, 19 nt, Artificial Sequence
  Description of Artificial Sequence: Synthetic oligonucleotide
  Antisense strand to SEQ ID NO: 1136000
aauuuggacaaagaacccu

SEQ ID NO: 1136002 - RNA, 19 nt, Artificial Sequence
  Description of Artificial Sequence: Synthetic oligonucleotide
  Sense strand starting at position 2176 of SEQ ID NO: 916173
ggguucuuuguccaaauua

SEQ ID NO: 1136003 - RNA, 19 nt, Artificial Sequence
  Description of Artificial Sequence: Synthetic oligonucleotide
  Antisense strand to SEQ ID NO: 1136002
uaauuuggacaaagaaccc

SEQ ID NO: 1136004 - RNA, 19 nt, Artificial Sequence
  Description of Artificial Sequence: Synthetic oligonucleotide
  Sense strand starting at position 2205 of SEQ ID NO: 916173
ugggcugaucuuuggguga

SEQ ID NO: 1136005 - RNA, 19 nt, Artificial Sequence
  Description of Artificial Sequence: Synthetic oligonucleotide
  Antisense strand to SEQ ID NO: 1136004
ucacccaaagaucagccca

SEQ ID NO: 1136006 - RNA, 19 nt, Artificial Sequence
  Description of Artificial Sequence: Synthetic oligonucleotide
  Sense strand starting at position 2333 of SEQ ID NO: 916173
uaaggugauugguccaaau

SEQ ID NO: 1136007 - RNA, 19 nt, Artificial Sequence
  Description of Artificial Sequence: Synthetic oligonucleotide
  Antisense strand to SEQ ID NO: 1136006
auuuggaccaaucaccuua

SEQ ID NO: 1136008 - RNA, 19 nt, Artificial Sequence
  Description of Artificial Sequence: Synthetic oligonucleotide
  Sense strand starting at position 2404 of SEQ ID NO: 916173
agaggaugugucggucaga

SEQ ID NO: 1136009 - RNA, 19 nt, Artificial Sequence
  Description of Artificial Sequence: Synthetic oligonucleotide
  Antisense strand to SEQ ID NO: 1136008
ucugaccgacacauccucu

SEQ ID NO: 1136010 - RNA, 19 nt, Artificial Sequence
  Description of Artificial Sequence: Synthetic oligonucleotide
  Sense strand starting at position 2405 of SEQ ID NO: 916173
gaggaugugucggucagaa

SEQ ID NO: 1136011 - RNA, 19 nt, Artificial Sequence
  Description of Artificial Sequence: Synthetic oligonucleotide
  Antisense strand to SEQ ID NO: 1136010
uucugaccgacacauccuc

SEQ ID NO: 1136012 - RNA, 19 nt, Artificial Sequence
  Description of Artificial Sequence: Synthetic oligonucleotide
  Sense strand starting at position 2780 of SEQ ID NO: 916173
guaugaugcccuugccaga

SEQ ID NO: 1136013 - RNA, 19 nt, Artificial Sequence
  Description of Artificial Sequence: Synthetic oligonucleotide
  Antisense strand to SEQ ID NO: 1136012
ucuggcaagggcaucauac

SEQ ID NO: 1136014 - RNA, 19 nt, Artificial Sequence
  Description of Artificial Sequence: Synthetic oligonucleotide
  Sense strand starting at position 2936 of SEQ ID NO: 916173
ugugcuuuaacaggagaag

SEQ ID NO: 1136015 - RNA, 19 nt, Artificial Sequence
  Description of Artificial Sequence: Synthetic oligonucleotide
  Antisense strand to SEQ ID NO: 1136014
cuucuccuguuaaagcaca

SEQ ID NO: 1136016 - RNA, 19 nt, Artificial Sequence
  Description of Artificial Sequence: Synthetic oligonucleotide
  Sense strand starting at position 2937 of SEQ ID NO: 916173
gugcuuuaacaggagaagu

SEQ ID NO: 1136017 - RNA, 19 nt, Artificial Sequence
  Description of Artificial Sequence: Synthetic oligonucleotide
  Antisense strand to SEQ ID NO: 1136016
acuucuccuguuaaagcac

SEQ ID NO: 1136018 - RNA, 19 nt, Artificial Sequence
  Description of Artificial Sequence: Synthetic oligonucleotide
  Sense strand starting at position 2939 of SEQ ID NO: 916173
gcuuuaacaggagaaguuu

SEQ ID NO: 1136019 - RNA, 19 nt, Artificial Sequence
  Description of Artificial Sequence: Synthetic oligonucleotide
  Antisense strand to SEQ ID NO: 1136018
aaacuucuccuguuaaagc

SEQ ID NO: 1136020 - RNA, 19 nt, Artificial Sequence
  Description of Artificial Sequence: Synthetic oligonucleotide
  Sense strand starting at position 2947 of SEQ ID NO: 916173
aggagaaguuucuuccucu

SEQ ID NO: 1136021 - RNA, 19 nt, Artificial Sequence
  Description of Artificial Sequence: Synthetic oligonucleotide
  Antisense strand to SEQ ID NO: 1136020
agaggaagaaacuucuccu

SEQ ID NO: 1136022 - RNA, 19 nt, Artificial Sequence
  Description of Artificial Sequence: Synthetic oligonucleotide
  Sense strand starting at position 3078 of SEQ ID NO: 916173
gcugguggguuaaagagaa

SEQ ID NO: 1136023 - RNA, 19 nt, Artificial Sequence
  Description of Artificial Sequence: Synthetic oligonucleotide
  Antisense strand to SEQ ID NO: 1136022
uucucuuuaacccaccagc

SEQ ID NO: 1136024 - RNA, 19 nt, Artificial Sequence
  Description of Artificial Sequence: Synthetic oligonucleotide
  Sense strand starting at position 3200 of SEQ ID NO: 916173
ggaagugcaauguauguau

SEQ ID NO: 1136025 - RNA, 19 nt, Artificial Sequence
  Description of Artificial Sequence: Synthetic oligonucleotide
  Antisense strand to SEQ ID NO: 1136024
auacauacauugcacuucc

SEQ ID NO: 1136026 - RNA, 19 nt, Artificial Sequence
  Description of Artificial Sequence: Synthetic oligonucleotide
  Sense strand starting at position 3202 of SEQ ID NO: 916173
aagugcaauguauguauau

SEQ ID NO: 1136027 - RNA, 19 nt, Artificial Sequence
  Description of Artificial Sequence: Synthetic oligonucleotide
  Antisense strand to SEQ ID NO: 1136026
auauacauacauugcacuu

SEQ ID NO: 1136028 - RNA, 19 nt, Artificial Sequence
  Description of Artificial Sequence: Synthetic oligonucleotide
  Sense strand starting at position 3203 of SEQ ID NO: 916173
agugcaauguauguauaua

SEQ ID NO: 1136029 - RNA, 19 nt, Artificial Sequence
  Description of Artificial Sequence: Synthetic oligonucleotide
  Antisense strand to SEQ ID NO: 1136028
uauauacauacauugcacu

SEQ ID NO: 1136030 - RNA, 19 nt, Artificial Sequence
  Description of Artificial Sequence: Synthetic oligonucleotide
  Sense strand starting at position 3204 of SEQ ID NO: 916173
gugcaauguauguauauau

SEQ ID NO: 1136031 - RNA, 19 nt, Artificial Sequence
  Description of Artificial Sequence: Synthetic oligonucleotide
  Antisense strand to SEQ ID NO: 1136030
auauauacauacauugcac

SEQ ID NO: 1136032 - RNA, 19 nt, Artificial Sequence
  Description of Artificial Sequence: Synthetic oligonucleotide
  Sense strand starting at position 3545 of SEQ ID NO: 916173
ggagcugguuagaaugagu

SEQ ID NO: 1136033 - RNA, 19 nt, Artificial Sequence
  Description of Artificial Sequence: Synthetic oligonucleotide
  Antisense strand to SEQ ID NO: 1136032
acucauucuaaccagcucc

SEQ ID NO: 1136034 - RNA, 19 nt, Artificial Sequence
  Description of Artificial Sequence: Synthetic oligonucleotide
  Sense strand starting at position 3548 of SEQ ID NO: 916173
gcugguuagaaugaguaag

SEQ ID NO: 1136035 - RNA, 19 nt, Artificial Sequence
  Description of Artificial Sequence: Synthetic oligonucleotide
  Antisense strand to SEQ ID NO: 1136034
cuuacucauucuaaccagc

SEQ ID NO: 1136036 - RNA, 19 nt, Artificial Sequence
  Description of Artificial Sequence: Synthetic oligonucleotide
  Sense strand starting at position 3760 of SEQ ID NO: 916173
gaaugaauggucugucccu

SEQ ID NO: 1136037 - RNA, 19 nt, Artificial Sequence
  Description of Artificial Sequence: Synthetic oligonucleotide
  Antisense strand to SEQ ID NO: 1136036
agggacagaccauucauuc

SEQ ID NO: 1136038 - RNA, 19 nt, Artificial Sequence
  Description of Artificial Sequence: Synthetic oligonucleotide
  Sense strand starting at position 3761 of SEQ ID NO: 916173
aaugaauggucugucccuu

SEQ ID NO: 1136039 - RNA, 19 nt, Artificial Sequence
  Description of Artificial Sequence: Synthetic oligonucleotide
  Antisense strand to SEQ ID NO: 1136038
aagggacagaccauucauu

SEQ ID NO: 1136040 - RNA, 19 nt, Artificial Sequence
  Description of Artificial Sequence: Synthetic oligonucleotide
  Sense strand starting at position 3958 of SEQ ID NO: 916173
aguuaaggaugacuccaua

SEQ ID NO: 1136041 - RNA, 19 nt, Artificial Sequence
  Description of Artificial Sequence: Synthetic oligonucleotide
  Antisense strand to SEQ ID NO: 1136040
uauggagucauccuuaacu

SEQ ID NO: 1136042 - RNA, 19 nt, Artificial Sequence
  Description of Artificial Sequence: Synthetic oligonucleotide
  Sense strand starting at position 93 of SEQ ID NO: 916174
ucagccuucuggcucuaaa

SEQ ID NO: 1136043 - RNA, 19 nt, Artificial Sequence
  Description of Artificial Sequence: Synthetic oligonucleotide
  Antisense strand to SEQ ID NO: 1136042
uuuagagccagaaggcuga

SEQ ID NO: 1136044 - RNA, 19 nt, Artificial Sequence
  Description of Artificial Sequence: Synthetic oligonucleotide
  Sense strand starting at position 526 of SEQ ID NO: 916174
cccauuaccuuuggcagua

SEQ ID NO: 1136045 - RNA, 19 nt, Artificial Sequence
  Description of Artificial Sequence: Synthetic oligonucleotide
  Antisense strand to SEQ ID NO: 1136044
uacugccaaagguaauggg

SEQ ID NO: 1136046 - RNA, 19 nt, Artificial Sequence
  Description of Artificial Sequence: Synthetic oligonucleotide
  Sense strand starting at position 527 of SEQ ID NO: 916174
ccauuaccuuuggcaguau

SEQ ID NO: 1136047 - RNA, 19 nt, Artificial Sequence
  Description of Artificial Sequence: Synthetic oligonucleotide
  Antisense strand to SEQ ID NO: 1136046
auacugccaaagguaaugg

SEQ ID NO: 1136048 - RNA, 19 nt, Artificial Sequence
  Description of Artificial Sequence: Synthetic oligonucleotide
  Sense strand starting at position 626 of SEQ ID NO: 916174
gggaucuccucggguggaa

SEQ ID NO: 1136049 - RNA, 19 nt, Artificial Sequence
  Description of Artificial Sequence: Synthetic oligonucleotide
  Antisense strand to SEQ ID NO: 1136048
uuccacccgaggagauccc

SEQ ID NO: 1136050 - RNA, 19 nt, Artificial Sequence
  Description of Artificial Sequence: Synthetic oligonucleotide
  Sense strand starting at position 678 of SEQ ID NO: 916174
gguggagccugagaucaau

SEQ ID NO: 1136051 - RNA, 19 nt, Artificial Sequence
  Description of Artificial Sequence: Synthetic oligonucleotide
  Antisense strand to SEQ ID NO: 1136050
auugaucucaggcuccacc

SEQ ID NO: 1136052 - RNA, 19 nt, Artificial Sequence
  Description of Artificial Sequence: Synthetic oligonucleotide
  Sense strand starting at position 773 of SEQ ID NO: 916174
gcagucuagggcuguagaa

SEQ ID NO: 1136053 - RNA, 19 nt, Artificial Sequence
  Description of Artificial Sequence: Synthetic oligonucleotide
  Antisense strand to SEQ ID NO: 1136052
uucuacagcccuagacugc

SEQ ID NO: 1136054 - RNA, 19 nt, Artificial Sequence
  Description of Artificial Sequence: Synthetic oligonucleotide
  Sense strand starting at position 823 of SEQ ID NO: 916174
aggucaaugcagugaggaa

SEQ ID NO: 1136055 - RNA, 19 nt, Artificial Sequence
  Description of Artificial Sequence: Synthetic oligonucleotide
  Antisense strand to SEQ ID NO: 1136054
uuccucacugcauugaccu

SEQ ID NO: 1136056 - RNA, 19 nt, Artificial Sequence
  Description of Artificial Sequence: Synthetic oligonucleotide
  Sense strand starting at position 1157 of SEQ ID NO: 916174
gcgaaaggcgcaugcaaua

SEQ ID NO: 1136057 - RNA, 19 nt, Artificial Sequence
  Description of Artificial Sequence: Synthetic oligonucleotide
  Antisense strand to SEQ ID NO: 1136056
uauugcaugcgccuuucgc

SEQ ID NO: 1136058 - RNA, 19 nt, Artificial Sequence
  Description of Artificial Sequence: Synthetic oligonucleotide
  Sense strand starting at position 1186 of SEQ ID NO: 916174
ggaagaggguccugagaaa

SEQ ID NO: 1136059 - RNA, 19 nt, Artificial Sequence
  Description of Artificial Sequence: Synthetic oligonucleotide
  Antisense strand to SEQ ID NO: 1136058
uuucucaggacccucuucc

SEQ ID NO: 1136060 - RNA, 19 nt, Artificial Sequence
  Description of Artificial Sequence: Synthetic oligonucleotide
  Sense strand starting at position 1463 of SEQ ID NO: 916174
agggacgcucuaggauaaa

SEQ ID NO: 1136061 - RNA, 19 nt, Artificial Sequence
  Description of Artificial Sequence: Synthetic oligonucleotide
  Antisense strand to SEQ ID NO: 1136060
uuuauccuagagcgucccu

SEQ ID NO: 1136062 - RNA, 19 nt, Artificial Sequence
  Description of Artificial Sequence: Synthetic oligonucleotide
  Sense strand starting at position 1493 of SEQ ID NO: 916174
cggagaggcucccaacuua

SEQ ID NO: 1136063 - RNA, 19 nt, Artificial Sequence
  Description of Artificial Sequence: Synthetic oligonucleotide
  Antisense strand to SEQ ID NO: 1136062
uaaguugggagccucuccg

SEQ ID NO: 1136064 - RNA, 19 nt, Artificial Sequence
  Description of Artificial Sequence: Synthetic oligonucleotide
  Sense strand starting at position 2551 of SEQ ID NO: 916174
cuuugaucuccuggaggua

SEQ ID NO: 1136065 - RNA, 19 nt, Artificial Sequence
  Description of Artificial Sequence: Synthetic oligonucleotide
  Antisense strand to SEQ ID NO: 1136064
uaccuccaggagaucaaag

SEQ ID NO: 1136066 - RNA, 19 nt, Artificial Sequence
  Description of Artificial Sequence: Synthetic oligonucleotide
  Sense strand starting at position 2554 of SEQ ID NO: 916174
ugaucuccuggagguagaa

SEQ ID NO: 1136067 - RNA, 19 nt, Artificial Sequence
  Description of Artificial Sequence: Synthetic oligonucleotide
  Antisense strand to SEQ ID NO: 1136066
uucuaccuccaggagauca

SEQ ID NO: 1136068 - RNA, 19 nt, Artificial Sequence
  Description of Artificial Sequence: Synthetic oligonucleotide
  Sense strand starting at position 3420 of SEQ ID NO: 916174
uuacuaucuuuagaggcua

SEQ ID NO: 1136069 - RNA, 19 nt, Artificial Sequence
  Description of Artificial Sequence: Synthetic oligonucleotide
  Antisense strand to SEQ ID NO: 1136068
uagccucuaaagauaguaa

SEQ ID NO: 1136070 - RNA, 19 nt, Artificial Sequence
  Description of Artificial Sequence: Synthetic oligonucleotide
  Sense strand starting at position 3768 of SEQ ID NO: 916174
guugccaguugcuaggaau

SEQ ID NO: 1136071 - RNA, 19 nt, Artificial Sequence
  Description of Artificial Sequence: Synthetic oligonucleotide
  Antisense strand to SEQ ID NO: 1136070
auuccuagcaacuggcaac

SEQ ID NO: 1136072 - RNA, 19 nt, Artificial Sequence
  Description of Artificial Sequence: Synthetic oligonucleotide
  Sense strand starting at position 3810 of SEQ ID NO: 916174
guuccagugucccuagaaa

SEQ ID NO: 1136073 - RNA, 19 nt, Artificial Sequence
  Description of Artificial Sequence: Synthetic oligonucleotide
  Antisense strand to SEQ ID NO: 1136072
uuucuagggacacuggaac

SEQ ID NO: 1136074 - RNA, 19 nt, Artificial Sequence
  Description of Artificial Sequence: Synthetic oligonucleotide
  Sense strand starting at position 3846 of SEQ ID NO: 916174
ugccaagccuugccagauu

SEQ ID NO: 1136075 - RNA, 19 nt, Artificial Sequence
  Description of Artificial Sequence: Synthetic oligonucleotide
  Antisense strand to SEQ ID NO: 1136074
aaucuggcaaggcuuggca

SEQ ID NO: 1136076 - RNA, 19 nt, Artificial Sequence
  Description of Artificial Sequence: Synthetic oligonucleotide
  Sense strand starting at position 343 of SEQ ID NO: 916175
ugcacauauucugcuaaag

SEQ ID NO: 1136077 - RNA, 19 nt, Artificial Sequence
  Description of Artificial Sequence: Synthetic oligonucleotide
  Antisense strand to SEQ ID NO: 1136076
cuuuagcagaauaugugca

SEQ ID NO: 1136078 - RNA, 19 nt, Artificial Sequence
  Description of Artificial Sequence: Synthetic oligonucleotide
  Sense strand starting at position 1086 of SEQ ID NO: 916175
gcucuagugagccgucauc

SEQ ID NO: 1136079 - RNA, 19 nt, Artificial Sequence
  Description of Artificial Sequence: Synthetic oligonucleotide
  Antisense strand to SEQ ID NO: 1136078
gaugacggcucacuagagc

SEQ ID NO: 1136080 - RNA, 19 nt, Artificial Sequence
  Description of Artificial Sequence: Synthetic oligonucleotide
  Sense strand starting at position 1162 of SEQ ID NO: 916175
cuaauaaagcacugggaua

SEQ ID NO: 1136081 - RNA, 19 nt, Artificial Sequence
  Description of Artificial Sequence: Synthetic oligonucleotide
  Antisense strand to SEQ ID NO: 1136080
uaucccagugcuuuauuag

SEQ ID NO: 1136082 - RNA, 19 nt, Artificial Sequence
  Description of Artificial Sequence: Synthetic oligonucleotide
  Sense strand starting at position 1385 of SEQ ID NO: 916175
guccuuaaguucugaguga

SEQ ID NO: 1136083 - RNA, 19 nt, Artificial Sequence
  Description of Artificial Sequence: Synthetic oligonucleotide
  Antisense strand to SEQ ID NO: 1136082
ucacucagaacuuaaggac

SEQ ID NO: 1136084 - RNA, 19 nt, Artificial Sequence
  Description of Artificial Sequence: Synthetic oligonucleotide
  Sense strand starting at position 1386 of SEQ ID NO: 916175
uccuuaaguucugagugaa

SEQ ID NO: 1136085 - RNA, 19 nt, Artificial Sequence
  Description of Artificial Sequence: Synthetic oligonucleotide
  Antisense strand to SEQ ID NO: 1136084
uucacucagaacuuaagga

SEQ ID NO: 1136086 - RNA, 19 nt, Artificial Sequence
  Description of Artificial Sequence: Synthetic oligonucleotide
  Sense strand starting at position 1389 of SEQ ID NO: 916175
uuaaguucugagugaauuc

SEQ ID NO: 1136087 - RNA, 19 nt, Artificial Sequence
  Description of Artificial Sequence: Synthetic oligonucleotide
  Antisense strand to SEQ ID NO: 1136086
gaauucacucagaacuuaa

SEQ ID NO: 1136088 - RNA, 19 nt, Artificial Sequence
  Description of Artificial Sequence: Synthetic oligonucleotide
  Sense strand starting at position 1421 of SEQ ID NO: 916175
ucaggaaagugguucugga

SEQ ID NO: 1136089 - RNA, 19 nt, Artificial Sequence
  Description of Artificial Sequence: Synthetic oligonucleotide
  Antisense strand to SEQ ID NO: 1136088
uccagaaccacuuuccuga

SEQ ID NO: 1136090 - RNA, 19 nt, Artificial Sequence
  Description of Artificial Sequence: Synthetic oligonucleotide
  Sense strand starting at position 1424 of SEQ ID NO: 916175
ggaaagugguucuggacgu

SEQ ID NO: 1136091 - RNA, 19 nt, Artificial Sequence
  Description of Artificial Sequence: Synthetic oligonucleotide
  Antisense strand to SEQ ID NO: 1136090
acguccagaaccacuuucc

SEQ ID NO: 1136092 - RNA, 19 nt, Artificial Sequence
  Description of Artificial Sequence: Synthetic oligonucleotide
  Sense strand starting at position 1665 of SEQ ID NO: 916175
ggcgcuacgacucgaaaga

SEQ ID NO: 1136093 - RNA, 19 nt, Artificial Sequence
  Description of Artificial Sequence: Synthetic oligonucleotide
  Antisense strand to SEQ ID NO: 1136092
ucuuucgagucguagcgcc

SEQ ID NO: 1136094 - RNA, 19 nt, Artificial Sequence
  Description of Artificial Sequence: Synthetic oligonucleotide
  Sense strand starting at position 2661 of SEQ ID NO: 916175
agacguagcucacgucuau

SEQ ID NO: 1136095 - RNA, 19 nt, Artificial Sequence
  Description of Artificial Sequence: Synthetic oligonucleotide
  Antisense strand to SEQ ID NO: 1136094
auagacgugagcuacgucu

SEQ ID NO: 1136096 - RNA, 19 nt, Artificial Sequence
  Description of Artificial Sequence: Synthetic oligonucleotide
  Sense strand starting at position 2922 of SEQ ID NO: 916175
augagauucugucuccaga

SEQ ID NO: 1136097 - RNA, 19 nt, Artificial Sequence
  Description of Artificial Sequence: Synthetic oligonucleotide
  Antisense strand to SEQ ID NO: 1136096
ucuggagacagaaucucau

SEQ ID NO: 1136098 - RNA, 19 nt, Artificial Sequence
  Description of Artificial Sequence: Synthetic oligonucleotide
  Sense strand starting at position 2924 of SEQ ID NO: 916175
gagauucugucuccagaua

SEQ ID NO: 1136099 - RNA, 19 nt, Artificial Sequence
  Description of Artificial Sequence: Synthetic oligonucleotide
  Antisense strand to SEQ ID NO: 1136098
uaucuggagacagaaucuc

SEQ ID NO: 1136100 - RNA, 19 nt, Artificial Sequence
  Description of Artificial Sequence: Synthetic oligonucleotide
  Sense strand starting at position 3023 of SEQ ID NO: 916175
auagauauauuggacauca

SEQ ID NO: 1136101 - RNA, 19 nt, Artificial Sequence
  Description of Artificial Sequence: Synthetic oligonucleotide
  Antisense strand to SEQ ID NO: 1136100
ugauguccaauauaucuau

SEQ ID NO: 1136102 - RNA, 19 nt, Artificial Sequence
  Description of Artificial Sequence: Synthetic oligonucleotide
  Sense strand starting at position 3112 of SEQ ID NO: 916175
accuuaaguccauaugucu

SEQ ID NO: 1136103 - RNA, 19 nt, Artificial Sequence
  Description of Artificial Sequence: Synthetic oligonucleotide
  Antisense strand to SEQ ID NO: 1136102
agacauauggacuuaaggu

SEQ ID NO: 1136104 - RNA, 19 nt, Artificial Sequence
  Description of Artificial Sequence: Synthetic oligonucleotide
  Sense strand starting at position 3118 of SEQ ID NO: 916175
aguccauaugucugacaug

SEQ ID NO: 1136105 - RNA, 19 nt, Artificial Sequence
  Description of Artificial Sequence: Synthetic oligonucleotide
  Antisense strand to SEQ ID NO: 1136104
caugucagacauauggacu

SEQ ID NO: 1136106 - RNA, 19 nt, Artificial Sequence
  Description of Artificial Sequence: Synthetic oligonucleotide
  Sense strand starting at position 3121 of SEQ ID NO: 916175
ccauaugucugacauggaa

SEQ ID NO: 1136107 - RNA, 19 nt, Artificial Sequence
  Description of Artificial Sequence: Synthetic oligonucleotide
  Antisense strand to SEQ ID NO: 1136106
uuccaugucagacauaugg

SEQ ID NO: 1136108 - RNA, 19 nt, Artificial Sequence
  Description of Artificial Sequence: Synthetic oligonucleotide
  Sense strand starting at position 3135 of SEQ ID NO: 916175
uggaacucguguccaaagu

SEQ ID NO: 1136109 - RNA, 19 nt, Artificial Sequence
  Description of Artificial Sequence: Synthetic oligonucleotide
  Antisense strand to SEQ ID NO: 1136108
acuuuggacacgaguucca

SEQ ID NO: 1136110 - RNA, 19 nt, Artificial Sequence
  Description of Artificial Sequence: Synthetic oligonucleotide
  Sense strand starting at position 3136 of SEQ ID NO: 916175
ggaacucguguccaaagua

SEQ ID NO: 1136111 - RNA, 19 nt, Artificial Sequence
  Description of Artificial Sequence: Synthetic oligonucleotide
  Antisense strand to SEQ ID NO: 1136110
uacuuuggacacgaguucc

SEQ ID NO: 1136112 - RNA, 19 nt, Artificial Sequence
  Description of Artificial Sequence: Synthetic oligonucleotide
  Sense strand starting at position 3393 of SEQ ID NO: 916175
gguguaggaagccgugauu

SEQ ID NO: 1136113 - RNA, 19 nt, Artificial Sequence
  Description of Artificial Sequence: Synthetic oligonucleotide
  Antisense strand to SEQ ID NO: 1136112
aaucacggcuuccuacacc

SEQ ID NO: 1136114 - RNA, 19 nt, Artificial Sequence
  Description of Artificial Sequence: Synthetic oligonucleotide
  Sense strand starting at position 3396 of SEQ ID NO: 916175
guaggaagccgugauuaug

SEQ ID NO: 1136115 - RNA, 19 nt, Artificial Sequence
  Description of Artificial Sequence: Synthetic oligonucleotide
  Antisense strand to SEQ ID NO: 1136114
cauaaucacggcuuccuac

SEQ ID NO: 1136116 - RNA, 19 nt, Artificial Sequence
  Description of Artificial Sequence: Synthetic oligonucleotide
  Sense strand starting at position 3608 of SEQ ID NO: 916175
augagauaguguugauggu

SEQ ID NO: 1136117 - RNA, 19 nt, Artificial Sequence
  Description of Artificial Sequence: Synthetic oligonucleotide
  Antisense strand to SEQ ID NO: 1136116
accaucaacacuaucucau

SEQ ID NO: 1136118 - RNA, 19 nt, Artificial Sequence
  Description of Artificial Sequence: Synthetic oligonucleotide
  Sense strand starting at position 3609 of SEQ ID NO: 916175
ugagauaguguugaugguu

SEQ ID NO: 1136119 - RNA, 19 nt, Artificial Sequence
  Description of Artificial Sequence: Synthetic oligonucleotide
  Antisense strand to SEQ ID NO: 1136118
aaccaucaacacuaucuca

SEQ ID NO: 1136120 - RNA, 19 nt, Artificial Sequence
  Description of Artificial Sequence: Synthetic oligonucleotide
  Sense strand starting at position 3612 of SEQ ID NO: 916175
gauaguguugaugguuaca

SEQ ID NO: 1136121 - RNA, 19 nt, Artificial Sequence
  Description of Artificial Sequence: Synthetic oligonucleotide
  Antisense strand to SEQ ID NO: 1136120
uguaaccaucaacacuauc

SEQ ID NO: 1136122 - RNA, 19 nt, Artificial Sequence
  Description of Artificial Sequence: Synthetic oligonucleotide
  Sense strand starting at position 3614 of SEQ ID NO: 916175
uaguguugaugguuacaca

SEQ ID NO: 1136123 - RNA, 19 nt, Artificial Sequence
  Description of Artificial Sequence: Synthetic oligonucleotide
  Antisense strand to SEQ ID NO: 1136122
uguguaaccaucaacacua

SEQ ID NO: 1136124 - RNA, 19 nt, Artificial Sequence
  Description of Artificial Sequence: Synthetic oligonucleotide
  Sense strand starting at position 3653 of SEQ ID NO: 916175
gucacugaaugauauacuu

SEQ ID NO: 1136125 - RNA, 19 nt, Artificial Sequence
  Description of Artificial Sequence: Synthetic oligonucleotide
  Antisense strand to SEQ ID NO: 1136124
aaguauaucauucagugac

SEQ ID NO: 1136126 - RNA, 19 nt, Artificial Sequence
  Description of Artificial Sequence: Synthetic oligonucleotide
  Sense strand starting at position 3682 of SEQ ID NO: 916175
aauguuaugguauguaugu

SEQ ID NO: 1136127 - RNA, 19 nt, Artificial Sequence
  Description of Artificial Sequence: Synthetic oligonucleotide
  Antisense strand to SEQ ID NO: 1136126
acauacauaccauaacauu

SEQ ID NO: 1136128 - RNA, 19 nt, Artificial Sequence
  Description of Artificial Sequence: Synthetic oligonucleotide
  Sense strand starting at position 3684 of SEQ ID NO: 916175
uguuaugguauguauguga

SEQ ID NO: 1136129 - RNA, 19 nt, Artificial Sequence
  Description of Artificial Sequence: Synthetic oligonucleotide
  Antisense strand to SEQ ID NO: 1136128
ucacauacauaccauaaca

SEQ ID NO: 1136130 - RNA, 19 nt, Artificial Sequence
  Description of Artificial Sequence: Synthetic oligonucleotide
  Sense strand starting at position 3687 of SEQ ID NO: 916175
uaugguauguaugugaauu

SEQ ID NO: 1136131 - RNA, 19 nt, Artificial Sequence
  Description of Artificial Sequence: Synthetic oligonucleotide
  Antisense strand to SEQ ID NO: 1136130
aauucacauacauaccaua

SEQ ID NO: 1136132 - RNA, 19 nt, Artificial Sequence
  Description of Artificial Sequence: Synthetic oligonucleotide
  Sense strand starting at position 3688 of SEQ ID NO: 916175
augguauguaugugaauua

SEQ ID NO: 1136133 - RNA, 19 nt, Artificial Sequence
  Description of Artificial Sequence: Synthetic oligonucleotide
  Antisense strand to SEQ ID NO: 1136132
uaauucacauacauaccau

SEQ ID NO: 1136134 - RNA, 19 nt, Artificial Sequence
  Description of Artificial Sequence: Synthetic oligonucleotide
  Sense strand starting at position 3689 of SEQ ID NO: 916175
ugguauguaugugaauuau

SEQ ID NO: 1136135 - RNA, 19 nt, Artificial Sequence
  Description of Artificial Sequence: Synthetic oligonucleotide
  Antisense strand to SEQ ID NO: 1136134
auaauucacauacauacca

SEQ ID NO: 1136136 - RNA, 19 nt, Artificial Sequence
  Description of Artificial Sequence: Synthetic oligonucleotide
  Sense strand starting at position 3693 of SEQ ID NO: 916175
auguaugugaauuaugucu

SEQ ID NO: 1136137 - RNA, 19 nt, Artificial Sequence
  Description of Artificial Sequence: Synthetic oligonucleotide
  Antisense strand to SEQ ID NO: 1136136
agacauaauucacauacau

SEQ ID NO: 1136138 - RNA, 19 nt, Artificial Sequence
  Description of Artificial Sequence: Synthetic oligonucleotide
  Sense strand starting at position 3698 of SEQ ID NO: 916175
ugugaauuaugucugcauu

SEQ ID NO: 1136139 - RNA, 19 nt, Artificial Sequence
  Description of Artificial Sequence: Synthetic oligonucleotide
  Antisense strand to SEQ ID NO: 1136138
aaugcagacauaauucaca

SEQ ID NO: 1136140 - RNA, 19 nt, Artificial Sequence
  Description of Artificial Sequence: Synthetic oligonucleotide
  Sense strand starting at position 3699 of SEQ ID NO: 916175
gugaauuaugucugcauuu

SEQ ID NO: 1136141 - RNA, 19 nt, Artificial Sequence
  Description of Artificial Sequence: Synthetic oligonucleotide
  Antisense strand to SEQ ID NO: 1136140
aaaugcagacauaauucac

SEQ ID NO: 1136142 - RNA, 19 nt, Artificial Sequence
  Description of Artificial Sequence: Synthetic oligonucleotide
  Sense strand starting at position 3728 of SEQ ID NO: 916175
aaagaaaugugggcuguga

SEQ ID NO: 1136143 - RNA, 19 nt, Artificial Sequence
  Description of Artificial Sequence: Synthetic oligonucleotide
  Antisense strand to SEQ ID NO: 1136142
ucacagcccacauuucuuu

SEQ ID NO: 1136144 - RNA, 19 nt, Artificial Sequence
  Description of Artificial Sequence: Synthetic oligonucleotide
  Sense strand starting at position 3732 of SEQ ID NO: 916175
aaaugugggcugugaggua

SEQ ID NO: 1136145 - RNA, 19 nt, Artificial Sequence
  Description of Artificial Sequence: Synthetic oligonucleotide
  Antisense strand to SEQ ID NO: 1136144
uaccucacagcccacauuu

SEQ ID NO: 1136146 - RNA, 19 nt, Artificial Sequence
  Description of Artificial Sequence: Synthetic oligonucleotide
  Sense strand starting at position 3752 of SEQ ID NO: 916175
agugaugaaugcuuaacuu

SEQ ID NO: 1136147 - RNA, 19 nt, Artificial Sequence
  Description of Artificial Sequence: Synthetic oligonucleotide
  Antisense strand to SEQ ID NO: 1136146
aaguuaagcauucaucacu

SEQ ID NO: 1136148 - RNA, 19 nt, Artificial Sequence
  Description of Artificial Sequence: Synthetic oligonucleotide
  Sense strand starting at position 3801 of SEQ ID NO: 916175
agugucucuuaccuguaau

SEQ ID NO: 1136149 - RNA, 19 nt, Artificial Sequence
  Description of Artificial Sequence: Synthetic oligonucleotide
  Antisense strand to SEQ ID NO: 1136148
auuacagguaagagacacu

SEQ ID NO: 1136150 - RNA, 19 nt, Artificial Sequence
  Description of Artificial Sequence: Synthetic oligonucleotide
  Sense strand starting at position 3804 of SEQ ID NO: 916175
gucucuuaccuguaaucuc

SEQ ID NO: 1136151 - RNA, 19 nt, Artificial Sequence
  Description of Artificial Sequence: Synthetic oligonucleotide
  Antisense strand to SEQ ID NO: 1136150
gagauuacagguaagagac

SEQ ID NO: 1136152 - RNA, 19 nt, Artificial Sequence
  Description of Artificial Sequence: Synthetic oligonucleotide
  Sense strand starting at position 3980 of SEQ ID NO: 916175
gggauaagauuagguggau

SEQ ID NO: 1136153 - RNA, 19 nt, Artificial Sequence
  Description of Artificial Sequence: Synthetic oligonucleotide
  Antisense strand to SEQ ID NO: 1136152
auccaccuaaucuuauccc

SEQ ID NO: 1136154 - RNA, 19 nt, Artificial Sequence
  Description of Artificial Sequence: Synthetic oligonucleotide
  Sense strand starting at position 21 of SEQ ID NO: 916176
ucuuguaaacagcgguuau

SEQ ID NO: 1136155 - RNA, 19 nt, Artificial Sequence
  Description of Artificial Sequence: Synthetic oligonucleotide
  Antisense strand to SEQ ID NO: 1136154
auaaccgcuguuuacaaga

SEQ ID NO: 1136156 - RNA, 19 nt, Artificial Sequence
  Description of Artificial Sequence: Synthetic oligonucleotide
  Sense strand starting at position 25 of SEQ ID NO: 916176
guaaacagcgguuaucuca

SEQ ID NO: 1136157 - RNA, 19 nt, Artificial Sequence
  Description of Artificial Sequence: Synthetic oligonucleotide
  Antisense strand to SEQ ID NO: 1136156
ugagauaaccgcuguuuac

SEQ ID NO: 1136158 - RNA, 19 nt, Artificial Sequence
  Description of Artificial Sequence: Synthetic oligonucleotide
  Sense strand starting at position 38 of SEQ ID NO: 916176
aucucagaauaguagaauu

SEQ ID NO: 1136159 - RNA, 19 nt, Artificial Sequence
  Description of Artificial Sequence: Synthetic oligonucleotide
  Antisense strand to SEQ ID NO: 1136158
aauucuacuauucugagau

SEQ ID NO: 1136160 - RNA, 19 nt, Artificial Sequence
  Description of Artificial Sequence: Synthetic oligonucleotide
  Sense strand starting at position 96 of SEQ ID NO: 916176
aagugaaugacuuguggug

SEQ ID NO: 1136161 - RNA, 19 nt, Artificial Sequence
  Description of Artificial Sequence: Synthetic oligonucleotide
  Antisense strand to SEQ ID NO: 1136160
caccacaagucauucacuu

SEQ ID NO: 1136162 - RNA, 19 nt, Artificial Sequence
  Description of Artificial Sequence: Synthetic oligonucleotide
  Sense strand starting at position 103 of SEQ ID NO: 916176
ugacuuguggugcaaucuu

SEQ ID NO: 1136163 - RNA, 19 nt, Artificial Sequence
  Description of Artificial Sequence: Synthetic oligonucleotide
  Antisense strand to SEQ ID NO: 1136162
aagauugcaccacaaguca

SEQ ID NO: 1136164 - RNA, 19 nt, Artificial Sequence
  Description of Artificial Sequence: Synthetic oligonucleotide
  Sense strand starting at position 126 of SEQ ID NO: 916176
agucucaaucuguguauuc

SEQ ID NO: 1136165 - RNA, 19 nt, Artificial Sequence
  Description of Artificial Sequence: Synthetic oligonucleotide
  Antisense strand to SEQ ID NO: 1136164
gaauacacagauugagacu

SEQ ID NO: 1136166 - RNA, 19 nt, Artificial Sequence
  Description of Artificial Sequence: Synthetic oligonucleotide
  Sense strand starting at position 127 of SEQ ID NO: 916176
gucucaaucuguguauucu

SEQ ID NO: 1136167 - RNA, 19 nt, Artificial Sequence
  Description of Artificial Sequence: Synthetic oligonucleotide
  Antisense strand to SEQ ID NO: 1136166
agaauacacagauugagac

SEQ ID NO: 1136168 - RNA, 19 nt, Artificial Sequence
  Description of Artificial Sequence: Synthetic oligonucleotide
  Sense strand starting at position 135 of SEQ ID NO: 916176
cuguguauucugcaauaaa

SEQ ID NO: 1136169 - RNA, 19 nt, Artificial Sequence
  Description of Artificial Sequence: Synthetic oligonucleotide
  Antisense strand to SEQ ID NO: 1136168
uuuauugcagaauacacag

SEQ ID NO: 1136170 - RNA, 19 nt, Artificial Sequence
  Description of Artificial Sequence: Synthetic oligonucleotide
  Sense strand starting at position 172 of SEQ ID NO: 916176
uugcauuugugauacauuc

SEQ ID NO: 1136171 - RNA, 19 nt, Artificial Sequence
  Description of Artificial Sequence: Synthetic oligonucleotide
  Antisense strand to SEQ ID NO: 1136170
gaauguaucacaaaugcaa

SEQ ID NO: 1136172 - RNA, 19 nt, Artificial Sequence
  Description of Artificial Sequence: Synthetic oligonucleotide
  Sense strand starting at position 206 of SEQ ID NO: 916176
gugacaauucuauacuguu

SEQ ID NO: 1136173 - RNA, 19 nt, Artificial Sequence
  Description of Artificial Sequence: Synthetic oligonucleotide
  Antisense strand to SEQ ID NO: 1136172
aacaguauagaauugucac

SEQ ID NO: 1136174 - RNA, 19 nt, Artificial Sequence
  Description of Artificial Sequence: Synthetic oligonucleotide
  Sense strand starting at position 247 of SEQ ID NO: 916176
aagugugaauucgugacca

SEQ ID NO: 1136175 - RNA, 19 nt, Artificial Sequence
  Description of Artificial Sequence: Synthetic oligonucleotide
  Antisense strand to SEQ ID NO: 1136174
uggucacgaauucacacuu

SEQ ID NO: 1136176 - RNA, 19 nt, Artificial Sequence
  Description of Artificial Sequence: Synthetic oligonucleotide
  Sense strand starting at position 249 of SEQ ID NO: 916176
gugugaauucgugaccaaa

SEQ ID NO: 1136177 - RNA, 19 nt, Artificial Sequence
  Description of Artificial Sequence: Synthetic oligonucleotide
  Antisense strand to SEQ ID NO: 1136176
uuuggucacgaauucacac

SEQ ID NO: 1136178 - RNA, 19 nt, Artificial Sequence
  Description of Artificial Sequence: Synthetic oligonucleotide
  Sense strand starting at position 296 of SEQ ID NO: 916176
acagcaauauguuuagaaa

SEQ ID NO: 1136179 - RNA, 19 nt, Artificial Sequence
  Description of Artificial Sequence: Synthetic oligonucleotide
  Antisense strand to SEQ ID NO: 1136178
uuucuaaacauauugcugu

SEQ ID NO: 1136180 - RNA, 19 nt, Artificial Sequence
  Description of Artificial Sequence: Synthetic oligonucleotide
  Sense strand starting at position 389 of SEQ ID NO: 916176
ccacaugacguccauuacu

SEQ ID NO: 1136181 - RNA, 19 nt, Artificial Sequence
  Description of Artificial Sequence: Synthetic oligonucleotide
  Antisense strand to SEQ ID NO: 1136180
aguaauggacgucaugugg

SEQ ID NO: 1136182 - RNA, 19 nt, Artificial Sequence
  Description of Artificial Sequence: Synthetic oligonucleotide
  Sense strand starting at position 517 of SEQ ID NO: 916176
aaagaagauugcccggaau

SEQ ID NO: 1136183 - RNA, 19 nt, Artificial Sequence
  Description of Artificial Sequence: Synthetic oligonucleotide
  Antisense strand to SEQ ID NO: 1136182
auuccgggcaaucuucuuu

SEQ ID NO: 1136184 - RNA, 19 nt, Artificial Sequence
  Description of Artificial Sequence: Synthetic oligonucleotide
  Sense strand starting at position 520 of SEQ ID NO: 916176
gaagauugcccggaauccu

SEQ ID NO: 1136185 - RNA, 19 nt, Artificial Sequence
  Description of Artificial Sequence: Synthetic oligonucleotide
  Antisense strand to SEQ ID NO: 1136184
aggauuccgggcaaucuuc

SEQ ID NO: 1136186 - RNA, 19 nt, Artificial Sequence
  Description of Artificial Sequence: Synthetic oligonucleotide
  Sense strand starting at position 750 of SEQ ID NO: 916176
ucuagaugucugcggauuu

SEQ ID NO: 1136187 - RNA, 19 nt, Artificial Sequence
  Description of Artificial Sequence: Synthetic oligonucleotide
  Antisense strand to SEQ ID NO: 1136186
aaauccgcagacaucuaga

SEQ ID NO: 1136188 - RNA, 19 nt, Artificial Sequence
  Description of Artificial Sequence: Synthetic oligonucleotide
  Sense strand starting at position 798 of SEQ ID NO: 916176
gcgagauuccaacaguacu

SEQ ID NO: 1136189 - RNA, 19 nt, Artificial Sequence
  Description of Artificial Sequence: Synthetic oligonucleotide
  Antisense strand to SEQ ID NO: 1136188
aguacuguuggaaucucgc

SEQ ID NO: 1136190 - RNA, 19 nt, Artificial Sequence
  Description of Artificial Sequence: Synthetic oligonucleotide
  Sense strand starting at position 857 of SEQ ID NO: 916176
ggagaacggucggugcaaa

SEQ ID NO: 1136191 - RNA, 19 nt, Artificial Sequence
  Description of Artificial Sequence: Synthetic oligonucleotide
  Antisense strand to SEQ ID NO: 1136190
uuugcaccgaccguucucc

SEQ ID NO: 1136192 - RNA, 19 nt, Artificial Sequence
  Description of Artificial Sequence: Synthetic oligonucleotide
  Sense strand starting at position 887 of SEQ ID NO: 916176
cagguaguccuaggaagga

SEQ ID NO: 1136193 - RNA, 19 nt, Artificial Sequence
  Description of Artificial Sequence: Synthetic oligonucleotide
  Antisense strand to SEQ ID NO: 1136192
uccuuccuaggacuaccug

SEQ ID NO: 1136194 - RNA, 19 nt, Artificial Sequence
  Description of Artificial Sequence: Synthetic oligonucleotide
  Sense strand starting at position 1056 of SEQ ID NO: 916176
gccauuaggcauugacaac

SEQ ID NO: 1136195 - RNA, 19 nt, Artificial Sequence
  Description of Artificial Sequence: Synthetic oligonucleotide
  Antisense strand to SEQ ID NO: 1136194
guugucaaugccuaauggc

SEQ ID NO: 1136196 - RNA, 19 nt, Artificial Sequence
  Description of Artificial Sequence: Synthetic oligonucleotide
  Sense strand starting at position 1080 of SEQ ID NO: 916176
cgaaacaauuagcuauguu

SEQ ID NO: 1136197 - RNA, 19 nt, Artificial Sequence
  Description of Artificial Sequence: Synthetic oligonucleotide
  Antisense strand to SEQ ID NO: 1136196
aacauagcuaauuguuucg

SEQ ID NO: 1136198 - RNA, 19 nt, Artificial Sequence
  Description of Artificial Sequence: Synthetic oligonucleotide
  Sense strand starting at position 2048 of SEQ ID NO: 916176
gggcgcugcgccaaguuau

SEQ ID NO: 1136199 - RNA, 19 nt, Artificial Sequence
  Description of Artificial Sequence: Synthetic oligonucleotide
  Antisense strand to SEQ ID NO: 1136198
auaacuuggcgcagcgccc

SEQ ID NO: 1136200 - RNA, 19 nt, Artificial Sequence
  Description of Artificial Sequence: Synthetic oligonucleotide
  Sense strand starting at position 2064 of SEQ ID NO: 916176
uaucaaggccgcgaucaaa

SEQ ID NO: 1136201 - RNA, 19 nt, Artificial Sequence
  Description of Artificial Sequence: Synthetic oligonucleotide
  Antisense strand to SEQ ID NO: 1136200
uuugaucgcggccuugaua

SEQ ID NO: 1136202 - RNA, 19 nt, Artificial Sequence
  Description of Artificial Sequence: Synthetic oligonucleotide
  Sense strand starting at position 2271 of SEQ ID NO: 916176
gcccuuuggcggcaaacaa

SEQ ID NO: 1136203 - RNA, 19 nt, Artificial Sequence
  Description of Artificial Sequence: Synthetic oligonucleotide
  Antisense strand to SEQ ID NO: 1136202
uuguuugccgccaaagggc

SEQ ID NO: 1136204 - RNA, 19 nt, Artificial Sequence
  Description of Artificial Sequence: Synthetic oligonucleotide
  Sense strand starting at position 2317 of SEQ ID NO: 916176
gucuuccuccucugaucau

SEQ ID NO: 1136205 - RNA, 19 nt, Artificial Sequence
  Description of Artificial Sequence: Synthetic oligonucleotide
  Antisense strand to SEQ ID NO: 1136204
augaucagaggaggaagac

SEQ ID NO: 1136206 - RNA, 19 nt, Artificial Sequence
  Description of Artificial Sequence: Synthetic oligonucleotide
  Sense strand starting at position 2534 of SEQ ID NO: 916176
ccugaugugguuugaagua

SEQ ID NO: 1136207 - RNA, 19 nt, Artificial Sequence
  Description of Artificial Sequence: Synthetic oligonucleotide
  Antisense strand to SEQ ID NO: 1136206
uacuucaaaccacaucagg

SEQ ID NO: 1136208 - RNA, 19 nt, Artificial Sequence
  Description of Artificial Sequence: Synthetic oligonucleotide
  Sense strand starting at position 2536 of SEQ ID NO: 916176
ugaugugguuugaaguagu

SEQ ID NO: 1136209 - RNA, 19 nt, Artificial Sequence
  Description of Artificial Sequence: Synthetic oligonucleotide
  Antisense strand to SEQ ID NO: 1136208
acuacuucaaaccacauca

SEQ ID NO: 1136210 - RNA, 19 nt, Artificial Sequence
  Description of Artificial Sequence: Synthetic oligonucleotide
  Sense strand starting at position 2539 of SEQ ID NO: 916176
ugugguuugaaguagugga

SEQ ID NO: 1136211 - RNA, 19 nt, Artificial Sequence
  Description of Artificial Sequence: Synthetic oligonucleotide
  Antisense strand to SEQ ID NO: 1136210
uccacuacuucaaaccaca

SEQ ID NO: 1136212 - RNA, 19 nt, Artificial Sequence
  Description of Artificial Sequence: Synthetic oligonucleotide
  Sense strand starting at position 2566 of SEQ ID NO: 916176
ucacuuugugccucucgua

SEQ ID NO: 1136213 - RNA, 19 nt, Artificial Sequence
  Description of Artificial Sequence: Synthetic oligonucleotide
  Antisense strand to SEQ ID NO: 1136212
uacgagaggcacaaaguga

SEQ ID NO: 1136214 - RNA, 19 nt, Artificial Sequence
  Description of Artificial Sequence: Synthetic oligonucleotide
  Sense strand starting at position 2636 of SEQ ID NO: 916176
aagagaaguccauguucuc

SEQ ID NO: 1136215 - RNA, 19 nt, Artificial Sequence
  Description of Artificial Sequence: Synthetic oligonucleotide
  Antisense strand to SEQ ID NO: 1136214
gagaacauggacuucucuu

SEQ ID NO: 1136216 - RNA, 19 nt, Artificial Sequence
  Description of Artificial Sequence: Synthetic oligonucleotide
  Sense strand starting at position 2639 of SEQ ID NO: 916176
agaaguccauguucucaua

SEQ ID NO: 1136217 - RNA, 19 nt, Artificial Sequence
  Description of Artificial Sequence: Synthetic oligonucleotide
  Antisense strand to SEQ ID NO: 1136216
uaugagaacauggacuucu

SEQ ID NO: 1136218 - RNA, 19 nt, Artificial Sequence
  Description of Artificial Sequence: Synthetic oligonucleotide
  Sense strand starting at position 2651 of SEQ ID NO: 916176
ucucauagacauuguguuu

SEQ ID NO: 1136219 - RNA, 19 nt, Artificial Sequence
  Description of Artificial Sequence: Synthetic oligonucleotide
  Antisense strand to SEQ ID NO: 1136218
aaacacaaugucuaugaga

SEQ ID NO: 1136220 - RNA, 19 nt, Artificial Sequence
  Description of Artificial Sequence: Synthetic oligonucleotide
  Sense strand starting at position 2797 of SEQ ID NO: 916176
ggacuugcuugcuuuguga

SEQ ID NO: 1136221 - RNA, 19 nt, Artificial Sequence
  Description of Artificial Sequence: Synthetic oligonucleotide
  Antisense strand to SEQ ID NO: 1136220
ucacaaagcaagcaagucc

SEQ ID NO: 1136222 - RNA, 19 nt, Artificial Sequence
  Description of Artificial Sequence: Synthetic oligonucleotide
  Sense strand starting at position 2799 of SEQ ID NO: 916176
acuugcuugcuuugugaag

SEQ ID NO: 1136223 - RNA, 19 nt, Artificial Sequence
  Description of Artificial Sequence: Synthetic oligonucleotide
  Antisense strand to SEQ ID NO: 1136222
cuucacaaagcaagcaagu

SEQ ID NO: 1136224 - RNA, 19 nt, Artificial Sequence
  Description of Artificial Sequence: Synthetic oligonucleotide
  Sense strand starting at position 2928 of SEQ ID NO: 916176
ugggaauacucucuccaau

SEQ ID NO: 1136225 - RNA, 19 nt, Artificial Sequence
  Description of Artificial Sequence: Synthetic oligonucleotide
  Antisense strand to SEQ ID NO: 1136224
auuggagagaguauuccca

SEQ ID NO: 1136226 - RNA, 19 nt, Artificial Sequence
  Description of Artificial Sequence: Synthetic oligonucleotide
  Sense strand starting at position 3167 of SEQ ID NO: 916176
caaugcugacgccagaauu

SEQ ID NO: 1136227 - RNA, 19 nt, Artificial Sequence
  Description of Artificial Sequence: Synthetic oligonucleotide
  Antisense strand to SEQ ID NO: 1136226
aauucuggcgucagcauug

SEQ ID NO: 1136228 - RNA, 19 nt, Artificial Sequence
  Description of Artificial Sequence: Synthetic oligonucleotide
  Sense strand starting at position 3401 of SEQ ID NO: 916176
auagcagugagcugccaua

SEQ ID NO: 1136229 - RNA, 19 nt, Artificial Sequence
  Description of Artificial Sequence: Synthetic oligonucleotide
  Antisense strand to SEQ ID NO: 1136228
uauggcagcucacugcuau

SEQ ID NO: 1136230 - RNA, 19 nt, Artificial Sequence
  Description of Artificial Sequence: Synthetic oligonucleotide
  Sense strand starting at position 3471 of SEQ ID NO: 916176
uaaauugugcacugagaau

SEQ ID NO: 1136231 - RNA, 19 nt, Artificial Sequence
  Description of Artificial Sequence: Synthetic oligonucleotide
  Antisense strand to SEQ ID NO: 1136230
auucucagugcacaauuua

SEQ ID NO: 1136232 - RNA, 19 nt, Artificial Sequence
  Description of Artificial Sequence: Synthetic oligonucleotide
  Sense strand starting at position 3791 of SEQ ID NO: 916176
auuuacgucuaguaagaaa

SEQ ID NO: 1136233 - RNA, 19 nt, Artificial Sequence
  Description of Artificial Sequence: Synthetic oligonucleotide
  Antisense strand to SEQ ID NO: 1136232
uuucuuacuagacguaaau

SEQ ID NO: 1136234 - RNA, 19 nt, Artificial Sequence
  Description of Artificial Sequence: Synthetic oligonucleotide
  Sense strand starting at position 184 of SEQ ID NO: 916177
guagccucuggacauauaa

SEQ ID NO: 1136235 - RNA, 19 nt, Artificial Sequence
  Description of Artificial Sequence: Synthetic oligonucleotide
  Antisense strand to SEQ ID NO: 1136234
uuauauguccagaggcuac

SEQ ID NO: 1136236 - RNA, 19 nt, Artificial Sequence
  Description of Artificial Sequence: Synthetic oligonucleotide
  Sense strand starting at position 321 of SEQ ID NO: 916177
auagcuaucuaagauuuga

SEQ ID NO: 1136237 - RNA, 19 nt, Artificial Sequence
  Description of Artificial Sequence: Synthetic oligonucleotide
  Antisense strand to SEQ ID NO: 1136236
ucaaaucuuagauagcuau

SEQ ID NO: 1136238 - RNA, 19 nt, Artificial Sequence
  Description of Artificial Sequence: Synthetic oligonucleotide
  Sense strand starting at position 622 of SEQ ID NO: 916177
ucccuuauugagcaggcaa

SEQ ID NO: 1136239 - RNA, 19 nt, Artificial Sequence
  Description of Artificial Sequence: Synthetic oligonucleotide
  Antisense strand to SEQ ID NO: 1136238
uugccugcucaauaaggga

SEQ ID NO: 1136240 - RNA, 19 nt, Artificial Sequence
  Description of Artificial Sequence: Synthetic oligonucleotide
  Sense strand starting at position 695 of SEQ ID NO: 916177
gacacacuucuuggguuua

SEQ ID NO: 1136241 - RNA, 19 nt, Artificial Sequence
  Description of Artificial Sequence: Synthetic oligonucleotide
  Antisense strand to SEQ ID NO: 1136240
uaaacccaagaaguguguc

SEQ ID NO: 1136242 - RNA, 19 nt, Artificial Sequence
  Description of Artificial Sequence: Synthetic oligonucleotide
  Sense strand starting at position 790 of SEQ ID NO: 916177
acuugaaugcacuggcaga

SEQ ID NO: 1136243 - RNA, 19 nt, Artificial Sequence
  Description of Artificial Sequence: Synthetic oligonucleotide
  Antisense strand to SEQ ID NO: 1136242
ucugccagugcauucaagu

SEQ ID NO: 1136244 - RNA, 19 nt, Artificial Sequence
  Description of Artificial Sequence: Synthetic oligonucleotide
  Sense strand starting at position 1071 of SEQ ID NO: 916177
gcaaaucuuccaggaacca

SEQ ID NO: 1136245 - RNA, 19 nt, Artificial Sequence
  Description of Artificial Sequence: Synthetic oligonucleotide
  Antisense strand to SEQ ID NO: 1136244
ugguuccuggaagauuugc

SEQ ID NO: 1136246 - RNA, 19 nt, Artificial Sequence
  Description of Artificial Sequence: Synthetic oligonucleotide
  Sense strand starting at position 1249 of SEQ ID NO: 916177
cucagaauuugcuugcauu

SEQ ID NO: 1136247 - RNA, 19 nt, Artificial Sequence
  Description of Artificial Sequence: Synthetic oligonucleotide
  Antisense strand to SEQ ID NO: 1136246
aaugcaagcaaauucugag

SEQ ID NO: 1136248 - RNA, 19 nt, Artificial Sequence
  Description of Artificial Sequence: Synthetic oligonucleotide
  Sense strand starting at position 1270 of SEQ ID NO: 916177
gcaucacuccuagagcuau

SEQ ID NO: 1136249 - RNA, 19 nt, Artificial Sequence
  Description of Artificial Sequence: Synthetic oligonucleotide
  Antisense strand to SEQ ID NO: 1136248
auagcucuaggagugaugc

SEQ ID NO: 1136250 - RNA, 19 nt, Artificial Sequence
  Description of Artificial Sequence: Synthetic oligonucleotide
  Sense strand starting at position 1684 of SEQ ID NO: 916177
ggcaucugucaugacuacu

SEQ ID NO: 1136251 - RNA, 19 nt, Artificial Sequence
  Description of Artificial Sequence: Synthetic oligonucleotide
  Antisense strand to SEQ ID NO: 1136250
aguagucaugacagaugcc

SEQ ID NO: 1136252 - RNA, 19 nt, Artificial Sequence
  Description of Artificial Sequence: Synthetic oligonucleotide
  Sense strand starting at position 1711 of SEQ ID NO: 916177
cuauuugcuguauguuauu

SEQ ID NO: 1136253 - RNA, 19 nt, Artificial Sequence
  Description of Artificial Sequence: Synthetic oligonucleotide
  Antisense strand to SEQ ID NO: 1136252
aauaacauacagcaaauag

SEQ ID NO: 1136254 - RNA, 19 nt, Artificial Sequence
  Description of Artificial Sequence: Synthetic oligonucleotide
  Sense strand starting at position 1864 of SEQ ID NO: 916177
guuguuauaguagggaaag

SEQ ID NO: 1136255 - RNA, 19 nt, Artificial Sequence
  Description of Artificial Sequence: Synthetic oligonucleotide
  Antisense strand to SEQ ID NO: 1136254
cuuucccuacuauaacaac

SEQ ID NO: 1136256 - RNA, 19 nt, Artificial Sequence
  Description of Artificial Sequence: Synthetic oligonucleotide
  Sense strand starting at position 1945 of SEQ ID NO: 916177
gcacaaagugacugaggau

SEQ ID NO: 1136257 - RNA, 19 nt, Artificial Sequence
  Description of Artificial Sequence: Synthetic oligonucleotide
  Antisense strand to SEQ ID NO: 1136256
auccucagucacuuugugc

SEQ ID NO: 1136258 - RNA, 19 nt, Artificial Sequence
  Description of Artificial Sequence: Synthetic oligonucleotide
  Sense strand starting at position 1963 of SEQ ID NO: 916177
ugcagagcuagugguauuu

SEQ ID NO: 1136259 - RNA, 19 nt, Artificial Sequence
  Description of Artificial Sequence: Synthetic oligonucleotide
  Antisense strand to SEQ ID NO: 1136258
aaauaccacuagcucugca

SEQ ID NO: 1136260 - RNA, 19 nt, Artificial Sequence
  Description of Artificial Sequence: Synthetic oligonucleotide
  Sense strand starting at position 2275 of SEQ ID NO: 916177
ucauguauacagugauacu

SEQ ID NO: 1136261 - RNA, 19 nt, Artificial Sequence
  Description of Artificial Sequence: Synthetic oligonucleotide
  Antisense strand to SEQ ID NO: 1136260
aguaucacuguauacauga

SEQ ID NO: 1136262 - RNA, 19 nt, Artificial Sequence
  Description of Artificial Sequence: Synthetic oligonucleotide
  Sense strand starting at position 2391 of SEQ ID NO: 916177
guaaauguugcagaaaccu

SEQ ID NO: 1136263 - RNA, 19 nt, Artificial Sequence
  Description of Artificial Sequence: Synthetic oligonucleotide
  Antisense strand to SEQ ID NO: 1136262
agguuucugcaacauuuac

SEQ ID NO: 1136264 - RNA, 19 nt, Artificial Sequence
  Description of Artificial Sequence: Synthetic oligonucleotide
  Sense strand starting at position 2797 of SEQ ID NO: 916177
ucugguaugcuuuagauaa

SEQ ID NO: 1136265 - RNA, 19 nt, Artificial Sequence
  Description of Artificial Sequence: Synthetic oligonucleotide
  Antisense strand to SEQ ID NO: 1136264
uuaucuaaagcauaccaga

SEQ ID NO: 1136266 - RNA, 19 nt, Artificial Sequence
  Description of Artificial Sequence: Synthetic oligonucleotide
  Sense strand starting at position 2862 of SEQ ID NO: 916177
augucugcaagugaauaga

SEQ ID NO: 1136267 - RNA, 19 nt, Artificial Sequence
  Description of Artificial Sequence: Synthetic oligonucleotide
  Antisense strand to SEQ ID NO: 1136266
ucuauucacuugcagacau

SEQ ID NO: 1136268 - RNA, 19 nt, Artificial Sequence
  Description of Artificial Sequence: Synthetic oligonucleotide
  Sense strand starting at position 2929 of SEQ ID NO: 916177
agaagaagguuugucuuua

SEQ ID NO: 1136269 - RNA, 19 nt, Artificial Sequence
  Description of Artificial Sequence: Synthetic oligonucleotide
  Antisense strand to SEQ ID NO: 1136268
uaaagacaaaccuucuucu

SEQ ID NO: 1136270 - RNA, 19 nt, Artificial Sequence
  Description of Artificial Sequence: Synthetic oligonucleotide
  Sense strand starting at position 2930 of SEQ ID NO: 916177
gaagaagguuugucuuuaa

SEQ ID NO: 1136271 - RNA, 19 nt, Artificial Sequence
  Description of Artificial Sequence: Synthetic oligonucleotide
  Antisense strand to SEQ ID NO: 1136270
uuaaagacaaaccuucuuc

SEQ ID NO: 1136272 - RNA, 19 nt, Artificial Sequence
  Description of Artificial Sequence: Synthetic oligonucleotide
  Sense strand starting at position 2934 of SEQ ID NO: 916177
aagguuugucuuuaagguu

SEQ ID NO: 1136273 - RNA, 19 nt, Artificial Sequence
  Description of Artificial Sequence: Synthetic oligonucleotide
  Antisense strand to SEQ ID NO: 1136272
aaccuuaaagacaaaccuu

SEQ ID NO: 1136274 - RNA, 19 nt, Artificial Sequence
  Description of Artificial Sequence: Synthetic oligonucleotide
  Sense strand starting at position 3021 of SEQ ID NO: 916177
gggcauucuuauuugucau

SEQ ID NO: 1136275 - RNA, 19 nt, Artificial Sequence
  Description of Artificial Sequence: Synthetic oligonucleotide
  Antisense strand to SEQ ID NO: 1136274
augacaaauaagaaugccc

SEQ ID NO: 1136276 - RNA, 19 nt, Artificial Sequence
  Description of Artificial Sequence: Synthetic oligonucleotide
  Sense strand starting at position 3123 of SEQ ID NO: 916177
cagugauaauggguaaugu

SEQ ID NO: 1136277 - RNA, 19 nt, Artificial Sequence
  Description of Artificial Sequence: Synthetic oligonucleotide
  Antisense strand to SEQ ID NO: 1136276
acauuacccauuaucacug

SEQ ID NO: 1136278 - RNA, 19 nt, Artificial Sequence
  Description of Artificial Sequence: Synthetic oligonucleotide
  Sense strand starting at position 3124 of SEQ ID NO: 916177
agugauaauggguaaugua

SEQ ID NO: 1136279 - RNA, 19 nt, Artificial Sequence
  Description of Artificial Sequence: Synthetic oligonucleotide
  Antisense strand to SEQ ID NO: 1136278
uacauuacccauuaucacu

SEQ ID NO: 1136280 - RNA, 19 nt, Artificial Sequence
  Description of Artificial Sequence: Synthetic oligonucleotide
  Sense strand starting at position 3248 of SEQ ID NO: 916177
gaagcagugcuggaaagau

SEQ ID NO: 1136281 - RNA, 19 nt, Artificial Sequence
  Description of Artificial Sequence: Synthetic oligonucleotide
  Antisense strand to SEQ ID NO: 1136280
aucuuuccagcacugcuuc

SEQ ID NO: 1136282 - RNA, 19 nt, Artificial Sequence
  Description of Artificial Sequence: Synthetic oligonucleotide
  Sense strand starting at position 3257 of SEQ ID NO: 916177
cuggaaagaugccugaauc

SEQ ID NO: 1136283 - RNA, 19 nt, Artificial Sequence
  Description of Artificial Sequence: Synthetic oligonucleotide
  Antisense strand to SEQ ID NO: 1136282
gauucaggcaucuuuccag

SEQ ID NO: 1136284 - RNA, 19 nt, Artificial Sequence
  Description of Artificial Sequence: Synthetic oligonucleotide
  Sense strand starting at position 3358 of SEQ ID NO: 916177
acacauucuuaagcagagu

SEQ ID NO: 1136285 - RNA, 19 nt, Artificial Sequence
  Description of Artificial Sequence: Synthetic oligonucleotide
  Antisense strand to SEQ ID NO: 1136284
acucugcuuaagaaugugu

SEQ ID NO: 1136286 - RNA, 19 nt, Artificial Sequence
  Description of Artificial Sequence: Synthetic oligonucleotide
  Sense strand starting at position 3478 of SEQ ID NO: 916177
gugucaggucccuagacau

SEQ ID NO: 1136287 - RNA, 19 nt, Artificial Sequence
  Description of Artificial Sequence: Synthetic oligonucleotide
  Antisense strand to SEQ ID NO: 1136286
augucuagggaccugacac

SEQ ID NO: 1136288 - RNA, 19 nt, Artificial Sequence
  Description of Artificial Sequence: Synthetic oligonucleotide
  Sense strand starting at position 3484 of SEQ ID NO: 916177
ggucccuagacaugauuga

SEQ ID NO: 1136289 - RNA, 19 nt, Artificial Sequence
  Description of Artificial Sequence: Synthetic oligonucleotide
  Antisense strand to SEQ ID NO: 1136288
ucaaucaugucuagggacc

SEQ ID NO: 1136290 - RNA, 19 nt, Artificial Sequence
  Description of Artificial Sequence: Synthetic oligonucleotide
  Sense strand starting at position 3488 of SEQ ID NO: 916177
ccuagacaugauugagucu

SEQ ID NO: 1136291 - RNA, 19 nt, Artificial Sequence
  Description of Artificial Sequence: Synthetic oligonucleotide
  Antisense strand to SEQ ID NO: 1136290
agacucaaucaugucuagg

SEQ ID NO: 1136292 - RNA, 19 nt, Artificial Sequence
  Description of Artificial Sequence: Synthetic oligonucleotide
  Sense strand starting at position 3511 of SEQ ID NO: 916177
gagggauacguguauacac

SEQ ID NO: 1136293 - RNA, 19 nt, Artificial Sequence
  Description of Artificial Sequence: Synthetic oligonucleotide
  Antisense strand to SEQ ID NO: 1136292
guguauacacguaucccuc

SEQ ID NO: 1136294 - RNA, 19 nt, Artificial Sequence
  Description of Artificial Sequence: Synthetic oligonucleotide
  Sense strand starting at position 3513 of SEQ ID NO: 916177
gggauacguguauacacaa

SEQ ID NO: 1136295 - RNA, 19 nt, Artificial Sequence
  Description of Artificial Sequence: Synthetic oligonucleotide
  Antisense strand to SEQ ID NO: 1136294
uuguguauacacguauccc

SEQ ID NO: 1136296 - RNA, 19 nt, Artificial Sequence
  Description of Artificial Sequence: Synthetic oligonucleotide
  Sense strand starting at position 3535 of SEQ ID NO: 916177
ggcaguguuagcucucagu

SEQ ID NO: 1136297 - RNA, 19 nt, Artificial Sequence
  Description of Artificial Sequence: Synthetic oligonucleotide
  Antisense strand to SEQ ID NO: 1136296
acugagagcuaacacugcc

SEQ ID NO: 1136298 - RNA, 19 nt, Artificial Sequence
  Description of Artificial Sequence: Synthetic oligonucleotide
  Sense strand starting at position 3546 of SEQ ID NO: 916177
cucucaguuccacgcauuu

SEQ ID NO: 1136299 - RNA, 19 nt, Artificial Sequence
  Description of Artificial Sequence: Synthetic oligonucleotide
  Antisense strand to SEQ ID NO: 1136298
aaaugcguggaacugagag

SEQ ID NO: 1136300 - RNA, 19 nt, Artificial Sequence
  Description of Artificial Sequence: Synthetic oligonucleotide
  Sense strand starting at position 3579 of SEQ ID NO: 916177
auuuaucugucacuagcuu

SEQ ID NO: 1136301 - RNA, 19 nt, Artificial Sequence
  Description of Artificial Sequence: Synthetic oligonucleotide
  Antisense strand to SEQ ID NO: 1136300
aagcuagugacagauaaau

SEQ ID NO: 1136302 - RNA, 19 nt, Artificial Sequence
  Description of Artificial Sequence: Synthetic oligonucleotide
  Sense strand starting at position 3625 of SEQ ID NO: 916177
acaacagauuccuugagua

SEQ ID NO: 1136303 - RNA, 19 nt, Artificial Sequence
  Description of Artificial Sequence: Synthetic oligonucleotide
  Antisense strand to SEQ ID NO: 1136302
uacucaaggaaucuguugu

SEQ ID NO: 1136304 - RNA, 19 nt, Artificial Sequence
  Description of Artificial Sequence: Synthetic oligonucleotide
  Sense strand starting at position 3630 of SEQ ID NO: 916177
agauuccuugaguaucuau

SEQ ID NO: 1136305 - RNA, 19 nt, Artificial Sequence
  Description of Artificial Sequence: Synthetic oligonucleotide
  Antisense strand to SEQ ID NO: 1136304
auagauacucaaggaaucu

SEQ ID NO: 1136306 - RNA, 19 nt, Artificial Sequence
  Description of Artificial Sequence: Synthetic oligonucleotide
  Sense strand starting at position 3633 of SEQ ID NO: 916177
uuccuugaguaucuaugaa

SEQ ID NO: 1136307 - RNA, 19 nt, Artificial Sequence
  Description of Artificial Sequence: Synthetic oligonucleotide
  Antisense strand to SEQ ID NO: 1136306
uucauagauacucaaggaa

SEQ ID NO: 1136308 - RNA, 19 nt, Artificial Sequence
  Description of Artificial Sequence: Synthetic oligonucleotide
  Sense strand starting at position 3752 of SEQ ID NO: 916177
gagggcucugguuaaacuu

SEQ ID NO: 1136309 - RNA, 19 nt, Artificial Sequence
  Description of Artificial Sequence: Synthetic oligonucleotide
  Antisense strand to SEQ ID NO: 1136308
aaguuuaaccagagcccuc

SEQ ID NO: 1136310 - RNA, 19 nt, Artificial Sequence
  Description of Artificial Sequence: Synthetic oligonucleotide
  Sense strand starting at position 3783 of SEQ ID NO: 916177
ccagaaauauuguuucgac

SEQ ID NO: 1136311 - RNA, 19 nt, Artificial Sequence
  Description of Artificial Sequence: Synthetic oligonucleotide
  Antisense strand to SEQ ID NO: 1136310
gucgaaacaauauuucugg

SEQ ID NO: 1136312 - RNA, 19 nt, Artificial Sequence
  Description of Artificial Sequence: Synthetic oligonucleotide
  Sense strand starting at position 3784 of SEQ ID NO: 916177
cagaaauauuguuucgaca

SEQ ID NO: 1136313 - RNA, 19 nt, Artificial Sequence
  Description of Artificial Sequence: Synthetic oligonucleotide
  Antisense strand to SEQ ID NO: 1136312
ugucgaaacaauauuucug

SEQ ID NO: 1136314 - RNA, 19 nt, Artificial Sequence
  Description of Artificial Sequence: Synthetic oligonucleotide
  Sense strand starting at position 236 of SEQ ID NO: 916178
ggcccuccuuugguagaga

SEQ ID NO: 1136315 - RNA, 19 nt, Artificial Sequence
  Description of Artificial Sequence: Synthetic oligonucleotide
  Antisense strand to SEQ ID NO: 1136314
ucucuaccaaaggagggcc

SEQ ID NO: 1136316 - RNA, 19 nt, Artificial Sequence
  Description of Artificial Sequence: Synthetic oligonucleotide
  Sense strand starting at position 474 of SEQ ID NO: 916178
cuggguuucugggugaaga

SEQ ID NO: 1136317 - RNA, 19 nt, Artificial Sequence
  Description of Artificial Sequence: Synthetic oligonucleotide
  Antisense strand to SEQ ID NO: 1136316
ucuucacccagaaacccag

SEQ ID NO: 1136318 - RNA, 19 nt, Artificial Sequence
  Description of Artificial Sequence: Synthetic oligonucleotide
  Sense strand starting at position 475 of SEQ ID NO: 916178
uggguuucugggugaagau

SEQ ID NO: 1136319 - RNA, 19 nt, Artificial Sequence
  Description of Artificial Sequence: Synthetic oligonucleotide
  Antisense strand to SEQ ID NO: 1136318
aucuucacccagaaaccca

SEQ ID NO: 1136320 - RNA, 19 nt, Artificial Sequence
  Description of Artificial Sequence: Synthetic oligonucleotide
  Sense strand starting at position 476 of SEQ ID NO: 916178
ggguuucugggugaagauu

SEQ ID NO: 1136321 - RNA, 19 nt, Artificial Sequence
  Description of Artificial Sequence: Synthetic oligonucleotide
  Antisense strand to SEQ ID NO: 1136320
aaucuucacccagaaaccc

SEQ ID NO: 1136322 - RNA, 19 nt, Artificial Sequence
  Description of Artificial Sequence: Synthetic oligonucleotide
  Sense strand starting at position 850 of SEQ ID NO: 916178
gagacagugucagacaaua

SEQ ID NO: 1136323 - RNA, 19 nt, Artificial Sequence
  Description of Artificial Sequence: Synthetic oligonucleotide
  Antisense strand to SEQ ID NO: 1136322
uauugucugacacugucuc

SEQ ID NO: 1136324 - RNA, 19 nt, Artificial Sequence
  Description of Artificial Sequence: Synthetic oligonucleotide
  Sense strand starting at position 1021 of SEQ ID NO: 916178
gggccuuguguauaguaga

SEQ ID NO: 1136325 - RNA, 19 nt, Artificial Sequence
  Description of Artificial Sequence: Synthetic oligonucleotide
  Antisense strand to SEQ ID NO: 1136324
ucuacuauacacaaggccc

SEQ ID NO: 1136326 - RNA, 19 nt, Artificial Sequence
  Description of Artificial Sequence: Synthetic oligonucleotide
  Sense strand starting at position 1044 of SEQ ID NO: 916178
caauaaauaugaguugugu

SEQ ID NO: 1136327 - RNA, 19 nt, Artificial Sequence
  Description of Artificial Sequence: Synthetic oligonucleotide
  Antisense strand to SEQ ID NO: 1136326
acacaacucauauuuauug

SEQ ID NO: 1136328 - RNA, 19 nt, Artificial Sequence
  Description of Artificial Sequence: Synthetic oligonucleotide
  Sense strand starting at position 1046 of SEQ ID NO: 916178
auaaauaugaguuguguug

SEQ ID NO: 1136329 - RNA, 19 nt, Artificial Sequence
  Description of Artificial Sequence: Synthetic oligonucleotide
  Antisense strand to SEQ ID NO: 1136328
caacacaacucauauuuau

SEQ ID NO: 1136330 - RNA, 19 nt, Artificial Sequence
  Description of Artificial Sequence: Synthetic oligonucleotide
  Sense strand starting at position 1080 of SEQ ID NO: 916178
aagagauguugcuuaagcu

SEQ ID NO: 1136331 - RNA, 19 nt, Artificial Sequence
  Description of Artificial Sequence: Synthetic oligonucleotide
  Antisense strand to SEQ ID NO: 1136330
agcuuaagcaacaucucuu

SEQ ID NO: 1136332 - RNA, 19 nt, Artificial Sequence
  Description of Artificial Sequence: Synthetic oligonucleotide
  Sense strand starting at position 1081 of SEQ ID NO: 916178
agagauguugcuuaagcuc

SEQ ID NO: 1136333 - RNA, 19 nt, Artificial Sequence
  Description of Artificial Sequence: Synthetic oligonucleotide
  Antisense strand to SEQ ID NO: 1136332
gagcuuaagcaacaucucu

SEQ ID NO: 1136334 - RNA, 19 nt, Artificial Sequence
  Description of Artificial Sequence: Synthetic oligonucleotide
  Sense strand starting at position 1087 of SEQ ID NO: 916178
guugcuuaagcucugcuau

SEQ ID NO: 1136335 - RNA, 19 nt, Artificial Sequence
  Description of Artificial Sequence: Synthetic oligonucleotide
  Antisense strand to SEQ ID NO: 1136334
auagcagagcuuaagcaac

SEQ ID NO: 1136336 - RNA, 19 nt, Artificial Sequence
  Description of Artificial Sequence: Synthetic oligonucleotide
  Sense strand starting at position 1166 of SEQ ID NO: 916178
cccucugguuaaucucaga

SEQ ID NO: 1136337 - RNA, 19 nt, Artificial Sequence
  Description of Artificial Sequence: Synthetic oligonucleotide
  Antisense strand to SEQ ID NO: 1136336
ucugagauuaaccagaggg

SEQ ID NO: 1136338 - RNA, 19 nt, Artificial Sequence
  Description of Artificial Sequence: Synthetic oligonucleotide
  Sense strand starting at position 1388 of SEQ ID NO: 916178
agcaccuccuguuuacaga

SEQ ID NO: 1136339 - RNA, 19 nt, Artificial Sequence
  Description of Artificial Sequence: Synthetic oligonucleotide
  Antisense strand to SEQ ID NO: 1136338
ucuguaaacaggaggugcu

SEQ ID NO: 1136340 - RNA, 19 nt, Artificial Sequence
  Description of Artificial Sequence: Synthetic oligonucleotide
  Sense strand starting at position 1389 of SEQ ID NO: 916178
gcaccuccuguuuacagaa

SEQ ID NO: 1136341 - RNA, 19 nt, Artificial Sequence
  Description of Artificial Sequence: Synthetic oligonucleotide
  Antisense strand to SEQ ID NO: 1136340
uucuguaaacaggaggugc

SEQ ID NO: 1136342 - RNA, 19 nt, Artificial Sequence
  Description of Artificial Sequence: Synthetic oligonucleotide
  Sense strand starting at position 1396 of SEQ ID NO: 916178
cuguuuacagaaugaaguu

SEQ ID NO: 1136343 - RNA, 19 nt, Artificial Sequence
  Description of Artificial Sequence: Synthetic oligonucleotide
  Antisense strand to SEQ ID NO: 1136342
aacuucauucuguaaacag

SEQ ID NO: 1136344 - RNA, 19 nt, Artificial Sequence
  Description of Artificial Sequence: Synthetic oligonucleotide
  Sense strand starting at position 1438 of SEQ ID NO: 916178
cccucagaagugugaacua

SEQ ID NO: 1136345 - RNA, 19 nt, Artificial Sequence
  Description of Artificial Sequence: Synthetic oligonucleotide
  Antisense strand to SEQ ID NO: 1136344
uaguucacacuucugaggg

SEQ ID NO: 1136346 - RNA, 19 nt, Artificial Sequence
  Description of Artificial Sequence: Synthetic oligonucleotide
  Sense strand starting at position 1443 of SEQ ID NO: 916178
agaagugugaacuacuguu

SEQ ID NO: 1136347 - RNA, 19 nt, Artificial Sequence
  Description of Artificial Sequence: Synthetic oligonucleotide
  Antisense strand to SEQ ID NO: 1136346
aacaguaguucacacuucu

SEQ ID NO: 1136348 - RNA, 19 nt, Artificial Sequence
  Description of Artificial Sequence: Synthetic oligonucleotide
  Sense strand starting at position 1707 of SEQ ID NO: 916178
ggugcucucgcgccacuua

SEQ ID NO: 1136349 - RNA, 19 nt, Artificial Sequence
  Description of Artificial Sequence: Synthetic oligonucleotide
  Antisense strand to SEQ ID NO: 1136348
uaaguggcgcgagagcacc

SEQ ID NO: 1136350 - RNA, 19 nt, Artificial Sequence
  Description of Artificial Sequence: Synthetic oligonucleotide
  Sense strand starting at position 1720 of SEQ ID NO: 916178
cacuuaccugccugagagu

SEQ ID NO: 1136351 - RNA, 19 nt, Artificial Sequence
  Description of Artificial Sequence: Synthetic oligonucleotide
  Antisense strand to SEQ ID NO: 1136350
acucucaggcagguaagug

SEQ ID NO: 1136352 - RNA, 19 nt, Artificial Sequence
  Description of Artificial Sequence: Synthetic oligonucleotide
  Sense strand starting at position 1721 of SEQ ID NO: 916178
acuuaccugccugagaguu

SEQ ID NO: 1136353 - RNA, 19 nt, Artificial Sequence
  Description of Artificial Sequence: Synthetic oligonucleotide
  Antisense strand to SEQ ID NO: 1136352
aacucucaggcagguaagu

SEQ ID NO: 1136354 - RNA, 19 nt, Artificial Sequence
  Description of Artificial Sequence: Synthetic oligonucleotide
  Sense strand starting at position 2335 of SEQ ID NO: 916178
guugguucacuugguggau

SEQ ID NO: 1136355 - RNA, 19 nt, Artificial Sequence
  Description of Artificial Sequence: Synthetic oligonucleotide
  Antisense strand to SEQ ID NO: 1136354
auccaccaagugaaccaac

SEQ ID NO: 1136356 - RNA, 19 nt, Artificial Sequence
  Description of Artificial Sequence: Synthetic oligonucleotide
  Sense strand starting at position 2371 of SEQ ID NO: 916178
auauuucucucuguguguu

SEQ ID NO: 1136357 - RNA, 19 nt, Artificial Sequence
  Description of Artificial Sequence: Synthetic oligonucleotide
  Antisense strand to SEQ ID NO: 1136356
aacacacagagagaaauau

SEQ ID NO: 1136358 - RNA, 19 nt, Artificial Sequence
  Description of Artificial Sequence: Synthetic oligonucleotide
  Sense strand starting at position 2501 of SEQ ID NO: 916178
gugaaauugcacugucucu

SEQ ID NO: 1136359 - RNA, 19 nt, Artificial Sequence
  Description of Artificial Sequence: Synthetic oligonucleotide
  Antisense strand to SEQ ID NO: 1136358
agagacagugcaauuucac

SEQ ID NO: 1136360 - RNA, 19 nt, Artificial Sequence
  Description of Artificial Sequence: Synthetic oligonucleotide
  Sense strand starting at position 2883 of SEQ ID NO: 916178
agagacugcguccacgaau

SEQ ID NO: 1136361 - RNA, 19 nt, Artificial Sequence
  Description of Artificial Sequence: Synthetic oligonucleotide
  Antisense strand to SEQ ID NO: 1136360
auucguggacgcagucucu

SEQ ID NO: 1136362 - RNA, 19 nt, Artificial Sequence
  Description of Artificial Sequence: Synthetic oligonucleotide
  Sense strand starting at position 3149 of SEQ ID NO: 916178
acaguugagccuugauaaa

SEQ ID NO: 1136363 - RNA, 19 nt, Artificial Sequence
  Description of Artificial Sequence: Synthetic oligonucleotide
  Antisense strand to SEQ ID NO: 1136362
uuuaucaaggcucaacugu

SEQ ID NO: 1136364 - RNA, 19 nt, Artificial Sequence
  Description of Artificial Sequence: Synthetic oligonucleotide
  Sense strand starting at position 3203 of SEQ ID NO: 916178
cggcuaacauuccuuaaac

SEQ ID NO: 1136365 - RNA, 19 nt, Artificial Sequence
  Description of Artificial Sequence: Synthetic oligonucleotide
  Antisense strand to SEQ ID NO: 1136364
guuuaaggaauguuagccg

SEQ ID NO: 1136366 - RNA, 19 nt, Artificial Sequence
  Description of Artificial Sequence: Synthetic oligonucleotide
  Sense strand starting at position 3249 of SEQ ID NO: 916178
gggccuguucucuacugga

SEQ ID NO: 1136367 - RNA, 19 nt, Artificial Sequence
  Description of Artificial Sequence: Synthetic oligonucleotide
  Antisense strand to SEQ ID NO: 1136366
uccaguagagaacaggccc

SEQ ID NO: 1136368 - RNA, 19 nt, Artificial Sequence
  Description of Artificial Sequence: Synthetic oligonucleotide
  Sense strand starting at position 3254 of SEQ ID NO: 916178
uguucucuacuggagaauc

SEQ ID NO: 1136369 - RNA, 19 nt, Artificial Sequence
  Description of Artificial Sequence: Synthetic oligonucleotide
  Antisense strand to SEQ ID NO: 1136368
gauucuccaguagagaaca

SEQ ID NO: 1136370 - RNA, 19 nt, Artificial Sequence
  Description of Artificial Sequence: Synthetic oligonucleotide
  Sense strand starting at position 3284 of SEQ ID NO: 916178
gagguuggcuuucuccaga

SEQ ID NO: 1136371 - RNA, 19 nt, Artificial Sequence
  Description of Artificial Sequence: Synthetic oligonucleotide
  Antisense strand to SEQ ID NO: 1136370
ucuggagaaagccaaccuc

SEQ ID NO: 1136372 - RNA, 19 nt, Artificial Sequence
  Description of Artificial Sequence: Synthetic oligonucleotide
  Sense strand starting at position 3287 of SEQ ID NO: 916178
guuggcuuucuccagacca

SEQ ID NO: 1136373 - RNA, 19 nt, Artificial Sequence
  Description of Artificial Sequence: Synthetic oligonucleotide
  Antisense strand to SEQ ID NO: 1136372
uggucuggagaaagccaac

SEQ ID NO: 1136374 - RNA, 19 nt, Artificial Sequence
  Description of Artificial Sequence: Synthetic oligonucleotide
  Sense strand starting at position 3298 of SEQ ID NO: 916178
ccagaccauguguauagua

SEQ ID NO: 1136375 - RNA, 19 nt, Artificial Sequence
  Description of Artificial Sequence: Synthetic oligonucleotide
  Antisense strand to SEQ ID NO: 1136374
uacuauacacauggucugg

SEQ ID NO: 1136376 - RNA, 19 nt, Artificial Sequence
  Description of Artificial Sequence: Synthetic oligonucleotide
  Sense strand starting at position 3300 of SEQ ID NO: 916178
agaccauguguauaguagu

SEQ ID NO: 1136377 - RNA, 19 nt, Artificial Sequence
  Description of Artificial Sequence: Synthetic oligonucleotide
  Antisense strand to SEQ ID NO: 1136376
acuacuauacacauggucu

SEQ ID NO: 1136378 - RNA, 19 nt, Artificial Sequence
  Description of Artificial Sequence: Synthetic oligonucleotide
  Sense strand starting at position 3306 of SEQ ID NO: 916178
uguguauaguagucauaau

SEQ ID NO: 1136379 - RNA, 19 nt, Artificial Sequence
  Description of Artificial Sequence: Synthetic oligonucleotide
  Antisense strand to SEQ ID NO: 1136378
auuaugacuacuauacaca

SEQ ID NO: 1136380 - RNA, 19 nt, Artificial Sequence
  Description of Artificial Sequence: Synthetic oligonucleotide
  Sense strand starting at position 3307 of SEQ ID NO: 916178
guguauaguagucauaaua

SEQ ID NO: 1136381 - RNA, 19 nt, Artificial Sequence
  Description of Artificial Sequence: Synthetic oligonucleotide
  Antisense strand to SEQ ID NO: 1136380
uauuaugacuacuauacac

SEQ ID NO: 1136382 - RNA, 19 nt, Artificial Sequence
  Description of Artificial Sequence: Synthetic oligonucleotide
  Sense strand starting at position 3400 of SEQ ID NO: 916178
aacuuagugccuuagagaa

SEQ ID NO: 1136383 - RNA, 19 nt, Artificial Sequence
  Description of Artificial Sequence: Synthetic oligonucleotide
  Antisense strand to SEQ ID NO: 1136382
uucucuaaggcacuaaguu

SEQ ID NO: 1136384 - RNA, 19 nt, Artificial Sequence
  Description of Artificial Sequence: Synthetic oligonucleotide
  Sense strand starting at position 3407 of SEQ ID NO: 916178
ugccuuagagaauguguca

SEQ ID NO: 1136385 - RNA, 19 nt, Artificial Sequence
  Description of Artificial Sequence: Synthetic oligonucleotide
  Antisense strand to SEQ ID NO: 1136384
ugacacauucucuaaggca

SEQ ID NO: 1136386 - RNA, 19 nt, Artificial Sequence
  Description of Artificial Sequence: Synthetic oligonucleotide
  Sense strand starting at position 3410 of SEQ ID NO: 916178
cuuagagaaugugucacuu

SEQ ID NO: 1136387 - RNA, 19 nt, Artificial Sequence
  Description of Artificial Sequence: Synthetic oligonucleotide
  Antisense strand to SEQ ID NO: 1136386
aagugacacauucucuaag

SEQ ID NO: 1136388 - RNA, 19 nt, Artificial Sequence
  Description of Artificial Sequence: Synthetic oligonucleotide
  Sense strand starting at position 3414 of SEQ ID NO: 916178
gagaaugugucacuuaaca

SEQ ID NO: 1136389 - RNA, 19 nt, Artificial Sequence
  Description of Artificial Sequence: Synthetic oligonucleotide
  Antisense strand to SEQ ID NO: 1136388
uguuaagugacacauucuc

SEQ ID NO: 1136390 - RNA, 19 nt, Artificial Sequence
  Description of Artificial Sequence: Synthetic oligonucleotide
  Sense strand starting at position 3669 of SEQ ID NO: 916178
ugccaaagugcugggauau

SEQ ID NO: 1136391 - RNA, 19 nt, Artificial Sequence
  Description of Artificial Sequence: Synthetic oligonucleotide
  Antisense strand to SEQ ID NO: 1136390
auaucccagcacuuuggca

SEQ ID NO: 1136392 - RNA, 19 nt, Artificial Sequence
  Description of Artificial Sequence: Synthetic oligonucleotide
  Sense strand starting at position 3670 of SEQ ID NO: 916178
gccaaagugcugggauauc

SEQ ID NO: 1136393 - RNA, 19 nt, Artificial Sequence
  Description of Artificial Sequence: Synthetic oligonucleotide
  Antisense strand to SEQ ID NO: 1136392
gauaucccagcacuuuggc

SEQ ID NO: 1136394 - RNA, 19 nt, Artificial Sequence
  Description of Artificial Sequence: Synthetic oligonucleotide
  Sense strand starting at position 153 of SEQ ID NO: 916179
ggcccuccuuugguagaga

SEQ ID NO: 1136395 - RNA, 19 nt, Artificial Sequence
  Description of Artificial Sequence: Synthetic oligonucleotide
  Antisense strand to SEQ ID NO: 1136394
ucucuaccaaaggagggcc

SEQ ID NO: 1136396 - RNA, 19 nt, Artificial Sequence
  Description of Artificial Sequence: Synthetic oligonucleotide
  Sense strand starting at position 391 of SEQ ID NO: 916179
cuggguuucugggugaaga

SEQ ID NO: 1136397 - RNA, 19 nt, Artificial Sequence
  Description of Artificial Sequence: Synthetic oligonucleotide
  Antisense strand to SEQ ID NO: 1136396
ucuucacccagaaacccag

SEQ ID NO: 1136398 - RNA, 19 nt, Artificial Sequence
  Description of Artificial Sequence: Synthetic oligonucleotide
  Sense strand starting at position 392 of SEQ ID NO: 916179
uggguuucugggugaagau

SEQ ID NO: 1136399 - RNA, 19 nt, Artificial Sequence
  Description of Artificial Sequence: Synthetic oligonucleotide
  Antisense strand to SEQ ID NO: 1136398
aucuucacccagaaaccca

SEQ ID NO: 1136400 - RNA, 19 nt, Artificial Sequence
  Description of Artificial Sequence: Synthetic oligonucleotide
  Sense strand starting at position 393 of SEQ ID NO: 916179
ggguuucugggugaagauu

SEQ ID NO: 1136401 - RNA, 19 nt, Artificial Sequence
  Description of Artificial Sequence: Synthetic oligonucleotide
  Antisense strand to SEQ ID NO: 1136400
aaucuucacccagaaaccc

SEQ ID NO: 1136402 - RNA, 19 nt, Artificial Sequence
  Description of Artificial Sequence: Synthetic oligonucleotide
  Sense strand starting at position 938 of SEQ ID NO: 916179
gggccuuguguauaguaga

SEQ ID NO: 1136403 - RNA, 19 nt, Artificial Sequence
  Description of Artificial Sequence: Synthetic oligonucleotide
  Antisense strand to SEQ ID NO: 1136402
ucuacuauacacaaggccc

SEQ ID NO: 1136404 - RNA, 19 nt, Artificial Sequence
  Description of Artificial Sequence: Synthetic oligonucleotide
  Sense strand starting at position 961 of SEQ ID NO: 916179
caauaaauaugaguugugu

SEQ ID NO: 1136405 - RNA, 19 nt, Artificial Sequence
  Description of Artificial Sequence: Synthetic oligonucleotide
  Antisense strand to SEQ ID NO: 1136404
acacaacucauauuuauug

SEQ ID NO: 1136406 - RNA, 19 nt, Artificial Sequence
  Description of Artificial Sequence: Synthetic oligonucleotide
  Sense strand starting at position 963 of SEQ ID NO: 916179
auaaauaugaguuguguug

SEQ ID NO: 1136407 - RNA, 19 nt, Artificial Sequence
  Description of Artificial Sequence: Synthetic oligonucleotide
  Antisense strand to SEQ ID NO: 1136406
caacacaacucauauuuau

SEQ ID NO: 1136408 - RNA, 19 nt, Artificial Sequence
  Description of Artificial Sequence: Synthetic oligonucleotide
  Sense strand starting at position 997 of SEQ ID NO: 916179
aagagauguugcuuaagcu

SEQ ID NO: 1136409 - RNA, 19 nt, Artificial Sequence
  Description of Artificial Sequence: Synthetic oligonucleotide
  Antisense strand to SEQ ID NO: 1136408
agcuuaagcaacaucucuu

SEQ ID NO: 1136410 - RNA, 19 nt, Artificial Sequence
  Description of Artificial Sequence: Synthetic oligonucleotide
  Sense strand starting at position 998 of SEQ ID NO: 916179
agagauguugcuuaagcuc

SEQ ID NO: 1136411 - RNA, 19 nt, Artificial Sequence
  Description of Artificial Sequence: Synthetic oligonucleotide
  Antisense strand to SEQ ID NO: 1136410
gagcuuaagcaacaucucu

SEQ ID NO: 1136412 - RNA, 19 nt, Artificial Sequence
  Description of Artificial Sequence: Synthetic oligonucleotide
  Sense strand starting at position 1004 of SEQ ID NO: 916179
guugcuuaagcucugcuau

SEQ ID NO: 1136413 - RNA, 19 nt, Artificial Sequence
  Description of Artificial Sequence: Synthetic oligonucleotide
  Antisense strand to SEQ ID NO: 1136412
auagcagagcuuaagcaac

SEQ ID NO: 1136414 - RNA, 19 nt, Artificial Sequence
  Description of Artificial Sequence: Synthetic oligonucleotide
  Sense strand starting at position 1083 of SEQ ID NO: 916179
cccucugguuaaucucaga

SEQ ID NO: 1136415 - RNA, 19 nt, Artificial Sequence
  Description of Artificial Sequence: Synthetic oligonucleotide
  Antisense strand to SEQ ID NO: 1136414
ucugagauuaaccagaggg

SEQ ID NO: 1136416 - RNA, 19 nt, Artificial Sequence
  Description of Artificial Sequence: Synthetic oligonucleotide
  Sense strand starting at position 1305 of SEQ ID NO: 916179
agcaccuccuguuuacaga

SEQ ID NO: 1136417 - RNA, 19 nt, Artificial Sequence
  Description of Artificial Sequence: Synthetic oligonucleotide
  Antisense strand to SEQ ID NO: 1136416
ucuguaaacaggaggugcu

SEQ ID NO: 1136418 - RNA, 19 nt, Artificial Sequence
  Description of Artificial Sequence: Synthetic oligonucleotide
  Sense strand starting at position 1306 of SEQ ID NO: 916179
gcaccuccuguuuacagaa

SEQ ID NO: 1136419 - RNA, 19 nt, Artificial Sequence
  Description of Artificial Sequence: Synthetic oligonucleotide
  Antisense strand to SEQ ID NO: 1136418
uucuguaaacaggaggugc

SEQ ID NO: 1136420 - RNA, 19 nt, Artificial Sequence
  Description of Artificial Sequence: Synthetic oligonucleotide
  Sense strand starting at position 1313 of SEQ ID NO: 916179
cuguuuacagaaugaaguu

SEQ ID NO: 1136421 - RNA, 19 nt, Artificial Sequence
  Description of Artificial Sequence: Synthetic oligonucleotide
  Antisense strand to SEQ ID NO: 1136420
aacuucauucuguaaacag

SEQ ID NO: 1136422 - RNA, 19 nt, Artificial Sequence
  Description of Artificial Sequence: Synthetic oligonucleotide
  Sense strand starting at position 1355 of SEQ ID NO: 916179
cccucagaagugugaacua

SEQ ID NO: 1136423 - RNA, 19 nt, Artificial Sequence
  Description of Artificial Sequence: Synthetic oligonucleotide
  Antisense strand to SEQ ID NO: 1136422
uaguucacacuucugaggg

SEQ ID NO: 1136424 - RNA, 19 nt, Artificial Sequence
  Description of Artificial Sequence: Synthetic oligonucleotide
  Sense strand starting at position 1360 of SEQ ID NO: 916179
agaagugugaacuacuguu

SEQ ID NO: 1136425 - RNA, 19 nt, Artificial Sequence
  Description of Artificial Sequence: Synthetic oligonucleotide
  Antisense strand to SEQ ID NO: 1136424
aacaguaguucacacuucu

SEQ ID NO: 1136426 - RNA, 19 nt, Artificial Sequence
  Description of Artificial Sequence: Synthetic oligonucleotide
  Sense strand starting at position 1624 of SEQ ID NO: 916179
ggugcucucgcgccacuua

SEQ ID NO: 1136427 - RNA, 19 nt, Artificial Sequence
  Description of Artificial Sequence: Synthetic oligonucleotide
  Antisense strand to SEQ ID NO: 1136426
uaaguggcgcgagagcacc

SEQ ID NO: 1136428 - RNA, 19 nt, Artificial Sequence
  Description of Artificial Sequence: Synthetic oligonucleotide
  Sense strand starting at position 1637 of SEQ ID NO: 916179
cacuuaccugccugagagu

SEQ ID NO: 1136429 - RNA, 19 nt, Artificial Sequence
  Description of Artificial Sequence: Synthetic oligonucleotide
  Antisense strand to SEQ ID NO: 1136428
acucucaggcagguaagug

SEQ ID NO: 1136430 - RNA, 19 nt, Artificial Sequence
  Description of Artificial Sequence: Synthetic oligonucleotide
  Sense strand starting at position 1638 of SEQ ID NO: 916179
acuuaccugccugagaguu

SEQ ID NO: 1136431 - RNA, 19 nt, Artificial Sequence
  Description of Artificial Sequence: Synthetic oligonucleotide
  Antisense strand to SEQ ID NO: 1136430
aacucucaggcagguaagu

SEQ ID NO: 1136432 - RNA, 19 nt, Artificial Sequence
  Description of Artificial Sequence: Synthetic oligonucleotide
  Sense strand starting at position 2252 of SEQ ID NO: 916179
guugguucacuugguggau

SEQ ID NO: 1136433 - RNA, 19 nt, Artificial Sequence
  Description of Artificial Sequence: Synthetic oligonucleotide
  Antisense strand to SEQ ID NO: 1136432
auccaccaagugaaccaac

SEQ ID NO: 1136434 - RNA, 19 nt, Artificial Sequence
  Description of Artificial Sequence: Synthetic oligonucleotide
  Sense strand starting at position 2288 of SEQ ID NO: 916179
auauuucucucuguguguu

SEQ ID NO: 1136435 - RNA, 19 nt, Artificial Sequence
  Description of Artificial Sequence: Synthetic oligonucleotide
  Antisense strand to SEQ ID NO: 1136434
aacacacagagagaaauau

SEQ ID NO: 1136436 - RNA, 19 nt, Artificial Sequence
  Description of Artificial Sequence: Synthetic oligonucleotide
  Sense strand starting at position 2800 of SEQ ID NO: 916179
agagacugcguccacgaau

SEQ ID NO: 1136437 - RNA, 19 nt, Artificial Sequence
  Description of Artificial Sequence: Synthetic oligonucleotide
  Antisense strand to SEQ ID NO: 1136436
auucguggacgcagucucu

SEQ ID NO: 1136438 - RNA, 19 nt, Artificial Sequence
  Description of Artificial Sequence: Synthetic oligonucleotide
  Sense strand starting at position 3066 of SEQ ID NO: 916179
acaguugagccuugauaaa

SEQ ID NO: 1136439 - RNA, 19 nt, Artificial Sequence
  Description of Artificial Sequence: Synthetic oligonucleotide
  Antisense strand to SEQ ID NO: 1136438
uuuaucaaggcucaacugu

SEQ ID NO: 1136440 - RNA, 19 nt, Artificial Sequence
  Description of Artificial Sequence: Synthetic oligonucleotide
  Sense strand starting at position 3120 of SEQ ID NO: 916179
cggcuaacauuccuuaaac

SEQ ID NO: 1136441 - RNA, 19 nt, Artificial Sequence
  Description of Artificial Sequence: Synthetic oligonucleotide
  Antisense strand to SEQ ID NO: 1136440
guuuaaggaauguuagccg

SEQ ID NO: 1136442 - RNA, 19 nt, Artificial Sequence
  Description of Artificial Sequence: Synthetic oligonucleotide
  Sense strand starting at position 3166 of SEQ ID NO: 916179
gggccuguucucuacugga

SEQ ID NO: 1136443 - RNA, 19 nt, Artificial Sequence
  Description of Artificial Sequence: Synthetic oligonucleotide
  Antisense strand to SEQ ID NO: 1136442
uccaguagagaacaggccc

SEQ ID NO: 1136444 - RNA, 19 nt, Artificial Sequence
  Description of Artificial Sequence: Synthetic oligonucleotide
  Sense strand starting at position 3171 of SEQ ID NO: 916179
uguucucuacuggagaauc

SEQ ID NO: 1136445 - RNA, 19 nt, Artificial Sequence
  Description of Artificial Sequence: Synthetic oligonucleotide
  Antisense strand to SEQ ID NO: 1136444
gauucuccaguagagaaca

SEQ ID NO: 1136446 - RNA, 19 nt, Artificial Sequence
  Description of Artificial Sequence: Synthetic oligonucleotide
  Sense strand starting at position 3201 of SEQ ID NO: 916179
gagguuggcuuucuccaga

SEQ ID NO: 1136447 - RNA, 19 nt, Artificial Sequence
  Description of Artificial Sequence: Synthetic oligonucleotide
  Antisense strand to SEQ ID NO: 1136446
ucuggagaaagccaaccuc

SEQ ID NO: 1136448 - RNA, 19 nt, Artificial Sequence
  Description of Artificial Sequence: Synthetic oligonucleotide
  Sense strand starting at position 3204 of SEQ ID NO: 916179
guuggcuuucuccagacca

SEQ ID NO: 1136449 - RNA, 19 nt, Artificial Sequence
  Description of Artificial Sequence: Synthetic oligonucleotide
  Antisense strand to SEQ ID NO: 1136448
uggucuggagaaagccaac

SEQ ID NO: 1136450 - RNA, 19 nt, Artificial Sequence
  Description of Artificial Sequence: Synthetic oligonucleotide
  Sense strand starting at position 3215 of SEQ ID NO: 916179
ccagaccauguguauagua

SEQ ID NO: 1136451 - RNA, 19 nt, Artificial Sequence
  Description of Artificial Sequence: Synthetic oligonucleotide
  Antisense strand to SEQ ID NO: 1136450
uacuauacacauggucugg

SEQ ID NO: 1136452 - RNA, 19 nt, Artificial Sequence
  Description of Artificial Sequence: Synthetic oligonucleotide
  Sense strand starting at position 3217 of SEQ ID NO: 916179
agaccauguguauaguagu

SEQ ID NO: 1136453 - RNA, 19 nt, Artificial Sequence
  Description of Artificial Sequence: Synthetic oligonucleotide
  Antisense strand to SEQ ID NO: 1136452
acuacuauacacauggucu

SEQ ID NO: 1136454 - RNA, 19 nt, Artificial Sequence
  Description of Artificial Sequence: Synthetic oligonucleotide
  Sense strand starting at position 3223 of SEQ ID NO: 916179
uguguauaguagucauaau

SEQ ID NO: 1136455 - RNA, 19 nt, Artificial Sequence
  Description of Artificial Sequence: Synthetic oligonucleotide
  Antisense strand to SEQ ID NO: 1136454
auuaugacuacuauacaca

SEQ ID NO: 1136456 - RNA, 19 nt, Artificial Sequence
  Description of Artificial Sequence: Synthetic oligonucleotide
  Sense strand starting at position 3224 of SEQ ID NO: 916179
guguauaguagucauaaua

SEQ ID NO: 1136457 - RNA, 19 nt, Artificial Sequence
  Description of Artificial Sequence: Synthetic oligonucleotide
  Antisense strand to SEQ ID NO: 1136456
uauuaugacuacuauacac

SEQ ID NO: 1136458 - RNA, 19 nt, Artificial Sequence
  Description of Artificial Sequence: Synthetic oligonucleotide
  Sense strand starting at position 3317 of SEQ ID NO: 916179
aacuuagugccuuagagaa

SEQ ID NO: 1136459 - RNA, 19 nt, Artificial Sequence
  Description of Artificial Sequence: Synthetic oligonucleotide
  Antisense strand to SEQ ID NO: 1136458
uucucuaaggcacuaaguu

SEQ ID NO: 1136460 - RNA, 19 nt, Artificial Sequence
  Description of Artificial Sequence: Synthetic oligonucleotide
  Sense strand starting at position 3324 of SEQ ID NO: 916179
ugccuuagagaauguguca

SEQ ID NO: 1136461 - RNA, 19 nt, Artificial Sequence
  Description of Artificial Sequence: Synthetic oligonucleotide
  Antisense strand to SEQ ID NO: 1136460
ugacacauucucuaaggca

SEQ ID NO: 1136462 - RNA, 19 nt, Artificial Sequence
  Description of Artificial Sequence: Synthetic oligonucleotide
  Sense strand starting at position 3327 of SEQ ID NO: 916179
cuuagagaaugugucacuu

SEQ ID NO: 1136463 - RNA, 19 nt, Artificial Sequence
  Description of Artificial Sequence: Synthetic oligonucleotide
  Antisense strand to SEQ ID NO: 1136462
aagugacacauucucuaag

SEQ ID NO: 1136464 - RNA, 19 nt, Artificial Sequence
  Description of Artificial Sequence: Synthetic oligonucleotide
  Sense strand starting at position 3331 of SEQ ID NO: 916179
gagaaugugucacuuaaca

SEQ ID NO: 1136465 - RNA, 19 nt, Artificial Sequence
  Description of Artificial Sequence: Synthetic oligonucleotide
  Antisense strand to SEQ ID NO: 1136464
uguuaagugacacauucuc

SEQ ID NO: 1136466 - RNA, 19 nt, Artificial Sequence
  Description of Artificial Sequence: Synthetic oligonucleotide
  Sense strand starting at position 3586 of SEQ ID NO: 916179
ugccaaagugcugggauau

SEQ ID NO: 1136467 - RNA, 19 nt, Artificial Sequence
  Description of Artificial Sequence: Synthetic oligonucleotide
  Antisense strand to SEQ ID NO: 1136466
auaucccagcacuuuggca

SEQ ID NO: 1136468 - RNA, 19 nt, Artificial Sequence
  Description of Artificial Sequence: Synthetic oligonucleotide
  Sense strand starting at position 3587 of SEQ ID NO: 916179
gccaaagugcugggauauc

SEQ ID NO: 1136469 - RNA, 19 nt, Artificial Sequence
  Description of Artificial Sequence: Synthetic oligonucleotide
  Antisense strand to SEQ ID NO: 1136468
gauaucccagcacuuuggc

SEQ ID NO: 1136470 - RNA, 19 nt, Artificial Sequence
  Description of Artificial Sequence: Synthetic oligonucleotide
  Sense strand starting at position 3981 of SEQ ID NO: 916179
cacggaaucuuguucuguu

SEQ ID NO: 1136471 - RNA, 19 nt, Artificial Sequence
  Description of Artificial Sequence: Synthetic oligonucleotide
  Antisense strand to SEQ ID NO: 1136470
aacagaacaagauuccgug

SEQ ID NO: 1136472 - RNA, 19 nt, Artificial Sequence
  Description of Artificial Sequence: Synthetic oligonucleotide
  Sense strand starting at position 3982 of SEQ ID NO: 916179
acggaaucuuguucuguuu

SEQ ID NO: 1136473 - RNA, 19 nt, Artificial Sequence
  Description of Artificial Sequence: Synthetic oligonucleotide
  Antisense strand to SEQ ID NO: 1136472
aaacagaacaagauuccgu

SEQ ID NO: 1136474 - RNA, 19 nt, Artificial Sequence
  Description of Artificial Sequence: Synthetic oligonucleotide
  Sense strand starting at position 22 of SEQ ID NO: 916180
acuaguagagccugaauau

SEQ ID NO: 1136475 - RNA, 19 nt, Artificial Sequence
  Description of Artificial Sequence: Synthetic oligonucleotide
  Antisense strand to SEQ ID NO: 1136474
auauucaggcucuacuagu

SEQ ID NO: 1136476 - RNA, 19 nt, Artificial Sequence
  Description of Artificial Sequence: Synthetic oligonucleotide
  Sense strand starting at position 23 of SEQ ID NO: 916180
cuaguagagccugaauaug

SEQ ID NO: 1136477 - RNA, 19 nt, Artificial Sequence
  Description of Artificial Sequence: Synthetic oligonucleotide
  Antisense strand to SEQ ID NO: 1136476
cauauucaggcucuacuag

SEQ ID NO: 1136478 - RNA, 19 nt, Artificial Sequence
  Description of Artificial Sequence: Synthetic oligonucleotide
  Sense strand starting at position 84 of SEQ ID NO: 916180
uggcauggcuaucaucaaa

SEQ ID NO: 1136479 - RNA, 19 nt, Artificial Sequence
  Description of Artificial Sequence: Synthetic oligonucleotide
  Antisense strand to SEQ ID NO: 1136478
uuugaugauagccaugcca

SEQ ID NO: 1136480 - RNA, 19 nt, Artificial Sequence
  Description of Artificial Sequence: Synthetic oligonucleotide
  Sense strand starting at position 138 of SEQ ID NO: 916180
gugaauauuuccuguagcu

SEQ ID NO: 1136481 - RNA, 19 nt, Artificial Sequence
  Description of Artificial Sequence: Synthetic oligonucleotide
  Antisense strand to SEQ ID NO: 1136480
agcuacaggaaauauucac

SEQ ID NO: 1136482 - RNA, 19 nt, Artificial Sequence
  Description of Artificial Sequence: Synthetic oligonucleotide
  Sense strand starting at position 166 of SEQ ID NO: 916180
gcacuuagcucucaaauug

SEQ ID NO: 1136483 - RNA, 19 nt, Artificial Sequence
  Description of Artificial Sequence: Synthetic oligonucleotide
  Antisense strand to SEQ ID NO: 1136482
caauuugagagcuaagugc

SEQ ID NO: 1136484 - RNA, 19 nt, Artificial Sequence
  Description of Artificial Sequence: Synthetic oligonucleotide
  Sense strand starting at position 313 of SEQ ID NO: 916180
guuaaacuuccaugaaugg

SEQ ID NO: 1136485 - RNA, 19 nt, Artificial Sequence
  Description of Artificial Sequence: Synthetic oligonucleotide
  Antisense strand to SEQ ID NO: 1136484
ccauucauggaaguuuaac

SEQ ID NO: 1136486 - RNA, 19 nt, Artificial Sequence
  Description of Artificial Sequence: Synthetic oligonucleotide
  Sense strand starting at position 346 of SEQ ID NO: 916180
gguacuuauuguuuguacu

SEQ ID NO: 1136487 - RNA, 19 nt, Artificial Sequence
  Description of Artificial Sequence: Synthetic oligonucleotide
  Antisense strand to SEQ ID NO: 1136486
aguacaaacaauaaguacc

SEQ ID NO: 1136488 - RNA, 19 nt, Artificial Sequence
  Description of Artificial Sequence: Synthetic oligonucleotide
  Sense strand starting at position 347 of SEQ ID NO: 916180
guacuuauuguuuguacuu

SEQ ID NO: 1136489 - RNA, 19 nt, Artificial Sequence
  Description of Artificial Sequence: Synthetic oligonucleotide
  Antisense strand to SEQ ID NO: 1136488
aaguacaaacaauaaguac

SEQ ID NO: 1136490 - RNA, 19 nt, Artificial Sequence
  Description of Artificial Sequence: Synthetic oligonucleotide
  Sense strand starting at position 710 of SEQ ID NO: 916180
agcugacaacacugacuua

SEQ ID NO: 1136491 - RNA, 19 nt, Artificial Sequence
  Description of Artificial Sequence: Synthetic oligonucleotide
  Antisense strand to SEQ ID NO: 1136490
uaagucaguguugucagcu

SEQ ID NO: 1136492 - RNA, 19 nt, Artificial Sequence
  Description of Artificial Sequence: Synthetic oligonucleotide
  Sense strand starting at position 720 of SEQ ID NO: 916180
acugacuuauccugugaua

SEQ ID NO: 1136493 - RNA, 19 nt, Artificial Sequence
  Description of Artificial Sequence: Synthetic oligonucleotide
  Antisense strand to SEQ ID NO: 1136492
uaucacaggauaagucagu

SEQ ID NO: 1136494 - RNA, 19 nt, Artificial Sequence
  Description of Artificial Sequence: Synthetic oligonucleotide
  Sense strand starting at position 722 of SEQ ID NO: 916180
ugacuuauccugugauagu

SEQ ID NO: 1136495 - RNA, 19 nt, Artificial Sequence
  Description of Artificial Sequence: Synthetic oligonucleotide
  Antisense strand to SEQ ID NO: 1136494
acuaucacaggauaaguca

SEQ ID NO: 1136496 - RNA, 19 nt, Artificial Sequence
  Description of Artificial Sequence: Synthetic oligonucleotide
  Sense strand starting at position 723 of SEQ ID NO: 916180
gacuuauccugugauaguc

SEQ ID NO: 1136497 - RNA, 19 nt, Artificial Sequence
  Description of Artificial Sequence: Synthetic oligonucleotide
  Antisense strand to SEQ ID NO: 1136496
gacuaucacaggauaaguc

SEQ ID NO: 1136498 - RNA, 19 nt, Artificial Sequence
  Description of Artificial Sequence: Synthetic oligonucleotide
  Sense strand starting at position 725 of SEQ ID NO: 916180
cuuauccugugauagucau

SEQ ID NO: 1136499 - RNA, 19 nt, Artificial Sequence
  Description of Artificial Sequence: Synthetic oligonucleotide
  Antisense strand to SEQ ID NO: 1136498
augacuaucacaggauaag

SEQ ID NO: 1136500 - RNA, 19 nt, Artificial Sequence
  Description of Artificial Sequence: Synthetic oligonucleotide
  Sense strand starting at position 834 of SEQ ID NO: 916180
gguaauagauauuagagag

SEQ ID NO: 1136501 - RNA, 19 nt, Artificial Sequence
  Description of Artificial Sequence: Synthetic oligonucleotide
  Antisense strand to SEQ ID NO: 1136500
cucucuaauaucuauuacc

SEQ ID NO: 1136502 - RNA, 19 nt, Artificial Sequence
  Description of Artificial Sequence: Synthetic oligonucleotide
  Sense strand starting at position 841 of SEQ ID NO: 916180
gauauuagagaguguggca

SEQ ID NO: 1136503 - RNA, 19 nt, Artificial Sequence
  Description of Artificial Sequence: Synthetic oligonucleotide
  Antisense strand to SEQ ID NO: 1136502
ugccacacucucuaauauc

SEQ ID NO: 1136504 - RNA, 19 nt, Artificial Sequence
  Description of Artificial Sequence: Synthetic oligonucleotide
  Sense strand starting at position 1155 of SEQ ID NO: 916180
gguaaacacacguagaacu

SEQ ID NO: 1136505 - RNA, 19 nt, Artificial Sequence
  Description of Artificial Sequence: Synthetic oligonucleotide
  Antisense strand to SEQ ID NO: 1136504
aguucuacguguguuuacc

SEQ ID NO: 1136506 - RNA, 19 nt, Artificial Sequence
  Description of Artificial Sequence: Synthetic oligonucleotide
  Sense strand starting at position 1165 of SEQ ID NO: 916180
cguagaacuuaccugguuu

SEQ ID NO: 1136507 - RNA, 19 nt, Artificial Sequence
  Description of Artificial Sequence: Synthetic oligonucleotide
  Antisense strand to SEQ ID NO: 1136506
aaaccagguaaguucuacg

SEQ ID NO: 1136508 - RNA, 19 nt, Artificial Sequence
  Description of Artificial Sequence: Synthetic oligonucleotide
  Sense strand starting at position 2101 of SEQ ID NO: 916180
ccauguauguacucacgca

SEQ ID NO: 1136509 - RNA, 19 nt, Artificial Sequence
  Description of Artificial Sequence: Synthetic oligonucleotide
  Antisense strand to SEQ ID NO: 1136508
ugcgugaguacauacaugg

SEQ ID NO: 1136510 - RNA, 19 nt, Artificial Sequence
  Description of Artificial Sequence: Synthetic oligonucleotide
  Sense strand starting at position 2121 of SEQ ID NO: 916180
ucagaaugugauuacagca

SEQ ID NO: 1136511 - RNA, 19 nt, Artificial Sequence
  Description of Artificial Sequence: Synthetic oligonucleotide
  Antisense strand to SEQ ID NO: 1136510
ugcuguaaucacauucuga

SEQ ID NO: 1136512 - RNA, 19 nt, Artificial Sequence
  Description of Artificial Sequence: Synthetic oligonucleotide
  Sense strand starting at position 2126 of SEQ ID NO: 916180
augugauuacagcauaaug

SEQ ID NO: 1136513 - RNA, 19 nt, Artificial Sequence
  Description of Artificial Sequence: Synthetic oligonucleotide
  Antisense strand to SEQ ID NO: 1136512
cauuaugcuguaaucacau

SEQ ID NO: 1136514 - RNA, 19 nt, Artificial Sequence
  Description of Artificial Sequence: Synthetic oligonucleotide
  Sense strand starting at position 2128 of SEQ ID NO: 916180
gugauuacagcauaaugua

SEQ ID NO: 1136515 - RNA, 19 nt, Artificial Sequence
  Description of Artificial Sequence: Synthetic oligonucleotide
  Antisense strand to SEQ ID NO: 1136514
uacauuaugcuguaaucac

SEQ ID NO: 1136516 - RNA, 19 nt, Artificial Sequence
  Description of Artificial Sequence: Synthetic oligonucleotide
  Sense strand starting at position 2136 of SEQ ID NO: 916180
agcauaauguacucauagu

SEQ ID NO: 1136517 - RNA, 19 nt, Artificial Sequence
  Description of Artificial Sequence: Synthetic oligonucleotide
  Antisense strand to SEQ ID NO: 1136516
acuaugaguacauuaugcu

SEQ ID NO: 1136518 - RNA, 19 nt, Artificial Sequence
  Description of Artificial Sequence: Synthetic oligonucleotide
  Sense strand starting at position 2142 of SEQ ID NO: 916180
auguacucauaguaaacaa

SEQ ID NO: 1136519 - RNA, 19 nt, Artificial Sequence
  Description of Artificial Sequence: Synthetic oligonucleotide
  Antisense strand to SEQ ID NO: 1136518
uuguuuacuaugaguacau

SEQ ID NO: 1136520 - RNA, 19 nt, Artificial Sequence
  Description of Artificial Sequence: Synthetic oligonucleotide
  Sense strand starting at position 2420 of SEQ ID NO: 916180
cugaauaucugacuugcua

SEQ ID NO: 1136521 - RNA, 19 nt, Artificial Sequence
  Description of Artificial Sequence: Synthetic oligonucleotide
  Antisense strand to SEQ ID NO: 1136520
uagcaagucagauauucag

SEQ ID NO: 1136522 - RNA, 19 nt, Artificial Sequence
  Description of Artificial Sequence: Synthetic oligonucleotide
  Sense strand starting at position 2461 of SEQ ID NO: 916180
cugacaaguuauuagaaua

SEQ ID NO: 1136523 - RNA, 19 nt, Artificial Sequence
  Description of Artificial Sequence: Synthetic oligonucleotide
  Antisense strand to SEQ ID NO: 1136522
uauucuaauaacuugucag

SEQ ID NO: 1136524 - RNA, 19 nt, Artificial Sequence
  Description of Artificial Sequence: Synthetic oligonucleotide
  Sense strand starting at position 2528 of SEQ ID NO: 916180
auguauacaucaguaguaa

SEQ ID NO: 1136525 - RNA, 19 nt, Artificial Sequence
  Description of Artificial Sequence: Synthetic oligonucleotide
  Antisense strand to SEQ ID NO: 1136524
uuacuacugauguauacau

SEQ ID NO: 1136526 - RNA, 19 nt, Artificial Sequence
  Description of Artificial Sequence: Synthetic oligonucleotide
  Sense strand starting at position 2529 of SEQ ID NO: 916180
uguauacaucaguaguaac

SEQ ID NO: 1136527 - RNA, 19 nt, Artificial Sequence
  Description of Artificial Sequence: Synthetic oligonucleotide
  Antisense strand to SEQ ID NO: 1136526
guuacuacugauguauaca

SEQ ID NO: 1136528 - RNA, 19 nt, Artificial Sequence
  Description of Artificial Sequence: Synthetic oligonucleotide
  Sense strand starting at position 2716 of SEQ ID NO: 916180
aucuguguucauggaugag

SEQ ID NO: 1136529 - RNA, 19 nt, Artificial Sequence
  Description of Artificial Sequence: Synthetic oligonucleotide
  Antisense strand to SEQ ID NO: 1136528
cucauccaugaacacagau

SEQ ID NO: 1136530 - RNA, 19 nt, Artificial Sequence
  Description of Artificial Sequence: Synthetic oligonucleotide
  Sense strand starting at position 2722 of SEQ ID NO: 916180
guucauggaugagaagaca

SEQ ID NO: 1136531 - RNA, 19 nt, Artificial Sequence
  Description of Artificial Sequence: Synthetic oligonucleotide
  Antisense strand to SEQ ID NO: 1136530
ugucuucucauccaugaac

SEQ ID NO: 1136532 - RNA, 19 nt, Artificial Sequence
  Description of Artificial Sequence: Synthetic oligonucleotide
  Sense strand starting at position 3075 of SEQ ID NO: 916180
ugagcuuacuuacuguuua

SEQ ID NO: 1136533 - RNA, 19 nt, Artificial Sequence
  Description of Artificial Sequence: Synthetic oligonucleotide
  Antisense strand to SEQ ID NO: 1136532
uaaacaguaaguaagcuca

SEQ ID NO: 1136534 - RNA, 19 nt, Artificial Sequence
  Description of Artificial Sequence: Synthetic oligonucleotide
  Sense strand starting at position 3079 of SEQ ID NO: 916180
cuuacuuacuguuuauaug

SEQ ID NO: 1136535 - RNA, 19 nt, Artificial Sequence
  Description of Artificial Sequence: Synthetic oligonucleotide
  Antisense strand to SEQ ID NO: 1136534
cauauaaacaguaaguaag

SEQ ID NO: 1136536 - RNA, 19 nt, Artificial Sequence
  Description of Artificial Sequence: Synthetic oligonucleotide
  Sense strand starting at position 3089 of SEQ ID NO: 916180
guuuauauguaucccacau

SEQ ID NO: 1136537 - RNA, 19 nt, Artificial Sequence
  Description of Artificial Sequence: Synthetic oligonucleotide
  Antisense strand to SEQ ID NO: 1136536
augugggauacauauaaac

SEQ ID NO: 1136538 - RNA, 19 nt, Artificial Sequence
  Description of Artificial Sequence: Synthetic oligonucleotide
  Sense strand starting at position 3093 of SEQ ID NO: 916180
auauguaucccacauagug

SEQ ID NO: 1136539 - RNA, 19 nt, Artificial Sequence
  Description of Artificial Sequence: Synthetic oligonucleotide
  Antisense strand to SEQ ID NO: 1136538
cacuaugugggauacauau

SEQ ID NO: 1136540 - RNA, 19 nt, Artificial Sequence
  Description of Artificial Sequence: Synthetic oligonucleotide
  Sense strand starting at position 3142 of SEQ ID NO: 916180
gugugugauuacuggauac

SEQ ID NO: 1136541 - RNA, 19 nt, Artificial Sequence
  Description of Artificial Sequence: Synthetic oligonucleotide
  Antisense strand to SEQ ID NO: 1136540
guauccaguaaucacacac

SEQ ID NO: 1136542 - RNA, 19 nt, Artificial Sequence
  Description of Artificial Sequence: Synthetic oligonucleotide
  Sense strand starting at position 3144 of SEQ ID NO: 916180
gugugauuacuggauacua

SEQ ID NO: 1136543 - RNA, 19 nt, Artificial Sequence
  Description of Artificial Sequence: Synthetic oligonucleotide
  Antisense strand to SEQ ID NO: 1136542
uaguauccaguaaucacac

SEQ ID NO: 1136544 - RNA, 19 nt, Artificial Sequence
  Description of Artificial Sequence: Synthetic oligonucleotide
  Sense strand starting at position 3211 of SEQ ID NO: 916180
acaucugaccugcaagguu

SEQ ID NO: 1136545 - RNA, 19 nt, Artificial Sequence
  Description of Artificial Sequence: Synthetic oligonucleotide
  Antisense strand to SEQ ID NO: 1136544
aaccuugcaggucagaugu

SEQ ID NO: 1136546 - RNA, 19 nt, Artificial Sequence
  Description of Artificial Sequence: Synthetic oligonucleotide
  Sense strand starting at position 3219 of SEQ ID NO: 916180
ccugcaagguuucuuacaa

SEQ ID NO: 1136547 - RNA, 19 nt, Artificial Sequence
  Description of Artificial Sequence: Synthetic oligonucleotide
  Antisense strand to SEQ ID NO: 1136546
uuguaagaaaccuugcagg

SEQ ID NO: 1136548 - RNA, 19 nt, Artificial Sequence
  Description of Artificial Sequence: Synthetic oligonucleotide
  Sense strand starting at position 3236 of SEQ ID NO: 916180
aaaguauuguagccuugua

SEQ ID NO: 1136549 - RNA, 19 nt, Artificial Sequence
  Description of Artificial Sequence: Synthetic oligonucleotide
  Antisense strand to SEQ ID NO: 1136548
uacaaggcuacaauacuuu

SEQ ID NO: 1136550 - RNA, 19 nt, Artificial Sequence
  Description of Artificial Sequence: Synthetic oligonucleotide
  Sense strand starting at position 3482 of SEQ ID NO: 916180
gguagugagugcgucucau

SEQ ID NO: 1136551 - RNA, 19 nt, Artificial Sequence
  Description of Artificial Sequence: Synthetic oligonucleotide
  Antisense strand to SEQ ID NO: 1136550
augagacgcacucacuacc

SEQ ID NO: 1136552 - RNA, 19 nt, Artificial Sequence
  Description of Artificial Sequence: Synthetic oligonucleotide
  Sense strand starting at position 3553 of SEQ ID NO: 916180
gucgccauguaagacauaa

SEQ ID NO: 1136553 - RNA, 19 nt, Artificial Sequence
  Description of Artificial Sequence: Synthetic oligonucleotide
  Antisense strand to SEQ ID NO: 1136552
uuaugucuuacauggcgac

SEQ ID NO: 1136554 - RNA, 19 nt, Artificial Sequence
  Description of Artificial Sequence: Synthetic oligonucleotide
  Sense strand starting at position 141 of SEQ ID NO: 916181
agaaguauuugcuggaaga

SEQ ID NO: 1136555 - RNA, 19 nt, Artificial Sequence
  Description of Artificial Sequence: Synthetic oligonucleotide
  Antisense strand to SEQ ID NO: 1136554
ucuuccagcaaauacuucu

SEQ ID NO: 1136556 - RNA, 19 nt, Artificial Sequence
  Description of Artificial Sequence: Synthetic oligonucleotide
  Sense strand starting at position 284 of SEQ ID NO: 916181
cuaggcaagccuugggaaa

SEQ ID NO: 1136557 - RNA, 19 nt, Artificial Sequence
  Description of Artificial Sequence: Synthetic oligonucleotide
  Antisense strand to SEQ ID NO: 1136556
uuucccaaggcuugccuag

SEQ ID NO: 1136558 - RNA, 19 nt, Artificial Sequence
  Description of Artificial Sequence: Synthetic oligonucleotide
  Sense strand starting at position 295 of SEQ ID NO: 916181
uugggaaagucacugcuua

SEQ ID NO: 1136559 - RNA, 19 nt, Artificial Sequence
  Description of Artificial Sequence: Synthetic oligonucleotide
  Antisense strand to SEQ ID NO: 1136558
uaagcagugacuuucccaa

SEQ ID NO: 1136560 - RNA, 19 nt, Artificial Sequence
  Description of Artificial Sequence: Synthetic oligonucleotide
  Sense strand starting at position 296 of SEQ ID NO: 916181
ugggaaagucacugcuuaa

SEQ ID NO: 1136561 - RNA, 19 nt, Artificial Sequence
  Description of Artificial Sequence: Synthetic oligonucleotide
  Antisense strand to SEQ ID NO: 1136560
uuaagcagugacuuuccca

SEQ ID NO: 1136562 - RNA, 19 nt, Artificial Sequence
  Description of Artificial Sequence: Synthetic oligonucleotide
  Sense strand starting at position 355 of SEQ ID NO: 916181
uauugagagccaugucuac

SEQ ID NO: 1136563 - RNA, 19 nt, Artificial Sequence
  Description of Artificial Sequence: Synthetic oligonucleotide
  Antisense strand to SEQ ID NO: 1136562
guagacauggcucucaaua

SEQ ID NO: 1136564 - RNA, 19 nt, Artificial Sequence
  Description of Artificial Sequence: Synthetic oligonucleotide
  Sense strand starting at position 524 of SEQ ID NO: 916181
uaaguugugaaagagugau

SEQ ID NO: 1136565 - RNA, 19 nt, Artificial Sequence
  Description of Artificial Sequence: Synthetic oligonucleotide
  Antisense strand to SEQ ID NO: 1136564
aucacucuuucacaacuua

SEQ ID NO: 1136566 - RNA, 19 nt, Artificial Sequence
  Description of Artificial Sequence: Synthetic oligonucleotide
  Sense strand starting at position 528 of SEQ ID NO: 916181
uugugaaagagugauguga

SEQ ID NO: 1136567 - RNA, 19 nt, Artificial Sequence
  Description of Artificial Sequence: Synthetic oligonucleotide
  Antisense strand to SEQ ID NO: 1136566
ucacaucacucuuucacaa

SEQ ID NO: 1136568 - RNA, 19 nt, Artificial Sequence
  Description of Artificial Sequence: Synthetic oligonucleotide
  Sense strand starting at position 781 of SEQ ID NO: 916181
agguguacugagcaagcaa

SEQ ID NO: 1136569 - RNA, 19 nt, Artificial Sequence
  Description of Artificial Sequence: Synthetic oligonucleotide
  Antisense strand to SEQ ID NO: 1136568
uugcuugcucaguacaccu

SEQ ID NO: 1136570 - RNA, 19 nt, Artificial Sequence
  Description of Artificial Sequence: Synthetic oligonucleotide
  Sense strand starting at position 1067 of SEQ ID NO: 916181
ggagcuaagcguaaugcga

SEQ ID NO: 1136571 - RNA, 19 nt, Artificial Sequence
  Description of Artificial Sequence: Synthetic oligonucleotide
  Antisense strand to SEQ ID NO: 1136570
ucgcauuacgcuuagcucc

SEQ ID NO: 1136572 - RNA, 19 nt, Artificial Sequence
  Description of Artificial Sequence: Synthetic oligonucleotide
  Sense strand starting at position 1101 of SEQ ID NO: 916181
ccggaacgaaguugucuaa

SEQ ID NO: 1136573 - RNA, 19 nt, Artificial Sequence
  Description of Artificial Sequence: Synthetic oligonucleotide
  Antisense strand to SEQ ID NO: 1136572
uuagacaacuucguuccgg

SEQ ID NO: 1136574 - RNA, 19 nt, Artificial Sequence
  Description of Artificial Sequence: Synthetic oligonucleotide
  Sense strand starting at position 1110 of SEQ ID NO: 916181
aguugucuaaaccgaagau

SEQ ID NO: 1136575 - RNA, 19 nt, Artificial Sequence
  Description of Artificial Sequence: Synthetic oligonucleotide
  Antisense strand to SEQ ID NO: 1136574
aucuucgguuuagacaacu

SEQ ID NO: 1136576 - RNA, 19 nt, Artificial Sequence
  Description of Artificial Sequence: Synthetic oligonucleotide
  Sense strand starting at position 1264 of SEQ ID NO: 916181
aaacgugagaucuagugca

SEQ ID NO: 1136577 - RNA, 19 nt, Artificial Sequence
  Description of Artificial Sequence: Synthetic oligonucleotide
  Antisense strand to SEQ ID NO: 1136576
ugcacuagaucucacguuu

SEQ ID NO: 1136578 - RNA, 19 nt, Artificial Sequence
  Description of Artificial Sequence: Synthetic oligonucleotide
  Sense strand starting at position 2198 of SEQ ID NO: 916181
gucgauuagcaccgaaaca

SEQ ID NO: 1136579 - RNA, 19 nt, Artificial Sequence
  Description of Artificial Sequence: Synthetic oligonucleotide
  Antisense strand to SEQ ID NO: 1136578
uguuucggugcuaaucgac

SEQ ID NO: 1136580 - RNA, 19 nt, Artificial Sequence
  Description of Artificial Sequence: Synthetic oligonucleotide
  Sense strand starting at position 2559 of SEQ ID NO: 916181
cgaaauuaguggucuucug

SEQ ID NO: 1136581 - RNA, 19 nt, Artificial Sequence
  Description of Artificial Sequence: Synthetic oligonucleotide
  Antisense strand to SEQ ID NO: 1136580
cagaagaccacuaauuucg

SEQ ID NO: 1136582 - RNA, 19 nt, Artificial Sequence
  Description of Artificial Sequence: Synthetic oligonucleotide
  Sense strand starting at position 2567 of SEQ ID NO: 916181
guggucuucugaccugaga

SEQ ID NO: 1136583 - RNA, 19 nt, Artificial Sequence
  Description of Artificial Sequence: Synthetic oligonucleotide
  Antisense strand to SEQ ID NO: 1136582
ucucaggucagaagaccac

SEQ ID NO: 1136584 - RNA, 19 nt, Artificial Sequence
  Description of Artificial Sequence: Synthetic oligonucleotide
  Sense strand starting at position 2569 of SEQ ID NO: 916181
ggucuucugaccugagacu

SEQ ID NO: 1136585 - RNA, 19 nt, Artificial Sequence
  Description of Artificial Sequence: Synthetic oligonucleotide
  Antisense strand to SEQ ID NO: 1136584
agucucaggucagaagacc

SEQ ID NO: 1136586 - RNA, 19 nt, Artificial Sequence
  Description of Artificial Sequence: Synthetic oligonucleotide
  Sense strand starting at position 2666 of SEQ ID NO: 916181
ggagcgugggcggaaauua

SEQ ID NO: 1136587 - RNA, 19 nt, Artificial Sequence
  Description of Artificial Sequence: Synthetic oligonucleotide
  Antisense strand to SEQ ID NO: 1136586
uaauuuccgcccacgcucc

SEQ ID NO: 1136588 - RNA, 19 nt, Artificial Sequence
  Description of Artificial Sequence: Synthetic oligonucleotide
  Sense strand starting at position 2677 of SEQ ID NO: 916181
ggaaauuaguguccacguu

SEQ ID NO: 1136589 - RNA, 19 nt, Artificial Sequence
  Description of Artificial Sequence: Synthetic oligonucleotide
  Antisense strand to SEQ ID NO: 1136588
aacguggacacuaauuucc

SEQ ID NO: 1136590 - RNA, 19 nt, Artificial Sequence
  Description of Artificial Sequence: Synthetic oligonucleotide
  Sense strand starting at position 2879 of SEQ ID NO: 916181
ccauuaauuuaaggaugua

SEQ ID NO: 1136591 - RNA, 19 nt, Artificial Sequence
  Description of Artificial Sequence: Synthetic oligonucleotide
  Antisense strand to SEQ ID NO: 1136590
uacauccuuaaauuaaugg

SEQ ID NO: 1136592 - RNA, 19 nt, Artificial Sequence
  Description of Artificial Sequence: Synthetic oligonucleotide
  Sense strand starting at position 2919 of SEQ ID NO: 916181
gaaaguaagaaugguguga

SEQ ID NO: 1136593 - RNA, 19 nt, Artificial Sequence
  Description of Artificial Sequence: Synthetic oligonucleotide
  Antisense strand to SEQ ID NO: 1136592
ucacaccauucuuacuuuc

SEQ ID NO: 1136594 - RNA, 19 nt, Artificial Sequence
  Description of Artificial Sequence: Synthetic oligonucleotide
  Sense strand starting at position 2923 of SEQ ID NO: 916181
guaagaauggugugaauua

SEQ ID NO: 1136595 - RNA, 19 nt, Artificial Sequence
  Description of Artificial Sequence: Synthetic oligonucleotide
  Antisense strand to SEQ ID NO: 1136594
uaauucacaccauucuuac

SEQ ID NO: 1136596 - RNA, 19 nt, Artificial Sequence
  Description of Artificial Sequence: Synthetic oligonucleotide
  Sense strand starting at position 2955 of SEQ ID NO: 916181
ccuuccaguguuuauuaaa

SEQ ID NO: 1136597 - RNA, 19 nt, Artificial Sequence
  Description of Artificial Sequence: Synthetic oligonucleotide
  Antisense strand to SEQ ID NO: 1136596
uuuaauaaacacuggaagg

SEQ ID NO: 1136598 - RNA, 19 nt, Artificial Sequence
  Description of Artificial Sequence: Synthetic oligonucleotide
  Sense strand starting at position 2980 of SEQ ID NO: 916181
uucgguguccuugagagga

SEQ ID NO: 1136599 - RNA, 19 nt, Artificial Sequence
  Description of Artificial Sequence: Synthetic oligonucleotide
  Antisense strand to SEQ ID NO: 1136598
uccucucaaggacaccgaa

SEQ ID NO: 1136600 - RNA, 19 nt, Artificial Sequence
  Description of Artificial Sequence: Synthetic oligonucleotide
  Sense strand starting at position 2984 of SEQ ID NO: 916181
guguccuugagaggaguua

SEQ ID NO: 1136601 - RNA, 19 nt, Artificial Sequence
  Description of Artificial Sequence: Synthetic oligonucleotide
  Antisense strand to SEQ ID NO: 1136600
uaacuccucucaaggacac

SEQ ID NO: 1136602 - RNA, 19 nt, Artificial Sequence
  Description of Artificial Sequence: Synthetic oligonucleotide
  Sense strand starting at position 2985 of SEQ ID NO: 916181
uguccuugagaggaguuaa

SEQ ID NO: 1136603 - RNA, 19 nt, Artificial Sequence
  Description of Artificial Sequence: Synthetic oligonucleotide
  Antisense strand to SEQ ID NO: 1136602
uuaacuccucucaaggaca

SEQ ID NO: 1136604 - RNA, 19 nt, Artificial Sequence
  Description of Artificial Sequence: Synthetic oligonucleotide
  Sense strand starting at position 3170 of SEQ ID NO: 916181
ucgacaugcacuuggauca

SEQ ID NO: 1136605 - RNA, 19 nt, Artificial Sequence
  Description of Artificial Sequence: Synthetic oligonucleotide
  Antisense strand to SEQ ID NO: 1136604
ugauccaagugcaugucga

SEQ ID NO: 1136606 - RNA, 19 nt, Artificial Sequence
  Description of Artificial Sequence: Synthetic oligonucleotide
  Sense strand starting at position 3374 of SEQ ID NO: 916181
cuuguuacucccuagcagu

SEQ ID NO: 1136607 - RNA, 19 nt, Artificial Sequence
  Description of Artificial Sequence: Synthetic oligonucleotide
  Antisense strand to SEQ ID NO: 1136606
acugcuagggaguaacaag

SEQ ID NO: 1136608 - RNA, 19 nt, Artificial Sequence
  Description of Artificial Sequence: Synthetic oligonucleotide
  Sense strand starting at position 3491 of SEQ ID NO: 916181
uguggucuuacuuaacugu

SEQ ID NO: 1136609 - RNA, 19 nt, Artificial Sequence
  Description of Artificial Sequence: Synthetic oligonucleotide
  Antisense strand to SEQ ID NO: 1136608
acaguuaaguaagaccaca

SEQ ID NO: 1136610 - RNA, 19 nt, Artificial Sequence
  Description of Artificial Sequence: Synthetic oligonucleotide
  Sense strand starting at position 3494 of SEQ ID NO: 916181
ggucuuacuuaacuguaaa

SEQ ID NO: 1136611 - RNA, 19 nt, Artificial Sequence
  Description of Artificial Sequence: Synthetic oligonucleotide
  Antisense strand to SEQ ID NO: 1136610
uuuacaguuaaguaagacc

SEQ ID NO: 1136612 - RNA, 19 nt, Artificial Sequence
  Description of Artificial Sequence: Synthetic oligonucleotide
  Sense strand starting at position 3509 of SEQ ID NO: 916181
uaaagugagguuugaagua

SEQ ID NO: 1136613 - RNA, 19 nt, Artificial Sequence
  Description of Artificial Sequence: Synthetic oligonucleotide
  Antisense strand to SEQ ID NO: 1136612
uacuucaaaccucacuuua

SEQ ID NO: 1136614 - RNA, 19 nt, Artificial Sequence
  Description of Artificial Sequence: Synthetic oligonucleotide
  Sense strand starting at position 3518 of SEQ ID NO: 916181
guuugaaguaggugucuga

SEQ ID NO: 1136615 - RNA, 19 nt, Artificial Sequence
  Description of Artificial Sequence: Synthetic oligonucleotide
  Antisense strand to SEQ ID NO: 1136614
ucagacaccuacuucaaac

SEQ ID NO: 1136616 - RNA, 19 nt, Artificial Sequence
  Description of Artificial Sequence: Synthetic oligonucleotide
  Sense strand starting at position 3521 of SEQ ID NO: 916181
ugaaguaggugucugagau

SEQ ID NO: 1136617 - RNA, 19 nt, Artificial Sequence
  Description of Artificial Sequence: Synthetic oligonucleotide
  Antisense strand to SEQ ID NO: 1136616
aucucagacaccuacuuca

SEQ ID NO: 1136618 - RNA, 19 nt, Artificial Sequence
  Description of Artificial Sequence: Synthetic oligonucleotide
  Sense strand starting at position 3529 of SEQ ID NO: 916181
gugucugagauacaucaug

SEQ ID NO: 1136619 - RNA, 19 nt, Artificial Sequence
  Description of Artificial Sequence: Synthetic oligonucleotide
  Antisense strand to SEQ ID NO: 1136618
caugauguaucucagacac

SEQ ID NO: 1136620 - RNA, 19 nt, Artificial Sequence
  Description of Artificial Sequence: Synthetic oligonucleotide
  Sense strand starting at position 3568 of SEQ ID NO: 916181
ggagaauuaaguugcuaag

SEQ ID NO: 1136621 - RNA, 19 nt, Artificial Sequence
  Description of Artificial Sequence: Synthetic oligonucleotide
  Antisense strand to SEQ ID NO: 1136620
cuuagcaacuuaauucucc

SEQ ID NO: 1136622 - RNA, 19 nt, Artificial Sequence
  Description of Artificial Sequence: Synthetic oligonucleotide
  Sense strand starting at position 3587 of SEQ ID NO: 916181
cgcuauguuauacacggaa

SEQ ID NO: 1136623 - RNA, 19 nt, Artificial Sequence
  Description of Artificial Sequence: Synthetic oligonucleotide
  Antisense strand to SEQ ID NO: 1136622
uuccguguauaacauagcg

SEQ ID NO: 1136624 - RNA, 19 nt, Artificial Sequence
  Description of Artificial Sequence: Synthetic oligonucleotide
  Sense strand starting at position 3590 of SEQ ID NO: 916181
uauguuauacacggaaaua

SEQ ID NO: 1136625 - RNA, 19 nt, Artificial Sequence
  Description of Artificial Sequence: Synthetic oligonucleotide
  Antisense strand to SEQ ID NO: 1136624
uauuuccguguauaacaua

SEQ ID NO: 1136626 - RNA, 19 nt, Artificial Sequence
  Description of Artificial Sequence: Synthetic oligonucleotide
  Sense strand starting at position 3601 of SEQ ID NO: 916181
cggaaauacuguccuaaca

SEQ ID NO: 1136627 - RNA, 19 nt, Artificial Sequence
  Description of Artificial Sequence: Synthetic oligonucleotide
  Antisense strand to SEQ ID NO: 1136626
uguuaggacaguauuuccg

SEQ ID NO: 1136628 - RNA, 19 nt, Artificial Sequence
  Description of Artificial Sequence: Synthetic oligonucleotide
  Sense strand starting at position 3868 of SEQ ID NO: 916181
aaguaaguguggucugaca

SEQ ID NO: 1136629 - RNA, 19 nt, Artificial Sequence
  Description of Artificial Sequence: Synthetic oligonucleotide
  Antisense strand to SEQ ID NO: 1136628
ugucagaccacacuuacuu

SEQ ID NO: 1136630 - RNA, 19 nt, Artificial Sequence
  Description of Artificial Sequence: Synthetic oligonucleotide
  Sense strand starting at position 3870 of SEQ ID NO: 916181
guaaguguggucugacaaa

SEQ ID NO: 1136631 - RNA, 19 nt, Artificial Sequence
  Description of Artificial Sequence: Synthetic oligonucleotide
  Antisense strand to SEQ ID NO: 1136630
uuugucagaccacacuuac

SEQ ID NO: 1136632 - RNA, 19 nt, Artificial Sequence
  Description of Artificial Sequence: Synthetic oligonucleotide
  Sense strand starting at position 3977 of SEQ ID NO: 916181
gacggagauuuggagauaa

SEQ ID NO: 1136633 - RNA, 19 nt, Artificial Sequence
  Description of Artificial Sequence: Synthetic oligonucleotide
  Antisense strand to SEQ ID NO: 1136632
uuaucuccaaaucuccguc

SEQ ID NO: 1136634 - RNA, 19 nt, Artificial Sequence
  Description of Artificial Sequence: Synthetic oligonucleotide
  Sense strand starting at position 122 of SEQ ID NO: 916182
acuacaacgugacuauaua

SEQ ID NO: 1136635 - RNA, 19 nt, Artificial Sequence
  Description of Artificial Sequence: Synthetic oligonucleotide
  Antisense strand to SEQ ID NO: 1136634
uauauagucacguuguagu

SEQ ID NO: 1136636 - RNA, 19 nt, Artificial Sequence
  Description of Artificial Sequence: Synthetic oligonucleotide
  Sense strand starting at position 129 of SEQ ID NO: 916182
cgugacuauauagagcaau

SEQ ID NO: 1136637 - RNA, 19 nt, Artificial Sequence
  Description of Artificial Sequence: Synthetic oligonucleotide
  Antisense strand to SEQ ID NO: 1136636
auugcucuauauagucacg

SEQ ID NO: 1136638 - RNA, 19 nt, Artificial Sequence
  Description of Artificial Sequence: Synthetic oligonucleotide
  Sense strand starting at position 153 of SEQ ID NO: 916182
ggaagaacuuaugcuuuag

SEQ ID NO: 1136639 - RNA, 19 nt, Artificial Sequence
  Description of Artificial Sequence: Synthetic oligonucleotide
  Antisense strand to SEQ ID NO: 1136638
cuaaagcauaaguucuucc

SEQ ID NO: 1136640 - RNA, 19 nt, Artificial Sequence
  Description of Artificial Sequence: Synthetic oligonucleotide
  Sense strand starting at position 464 of SEQ ID NO: 916182
accuuccuaugaguuaagu

SEQ ID NO: 1136641 - RNA, 19 nt, Artificial Sequence
  Description of Artificial Sequence: Synthetic oligonucleotide
  Antisense strand to SEQ ID NO: 1136640
acuuaacucauaggaaggu

SEQ ID NO: 1136642 - RNA, 19 nt, Artificial Sequence
  Description of Artificial Sequence: Synthetic oligonucleotide
  Sense strand starting at position 749 of SEQ ID NO: 916182
gauuuccuuugagagaucu

SEQ ID NO: 1136643 - RNA, 19 nt, Artificial Sequence
  Description of Artificial Sequence: Synthetic oligonucleotide
  Antisense strand to SEQ ID NO: 1136642
agaucucucaaaggaaauc

SEQ ID NO: 1136644 - RNA, 19 nt, Artificial Sequence
  Description of Artificial Sequence: Synthetic oligonucleotide
  Sense strand starting at position 787 of SEQ ID NO: 916182
uaugauuuguaccaggaag

SEQ ID NO: 1136645 - RNA, 19 nt, Artificial Sequence
  Description of Artificial Sequence: Synthetic oligonucleotide
  Antisense strand to SEQ ID NO: 1136644
cuuccugguacaaaucaua

SEQ ID NO: 1136646 - RNA, 19 nt, Artificial Sequence
  Description of Artificial Sequence: Synthetic oligonucleotide
  Sense strand starting at position 992 of SEQ ID NO: 916182
gguaaauaaccaugucuuu

SEQ ID NO: 1136647 - RNA, 19 nt, Artificial Sequence
  Description of Artificial Sequence: Synthetic oligonucleotide
  Antisense strand to SEQ ID NO: 1136646
aaagacaugguuauuuacc

SEQ ID NO: 1136648 - RNA, 19 nt, Artificial Sequence
  Description of Artificial Sequence: Synthetic oligonucleotide
  Sense strand starting at position 1038 of SEQ ID NO: 916182
uuauaauugcuguauacug

SEQ ID NO: 1136649 - RNA, 19 nt, Artificial Sequence
  Description of Artificial Sequence: Synthetic oligonucleotide
  Antisense strand to SEQ ID NO: 1136648
caguauacagcaauuauaa

SEQ ID NO: 1136650 - RNA, 19 nt, Artificial Sequence
  Description of Artificial Sequence: Synthetic oligonucleotide
  Sense strand starting at position 1053 of SEQ ID NO: 916182
acuggaguccaauguauca

SEQ ID NO: 1136651 - RNA, 19 nt, Artificial Sequence
  Description of Artificial Sequence: Synthetic oligonucleotide
  Antisense strand to SEQ ID NO: 1136650
ugauacauuggacuccagu

SEQ ID NO: 1136652 - RNA, 19 nt, Artificial Sequence
  Description of Artificial Sequence: Synthetic oligonucleotide
  Sense strand starting at position 1063 of SEQ ID NO: 916182
aauguaucaggcuaggcaa

SEQ ID NO: 1136653 - RNA, 19 nt, Artificial Sequence
  Description of Artificial Sequence: Synthetic oligonucleotide
  Antisense strand to SEQ ID NO: 1136652
uugccuagccugauacauu

SEQ ID NO: 1136654 - RNA, 19 nt, Artificial Sequence
  Description of Artificial Sequence: Synthetic oligonucleotide
  Sense strand starting at position 1074 of SEQ ID NO: 916182
cuaggcaauuaacugaaau

SEQ ID NO: 1136655 - RNA, 19 nt, Artificial Sequence
  Description of Artificial Sequence: Synthetic oligonucleotide
  Antisense strand to SEQ ID NO: 1136654
auuucaguuaauugccuag

SEQ ID NO: 1136656 - RNA, 19 nt, Artificial Sequence
  Description of Artificial Sequence: Synthetic oligonucleotide
  Sense strand starting at position 1188 of SEQ ID NO: 916182
ccacuuugucuuuaagucu

SEQ ID NO: 1136657 - RNA, 19 nt, Artificial Sequence
  Description of Artificial Sequence: Synthetic oligonucleotide
  Antisense strand to SEQ ID NO: 1136656
agacuuaaagacaaagugg

SEQ ID NO: 1136658 - RNA, 19 nt, Artificial Sequence
  Description of Artificial Sequence: Synthetic oligonucleotide
  Sense strand starting at position 1481 of SEQ ID NO: 916182
gaauguggcauuugucuga

SEQ ID NO: 1136659 - RNA, 19 nt, Artificial Sequence
  Description of Artificial Sequence: Synthetic oligonucleotide
  Antisense strand to SEQ ID NO: 1136658
ucagacaaaugccacauuc

SEQ ID NO: 1136660 - RNA, 19 nt, Artificial Sequence
  Description of Artificial Sequence: Synthetic oligonucleotide
  Sense strand starting at position 1485 of SEQ ID NO: 916182
guggcauuugucugaaugg

SEQ ID NO: 1136661 - RNA, 19 nt, Artificial Sequence
  Description of Artificial Sequence: Synthetic oligonucleotide
  Antisense strand to SEQ ID NO: 1136660
ccauucagacaaaugccac

SEQ ID NO: 1136662 - RNA, 19 nt, Artificial Sequence
  Description of Artificial Sequence: Synthetic oligonucleotide
  Sense strand starting at position 1772 of SEQ ID NO: 916182
cggcucucuagagaucaau

SEQ ID NO: 1136663 - RNA, 19 nt, Artificial Sequence
  Description of Artificial Sequence: Synthetic oligonucleotide
  Antisense strand to SEQ ID NO: 1136662
auugaucucuagagagccg

SEQ ID NO: 1136664 - RNA, 19 nt, Artificial Sequence
  Description of Artificial Sequence: Synthetic oligonucleotide
  Sense strand starting at position 1973 of SEQ ID NO: 916182
cggaaauaucgcgagaaca

SEQ ID NO: 1136665 - RNA, 19 nt, Artificial Sequence
  Description of Artificial Sequence: Synthetic oligonucleotide
  Antisense strand to SEQ ID NO: 1136664
uguucucgcgauauuuccg

SEQ ID NO: 1136666 - RNA, 19 nt, Artificial Sequence
  Description of Artificial Sequence: Synthetic oligonucleotide
  Sense strand starting at position 2034 of SEQ ID NO: 916182
uacagaucucgcgauauuc

SEQ ID NO: 1136667 - RNA, 19 nt, Artificial Sequence
  Description of Artificial Sequence: Synthetic oligonucleotide
  Antisense strand to SEQ ID NO: 1136666
gaauaucgcgagaucugua

SEQ ID NO: 1136668 - RNA, 19 nt, Artificial Sequence
  Description of Artificial Sequence: Synthetic oligonucleotide
  Sense strand starting at position 2043 of SEQ ID NO: 916182
cgcgauauucccuuugcuu

SEQ ID NO: 1136669 - RNA, 19 nt, Artificial Sequence
  Description of Artificial Sequence: Synthetic oligonucleotide
  Antisense strand to SEQ ID NO: 1136668
aagcaaagggaauaucgcg

SEQ ID NO: 1136670 - RNA, 19 nt, Artificial Sequence
  Description of Artificial Sequence: Synthetic oligonucleotide
  Sense strand starting at position 2060 of SEQ ID NO: 916182
uuacgacgugcuuagggaa

SEQ ID NO: 1136671 - RNA, 19 nt, Artificial Sequence
  Description of Artificial Sequence: Synthetic oligonucleotide
  Antisense strand to SEQ ID NO: 1136670
uucccuaagcacgucguaa

SEQ ID NO: 1136672 - RNA, 19 nt, Artificial Sequence
  Description of Artificial Sequence: Synthetic oligonucleotide
  Sense strand starting at position 2077 of SEQ ID NO: 916182
aaugaagaggcgugguuaa

SEQ ID NO: 1136673 - RNA, 19 nt, Artificial Sequence
  Description of Artificial Sequence: Synthetic oligonucleotide
  Antisense strand to SEQ ID NO: 1136672
uuaaccacgccucuucauu

SEQ ID NO: 1136674 - RNA, 19 nt, Artificial Sequence
  Description of Artificial Sequence: Synthetic oligonucleotide
  Sense strand starting at position 2117 of SEQ ID NO: 916182
gggaaaugagguugcaacu

SEQ ID NO: 1136675 - RNA, 19 nt, Artificial Sequence
  Description of Artificial Sequence: Synthetic oligonucleotide
  Antisense strand to SEQ ID NO: 1136674
aguugcaaccucauuuccc

SEQ ID NO: 1136676 - RNA, 19 nt, Artificial Sequence
  Description of Artificial Sequence: Synthetic oligonucleotide
  Sense strand starting at position 2272 of SEQ ID NO: 916182
cgcagaaauuaucccuaac

SEQ ID NO: 1136677 - RNA, 19 nt, Artificial Sequence
  Description of Artificial Sequence: Synthetic oligonucleotide
  Antisense strand to SEQ ID NO: 1136676
guuagggauaauuucugcg

SEQ ID NO: 1136678 - RNA, 19 nt, Artificial Sequence
  Description of Artificial Sequence: Synthetic oligonucleotide
  Sense strand starting at position 2402 of SEQ ID NO: 916182
uuuauuauuugaucagcgu

SEQ ID NO: 1136679 - RNA, 19 nt, Artificial Sequence
  Description of Artificial Sequence: Synthetic oligonucleotide
  Antisense strand to SEQ ID NO: 1136678
acgcugaucaaauaauaaa

SEQ ID NO: 1136680 - RNA, 19 nt, Artificial Sequence
  Description of Artificial Sequence: Synthetic oligonucleotide
  Sense strand starting at position 2562 of SEQ ID NO: 916182
ggaguuaauagacggaacu

SEQ ID NO: 1136681 - RNA, 19 nt, Artificial Sequence
  Description of Artificial Sequence: Synthetic oligonucleotide
  Antisense strand to SEQ ID NO: 1136680
aguuccgucuauuaacucc

SEQ ID NO: 1136682 - RNA, 19 nt, Artificial Sequence
  Description of Artificial Sequence: Synthetic oligonucleotide
  Sense strand starting at position 2563 of SEQ ID NO: 916182
gaguuaauagacggaacuu

SEQ ID NO: 1136683 - RNA, 19 nt, Artificial Sequence
  Description of Artificial Sequence: Synthetic oligonucleotide
  Antisense strand to SEQ ID NO: 1136682
aaguuccgucuauuaacuc

SEQ ID NO: 1136684 - RNA, 19 nt, Artificial Sequence
  Description of Artificial Sequence: Synthetic oligonucleotide
  Sense strand starting at position 2599 of SEQ ID NO: 916182
ugugaacuccuggagagua

SEQ ID NO: 1136685 - RNA, 19 nt, Artificial Sequence
  Description of Artificial Sequence: Synthetic oligonucleotide
  Antisense strand to SEQ ID NO: 1136684
uacucuccaggaguucaca

SEQ ID NO: 1136686 - RNA, 19 nt, Artificial Sequence
  Description of Artificial Sequence: Synthetic oligonucleotide
  Sense strand starting at position 2640 of SEQ ID NO: 916182
acccaucuguuaccagauu

SEQ ID NO: 1136687 - RNA, 19 nt, Artificial Sequence
  Description of Artificial Sequence: Synthetic oligonucleotide
  Antisense strand to SEQ ID NO: 1136686
aaucugguaacagaugggu

SEQ ID NO: 1136688 - RNA, 19 nt, Artificial Sequence
  Description of Artificial Sequence: Synthetic oligonucleotide
  Sense strand starting at position 2704 of SEQ ID NO: 916182
gaagucuaacaacggcaua

SEQ ID NO: 1136689 - RNA, 19 nt, Artificial Sequence
  Description of Artificial Sequence: Synthetic oligonucleotide
  Antisense strand to SEQ ID NO: 1136688
uaugccguuguuagacuuc

SEQ ID NO: 1136690 - RNA, 19 nt, Artificial Sequence
  Description of Artificial Sequence: Synthetic oligonucleotide
  Sense strand starting at position 2707 of SEQ ID NO: 916182
gucuaacaacggcauaauu

SEQ ID NO: 1136691 - RNA, 19 nt, Artificial Sequence
  Description of Artificial Sequence: Synthetic oligonucleotide
  Antisense strand to SEQ ID NO: 1136690
aauuaugccguuguuagac

SEQ ID NO: 1136692 - RNA, 19 nt, Artificial Sequence
  Description of Artificial Sequence: Synthetic oligonucleotide
  Sense strand starting at position 2709 of SEQ ID NO: 916182
cuaacaacggcauaauuau

SEQ ID NO: 1136693 - RNA, 19 nt, Artificial Sequence
  Description of Artificial Sequence: Synthetic oligonucleotide
  Antisense strand to SEQ ID NO: 1136692
auaauuaugccguuguuag

SEQ ID NO: 1136694 - RNA, 19 nt, Artificial Sequence
  Description of Artificial Sequence: Synthetic oligonucleotide
  Sense strand starting at position 2921 of SEQ ID NO: 916182
uaaacugugccucaaagga

SEQ ID NO: 1136695 - RNA, 19 nt, Artificial Sequence
  Description of Artificial Sequence: Synthetic oligonucleotide
  Antisense strand to SEQ ID NO: 1136694
uccuuugaggcacaguuua

SEQ ID NO: 1136696 - RNA, 19 nt, Artificial Sequence
  Description of Artificial Sequence: Synthetic oligonucleotide
  Sense strand starting at position 3201 of SEQ ID NO: 916182
gcauguaaccuugaccaca

SEQ ID NO: 1136697 - RNA, 19 nt, Artificial Sequence
  Description of Artificial Sequence: Synthetic oligonucleotide
  Antisense strand to SEQ ID NO: 1136696
uguggucaagguuacaugc

SEQ ID NO: 1136698 - RNA, 19 nt, Artificial Sequence
  Description of Artificial Sequence: Synthetic oligonucleotide
  Sense strand starting at position 3264 of SEQ ID NO: 916182
gcaugauaauaucucagag

SEQ ID NO: 1136699 - RNA, 19 nt, Artificial Sequence
  Description of Artificial Sequence: Synthetic oligonucleotide
  Antisense strand to SEQ ID NO: 1136698
cucugagauauuaucaugc

SEQ ID NO: 1136700 - RNA, 19 nt, Artificial Sequence
  Description of Artificial Sequence: Synthetic oligonucleotide
  Sense strand starting at position 3463 of SEQ ID NO: 916182
acaacuaucccaugagagu

SEQ ID NO: 1136701 - RNA, 19 nt, Artificial Sequence
  Description of Artificial Sequence: Synthetic oligonucleotide
  Antisense strand to SEQ ID NO: 1136700
acucucaugggauaguugu

SEQ ID NO: 1136702 - RNA, 19 nt, Artificial Sequence
  Description of Artificial Sequence: Synthetic oligonucleotide
  Sense strand starting at position 3482 of SEQ ID NO: 916182
uggauuucccaguguagca

SEQ ID NO: 1136703 - RNA, 19 nt, Artificial Sequence
  Description of Artificial Sequence: Synthetic oligonucleotide
  Antisense strand to SEQ ID NO: 1136702
ugcuacacugggaaaucca

SEQ ID NO: 1136704 - RNA, 19 nt, Artificial Sequence
  Description of Artificial Sequence: Synthetic oligonucleotide
  Sense strand starting at position 3550 of SEQ ID NO: 916182
uaaucuacccagugaagag

SEQ ID NO: 1136705 - RNA, 19 nt, Artificial Sequence
  Description of Artificial Sequence: Synthetic oligonucleotide
  Antisense strand to SEQ ID NO: 1136704
cucuucacuggguagauua

SEQ ID NO: 1136706 - RNA, 19 nt, Artificial Sequence
  Description of Artificial Sequence: Synthetic oligonucleotide
  Sense strand starting at position 3752 of SEQ ID NO: 916182
acuuaaucuuguguuauca

SEQ ID NO: 1136707 - RNA, 19 nt, Artificial Sequence
  Description of Artificial Sequence: Synthetic oligonucleotide
  Antisense strand to SEQ ID NO: 1136706
ugauaacacaagauuaagu

SEQ ID NO: 1136708 - RNA, 19 nt, Artificial Sequence
  Description of Artificial Sequence: Synthetic oligonucleotide
  Sense strand starting at position 3762 of SEQ ID NO: 916182
guguuaucaguggcguuau

SEQ ID NO: 1136709 - RNA, 19 nt, Artificial Sequence
  Description of Artificial Sequence: Synthetic oligonucleotide
  Antisense strand to SEQ ID NO: 1136708
auaacgccacugauaacac

SEQ ID NO: 1136710 - RNA, 19 nt, Artificial Sequence
  Description of Artificial Sequence: Synthetic oligonucleotide
  Sense strand starting at position 3814 of SEQ ID NO: 916182
auguauuacccgcauaaga

SEQ ID NO: 1136711 - RNA, 19 nt, Artificial Sequence
  Description of Artificial Sequence: Synthetic oligonucleotide
  Antisense strand to SEQ ID NO: 1136710
ucuuaugcggguaauacau

SEQ ID NO: 1136712 - RNA, 19 nt, Artificial Sequence
  Description of Artificial Sequence: Synthetic oligonucleotide
  Sense strand starting at position 3816 of SEQ ID NO: 916182
guauuacccgcauaagaua

SEQ ID NO: 1136713 - RNA, 19 nt, Artificial Sequence
  Description of Artificial Sequence: Synthetic oligonucleotide
  Antisense strand to SEQ ID NO: 1136712
uaucuuaugcggguaauac

SEQ ID NO: 1136714 - RNA, 19 nt, Artificial Sequence
  Description of Artificial Sequence: Synthetic oligonucleotide
  Sense strand starting at position 113 of SEQ ID NO: 916183
cauggcuaagaguggauua

SEQ ID NO: 1136715 - RNA, 19 nt, Artificial Sequence
  Description of Artificial Sequence: Synthetic oligonucleotide
  Antisense strand to SEQ ID NO: 1136714
uaauccacucuuagccaug

SEQ ID NO: 1136716 - RNA, 19 nt, Artificial Sequence
  Description of Artificial Sequence: Synthetic oligonucleotide
  Sense strand starting at position 114 of SEQ ID NO: 916183
auggcuaagaguggauuau

SEQ ID NO: 1136717 - RNA, 19 nt, Artificial Sequence
  Description of Artificial Sequence: Synthetic oligonucleotide
  Antisense strand to SEQ ID NO: 1136716
auaauccacucuuagccau

SEQ ID NO: 1136718 - RNA, 19 nt, Artificial Sequence
  Description of Artificial Sequence: Synthetic oligonucleotide
  Sense strand starting at position 118 of SEQ ID NO: 916183
cuaagaguggauuaugcau

SEQ ID NO: 1136719 - RNA, 19 nt, Artificial Sequence
  Description of Artificial Sequence: Synthetic oligonucleotide
  Antisense strand to SEQ ID NO: 1136718
augcauaauccacucuuag

SEQ ID NO: 1136720 - RNA, 19 nt, Artificial Sequence
  Description of Artificial Sequence: Synthetic oligonucleotide
  Sense strand starting at position 124 of SEQ ID NO: 916183
guggauuaugcauauucca

SEQ ID NO: 1136721 - RNA, 19 nt, Artificial Sequence
  Description of Artificial Sequence: Synthetic oligonucleotide
  Antisense strand to SEQ ID NO: 1136720
uggaauaugcauaauccac

SEQ ID NO: 1136722 - RNA, 19 nt, Artificial Sequence
  Description of Artificial Sequence: Synthetic oligonucleotide
  Sense strand starting at position 131 of SEQ ID NO: 916183
augcauauuccacauguau

SEQ ID NO: 1136723 - RNA, 19 nt, Artificial Sequence
  Description of Artificial Sequence: Synthetic oligonucleotide
  Antisense strand to SEQ ID NO: 1136722
auacauguggaauaugcau

SEQ ID NO: 1136724 - RNA, 19 nt, Artificial Sequence
  Description of Artificial Sequence: Synthetic oligonucleotide
  Sense strand starting at position 498 of SEQ ID NO: 916183
accaaagccgucuagacaa

SEQ ID NO: 1136725 - RNA, 19 nt, Artificial Sequence
  Description of Artificial Sequence: Synthetic oligonucleotide
  Antisense strand to SEQ ID NO: 1136724
uugucuagacggcuuuggu

SEQ ID NO: 1136726 - RNA, 19 nt, Artificial Sequence
  Description of Artificial Sequence: Synthetic oligonucleotide
  Sense strand starting at position 564 of SEQ ID NO: 916183
uccagaucuugaccuagau

SEQ ID NO: 1136727 - RNA, 19 nt, Artificial Sequence
  Description of Artificial Sequence: Synthetic oligonucleotide
  Antisense strand to SEQ ID NO: 1136726
aucuaggucaagaucugga

SEQ ID NO: 1136728 - RNA, 19 nt, Artificial Sequence
  Description of Artificial Sequence: Synthetic oligonucleotide
  Sense strand starting at position 702 of SEQ ID NO: 916183
gguggaaaggauugucuag

SEQ ID NO: 1136729 - RNA, 19 nt, Artificial Sequence
  Description of Artificial Sequence: Synthetic oligonucleotide
  Antisense strand to SEQ ID NO: 1136728
cuagacaauccuuuccacc

SEQ ID NO: 1136730 - RNA, 19 nt, Artificial Sequence
  Description of Artificial Sequence: Synthetic oligonucleotide
  Sense strand starting at position 704 of SEQ ID NO: 916183
uggaaaggauugucuagcu

SEQ ID NO: 1136731 - RNA, 19 nt, Artificial Sequence
  Description of Artificial Sequence: Synthetic oligonucleotide
  Antisense strand to SEQ ID NO: 1136730
agcuagacaauccuuucca

SEQ ID NO: 1136732 - RNA, 19 nt, Artificial Sequence
  Description of Artificial Sequence: Synthetic oligonucleotide
  Sense strand starting at position 894 of SEQ ID NO: 916183
uagauccacgccuauagau

SEQ ID NO: 1136733 - RNA, 19 nt, Artificial Sequence
  Description of Artificial Sequence: Synthetic oligonucleotide
  Antisense strand to SEQ ID NO: 1136732
aucuauaggcguggaucua

SEQ ID NO: 1136734 - RNA, 19 nt, Artificial Sequence
  Description of Artificial Sequence: Synthetic oligonucleotide
  Sense strand starting at position 923 of SEQ ID NO: 916183
guaucagcuccugaacaau

SEQ ID NO: 1136735 - RNA, 19 nt, Artificial Sequence
  Description of Artificial Sequence: Synthetic oligonucleotide
  Antisense strand to SEQ ID NO: 1136734
auuguucaggagcugauac

SEQ ID NO: 1136736 - RNA, 19 nt, Artificial Sequence
  Description of Artificial Sequence: Synthetic oligonucleotide
  Sense strand starting at position 1380 of SEQ ID NO: 916183
ucauaauuauuugccgagu

SEQ ID NO: 1136737 - RNA, 19 nt, Artificial Sequence
  Description of Artificial Sequence: Synthetic oligonucleotide
  Antisense strand to SEQ ID NO: 1136736
acucggcaaauaauuauga

SEQ ID NO: 1136738 - RNA, 19 nt, Artificial Sequence
  Description of Artificial Sequence: Synthetic oligonucleotide
  Sense strand starting at position 1468 of SEQ ID NO: 916183
uugggacugcuuuauacaa

SEQ ID NO: 1136739 - RNA, 19 nt, Artificial Sequence
  Description of Artificial Sequence: Synthetic oligonucleotide
  Antisense strand to SEQ ID NO: 1136738
uuguauaaagcagucccaa

SEQ ID NO: 1136740 - RNA, 19 nt, Artificial Sequence
  Description of Artificial Sequence: Synthetic oligonucleotide
  Sense strand starting at position 1727 of SEQ ID NO: 916183
ugcccauaucaagacgaau

SEQ ID NO: 1136741 - RNA, 19 nt, Artificial Sequence
  Description of Artificial Sequence: Synthetic oligonucleotide
  Antisense strand to SEQ ID NO: 1136740
auucgucuugauaugggca

SEQ ID NO: 1136742 - RNA, 19 nt, Artificial Sequence
  Description of Artificial Sequence: Synthetic oligonucleotide
  Sense strand starting at position 1733 of SEQ ID NO: 916183
uaucaagacgaaugaguaa

SEQ ID NO: 1136743 - RNA, 19 nt, Artificial Sequence
  Description of Artificial Sequence: Synthetic oligonucleotide
  Antisense strand to SEQ ID NO: 1136742
uuacucauucgucuugaua

SEQ ID NO: 1136744 - RNA, 19 nt, Artificial Sequence
  Description of Artificial Sequence: Synthetic oligonucleotide
  Sense strand starting at position 1782 of SEQ ID NO: 916183
auuugcagcuccucuagau

SEQ ID NO: 1136745 - RNA, 19 nt, Artificial Sequence
  Description of Artificial Sequence: Synthetic oligonucleotide
  Antisense strand to SEQ ID NO: 1136744
aucuagaggagcugcaaau

SEQ ID NO: 1136746 - RNA, 19 nt, Artificial Sequence
  Description of Artificial Sequence: Synthetic oligonucleotide
  Sense strand starting at position 1902 of SEQ ID NO: 916183
ucaggacucguuuaacauu

SEQ ID NO: 1136747 - RNA, 19 nt, Artificial Sequence
  Description of Artificial Sequence: Synthetic oligonucleotide
  Antisense strand to SEQ ID NO: 1136746
aauguuaaacgaguccuga

SEQ ID NO: 1136748 - RNA, 19 nt, Artificial Sequence
  Description of Artificial Sequence: Synthetic oligonucleotide
  Sense strand starting at position 1995 of SEQ ID NO: 916183
cugugcauggaucaagaau

SEQ ID NO: 1136749 - RNA, 19 nt, Artificial Sequence
  Description of Artificial Sequence: Synthetic oligonucleotide
  Antisense strand to SEQ ID NO: 1136748
auucuugauccaugcacag

SEQ ID NO: 1136750 - RNA, 19 nt, Artificial Sequence
  Description of Artificial Sequence: Synthetic oligonucleotide
  Sense strand starting at position 2102 of SEQ ID NO: 916183
ggacuuaaagaaugcacua

SEQ ID NO: 1136751 - RNA, 19 nt, Artificial Sequence
  Description of Artificial Sequence: Synthetic oligonucleotide
  Antisense strand to SEQ ID NO: 1136750
uagugcauucuuuaagucc

SEQ ID NO: 1136752 - RNA, 19 nt, Artificial Sequence
  Description of Artificial Sequence: Synthetic oligonucleotide
  Sense strand starting at position 2131 of SEQ ID NO: 916183
agaggauguuaagugguga

SEQ ID NO: 1136753 - RNA, 19 nt, Artificial Sequence
  Description of Artificial Sequence: Synthetic oligonucleotide
  Antisense strand to SEQ ID NO: 1136752
ucaccacuuaacauccucu

SEQ ID NO: 1136754 - RNA, 19 nt, Artificial Sequence
  Description of Artificial Sequence: Synthetic oligonucleotide
  Sense strand starting at position 2132 of SEQ ID NO: 916183
gaggauguuaaguggugau

SEQ ID NO: 1136755 - RNA, 19 nt, Artificial Sequence
  Description of Artificial Sequence: Synthetic oligonucleotide
  Antisense strand to SEQ ID NO: 1136754
aucaccacuuaacauccuc

SEQ ID NO: 1136756 - RNA, 19 nt, Artificial Sequence
  Description of Artificial Sequence: Synthetic oligonucleotide
  Sense strand starting at position 2136 of SEQ ID NO: 916183
auguuaaguggugauaaca

SEQ ID NO: 1136757 - RNA, 19 nt, Artificial Sequence
  Description of Artificial Sequence: Synthetic oligonucleotide
  Antisense strand to SEQ ID NO: 1136756
uguuaucaccacuuaacau

SEQ ID NO: 1136758 - RNA, 19 nt, Artificial Sequence
  Description of Artificial Sequence: Synthetic oligonucleotide
  Sense strand starting at position 2146 of SEQ ID NO: 916183
gugauaacauucucuaaga

SEQ ID NO: 1136759 - RNA, 19 nt, Artificial Sequence
  Description of Artificial Sequence: Synthetic oligonucleotide
  Antisense strand to SEQ ID NO: 1136758
ucuuagagaauguuaucac

SEQ ID NO: 1136760 - RNA, 19 nt, Artificial Sequence
  Description of Artificial Sequence: Synthetic oligonucleotide
  Sense strand starting at position 2197 of SEQ ID NO: 916183
gcagucucuccaguuuguu

SEQ ID NO: 1136761 - RNA, 19 nt, Artificial Sequence
  Description of Artificial Sequence: Synthetic oligonucleotide
  Antisense strand to SEQ ID NO: 1136760
aacaaacuggagagacugc

SEQ ID NO: 1136762 - RNA, 19 nt, Artificial Sequence
  Description of Artificial Sequence: Synthetic oligonucleotide
  Sense strand starting at position 2291 of SEQ ID NO: 916183
gguuucuggaagcaacauu

SEQ ID NO: 1136763 - RNA, 19 nt, Artificial Sequence
  Description of Artificial Sequence: Synthetic oligonucleotide
  Antisense strand to SEQ ID NO: 1136762
aauguugcuuccagaaacc

SEQ ID NO: 1136764 - RNA, 19 nt, Artificial Sequence
  Description of Artificial Sequence: Synthetic oligonucleotide
  Sense strand starting at position 2345 of SEQ ID NO: 916183
ugcauaaugcacuggaaag

SEQ ID NO: 1136765 - RNA, 19 nt, Artificial Sequence
  Description of Artificial Sequence: Synthetic oligonucleotide
  Antisense strand to SEQ ID NO: 1136764
cuuuccagugcauuaugca

SEQ ID NO: 1136766 - RNA, 19 nt, Artificial Sequence
  Description of Artificial Sequence: Synthetic oligonucleotide
  Sense strand starting at position 2534 of SEQ ID NO: 916183
gaguuuccucaagaguauc

SEQ ID NO: 1136767 - RNA, 19 nt, Artificial Sequence
  Description of Artificial Sequence: Synthetic oligonucleotide
  Antisense strand to SEQ ID NO: 1136766
gauacucuugaggaaacuc

SEQ ID NO: 1136768 - RNA, 19 nt, Artificial Sequence
  Description of Artificial Sequence: Synthetic oligonucleotide
  Sense strand starting at position 2540 of SEQ ID NO: 916183
ccucaagaguaucugaagu

SEQ ID NO: 1136769 - RNA, 19 nt, Artificial Sequence
  Description of Artificial Sequence: Synthetic oligonucleotide
  Antisense strand to SEQ ID NO: 1136768
acuucagauacucuugagg

SEQ ID NO: 1136770 - RNA, 19 nt, Artificial Sequence
  Description of Artificial Sequence: Synthetic oligonucleotide
  Sense strand starting at position 2636 of SEQ ID NO: 916183
uuugaauucccauggaauu

SEQ ID NO: 1136771 - RNA, 19 nt, Artificial Sequence
  Description of Artificial Sequence: Synthetic oligonucleotide
  Antisense strand to SEQ ID NO: 1136770
aauuccaugggaauucaaa

SEQ ID NO: 1136772 - RNA, 19 nt, Artificial Sequence
  Description of Artificial Sequence: Synthetic oligonucleotide
  Sense strand starting at position 2729 of SEQ ID NO: 916183
uuugguggcacugagaaau

SEQ ID NO: 1136773 - RNA, 19 nt, Artificial Sequence
  Description of Artificial Sequence: Synthetic oligonucleotide
  Antisense strand to SEQ ID NO: 1136772
auuucucagugccaccaaa

SEQ ID NO: 1136774 - RNA, 19 nt, Artificial Sequence
  Description of Artificial Sequence: Synthetic oligonucleotide
  Sense strand starting at position 2994 of SEQ ID NO: 916183
acacguacacgauauaaca

SEQ ID NO: 1136775 - RNA, 19 nt, Artificial Sequence
  Description of Artificial Sequence: Synthetic oligonucleotide
  Antisense strand to SEQ ID NO: 1136774
uguuauaucguguacgugu

SEQ ID NO: 1136776 - RNA, 19 nt, Artificial Sequence
  Description of Artificial Sequence: Synthetic oligonucleotide
  Sense strand starting at position 3245 of SEQ ID NO: 916183
uuacuaucccauuagguca

SEQ ID NO: 1136777 - RNA, 19 nt, Artificial Sequence
  Description of Artificial Sequence: Synthetic oligonucleotide
  Antisense strand to SEQ ID NO: 1136776
ugaccuaaugggauaguaa

SEQ ID NO: 1136778 - RNA, 19 nt, Artificial Sequence
  Description of Artificial Sequence: Synthetic oligonucleotide
  Sense strand starting at position 3250 of SEQ ID NO: 916183
aucccauuaggucaaaguu

SEQ ID NO: 1136779 - RNA, 19 nt, Artificial Sequence
  Description of Artificial Sequence: Synthetic oligonucleotide
  Antisense strand to SEQ ID NO: 1136778
aacuuugaccuaaugggau

SEQ ID NO: 1136780 - RNA, 19 nt, Artificial Sequence
  Description of Artificial Sequence: Synthetic oligonucleotide
  Sense strand starting at position 3256 of SEQ ID NO: 916183
uuaggucaaaguuagguua

SEQ ID NO: 1136781 - RNA, 19 nt, Artificial Sequence
  Description of Artificial Sequence: Synthetic oligonucleotide
  Antisense strand to SEQ ID NO: 1136780
uaaccuaacuuugaccuaa

SEQ ID NO: 1136782 - RNA, 19 nt, Artificial Sequence
  Description of Artificial Sequence: Synthetic oligonucleotide
  Sense strand starting at position 3352 of SEQ ID NO: 916183
uuaggacaggcucauaguu

SEQ ID NO: 1136783 - RNA, 19 nt, Artificial Sequence
  Description of Artificial Sequence: Synthetic oligonucleotide
  Antisense strand to SEQ ID NO: 1136782
aacuaugagccuguccuaa

SEQ ID NO: 1136784 - RNA, 19 nt, Artificial Sequence
  Description of Artificial Sequence: Synthetic oligonucleotide
  Sense strand starting at position 3570 of SEQ ID NO: 916183
ggagaauauuauguugcau

SEQ ID NO: 1136785 - RNA, 19 nt, Artificial Sequence
  Description of Artificial Sequence: Synthetic oligonucleotide
  Antisense strand to SEQ ID NO: 1136784
augcaacauaauauucucc

SEQ ID NO: 1136786 - RNA, 19 nt, Artificial Sequence
  Description of Artificial Sequence: Synthetic oligonucleotide
  Sense strand starting at position 3838 of SEQ ID NO: 916183
uaggcuuuagaaugaggga

SEQ ID NO: 1136787 - RNA, 19 nt, Artificial Sequence
  Description of Artificial Sequence: Synthetic oligonucleotide
  Antisense strand to SEQ ID NO: 1136786
ucccucauucuaaagccua

SEQ ID NO: 1136788 - RNA, 19 nt, Artificial Sequence
  Description of Artificial Sequence: Synthetic oligonucleotide
  Sense strand starting at position 3896 of SEQ ID NO: 916183
agggucaagugcuuaagaa

SEQ ID NO: 1136789 - RNA, 19 nt, Artificial Sequence
  Description of Artificial Sequence: Synthetic oligonucleotide
  Antisense strand to SEQ ID NO: 1136788
uucuuaagcacuugacccu

SEQ ID NO: 1136790 - RNA, 19 nt, Artificial Sequence
  Description of Artificial Sequence: Synthetic oligonucleotide
  Sense strand starting at position 3897 of SEQ ID NO: 916183
gggucaagugcuuaagaaa

SEQ ID NO: 1136791 - RNA, 19 nt, Artificial Sequence
  Description of Artificial Sequence: Synthetic oligonucleotide
  Antisense strand to SEQ ID NO: 1136790
uuucuuaagcacuugaccc

SEQ ID NO: 1136792 - RNA, 19 nt, Artificial Sequence
  Description of Artificial Sequence: Synthetic oligonucleotide
  Sense strand starting at position 3965 of SEQ ID NO: 916183
guacgaaucagacaucugu

SEQ ID NO: 1136793 - RNA, 19 nt, Artificial Sequence
  Description of Artificial Sequence: Synthetic oligonucleotide
  Antisense strand to SEQ ID NO: 1136792
acagaugucugauucguac

SEQ ID NO: 1136794 - RNA, 19 nt, Artificial Sequence
  Description of Artificial Sequence: Synthetic oligonucleotide
  Sense strand starting at position 131 of SEQ ID NO: 916184
gauagugcaugagucacaa

SEQ ID NO: 1136795 - RNA, 19 nt, Artificial Sequence
  Description of Artificial Sequence: Synthetic oligonucleotide
  Antisense strand to SEQ ID NO: 1136794
uugugacucaugcacuauc

SEQ ID NO: 1136796 - RNA, 19 nt, Artificial Sequence
  Description of Artificial Sequence: Synthetic oligonucleotide
  Sense strand starting at position 394 of SEQ ID NO: 916184
gguaucuacucuucuagag

SEQ ID NO: 1136797 - RNA, 19 nt, Artificial Sequence
  Description of Artificial Sequence: Synthetic oligonucleotide
  Antisense strand to SEQ ID NO: 1136796
cucuagaagaguagauacc

SEQ ID NO: 1136798 - RNA, 19 nt, Artificial Sequence
  Description of Artificial Sequence: Synthetic oligonucleotide
  Sense strand starting at position 644 of SEQ ID NO: 916184
gugauuuccaacuguguac

SEQ ID NO: 1136799 - RNA, 19 nt, Artificial Sequence
  Description of Artificial Sequence: Synthetic oligonucleotide
  Antisense strand to SEQ ID NO: 1136798
guacacaguuggaaaucac

SEQ ID NO: 1136800 - RNA, 19 nt, Artificial Sequence
  Description of Artificial Sequence: Synthetic oligonucleotide
  Sense strand starting at position 663 of SEQ ID NO: 916184
gcagaacugacaggguaau

SEQ ID NO: 1136801 - RNA, 19 nt, Artificial Sequence
  Description of Artificial Sequence: Synthetic oligonucleotide
  Antisense strand to SEQ ID NO: 1136800
auuacccugucaguucugc

SEQ ID NO: 1136802 - RNA, 19 nt, Artificial Sequence
  Description of Artificial Sequence: Synthetic oligonucleotide
  Sense strand starting at position 673 of SEQ ID NO: 916184
caggguaaucaggaguugu

SEQ ID NO: 1136803 - RNA, 19 nt, Artificial Sequence
  Description of Artificial Sequence: Synthetic oligonucleotide
  Antisense strand to SEQ ID NO: 1136802
acaacuccugauuacccug

SEQ ID NO: 1136804 - RNA, 19 nt, Artificial Sequence
  Description of Artificial Sequence: Synthetic oligonucleotide
  Sense strand starting at position 677 of SEQ ID NO: 916184
guaaucaggaguuguaacu

SEQ ID NO: 1136805 - RNA, 19 nt, Artificial Sequence
  Description of Artificial Sequence: Synthetic oligonucleotide
  Antisense strand to SEQ ID NO: 1136804
aguuacaacuccugauuac

SEQ ID NO: 1136806 - RNA, 19 nt, Artificial Sequence
  Description of Artificial Sequence: Synthetic oligonucleotide
  Sense strand starting at position 711 of SEQ ID NO: 916184
acaagaaggucugcuauga

SEQ ID NO: 1136807 - RNA, 19 nt, Artificial Sequence
  Description of Artificial Sequence: Synthetic oligonucleotide
  Antisense strand to SEQ ID NO: 1136806
ucauagcagaccuucuugu

SEQ ID NO: 1136808 - RNA, 19 nt, Artificial Sequence
  Description of Artificial Sequence: Synthetic oligonucleotide
  Sense strand starting at position 715 of SEQ ID NO: 916184
gaaggucugcuaugagaga

SEQ ID NO: 1136809 - RNA, 19 nt, Artificial Sequence
  Description of Artificial Sequence: Synthetic oligonucleotide
  Antisense strand to SEQ ID NO: 1136808
ucucucauagcagaccuuc

SEQ ID NO: 1136810 - RNA, 19 nt, Artificial Sequence
  Description of Artificial Sequence: Synthetic oligonucleotide
  Sense strand starting at position 741 of SEQ ID NO: 916184
cuugaucagcugugaggau

SEQ ID NO: 1136811 - RNA, 19 nt, Artificial Sequence
  Description of Artificial Sequence: Synthetic oligonucleotide
  Antisense strand to SEQ ID NO: 1136810
auccucacagcugaucaag

SEQ ID NO: 1136812 - RNA, 19 nt, Artificial Sequence
  Description of Artificial Sequence: Synthetic oligonucleotide
  Sense strand starting at position 857 of SEQ ID NO: 916184
agguuaacaccuugaauau

SEQ ID NO: 1136813 - RNA, 19 nt, Artificial Sequence
  Description of Artificial Sequence: Synthetic oligonucleotide
  Antisense strand to SEQ ID NO: 1136812
auauucaagguguuaaccu

SEQ ID NO: 1136814 - RNA, 19 nt, Artificial Sequence
  Description of Artificial Sequence: Synthetic oligonucleotide
  Sense strand starting at position 924 of SEQ ID NO: 916184
aggagagucuaccauauuu

SEQ ID NO: 1136815 - RNA, 19 nt, Artificial Sequence
  Description of Artificial Sequence: Synthetic oligonucleotide
  Antisense strand to SEQ ID NO: 1136814
aaauaugguagacucuccu

SEQ ID NO: 1136816 - RNA, 19 nt, Artificial Sequence
  Description of Artificial Sequence: Synthetic oligonucleotide
  Sense strand starting at position 972 of SEQ ID NO: 916184
gacuaauguccaggauguu

SEQ ID NO: 1136817 - RNA, 19 nt, Artificial Sequence
  Description of Artificial Sequence: Synthetic oligonucleotide
  Antisense strand to SEQ ID NO: 1136816
aacauccuggacauuaguc

SEQ ID NO: 1136818 - RNA, 19 nt, Artificial Sequence
  Description of Artificial Sequence: Synthetic oligonucleotide
  Sense strand starting at position 973 of SEQ ID NO: 916184
acuaauguccaggauguuu

SEQ ID NO: 1136819 - RNA, 19 nt, Artificial Sequence
  Description of Artificial Sequence: Synthetic oligonucleotide
  Antisense strand to SEQ ID NO: 1136818
aaacauccuggacauuagu

SEQ ID NO: 1136820 - RNA, 19 nt, Artificial Sequence
  Description of Artificial Sequence: Synthetic oligonucleotide
  Sense strand starting at position 1060 of SEQ ID NO: 916184
gugcuaugagaguauagac

SEQ ID NO: 1136821 - RNA, 19 nt, Artificial Sequence
  Description of Artificial Sequence: Synthetic oligonucleotide
  Antisense strand to SEQ ID NO: 1136820
gucuauacucucauagcac

SEQ ID NO: 1136822 - RNA, 19 nt, Artificial Sequence
  Description of Artificial Sequence: Synthetic oligonucleotide
  Sense strand starting at position 1076 of SEQ ID NO: 916184
gaccaaauguguuuaggac

SEQ ID NO: 1136823 - RNA, 19 nt, Artificial Sequence
  Description of Artificial Sequence: Synthetic oligonucleotide
  Antisense strand to SEQ ID NO: 1136822
guccuaaacacauuugguc

SEQ ID NO: 1136824 - RNA, 19 nt, Artificial Sequence
  Description of Artificial Sequence: Synthetic oligonucleotide
  Sense strand starting at position 1082 of SEQ ID NO: 916184
auguguuuaggacaauggu

SEQ ID NO: 1136825 - RNA, 19 nt, Artificial Sequence
  Description of Artificial Sequence: Synthetic oligonucleotide
  Antisense strand to SEQ ID NO: 1136824
accauuguccuaaacacau

SEQ ID NO: 1136826 - RNA, 19 nt, Artificial Sequence
  Description of Artificial Sequence: Synthetic oligonucleotide
  Sense strand starting at position 1115 of SEQ ID NO: 916184
gcauucuuucugcagauac

SEQ ID NO: 1136827 - RNA, 19 nt, Artificial Sequence
  Description of Artificial Sequence: Synthetic oligonucleotide
  Antisense strand to SEQ ID NO: 1136826
guaucugcagaaagaaugc

SEQ ID NO: 1136828 - RNA, 19 nt, Artificial Sequence
  Description of Artificial Sequence: Synthetic oligonucleotide
  Sense strand starting at position 1518 of SEQ ID NO: 916184
agaagaugucaggguacug

SEQ ID NO: 1136829 - RNA, 19 nt, Artificial Sequence
  Description of Artificial Sequence: Synthetic oligonucleotide
  Antisense strand to SEQ ID NO: 1136828
caguacccugacaucuucu

SEQ ID NO: 1136830 - RNA, 19 nt, Artificial Sequence
  Description of Artificial Sequence: Synthetic oligonucleotide
  Sense strand starting at position 1605 of SEQ ID NO: 916184
gagcacaauuuauaggagu

SEQ ID NO: 1136831 - RNA, 19 nt, Artificial Sequence
  Description of Artificial Sequence: Synthetic oligonucleotide
  Antisense strand to SEQ ID NO: 1136830
acuccuauaaauugugcuc

SEQ ID NO: 1136832 - RNA, 19 nt, Artificial Sequence
  Description of Artificial Sequence: Synthetic oligonucleotide
  Sense strand starting at position 1628 of SEQ ID NO: 916184
uuggcauuccaaggcauaa

SEQ ID NO: 1136833 - RNA, 19 nt, Artificial Sequence
  Description of Artificial Sequence: Synthetic oligonucleotide
  Antisense strand to SEQ ID NO: 1136832
uuaugccuuggaaugccaa

SEQ ID NO: 1136834 - RNA, 19 nt, Artificial Sequence
  Description of Artificial Sequence: Synthetic oligonucleotide
  Sense strand starting at position 1681 of SEQ ID NO: 916184
auggucugucucugaagga

SEQ ID NO: 1136835 - RNA, 19 nt, Artificial Sequence
  Description of Artificial Sequence: Synthetic oligonucleotide
  Antisense strand to SEQ ID NO: 1136834
uccuucagagacagaccau

SEQ ID NO: 1136836 - RNA, 19 nt, Artificial Sequence
  Description of Artificial Sequence: Synthetic oligonucleotide
  Sense strand starting at position 1685 of SEQ ID NO: 916184
ucugucucugaaggauacu

SEQ ID NO: 1136837 - RNA, 19 nt, Artificial Sequence
  Description of Artificial Sequence: Synthetic oligonucleotide
  Antisense strand to SEQ ID NO: 1136836
aguauccuucagagacaga

SEQ ID NO: 1136838 - RNA, 19 nt, Artificial Sequence
  Description of Artificial Sequence: Synthetic oligonucleotide
  Sense strand starting at position 2156 of SEQ ID NO: 916184
aaagucaggucaguuuauu

SEQ ID NO: 1136839 - RNA, 19 nt, Artificial Sequence
  Description of Artificial Sequence: Synthetic oligonucleotide
  Antisense strand to SEQ ID NO: 1136838
aauaaacugaccugacuuu

SEQ ID NO: 1136840 - RNA, 19 nt, Artificial Sequence
  Description of Artificial Sequence: Synthetic oligonucleotide
  Sense strand starting at position 2209 of SEQ ID NO: 916184
ugauccuagcgcuaagaau

SEQ ID NO: 1136841 - RNA, 19 nt, Artificial Sequence
  Description of Artificial Sequence: Synthetic oligonucleotide
  Antisense strand to SEQ ID NO: 1136840
auucuuagcgcuaggauca

SEQ ID NO: 1136842 - RNA, 19 nt, Artificial Sequence
  Description of Artificial Sequence: Synthetic oligonucleotide
  Sense strand starting at position 2217 of SEQ ID NO: 916184
gcgcuaagaauagaaagau

SEQ ID NO: 1136843 - RNA, 19 nt, Artificial Sequence
  Description of Artificial Sequence: Synthetic oligonucleotide
  Antisense strand to SEQ ID NO: 1136842
aucuuucuauucuuagcgc

SEQ ID NO: 1136844 - RNA, 19 nt, Artificial Sequence
  Description of Artificial Sequence: Synthetic oligonucleotide
  Sense strand starting at position 2264 of SEQ ID NO: 916184
cuuagauuaucagugggag

SEQ ID NO: 1136845 - RNA, 19 nt, Artificial Sequence
  Description of Artificial Sequence: Synthetic oligonucleotide
  Antisense strand to SEQ ID NO: 1136844
cucccacugauaaucuaag

SEQ ID NO: 1136846 - RNA, 19 nt, Artificial Sequence
  Description of Artificial Sequence: Synthetic oligonucleotide
  Sense strand starting at position 2346 of SEQ ID NO: 916184
gugcuaugacaauacauau

SEQ ID NO: 1136847 - RNA, 19 nt, Artificial Sequence
  Description of Artificial Sequence: Synthetic oligonucleotide
  Antisense strand to SEQ ID NO: 1136846
auauguauugucauagcac

SEQ ID NO: 1136848 - RNA, 19 nt, Artificial Sequence
  Description of Artificial Sequence: Synthetic oligonucleotide
  Sense strand starting at position 2376 of SEQ ID NO: 916184
gggacaaugcuaggguuca

SEQ ID NO: 1136849 - RNA, 19 nt, Artificial Sequence
  Description of Artificial Sequence: Synthetic oligonucleotide
  Antisense strand to SEQ ID NO: 1136848
ugaacccuagcauuguccc

SEQ ID NO: 1136850 - RNA, 19 nt, Artificial Sequence
  Description of Artificial Sequence: Synthetic oligonucleotide
  Sense strand starting at position 2428 of SEQ ID NO: 916184
cagaguucuggguaaguaa

SEQ ID NO: 1136851 - RNA, 19 nt, Artificial Sequence
  Description of Artificial Sequence: Synthetic oligonucleotide
  Antisense strand to SEQ ID NO: 1136850
uuacuuacccagaacucug

SEQ ID NO: 1136852 - RNA, 19 nt, Artificial Sequence
  Description of Artificial Sequence: Synthetic oligonucleotide
  Sense strand starting at position 2431 of SEQ ID NO: 916184
aguucuggguaaguaagau

SEQ ID NO: 1136853 - RNA, 19 nt, Artificial Sequence
  Description of Artificial Sequence: Synthetic oligonucleotide
  Antisense strand to SEQ ID NO: 1136852
aucuuacuuacccagaacu

SEQ ID NO: 1136854 - RNA, 19 nt, Artificial Sequence
  Description of Artificial Sequence: Synthetic oligonucleotide
  Sense strand starting at position 2829 of SEQ ID NO: 916184
aaauauaaugugugacaga

SEQ ID NO: 1136855 - RNA, 19 nt, Artificial Sequence
  Description of Artificial Sequence: Synthetic oligonucleotide
  Antisense strand to SEQ ID NO: 1136854
ucugucacacauuauauuu

SEQ ID NO: 1136856 - RNA, 19 nt, Artificial Sequence
  Description of Artificial Sequence: Synthetic oligonucleotide
  Sense strand starting at position 2838 of SEQ ID NO: 916184
gugugacagaauuacuagu

SEQ ID NO: 1136857 - RNA, 19 nt, Artificial Sequence
  Description of Artificial Sequence: Synthetic oligonucleotide
  Antisense strand to SEQ ID NO: 1136856
acuaguaauucugucacac

SEQ ID NO: 1136858 - RNA, 19 nt, Artificial Sequence
  Description of Artificial Sequence: Synthetic oligonucleotide
  Sense strand starting at position 2840 of SEQ ID NO: 916184
gugacagaauuacuaguaa

SEQ ID NO: 1136859 - RNA, 19 nt, Artificial Sequence
  Description of Artificial Sequence: Synthetic oligonucleotide
  Antisense strand to SEQ ID NO: 1136858
uuacuaguaauucugucac

SEQ ID NO: 1136860 - RNA, 19 nt, Artificial Sequence
  Description of Artificial Sequence: Synthetic oligonucleotide
  Sense strand starting at position 2879 of SEQ ID NO: 916184
ggaagugauacauguggac

SEQ ID NO: 1136861 - RNA, 19 nt, Artificial Sequence
  Description of Artificial Sequence: Synthetic oligonucleotide
  Antisense strand to SEQ ID NO: 1136860
guccacauguaucacuucc

SEQ ID NO: 1136862 - RNA, 19 nt, Artificial Sequence
  Description of Artificial Sequence: Synthetic oligonucleotide
  Sense strand starting at position 2921 of SEQ ID NO: 916184
cacagcaggcuuuauauga

SEQ ID NO: 1136863 - RNA, 19 nt, Artificial Sequence
  Description of Artificial Sequence: Synthetic oligonucleotide
  Antisense strand to SEQ ID NO: 1136862
ucauauaaagccugcugug

SEQ ID NO: 1136864 - RNA, 19 nt, Artificial Sequence
  Description of Artificial Sequence: Synthetic oligonucleotide
  Sense strand starting at position 3032 of SEQ ID NO: 916184
cucacaagugucugaggaa

SEQ ID NO: 1136865 - RNA, 19 nt, Artificial Sequence
  Description of Artificial Sequence: Synthetic oligonucleotide
  Antisense strand to SEQ ID NO: 1136864
uuccucagacacuugugag

SEQ ID NO: 1136866 - RNA, 19 nt, Artificial Sequence
  Description of Artificial Sequence: Synthetic oligonucleotide
  Sense strand starting at position 3218 of SEQ ID NO: 916184
ccuuguugacaauaugauu

SEQ ID NO: 1136867 - RNA, 19 nt, Artificial Sequence
  Description of Artificial Sequence: Synthetic oligonucleotide
  Antisense strand to SEQ ID NO: 1136866
aaucauauugucaacaagg

SEQ ID NO: 1136868 - RNA, 19 nt, Artificial Sequence
  Description of Artificial Sequence: Synthetic oligonucleotide
  Sense strand starting at position 3234 of SEQ ID NO: 916184
auuguaugccuagaaagcu

SEQ ID NO: 1136869 - RNA, 19 nt, Artificial Sequence
  Description of Artificial Sequence: Synthetic oligonucleotide
  Antisense strand to SEQ ID NO: 1136868
agcuuucuaggcauacaau

SEQ ID NO: 1136870 - RNA, 19 nt, Artificial Sequence
  Description of Artificial Sequence: Synthetic oligonucleotide
  Sense strand starting at position 3242 of SEQ ID NO: 916184
ccuagaaagcucugaagac

SEQ ID NO: 1136871 - RNA, 19 nt, Artificial Sequence
  Description of Artificial Sequence: Synthetic oligonucleotide
  Antisense strand to SEQ ID NO: 1136870
gucuucagagcuuucuagg

SEQ ID NO: 1136872 - RNA, 19 nt, Artificial Sequence
  Description of Artificial Sequence: Synthetic oligonucleotide
  Sense strand starting at position 3251 of SEQ ID NO: 916184
cucugaagacucugccaaa

SEQ ID NO: 1136873 - RNA, 19 nt, Artificial Sequence
  Description of Artificial Sequence: Synthetic oligonucleotide
  Antisense strand to SEQ ID NO: 1136872
uuuggcagagucuucagag

SEQ ID NO: 1136874 - RNA, 19 nt, Artificial Sequence
  Description of Artificial Sequence: Synthetic oligonucleotide
  Sense strand starting at position 461 of SEQ ID NO: 916185
ucuugaaacuuugccuuga

SEQ ID NO: 1136875 - RNA, 19 nt, Artificial Sequence
  Description of Artificial Sequence: Synthetic oligonucleotide
  Antisense strand to SEQ ID NO: 1136874
ucaaggcaaaguuucaaga

SEQ ID NO: 1136876 - RNA, 19 nt, Artificial Sequence
  Description of Artificial Sequence: Synthetic oligonucleotide
  Sense strand starting at position 462 of SEQ ID NO: 916185
cuugaaacuuugccuugaa

SEQ ID NO: 1136877 - RNA, 19 nt, Artificial Sequence
  Description of Artificial Sequence: Synthetic oligonucleotide
  Antisense strand to SEQ ID NO: 1136876
uucaaggcaaaguuucaag

SEQ ID NO: 1136878 - RNA, 19 nt, Artificial Sequence
  Description of Artificial Sequence: Synthetic oligonucleotide
  Sense strand starting at position 463 of SEQ ID NO: 916185
uugaaacuuugccuugaau

SEQ ID NO: 1136879 - RNA, 19 nt, Artificial Sequence
  Description of Artificial Sequence: Synthetic oligonucleotide
  Antisense strand to SEQ ID NO: 1136878
auucaaggcaaaguuucaa

SEQ ID NO: 1136880 - RNA, 19 nt, Artificial Sequence
  Description of Artificial Sequence: Synthetic oligonucleotide
  Sense strand starting at position 474 of SEQ ID NO: 916185
ccuugaaugagcugcaagu

SEQ ID NO: 1136881 - RNA, 19 nt, Artificial Sequence
  Description of Artificial Sequence: Synthetic oligonucleotide
  Antisense strand to SEQ ID NO: 1136880
acuugcagcucauucaagg

SEQ ID NO: 1136882 - RNA, 19 nt, Artificial Sequence
  Description of Artificial Sequence: Synthetic oligonucleotide
  Sense strand starting at position 929 of SEQ ID NO: 916185
gugguuucgacaugaaccu

SEQ ID NO: 1136883 - RNA, 19 nt, Artificial Sequence
  Description of Artificial Sequence: Synthetic oligonucleotide
  Antisense strand to SEQ ID NO: 1136882
agguucaugucgaaaccac

SEQ ID NO: 1136884 - RNA, 19 nt, Artificial Sequence
  Description of Artificial Sequence: Synthetic oligonucleotide
  Sense strand starting at position 942 of SEQ ID NO: 916185
gaaccuguuucgccucaga

SEQ ID NO: 1136885 - RNA, 19 nt, Artificial Sequence
  Description of Artificial Sequence: Synthetic oligonucleotide
  Antisense strand to SEQ ID NO: 1136884
ucugaggcgaaacagguuc

SEQ ID NO: 1136886 - RNA, 19 nt, Artificial Sequence
  Description of Artificial Sequence: Synthetic oligonucleotide
  Sense strand starting at position 945 of SEQ ID NO: 916185
ccuguuucgccucagauca

SEQ ID NO: 1136887 - RNA, 19 nt, Artificial Sequence
  Description of Artificial Sequence: Synthetic oligonucleotide
  Antisense strand to SEQ ID NO: 1136886
ugaucugaggcgaaacagg

SEQ ID NO: 1136888 - RNA, 19 nt, Artificial Sequence
  Description of Artificial Sequence: Synthetic oligonucleotide
  Sense strand starting at position 968 of SEQ ID NO: 916185
gcauuagauucugauaaga

SEQ ID NO: 1136889 - RNA, 19 nt, Artificial Sequence
  Description of Artificial Sequence: Synthetic oligonucleotide
  Antisense strand to SEQ ID NO: 1136888
ucuuaucagaaucuaaugc

SEQ ID NO: 1136890 - RNA, 19 nt, Artificial Sequence
  Description of Artificial Sequence: Synthetic oligonucleotide
  Sense strand starting at position 1226 of SEQ ID NO: 916185
caagauguaugauaucuga

SEQ ID NO: 1136891 - RNA, 19 nt, Artificial Sequence
  Description of Artificial Sequence: Synthetic oligonucleotide
  Antisense strand to SEQ ID NO: 1136890
ucagauaucauacaucuug

SEQ ID NO: 1136892 - RNA, 19 nt, Artificial Sequence
  Description of Artificial Sequence: Synthetic oligonucleotide
  Sense strand starting at position 1229 of SEQ ID NO: 916185
gauguaugauaucugauca

SEQ ID NO: 1136893 - RNA, 19 nt, Artificial Sequence
  Description of Artificial Sequence: Synthetic oligonucleotide
  Antisense strand to SEQ ID NO: 1136892
ugaucagauaucauacauc

SEQ ID NO: 1136894 - RNA, 19 nt, Artificial Sequence
  Description of Artificial Sequence: Synthetic oligonucleotide
  Sense strand starting at position 1234 of SEQ ID NO: 916185
augauaucugaucauuguu

SEQ ID NO: 1136895 - RNA, 19 nt, Artificial Sequence
  Description of Artificial Sequence: Synthetic oligonucleotide
  Antisense strand to SEQ ID NO: 1136894
aacaaugaucagauaucau

SEQ ID NO: 1136896 - RNA, 19 nt, Artificial Sequence
  Description of Artificial Sequence: Synthetic oligonucleotide
  Sense strand starting at position 1240 of SEQ ID NO: 916185
ucugaucauuguuugcaca

SEQ ID NO: 1136897 - RNA, 19 nt, Artificial Sequence
  Description of Artificial Sequence: Synthetic oligonucleotide
  Antisense strand to SEQ ID NO: 1136896
ugugcaaacaaugaucaga

SEQ ID NO: 1136898 - RNA, 19 nt, Artificial Sequence
  Description of Artificial Sequence: Synthetic oligonucleotide
  Sense strand starting at position 1486 of SEQ ID NO: 916185
gcaucuuugcaagggugga

SEQ ID NO: 1136899 - RNA, 19 nt, Artificial Sequence
  Description of Artificial Sequence: Synthetic oligonucleotide
  Antisense strand to SEQ ID NO: 1136898
uccacccuugcaaagaugc

SEQ ID NO: 1136900 - RNA, 19 nt, Artificial Sequence
  Description of Artificial Sequence: Synthetic oligonucleotide
  Sense strand starting at position 1499 of SEQ ID NO: 916185
gguggaugcaaguauaaau

SEQ ID NO: 1136901 - RNA, 19 nt, Artificial Sequence
  Description of Artificial Sequence: Synthetic oligonucleotide
  Antisense strand to SEQ ID NO: 1136900
auuuauacuugcauccacc

SEQ ID NO: 1136902 - RNA, 19 nt, Artificial Sequence
  Description of Artificial Sequence: Synthetic oligonucleotide
  Sense strand starting at position 1570 of SEQ ID NO: 916185
auaacauucuccgcucaga

SEQ ID NO: 1136903 - RNA, 19 nt, Artificial Sequence
  Description of Artificial Sequence: Synthetic oligonucleotide
  Antisense strand to SEQ ID NO: 1136902
ucugagcggagaauguuau

SEQ ID NO: 1136904 - RNA, 19 nt, Artificial Sequence
  Description of Artificial Sequence: Synthetic oligonucleotide
  Sense strand starting at position 1732 of SEQ ID NO: 916185
ccgguuaccuuguagaaag

SEQ ID NO: 1136905 - RNA, 19 nt, Artificial Sequence
  Description of Artificial Sequence: Synthetic oligonucleotide
  Antisense strand to SEQ ID NO: 1136904
cuuucuacaagguaaccgg

SEQ ID NO: 1136906 - RNA, 19 nt, Artificial Sequence
  Description of Artificial Sequence: Synthetic oligonucleotide
  Sense strand starting at position 2232 of SEQ ID NO: 916185
acgcuauagcaauucguuu

SEQ ID NO: 1136907 - RNA, 19 nt, Artificial Sequence
  Description of Artificial Sequence: Synthetic oligonucleotide
  Antisense strand to SEQ ID NO: 1136906
aaacgaauugcuauagcgu

SEQ ID NO: 1136908 - RNA, 19 nt, Artificial Sequence
  Description of Artificial Sequence: Synthetic oligonucleotide
  Sense strand starting at position 2237 of SEQ ID NO: 916185
auagcaauucguuugcugu

SEQ ID NO: 1136909 - RNA, 19 nt, Artificial Sequence
  Description of Artificial Sequence: Synthetic oligonucleotide
  Antisense strand to SEQ ID NO: 1136908
acagcaaacgaauugcuau

SEQ ID NO: 1136910 - RNA, 19 nt, Artificial Sequence
  Description of Artificial Sequence: Synthetic oligonucleotide
  Sense strand starting at position 2257 of SEQ ID NO: 916185
cuuccucuccuucgaagau

SEQ ID NO: 1136911 - RNA, 19 nt, Artificial Sequence
  Description of Artificial Sequence: Synthetic oligonucleotide
  Antisense strand to SEQ ID NO: 1136910
aucuucgaaggagaggaag

SEQ ID NO: 1136912 - RNA, 19 nt, Artificial Sequence
  Description of Artificial Sequence: Synthetic oligonucleotide
  Sense strand starting at position 2348 of SEQ ID NO: 916185
gucagucuauuagucaagu

SEQ ID NO: 1136913 - RNA, 19 nt, Artificial Sequence
  Description of Artificial Sequence: Synthetic oligonucleotide
  Antisense strand to SEQ ID NO: 1136912
acuugacuaauagacugac

SEQ ID NO: 1136914 - RNA, 19 nt, Artificial Sequence
  Description of Artificial Sequence: Synthetic oligonucleotide
  Sense strand starting at position 2349 of SEQ ID NO: 916185
ucagucuauuagucaaguu

SEQ ID NO: 1136915 - RNA, 19 nt, Artificial Sequence
  Description of Artificial Sequence: Synthetic oligonucleotide
  Antisense strand to SEQ ID NO: 1136914
aacuugacuaauagacuga

SEQ ID NO: 1136916 - RNA, 19 nt, Artificial Sequence
  Description of Artificial Sequence: Synthetic oligonucleotide
  Sense strand starting at position 2585 of SEQ ID NO: 916185
ucauucuguuccgcaggua

SEQ ID NO: 1136917 - RNA, 19 nt, Artificial Sequence
  Description of Artificial Sequence: Synthetic oligonucleotide
  Antisense strand to SEQ ID NO: 1136916
uaccugcggaacagaauga

SEQ ID NO: 1136918 - RNA, 19 nt, Artificial Sequence
  Description of Artificial Sequence: Synthetic oligonucleotide
  Sense strand starting at position 2714 of SEQ ID NO: 916185
gcggcauaggaauaaugau

SEQ ID NO: 1136919 - RNA, 19 nt, Artificial Sequence
  Description of Artificial Sequence: Synthetic oligonucleotide
  Antisense strand to SEQ ID NO: 1136918
aucauuauuccuaugccgc

SEQ ID NO: 1136920 - RNA, 19 nt, Artificial Sequence
  Description of Artificial Sequence: Synthetic oligonucleotide
  Sense strand starting at position 2734 of SEQ ID NO: 916185
uaaacagugcaguguaauu

SEQ ID NO: 1136921 - RNA, 19 nt, Artificial Sequence
  Description of Artificial Sequence: Synthetic oligonucleotide
  Antisense strand to SEQ ID NO: 1136920
aauuacacugcacuguuua

SEQ ID NO: 1136922 - RNA, 19 nt, Artificial Sequence
  Description of Artificial Sequence: Synthetic oligonucleotide
  Sense strand starting at position 2782 of SEQ ID NO: 916185
uugacucacgucuguaauc

SEQ ID NO: 1136923 - RNA, 19 nt, Artificial Sequence
  Description of Artificial Sequence: Synthetic oligonucleotide
  Antisense strand to SEQ ID NO: 1136922
gauuacagacgugagucaa

SEQ ID NO: 1136924 - RNA, 19 nt, Artificial Sequence
  Description of Artificial Sequence: Synthetic oligonucleotide
  Sense strand starting at position 3147 of SEQ ID NO: 916185
ugagcuggaccuugaaaua

SEQ ID NO: 1136925 - RNA, 19 nt, Artificial Sequence
  Description of Artificial Sequence: Synthetic oligonucleotide
  Antisense strand to SEQ ID NO: 1136924
uauuucaagguccagcuca

SEQ ID NO: 1136926 - RNA, 19 nt, Artificial Sequence
  Description of Artificial Sequence: Synthetic oligonucleotide
  Sense strand starting at position 3239 of SEQ ID NO: 916185
ggaacugguugagaugaau

SEQ ID NO: 1136927 - RNA, 19 nt, Artificial Sequence
  Description of Artificial Sequence: Synthetic oligonucleotide
  Antisense strand to SEQ ID NO: 1136926
auucaucucaaccaguucc

SEQ ID NO: 1136928 - RNA, 19 nt, Artificial Sequence
  Description of Artificial Sequence: Synthetic oligonucleotide
  Sense strand starting at position 3308 of SEQ ID NO: 916185
gauugauuauuacugagcu

SEQ ID NO: 1136929 - RNA, 19 nt, Artificial Sequence
  Description of Artificial Sequence: Synthetic oligonucleotide
  Antisense strand to SEQ ID NO: 1136928
agcucaguaauaaucaauc

SEQ ID NO: 1136930 - RNA, 19 nt, Artificial Sequence
  Description of Artificial Sequence: Synthetic oligonucleotide
  Sense strand starting at position 3400 of SEQ ID NO: 916185
ugagguuagauuugugugu

SEQ ID NO: 1136931 - RNA, 19 nt, Artificial Sequence
  Description of Artificial Sequence: Synthetic oligonucleotide
  Antisense strand to SEQ ID NO: 1136930
acacacaaaucuaaccuca

SEQ ID NO: 1136932 - RNA, 19 nt, Artificial Sequence
  Description of Artificial Sequence: Synthetic oligonucleotide
  Sense strand starting at position 3401 of SEQ ID NO: 916185
gagguuagauuugugugua

SEQ ID NO: 1136933 - RNA, 19 nt, Artificial Sequence
  Description of Artificial Sequence: Synthetic oligonucleotide
  Antisense strand to SEQ ID NO: 1136932
uacacacaaaucuaaccuc

SEQ ID NO: 1136934 - RNA, 19 nt, Artificial Sequence
  Description of Artificial Sequence: Synthetic oligonucleotide
  Sense strand starting at position 3402 of SEQ ID NO: 916185
agguuagauuuguguguag

SEQ ID NO: 1136935 - RNA, 19 nt, Artificial Sequence
  Description of Artificial Sequence: Synthetic oligonucleotide
  Antisense strand to SEQ ID NO: 1136934
cuacacacaaaucuaaccu

SEQ ID NO: 1136936 - RNA, 19 nt, Artificial Sequence
  Description of Artificial Sequence: Synthetic oligonucleotide
  Sense strand starting at position 3404 of SEQ ID NO: 916185
guuagauuuguguguagaa

SEQ ID NO: 1136937 - RNA, 19 nt, Artificial Sequence
  Description of Artificial Sequence: Synthetic oligonucleotide
  Antisense strand to SEQ ID NO: 1136936
uucuacacacaaaucuaac

SEQ ID NO: 1136938 - RNA, 19 nt, Artificial Sequence
  Description of Artificial Sequence: Synthetic oligonucleotide
  Sense strand starting at position 3661 of SEQ ID NO: 916185
ggaaauggauuggaauuga

SEQ ID NO: 1136939 - RNA, 19 nt, Artificial Sequence
  Description of Artificial Sequence: Synthetic oligonucleotide
  Antisense strand to SEQ ID NO: 1136938
ucaauuccaauccauuucc

SEQ ID NO: 1136940 - RNA, 19 nt, Artificial Sequence
  Description of Artificial Sequence: Synthetic oligonucleotide
  Sense strand starting at position 3713 of SEQ ID NO: 916185
gcaauagucuaguuggaag

SEQ ID NO: 1136941 - RNA, 19 nt, Artificial Sequence
  Description of Artificial Sequence: Synthetic oligonucleotide
  Antisense strand to SEQ ID NO: 1136940
cuuccaacuagacuauugc

SEQ ID NO: 1136942 - RNA, 19 nt, Artificial Sequence
  Description of Artificial Sequence: Synthetic oligonucleotide
  Sense strand starting at position 3822 of SEQ ID NO: 916185
ugaacaaaugcauguaaga

SEQ ID NO: 1136943 - RNA, 19 nt, Artificial Sequence
  Description of Artificial Sequence: Synthetic oligonucleotide
  Antisense strand to SEQ ID NO: 1136942
ucuuacaugcauuuguuca

SEQ ID NO: 1136944 - RNA, 19 nt, Artificial Sequence
  Description of Artificial Sequence: Synthetic oligonucleotide
  Sense strand starting at position 3852 of SEQ ID NO: 916185
augcauuguaagggacuua

SEQ ID NO: 1136945 - RNA, 19 nt, Artificial Sequence
  Description of Artificial Sequence: Synthetic oligonucleotide
  Antisense strand to SEQ ID NO: 1136944
uaagucccuuacaaugcau

SEQ ID NO: 1136946 - RNA, 19 nt, Artificial Sequence
  Description of Artificial Sequence: Synthetic oligonucleotide
  Sense strand starting at position 3863 of SEQ ID NO: 916185
gggacuuacugcuauaauu

SEQ ID NO: 1136947 - RNA, 19 nt, Artificial Sequence
  Description of Artificial Sequence: Synthetic oligonucleotide
  Antisense strand to SEQ ID NO: 1136946
aauuauagcaguaaguccc

SEQ ID NO: 1136948 - RNA, 19 nt, Artificial Sequence
  Description of Artificial Sequence: Synthetic oligonucleotide
  Sense strand starting at position 3883 of SEQ ID NO: 916185
accauuguauguuuccaaa

SEQ ID NO: 1136949 - RNA, 19 nt, Artificial Sequence
  Description of Artificial Sequence: Synthetic oligonucleotide
  Antisense strand to SEQ ID NO: 1136948
uuuggaaacauacaauggu

SEQ ID NO: 1136950 - RNA, 19 nt, Artificial Sequence
  Description of Artificial Sequence: Synthetic oligonucleotide
  Sense strand starting at position 3950 of SEQ ID NO: 916185
caaccaguuugauuggaua

SEQ ID NO: 1136951 - RNA, 19 nt, Artificial Sequence
  Description of Artificial Sequence: Synthetic oligonucleotide
  Antisense strand to SEQ ID NO: 1136950
uauccaaucaaacugguug

SEQ ID NO: 1136952 - RNA, 19 nt, Artificial Sequence
  Description of Artificial Sequence: Synthetic oligonucleotide
  Sense strand starting at position 3953 of SEQ ID NO: 916185
ccaguuugauuggauauaa

SEQ ID NO: 1136953 - RNA, 19 nt, Artificial Sequence
  Description of Artificial Sequence: Synthetic oligonucleotide
  Antisense strand to SEQ ID NO: 1136952
uuauauccaaucaaacugg

SEQ ID NO: 1136954 - RNA, 19 nt, Artificial Sequence
  Description of Artificial Sequence: Synthetic oligonucleotide
  Sense strand starting at position 53 of SEQ ID NO: 916186
gcccucucaggauagacua

SEQ ID NO: 1136955 - RNA, 19 nt, Artificial Sequence
  Description of Artificial Sequence: Synthetic oligonucleotide
  Antisense strand to SEQ ID NO: 1136954
uagucuauccugagagggc

SEQ ID NO: 1136956 - RNA, 19 nt, Artificial Sequence
  Description of Artificial Sequence: Synthetic oligonucleotide
  Sense strand starting at position 1411 of SEQ ID NO: 916186
uuuggaaagccagguguau

SEQ ID NO: 1136957 - RNA, 19 nt, Artificial Sequence
  Description of Artificial Sequence: Synthetic oligonucleotide
  Antisense strand to SEQ ID NO: 1136956
auacaccuggcuuuccaaa

SEQ ID NO: 1136958 - RNA, 19 nt, Artificial Sequence
  Description of Artificial Sequence: Synthetic oligonucleotide
  Sense strand starting at position 1567 of SEQ ID NO: 916186
agagaagauuguuaaugaa

SEQ ID NO: 1136959 - RNA, 19 nt, Artificial Sequence
  Description of Artificial Sequence: Synthetic oligonucleotide
  Antisense strand to SEQ ID NO: 1136958
uucauuaacaaucuucucu

SEQ ID NO: 1136960 - RNA, 19 nt, Artificial Sequence
  Description of Artificial Sequence: Synthetic oligonucleotide
  Sense strand starting at position 1570 of SEQ ID NO: 916186
gaagauuguuaaugaagcu

SEQ ID NO: 1136961 - RNA, 19 nt, Artificial Sequence
  Description of Artificial Sequence: Synthetic oligonucleotide
  Antisense strand to SEQ ID NO: 1136960
agcuucauuaacaaucuuc

SEQ ID NO: 1136962 - RNA, 19 nt, Artificial Sequence
  Description of Artificial Sequence: Synthetic oligonucleotide
  Sense strand starting at position 1628 of SEQ ID NO: 916186
ggcaaagaaucacaucaga

SEQ ID NO: 1136963 - RNA, 19 nt, Artificial Sequence
  Description of Artificial Sequence: Synthetic oligonucleotide
  Antisense strand to SEQ ID NO: 1136962
ucugaugugauucuuugcc

SEQ ID NO: 1136964 - RNA, 19 nt, Artificial Sequence
  Description of Artificial Sequence: Synthetic oligonucleotide
  Sense strand starting at position 1678 of SEQ ID NO: 916186
cgccgugcucccguuauaa

SEQ ID NO: 1136965 - RNA, 19 nt, Artificial Sequence
  Description of Artificial Sequence: Synthetic oligonucleotide
  Antisense strand to SEQ ID NO: 1136964
uuauaacgggagcacggcg

SEQ ID NO: 1136966 - RNA, 19 nt, Artificial Sequence
  Description of Artificial Sequence: Synthetic oligonucleotide
  Sense strand starting at position 2200 of SEQ ID NO: 916186
gagcucaguuucucagcua

SEQ ID NO: 1136967 - RNA, 19 nt, Artificial Sequence
  Description of Artificial Sequence: Synthetic oligonucleotide
  Antisense strand to SEQ ID NO: 1136966
uagcugagaaacugagcuc

SEQ ID NO: 1136968 - RNA, 19 nt, Artificial Sequence
  Description of Artificial Sequence: Synthetic oligonucleotide
  Sense strand starting at position 2226 of SEQ ID NO: 916186
cuuagucgcuaucgguaau

SEQ ID NO: 1136969 - RNA, 19 nt, Artificial Sequence
  Description of Artificial Sequence: Synthetic oligonucleotide
  Antisense strand to SEQ ID NO: 1136968
auuaccgauagcgacuaag

SEQ ID NO: 1136970 - RNA, 19 nt, Artificial Sequence
  Description of Artificial Sequence: Synthetic oligonucleotide
  Sense strand starting at position 2272 of SEQ ID NO: 916186
gagcucaggcaagaguuua

SEQ ID NO: 1136971 - RNA, 19 nt, Artificial Sequence
  Description of Artificial Sequence: Synthetic oligonucleotide
  Antisense strand to SEQ ID NO: 1136970
uaaacucuugccugagcuc

SEQ ID NO: 1136972 - RNA, 19 nt, Artificial Sequence
  Description of Artificial Sequence: Synthetic oligonucleotide
  Sense strand starting at position 2277 of SEQ ID NO: 916186
caggcaagaguuuaaguuu

SEQ ID NO: 1136973 - RNA, 19 nt, Artificial Sequence
  Description of Artificial Sequence: Synthetic oligonucleotide
  Antisense strand to SEQ ID NO: 1136972
aaacuuaaacucuugccug

SEQ ID NO: 1136974 - RNA, 19 nt, Artificial Sequence
  Description of Artificial Sequence: Synthetic oligonucleotide
  Sense strand starting at position 2334 of SEQ ID NO: 916186
cgcgguuuggguuacuaga

SEQ ID NO: 1136975 - RNA, 19 nt, Artificial Sequence
  Description of Artificial Sequence: Synthetic oligonucleotide
  Antisense strand to SEQ ID NO: 1136974
ucuaguaacccaaaccgcg

SEQ ID NO: 1136976 - RNA, 19 nt, Artificial Sequence
  Description of Artificial Sequence: Synthetic oligonucleotide
  Sense strand starting at position 2336 of SEQ ID NO: 916186
cgguuuggguuacuagaaa

SEQ ID NO: 1136977 - RNA, 19 nt, Artificial Sequence
  Description of Artificial Sequence: Synthetic oligonucleotide
  Antisense strand to SEQ ID NO: 1136976
uuucuaguaacccaaaccg

SEQ ID NO: 1136978 - RNA, 19 nt, Artificial Sequence
  Description of Artificial Sequence: Synthetic oligonucleotide
  Sense strand starting at position 2360 of SEQ ID NO: 916186
ggcuuagacuucuacgaau

SEQ ID NO: 1136979 - RNA, 19 nt, Artificial Sequence
  Description of Artificial Sequence: Synthetic oligonucleotide
  Antisense strand to SEQ ID NO: 1136978
auucguagaagucuaagcc

SEQ ID NO: 1136980 - RNA, 19 nt, Artificial Sequence
  Description of Artificial Sequence: Synthetic oligonucleotide
  Sense strand starting at position 2522 of SEQ ID NO: 916186
cgcccaacuuccuacgaaa

SEQ ID NO: 1136981 - RNA, 19 nt, Artificial Sequence
  Description of Artificial Sequence: Synthetic oligonucleotide
  Antisense strand to SEQ ID NO: 1136980
uuucguaggaaguugggcg

SEQ ID NO: 1136982 - RNA, 19 nt, Artificial Sequence
  Description of Artificial Sequence: Synthetic oligonucleotide
  Sense strand starting at position 2624 of SEQ ID NO: 916186
ccuucuauugguuguauga

SEQ ID NO: 1136983 - RNA, 19 nt, Artificial Sequence
  Description of Artificial Sequence: Synthetic oligonucleotide
  Antisense strand to SEQ ID NO: 1136982
ucauacaaccaauagaagg

SEQ ID NO: 1136984 - RNA, 19 nt, Artificial Sequence
  Description of Artificial Sequence: Synthetic oligonucleotide
  Sense strand starting at position 2626 of SEQ ID NO: 916186
uucuauugguuguaugaga

SEQ ID NO: 1136985 - RNA, 19 nt, Artificial Sequence
  Description of Artificial Sequence: Synthetic oligonucleotide
  Antisense strand to SEQ ID NO: 1136984
ucucauacaaccaauagaa

SEQ ID NO: 1136986 - RNA, 19 nt, Artificial Sequence
  Description of Artificial Sequence: Synthetic oligonucleotide
  Sense strand starting at position 2695 of SEQ ID NO: 916186
gugggaguugugaguagca

SEQ ID NO: 1136987 - RNA, 19 nt, Artificial Sequence
  Description of Artificial Sequence: Synthetic oligonucleotide
  Antisense strand to SEQ ID NO: 1136986
ugcuacucacaacucccac

SEQ ID NO: 1136988 - RNA, 19 nt, Artificial Sequence
  Description of Artificial Sequence: Synthetic oligonucleotide
  Sense strand starting at position 2702 of SEQ ID NO: 916186
uugugaguagcaggaagaa

SEQ ID NO: 1136989 - RNA, 19 nt, Artificial Sequence
  Description of Artificial Sequence: Synthetic oligonucleotide
  Antisense strand to SEQ ID NO: 1136988
uucuuccugcuacucacaa

SEQ ID NO: 1136990 - RNA, 19 nt, Artificial Sequence
  Description of Artificial Sequence: Synthetic oligonucleotide
  Sense strand starting at position 2754 of SEQ ID NO: 916186
ucuuuaauggcuuauguuu

SEQ ID NO: 1136991 - RNA, 19 nt, Artificial Sequence
  Description of Artificial Sequence: Synthetic oligonucleotide
  Antisense strand to SEQ ID NO: 1136990
aaacauaagccauuaaaga

SEQ ID NO: 1136992 - RNA, 19 nt, Artificial Sequence
  Description of Artificial Sequence: Synthetic oligonucleotide
  Sense strand starting at position 2855 of SEQ ID NO: 916186
ucagcuugucgcugaugaa

SEQ ID NO: 1136993 - RNA, 19 nt, Artificial Sequence
  Description of Artificial Sequence: Synthetic oligonucleotide
  Antisense strand to SEQ ID NO: 1136992
uucaucagcgacaagcuga

SEQ ID NO: 1136994 - RNA, 19 nt, Artificial Sequence
  Description of Artificial Sequence: Synthetic oligonucleotide
  Sense strand starting at position 2856 of SEQ ID NO: 916186
cagcuugucgcugaugaac

SEQ ID NO: 1136995 - RNA, 19 nt, Artificial Sequence
  Description of Artificial Sequence: Synthetic oligonucleotide
  Antisense strand to SEQ ID NO: 1136994
guucaucagcgacaagcug

SEQ ID NO: 1136996 - RNA, 19 nt, Artificial Sequence
  Description of Artificial Sequence: Synthetic oligonucleotide
  Sense strand starting at position 2924 of SEQ ID NO: 916186
uugagaaucuagcagggaa

SEQ ID NO: 1136997 - RNA, 19 nt, Artificial Sequence
  Description of Artificial Sequence: Synthetic oligonucleotide
  Antisense strand to SEQ ID NO: 1136996
uucccugcuagauucucaa

SEQ ID NO: 1136998 - RNA, 19 nt, Artificial Sequence
  Description of Artificial Sequence: Synthetic oligonucleotide
  Sense strand starting at position 3644 of SEQ ID NO: 916186
ccuauuguuuagcaagcau

SEQ ID NO: 1136999 - RNA, 19 nt, Artificial Sequence
  Description of Artificial Sequence: Synthetic oligonucleotide
  Antisense strand to SEQ ID NO: 1136998
augcuugcuaaacaauagg

SEQ ID NO: 1137000 - RNA, 19 nt, Artificial Sequence
  Description of Artificial Sequence: Synthetic oligonucleotide
  Sense strand starting at position 3655 of SEQ ID NO: 916186
gcaagcauucuaggacuuu

SEQ ID NO: 1137001 - RNA, 19 nt, Artificial Sequence
  Description of Artificial Sequence: Synthetic oligonucleotide
  Antisense strand to SEQ ID NO: 1137000
aaaguccuagaaugcuugc

SEQ ID NO: 1137002 - RNA, 19 nt, Artificial Sequence
  Description of Artificial Sequence: Synthetic oligonucleotide
  Sense strand starting at position 476 of SEQ ID NO: 916187
gacaccugcgcuuuguauu

SEQ ID NO: 1137003 - RNA, 19 nt, Artificial Sequence
  Description of Artificial Sequence: Synthetic oligonucleotide
  Antisense strand to SEQ ID NO: 1137002
aauacaaagcgcagguguc

SEQ ID NO: 1137004 - RNA, 19 nt, Artificial Sequence
  Description of Artificial Sequence: Synthetic oligonucleotide
  Sense strand starting at position 499 of SEQ ID NO: 916187
guaggaagauugguuucca

SEQ ID NO: 1137005 - RNA, 19 nt, Artificial Sequence
  Description of Artificial Sequence: Synthetic oligonucleotide
  Antisense strand to SEQ ID NO: 1137004
uggaaaccaaucuuccuac

SEQ ID NO: 1137006 - RNA, 19 nt, Artificial Sequence
  Description of Artificial Sequence: Synthetic oligonucleotide
  Sense strand starting at position 500 of SEQ ID NO: 916187
uaggaagauugguuuccau

SEQ ID NO: 1137007 - RNA, 19 nt, Artificial Sequence
  Description of Artificial Sequence: Synthetic oligonucleotide
  Antisense strand to SEQ ID NO: 1137006
auggaaaccaaucuuccua

SEQ ID NO: 1137008 - RNA, 19 nt, Artificial Sequence
  Description of Artificial Sequence: Synthetic oligonucleotide
  Sense strand starting at position 503 of SEQ ID NO: 916187
gaagauugguuuccaugau

SEQ ID NO: 1137009 - RNA, 19 nt, Artificial Sequence
  Description of Artificial Sequence: Synthetic oligonucleotide
  Antisense strand to SEQ ID NO: 1137008
aucauggaaaccaaucuuc

SEQ ID NO: 1137010 - RNA, 19 nt, Artificial Sequence
  Description of Artificial Sequence: Synthetic oligonucleotide
  Sense strand starting at position 1034 of SEQ ID NO: 916187
gagagaaccguauggcuuu

SEQ ID NO: 1137011 - RNA, 19 nt, Artificial Sequence
  Description of Artificial Sequence: Synthetic oligonucleotide
  Antisense strand to SEQ ID NO: 1137010
aaagccauacgguucucuc

SEQ ID NO: 1137012 - RNA, 19 nt, Artificial Sequence
  Description of Artificial Sequence: Synthetic oligonucleotide
  Sense strand starting at position 1040 of SEQ ID NO: 916187
accguauggcuuuaaguag

SEQ ID NO: 1137013 - RNA, 19 nt, Artificial Sequence
  Description of Artificial Sequence: Synthetic oligonucleotide
  Antisense strand to SEQ ID NO: 1137012
cuacuuaaagccauacggu

SEQ ID NO: 1137014 - RNA, 19 nt, Artificial Sequence
  Description of Artificial Sequence: Synthetic oligonucleotide
  Sense strand starting at position 1092 of SEQ ID NO: 916187
ggaaaccuuugagagguaa

SEQ ID NO: 1137015 - RNA, 19 nt, Artificial Sequence
  Description of Artificial Sequence: Synthetic oligonucleotide
  Antisense strand to SEQ ID NO: 1137014
uuaccucucaaagguuucc

SEQ ID NO: 1137016 - RNA, 19 nt, Artificial Sequence
  Description of Artificial Sequence: Synthetic oligonucleotide
  Sense strand starting at position 1191 of SEQ ID NO: 916187
gggagagcuucggcugaga

SEQ ID NO: 1137017 - RNA, 19 nt, Artificial Sequence
  Description of Artificial Sequence: Synthetic oligonucleotide
  Antisense strand to SEQ ID NO: 1137016
ucucagccgaagcucuccc

SEQ ID NO: 1137018 - RNA, 19 nt, Artificial Sequence
  Description of Artificial Sequence: Synthetic oligonucleotide
  Sense strand starting at position 1402 of SEQ ID NO: 916187
gggagcugacucuaggcau

SEQ ID NO: 1137019 - RNA, 19 nt, Artificial Sequence
  Description of Artificial Sequence: Synthetic oligonucleotide
  Antisense strand to SEQ ID NO: 1137018
augccuagagucagcuccc

SEQ ID NO: 1137020 - RNA, 19 nt, Artificial Sequence
  Description of Artificial Sequence: Synthetic oligonucleotide
  Sense strand starting at position 2098 of SEQ ID NO: 916187
ccggguuucggauagguag

SEQ ID NO: 1137021 - RNA, 19 nt, Artificial Sequence
  Description of Artificial Sequence: Synthetic oligonucleotide
  Antisense strand to SEQ ID NO: 1137020
cuaccuauccgaaacccgg

SEQ ID NO: 1137022 - RNA, 19 nt, Artificial Sequence
  Description of Artificial Sequence: Synthetic oligonucleotide
  Sense strand starting at position 2193 of SEQ ID NO: 916187
ggcauucgauugguaauaa

SEQ ID NO: 1137023 - RNA, 19 nt, Artificial Sequence
  Description of Artificial Sequence: Synthetic oligonucleotide
  Antisense strand to SEQ ID NO: 1137022
uuauuaccaaucgaaugcc

SEQ ID NO: 1137024 - RNA, 19 nt, Artificial Sequence
  Description of Artificial Sequence: Synthetic oligonucleotide
  Sense strand starting at position 2401 of SEQ ID NO: 916187
aggauuuggucugggauau

SEQ ID NO: 1137025 - RNA, 19 nt, Artificial Sequence
  Description of Artificial Sequence: Synthetic oligonucleotide
  Antisense strand to SEQ ID NO: 1137024
auaucccagaccaaauccu

SEQ ID NO: 1137026 - RNA, 19 nt, Artificial Sequence
  Description of Artificial Sequence: Synthetic oligonucleotide
  Sense strand starting at position 2529 of SEQ ID NO: 916187
uuggaaugaaaguguuuga

SEQ ID NO: 1137027 - RNA, 19 nt, Artificial Sequence
  Description of Artificial Sequence: Synthetic oligonucleotide
  Antisense strand to SEQ ID NO: 1137026
ucaaacacuuucauuccaa

SEQ ID NO: 1137028 - RNA, 19 nt, Artificial Sequence
  Description of Artificial Sequence: Synthetic oligonucleotide
  Sense strand starting at position 2620 of SEQ ID NO: 916187
acuggagagucagagaauu

SEQ ID NO: 1137029 - RNA, 19 nt, Artificial Sequence
  Description of Artificial Sequence: Synthetic oligonucleotide
  Antisense strand to SEQ ID NO: 1137028
aauucucugacucuccagu

SEQ ID NO: 1137030 - RNA, 19 nt, Artificial Sequence
  Description of Artificial Sequence: Synthetic oligonucleotide
  Sense strand starting at position 2716 of SEQ ID NO: 916187
uuuggaaauuuccaagagu

SEQ ID NO: 1137031 - RNA, 19 nt, Artificial Sequence
  Description of Artificial Sequence: Synthetic oligonucleotide
  Antisense strand to SEQ ID NO: 1137030
acucuuggaaauuuccaaa

SEQ ID NO: 1137032 - RNA, 19 nt, Artificial Sequence
  Description of Artificial Sequence: Synthetic oligonucleotide
  Sense strand starting at position 2729 of SEQ ID NO: 916187
aagaguuaguaagucaucu

SEQ ID NO: 1137033 - RNA, 19 nt, Artificial Sequence
  Description of Artificial Sequence: Synthetic oligonucleotide
  Antisense strand to SEQ ID NO: 1137032
agaugacuuacuaacucuu

SEQ ID NO: 1137034 - RNA, 19 nt, Artificial Sequence
  Description of Artificial Sequence: Synthetic oligonucleotide
  Sense strand starting at position 2733 of SEQ ID NO: 916187
guuaguaagucaucucuau

SEQ ID NO: 1137035 - RNA, 19 nt, Artificial Sequence
  Description of Artificial Sequence: Synthetic oligonucleotide
  Antisense strand to SEQ ID NO: 1137034
auagagaugacuuacuaac

SEQ ID NO: 1137036 - RNA, 19 nt, Artificial Sequence
  Description of Artificial Sequence: Synthetic oligonucleotide
  Sense strand starting at position 2737 of SEQ ID NO: 916187
guaagucaucucuaucuua

SEQ ID NO: 1137037 - RNA, 19 nt, Artificial Sequence
  Description of Artificial Sequence: Synthetic oligonucleotide
  Antisense strand to SEQ ID NO: 1137036
uaagauagagaugacuuac

SEQ ID NO: 1137038 - RNA, 19 nt, Artificial Sequence
  Description of Artificial Sequence: Synthetic oligonucleotide
  Sense strand starting at position 2740 of SEQ ID NO: 916187
agucaucucuaucuuagag

SEQ ID NO: 1137039 - RNA, 19 nt, Artificial Sequence
  Description of Artificial Sequence: Synthetic oligonucleotide
  Antisense strand to SEQ ID NO: 1137038
cucuaagauagagaugacu

SEQ ID NO: 1137040 - RNA, 19 nt, Artificial Sequence
  Description of Artificial Sequence: Synthetic oligonucleotide
  Sense strand starting at position 2915 of SEQ ID NO: 916187
aaggaagguuugccauaca

SEQ ID NO: 1137041 - RNA, 19 nt, Artificial Sequence
  Description of Artificial Sequence: Synthetic oligonucleotide
  Antisense strand to SEQ ID NO: 1137040
uguauggcaaaccuuccuu

SEQ ID NO: 1137042 - RNA, 19 nt, Artificial Sequence
  Description of Artificial Sequence: Synthetic oligonucleotide
  Sense strand starting at position 2918 of SEQ ID NO: 916187
gaagguuugccauacaguc

SEQ ID NO: 1137043 - RNA, 19 nt, Artificial Sequence
  Description of Artificial Sequence: Synthetic oligonucleotide
  Antisense strand to SEQ ID NO: 1137042
gacuguauggcaaaccuuc

SEQ ID NO: 1137044 - RNA, 19 nt, Artificial Sequence
  Description of Artificial Sequence: Synthetic oligonucleotide
  Sense strand starting at position 2996 of SEQ ID NO: 916187
aggguacaccgaugacuau

SEQ ID NO: 1137045 - RNA, 19 nt, Artificial Sequence
  Description of Artificial Sequence: Synthetic oligonucleotide
  Antisense strand to SEQ ID NO: 1137044
auagucaucgguguacccu

SEQ ID NO: 1137046 - RNA, 19 nt, Artificial Sequence
  Description of Artificial Sequence: Synthetic oligonucleotide
  Sense strand starting at position 2997 of SEQ ID NO: 916187
ggguacaccgaugacuauu

SEQ ID NO: 1137047 - RNA, 19 nt, Artificial Sequence
  Description of Artificial Sequence: Synthetic oligonucleotide
  Antisense strand to SEQ ID NO: 1137046
aauagucaucgguguaccc

SEQ ID NO: 1137048 - RNA, 19 nt, Artificial Sequence
  Description of Artificial Sequence: Synthetic oligonucleotide
  Sense strand starting at position 3005 of SEQ ID NO: 916187
cgaugacuauuguuacuag

SEQ ID NO: 1137049 - RNA, 19 nt, Artificial Sequence
  Description of Artificial Sequence: Synthetic oligonucleotide
  Antisense strand to SEQ ID NO: 1137048
cuaguaacaauagucaucg

SEQ ID NO: 1137050 - RNA, 19 nt, Artificial Sequence
  Description of Artificial Sequence: Synthetic oligonucleotide
  Sense strand starting at position 3008 of SEQ ID NO: 916187
ugacuauuguuacuaguua

SEQ ID NO: 1137051 - RNA, 19 nt, Artificial Sequence
  Description of Artificial Sequence: Synthetic oligonucleotide
  Antisense strand to SEQ ID NO: 1137050
uaacuaguaacaauaguca

SEQ ID NO: 1137052 - RNA, 19 nt, Artificial Sequence
  Description of Artificial Sequence: Synthetic oligonucleotide
  Sense strand starting at position 3044 of SEQ ID NO: 916187
aguguuguccuaggaucua

SEQ ID NO: 1137053 - RNA, 19 nt, Artificial Sequence
  Description of Artificial Sequence: Synthetic oligonucleotide
  Antisense strand to SEQ ID NO: 1137052
uagauccuaggacaacacu

SEQ ID NO: 1137054 - RNA, 19 nt, Artificial Sequence
  Description of Artificial Sequence: Synthetic oligonucleotide
  Sense strand starting at position 3088 of SEQ ID NO: 916187
gagggaaguguuggucaua

SEQ ID NO: 1137055 - RNA, 19 nt, Artificial Sequence
  Description of Artificial Sequence: Synthetic oligonucleotide
  Antisense strand to SEQ ID NO: 1137054
uaugaccaacacuucccuc

SEQ ID NO: 1137056 - RNA, 19 nt, Artificial Sequence
  Description of Artificial Sequence: Synthetic oligonucleotide
  Sense strand starting at position 3089 of SEQ ID NO: 916187
agggaaguguuggucauaa

SEQ ID NO: 1137057 - RNA, 19 nt, Artificial Sequence
  Description of Artificial Sequence: Synthetic oligonucleotide
  Antisense strand to SEQ ID NO: 1137056
uuaugaccaacacuucccu

SEQ ID NO: 1137058 - RNA, 19 nt, Artificial Sequence
  Description of Artificial Sequence: Synthetic oligonucleotide
  Sense strand starting at position 3091 of SEQ ID NO: 916187
ggaaguguuggucauaaga

SEQ ID NO: 1137059 - RNA, 19 nt, Artificial Sequence
  Description of Artificial Sequence: Synthetic oligonucleotide
  Antisense strand to SEQ ID NO: 1137058
ucuuaugaccaacacuucc

SEQ ID NO: 1137060 - RNA, 19 nt, Artificial Sequence
  Description of Artificial Sequence: Synthetic oligonucleotide
  Sense strand starting at position 3101 of SEQ ID NO: 916187
gucauaagaugauuaccuu

SEQ ID NO: 1137061 - RNA, 19 nt, Artificial Sequence
  Description of Artificial Sequence: Synthetic oligonucleotide
  Antisense strand to SEQ ID NO: 1137060
aagguaaucaucuuaugac

SEQ ID NO: 1137062 - RNA, 19 nt, Artificial Sequence
  Description of Artificial Sequence: Synthetic oligonucleotide
  Sense strand starting at position 3144 of SEQ ID NO: 916187
uuauguaaaucugucagau

SEQ ID NO: 1137063 - RNA, 19 nt, Artificial Sequence
  Description of Artificial Sequence: Synthetic oligonucleotide
  Antisense strand to SEQ ID NO: 1137062
aucugacagauuuacauaa

SEQ ID NO: 1137064 - RNA, 19 nt, Artificial Sequence
  Description of Artificial Sequence: Synthetic oligonucleotide
  Sense strand starting at position 3180 of SEQ ID NO: 916187
guugaucacugggaagaaa

SEQ ID NO: 1137065 - RNA, 19 nt, Artificial Sequence
  Description of Artificial Sequence: Synthetic oligonucleotide
  Antisense strand to SEQ ID NO: 1137064
uuucuucccagugaucaac

SEQ ID NO: 1137066 - RNA, 19 nt, Artificial Sequence
  Description of Artificial Sequence: Synthetic oligonucleotide
  Sense strand starting at position 3199 of SEQ ID NO: 916187
cuagccauuucuuagagga

SEQ ID NO: 1137067 - RNA, 19 nt, Artificial Sequence
  Description of Artificial Sequence: Synthetic oligonucleotide
  Antisense strand to SEQ ID NO: 1137066
uccucuaagaaauggcuag

SEQ ID NO: 1137068 - RNA, 19 nt, Artificial Sequence
  Description of Artificial Sequence: Synthetic oligonucleotide
  Sense strand starting at position 3201 of SEQ ID NO: 916187
agccauuucuuagaggaag

SEQ ID NO: 1137069 - RNA, 19 nt, Artificial Sequence
  Description of Artificial Sequence: Synthetic oligonucleotide
  Antisense strand to SEQ ID NO: 1137068
cuuccucuaagaaauggcu

SEQ ID NO: 1137070 - RNA, 19 nt, Artificial Sequence
  Description of Artificial Sequence: Synthetic oligonucleotide
  Sense strand starting at position 3234 of SEQ ID NO: 916187
aggccugcagcugauaaau

SEQ ID NO: 1137071 - RNA, 19 nt, Artificial Sequence
  Description of Artificial Sequence: Synthetic oligonucleotide
  Antisense strand to SEQ ID NO: 1137070
auuuaucagcugcaggccu

SEQ ID NO: 1137072 - RNA, 19 nt, Artificial Sequence
  Description of Artificial Sequence: Synthetic oligonucleotide
  Sense strand starting at position 3283 of SEQ ID NO: 916187
ucagccuguguuuaccaaa

SEQ ID NO: 1137073 - RNA, 19 nt, Artificial Sequence
  Description of Artificial Sequence: Synthetic oligonucleotide
  Antisense strand to SEQ ID NO: 1137072
uuugguaaacacaggcuga

SEQ ID NO: 1137074 - RNA, 19 nt, Artificial Sequence
  Description of Artificial Sequence: Synthetic oligonucleotide
  Sense strand starting at position 3552 of SEQ ID NO: 916187
ggaugaaccuuagagagaa

SEQ ID NO: 1137075 - RNA, 19 nt, Artificial Sequence
  Description of Artificial Sequence: Synthetic oligonucleotide
  Antisense strand to SEQ ID NO: 1137074
uucucucuaagguucaucc

SEQ ID NO: 1137076 - RNA, 19 nt, Artificial Sequence
  Description of Artificial Sequence: Synthetic oligonucleotide
  Sense strand starting at position 3892 of SEQ ID NO: 916187
augcccauuuguuagagga

SEQ ID NO: 1137077 - RNA, 19 nt, Artificial Sequence
  Description of Artificial Sequence: Synthetic oligonucleotide
  Antisense strand to SEQ ID NO: 1137076
uccucuaacaaaugggcau

SEQ ID NO: 1137078 - RNA, 19 nt, Artificial Sequence
  Description of Artificial Sequence: Synthetic oligonucleotide
  Sense strand starting at position 3894 of SEQ ID NO: 916187
gcccauuuguuagaggaag

SEQ ID NO: 1137079 - RNA, 19 nt, Artificial Sequence
  Description of Artificial Sequence: Synthetic oligonucleotide
  Antisense strand to SEQ ID NO: 1137078
cuuccucuaacaaaugggc

SEQ ID NO: 1137080 - RNA, 19 nt, Artificial Sequence
  Description of Artificial Sequence: Synthetic oligonucleotide
  Sense strand starting at position 3945 of SEQ ID NO: 916187
agaguaaacuuccuggacu

SEQ ID NO: 1137081 - RNA, 19 nt, Artificial Sequence
  Description of Artificial Sequence: Synthetic oligonucleotide
  Antisense strand to SEQ ID NO: 1137080
aguccaggaaguuuacucu

SEQ ID NO: 1137082 - RNA, 19 nt, Artificial Sequence
  Description of Artificial Sequence: Synthetic oligonucleotide
  Sense strand starting at position 107 of SEQ ID NO: 916188
cugccaacacuagaguuua

SEQ ID NO: 1137083 - RNA, 19 nt, Artificial Sequence
  Description of Artificial Sequence: Synthetic oligonucleotide
  Antisense strand to SEQ ID NO: 1137082
uaaacucuaguguuggcag

SEQ ID NO: 1137084 - RNA, 19 nt, Artificial Sequence
  Description of Artificial Sequence: Synthetic oligonucleotide
  Sense strand starting at position 117 of SEQ ID NO: 916188
uagaguuuaccaggaagua

SEQ ID NO: 1137085 - RNA, 19 nt, Artificial Sequence
  Description of Artificial Sequence: Synthetic oligonucleotide
  Antisense strand to SEQ ID NO: 1137084
uacuuccugguaaacucua

SEQ ID NO: 1137086 - RNA, 19 nt, Artificial Sequence
  Description of Artificial Sequence: Synthetic oligonucleotide
  Sense strand starting at position 161 of SEQ ID NO: 916188
uguauaagugacugccaga

SEQ ID NO: 1137087 - RNA, 19 nt, Artificial Sequence
  Description of Artificial Sequence: Synthetic oligonucleotide
  Antisense strand to SEQ ID NO: 1137086
ucuggcagucacuuauaca

SEQ ID NO: 1137088 - RNA, 19 nt, Artificial Sequence
  Description of Artificial Sequence: Synthetic oligonucleotide
  Sense strand starting at position 490 of SEQ ID NO: 916188
ggaacuguucugggcccua

SEQ ID NO: 1137089 - RNA, 19 nt, Artificial Sequence
  Description of Artificial Sequence: Synthetic oligonucleotide
  Antisense strand to SEQ ID NO: 1137088
uagggcccagaacaguucc

SEQ ID NO: 1137090 - RNA, 19 nt, Artificial Sequence
  Description of Artificial Sequence: Synthetic oligonucleotide
  Sense strand starting at position 559 of SEQ ID NO: 916188
cgaagaauuuagcaaauaa

SEQ ID NO: 1137091 - RNA, 19 nt, Artificial Sequence
  Description of Artificial Sequence: Synthetic oligonucleotide
  Antisense strand to SEQ ID NO: 1137090
uuauuugcuaaauucuucg

SEQ ID NO: 1137092 - RNA, 19 nt, Artificial Sequence
  Description of Artificial Sequence: Synthetic oligonucleotide
  Sense strand starting at position 592 of SEQ ID NO: 916188
gugaauaaauuagucauca

SEQ ID NO: 1137093 - RNA, 19 nt, Artificial Sequence
  Description of Artificial Sequence: Synthetic oligonucleotide
  Antisense strand to SEQ ID NO: 1137092
ugaugacuaauuuauucac

SEQ ID NO: 1137094 - RNA, 19 nt, Artificial Sequence
  Description of Artificial Sequence: Synthetic oligonucleotide
  Sense strand starting at position 753 of SEQ ID NO: 916188
uguaucuaguuccugaaac

SEQ ID NO: 1137095 - RNA, 19 nt, Artificial Sequence
  Description of Artificial Sequence: Synthetic oligonucleotide
  Antisense strand to SEQ ID NO: 1137094
guuucaggaacuagauaca

SEQ ID NO: 1137096 - RNA, 19 nt, Artificial Sequence
  Description of Artificial Sequence: Synthetic oligonucleotide
  Sense strand starting at position 808 of SEQ ID NO: 916188
cguaguggaaaucauaacu

SEQ ID NO: 1137097 - RNA, 19 nt, Artificial Sequence
  Description of Artificial Sequence: Synthetic oligonucleotide
  Antisense strand to SEQ ID NO: 1137096
aguuaugauuuccacuacg

SEQ ID NO: 1137098 - RNA, 19 nt, Artificial Sequence
  Description of Artificial Sequence: Synthetic oligonucleotide
  Sense strand starting at position 1049 of SEQ ID NO: 916188
uggucauuacuuugggaau

SEQ ID NO: 1137099 - RNA, 19 nt, Artificial Sequence
  Description of Artificial Sequence: Synthetic oligonucleotide
  Antisense strand to SEQ ID NO: 1137098
auucccaaaguaaugacca

SEQ ID NO: 1137100 - RNA, 19 nt, Artificial Sequence
  Description of Artificial Sequence: Synthetic oligonucleotide
  Sense strand starting at position 1060 of SEQ ID NO: 916188
uugggaauugaguacgcua

SEQ ID NO: 1137101 - RNA, 19 nt, Artificial Sequence
  Description of Artificial Sequence: Synthetic oligonucleotide
  Antisense strand to SEQ ID NO: 1137100
uagcguacucaauucccaa

SEQ ID NO: 1137102 - RNA, 19 nt, Artificial Sequence
  Description of Artificial Sequence: Synthetic oligonucleotide
  Sense strand starting at position 1065 of SEQ ID NO: 916188
aauugaguacgcuaggguu

SEQ ID NO: 1137103 - RNA, 19 nt, Artificial Sequence
  Description of Artificial Sequence: Synthetic oligonucleotide
  Antisense strand to SEQ ID NO: 1137102
aacccuagcguacucaauu

SEQ ID NO: 1137104 - RNA, 19 nt, Artificial Sequence
  Description of Artificial Sequence: Synthetic oligonucleotide
  Sense strand starting at position 1159 of SEQ ID NO: 916188
gaggauuaaugacugcauu

SEQ ID NO: 1137105 - RNA, 19 nt, Artificial Sequence
  Description of Artificial Sequence: Synthetic oligonucleotide
  Antisense strand to SEQ ID NO: 1137104
aaugcagucauuaauccuc

SEQ ID NO: 1137106 - RNA, 19 nt, Artificial Sequence
  Description of Artificial Sequence: Synthetic oligonucleotide
  Sense strand starting at position 1160 of SEQ ID NO: 916188
aggauuaaugacugcauua

SEQ ID NO: 1137107 - RNA, 19 nt, Artificial Sequence
  Description of Artificial Sequence: Synthetic oligonucleotide
  Antisense strand to SEQ ID NO: 1137106
uaaugcagucauuaauccu

SEQ ID NO: 1137108 - RNA, 19 nt, Artificial Sequence
  Description of Artificial Sequence: Synthetic oligonucleotide
  Sense strand starting at position 1271 of SEQ ID NO: 916188
gggcaacuaucagcaggaa

SEQ ID NO: 1137109 - RNA, 19 nt, Artificial Sequence
  Description of Artificial Sequence: Synthetic oligonucleotide
  Antisense strand to SEQ ID NO: 1137108
uuccugcugauaguugccc

SEQ ID NO: 1137110 - RNA, 19 nt, Artificial Sequence
  Description of Artificial Sequence: Synthetic oligonucleotide
  Sense strand starting at position 1272 of SEQ ID NO: 916188
ggcaacuaucagcaggaau

SEQ ID NO: 1137111 - RNA, 19 nt, Artificial Sequence
  Description of Artificial Sequence: Synthetic oligonucleotide
  Antisense strand to SEQ ID NO: 1137110
auuccugcugauaguugcc

SEQ ID NO: 1137112 - RNA, 19 nt, Artificial Sequence
  Description of Artificial Sequence: Synthetic oligonucleotide
  Sense strand starting at position 1442 of SEQ ID NO: 916188
aggagauguugcccuaggu

SEQ ID NO: 1137113 - RNA, 19 nt, Artificial Sequence
  Description of Artificial Sequence: Synthetic oligonucleotide
  Antisense strand to SEQ ID NO: 1137112
accuagggcaacaucuccu

SEQ ID NO: 1137114 - RNA, 19 nt, Artificial Sequence
  Description of Artificial Sequence: Synthetic oligonucleotide
  Sense strand starting at position 2093 of SEQ ID NO: 916188
gcuuguuggccugcgauua

SEQ ID NO: 1137115 - RNA, 19 nt, Artificial Sequence
  Description of Artificial Sequence: Synthetic oligonucleotide
  Antisense strand to SEQ ID NO: 1137114
uaaucgcaggccaacaagc

SEQ ID NO: 1137116 - RNA, 19 nt, Artificial Sequence
  Description of Artificial Sequence: Synthetic oligonucleotide
  Sense strand starting at position 2215 of SEQ ID NO: 916188
accuuauccgaauggucau

SEQ ID NO: 1137117 - RNA, 19 nt, Artificial Sequence
  Description of Artificial Sequence: Synthetic oligonucleotide
  Antisense strand to SEQ ID NO: 1137116
augaccauucggauaaggu

SEQ ID NO: 1137118 - RNA, 19 nt, Artificial Sequence
  Description of Artificial Sequence: Synthetic oligonucleotide
  Sense strand starting at position 2236 of SEQ ID NO: 916188
ggcaucuggacuugaguua

SEQ ID NO: 1137119 - RNA, 19 nt, Artificial Sequence
  Description of Artificial Sequence: Synthetic oligonucleotide
  Antisense strand to SEQ ID NO: 1137118
uaacucaaguccagaugcc

SEQ ID NO: 1137120 - RNA, 19 nt, Artificial Sequence
  Description of Artificial Sequence: Synthetic oligonucleotide
  Sense strand starting at position 2237 of SEQ ID NO: 916188
gcaucuggacuugaguuaa

SEQ ID NO: 1137121 - RNA, 19 nt, Artificial Sequence
  Description of Artificial Sequence: Synthetic oligonucleotide
  Antisense strand to SEQ ID NO: 1137120
uuaacucaaguccagaugc

SEQ ID NO: 1137122 - RNA, 19 nt, Artificial Sequence
  Description of Artificial Sequence: Synthetic oligonucleotide
  Sense strand starting at position 2303 of SEQ ID NO: 916188
aggaucacucuccgaacuu

SEQ ID NO: 1137123 - RNA, 19 nt, Artificial Sequence
  Description of Artificial Sequence: Synthetic oligonucleotide
  Antisense strand to SEQ ID NO: 1137122
aaguucggagagugauccu

SEQ ID NO: 1137124 - RNA, 19 nt, Artificial Sequence
  Description of Artificial Sequence: Synthetic oligonucleotide
  Sense strand starting at position 2315 of SEQ ID NO: 916188
cgaacuuggccugagucua

SEQ ID NO: 1137125 - RNA, 19 nt, Artificial Sequence
  Description of Artificial Sequence: Synthetic oligonucleotide
  Antisense strand to SEQ ID NO: 1137124
uagacucaggccaaguucg

SEQ ID NO: 1137126 - RNA, 19 nt, Artificial Sequence
  Description of Artificial Sequence: Synthetic oligonucleotide
  Sense strand starting at position 2388 of SEQ ID NO: 916188
cucauacuaguuggguuaa

SEQ ID NO: 1137127 - RNA, 19 nt, Artificial Sequence
  Description of Artificial Sequence: Synthetic oligonucleotide
  Antisense strand to SEQ ID NO: 1137126
uuaacccaacuaguaugag

SEQ ID NO: 1137128 - RNA, 19 nt, Artificial Sequence
  Description of Artificial Sequence: Synthetic oligonucleotide
  Sense strand starting at position 2390 of SEQ ID NO: 916188
cauacuaguuggguuaacu

SEQ ID NO: 1137129 - RNA, 19 nt, Artificial Sequence
  Description of Artificial Sequence: Synthetic oligonucleotide
  Antisense strand to SEQ ID NO: 1137128
aguuaacccaacuaguaug

SEQ ID NO: 1137130 - RNA, 19 nt, Artificial Sequence
  Description of Artificial Sequence: Synthetic oligonucleotide
  Sense strand starting at position 2407 of SEQ ID NO: 916188
cuauauucccauuagcagu

SEQ ID NO: 1137131 - RNA, 19 nt, Artificial Sequence
  Description of Artificial Sequence: Synthetic oligonucleotide
  Antisense strand to SEQ ID NO: 1137130
acugcuaaugggaauauag

SEQ ID NO: 1137132 - RNA, 19 nt, Artificial Sequence
  Description of Artificial Sequence: Synthetic oligonucleotide
  Sense strand starting at position 2463 of SEQ ID NO: 916188
guauuuggguaagacaacu

SEQ ID NO: 1137133 - RNA, 19 nt, Artificial Sequence
  Description of Artificial Sequence: Synthetic oligonucleotide
  Antisense strand to SEQ ID NO: 1137132
aguugucuuacccaaauac

SEQ ID NO: 1137134 - RNA, 19 nt, Artificial Sequence
  Description of Artificial Sequence: Synthetic oligonucleotide
  Sense strand starting at position 2505 of SEQ ID NO: 916188
ggaguaagauguucgacca

SEQ ID NO: 1137135 - RNA, 19 nt, Artificial Sequence
  Description of Artificial Sequence: Synthetic oligonucleotide
  Antisense strand to SEQ ID NO: 1137134
uggucgaacaucuuacucc

SEQ ID NO: 1137136 - RNA, 19 nt, Artificial Sequence
  Description of Artificial Sequence: Synthetic oligonucleotide
  Sense strand starting at position 2506 of SEQ ID NO: 916188
gaguaagauguucgaccau

SEQ ID NO: 1137137 - RNA, 19 nt, Artificial Sequence
  Description of Artificial Sequence: Synthetic oligonucleotide
  Antisense strand to SEQ ID NO: 1137136
auggucgaacaucuuacuc

SEQ ID NO: 1137138 - RNA, 19 nt, Artificial Sequence
  Description of Artificial Sequence: Synthetic oligonucleotide
  Sense strand starting at position 2517 of SEQ ID NO: 916188
ucgaccauacagugaauaa

SEQ ID NO: 1137139 - RNA, 19 nt, Artificial Sequence
  Description of Artificial Sequence: Synthetic oligonucleotide
  Antisense strand to SEQ ID NO: 1137138
uuauucacuguauggucga

SEQ ID NO: 1137140 - RNA, 19 nt, Artificial Sequence
  Description of Artificial Sequence: Synthetic oligonucleotide
  Sense strand starting at position 2553 of SEQ ID NO: 916188
cagauuagagucugguaug

SEQ ID NO: 1137141 - RNA, 19 nt, Artificial Sequence
  Description of Artificial Sequence: Synthetic oligonucleotide
  Antisense strand to SEQ ID NO: 1137140
cauaccagacucuaaucug

SEQ ID NO: 1137142 - RNA, 19 nt, Artificial Sequence
  Description of Artificial Sequence: Synthetic oligonucleotide
  Sense strand starting at position 2558 of SEQ ID NO: 916188
uagagucugguaugaagaa

SEQ ID NO: 1137143 - RNA, 19 nt, Artificial Sequence
  Description of Artificial Sequence: Synthetic oligonucleotide
  Antisense strand to SEQ ID NO: 1137142
uucuucauaccagacucua

SEQ ID NO: 1137144 - RNA, 19 nt, Artificial Sequence
  Description of Artificial Sequence: Synthetic oligonucleotide
  Sense strand starting at position 2778 of SEQ ID NO: 916188
cacuuagcacacggugaau

SEQ ID NO: 1137145 - RNA, 19 nt, Artificial Sequence
  Description of Artificial Sequence: Synthetic oligonucleotide
  Antisense strand to SEQ ID NO: 1137144
auucaccgugugcuaagug

SEQ ID NO: 1137146 - RNA, 19 nt, Artificial Sequence
  Description of Artificial Sequence: Synthetic oligonucleotide
  Sense strand starting at position 2821 of SEQ ID NO: 916188
ccuuaacuggacugaguuu

SEQ ID NO: 1137147 - RNA, 19 nt, Artificial Sequence
  Description of Artificial Sequence: Synthetic oligonucleotide
  Antisense strand to SEQ ID NO: 1137146
aaacucaguccaguuaagg

SEQ ID NO: 1137148 - RNA, 19 nt, Artificial Sequence
  Description of Artificial Sequence: Synthetic oligonucleotide
  Sense strand starting at position 2879 of SEQ ID NO: 916188
aguuuacauccugauuguu

SEQ ID NO: 1137149 - RNA, 19 nt, Artificial Sequence
  Description of Artificial Sequence: Synthetic oligonucleotide
  Antisense strand to SEQ ID NO: 1137148
aacaaucaggauguaaacu

SEQ ID NO: 1137150 - RNA, 19 nt, Artificial Sequence
  Description of Artificial Sequence: Synthetic oligonucleotide
  Sense strand starting at position 2942 of SEQ ID NO: 916188
caccgauaacgguaaacuu

SEQ ID NO: 1137151 - RNA, 19 nt, Artificial Sequence
  Description of Artificial Sequence: Synthetic oligonucleotide
  Antisense strand to SEQ ID NO: 1137150
aaguuuaccguuaucggug

SEQ ID NO: 1137152 - RNA, 19 nt, Artificial Sequence
  Description of Artificial Sequence: Synthetic oligonucleotide
  Sense strand starting at position 2950 of SEQ ID NO: 916188
acgguaaacuuccuaaacu

SEQ ID NO: 1137153 - RNA, 19 nt, Artificial Sequence
  Description of Artificial Sequence: Synthetic oligonucleotide
  Antisense strand to SEQ ID NO: 1137152
aguuuaggaaguuuaccgu

SEQ ID NO: 1137154 - RNA, 19 nt, Artificial Sequence
  Description of Artificial Sequence: Synthetic oligonucleotide
  Sense strand starting at position 3634 of SEQ ID NO: 916188
acuauuagguaccugagaa

SEQ ID NO: 1137155 - RNA, 19 nt, Artificial Sequence
  Description of Artificial Sequence: Synthetic oligonucleotide
  Antisense strand to SEQ ID NO: 1137154
uucucagguaccuaauagu

SEQ ID NO: 1137156 - RNA, 19 nt, Artificial Sequence
  Description of Artificial Sequence: Synthetic oligonucleotide
  Sense strand starting at position 3930 of SEQ ID NO: 916188
acccuaccaggauguauua

SEQ ID NO: 1137157 - RNA, 19 nt, Artificial Sequence
  Description of Artificial Sequence: Synthetic oligonucleotide
  Antisense strand to SEQ ID NO: 1137156
uaauacauccugguagggu

SEQ ID NO: 1137158 - RNA, 19 nt, Artificial Sequence
  Description of Artificial Sequence: Synthetic oligonucleotide
  Sense strand starting at position 3939 of SEQ ID NO: 916188
ggauguauuauauauuggu

SEQ ID NO: 1137159 - RNA, 19 nt, Artificial Sequence
  Description of Artificial Sequence: Synthetic oligonucleotide
  Antisense strand to SEQ ID NO: 1137158
accaauauauaauacaucc

SEQ ID NO: 1137160 - RNA, 19 nt, Artificial Sequence
  Description of Artificial Sequence: Synthetic oligonucleotide
  Sense strand starting at position 3955 of SEQ ID NO: 916188
gguuuagguaugggcaaau

SEQ ID NO: 1137161 - RNA, 19 nt, Artificial Sequence
  Description of Artificial Sequence: Synthetic oligonucleotide
  Antisense strand to SEQ ID NO: 1137160
auuugcccauaccuaaacc

SEQ ID NO: 1137162 - RNA, 19 nt, Artificial Sequence
  Description of Artificial Sequence: Synthetic oligonucleotide
  Sense strand starting at position 23 of SEQ ID NO: 916189
uaaaguuacugaucuguag

SEQ ID NO: 1137163 - RNA, 19 nt, Artificial Sequence
  Description of Artificial Sequence: Synthetic oligonucleotide
  Antisense strand to SEQ ID NO: 1137162
cuacagaucaguaacuuua

SEQ ID NO: 1137164 - RNA, 19 nt, Artificial Sequence
  Description of Artificial Sequence: Synthetic oligonucleotide
  Sense strand starting at position 114 of SEQ ID NO: 916189
uuuaguuaccucuauguua

SEQ ID NO: 1137165 - RNA, 19 nt, Artificial Sequence
  Description of Artificial Sequence: Synthetic oligonucleotide
  Antisense strand to SEQ ID NO: 1137164
uaacauagagguaacuaaa

SEQ ID NO: 1137166 - RNA, 19 nt, Artificial Sequence
  Description of Artificial Sequence: Synthetic oligonucleotide
  Sense strand starting at position 117 of SEQ ID NO: 916189
aguuaccucuauguuauga

SEQ ID NO: 1137167 - RNA, 19 nt, Artificial Sequence
  Description of Artificial Sequence: Synthetic oligonucleotide
  Antisense strand to SEQ ID NO: 1137166
ucauaacauagagguaacu

SEQ ID NO: 1137168 - RNA, 19 nt, Artificial Sequence
  Description of Artificial Sequence: Synthetic oligonucleotide
  Sense strand starting at position 149 of SEQ ID NO: 916189
uuagauuaucuauaccgca

SEQ ID NO: 1137169 - RNA, 19 nt, Artificial Sequence
  Description of Artificial Sequence: Synthetic oligonucleotide
  Antisense strand to SEQ ID NO: 1137168
ugcgguauagauaaucuaa

SEQ ID NO: 1137170 - RNA, 19 nt, Artificial Sequence
  Description of Artificial Sequence: Synthetic oligonucleotide
  Sense strand starting at position 154 of SEQ ID NO: 916189
uuaucuauaccgcaggauu

SEQ ID NO: 1137171 - RNA, 19 nt, Artificial Sequence
  Description of Artificial Sequence: Synthetic oligonucleotide
  Antisense strand to SEQ ID NO: 1137170
aauccugcgguauagauaa

SEQ ID NO: 1137172 - RNA, 19 nt, Artificial Sequence
  Description of Artificial Sequence: Synthetic oligonucleotide
  Sense strand starting at position 174 of SEQ ID NO: 916189
uccugaacucuguguagaa

SEQ ID NO: 1137173 - RNA, 19 nt, Artificial Sequence
  Description of Artificial Sequence: Synthetic oligonucleotide
  Antisense strand to SEQ ID NO: 1137172
uucuacacagaguucagga

SEQ ID NO: 1137174 - RNA, 19 nt, Artificial Sequence
  Description of Artificial Sequence: Synthetic oligonucleotide
  Sense strand starting at position 175 of SEQ ID NO: 916189
ccugaacucuguguagaau

SEQ ID NO: 1137175 - RNA, 19 nt, Artificial Sequence
  Description of Artificial Sequence: Synthetic oligonucleotide
  Antisense strand to SEQ ID NO: 1137174
auucuacacagaguucagg

SEQ ID NO: 1137176 - RNA, 19 nt, Artificial Sequence
  Description of Artificial Sequence: Synthetic oligonucleotide
  Sense strand starting at position 176 of SEQ ID NO: 916189
cugaacucuguguagaauc

SEQ ID NO: 1137177 - RNA, 19 nt, Artificial Sequence
  Description of Artificial Sequence: Synthetic oligonucleotide
  Antisense strand to SEQ ID NO: 1137176
gauucuacacagaguucag

SEQ ID NO: 1137178 - RNA, 19 nt, Artificial Sequence
  Description of Artificial Sequence: Synthetic oligonucleotide
  Sense strand starting at position 178 of SEQ ID NO: 916189
gaacucuguguagaaucua

SEQ ID NO: 1137179 - RNA, 19 nt, Artificial Sequence
  Description of Artificial Sequence: Synthetic oligonucleotide
  Antisense strand to SEQ ID NO: 1137178
uagauucuacacagaguuc

SEQ ID NO: 1137180 - RNA, 19 nt, Artificial Sequence
  Description of Artificial Sequence: Synthetic oligonucleotide
  Sense strand starting at position 296 of SEQ ID NO: 916189
accuccaguuauguacaaa

SEQ ID NO: 1137181 - RNA, 19 nt, Artificial Sequence
  Description of Artificial Sequence: Synthetic oligonucleotide
  Antisense strand to SEQ ID NO: 1137180
uuuguacauaacuggaggu

SEQ ID NO: 1137182 - RNA, 19 nt, Artificial Sequence
  Description of Artificial Sequence: Synthetic oligonucleotide
  Sense strand starting at position 465 of SEQ ID NO: 916189
cuaguaagcacguaugaug

SEQ ID NO: 1137183 - RNA, 19 nt, Artificial Sequence
  Description of Artificial Sequence: Synthetic oligonucleotide
  Antisense strand to SEQ ID NO: 1137182
caucauacgugcuuacuag

SEQ ID NO: 1137184 - RNA, 19 nt, Artificial Sequence
  Description of Artificial Sequence: Synthetic oligonucleotide
  Sense strand starting at position 514 of SEQ ID NO: 916189
auugaaaggcaguguuaaa

SEQ ID NO: 1137185 - RNA, 19 nt, Artificial Sequence
  Description of Artificial Sequence: Synthetic oligonucleotide
  Antisense strand to SEQ ID NO: 1137184
uuuaacacugccuuucaau

SEQ ID NO: 1137186 - RNA, 19 nt, Artificial Sequence
  Description of Artificial Sequence: Synthetic oligonucleotide
  Sense strand starting at position 525 of SEQ ID NO: 916189
guguuaaaccaggaagggu

SEQ ID NO: 1137187 - RNA, 19 nt, Artificial Sequence
  Description of Artificial Sequence: Synthetic oligonucleotide
  Antisense strand to SEQ ID NO: 1137186
acccuuccugguuuaacac

SEQ ID NO: 1137188 - RNA, 19 nt, Artificial Sequence
  Description of Artificial Sequence: Synthetic oligonucleotide
  Sense strand starting at position 830 of SEQ ID NO: 916189
gcaccacagucuuuacaga

SEQ ID NO: 1137189 - RNA, 19 nt, Artificial Sequence
  Description of Artificial Sequence: Synthetic oligonucleotide
  Antisense strand to SEQ ID NO: 1137188
ucuguaaagacuguggugc

SEQ ID NO: 1137190 - RNA, 19 nt, Artificial Sequence
  Description of Artificial Sequence: Synthetic oligonucleotide
  Sense strand starting at position 923 of SEQ ID NO: 916189
cagagugcugcuuagauag

SEQ ID NO: 1137191 - RNA, 19 nt, Artificial Sequence
  Description of Artificial Sequence: Synthetic oligonucleotide
  Antisense strand to SEQ ID NO: 1137190
cuaucuaagcagcacucug

SEQ ID NO: 1137192 - RNA, 19 nt, Artificial Sequence
  Description of Artificial Sequence: Synthetic oligonucleotide
  Sense strand starting at position 1020 of SEQ ID NO: 916189
cuacuuugggauugcucaa

SEQ ID NO: 1137193 - RNA, 19 nt, Artificial Sequence
  Description of Artificial Sequence: Synthetic oligonucleotide
  Antisense strand to SEQ ID NO: 1137192
uugagcaaucccaaaguag

SEQ ID NO: 1137194 - RNA, 19 nt, Artificial Sequence
  Description of Artificial Sequence: Synthetic oligonucleotide
  Sense strand starting at position 1040 of SEQ ID NO: 916189
uuucauauggaucggagua

SEQ ID NO: 1137195 - RNA, 19 nt, Artificial Sequence
  Description of Artificial Sequence: Synthetic oligonucleotide
  Antisense strand to SEQ ID NO: 1137194
uacuccgauccauaugaaa

SEQ ID NO: 1137196 - RNA, 19 nt, Artificial Sequence
  Description of Artificial Sequence: Synthetic oligonucleotide
  Sense strand starting at position 1108 of SEQ ID NO: 916189
uugugcaaugccuaggaaa

SEQ ID NO: 1137197 - RNA, 19 nt, Artificial Sequence
  Description of Artificial Sequence: Synthetic oligonucleotide
  Antisense strand to SEQ ID NO: 1137196
uuuccuaggcauugcacaa

SEQ ID NO: 1137198 - RNA, 19 nt, Artificial Sequence
  Description of Artificial Sequence: Synthetic oligonucleotide
  Sense strand starting at position 1147 of SEQ ID NO: 916189
cuccgacagcgcuugcaau

SEQ ID NO: 1137199 - RNA, 19 nt, Artificial Sequence
  Description of Artificial Sequence: Synthetic oligonucleotide
  Antisense strand to SEQ ID NO: 1137198
auugcaagcgcugucggag

SEQ ID NO: 1137200 - RNA, 19 nt, Artificial Sequence
  Description of Artificial Sequence: Synthetic oligonucleotide
  Sense strand starting at position 1149 of SEQ ID NO: 916189
ccgacagcgcuugcaauua

SEQ ID NO: 1137201 - RNA, 19 nt, Artificial Sequence
  Description of Artificial Sequence: Synthetic oligonucleotide
  Antisense strand to SEQ ID NO: 1137200
uaauugcaagcgcugucgg

SEQ ID NO: 1137202 - RNA, 19 nt, Artificial Sequence
  Description of Artificial Sequence: Synthetic oligonucleotide
  Sense strand starting at position 1309 of SEQ ID NO: 916189
ucacauguuggguguagga

SEQ ID NO: 1137203 - RNA, 19 nt, Artificial Sequence
  Description of Artificial Sequence: Synthetic oligonucleotide
  Antisense strand to SEQ ID NO: 1137202
uccuacacccaacauguga

SEQ ID NO: 1137204 - RNA, 19 nt, Artificial Sequence
  Description of Artificial Sequence: Synthetic oligonucleotide
  Sense strand starting at position 1311 of SEQ ID NO: 916189
acauguuggguguaggaau

SEQ ID NO: 1137205 - RNA, 19 nt, Artificial Sequence
  Description of Artificial Sequence: Synthetic oligonucleotide
  Antisense strand to SEQ ID NO: 1137204
auuccuacacccaacaugu

SEQ ID NO: 1137206 - RNA, 19 nt, Artificial Sequence
  Description of Artificial Sequence: Synthetic oligonucleotide
  Sense strand starting at position 1431 of SEQ ID NO: 916189
ccaauugugaccggcauuu

SEQ ID NO: 1137207 - RNA, 19 nt, Artificial Sequence
  Description of Artificial Sequence: Synthetic oligonucleotide
  Antisense strand to SEQ ID NO: 1137206
aaaugccggucacaauugg

SEQ ID NO: 1137208 - RNA, 19 nt, Artificial Sequence
  Description of Artificial Sequence: Synthetic oligonucleotide
  Sense strand starting at position 2144 of SEQ ID NO: 916189
cucauugaucuugagaguu

SEQ ID NO: 1137209 - RNA, 19 nt, Artificial Sequence
  Description of Artificial Sequence: Synthetic oligonucleotide
  Antisense strand to SEQ ID NO: 1137208
aacucucaagaucaaugag

SEQ ID NO: 1137210 - RNA, 19 nt, Artificial Sequence
  Description of Artificial Sequence: Synthetic oligonucleotide
  Sense strand starting at position 2428 of SEQ ID NO: 916189
agccaauuuccgggcuuaa

SEQ ID NO: 1137211 - RNA, 19 nt, Artificial Sequence
  Description of Artificial Sequence: Synthetic oligonucleotide
  Antisense strand to SEQ ID NO: 1137210
uuaagcccggaaauuggcu

SEQ ID NO: 1137212 - RNA, 19 nt, Artificial Sequence
  Description of Artificial Sequence: Synthetic oligonucleotide
  Sense strand starting at position 2533 of SEQ ID NO: 916189
gucucuuggauacaucgau

SEQ ID NO: 1137213 - RNA, 19 nt, Artificial Sequence
  Description of Artificial Sequence: Synthetic oligonucleotide
  Antisense strand to SEQ ID NO: 1137212
aucgauguauccaagagac

SEQ ID NO: 1137214 - RNA, 19 nt, Artificial Sequence
  Description of Artificial Sequence: Synthetic oligonucleotide
  Sense strand starting at position 3056 of SEQ ID NO: 916189
gugacucgacuacaaaguu

SEQ ID NO: 1137215 - RNA, 19 nt, Artificial Sequence
  Description of Artificial Sequence: Synthetic oligonucleotide
  Antisense strand to SEQ ID NO: 1137214
aacuuuguagucgagucac

SEQ ID NO: 1137216 - RNA, 19 nt, Artificial Sequence
  Description of Artificial Sequence: Synthetic oligonucleotide
  Sense strand starting at position 3109 of SEQ ID NO: 916189
caggaccgcuucucugaaa

SEQ ID NO: 1137217 - RNA, 19 nt, Artificial Sequence
  Description of Artificial Sequence: Synthetic oligonucleotide
  Antisense strand to SEQ ID NO: 1137216
uuucagagaagcgguccug

SEQ ID NO: 1137218 - RNA, 19 nt, Artificial Sequence
  Description of Artificial Sequence: Synthetic oligonucleotide
  Sense strand starting at position 3129 of SEQ ID NO: 916189
cgucauuggccgguugauu

SEQ ID NO: 1137219 - RNA, 19 nt, Artificial Sequence
  Description of Artificial Sequence: Synthetic oligonucleotide
  Antisense strand to SEQ ID NO: 1137218
aaucaaccggccaaugacg

SEQ ID NO: 1137220 - RNA, 19 nt, Artificial Sequence
  Description of Artificial Sequence: Synthetic oligonucleotide
  Sense strand starting at position 3172 of SEQ ID NO: 916189
ggaggaauauuugguugga

SEQ ID NO: 1137221 - RNA, 19 nt, Artificial Sequence
  Description of Artificial Sequence: Synthetic oligonucleotide
  Antisense strand to SEQ ID NO: 1137220
uccaaccaaauauuccucc

SEQ ID NO: 1137222 - RNA, 19 nt, Artificial Sequence
  Description of Artificial Sequence: Synthetic oligonucleotide
  Sense strand starting at position 3240 of SEQ ID NO: 916189
gagcacaagugaucugauc

SEQ ID NO: 1137223 - RNA, 19 nt, Artificial Sequence
  Description of Artificial Sequence: Synthetic oligonucleotide
  Antisense strand to SEQ ID NO: 1137222
gaucagaucacuugugcuc

SEQ ID NO: 1137224 - RNA, 19 nt, Artificial Sequence
  Description of Artificial Sequence: Synthetic oligonucleotide
  Sense strand starting at position 3248 of SEQ ID NO: 916189
gugaucugaucacucuauu

SEQ ID NO: 1137225 - RNA, 19 nt, Artificial Sequence
  Description of Artificial Sequence: Synthetic oligonucleotide
  Antisense strand to SEQ ID NO: 1137224
aauagagugaucagaucac

SEQ ID NO: 1137226 - RNA, 19 nt, Artificial Sequence
  Description of Artificial Sequence: Synthetic oligonucleotide
  Sense strand starting at position 3364 of SEQ ID NO: 916189
ggguuuaauauguggaugu

SEQ ID NO: 1137227 - RNA, 19 nt, Artificial Sequence
  Description of Artificial Sequence: Synthetic oligonucleotide
  Antisense strand to SEQ ID NO: 1137226
acauccacauauuaaaccc

SEQ ID NO: 1137228 - RNA, 19 nt, Artificial Sequence
  Description of Artificial Sequence: Synthetic oligonucleotide
  Sense strand starting at position 3366 of SEQ ID NO: 916189
guuuaauauguggaugugu

SEQ ID NO: 1137229 - RNA, 19 nt, Artificial Sequence
  Description of Artificial Sequence: Synthetic oligonucleotide
  Antisense strand to SEQ ID NO: 1137228
acacauccacauauuaaac

SEQ ID NO: 1137230 - RNA, 19 nt, Artificial Sequence
  Description of Artificial Sequence: Synthetic oligonucleotide
  Sense strand starting at position 3368 of SEQ ID NO: 916189
uuaauauguggauguguaa

SEQ ID NO: 1137231 - RNA, 19 nt, Artificial Sequence
  Description of Artificial Sequence: Synthetic oligonucleotide
  Antisense strand to SEQ ID NO: 1137230
uuacacauccacauauuaa

SEQ ID NO: 1137232 - RNA, 19 nt, Artificial Sequence
  Description of Artificial Sequence: Synthetic oligonucleotide
  Sense strand starting at position 3470 of SEQ ID NO: 916189
auauguuaccugcacugga

SEQ ID NO: 1137233 - RNA, 19 nt, Artificial Sequence
  Description of Artificial Sequence: Synthetic oligonucleotide
  Antisense strand to SEQ ID NO: 1137232
uccagugcagguaacauau

SEQ ID NO: 1137234 - RNA, 19 nt, Artificial Sequence
  Description of Artificial Sequence: Synthetic oligonucleotide
  Sense strand starting at position 3558 of SEQ ID NO: 916189
auuaucaaauguguugaga

SEQ ID NO: 1137235 - RNA, 19 nt, Artificial Sequence
  Description of Artificial Sequence: Synthetic oligonucleotide
  Antisense strand to SEQ ID NO: 1137234
ucucaacacauuugauaau

SEQ ID NO: 1137236 - RNA, 19 nt, Artificial Sequence
  Description of Artificial Sequence: Synthetic oligonucleotide
  Sense strand starting at position 3561 of SEQ ID NO: 916189
aucaaauguguugagacuu

SEQ ID NO: 1137237 - RNA, 19 nt, Artificial Sequence
  Description of Artificial Sequence: Synthetic oligonucleotide
  Antisense strand to SEQ ID NO: 1137236
aagucucaacacauuugau

SEQ ID NO: 1137238 - RNA, 19 nt, Artificial Sequence
  Description of Artificial Sequence: Synthetic oligonucleotide
  Sense strand starting at position 3606 of SEQ ID NO: 916189
uugaucagaucauuacgaa

SEQ ID NO: 1137239 - RNA, 19 nt, Artificial Sequence
  Description of Artificial Sequence: Synthetic oligonucleotide
  Antisense strand to SEQ ID NO: 1137238
uucguaaugaucugaucaa

SEQ ID NO: 1137240 - RNA, 19 nt, Artificial Sequence
  Description of Artificial Sequence: Synthetic oligonucleotide
  Sense strand starting at position 3732 of SEQ ID NO: 916189
ccaagagaucucugucuug

SEQ ID NO: 1137241 - RNA, 19 nt, Artificial Sequence
  Description of Artificial Sequence: Synthetic oligonucleotide
  Antisense strand to SEQ ID NO: 1137240
caagacagagaucucuugg

SEQ ID NO: 1137242 - RNA, 19 nt, Artificial Sequence
  Description of Artificial Sequence: Synthetic oligonucleotide
  Sense strand starting at position 10 of SEQ ID NO: 916190
ggccucauccuguaggaau

SEQ ID NO: 1137243 - RNA, 19 nt, Artificial Sequence
  Description of Artificial Sequence: Synthetic oligonucleotide
  Antisense strand to SEQ ID NO: 1137242
auuccuacaggaugaggcc

SEQ ID NO: 1137244 - RNA, 19 nt, Artificial Sequence
  Description of Artificial Sequence: Synthetic oligonucleotide
  Sense strand starting at position 98 of SEQ ID NO: 916190
aguugagucucuuccguca

SEQ ID NO: 1137245 - RNA, 19 nt, Artificial Sequence
  Description of Artificial Sequence: Synthetic oligonucleotide
  Antisense strand to SEQ ID NO: 1137244
ugacggaagagacucaacu

SEQ ID NO: 1137246 - RNA, 19 nt, Artificial Sequence
  Description of Artificial Sequence: Synthetic oligonucleotide
  Sense strand starting at position 103 of SEQ ID NO: 916190
agucucuuccgucacugaa

SEQ ID NO: 1137247 - RNA, 19 nt, Artificial Sequence
  Description of Artificial Sequence: Synthetic oligonucleotide
  Antisense strand to SEQ ID NO: 1137246
uucagugacggaagagacu

SEQ ID NO: 1137248 - RNA, 19 nt, Artificial Sequence
  Description of Artificial Sequence: Synthetic oligonucleotide
  Sense strand starting at position 216 of SEQ ID NO: 916190
cguggacauguuuagcuuu

SEQ ID NO: 1137249 - RNA, 19 nt, Artificial Sequence
  Description of Artificial Sequence: Synthetic oligonucleotide
  Antisense strand to SEQ ID NO: 1137248
aaagcuaaacauguccacg

SEQ ID NO: 1137250 - RNA, 19 nt, Artificial Sequence
  Description of Artificial Sequence: Synthetic oligonucleotide
  Sense strand starting at position 367 of SEQ ID NO: 916190
cccagaagacuguguuaga

SEQ ID NO: 1137251 - RNA, 19 nt, Artificial Sequence
  Description of Artificial Sequence: Synthetic oligonucleotide
  Antisense strand to SEQ ID NO: 1137250
ucuaacacagucuucuggg

SEQ ID NO: 1137252 - RNA, 19 nt, Artificial Sequence
  Description of Artificial Sequence: Synthetic oligonucleotide
  Sense strand starting at position 368 of SEQ ID NO: 916190
ccagaagacuguguuagac

SEQ ID NO: 1137253 - RNA, 19 nt, Artificial Sequence
  Description of Artificial Sequence: Synthetic oligonucleotide
  Antisense strand to SEQ ID NO: 1137252
gucuaacacagucuucugg

SEQ ID NO: 1137254 - RNA, 19 nt, Artificial Sequence
  Description of Artificial Sequence: Synthetic oligonucleotide
  Sense strand starting at position 471 of SEQ ID NO: 916190
gaagacuucugguuccauc

SEQ ID NO: 1137255 - RNA, 19 nt, Artificial Sequence
  Description of Artificial Sequence: Synthetic oligonucleotide
  Antisense strand to SEQ ID NO: 1137254
gauggaaccagaagucuuc

SEQ ID NO: 1137256 - RNA, 19 nt, Artificial Sequence
  Description of Artificial Sequence: Synthetic oligonucleotide
  Sense strand starting at position 663 of SEQ ID NO: 916190
gggugaguucuccauguuu

SEQ ID NO: 1137257 - RNA, 19 nt, Artificial Sequence
  Description of Artificial Sequence: Synthetic oligonucleotide
  Antisense strand to SEQ ID NO: 1137256
aaacauggagaacucaccc

SEQ ID NO: 1137258 - RNA, 19 nt, Artificial Sequence
  Description of Artificial Sequence: Synthetic oligonucleotide
  Sense strand starting at position 665 of SEQ ID NO: 916190
gugaguucuccauguuuac

SEQ ID NO: 1137259 - RNA, 19 nt, Artificial Sequence
  Description of Artificial Sequence: Synthetic oligonucleotide
  Antisense strand to SEQ ID NO: 1137258
guaaacauggagaacucac

SEQ ID NO: 1137260 - RNA, 19 nt, Artificial Sequence
  Description of Artificial Sequence: Synthetic oligonucleotide
  Sense strand starting at position 741 of SEQ ID NO: 916190
cccggaucugaaggaucau

SEQ ID NO: 1137261 - RNA, 19 nt, Artificial Sequence
  Description of Artificial Sequence: Synthetic oligonucleotide
  Antisense strand to SEQ ID NO: 1137260
augauccuucagauccggg

SEQ ID NO: 1137262 - RNA, 19 nt, Artificial Sequence
  Description of Artificial Sequence: Synthetic oligonucleotide
  Sense strand starting at position 750 of SEQ ID NO: 916190
gaaggaucauguccaccua

SEQ ID NO: 1137263 - RNA, 19 nt, Artificial Sequence
  Description of Artificial Sequence: Synthetic oligonucleotide
  Antisense strand to SEQ ID NO: 1137262
uagguggacaugauccuuc

SEQ ID NO: 1137264 - RNA, 19 nt, Artificial Sequence
  Description of Artificial Sequence: Synthetic oligonucleotide
  Sense strand starting at position 856 of SEQ ID NO: 916190
ccaagugaggugugaccaa

SEQ ID NO: 1137265 - RNA, 19 nt, Artificial Sequence
  Description of Artificial Sequence: Synthetic oligonucleotide
  Antisense strand to SEQ ID NO: 1137264
uuggucacaccucacuugg

SEQ ID NO: 1137266 - RNA, 19 nt, Artificial Sequence
  Description of Artificial Sequence: Synthetic oligonucleotide
  Sense strand starting at position 883 of SEQ ID NO: 916190
ggugguaucacccagugac

SEQ ID NO: 1137267 - RNA, 19 nt, Artificial Sequence
  Description of Artificial Sequence: Synthetic oligonucleotide
  Antisense strand to SEQ ID NO: 1137266
gucacugggugauaccacc

SEQ ID NO: 1137268 - RNA, 19 nt, Artificial Sequence
  Description of Artificial Sequence: Synthetic oligonucleotide
  Sense strand starting at position 886 of SEQ ID NO: 916190
gguaucacccagugacauc

SEQ ID NO: 1137269 - RNA, 19 nt, Artificial Sequence
  Description of Artificial Sequence: Synthetic oligonucleotide
  Antisense strand to SEQ ID NO: 1137268
gaugucacugggugauacc

SEQ ID NO: 1137270 - RNA, 19 nt, Artificial Sequence
  Description of Artificial Sequence: Synthetic oligonucleotide
  Sense strand starting at position 958 of SEQ ID NO: 916190
gaaggaugucauuggcucu

SEQ ID NO: 1137271 - RNA, 19 nt, Artificial Sequence
  Description of Artificial Sequence: Synthetic oligonucleotide
  Antisense strand to SEQ ID NO: 1137270
agagccaaugacauccuuc

SEQ ID NO: 1137272 - RNA, 19 nt, Artificial Sequence
  Description of Artificial Sequence: Synthetic oligonucleotide
  Sense strand starting at position 961 of SEQ ID NO: 916190
ggaugucauuggcucugaa

SEQ ID NO: 1137273 - RNA, 19 nt, Artificial Sequence
  Description of Artificial Sequence: Synthetic oligonucleotide
  Antisense strand to SEQ ID NO: 1137272
uucagagccaaugacaucc

SEQ ID NO: 1137274 - RNA, 19 nt, Artificial Sequence
  Description of Artificial Sequence: Synthetic oligonucleotide
  Sense strand starting at position 964 of SEQ ID NO: 916190
ugucauuggcucugaagcu

SEQ ID NO: 1137275 - RNA, 19 nt, Artificial Sequence
  Description of Artificial Sequence: Synthetic oligonucleotide
  Antisense strand to SEQ ID NO: 1137274
agcuucagagccaaugaca

SEQ ID NO: 1137276 - RNA, 19 nt, Artificial Sequence
  Description of Artificial Sequence: Synthetic oligonucleotide
  Sense strand starting at position 1091 of SEQ ID NO: 916190
aggcccuagugguuguaua

SEQ ID NO: 1137277 - RNA, 19 nt, Artificial Sequence
  Description of Artificial Sequence: Synthetic oligonucleotide
  Antisense strand to SEQ ID NO: 1137276
uauacaaccacuagggccu

SEQ ID NO: 1137278 - RNA, 19 nt, Artificial Sequence
  Description of Artificial Sequence: Synthetic oligonucleotide
  Sense strand starting at position 1092 of SEQ ID NO: 916190
ggcccuagugguuguauaa

SEQ ID NO: 1137279 - RNA, 19 nt, Artificial Sequence
  Description of Artificial Sequence: Synthetic oligonucleotide
  Antisense strand to SEQ ID NO: 1137278
uuauacaaccacuagggcc

SEQ ID NO: 1137280 - RNA, 19 nt, Artificial Sequence
  Description of Artificial Sequence: Synthetic oligonucleotide
  Sense strand starting at position 1099 of SEQ ID NO: 916190
gugguuguauaauuccaca

SEQ ID NO: 1137281 - RNA, 19 nt, Artificial Sequence
  Description of Artificial Sequence: Synthetic oligonucleotide
  Antisense strand to SEQ ID NO: 1137280
uguggaauuauacaaccac

SEQ ID NO: 1137282 - RNA, 19 nt, Artificial Sequence
  Description of Artificial Sequence: Synthetic oligonucleotide
  Sense strand starting at position 1104 of SEQ ID NO: 916190
uguauaauuccacaggcua

SEQ ID NO: 1137283 - RNA, 19 nt, Artificial Sequence
  Description of Artificial Sequence: Synthetic oligonucleotide
  Antisense strand to SEQ ID NO: 1137282
uagccuguggaauuauaca

SEQ ID NO: 1137284 - RNA, 19 nt, Artificial Sequence
  Description of Artificial Sequence: Synthetic oligonucleotide
  Sense strand starting at position 1257 of SEQ ID NO: 916190
agcaucuugaugcagaguu

SEQ ID NO: 1137285 - RNA, 19 nt, Artificial Sequence
  Description of Artificial Sequence: Synthetic oligonucleotide
  Antisense strand to SEQ ID NO: 1137284
aacucugcaucaagaugcu

SEQ ID NO: 1137286 - RNA, 19 nt, Artificial Sequence
  Description of Artificial Sequence: Synthetic oligonucleotide
  Sense strand starting at position 1313 of SEQ ID NO: 916190
cgcccagauguggaacaau

SEQ ID NO: 1137287 - RNA, 19 nt, Artificial Sequence
  Description of Artificial Sequence: Synthetic oligonucleotide
  Antisense strand to SEQ ID NO: 1137286
auuguuccacaucugggcg

SEQ ID NO: 1137288 - RNA, 19 nt, Artificial Sequence
  Description of Artificial Sequence: Synthetic oligonucleotide
  Sense strand starting at position 1380 of SEQ ID NO: 916190
gcauaaagugguuggguuu

SEQ ID NO: 1137289 - RNA, 19 nt, Artificial Sequence
  Description of Artificial Sequence: Synthetic oligonucleotide
  Antisense strand to SEQ ID NO: 1137288
aaacccaaccacuuuaugc

SEQ ID NO: 1137290 - RNA, 19 nt, Artificial Sequence
  Description of Artificial Sequence: Synthetic oligonucleotide
  Sense strand starting at position 1616 of SEQ ID NO: 916190
ggaagaggccucgguccau

SEQ ID NO: 1137291 - RNA, 19 nt, Artificial Sequence
  Description of Artificial Sequence: Synthetic oligonucleotide
  Antisense strand to SEQ ID NO: 1137290
auggaccgaggccucuucc

SEQ ID NO: 1137292 - RNA, 19 nt, Artificial Sequence
  Description of Artificial Sequence: Synthetic oligonucleotide
  Sense strand starting at position 1786 of SEQ ID NO: 916190
gggagaugccgguaccuuu

SEQ ID NO: 1137293 - RNA, 19 nt, Artificial Sequence
  Description of Artificial Sequence: Synthetic oligonucleotide
  Antisense strand to SEQ ID NO: 1137292
aaagguaccggcaucuccc

SEQ ID NO: 1137294 - RNA, 19 nt, Artificial Sequence
  Description of Artificial Sequence: Synthetic oligonucleotide
  Sense strand starting at position 1796 of SEQ ID NO: 916190
gguaccuuucccuggguca

SEQ ID NO: 1137295 - RNA, 19 nt, Artificial Sequence
  Description of Artificial Sequence: Synthetic oligonucleotide
  Antisense strand to SEQ ID NO: 1137294
ugacccagggaaagguacc

SEQ ID NO: 1137296 - RNA, 19 nt, Artificial Sequence
  Description of Artificial Sequence: Synthetic oligonucleotide
  Sense strand starting at position 1797 of SEQ ID NO: 916190
guaccuuucccugggucau

SEQ ID NO: 1137297 - RNA, 19 nt, Artificial Sequence
  Description of Artificial Sequence: Synthetic oligonucleotide
  Antisense strand to SEQ ID NO: 1137296
augacccagggaaagguac

SEQ ID NO: 1137298 - RNA, 19 nt, Artificial Sequence
  Description of Artificial Sequence: Synthetic oligonucleotide
  Sense strand starting at position 2495 of SEQ ID NO: 916190
cugugaaaugcacacagua

SEQ ID NO: 1137299 - RNA, 19 nt, Artificial Sequence
  Description of Artificial Sequence: Synthetic oligonucleotide
  Antisense strand to SEQ ID NO: 1137298
uacugugugcauuucacag

SEQ ID NO: 1137300 - RNA, 19 nt, Artificial Sequence
  Description of Artificial Sequence: Synthetic oligonucleotide
  Sense strand starting at position 2841 of SEQ ID NO: 916190
gggaucaagucccaauuua

SEQ ID NO: 1137301 - RNA, 19 nt, Artificial Sequence
  Description of Artificial Sequence: Synthetic oligonucleotide
  Antisense strand to SEQ ID NO: 1137300
uaaauugggacuugauccc

SEQ ID NO: 1137302 - RNA, 19 nt, Artificial Sequence
  Description of Artificial Sequence: Synthetic oligonucleotide
  Sense strand starting at position 2934 of SEQ ID NO: 916190
agaacagagcucuguccau

SEQ ID NO: 1137303 - RNA, 19 nt, Artificial Sequence
  Description of Artificial Sequence: Synthetic oligonucleotide
  Antisense strand to SEQ ID NO: 1137302
auggacagagcucuguucu

SEQ ID NO: 1137304 - RNA, 19 nt, Artificial Sequence
  Description of Artificial Sequence: Synthetic oligonucleotide
  Sense strand starting at position 3005 of SEQ ID NO: 916190
ccaagaagugcuggaagua

SEQ ID NO: 1137305 - RNA, 19 nt, Artificial Sequence
  Description of Artificial Sequence: Synthetic oligonucleotide
  Antisense strand to SEQ ID NO: 1137304
uacuuccagcacuucuugg

SEQ ID NO: 1137306 - RNA, 19 nt, Artificial Sequence
  Description of Artificial Sequence: Synthetic oligonucleotide
  Sense strand starting at position 3006 of SEQ ID NO: 916190
caagaagugcuggaaguau

SEQ ID NO: 1137307 - RNA, 19 nt, Artificial Sequence
  Description of Artificial Sequence: Synthetic oligonucleotide
  Antisense strand to SEQ ID NO: 1137306
auacuuccagcacuucuug

SEQ ID NO: 1137308 - RNA, 19 nt, Artificial Sequence
  Description of Artificial Sequence: Synthetic oligonucleotide
  Sense strand starting at position 3014 of SEQ ID NO: 916190
gcuggaaguaugugaggua

SEQ ID NO: 1137309 - RNA, 19 nt, Artificial Sequence
  Description of Artificial Sequence: Synthetic oligonucleotide
  Antisense strand to SEQ ID NO: 1137308
uaccucacauacuuccagc

SEQ ID NO: 1137310 - RNA, 19 nt, Artificial Sequence
  Description of Artificial Sequence: Synthetic oligonucleotide
  Sense strand starting at position 3041 of SEQ ID NO: 916190
ugaggagucuccuaccaga

SEQ ID NO: 1137311 - RNA, 19 nt, Artificial Sequence
  Description of Artificial Sequence: Synthetic oligonucleotide
  Antisense strand to SEQ ID NO: 1137310
ucugguaggagacuccuca

SEQ ID NO: 1137312 - RNA, 19 nt, Artificial Sequence
  Description of Artificial Sequence: Synthetic oligonucleotide
  Sense strand starting at position 3239 of SEQ ID NO: 916190
gcagacaaauuaucaaagu

SEQ ID NO: 1137313 - RNA, 19 nt, Artificial Sequence
  Description of Artificial Sequence: Synthetic oligonucleotide
  Antisense strand to SEQ ID NO: 1137312
acuuugauaauuugucugc

SEQ ID NO: 1137314 - RNA, 19 nt, Artificial Sequence
  Description of Artificial Sequence: Synthetic oligonucleotide
  Sense strand starting at position 3562 of SEQ ID NO: 916190
cuggccuaauuaucaaagu

SEQ ID NO: 1137315 - RNA, 19 nt, Artificial Sequence
  Description of Artificial Sequence: Synthetic oligonucleotide
  Antisense strand to SEQ ID NO: 1137314
acuuugauaauuaggccag

SEQ ID NO: 1137316 - RNA, 19 nt, Artificial Sequence
  Description of Artificial Sequence: Synthetic oligonucleotide
  Sense strand starting at position 3931 of SEQ ID NO: 916190
ggcgcugugaaguuucuuu

SEQ ID NO: 1137317 - RNA, 19 nt, Artificial Sequence
  Description of Artificial Sequence: Synthetic oligonucleotide
  Antisense strand to SEQ ID NO: 1137316
aaagaaacuucacagcgcc

SEQ ID NO: 1137318 - RNA, 19 nt, Artificial Sequence
  Description of Artificial Sequence: Synthetic oligonucleotide
  Sense strand starting at position 3935 of SEQ ID NO: 916190
cugugaaguuucuuugacu

SEQ ID NO: 1137319 - RNA, 19 nt, Artificial Sequence
  Description of Artificial Sequence: Synthetic oligonucleotide
  Antisense strand to SEQ ID NO: 1137318
agucaaagaaacuucacag

SEQ ID NO: 1137320 - RNA, 19 nt, Artificial Sequence
  Description of Artificial Sequence: Synthetic oligonucleotide
  Sense strand starting at position 3936 of SEQ ID NO: 916190
ugugaaguuucuuugacug

SEQ ID NO: 1137321 - RNA, 19 nt, Artificial Sequence
  Description of Artificial Sequence: Synthetic oligonucleotide
  Antisense strand to SEQ ID NO: 1137320
cagucaaagaaacuucaca

SEQ ID NO: 1137322 - RNA, 19 nt, Artificial Sequence
  Description of Artificial Sequence: Synthetic oligonucleotide
  Sense strand starting at position 97 of SEQ ID NO: 916191
gucgucaugccugacaacu

SEQ ID NO: 1137323 - RNA, 19 nt, Artificial Sequence
  Description of Artificial Sequence: Synthetic oligonucleotide
  Antisense strand to SEQ ID NO: 1137322
aguugucaggcaugacgac

SEQ ID NO: 1137324 - RNA, 19 nt, Artificial Sequence
  Description of Artificial Sequence: Synthetic oligonucleotide
  Sense strand starting at position 329 of SEQ ID NO: 916191
uccauaaagcagggaugau

SEQ ID NO: 1137325 - RNA, 19 nt, Artificial Sequence
  Description of Artificial Sequence: Synthetic oligonucleotide
  Antisense strand to SEQ ID NO: 1137324
aucaucccugcuuuaugga

SEQ ID NO: 1137326 - RNA, 19 nt, Artificial Sequence
  Description of Artificial Sequence: Synthetic oligonucleotide
  Sense strand starting at position 1013 of SEQ ID NO: 916191
uugucuuuccuagggagag

SEQ ID NO: 1137327 - RNA, 19 nt, Artificial Sequence
  Description of Artificial Sequence: Synthetic oligonucleotide
  Antisense strand to SEQ ID NO: 1137326
cucucccuaggaaagacaa

SEQ ID NO: 1137328 - RNA, 19 nt, Artificial Sequence
  Description of Artificial Sequence: Synthetic oligonucleotide
  Sense strand starting at position 1156 of SEQ ID NO: 916191
aagaguggcuucuugauca

SEQ ID NO: 1137329 - RNA, 19 nt, Artificial Sequence
  Description of Artificial Sequence: Synthetic oligonucleotide
  Antisense strand to SEQ ID NO: 1137328
ugaucaagaagccacucuu

SEQ ID NO: 1137330 - RNA, 19 nt, Artificial Sequence
  Description of Artificial Sequence: Synthetic oligonucleotide
  Sense strand starting at position 1210 of SEQ ID NO: 916191
cgggcauguggucaaaugu

SEQ ID NO: 1137331 - RNA, 19 nt, Artificial Sequence
  Description of Artificial Sequence: Synthetic oligonucleotide
  Antisense strand to SEQ ID NO: 1137330
acauuugaccacaugcccg

SEQ ID NO: 1137332 - RNA, 19 nt, Artificial Sequence
  Description of Artificial Sequence: Synthetic oligonucleotide
  Sense strand starting at position 1613 of SEQ ID NO: 916191
ugccuuugaccugggcaua

SEQ ID NO: 1137333 - RNA, 19 nt, Artificial Sequence
  Description of Artificial Sequence: Synthetic oligonucleotide
  Antisense strand to SEQ ID NO: 1137332
uaugcccaggucaaaggca

SEQ ID NO: 1137334 - RNA, 19 nt, Artificial Sequence
  Description of Artificial Sequence: Synthetic oligonucleotide
  Sense strand starting at position 1698 of SEQ ID NO: 916191
aaugaaagcuguucuaacg

SEQ ID NO: 1137335 - RNA, 19 nt, Artificial Sequence
  Description of Artificial Sequence: Synthetic oligonucleotide
  Antisense strand to SEQ ID NO: 1137334
cguuagaacagcuuucauu

SEQ ID NO: 1137336 - RNA, 19 nt, Artificial Sequence
  Description of Artificial Sequence: Synthetic oligonucleotide
  Sense strand starting at position 2318 of SEQ ID NO: 916191
gaagaaagaugauauggaa

SEQ ID NO: 1137337 - RNA, 19 nt, Artificial Sequence
  Description of Artificial Sequence: Synthetic oligonucleotide
  Antisense strand to SEQ ID NO: 1137336
uuccauaucaucuuucuuc

SEQ ID NO: 1137338 - RNA, 19 nt, Artificial Sequence
  Description of Artificial Sequence: Synthetic oligonucleotide
  Sense strand starting at position 2336 of SEQ ID NO: 916191
accacaauaccgcgaucau

SEQ ID NO: 1137339 - RNA, 19 nt, Artificial Sequence
  Description of Artificial Sequence: Synthetic oligonucleotide
  Antisense strand to SEQ ID NO: 1137338
augaucgcgguauuguggu

SEQ ID NO: 1137340 - RNA, 19 nt, Artificial Sequence
  Description of Artificial Sequence: Synthetic oligonucleotide
  Sense strand starting at position 2337 of SEQ ID NO: 916191
ccacaauaccgcgaucaua

SEQ ID NO: 1137341 - RNA, 19 nt, Artificial Sequence
  Description of Artificial Sequence: Synthetic oligonucleotide
  Antisense strand to SEQ ID NO: 1137340
uaugaucgcgguauugugg

SEQ ID NO: 1137342 - RNA, 19 nt, Artificial Sequence
  Description of Artificial Sequence: Synthetic oligonucleotide
  Sense strand starting at position 2346 of SEQ ID NO: 916191
cgcgaucauacugagggaa

SEQ ID NO: 1137343 - RNA, 19 nt, Artificial Sequence
  Description of Artificial Sequence: Synthetic oligonucleotide
  Antisense strand to SEQ ID NO: 1137342
uucccucaguaugaucgcg

SEQ ID NO: 1137344 - RNA, 19 nt, Artificial Sequence
  Description of Artificial Sequence: Synthetic oligonucleotide
  Sense strand starting at position 2358 of SEQ ID NO: 916191
gagggaauuuaacguugau

SEQ ID NO: 1137345 - RNA, 19 nt, Artificial Sequence
  Description of Artificial Sequence: Synthetic oligonucleotide
  Antisense strand to SEQ ID NO: 1137344
aucaacguuaaauucccuc

SEQ ID NO: 1137346 - RNA, 19 nt, Artificial Sequence
  Description of Artificial Sequence: Synthetic oligonucleotide
  Sense strand starting at position 2524 of SEQ ID NO: 916191
auugcauuucguugucacu

SEQ ID NO: 1137347 - RNA, 19 nt, Artificial Sequence
  Description of Artificial Sequence: Synthetic oligonucleotide
  Antisense strand to SEQ ID NO: 1137346
agugacaacgaaaugcaau

SEQ ID NO: 1137348 - RNA, 19 nt, Artificial Sequence
  Description of Artificial Sequence: Synthetic oligonucleotide
  Sense strand starting at position 2526 of SEQ ID NO: 916191
ugcauuucguugucacuau

SEQ ID NO: 1137349 - RNA, 19 nt, Artificial Sequence
  Description of Artificial Sequence: Synthetic oligonucleotide
  Antisense strand to SEQ ID NO: 1137348
auagugacaacgaaaugca

SEQ ID NO: 1137350 - RNA, 19 nt, Artificial Sequence
  Description of Artificial Sequence: Synthetic oligonucleotide
  Sense strand starting at position 2631 of SEQ ID NO: 916191
ucaauaacguuuguaggga

SEQ ID NO: 1137351 - RNA, 19 nt, Artificial Sequence
  Description of Artificial Sequence: Synthetic oligonucleotide
  Antisense strand to SEQ ID NO: 1137350
ucccuacaaacguuauuga

SEQ ID NO: 1137352 - RNA, 19 nt, Artificial Sequence
  Description of Artificial Sequence: Synthetic oligonucleotide
  Sense strand starting at position 2636 of SEQ ID NO: 916191
aacguuuguagggagaaca

SEQ ID NO: 1137353 - RNA, 19 nt, Artificial Sequence
  Description of Artificial Sequence: Synthetic oligonucleotide
  Antisense strand to SEQ ID NO: 1137352
uguucucccuacaaacguu

SEQ ID NO: 1137354 - RNA, 19 nt, Artificial Sequence
  Description of Artificial Sequence: Synthetic oligonucleotide
  Sense strand starting at position 2705 of SEQ ID NO: 916191
cuuccuguccacuguaaua

SEQ ID NO: 1137355 - RNA, 19 nt, Artificial Sequence
  Description of Artificial Sequence: Synthetic oligonucleotide
  Antisense strand to SEQ ID NO: 1137354
uauuacaguggacaggaag

SEQ ID NO: 1137356 - RNA, 19 nt, Artificial Sequence
  Description of Artificial Sequence: Synthetic oligonucleotide
  Sense strand starting at position 2707 of SEQ ID NO: 916191
uccuguccacuguaauaaa

SEQ ID NO: 1137357 - RNA, 19 nt, Artificial Sequence
  Description of Artificial Sequence: Synthetic oligonucleotide
  Antisense strand to SEQ ID NO: 1137356
uuuauuacaguggacagga

SEQ ID NO: 1137358 - RNA, 19 nt, Artificial Sequence
  Description of Artificial Sequence: Synthetic oligonucleotide
  Sense strand starting at position 2729 of SEQ ID NO: 916191
aaugguucccucuggagaa

SEQ ID NO: 1137359 - RNA, 19 nt, Artificial Sequence
  Description of Artificial Sequence: Synthetic oligonucleotide
  Antisense strand to SEQ ID NO: 1137358
uucuccagagggaaccauu

SEQ ID NO: 1137360 - RNA, 19 nt, Artificial Sequence
  Description of Artificial Sequence: Synthetic oligonucleotide
  Sense strand starting at position 2968 of SEQ ID NO: 916191
uugugucuucugcuugagu

SEQ ID NO: 1137361 - RNA, 19 nt, Artificial Sequence
  Description of Artificial Sequence: Synthetic oligonucleotide
  Antisense strand to SEQ ID NO: 1137360
acucaagcagaagacacaa

SEQ ID NO: 1137362 - RNA, 19 nt, Artificial Sequence
  Description of Artificial Sequence: Synthetic oligonucleotide
  Sense strand starting at position 3036 of SEQ ID NO: 916191
cccaguucuguguaguaac

SEQ ID NO: 1137363 - RNA, 19 nt, Artificial Sequence
  Description of Artificial Sequence: Synthetic oligonucleotide
  Antisense strand to SEQ ID NO: 1137362
guuacuacacagaacuggg

SEQ ID NO: 1137364 - RNA, 19 nt, Artificial Sequence
  Description of Artificial Sequence: Synthetic oligonucleotide
  Sense strand starting at position 3047 of SEQ ID NO: 916191
guaguaacaucucuuuaau

SEQ ID NO: 1137365 - RNA, 19 nt, Artificial Sequence
  Description of Artificial Sequence: Synthetic oligonucleotide
  Antisense strand to SEQ ID NO: 1137364
auuaaagagauguuacuac

SEQ ID NO: 1137366 - RNA, 19 nt, Artificial Sequence
  Description of Artificial Sequence: Synthetic oligonucleotide
  Sense strand starting at position 3124 of SEQ ID NO: 916191
cgaguuugggccaguugua

SEQ ID NO: 1137367 - RNA, 19 nt, Artificial Sequence
  Description of Artificial Sequence: Synthetic oligonucleotide
  Antisense strand to SEQ ID NO: 1137366
uacaacuggcccaaacucg

SEQ ID NO: 1137368 - RNA, 19 nt, Artificial Sequence
  Description of Artificial Sequence: Synthetic oligonucleotide
  Sense strand starting at position 3159 of SEQ ID NO: 916191
ggauuugucugauugcugu

SEQ ID NO: 1137369 - RNA, 19 nt, Artificial Sequence
  Description of Artificial Sequence: Synthetic oligonucleotide
  Antisense strand to SEQ ID NO: 1137368
acagcaaucagacaaaucc

SEQ ID NO: 1137370 - RNA, 19 nt, Artificial Sequence
  Description of Artificial Sequence: Synthetic oligonucleotide
  Sense strand starting at position 3166 of SEQ ID NO: 916191
ucugauugcugucucagga

SEQ ID NO: 1137371 - RNA, 19 nt, Artificial Sequence
  Description of Artificial Sequence: Synthetic oligonucleotide
  Antisense strand to SEQ ID NO: 1137370
uccugagacagcaaucaga

SEQ ID NO: 1137372 - RNA, 19 nt, Artificial Sequence
  Description of Artificial Sequence: Synthetic oligonucleotide
  Sense strand starting at position 3175 of SEQ ID NO: 916191
ugucucaggauucgaugua

SEQ ID NO: 1137373 - RNA, 19 nt, Artificial Sequence
  Description of Artificial Sequence: Synthetic oligonucleotide
  Antisense strand to SEQ ID NO: 1137372
uacaucgaauccugagaca

SEQ ID NO: 1137374 - RNA, 19 nt, Artificial Sequence
  Description of Artificial Sequence: Synthetic oligonucleotide
  Sense strand starting at position 3182 of SEQ ID NO: 916191
ggauucgauguaggauaaa

SEQ ID NO: 1137375 - RNA, 19 nt, Artificial Sequence
  Description of Artificial Sequence: Synthetic oligonucleotide
  Antisense strand to SEQ ID NO: 1137374
uuuauccuacaucgaaucc

SEQ ID NO: 1137376 - RNA, 19 nt, Artificial Sequence
  Description of Artificial Sequence: Synthetic oligonucleotide
  Sense strand starting at position 3224 of SEQ ID NO: 916191
guccauguugcgccaucaa

SEQ ID NO: 1137377 - RNA, 19 nt, Artificial Sequence
  Description of Artificial Sequence: Synthetic oligonucleotide
  Antisense strand to SEQ ID NO: 1137376
uugauggcgcaacauggac

SEQ ID NO: 1137378 - RNA, 19 nt, Artificial Sequence
  Description of Artificial Sequence: Synthetic oligonucleotide
  Sense strand starting at position 3320 of SEQ ID NO: 916191
ccucauuucuucgugcuca

SEQ ID NO: 1137379 - RNA, 19 nt, Artificial Sequence
  Description of Artificial Sequence: Synthetic oligonucleotide
  Antisense strand to SEQ ID NO: 1137378
ugagcacgaagaaaugagg

SEQ ID NO: 1137380 - RNA, 19 nt, Artificial Sequence
  Description of Artificial Sequence: Synthetic oligonucleotide
  Sense strand starting at position 3343 of SEQ ID NO: 916191
agcuuucccuuugugauuu

SEQ ID NO: 1137381 - RNA, 19 nt, Artificial Sequence
  Description of Artificial Sequence: Synthetic oligonucleotide
  Antisense strand to SEQ ID NO: 1137380
aaaucacaaagggaaagcu

SEQ ID NO: 1137382 - RNA, 19 nt, Artificial Sequence
  Description of Artificial Sequence: Synthetic oligonucleotide
  Sense strand starting at position 3397 of SEQ ID NO: 916191
gggauauccugcucccuga

SEQ ID NO: 1137383 - RNA, 19 nt, Artificial Sequence
  Description of Artificial Sequence: Synthetic oligonucleotide
  Antisense strand to SEQ ID NO: 1137382
ucagggagcaggauauccc

SEQ ID NO: 1137384 - RNA, 19 nt, Artificial Sequence
  Description of Artificial Sequence: Synthetic oligonucleotide
  Sense strand starting at position 3440 of SEQ ID NO: 916191
agcugaugcauugguaaag

SEQ ID NO: 1137385 - RNA, 19 nt, Artificial Sequence
  Description of Artificial Sequence: Synthetic oligonucleotide
  Antisense strand to SEQ ID NO: 1137384
cuuuaccaaugcaucagcu

SEQ ID NO: 1137386 - RNA, 19 nt, Artificial Sequence
  Description of Artificial Sequence: Synthetic oligonucleotide
  Sense strand starting at position 3441 of SEQ ID NO: 916191
gcugaugcauugguaaaga

SEQ ID NO: 1137387 - RNA, 19 nt, Artificial Sequence
  Description of Artificial Sequence: Synthetic oligonucleotide
  Antisense strand to SEQ ID NO: 1137386
ucuuuaccaaugcaucagc

SEQ ID NO: 1137388 - RNA, 19 nt, Artificial Sequence
  Description of Artificial Sequence: Synthetic oligonucleotide
  Sense strand starting at position 3459 of SEQ ID NO: 916191
agcuuugugcuagacgaua

SEQ ID NO: 1137389 - RNA, 19 nt, Artificial Sequence
  Description of Artificial Sequence: Synthetic oligonucleotide
  Antisense strand to SEQ ID NO: 1137388
uaucgucuagcacaaagcu

SEQ ID NO: 1137390 - RNA, 19 nt, Artificial Sequence
  Description of Artificial Sequence: Synthetic oligonucleotide
  Sense strand starting at position 3521 of SEQ ID NO: 916191
aacgcauagucugcagaga

SEQ ID NO: 1137391 - RNA, 19 nt, Artificial Sequence
  Description of Artificial Sequence: Synthetic oligonucleotide
  Antisense strand to SEQ ID NO: 1137390
ucucugcagacuaugcguu

SEQ ID NO: 1137392 - RNA, 19 nt, Artificial Sequence
  Description of Artificial Sequence: Synthetic oligonucleotide
  Sense strand starting at position 3627 of SEQ ID NO: 916191
gugguauagggugagucua

SEQ ID NO: 1137393 - RNA, 19 nt, Artificial Sequence
  Description of Artificial Sequence: Synthetic oligonucleotide
  Antisense strand to SEQ ID NO: 1137392
uagacucacccuauaccac

SEQ ID NO: 1137394 - RNA, 19 nt, Artificial Sequence
  Description of Artificial Sequence: Synthetic oligonucleotide
  Sense strand starting at position 3744 of SEQ ID NO: 916191
caaguuguagaaugcuuaa

SEQ ID NO: 1137395 - RNA, 19 nt, Artificial Sequence
  Description of Artificial Sequence: Synthetic oligonucleotide
  Antisense strand to SEQ ID NO: 1137394
uuaagcauucuacaacuug

SEQ ID NO: 1137396 - RNA, 19 nt, Artificial Sequence
  Description of Artificial Sequence: Synthetic oligonucleotide
  Sense strand starting at position 3747 of SEQ ID NO: 916191
guuguagaaugcuuaaagu

SEQ ID NO: 1137397 - RNA, 19 nt, Artificial Sequence
  Description of Artificial Sequence: Synthetic oligonucleotide
  Antisense strand to SEQ ID NO: 1137396
acuuuaagcauucuacaac

SEQ ID NO: 1137398 - RNA, 19 nt, Artificial Sequence
  Description of Artificial Sequence: Synthetic oligonucleotide
  Sense strand starting at position 3879 of SEQ ID NO: 916191
ggcgaaucugugcaaagca

SEQ ID NO: 1137399 - RNA, 19 nt, Artificial Sequence
  Description of Artificial Sequence: Synthetic oligonucleotide
  Antisense strand to SEQ ID NO: 1137398
ugcuuugcacagauucgcc

SEQ ID NO: 1137400 - RNA, 19 nt, Artificial Sequence
  Description of Artificial Sequence: Synthetic oligonucleotide
  Sense strand starting at position 3932 of SEQ ID NO: 916191
ccagauugcuuuccaguua

SEQ ID NO: 1137401 - RNA, 19 nt, Artificial Sequence
  Description of Artificial Sequence: Synthetic oligonucleotide
  Antisense strand to SEQ ID NO: 1137400
uaacuggaaagcaaucugg

SEQ ID NO: 1137402 - RNA, 19 nt, Artificial Sequence
  Description of Artificial Sequence: Synthetic oligonucleotide
  Sense strand starting at position 177 of SEQ ID NO: 916192
gugccuccaccugaaauua

SEQ ID NO: 1137403 - RNA, 19 nt, Artificial Sequence
  Description of Artificial Sequence: Synthetic oligonucleotide
  Antisense strand to SEQ ID NO: 1137402
uaauuucagguggaggcac

SEQ ID NO: 1137404 - RNA, 19 nt, Artificial Sequence
  Description of Artificial Sequence: Synthetic oligonucleotide
  Sense strand starting at position 221 of SEQ ID NO: 916192
gggcguuuguggucugaau

SEQ ID NO: 1137405 - RNA, 19 nt, Artificial Sequence
  Description of Artificial Sequence: Synthetic oligonucleotide
  Antisense strand to SEQ ID NO: 1137404
auucagaccacaaacgccc

SEQ ID NO: 1137406 - RNA, 19 nt, Artificial Sequence
  Description of Artificial Sequence: Synthetic oligonucleotide
  Sense strand starting at position 222 of SEQ ID NO: 916192
ggcguuuguggucugaauu

SEQ ID NO: 1137407 - RNA, 19 nt, Artificial Sequence
  Description of Artificial Sequence: Synthetic oligonucleotide
  Antisense strand to SEQ ID NO: 1137406
aauucagaccacaaacgcc

SEQ ID NO: 1137408 - RNA, 19 nt, Artificial Sequence
  Description of Artificial Sequence: Synthetic oligonucleotide
  Sense strand starting at position 223 of SEQ ID NO: 916192
gcguuuguggucugaauuc

SEQ ID NO: 1137409 - RNA, 19 nt, Artificial Sequence
  Description of Artificial Sequence: Synthetic oligonucleotide
  Antisense strand to SEQ ID NO: 1137408
gaauucagaccacaaacgc

SEQ ID NO: 1137410 - RNA, 19 nt, Artificial Sequence
  Description of Artificial Sequence: Synthetic oligonucleotide
  Sense strand starting at position 236 of SEQ ID NO: 916192
gaauucuagugccuggcau

SEQ ID NO: 1137411 - RNA, 19 nt, Artificial Sequence
  Description of Artificial Sequence: Synthetic oligonucleotide
  Antisense strand to SEQ ID NO: 1137410
augccaggcacuagaauuc

SEQ ID NO: 1137412 - RNA, 19 nt, Artificial Sequence
  Description of Artificial Sequence: Synthetic oligonucleotide
  Sense strand starting at position 287 of SEQ ID NO: 916192
ucugcaguaucuucugaaa

SEQ ID NO: 1137413 - RNA, 19 nt, Artificial Sequence
  Description of Artificial Sequence: Synthetic oligonucleotide
  Antisense strand to SEQ ID NO: 1137412
uuucagaagauacugcaga

SEQ ID NO: 1137414 - RNA, 19 nt, Artificial Sequence
  Description of Artificial Sequence: Synthetic oligonucleotide
  Sense strand starting at position 290 of SEQ ID NO: 916192
gcaguaucuucugaaaccu

SEQ ID NO: 1137415 - RNA, 19 nt, Artificial Sequence
  Description of Artificial Sequence: Synthetic oligonucleotide
  Antisense strand to SEQ ID NO: 1137414
agguuucagaagauacugc

SEQ ID NO: 1137416 - RNA, 19 nt, Artificial Sequence
  Description of Artificial Sequence: Synthetic oligonucleotide
  Sense strand starting at position 378 of SEQ ID NO: 916192
auaaguuggcuagaggcau

SEQ ID NO: 1137417 - RNA, 19 nt, Artificial Sequence
  Description of Artificial Sequence: Synthetic oligonucleotide
  Antisense strand to SEQ ID NO: 1137416
augccucuagccaacuuau

SEQ ID NO: 1137418 - RNA, 19 nt, Artificial Sequence
  Description of Artificial Sequence: Synthetic oligonucleotide
  Sense strand starting at position 395 of SEQ ID NO: 916192
auacaacugugcccagaau

SEQ ID NO: 1137419 - RNA, 19 nt, Artificial Sequence
  Description of Artificial Sequence: Synthetic oligonucleotide
  Antisense strand to SEQ ID NO: 1137418
auucugggcacaguuguau

SEQ ID NO: 1137420 - RNA, 19 nt, Artificial Sequence
  Description of Artificial Sequence: Synthetic oligonucleotide
  Sense strand starting at position 869 of SEQ ID NO: 916192
guccucaucuguuaaauug

SEQ ID NO: 1137421 - RNA, 19 nt, Artificial Sequence
  Description of Artificial Sequence: Synthetic oligonucleotide
  Antisense strand to SEQ ID NO: 1137420
caauuuaacagaugaggac

SEQ ID NO: 1137422 - RNA, 19 nt, Artificial Sequence
  Description of Artificial Sequence: Synthetic oligonucleotide
  Sense strand starting at position 931 of SEQ ID NO: 916192
cuggcaaacuaugggaaau

SEQ ID NO: 1137423 - RNA, 19 nt, Artificial Sequence
  Description of Artificial Sequence: Synthetic oligonucleotide
  Antisense strand to SEQ ID NO: 1137422
auuucccauaguuugccag

SEQ ID NO: 1137424 - RNA, 19 nt, Artificial Sequence
  Description of Artificial Sequence: Synthetic oligonucleotide
  Sense strand starting at position 1027 of SEQ ID NO: 916192
ccucuaagggcugagugaa

SEQ ID NO: 1137425 - RNA, 19 nt, Artificial Sequence
  Description of Artificial Sequence: Synthetic oligonucleotide
  Antisense strand to SEQ ID NO: 1137424
uucacucagcccuuagagg

SEQ ID NO: 1137426 - RNA, 19 nt, Artificial Sequence
  Description of Artificial Sequence: Synthetic oligonucleotide
  Sense strand starting at position 1042 of SEQ ID NO: 916192
ugaauugacuccugaagag

SEQ ID NO: 1137427 - RNA, 19 nt, Artificial Sequence
  Description of Artificial Sequence: Synthetic oligonucleotide
  Antisense strand to SEQ ID NO: 1137426
cucuucaggagucaauuca

SEQ ID NO: 1137428 - RNA, 19 nt, Artificial Sequence
  Description of Artificial Sequence: Synthetic oligonucleotide
  Sense strand starting at position 1087 of SEQ ID NO: 916192
gugagcuuucagggaaaga

SEQ ID NO: 1137429 - RNA, 19 nt, Artificial Sequence
  Description of Artificial Sequence: Synthetic oligonucleotide
  Antisense strand to SEQ ID NO: 1137428
ucuuucccugaaagcucac

SEQ ID NO: 1137430 - RNA, 19 nt, Artificial Sequence
  Description of Artificial Sequence: Synthetic oligonucleotide
  Sense strand starting at position 1178 of SEQ ID NO: 916192
gagacugaagcauggcauu

SEQ ID NO: 1137431 - RNA, 19 nt, Artificial Sequence
  Description of Artificial Sequence: Synthetic oligonucleotide
  Antisense strand to SEQ ID NO: 1137430
aaugccaugcuucagucuc

SEQ ID NO: 1137432 - RNA, 19 nt, Artificial Sequence
  Description of Artificial Sequence: Synthetic oligonucleotide
  Sense strand starting at position 1315 of SEQ ID NO: 916192
aaacaugugugccaagaac

SEQ ID NO: 1137433 - RNA, 19 nt, Artificial Sequence
  Description of Artificial Sequence: Synthetic oligonucleotide
  Antisense strand to SEQ ID NO: 1137432
guucuuggcacacauguuu

SEQ ID NO: 1137434 - RNA, 19 nt, Artificial Sequence
  Description of Artificial Sequence: Synthetic oligonucleotide
  Sense strand starting at position 1487 of SEQ ID NO: 916192
gugcgugggagcucucuua

SEQ ID NO: 1137435 - RNA, 19 nt, Artificial Sequence
  Description of Artificial Sequence: Synthetic oligonucleotide
  Antisense strand to SEQ ID NO: 1137434
uaagagagcucccacgcac

SEQ ID NO: 1137436 - RNA, 19 nt, Artificial Sequence
  Description of Artificial Sequence: Synthetic oligonucleotide
  Sense strand starting at position 1591 of SEQ ID NO: 916192
gucccuaugggcugagaga

SEQ ID NO: 1137437 - RNA, 19 nt, Artificial Sequence
  Description of Artificial Sequence: Synthetic oligonucleotide
  Antisense strand to SEQ ID NO: 1137436
ucucucagcccauagggac

SEQ ID NO: 1137438 - RNA, 19 nt, Artificial Sequence
  Description of Artificial Sequence: Synthetic oligonucleotide
  Sense strand starting at position 1613 of SEQ ID NO: 916192
gaggguggucauuggccaa

SEQ ID NO: 1137439 - RNA, 19 nt, Artificial Sequence
  Description of Artificial Sequence: Synthetic oligonucleotide
  Antisense strand to SEQ ID NO: 1137438
uuggccaaugaccacccuc

SEQ ID NO: 1137440 - RNA, 19 nt, Artificial Sequence
  Description of Artificial Sequence: Synthetic oligonucleotide
  Sense strand starting at position 1748 of SEQ ID NO: 916192
gucccauguccucgugcau

SEQ ID NO: 1137441 - RNA, 19 nt, Artificial Sequence
  Description of Artificial Sequence: Synthetic oligonucleotide
  Antisense strand to SEQ ID NO: 1137440
augcacgaggacaugggac

SEQ ID NO: 1137442 - RNA, 19 nt, Artificial Sequence
  Description of Artificial Sequence: Synthetic oligonucleotide
  Sense strand starting at position 2174 of SEQ ID NO: 916192
ccgggaagcucauugcgau

SEQ ID NO: 1137443 - RNA, 19 nt, Artificial Sequence
  Description of Artificial Sequence: Synthetic oligonucleotide
  Antisense strand to SEQ ID NO: 1137442
aucgcaaugagcuucccgg

SEQ ID NO: 1137444 - RNA, 19 nt, Artificial Sequence
  Description of Artificial Sequence: Synthetic oligonucleotide
  Sense strand starting at position 2175 of SEQ ID NO: 916192
cgggaagcucauugcgauu

SEQ ID NO: 1137445 - RNA, 19 nt, Artificial Sequence
  Description of Artificial Sequence: Synthetic oligonucleotide
  Antisense strand to SEQ ID NO: 1137444
aaucgcaaugagcuucccg

SEQ ID NO: 1137446 - RNA, 19 nt, Artificial Sequence
  Description of Artificial Sequence: Synthetic oligonucleotide
  Sense strand starting at position 2265 of SEQ ID NO: 916192
gcugaaguccuaggcuuaa

SEQ ID NO: 1137447 - RNA, 19 nt, Artificial Sequence
  Description of Artificial Sequence: Synthetic oligonucleotide
  Antisense strand to SEQ ID NO: 1137446
uuaagccuaggacuucagc

SEQ ID NO: 1137448 - RNA, 19 nt, Artificial Sequence
  Description of Artificial Sequence: Synthetic oligonucleotide
  Sense strand starting at position 2405 of SEQ ID NO: 916192
uugccagguuuagcaaauu

SEQ ID NO: 1137449 - RNA, 19 nt, Artificial Sequence
  Description of Artificial Sequence: Synthetic oligonucleotide
  Antisense strand to SEQ ID NO: 1137448
aauuugcuaaaccuggcaa

SEQ ID NO: 1137450 - RNA, 19 nt, Artificial Sequence
  Description of Artificial Sequence: Synthetic oligonucleotide
  Sense strand starting at position 2465 of SEQ ID NO: 916192
aaaugugugaguggcagaa

SEQ ID NO: 1137451 - RNA, 19 nt, Artificial Sequence
  Description of Artificial Sequence: Synthetic oligonucleotide
  Antisense strand to SEQ ID NO: 1137450
uucugccacucacacauuu

SEQ ID NO: 1137452 - RNA, 19 nt, Artificial Sequence
  Description of Artificial Sequence: Synthetic oligonucleotide
  Sense strand starting at position 2596 of SEQ ID NO: 916192
uugaguucgagucgcacua

SEQ ID NO: 1137453 - RNA, 19 nt, Artificial Sequence
  Description of Artificial Sequence: Synthetic oligonucleotide
  Antisense strand to SEQ ID NO: 1137452
uagugcgacucgaacucaa

SEQ ID NO: 1137454 - RNA, 19 nt, Artificial Sequence
  Description of Artificial Sequence: Synthetic oligonucleotide
  Sense strand starting at position 2690 of SEQ ID NO: 916192
agaccaucaugauauguaa

SEQ ID NO: 1137455 - RNA, 19 nt, Artificial Sequence
  Description of Artificial Sequence: Synthetic oligonucleotide
  Antisense strand to SEQ ID NO: 1137454
uuacauaucaugauggucu

SEQ ID NO: 1137456 - RNA, 19 nt, Artificial Sequence
  Description of Artificial Sequence: Synthetic oligonucleotide
  Sense strand starting at position 2693 of SEQ ID NO: 916192
ccaucaugauauguaaagu

SEQ ID NO: 1137457 - RNA, 19 nt, Artificial Sequence
  Description of Artificial Sequence: Synthetic oligonucleotide
  Antisense strand to SEQ ID NO: 1137456
acuuuacauaucaugaugg

SEQ ID NO: 1137458 - RNA, 19 nt, Artificial Sequence
  Description of Artificial Sequence: Synthetic oligonucleotide
  Sense strand starting at position 2722 of SEQ ID NO: 916192
acagaaagcucucaagaaa

SEQ ID NO: 1137459 - RNA, 19 nt, Artificial Sequence
  Description of Artificial Sequence: Synthetic oligonucleotide
  Antisense strand to SEQ ID NO: 1137458
uuucuugagagcuuucugu

SEQ ID NO: 1137460 - RNA, 19 nt, Artificial Sequence
  Description of Artificial Sequence: Synthetic oligonucleotide
  Sense strand starting at position 2835 of SEQ ID NO: 916192
cuauuaaguccuggccuga

SEQ ID NO: 1137461 - RNA, 19 nt, Artificial Sequence
  Description of Artificial Sequence: Synthetic oligonucleotide
  Antisense strand to SEQ ID NO: 1137460
ucaggccaggacuuaauag

SEQ ID NO: 1137462 - RNA, 19 nt, Artificial Sequence
  Description of Artificial Sequence: Synthetic oligonucleotide
  Sense strand starting at position 2878 of SEQ ID NO: 916192
gggucagcucuccauugua

SEQ ID NO: 1137463 - RNA, 19 nt, Artificial Sequence
  Description of Artificial Sequence: Synthetic oligonucleotide
  Antisense strand to SEQ ID NO: 1137462
uacaauggagagcugaccc

SEQ ID NO: 1137464 - RNA, 19 nt, Artificial Sequence
  Description of Artificial Sequence: Synthetic oligonucleotide
  Sense strand starting at position 2978 of SEQ ID NO: 916192
acaaaugaguucuggaagu

SEQ ID NO: 1137465 - RNA, 19 nt, Artificial Sequence
  Description of Artificial Sequence: Synthetic oligonucleotide
  Antisense strand to SEQ ID NO: 1137464
acuuccagaacucauuugu

SEQ ID NO: 1137466 - RNA, 19 nt, Artificial Sequence
  Description of Artificial Sequence: Synthetic oligonucleotide
  Sense strand starting at position 2991 of SEQ ID NO: 916192
ggaagugauucaugcuagg

SEQ ID NO: 1137467 - RNA, 19 nt, Artificial Sequence
  Description of Artificial Sequence: Synthetic oligonucleotide
  Antisense strand to SEQ ID NO: 1137466
ccuagcaugaaucacuucc

SEQ ID NO: 1137468 - RNA, 19 nt, Artificial Sequence
  Description of Artificial Sequence: Synthetic oligonucleotide
  Sense strand starting at position 3349 of SEQ ID NO: 916192
ugugguuaucugggagaag

SEQ ID NO: 1137469 - RNA, 19 nt, Artificial Sequence
  Description of Artificial Sequence: Synthetic oligonucleotide
  Antisense strand to SEQ ID NO: 1137468
cuucucccagauaaccaca

SEQ ID NO: 1137470 - RNA, 19 nt, Artificial Sequence
  Description of Artificial Sequence: Synthetic oligonucleotide
  Sense strand starting at position 3350 of SEQ ID NO: 916192
gugguuaucugggagaagg

SEQ ID NO: 1137471 - RNA, 19 nt, Artificial Sequence
  Description of Artificial Sequence: Synthetic oligonucleotide
  Antisense strand to SEQ ID NO: 1137470
ccuucucccagauaaccac

SEQ ID NO: 1137472 - RNA, 19 nt, Artificial Sequence
  Description of Artificial Sequence: Synthetic oligonucleotide
  Sense strand starting at position 3471 of SEQ ID NO: 916192
ugggaagaauaguaggaaa

SEQ ID NO: 1137473 - RNA, 19 nt, Artificial Sequence
  Description of Artificial Sequence: Synthetic oligonucleotide
  Antisense strand to SEQ ID NO: 1137472
uuuccuacuauucuuccca

SEQ ID NO: 1137474 - RNA, 19 nt, Artificial Sequence
  Description of Artificial Sequence: Synthetic oligonucleotide
  Sense strand starting at position 3837 of SEQ ID NO: 916192
aucagagauuauuggcaaa

SEQ ID NO: 1137475 - RNA, 19 nt, Artificial Sequence
  Description of Artificial Sequence: Synthetic oligonucleotide
  Antisense strand to SEQ ID NO: 1137474
uuugccaauaaucucugau

SEQ ID NO: 1137476 - RNA, 19 nt, Artificial Sequence
  Description of Artificial Sequence: Synthetic oligonucleotide
  Sense strand starting at position 3956 of SEQ ID NO: 916192
gggacauggucuguguuag

SEQ ID NO: 1137477 - RNA, 19 nt, Artificial Sequence
  Description of Artificial Sequence: Synthetic oligonucleotide
  Antisense strand to SEQ ID NO: 1137476
cuaacacagaccauguccc

SEQ ID NO: 1137478 - RNA, 19 nt, Artificial Sequence
  Description of Artificial Sequence: Synthetic oligonucleotide
  Sense strand starting at position 3960 of SEQ ID NO: 916192
cauggucuguguuagauuu

SEQ ID NO: 1137479 - RNA, 19 nt, Artificial Sequence
  Description of Artificial Sequence: Synthetic oligonucleotide
  Antisense strand to SEQ ID NO: 1137478
aaaucuaacacagaccaug

SEQ ID NO: 1137480 - RNA, 19 nt, Artificial Sequence
  Description of Artificial Sequence: Synthetic oligonucleotide
  Sense strand starting at position 3962 of SEQ ID NO: 916192
uggucuguguuagauuuaa

SEQ ID NO: 1137481 - RNA, 19 nt, Artificial Sequence
  Description of Artificial Sequence: Synthetic oligonucleotide
  Antisense strand to SEQ ID NO: 1137480
uuaaaucuaacacagacca

SEQ ID NO: 1137482 - RNA, 19 nt, Artificial Sequence
  Description of Artificial Sequence: Synthetic oligonucleotide
  Sense strand starting at position 606 of SEQ ID NO: 916193
acagguuugagcuaacaug

SEQ ID NO: 1137483 - RNA, 19 nt, Artificial Sequence
  Description of Artificial Sequence: Synthetic oligonucleotide
  Antisense strand to SEQ ID NO: 1137482
cauguuagcucaaaccugu

SEQ ID NO: 1137484 - RNA, 19 nt, Artificial Sequence
  Description of Artificial Sequence: Synthetic oligonucleotide
  Sense strand starting at position 774 of SEQ ID NO: 916193
guuguacugcgagagaaua

SEQ ID NO: 1137485 - RNA, 19 nt, Artificial Sequence
  Description of Artificial Sequence: Synthetic oligonucleotide
  Antisense strand to SEQ ID NO: 1137484
uauucucucgcaguacaac

SEQ ID NO: 1137486 - RNA, 19 nt, Artificial Sequence
  Description of Artificial Sequence: Synthetic oligonucleotide
  Sense strand starting at position 776 of SEQ ID NO: 916193
uguacugcgagagaauaaa

SEQ ID NO: 1137487 - RNA, 19 nt, Artificial Sequence
  Description of Artificial Sequence: Synthetic oligonucleotide
  Antisense strand to SEQ ID NO: 1137486
uuuauucucucgcaguaca

SEQ ID NO: 1137488 - RNA, 19 nt, Artificial Sequence
  Description of Artificial Sequence: Synthetic oligonucleotide
  Sense strand starting at position 797 of SEQ ID NO: 916193
gcaguauaaccuuaauugu

SEQ ID NO: 1137489 - RNA, 19 nt, Artificial Sequence
  Description of Artificial Sequence: Synthetic oligonucleotide
  Antisense strand to SEQ ID NO: 1137488
acaauuaagguuauacugc

SEQ ID NO: 1137490 - RNA, 19 nt, Artificial Sequence
  Description of Artificial Sequence: Synthetic oligonucleotide
  Sense strand starting at position 981 of SEQ ID NO: 916193
cccggcugacauuauguaa

SEQ ID NO: 1137491 - RNA, 19 nt, Artificial Sequence
  Description of Artificial Sequence: Synthetic oligonucleotide
  Antisense strand to SEQ ID NO: 1137490
uuacauaaugucagccggg

SEQ ID NO: 1137492 - RNA, 19 nt, Artificial Sequence
  Description of Artificial Sequence: Synthetic oligonucleotide
  Sense strand starting at position 984 of SEQ ID NO: 916193
ggcugacauuauguaaaca

SEQ ID NO: 1137493 - RNA, 19 nt, Artificial Sequence
  Description of Artificial Sequence: Synthetic oligonucleotide
  Antisense strand to SEQ ID NO: 1137492
uguuuacauaaugucagcc

SEQ ID NO: 1137494 - RNA, 19 nt, Artificial Sequence
  Description of Artificial Sequence: Synthetic oligonucleotide
  Sense strand starting at position 1096 of SEQ ID NO: 916193
cuggcuaauagcuguuuga

SEQ ID NO: 1137495 - RNA, 19 nt, Artificial Sequence
  Description of Artificial Sequence: Synthetic oligonucleotide
  Antisense strand to SEQ ID NO: 1137494
ucaaacagcuauuagccag

SEQ ID NO: 1137496 - RNA, 19 nt, Artificial Sequence
  Description of Artificial Sequence: Synthetic oligonucleotide
  Sense strand starting at position 1099 of SEQ ID NO: 916193
gcuaauagcuguuugauaa

SEQ ID NO: 1137497 - RNA, 19 nt, Artificial Sequence
  Description of Artificial Sequence: Synthetic oligonucleotide
  Antisense strand to SEQ ID NO: 1137496
uuaucaaacagcuauuagc

SEQ ID NO: 1137498 - RNA, 19 nt, Artificial Sequence
  Description of Artificial Sequence: Synthetic oligonucleotide
  Sense strand starting at position 1100 of SEQ ID NO: 916193
cuaauagcuguuugauaaa

SEQ ID NO: 1137499 - RNA, 19 nt, Artificial Sequence
  Description of Artificial Sequence: Synthetic oligonucleotide
  Antisense strand to SEQ ID NO: 1137498
uuuaucaaacagcuauuag

SEQ ID NO: 1137500 - RNA, 19 nt, Artificial Sequence
  Description of Artificial Sequence: Synthetic oligonucleotide
  Sense strand starting at position 1480 of SEQ ID NO: 916193
agagauuaaugucaaauug

SEQ ID NO: 1137501 - RNA, 19 nt, Artificial Sequence
  Description of Artificial Sequence: Synthetic oligonucleotide
  Antisense strand to SEQ ID NO: 1137500
caauuugacauuaaucucu

SEQ ID NO: 1137502 - RNA, 19 nt, Artificial Sequence
  Description of Artificial Sequence: Synthetic oligonucleotide
  Sense strand starting at position 1492 of SEQ ID NO: 916193
caaauuggagcuuguuaua

SEQ ID NO: 1137503 - RNA, 19 nt, Artificial Sequence
  Description of Artificial Sequence: Synthetic oligonucleotide
  Antisense strand to SEQ ID NO: 1137502
uauaacaagcuccaauuug

SEQ ID NO: 1137504 - RNA, 19 nt, Artificial Sequence
  Description of Artificial Sequence: Synthetic oligonucleotide
  Sense strand starting at position 1526 of SEQ ID NO: 916193
aggugaaauugucauuuga

SEQ ID NO: 1137505 - RNA, 19 nt, Artificial Sequence
  Description of Artificial Sequence: Synthetic oligonucleotide
  Antisense strand to SEQ ID NO: 1137504
ucaaaugacaauuucaccu

SEQ ID NO: 1137506 - RNA, 19 nt, Artificial Sequence
  Description of Artificial Sequence: Synthetic oligonucleotide
  Sense strand starting at position 1603 of SEQ ID NO: 916193
aaauguacuuggucacaga

SEQ ID NO: 1137507 - RNA, 19 nt, Artificial Sequence
  Description of Artificial Sequence: Synthetic oligonucleotide
  Antisense strand to SEQ ID NO: 1137506
ucugugaccaaguacauuu

SEQ ID NO: 1137508 - RNA, 19 nt, Artificial Sequence
  Description of Artificial Sequence: Synthetic oligonucleotide
  Sense strand starting at position 1685 of SEQ ID NO: 916193
ggagcugugcgcgcucaau

SEQ ID NO: 1137509 - RNA, 19 nt, Artificial Sequence
  Description of Artificial Sequence: Synthetic oligonucleotide
  Antisense strand to SEQ ID NO: 1137508
auugagcgcgcacagcucc

SEQ ID NO: 1137510 - RNA, 19 nt, Artificial Sequence
  Description of Artificial Sequence: Synthetic oligonucleotide
  Sense strand starting at position 1693 of SEQ ID NO: 916193
gcgcgcucaauccuagaga

SEQ ID NO: 1137511 - RNA, 19 nt, Artificial Sequence
  Description of Artificial Sequence: Synthetic oligonucleotide
  Antisense strand to SEQ ID NO: 1137510
ucucuaggauugagcgcgc

SEQ ID NO: 1137512 - RNA, 19 nt, Artificial Sequence
  Description of Artificial Sequence: Synthetic oligonucleotide
  Sense strand starting at position 1696 of SEQ ID NO: 916193
cgcucaauccuagagauga

SEQ ID NO: 1137513 - RNA, 19 nt, Artificial Sequence
  Description of Artificial Sequence: Synthetic oligonucleotide
  Antisense strand to SEQ ID NO: 1137512
ucaucucuaggauugagcg

SEQ ID NO: 1137514 - RNA, 19 nt, Artificial Sequence
  Description of Artificial Sequence: Synthetic oligonucleotide
  Sense strand starting at position 1794 of SEQ ID NO: 916193
gguggaauccuugaugcau

SEQ ID NO: 1137515 - RNA, 19 nt, Artificial Sequence
  Description of Artificial Sequence: Synthetic oligonucleotide
  Antisense strand to SEQ ID NO: 1137514
augcaucaaggauuccacc

SEQ ID NO: 1137516 - RNA, 19 nt, Artificial Sequence
  Description of Artificial Sequence: Synthetic oligonucleotide
  Sense strand starting at position 1824 of SEQ ID NO: 916193
agggucauugucuaucuca

SEQ ID NO: 1137517 - RNA, 19 nt, Artificial Sequence
  Description of Artificial Sequence: Synthetic oligonucleotide
  Antisense strand to SEQ ID NO: 1137516
ugagauagacaaugacccu

SEQ ID NO: 1137518 - RNA, 19 nt, Artificial Sequence
  Description of Artificial Sequence: Synthetic oligonucleotide
  Sense strand starting at position 1827 of SEQ ID NO: 916193
gucauugucuaucucauuu

SEQ ID NO: 1137519 - RNA, 19 nt, Artificial Sequence
  Description of Artificial Sequence: Synthetic oligonucleotide
  Antisense strand to SEQ ID NO: 1137518
aaaugagauagacaaugac

SEQ ID NO: 1137520 - RNA, 19 nt, Artificial Sequence
  Description of Artificial Sequence: Synthetic oligonucleotide
  Sense strand starting at position 1953 of SEQ ID NO: 916193
ggucuuuccugauccuaga

SEQ ID NO: 1137521 - RNA, 19 nt, Artificial Sequence
  Description of Artificial Sequence: Synthetic oligonucleotide
  Antisense strand to SEQ ID NO: 1137520
ucuaggaucaggaaagacc

SEQ ID NO: 1137522 - RNA, 19 nt, Artificial Sequence
  Description of Artificial Sequence: Synthetic oligonucleotide
  Sense strand starting at position 2047 of SEQ ID NO: 916193
gugacauuaucauugauca

SEQ ID NO: 1137523 - RNA, 19 nt, Artificial Sequence
  Description of Artificial Sequence: Synthetic oligonucleotide
  Antisense strand to SEQ ID NO: 1137522
ugaucaaugauaaugucac

SEQ ID NO: 1137524 - RNA, 19 nt, Artificial Sequence
  Description of Artificial Sequence: Synthetic oligonucleotide
  Sense strand starting at position 2070 of SEQ ID NO: 916193
uguaaagaaugcuuacuau

SEQ ID NO: 1137525 - RNA, 19 nt, Artificial Sequence
  Description of Artificial Sequence: Synthetic oligonucleotide
  Antisense strand to SEQ ID NO: 1137524
auaguaagcauucuuuaca

SEQ ID NO: 1137526 - RNA, 19 nt, Artificial Sequence
  Description of Artificial Sequence: Synthetic oligonucleotide
  Sense strand starting at position 2077 of SEQ ID NO: 916193
aaugcuuacuaugugcaga

SEQ ID NO: 1137527 - RNA, 19 nt, Artificial Sequence
  Description of Artificial Sequence: Synthetic oligonucleotide
  Antisense strand to SEQ ID NO: 1137526
ucugcacauaguaagcauu

SEQ ID NO: 1137528 - RNA, 19 nt, Artificial Sequence
  Description of Artificial Sequence: Synthetic oligonucleotide
  Sense strand starting at position 2079 of SEQ ID NO: 916193
ugcuuacuaugugcagaga

SEQ ID NO: 1137529 - RNA, 19 nt, Artificial Sequence
  Description of Artificial Sequence: Synthetic oligonucleotide
  Antisense strand to SEQ ID NO: 1137528
ucucugcacauaguaagca

SEQ ID NO: 1137530 - RNA, 19 nt, Artificial Sequence
  Description of Artificial Sequence: Synthetic oligonucleotide
  Sense strand starting at position 2080 of SEQ ID NO: 916193
gcuuacuaugugcagagaa

SEQ ID NO: 1137531 - RNA, 19 nt, Artificial Sequence
  Description of Artificial Sequence: Synthetic oligonucleotide
  Antisense strand to SEQ ID NO: 1137530
uucucugcacauaguaagc

SEQ ID NO: 1137532 - RNA, 19 nt, Artificial Sequence
  Description of Artificial Sequence: Synthetic oligonucleotide
  Sense strand starting at position 2082 of SEQ ID NO: 916193
uuacuaugugcagagaacu

SEQ ID NO: 1137533 - RNA, 19 nt, Artificial Sequence
  Description of Artificial Sequence: Synthetic oligonucleotide
  Antisense strand to SEQ ID NO: 1137532
aguucucugcacauaguaa

SEQ ID NO: 1137534 - RNA, 19 nt, Artificial Sequence
  Description of Artificial Sequence: Synthetic oligonucleotide
  Sense strand starting at position 2088 of SEQ ID NO: 916193
ugugcagagaacuggucau

SEQ ID NO: 1137535 - RNA, 19 nt, Artificial Sequence
  Description of Artificial Sequence: Synthetic oligonucleotide
  Antisense strand to SEQ ID NO: 1137534
augaccaguucucugcaca

SEQ ID NO: 1137536 - RNA, 19 nt, Artificial Sequence
  Description of Artificial Sequence: Synthetic oligonucleotide
  Sense strand starting at position 2094 of SEQ ID NO: 916193
gagaacuggucauucuaua

SEQ ID NO: 1137537 - RNA, 19 nt, Artificial Sequence
  Description of Artificial Sequence: Synthetic oligonucleotide
  Antisense strand to SEQ ID NO: 1137536
uauagaaugaccaguucuc

SEQ ID NO: 1137538 - RNA, 19 nt, Artificial Sequence
  Description of Artificial Sequence: Synthetic oligonucleotide
  Sense strand starting at position 2110 of SEQ ID NO: 916193
auaugcugccaugguagaa

SEQ ID NO: 1137539 - RNA, 19 nt, Artificial Sequence
  Description of Artificial Sequence: Synthetic oligonucleotide
  Antisense strand to SEQ ID NO: 1137538
uucuaccauggcagcauau

SEQ ID NO: 1137540 - RNA, 19 nt, Artificial Sequence
  Description of Artificial Sequence: Synthetic oligonucleotide
  Sense strand starting at position 2533 of SEQ ID NO: 916193
aaaucuaggugugucaaau

SEQ ID NO: 1137541 - RNA, 19 nt, Artificial Sequence
  Description of Artificial Sequence: Synthetic oligonucleotide
  Antisense strand to SEQ ID NO: 1137540
auuugacacaccuagauuu

SEQ ID NO: 1137542 - RNA, 19 nt, Artificial Sequence
  Description of Artificial Sequence: Synthetic oligonucleotide
  Sense strand starting at position 2665 of SEQ ID NO: 916193
uaguaacuuggaugauauc

SEQ ID NO: 1137543 - RNA, 19 nt, Artificial Sequence
  Description of Artificial Sequence: Synthetic oligonucleotide
  Antisense strand to SEQ ID NO: 1137542
gauaucauccaaguuacua

SEQ ID NO: 1137544 - RNA, 19 nt, Artificial Sequence
  Description of Artificial Sequence: Synthetic oligonucleotide
  Sense strand starting at position 2676 of SEQ ID NO: 916193
augauaucauuuggaugaa

SEQ ID NO: 1137545 - RNA, 19 nt, Artificial Sequence
  Description of Artificial Sequence: Synthetic oligonucleotide
  Antisense strand to SEQ ID NO: 1137544
uucauccaaaugauaucau

SEQ ID NO: 1137546 - RNA, 19 nt, Artificial Sequence
  Description of Artificial Sequence: Synthetic oligonucleotide
  Sense strand starting at position 2677 of SEQ ID NO: 916193
ugauaucauuuggaugaag

SEQ ID NO: 1137547 - RNA, 19 nt, Artificial Sequence
  Description of Artificial Sequence: Synthetic oligonucleotide
  Antisense strand to SEQ ID NO: 1137546
cuucauccaaaugauauca

SEQ ID NO: 1137548 - RNA, 19 nt, Artificial Sequence
  Description of Artificial Sequence: Synthetic oligonucleotide
  Sense strand starting at position 2691 of SEQ ID NO: 916193
ugaaguaacuuggaugaua

SEQ ID NO: 1137549 - RNA, 19 nt, Artificial Sequence
  Description of Artificial Sequence: Synthetic oligonucleotide
  Antisense strand to SEQ ID NO: 1137548
uaucauccaaguuacuuca

SEQ ID NO: 1137550 - RNA, 19 nt, Artificial Sequence
  Description of Artificial Sequence: Synthetic oligonucleotide
  Sense strand starting at position 2693 of SEQ ID NO: 916193
aaguaacuuggaugauauc

SEQ ID NO: 1137551 - RNA, 19 nt, Artificial Sequence
  Description of Artificial Sequence: Synthetic oligonucleotide
  Antisense strand to SEQ ID NO: 1137550
gauaucauccaaguuacuu

SEQ ID NO: 1137552 - RNA, 19 nt, Artificial Sequence
  Description of Artificial Sequence: Synthetic oligonucleotide
  Sense strand starting at position 2704 of SEQ ID NO: 916193
augauaucauuuggaugag

SEQ ID NO: 1137553 - RNA, 19 nt, Artificial Sequence
  Description of Artificial Sequence: Synthetic oligonucleotide
  Antisense strand to SEQ ID NO: 1137552
cucauccaaaugauaucau

SEQ ID NO: 1137554 - RNA, 19 nt, Artificial Sequence
  Description of Artificial Sequence: Synthetic oligonucleotide
  Sense strand starting at position 2722 of SEQ ID NO: 916193
ggaucacacucuuugcacu

SEQ ID NO: 1137555 - RNA, 19 nt, Artificial Sequence
  Description of Artificial Sequence: Synthetic oligonucleotide
  Antisense strand to SEQ ID NO: 1137554
agugcaaagagugugaucc

SEQ ID NO: 1137556 - RNA, 19 nt, Artificial Sequence
  Description of Artificial Sequence: Synthetic oligonucleotide
  Sense strand starting at position 2978 of SEQ ID NO: 916193
agcauuacagaagguugaa

SEQ ID NO: 1137557 - RNA, 19 nt, Artificial Sequence
  Description of Artificial Sequence: Synthetic oligonucleotide
  Antisense strand to SEQ ID NO: 1137556
uucaaccuucuguaaugcu

SEQ ID NO: 1137558 - RNA, 19 nt, Artificial Sequence
  Description of Artificial Sequence: Synthetic oligonucleotide
  Sense strand starting at position 3107 of SEQ ID NO: 916193
uuacuacagguguauguau

SEQ ID NO: 1137559 - RNA, 19 nt, Artificial Sequence
  Description of Artificial Sequence: Synthetic oligonucleotide
  Antisense strand to SEQ ID NO: 1137558
auacauacaccuguaguaa

SEQ ID NO: 1137560 - RNA, 19 nt, Artificial Sequence
  Description of Artificial Sequence: Synthetic oligonucleotide
  Sense strand starting at position 3776 of SEQ ID NO: 916193
cccaaaguuuaguugucaa

SEQ ID NO: 1137561 - RNA, 19 nt, Artificial Sequence
  Description of Artificial Sequence: Synthetic oligonucleotide
  Antisense strand to SEQ ID NO: 1137560
uugacaacuaaacuuuggg

SEQ ID NO: 1137562 - RNA, 19 nt, Artificial Sequence
  Description of Artificial Sequence: Synthetic oligonucleotide
  Sense strand starting at position 1 of SEQ ID NO: 916194
ggagguaucugacuuguua

SEQ ID NO: 1137563 - RNA, 19 nt, Artificial Sequence
  Description of Artificial Sequence: Synthetic oligonucleotide
  Antisense strand to SEQ ID NO: 1137562
uaacaagucagauaccucc

SEQ ID NO: 1137564 - RNA, 19 nt, Artificial Sequence
  Description of Artificial Sequence: Synthetic oligonucleotide
  Sense strand starting at position 22 of SEQ ID NO: 916194
gcucuaugccgauugccua

SEQ ID NO: 1137565 - RNA, 19 nt, Artificial Sequence
  Description of Artificial Sequence: Synthetic oligonucleotide
  Antisense strand to SEQ ID NO: 1137564
uaggcaaucggcauagagc

SEQ ID NO: 1137566 - RNA, 19 nt, Artificial Sequence
  Description of Artificial Sequence: Synthetic oligonucleotide
  Sense strand starting at position 228 of SEQ ID NO: 916194
ggaugacucugagcugagu

SEQ ID NO: 1137567 - RNA, 19 nt, Artificial Sequence
  Description of Artificial Sequence: Synthetic oligonucleotide
  Antisense strand to SEQ ID NO: 1137566
acucagcucagagucaucc

SEQ ID NO: 1137568 - RNA, 19 nt, Artificial Sequence
  Description of Artificial Sequence: Synthetic oligonucleotide
  Sense strand starting at position 261 of SEQ ID NO: 916194
agcuuuaggguuuaaugca

SEQ ID NO: 1137569 - RNA, 19 nt, Artificial Sequence
  Description of Artificial Sequence: Synthetic oligonucleotide
  Antisense strand to SEQ ID NO: 1137568
ugcauuaaacccuaaagcu

SEQ ID NO: 1137570 - RNA, 19 nt, Artificial Sequence
  Description of Artificial Sequence: Synthetic oligonucleotide
  Sense strand starting at position 438 of SEQ ID NO: 916194
ucauaauggacccgugacu

SEQ ID NO: 1137571 - RNA, 19 nt, Artificial Sequence
  Description of Artificial Sequence: Synthetic oligonucleotide
  Antisense strand to SEQ ID NO: 1137570
agucacggguccauuauga

SEQ ID NO: 1137572 - RNA, 19 nt, Artificial Sequence
  Description of Artificial Sequence: Synthetic oligonucleotide
  Sense strand starting at position 476 of SEQ ID NO: 916194
agcuaaugucaugaucugu

SEQ ID NO: 1137573 - RNA, 19 nt, Artificial Sequence
  Description of Artificial Sequence: Synthetic oligonucleotide
  Antisense strand to SEQ ID NO: 1137572
acagaucaugacauuagcu

SEQ ID NO: 1137574 - RNA, 19 nt, Artificial Sequence
  Description of Artificial Sequence: Synthetic oligonucleotide
  Sense strand starting at position 558 of SEQ ID NO: 916194
gguggaaugcuucacugga

SEQ ID NO: 1137575 - RNA, 19 nt, Artificial Sequence
  Description of Artificial Sequence: Synthetic oligonucleotide
  Antisense strand to SEQ ID NO: 1137574
uccagugaagcauuccacc

SEQ ID NO: 1137576 - RNA, 19 nt, Artificial Sequence
  Description of Artificial Sequence: Synthetic oligonucleotide
  Sense strand starting at position 710 of SEQ ID NO: 916194
aucauagcaucuuuggaga

SEQ ID NO: 1137577 - RNA, 19 nt, Artificial Sequence
  Description of Artificial Sequence: Synthetic oligonucleotide
  Antisense strand to SEQ ID NO: 1137576
ucuccaaagaugcuaugau

SEQ ID NO: 1137578 - RNA, 19 nt, Artificial Sequence
  Description of Artificial Sequence: Synthetic oligonucleotide
  Sense strand starting at position 771 of SEQ ID NO: 916194
uuggaucucucugcugaga

SEQ ID NO: 1137579 - RNA, 19 nt, Artificial Sequence
  Description of Artificial Sequence: Synthetic oligonucleotide
  Antisense strand to SEQ ID NO: 1137578
ucucagcagagagauccaa

SEQ ID NO: 1137580 - RNA, 19 nt, Artificial Sequence
  Description of Artificial Sequence: Synthetic oligonucleotide
  Sense strand starting at position 780 of SEQ ID NO: 916194
ucugcugagauuuggcauu

SEQ ID NO: 1137581 - RNA, 19 nt, Artificial Sequence
  Description of Artificial Sequence: Synthetic oligonucleotide
  Antisense strand to SEQ ID NO: 1137580
aaugccaaaucucagcaga

SEQ ID NO: 1137582 - RNA, 19 nt, Artificial Sequence
  Description of Artificial Sequence: Synthetic oligonucleotide
  Sense strand starting at position 814 of SEQ ID NO: 916194
uccuaauucuuccuggaag

SEQ ID NO: 1137583 - RNA, 19 nt, Artificial Sequence
  Description of Artificial Sequence: Synthetic oligonucleotide
  Antisense strand to SEQ ID NO: 1137582
cuuccaggaagaauuagga

SEQ ID NO: 1137584 - RNA, 19 nt, Artificial Sequence
  Description of Artificial Sequence: Synthetic oligonucleotide
  Sense strand starting at position 865 of SEQ ID NO: 916194
gucugagagcuggguagaa

SEQ ID NO: 1137585 - RNA, 19 nt, Artificial Sequence
  Description of Artificial Sequence: Synthetic oligonucleotide
  Antisense strand to SEQ ID NO: 1137584
uucuacccagcucucagac

SEQ ID NO: 1137586 - RNA, 19 nt, Artificial Sequence
  Description of Artificial Sequence: Synthetic oligonucleotide
  Sense strand starting at position 1003 of SEQ ID NO: 916194
uauuuaaagugggaaucau

SEQ ID NO: 1137587 - RNA, 19 nt, Artificial Sequence
  Description of Artificial Sequence: Synthetic oligonucleotide
  Antisense strand to SEQ ID NO: 1137586
augauucccacuuuaaaua

SEQ ID NO: 1137588 - RNA, 19 nt, Artificial Sequence
  Description of Artificial Sequence: Synthetic oligonucleotide
  Sense strand starting at position 1084 of SEQ ID NO: 916194
uuaauaguaccuggcacau

SEQ ID NO: 1137589 - RNA, 19 nt, Artificial Sequence
  Description of Artificial Sequence: Synthetic oligonucleotide
  Antisense strand to SEQ ID NO: 1137588
augugccagguacuauuaa

SEQ ID NO: 1137590 - RNA, 19 nt, Artificial Sequence
  Description of Artificial Sequence: Synthetic oligonucleotide
  Sense strand starting at position 1220 of SEQ ID NO: 916194
cuggaugucuuuccucaca

SEQ ID NO: 1137591 - RNA, 19 nt, Artificial Sequence
  Description of Artificial Sequence: Synthetic oligonucleotide
  Antisense strand to SEQ ID NO: 1137590
ugugaggaaagacauccag

SEQ ID NO: 1137592 - RNA, 19 nt, Artificial Sequence
  Description of Artificial Sequence: Synthetic oligonucleotide
  Sense strand starting at position 1222 of SEQ ID NO: 916194
ggaugucuuuccucacaag

SEQ ID NO: 1137593 - RNA, 19 nt, Artificial Sequence
  Description of Artificial Sequence: Synthetic oligonucleotide
  Antisense strand to SEQ ID NO: 1137592
cuugugaggaaagacaucc

SEQ ID NO: 1137594 - RNA, 19 nt, Artificial Sequence
  Description of Artificial Sequence: Synthetic oligonucleotide
  Sense strand starting at position 1416 of SEQ ID NO: 916194
aacagauucuggguccuuu

SEQ ID NO: 1137595 - RNA, 19 nt, Artificial Sequence
  Description of Artificial Sequence: Synthetic oligonucleotide
  Antisense strand to SEQ ID NO: 1137594
aaaggacccagaaucuguu

SEQ ID NO: 1137596 - RNA, 19 nt, Artificial Sequence
  Description of Artificial Sequence: Synthetic oligonucleotide
  Sense strand starting at position 1586 of SEQ ID NO: 916194
auacuaaucugucugcaga

SEQ ID NO: 1137597 - RNA, 19 nt, Artificial Sequence
  Description of Artificial Sequence: Synthetic oligonucleotide
  Antisense strand to SEQ ID NO: 1137596
ucugcagacagauuaguau

SEQ ID NO: 1137598 - RNA, 19 nt, Artificial Sequence
  Description of Artificial Sequence: Synthetic oligonucleotide
  Sense strand starting at position 1645 of SEQ ID NO: 916194
gcuggaaucucacucaaac

SEQ ID NO: 1137599 - RNA, 19 nt, Artificial Sequence
  Description of Artificial Sequence: Synthetic oligonucleotide
  Antisense strand to SEQ ID NO: 1137598
guuugagugagauuccagc

SEQ ID NO: 1137600 - RNA, 19 nt, Artificial Sequence
  Description of Artificial Sequence: Synthetic oligonucleotide
  Sense strand starting at position 2006 of SEQ ID NO: 916194
gugacaucaucaguuugau

SEQ ID NO: 1137601 - RNA, 19 nt, Artificial Sequence
  Description of Artificial Sequence: Synthetic oligonucleotide
  Antisense strand to SEQ ID NO: 1137600
aucaaacugaugaugucac

SEQ ID NO: 1137602 - RNA, 19 nt, Artificial Sequence
  Description of Artificial Sequence: Synthetic oligonucleotide
  Sense strand starting at position 2009 of SEQ ID NO: 916194
acaucaucaguuugauuag

SEQ ID NO: 1137603 - RNA, 19 nt, Artificial Sequence
  Description of Artificial Sequence: Synthetic oligonucleotide
  Antisense strand to SEQ ID NO: 1137602
cuaaucaaacugaugaugu

SEQ ID NO: 1137604 - RNA, 19 nt, Artificial Sequence
  Description of Artificial Sequence: Synthetic oligonucleotide
  Sense strand starting at position 2012 of SEQ ID NO: 916194
ucaucaguuugauuagaag

SEQ ID NO: 1137605 - RNA, 19 nt, Artificial Sequence
  Description of Artificial Sequence: Synthetic oligonucleotide
  Antisense strand to SEQ ID NO: 1137604
cuucuaaucaaacugauga

SEQ ID NO: 1137606 - RNA, 19 nt, Artificial Sequence
  Description of Artificial Sequence: Synthetic oligonucleotide
  Sense strand starting at position 2821 of SEQ ID NO: 916194
ggugauagauacccugaca

SEQ ID NO: 1137607 - RNA, 19 nt, Artificial Sequence
  Description of Artificial Sequence: Synthetic oligonucleotide
  Antisense strand to SEQ ID NO: 1137606
ugucaggguaucuaucacc

SEQ ID NO: 1137608 - RNA, 19 nt, Artificial Sequence
  Description of Artificial Sequence: Synthetic oligonucleotide
  Sense strand starting at position 3037 of SEQ ID NO: 916194
uggagauuccagcacuucu

SEQ ID NO: 1137609 - RNA, 19 nt, Artificial Sequence
  Description of Artificial Sequence: Synthetic oligonucleotide
  Antisense strand to SEQ ID NO: 1137608
agaagugcuggaaucucca

SEQ ID NO: 1137610 - RNA, 19 nt, Artificial Sequence
  Description of Artificial Sequence: Synthetic oligonucleotide
  Sense strand starting at position 3055 of SEQ ID NO: 916194
ucuugcaggaguugauaga

SEQ ID NO: 1137611 - RNA, 19 nt, Artificial Sequence
  Description of Artificial Sequence: Synthetic oligonucleotide
  Antisense strand to SEQ ID NO: 1137610
ucuaucaacuccugcaaga

SEQ ID NO: 1137612 - RNA, 19 nt, Artificial Sequence
  Description of Artificial Sequence: Synthetic oligonucleotide
  Sense strand starting at position 3123 of SEQ ID NO: 916194
acuugacuccauugacagu

SEQ ID NO: 1137613 - RNA, 19 nt, Artificial Sequence
  Description of Artificial Sequence: Synthetic oligonucleotide
  Antisense strand to SEQ ID NO: 1137612
acugucaauggagucaagu

SEQ ID NO: 1137614 - RNA, 19 nt, Artificial Sequence
  Description of Artificial Sequence: Synthetic oligonucleotide
  Sense strand starting at position 3275 of SEQ ID NO: 916194
uucucugaccacuauggua

SEQ ID NO: 1137615 - RNA, 19 nt, Artificial Sequence
  Description of Artificial Sequence: Synthetic oligonucleotide
  Antisense strand to SEQ ID NO: 1137614
uaccauaguggucagagaa

SEQ ID NO: 1137616 - RNA, 19 nt, Artificial Sequence
  Description of Artificial Sequence: Synthetic oligonucleotide
  Sense strand starting at position 3277 of SEQ ID NO: 916194
cucugaccacuaugguauu

SEQ ID NO: 1137617 - RNA, 19 nt, Artificial Sequence
  Description of Artificial Sequence: Synthetic oligonucleotide
  Antisense strand to SEQ ID NO: 1137616
aauaccauaguggucagag

SEQ ID NO: 1137618 - RNA, 19 nt, Artificial Sequence
  Description of Artificial Sequence: Synthetic oligonucleotide
  Sense strand starting at position 3705 of SEQ ID NO: 916194
cagacucuacagugggaau

SEQ ID NO: 1137619 - RNA, 19 nt, Artificial Sequence
  Description of Artificial Sequence: Synthetic oligonucleotide
  Antisense strand to SEQ ID NO: 1137618
auucccacuguagagucug

SEQ ID NO: 1137620 - RNA, 19 nt, Artificial Sequence
  Description of Artificial Sequence: Synthetic oligonucleotide
  Sense strand starting at position 3755 of SEQ ID NO: 916194
gccaauaaaguugguaaau

SEQ ID NO: 1137621 - RNA, 19 nt, Artificial Sequence
  Description of Artificial Sequence: Synthetic oligonucleotide
  Antisense strand to SEQ ID NO: 1137620
auuuaccaacuuuauuggc

SEQ ID NO: 1137622 - RNA, 19 nt, Artificial Sequence
  Description of Artificial Sequence: Synthetic oligonucleotide
  Sense strand starting at position 3756 of SEQ ID NO: 916194
ccaauaaaguugguaaauu

SEQ ID NO: 1137623 - RNA, 19 nt, Artificial Sequence
  Description of Artificial Sequence: Synthetic oligonucleotide
  Antisense strand to SEQ ID NO: 1137622
aauuuaccaacuuuauugg

SEQ ID NO: 1137624 - RNA, 19 nt, Artificial Sequence
  Description of Artificial Sequence: Synthetic oligonucleotide
  Sense strand starting at position 3782 of SEQ ID NO: 916194
augggcaaauucuuuaaca

SEQ ID NO: 1137625 - RNA, 19 nt, Artificial Sequence
  Description of Artificial Sequence: Synthetic oligonucleotide
  Antisense strand to SEQ ID NO: 1137624
uguuaaagaauuugcccau

SEQ ID NO: 1137626 - RNA, 19 nt, Artificial Sequence
  Description of Artificial Sequence: Synthetic oligonucleotide
  Sense strand starting at position 3783 of SEQ ID NO: 916194
ugggcaaauucuuuaacau

SEQ ID NO: 1137627 - RNA, 19 nt, Artificial Sequence
  Description of Artificial Sequence: Synthetic oligonucleotide
  Antisense strand to SEQ ID NO: 1137626
auguuaaagaauuugccca

SEQ ID NO: 1137628 - RNA, 19 nt, Artificial Sequence
  Description of Artificial Sequence: Synthetic oligonucleotide
  Sense strand starting at position 3808 of SEQ ID NO: 916194
ccuaucgaugcucacuaaa

SEQ ID NO: 1137629 - RNA, 19 nt, Artificial Sequence
  Description of Artificial Sequence: Synthetic oligonucleotide
  Antisense strand to SEQ ID NO: 1137628
uuuagugagcaucgauagg

SEQ ID NO: 1137630 - RNA, 19 nt, Artificial Sequence
  Description of Artificial Sequence: Synthetic oligonucleotide
  Sense strand starting at position 3811 of SEQ ID NO: 916194
aucgaugcucacuaaagaa

SEQ ID NO: 1137631 - RNA, 19 nt, Artificial Sequence
  Description of Artificial Sequence: Synthetic oligonucleotide
  Antisense strand to SEQ ID NO: 1137630
uucuuuagugagcaucgau

SEQ ID NO: 1137632 - RNA, 19 nt, Artificial Sequence
  Description of Artificial Sequence: Synthetic oligonucleotide
  Sense strand starting at position 3838 of SEQ ID NO: 916194
cuuugaauauccguaaauc

SEQ ID NO: 1137633 - RNA, 19 nt, Artificial Sequence
  Description of Artificial Sequence: Synthetic oligonucleotide
  Antisense strand to SEQ ID NO: 1137632
gauuuacggauauucaaag

SEQ ID NO: 1137634 - RNA, 19 nt, Artificial Sequence
  Description of Artificial Sequence: Synthetic oligonucleotide
  Sense strand starting at position 3839 of SEQ ID NO: 916194
uuugaauauccguaaaucu

SEQ ID NO: 1137635 - RNA, 19 nt, Artificial Sequence
  Description of Artificial Sequence: Synthetic oligonucleotide
  Antisense strand to SEQ ID NO: 1137634
agauuuacggauauucaaa

SEQ ID NO: 1137636 - RNA, 19 nt, Artificial Sequence
  Description of Artificial Sequence: Synthetic oligonucleotide
  Sense strand starting at position 3916 of SEQ ID NO: 916194
cagauaguuuaauugguga

SEQ ID NO: 1137637 - RNA, 19 nt, Artificial Sequence
  Description of Artificial Sequence: Synthetic oligonucleotide
  Antisense strand to SEQ ID NO: 1137636
ucaccaauuaaacuaucug

SEQ ID NO: 1137638 - RNA, 19 nt, Artificial Sequence
  Description of Artificial Sequence: Synthetic oligonucleotide
  Sense strand starting at position 3918 of SEQ ID NO: 916194
gauaguuuaauuggugagu

SEQ ID NO: 1137639 - RNA, 19 nt, Artificial Sequence
  Description of Artificial Sequence: Synthetic oligonucleotide
  Antisense strand to SEQ ID NO: 1137638
acucaccaauuaaacuauc

SEQ ID NO: 1137640 - RNA, 19 nt, Artificial Sequence
  Description of Artificial Sequence: Synthetic oligonucleotide
  Sense strand starting at position 3921 of SEQ ID NO: 916194
aguuuaauuggugaguucu

SEQ ID NO: 1137641 - RNA, 19 nt, Artificial Sequence
  Description of Artificial Sequence: Synthetic oligonucleotide
  Antisense strand to SEQ ID NO: 1137640
agaacucaccaauuaaacu

SEQ ID NO: 1137642 - RNA, 19 nt, Artificial Sequence
  Description of Artificial Sequence: Synthetic oligonucleotide
  Sense strand starting at position 49 of SEQ ID NO: 916195
ccaggaugggucuggguga

SEQ ID NO: 1137643 - RNA, 19 nt, Artificial Sequence
  Description of Artificial Sequence: Synthetic oligonucleotide
  Antisense strand to SEQ ID NO: 1137642
ucacccagacccauccugg

SEQ ID NO: 1137644 - RNA, 19 nt, Artificial Sequence
  Description of Artificial Sequence: Synthetic oligonucleotide
  Sense strand starting at position 103 of SEQ ID NO: 916195
ggucguuugcuguuauuag

SEQ ID NO: 1137645 - RNA, 19 nt, Artificial Sequence
  Description of Artificial Sequence: Synthetic oligonucleotide
  Antisense strand to SEQ ID NO: 1137644
cuaauaacagcaaacgacc

SEQ ID NO: 1137646 - RNA, 19 nt, Artificial Sequence
  Description of Artificial Sequence: Synthetic oligonucleotide
  Sense strand starting at position 487 of SEQ ID NO: 916195
agccuuaucgcucucgcau

SEQ ID NO: 1137647 - RNA, 19 nt, Artificial Sequence
  Description of Artificial Sequence: Synthetic oligonucleotide
  Antisense strand to SEQ ID NO: 1137646
augcgagagcgauaaggcu

SEQ ID NO: 1137648 - RNA, 19 nt, Artificial Sequence
  Description of Artificial Sequence: Synthetic oligonucleotide
  Sense strand starting at position 707 of SEQ ID NO: 916195
gaaggugagccugauccuu

SEQ ID NO: 1137649 - RNA, 19 nt, Artificial Sequence
  Description of Artificial Sequence: Synthetic oligonucleotide
  Antisense strand to SEQ ID NO: 1137648
aaggaucaggcucaccuuc

SEQ ID NO: 1137650 - RNA, 19 nt, Artificial Sequence
  Description of Artificial Sequence: Synthetic oligonucleotide
  Sense strand starting at position 737 of SEQ ID NO: 916195
uuuauuccacagugucaaa

SEQ ID NO: 1137651 - RNA, 19 nt, Artificial Sequence
  Description of Artificial Sequence: Synthetic oligonucleotide
  Antisense strand to SEQ ID NO: 1137650
uuugacacuguggaauaaa

SEQ ID NO: 1137652 - RNA, 19 nt, Artificial Sequence
  Description of Artificial Sequence: Synthetic oligonucleotide
  Sense strand starting at position 765 of SEQ ID NO: 916195
agauuuguuuacugaggaa

SEQ ID NO: 1137653 - RNA, 19 nt, Artificial Sequence
  Description of Artificial Sequence: Synthetic oligonucleotide
  Antisense strand to SEQ ID NO: 1137652
uuccucaguaaacaaaucu

SEQ ID NO: 1137654 - RNA, 19 nt, Artificial Sequence
  Description of Artificial Sequence: Synthetic oligonucleotide
  Sense strand starting at position 859 of SEQ ID NO: 916195
cucccuggacugcaagaau

SEQ ID NO: 1137655 - RNA, 19 nt, Artificial Sequence
  Description of Artificial Sequence: Synthetic oligonucleotide
  Antisense strand to SEQ ID NO: 1137654
auucuugcaguccagggag

SEQ ID NO: 1137656 - RNA, 19 nt, Artificial Sequence
  Description of Artificial Sequence: Synthetic oligonucleotide
  Sense strand starting at position 881 of SEQ ID NO: 916195
ggcggucuugcugcaauua

SEQ ID NO: 1137657 - RNA, 19 nt, Artificial Sequence
  Description of Artificial Sequence: Synthetic oligonucleotide
  Antisense strand to SEQ ID NO: 1137656
uaauugcagcaagaccgcc

SEQ ID NO: 1137658 - RNA, 19 nt, Artificial Sequence
  Description of Artificial Sequence: Synthetic oligonucleotide
  Sense strand starting at position 1694 of SEQ ID NO: 916195
uuuagaaagucgccauaaa

SEQ ID NO: 1137659 - RNA, 19 nt, Artificial Sequence
  Description of Artificial Sequence: Synthetic oligonucleotide
  Antisense strand to SEQ ID NO: 1137658
uuuauggcgacuuucuaaa

SEQ ID NO: 1137660 - RNA, 19 nt, Artificial Sequence
  Description of Artificial Sequence: Synthetic oligonucleotide
  Sense strand starting at position 1695 of SEQ ID NO: 916195
uuagaaagucgccauaaag

SEQ ID NO: 1137661 - RNA, 19 nt, Artificial Sequence
  Description of Artificial Sequence: Synthetic oligonucleotide
  Antisense strand to SEQ ID NO: 1137660
cuuuauggcgacuuucuaa

SEQ ID NO: 1137662 - RNA, 19 nt, Artificial Sequence
  Description of Artificial Sequence: Synthetic oligonucleotide
  Sense strand starting at position 1804 of SEQ ID NO: 916195
gcgagaaugcaggagaaua

SEQ ID NO: 1137663 - RNA, 19 nt, Artificial Sequence
  Description of Artificial Sequence: Synthetic oligonucleotide
  Antisense strand to SEQ ID NO: 1137662
uauucuccugcauucucgc

SEQ ID NO: 1137664 - RNA, 19 nt, Artificial Sequence
  Description of Artificial Sequence: Synthetic oligonucleotide
  Sense strand starting at position 1829 of SEQ ID NO: 916195
gacacuccagguugaguua

SEQ ID NO: 1137665 - RNA, 19 nt, Artificial Sequence
  Description of Artificial Sequence: Synthetic oligonucleotide
  Antisense strand to SEQ ID NO: 1137664
uaacucaaccuggaguguc

SEQ ID NO: 1137666 - RNA, 19 nt, Artificial Sequence
  Description of Artificial Sequence: Synthetic oligonucleotide
  Sense strand starting at position 1838 of SEQ ID NO: 916195
gguugaguuaagcaguaaa

SEQ ID NO: 1137667 - RNA, 19 nt, Artificial Sequence
  Description of Artificial Sequence: Synthetic oligonucleotide
  Antisense strand to SEQ ID NO: 1137666
uuuacugcuuaacucaacc

SEQ ID NO: 1137668 - RNA, 19 nt, Artificial Sequence
  Description of Artificial Sequence: Synthetic oligonucleotide
  Sense strand starting at position 1982 of SEQ ID NO: 916195
ugaggaggcaacugguaua

SEQ ID NO: 1137669 - RNA, 19 nt, Artificial Sequence
  Description of Artificial Sequence: Synthetic oligonucleotide
  Antisense strand to SEQ ID NO: 1137668
uauaccaguugccuccuca

SEQ ID NO: 1137670 - RNA, 19 nt, Artificial Sequence
  Description of Artificial Sequence: Synthetic oligonucleotide
  Sense strand starting at position 2006 of SEQ ID NO: 916195
uggacuaugucucccucua

SEQ ID NO: 1137671 - RNA, 19 nt, Artificial Sequence
  Description of Artificial Sequence: Synthetic oligonucleotide
  Antisense strand to SEQ ID NO: 1137670
uagagggagacauagucca

SEQ ID NO: 1137672 - RNA, 19 nt, Artificial Sequence
  Description of Artificial Sequence: Synthetic oligonucleotide
  Sense strand starting at position 2038 of SEQ ID NO: 916195
auuagaacgcuuuacuaga

SEQ ID NO: 1137673 - RNA, 19 nt, Artificial Sequence
  Description of Artificial Sequence: Synthetic oligonucleotide
  Antisense strand to SEQ ID NO: 1137672
ucuaguaaagcguucuaau

SEQ ID NO: 1137674 - RNA, 19 nt, Artificial Sequence
  Description of Artificial Sequence: Synthetic oligonucleotide
  Sense strand starting at position 2043 of SEQ ID NO: 916195
aacgcuuuacuagauguaa

SEQ ID NO: 1137675 - RNA, 19 nt, Artificial Sequence
  Description of Artificial Sequence: Synthetic oligonucleotide
  Antisense strand to SEQ ID NO: 1137674
uuacaucuaguaaagcguu

SEQ ID NO: 1137676 - RNA, 19 nt, Artificial Sequence
  Description of Artificial Sequence: Synthetic oligonucleotide
  Sense strand starting at position 2063 of SEQ ID NO: 916195
agaccaguuucucuccaua

SEQ ID NO: 1137677 - RNA, 19 nt, Artificial Sequence
  Description of Artificial Sequence: Synthetic oligonucleotide
  Antisense strand to SEQ ID NO: 1137676
uauggagagaaacuggucu

SEQ ID NO: 1137678 - RNA, 19 nt, Artificial Sequence
  Description of Artificial Sequence: Synthetic oligonucleotide
  Sense strand starting at position 2197 of SEQ ID NO: 916195
aaggaacgucgugauauuc

SEQ ID NO: 1137679 - RNA, 19 nt, Artificial Sequence
  Description of Artificial Sequence: Synthetic oligonucleotide
  Antisense strand to SEQ ID NO: 1137678
gaauaucacgacguuccuu

SEQ ID NO: 1137680 - RNA, 19 nt, Artificial Sequence
  Description of Artificial Sequence: Synthetic oligonucleotide
  Sense strand starting at position 2227 of SEQ ID NO: 916195
aggucauguccuuacaugu

SEQ ID NO: 1137681 - RNA, 19 nt, Artificial Sequence
  Description of Artificial Sequence: Synthetic oligonucleotide
  Antisense strand to SEQ ID NO: 1137680
acauguaaggacaugaccu

SEQ ID NO: 1137682 - RNA, 19 nt, Artificial Sequence
  Description of Artificial Sequence: Synthetic oligonucleotide
  Sense strand starting at position 2237 of SEQ ID NO: 916195
cuuacauguuuggucaaau

SEQ ID NO: 1137683 - RNA, 19 nt, Artificial Sequence
  Description of Artificial Sequence: Synthetic oligonucleotide
  Antisense strand to SEQ ID NO: 1137682
auuugaccaaacauguaag

SEQ ID NO: 1137684 - RNA, 19 nt, Artificial Sequence
  Description of Artificial Sequence: Synthetic oligonucleotide
  Sense strand starting at position 2238 of SEQ ID NO: 916195
uuacauguuuggucaaauu

SEQ ID NO: 1137685 - RNA, 19 nt, Artificial Sequence
  Description of Artificial Sequence: Synthetic oligonucleotide
  Antisense strand to SEQ ID NO: 1137684
aauuugaccaaacauguaa

SEQ ID NO: 1137686 - RNA, 19 nt, Artificial Sequence
  Description of Artificial Sequence: Synthetic oligonucleotide
  Sense strand starting at position 2264 of SEQ ID NO: 916195
gguuuaagcgcugugcaua

SEQ ID NO: 1137687 - RNA, 19 nt, Artificial Sequence
  Description of Artificial Sequence: Synthetic oligonucleotide
  Antisense strand to SEQ ID NO: 1137686
uaugcacagcgcuuaaacc

SEQ ID NO: 1137688 - RNA, 19 nt, Artificial Sequence
  Description of Artificial Sequence: Synthetic oligonucleotide
  Sense strand starting at position 2277 of SEQ ID NO: 916195
ugcauaugagcucaaauga

SEQ ID NO: 1137689 - RNA, 19 nt, Artificial Sequence
  Description of Artificial Sequence: Synthetic oligonucleotide
  Antisense strand to SEQ ID NO: 1137688
ucauuugagcucauaugca

SEQ ID NO: 1137690 - RNA, 19 nt, Artificial Sequence
  Description of Artificial Sequence: Synthetic oligonucleotide
  Sense strand starting at position 2314 of SEQ ID NO: 916195
cuucgaucauguuuggaga

SEQ ID NO: 1137691 - RNA, 19 nt, Artificial Sequence
  Description of Artificial Sequence: Synthetic oligonucleotide
  Antisense strand to SEQ ID NO: 1137690
ucuccaaacaugaucgaag

SEQ ID NO: 1137692 - RNA, 19 nt, Artificial Sequence
  Description of Artificial Sequence: Synthetic oligonucleotide
  Sense strand starting at position 2315 of SEQ ID NO: 916195
uucgaucauguuuggagau

SEQ ID NO: 1137693 - RNA, 19 nt, Artificial Sequence
  Description of Artificial Sequence: Synthetic oligonucleotide
  Antisense strand to SEQ ID NO: 1137692
aucuccaaacaugaucgaa

SEQ ID NO: 1137694 - RNA, 19 nt, Artificial Sequence
  Description of Artificial Sequence: Synthetic oligonucleotide
  Sense strand starting at position 2344 of SEQ ID NO: 916195
uuaaucuagugauuagaag

SEQ ID NO: 1137695 - RNA, 19 nt, Artificial Sequence
  Description of Artificial Sequence: Synthetic oligonucleotide
  Antisense strand to SEQ ID NO: 1137694
cuucuaaucacuagauuaa

SEQ ID NO: 1137696 - RNA, 19 nt, Artificial Sequence
  Description of Artificial Sequence: Synthetic oligonucleotide
  Sense strand starting at position 2532 of SEQ ID NO: 916195
uggucaagauagcuaaauu

SEQ ID NO: 1137697 - RNA, 19 nt, Artificial Sequence
  Description of Artificial Sequence: Synthetic oligonucleotide
  Antisense strand to SEQ ID NO: 1137696
aauuuagcuaucuugacca

SEQ ID NO: 1137698 - RNA, 19 nt, Artificial Sequence
  Description of Artificial Sequence: Synthetic oligonucleotide
  Sense strand starting at position 2825 of SEQ ID NO: 916195
uuuguuacaucaguccaaa

SEQ ID NO: 1137699 - RNA, 19 nt, Artificial Sequence
  Description of Artificial Sequence: Synthetic oligonucleotide
  Antisense strand to SEQ ID NO: 1137698
uuuggacugauguaacaaa

SEQ ID NO: 1137700 - RNA, 19 nt, Artificial Sequence
  Description of Artificial Sequence: Synthetic oligonucleotide
  Sense strand starting at position 2828 of SEQ ID NO: 916195
guuacaucaguccaaauca

SEQ ID NO: 1137701 - RNA, 19 nt, Artificial Sequence
  Description of Artificial Sequence: Synthetic oligonucleotide
  Antisense strand to SEQ ID NO: 1137700
ugauuuggacugauguaac

SEQ ID NO: 1137702 - RNA, 19 nt, Artificial Sequence
  Description of Artificial Sequence: Synthetic oligonucleotide
  Sense strand starting at position 2883 of SEQ ID NO: 916195
uugugaacuuacuauuuga

SEQ ID NO: 1137703 - RNA, 19 nt, Artificial Sequence
  Description of Artificial Sequence: Synthetic oligonucleotide
  Antisense strand to SEQ ID NO: 1137702
ucaaauaguaaguucacaa

SEQ ID NO: 1137704 - RNA, 19 nt, Artificial Sequence
  Description of Artificial Sequence: Synthetic oligonucleotide
  Sense strand starting at position 3074 of SEQ ID NO: 916195
agcugagacuaguugaaau

SEQ ID NO: 1137705 - RNA, 19 nt, Artificial Sequence
  Description of Artificial Sequence: Synthetic oligonucleotide
  Antisense strand to SEQ ID NO: 1137704
auuucaacuagucucagcu

SEQ ID NO: 1137706 - RNA, 19 nt, Artificial Sequence
  Description of Artificial Sequence: Synthetic oligonucleotide
  Sense strand starting at position 3159 of SEQ ID NO: 916195
uuugacuuugucuaguagu

SEQ ID NO: 1137707 - RNA, 19 nt, Artificial Sequence
  Description of Artificial Sequence: Synthetic oligonucleotide
  Antisense strand to SEQ ID NO: 1137706
acuacuagacaaagucaaa

SEQ ID NO: 1137708 - RNA, 19 nt, Artificial Sequence
  Description of Artificial Sequence: Synthetic oligonucleotide
  Sense strand starting at position 3172 of SEQ ID NO: 916195
aguaguauacagcaaucau

SEQ ID NO: 1137709 - RNA, 19 nt, Artificial Sequence
  Description of Artificial Sequence: Synthetic oligonucleotide
  Antisense strand to SEQ ID NO: 1137708
augauugcuguauacuacu

SEQ ID NO: 1137710 - RNA, 19 nt, Artificial Sequence
  Description of Artificial Sequence: Synthetic oligonucleotide
  Sense strand starting at position 3186 of SEQ ID NO: 916195
aucauuuguuuccaaggau

SEQ ID NO: 1137711 - RNA, 19 nt, Artificial Sequence
  Description of Artificial Sequence: Synthetic oligonucleotide
  Antisense strand to SEQ ID NO: 1137710
auccuuggaaacaaaugau

SEQ ID NO: 1137712 - RNA, 19 nt, Artificial Sequence
  Description of Artificial Sequence: Synthetic oligonucleotide
  Sense strand starting at position 3225 of SEQ ID NO: 916195
aaagauuuaugccauguga

SEQ ID NO: 1137713 - RNA, 19 nt, Artificial Sequence
  Description of Artificial Sequence: Synthetic oligonucleotide
  Antisense strand to SEQ ID NO: 1137712
ucacauggcauaaaucuuu

SEQ ID NO: 1137714 - RNA, 19 nt, Artificial Sequence
  Description of Artificial Sequence: Synthetic oligonucleotide
  Sense strand starting at position 3233 of SEQ ID NO: 916195
augccaugugauuaaauau

SEQ ID NO: 1137715 - RNA, 19 nt, Artificial Sequence
  Description of Artificial Sequence: Synthetic oligonucleotide
  Antisense strand to SEQ ID NO: 1137714
auauuuaaucacauggcau

SEQ ID NO: 1137716 - RNA, 19 nt, Artificial Sequence
  Description of Artificial Sequence: Synthetic oligonucleotide
  Sense strand starting at position 3594 of SEQ ID NO: 916195
auuguuuaagugugggaca

SEQ ID NO: 1137717 - RNA, 19 nt, Artificial Sequence
  Description of Artificial Sequence: Synthetic oligonucleotide
  Antisense strand to SEQ ID NO: 1137716
ugucccacacuuaaacaau

SEQ ID NO: 1137718 - RNA, 19 nt, Artificial Sequence
  Description of Artificial Sequence: Synthetic oligonucleotide
  Sense strand starting at position 3726 of SEQ ID NO: 916195
ucauaugaugcugaaauuc

SEQ ID NO: 1137719 - RNA, 19 nt, Artificial Sequence
  Description of Artificial Sequence: Synthetic oligonucleotide
  Antisense strand to SEQ ID NO: 1137718
gaauuucagcaucauauga

SEQ ID NO: 1137720 - RNA, 19 nt, Artificial Sequence
  Description of Artificial Sequence: Synthetic oligonucleotide
  Sense strand starting at position 3899 of SEQ ID NO: 916195
uguugauacuucuuaccuu

SEQ ID NO: 1137721 - RNA, 19 nt, Artificial Sequence
  Description of Artificial Sequence: Synthetic oligonucleotide
  Antisense strand to SEQ ID NO: 1137720
aagguaagaaguaucaaca

SEQ ID NO: 1137722 - RNA, 19 nt, Artificial Sequence
  Description of Artificial Sequence: Synthetic oligonucleotide
  Sense strand starting at position 366 of SEQ ID NO: 916196
gguuguacugaacggcaaa

SEQ ID NO: 1137723 - RNA, 19 nt, Artificial Sequence
  Description of Artificial Sequence: Synthetic oligonucleotide
  Antisense strand to SEQ ID NO: 1137722
uuugccguucaguacaacc

SEQ ID NO: 1137724 - RNA, 19 nt, Artificial Sequence
  Description of Artificial Sequence: Synthetic oligonucleotide
  Sense strand starting at position 532 of SEQ ID NO: 916196
ggaacuucagugugaagaa

SEQ ID NO: 1137725 - RNA, 19 nt, Artificial Sequence
  Description of Artificial Sequence: Synthetic oligonucleotide
  Antisense strand to SEQ ID NO: 1137724
uucuucacacugaaguucc

SEQ ID NO: 1137726 - RNA, 19 nt, Artificial Sequence
  Description of Artificial Sequence: Synthetic oligonucleotide
  Sense strand starting at position 585 of SEQ ID NO: 916196
auuggucucauuggcgauu

SEQ ID NO: 1137727 - RNA, 19 nt, Artificial Sequence
  Description of Artificial Sequence: Synthetic oligonucleotide
  Antisense strand to SEQ ID NO: 1137726
aaucgccaaugagaccaau

SEQ ID NO: 1137728 - RNA, 19 nt, Artificial Sequence
  Description of Artificial Sequence: Synthetic oligonucleotide
  Sense strand starting at position 586 of SEQ ID NO: 916196
uuggucucauuggcgauua

SEQ ID NO: 1137729 - RNA, 19 nt, Artificial Sequence
  Description of Artificial Sequence: Synthetic oligonucleotide
  Antisense strand to SEQ ID NO: 1137728
uaaucgccaaugagaccaa

SEQ ID NO: 1137730 - RNA, 19 nt, Artificial Sequence
  Description of Artificial Sequence: Synthetic oligonucleotide
  Sense strand starting at position 588 of SEQ ID NO: 916196
ggucucauuggcgauuaga

SEQ ID NO: 1137731 - RNA, 19 nt, Artificial Sequence
  Description of Artificial Sequence: Synthetic oligonucleotide
  Antisense strand to SEQ ID NO: 1137730
ucuaaucgccaaugagacc

SEQ ID NO: 1137732 - RNA, 19 nt, Artificial Sequence
  Description of Artificial Sequence: Synthetic oligonucleotide
  Sense strand starting at position 591 of SEQ ID NO: 916196
cucauuggcgauuagaaau

SEQ ID NO: 1137733 - RNA, 19 nt, Artificial Sequence
  Description of Artificial Sequence: Synthetic oligonucleotide
  Antisense strand to SEQ ID NO: 1137732
auuucuaaucgccaaugag

SEQ ID NO: 1137734 - RNA, 19 nt, Artificial Sequence
  Description of Artificial Sequence: Synthetic oligonucleotide
  Sense strand starting at position 601 of SEQ ID NO: 916196
auuagaaauccucguuuga

SEQ ID NO: 1137735 - RNA, 19 nt, Artificial Sequence
  Description of Artificial Sequence: Synthetic oligonucleotide
  Antisense strand to SEQ ID NO: 1137734
ucaaacgaggauuucuaau

SEQ ID NO: 1137736 - RNA, 19 nt, Artificial Sequence
  Description of Artificial Sequence: Synthetic oligonucleotide
  Sense strand starting at position 603 of SEQ ID NO: 916196
uagaaauccucguuugagg

SEQ ID NO: 1137737 - RNA, 19 nt, Artificial Sequence
  Description of Artificial Sequence: Synthetic oligonucleotide
  Antisense strand to SEQ ID NO: 1137736
ccucaaacgaggauuucua

SEQ ID NO: 1137738 - RNA, 19 nt, Artificial Sequence
  Description of Artificial Sequence: Synthetic oligonucleotide
  Sense strand starting at position 888 of SEQ ID NO: 916196
gagacugucucgcucucaa

SEQ ID NO: 1137739 - RNA, 19 nt, Artificial Sequence
  Description of Artificial Sequence: Synthetic oligonucleotide
  Antisense strand to SEQ ID NO: 1137738
uugagagcgagacagucuc

SEQ ID NO: 1137740 - RNA, 19 nt, Artificial Sequence
  Description of Artificial Sequence: Synthetic oligonucleotide
  Sense strand starting at position 2055 of SEQ ID NO: 916196
cgcguuucucacgggauuu

SEQ ID NO: 1137741 - RNA, 19 nt, Artificial Sequence
  Description of Artificial Sequence: Synthetic oligonucleotide
  Antisense strand to SEQ ID NO: 1137740
aaaucccgugagaaacgcg

SEQ ID NO: 1137742 - RNA, 19 nt, Artificial Sequence
  Description of Artificial Sequence: Synthetic oligonucleotide
  Sense strand starting at position 2056 of SEQ ID NO: 916196
gcguuucucacgggauuug

SEQ ID NO: 1137743 - RNA, 19 nt, Artificial Sequence
  Description of Artificial Sequence: Synthetic oligonucleotide
  Antisense strand to SEQ ID NO: 1137742
caaaucccgugagaaacgc

SEQ ID NO: 1137744 - RNA, 19 nt, Artificial Sequence
  Description of Artificial Sequence: Synthetic oligonucleotide
  Sense strand starting at position 2090 of SEQ ID NO: 916196
cguaguaggagguguggua

SEQ ID NO: 1137745 - RNA, 19 nt, Artificial Sequence
  Description of Artificial Sequence: Synthetic oligonucleotide
  Antisense strand to SEQ ID NO: 1137744
uaccacaccuccuacuacg

SEQ ID NO: 1137746 - RNA, 19 nt, Artificial Sequence
  Description of Artificial Sequence: Synthetic oligonucleotide
  Sense strand starting at position 2125 of SEQ ID NO: 916196
aagaauguggauugcgauu

SEQ ID NO: 1137747 - RNA, 19 nt, Artificial Sequence
  Description of Artificial Sequence: Synthetic oligonucleotide
  Antisense strand to SEQ ID NO: 1137746
aaucgcaauccacauucuu

SEQ ID NO: 1137748 - RNA, 19 nt, Artificial Sequence
  Description of Artificial Sequence: Synthetic oligonucleotide
  Sense strand starting at position 2300 of SEQ ID NO: 916196
aaaguaggaguucguggaa

SEQ ID NO: 1137749 - RNA, 19 nt, Artificial Sequence
  Description of Artificial Sequence: Synthetic oligonucleotide
  Antisense strand to SEQ ID NO: 1137748
uuccacgaacuccuacuuu

SEQ ID NO: 1137750 - RNA, 19 nt, Artificial Sequence
  Description of Artificial Sequence: Synthetic oligonucleotide
  Sense strand starting at position 2493 of SEQ ID NO: 916196
ugaaacgccucgcuuauuu

SEQ ID NO: 1137751 - RNA, 19 nt, Artificial Sequence
  Description of Artificial Sequence: Synthetic oligonucleotide
  Antisense strand to SEQ ID NO: 1137750
aaauaagcgaggcguuuca

SEQ ID NO: 1137752 - RNA, 19 nt, Artificial Sequence
  Description of Artificial Sequence: Synthetic oligonucleotide
  Sense strand starting at position 2512 of SEQ ID NO: 916196
cuacaacaacccugugaga

SEQ ID NO: 1137753 - RNA, 19 nt, Artificial Sequence
  Description of Artificial Sequence: Synthetic oligonucleotide
  Antisense strand to SEQ ID NO: 1137752
ucucacaggguuguuguag

SEQ ID NO: 1137754 - RNA, 19 nt, Artificial Sequence
  Description of Artificial Sequence: Synthetic oligonucleotide
  Sense strand starting at position 2568 of SEQ ID NO: 916196
cagaaagguuaauuaaguu

SEQ ID NO: 1137755 - RNA, 19 nt, Artificial Sequence
  Description of Artificial Sequence: Synthetic oligonucleotide
  Antisense strand to SEQ ID NO: 1137754
aacuuaauuaaccuuucug

SEQ ID NO: 1137756 - RNA, 19 nt, Artificial Sequence
  Description of Artificial Sequence: Synthetic oligonucleotide
  Sense strand starting at position 2762 of SEQ ID NO: 916196
uaaggagcaucagauaaug

SEQ ID NO: 1137757 - RNA, 19 nt, Artificial Sequence
  Description of Artificial Sequence: Synthetic oligonucleotide
  Antisense strand to SEQ ID NO: 1137756
cauuaucugaugcuccuua

SEQ ID NO: 1137758 - RNA, 19 nt, Artificial Sequence
  Description of Artificial Sequence: Synthetic oligonucleotide
  Sense strand starting at position 2772 of SEQ ID NO: 916196
cagauaauguguuagggaa

SEQ ID NO: 1137759 - RNA, 19 nt, Artificial Sequence
  Description of Artificial Sequence: Synthetic oligonucleotide
  Antisense strand to SEQ ID NO: 1137758
uucccuaacacauuaucug

SEQ ID NO: 1137760 - RNA, 19 nt, Artificial Sequence
  Description of Artificial Sequence: Synthetic oligonucleotide
  Sense strand starting at position 2784 of SEQ ID NO: 916196
uagggaaauuguucccuuu

SEQ ID NO: 1137761 - RNA, 19 nt, Artificial Sequence
  Description of Artificial Sequence: Synthetic oligonucleotide
  Antisense strand to SEQ ID NO: 1137760
aaagggaacaauuucccua

SEQ ID NO: 1137762 - RNA, 19 nt, Artificial Sequence
  Description of Artificial Sequence: Synthetic oligonucleotide
  Sense strand starting at position 2817 of SEQ ID NO: 916196
guucucaacuucgcauuua

SEQ ID NO: 1137763 - RNA, 19 nt, Artificial Sequence
  Description of Artificial Sequence: Synthetic oligonucleotide
  Antisense strand to SEQ ID NO: 1137762
uaaaugcgaaguugagaac

SEQ ID NO: 1137764 - RNA, 19 nt, Artificial Sequence
  Description of Artificial Sequence: Synthetic oligonucleotide
  Sense strand starting at position 2825 of SEQ ID NO: 916196
cuucgcauuuaggagaagu

SEQ ID NO: 1137765 - RNA, 19 nt, Artificial Sequence
  Description of Artificial Sequence: Synthetic oligonucleotide
  Antisense strand to SEQ ID NO: 1137764
acuucuccuaaaugcgaag

SEQ ID NO: 1137766 - RNA, 19 nt, Artificial Sequence
  Description of Artificial Sequence: Synthetic oligonucleotide
  Sense strand starting at position 2835 of SEQ ID NO: 916196
aggagaaguugugcucggu

SEQ ID NO: 1137767 - RNA, 19 nt, Artificial Sequence
  Description of Artificial Sequence: Synthetic oligonucleotide
  Antisense strand to SEQ ID NO: 1137766
accgagcacaacuucuccu

SEQ ID NO: 1137768 - RNA, 19 nt, Artificial Sequence
  Description of Artificial Sequence: Synthetic oligonucleotide
  Sense strand starting at position 2902 of SEQ ID NO: 916196
agcaguucuuagucucaga

SEQ ID NO: 1137769 - RNA, 19 nt, Artificial Sequence
  Description of Artificial Sequence: Synthetic oligonucleotide
  Antisense strand to SEQ ID NO: 1137768
ucugagacuaagaacugcu

SEQ ID NO: 1137770 - RNA, 19 nt, Artificial Sequence
  Description of Artificial Sequence: Synthetic oligonucleotide
  Sense strand starting at position 3000 of SEQ ID NO: 916196
ugucaaauauaagugguuu

SEQ ID NO: 1137771 - RNA, 19 nt, Artificial Sequence
  Description of Artificial Sequence: Synthetic oligonucleotide
  Antisense strand to SEQ ID NO: 1137770
aaaccacuuauauuugaca

SEQ ID NO: 1137772 - RNA, 19 nt, Artificial Sequence
  Description of Artificial Sequence: Synthetic oligonucleotide
  Sense strand starting at position 3020 of SEQ ID NO: 916196
caguuuacaguagggauaa

SEQ ID NO: 1137773 - RNA, 19 nt, Artificial Sequence
  Description of Artificial Sequence: Synthetic oligonucleotide
  Antisense strand to SEQ ID NO: 1137772
uuaucccuacuguaaacug

SEQ ID NO: 1137774 - RNA, 19 nt, Artificial Sequence
  Description of Artificial Sequence: Synthetic oligonucleotide
  Sense strand starting at position 3063 of SEQ ID NO: 916196
aagggaauguuaggaacau

SEQ ID NO: 1137775 - RNA, 19 nt, Artificial Sequence
  Description of Artificial Sequence: Synthetic oligonucleotide
  Antisense strand to SEQ ID NO: 1137774
auguuccuaacauucccuu

SEQ ID NO: 1137776 - RNA, 19 nt, Artificial Sequence
  Description of Artificial Sequence: Synthetic oligonucleotide
  Sense strand starting at position 3064 of SEQ ID NO: 916196
agggaauguuaggaacauu

SEQ ID NO: 1137777 - RNA, 19 nt, Artificial Sequence
  Description of Artificial Sequence: Synthetic oligonucleotide
  Antisense strand to SEQ ID NO: 1137776
aauguuccuaacauucccu

SEQ ID NO: 1137778 - RNA, 19 nt, Artificial Sequence
  Description of Artificial Sequence: Synthetic oligonucleotide
  Sense strand starting at position 3117 of SEQ ID NO: 916196
auaacauaugugugggaaa

SEQ ID NO: 1137779 - RNA, 19 nt, Artificial Sequence
  Description of Artificial Sequence: Synthetic oligonucleotide
  Antisense strand to SEQ ID NO: 1137778
uuucccacacauauguuau

SEQ ID NO: 1137780 - RNA, 19 nt, Artificial Sequence
  Description of Artificial Sequence: Synthetic oligonucleotide
  Sense strand starting at position 3119 of SEQ ID NO: 916196
aacauaugugugggaaaca

SEQ ID NO: 1137781 - RNA, 19 nt, Artificial Sequence
  Description of Artificial Sequence: Synthetic oligonucleotide
  Antisense strand to SEQ ID NO: 1137780
uguuucccacacauauguu

SEQ ID NO: 1137782 - RNA, 19 nt, Artificial Sequence
  Description of Artificial Sequence: Synthetic oligonucleotide
  Sense strand starting at position 3470 of SEQ ID NO: 916196
uggccucagucuuuaacaa

SEQ ID NO: 1137783 - RNA, 19 nt, Artificial Sequence
  Description of Artificial Sequence: Synthetic oligonucleotide
  Antisense strand to SEQ ID NO: 1137782
uuguuaaagacugaggcca

SEQ ID NO: 1137784 - RNA, 19 nt, Artificial Sequence
  Description of Artificial Sequence: Synthetic oligonucleotide
  Sense strand starting at position 3471 of SEQ ID NO: 916196
ggccucagucuuuaacaaa

SEQ ID NO: 1137785 - RNA, 19 nt, Artificial Sequence
  Description of Artificial Sequence: Synthetic oligonucleotide
  Antisense strand to SEQ ID NO: 1137784
uuuguuaaagacugaggcc

SEQ ID NO: 1137786 - RNA, 19 nt, Artificial Sequence
  Description of Artificial Sequence: Synthetic oligonucleotide
  Sense strand starting at position 3497 of SEQ ID NO: 916196
uucuaagcuguugacuuau

SEQ ID NO: 1137787 - RNA, 19 nt, Artificial Sequence
  Description of Artificial Sequence: Synthetic oligonucleotide
  Antisense strand to SEQ ID NO: 1137786
auaagucaacagcuuagaa

SEQ ID NO: 1137788 - RNA, 19 nt, Artificial Sequence
  Description of Artificial Sequence: Synthetic oligonucleotide
  Sense strand starting at position 3529 of SEQ ID NO: 916196
auguacauguaacuaagau

SEQ ID NO: 1137789 - RNA, 19 nt, Artificial Sequence
  Description of Artificial Sequence: Synthetic oligonucleotide
  Antisense strand to SEQ ID NO: 1137788
aucuuaguuacauguacau

SEQ ID NO: 1137790 - RNA, 19 nt, Artificial Sequence
  Description of Artificial Sequence: Synthetic oligonucleotide
  Sense strand starting at position 3541 of SEQ ID NO: 916196
cuaagauaccuauggccuu

SEQ ID NO: 1137791 - RNA, 19 nt, Artificial Sequence
  Description of Artificial Sequence: Synthetic oligonucleotide
  Antisense strand to SEQ ID NO: 1137790
aaggccauagguaucuuag

SEQ ID NO: 1137792 - RNA, 19 nt, Artificial Sequence
  Description of Artificial Sequence: Synthetic oligonucleotide
  Sense strand starting at position 3624 of SEQ ID NO: 916196
gugugauguggccaggugu

SEQ ID NO: 1137793 - RNA, 19 nt, Artificial Sequence
  Description of Artificial Sequence: Synthetic oligonucleotide
  Antisense strand to SEQ ID NO: 1137792
acaccuggccacaucacac

SEQ ID NO: 1137794 - RNA, 19 nt, Artificial Sequence
  Description of Artificial Sequence: Synthetic oligonucleotide
  Sense strand starting at position 3920 of SEQ ID NO: 916196
agauacagugugugaugua

SEQ ID NO: 1137795 - RNA, 19 nt, Artificial Sequence
  Description of Artificial Sequence: Synthetic oligonucleotide
  Antisense strand to SEQ ID NO: 1137794
uacaucacacacuguaucu

SEQ ID NO: 1137796 - RNA, 19 nt, Artificial Sequence
  Description of Artificial Sequence: Synthetic oligonucleotide
  Sense strand starting at position 3933 of SEQ ID NO: 916196
gauguauggagagggcauu

SEQ ID NO: 1137797 - RNA, 19 nt, Artificial Sequence
  Description of Artificial Sequence: Synthetic oligonucleotide
  Antisense strand to SEQ ID NO: 1137796
aaugcccucuccauacauc

SEQ ID NO: 1137798 - RNA, 19 nt, Artificial Sequence
  Description of Artificial Sequence: Synthetic oligonucleotide
  Sense strand starting at position 3959 of SEQ ID NO: 916196
gagacaacaguauguguaa

SEQ ID NO: 1137799 - RNA, 19 nt, Artificial Sequence
  Description of Artificial Sequence: Synthetic oligonucleotide
  Antisense strand to SEQ ID NO: 1137798
uuacacauacuguugucuc

SEQ ID NO: 1137800 - RNA, 19 nt, Artificial Sequence
  Description of Artificial Sequence: Synthetic oligonucleotide
  Sense strand starting at position 3960 of SEQ ID NO: 916196
agacaacaguauguguaaa

SEQ ID NO: 1137801 - RNA, 19 nt, Artificial Sequence
  Description of Artificial Sequence: Synthetic oligonucleotide
  Antisense strand to SEQ ID NO: 1137800
uuuacacauacuguugucu

SEQ ID NO: 1137802 - RNA, 19 nt, Artificial Sequence
  Description of Artificial Sequence: Synthetic oligonucleotide
  Sense strand starting at position 65 of SEQ ID NO: 916197
cuagaaaugugaucacagc

SEQ ID NO: 1137803 - RNA, 19 nt, Artificial Sequence
  Description of Artificial Sequence: Synthetic oligonucleotide
  Antisense strand to SEQ ID NO: 1137802
gcugugaucacauuucuag

SEQ ID NO: 1137804 - RNA, 19 nt, Artificial Sequence
  Description of Artificial Sequence: Synthetic oligonucleotide
  Sense strand starting at position 302 of SEQ ID NO: 916197
ucacaauaugcucguugaa

SEQ ID NO: 1137805 - RNA, 19 nt, Artificial Sequence
  Description of Artificial Sequence: Synthetic oligonucleotide
  Antisense strand to SEQ ID NO: 1137804
uucaacgagcauauuguga

SEQ ID NO: 1137806 - RNA, 19 nt, Artificial Sequence
  Description of Artificial Sequence: Synthetic oligonucleotide
  Sense strand starting at position 304 of SEQ ID NO: 916197
acaauaugcucguugaaau

SEQ ID NO: 1137807 - RNA, 19 nt, Artificial Sequence
  Description of Artificial Sequence: Synthetic oligonucleotide
  Antisense strand to SEQ ID NO: 1137806
auuucaacgagcauauugu

SEQ ID NO: 1137808 - RNA, 19 nt, Artificial Sequence
  Description of Artificial Sequence: Synthetic oligonucleotide
  Sense strand starting at position 305 of SEQ ID NO: 916197
caauaugcucguugaaauc

SEQ ID NO: 1137809 - RNA, 19 nt, Artificial Sequence
  Description of Artificial Sequence: Synthetic oligonucleotide
  Antisense strand to SEQ ID NO: 1137808
gauuucaacgagcauauug

SEQ ID NO: 1137810 - RNA, 19 nt, Artificial Sequence
  Description of Artificial Sequence: Synthetic oligonucleotide
  Sense strand starting at position 489 of SEQ ID NO: 916197
gcagaaguagccuauugga

SEQ ID NO: 1137811 - RNA, 19 nt, Artificial Sequence
  Description of Artificial Sequence: Synthetic oligonucleotide
  Antisense strand to SEQ ID NO: 1137810
uccaauaggcuacuucugc

SEQ ID NO: 1137812 - RNA, 19 nt, Artificial Sequence
  Description of Artificial Sequence: Synthetic oligonucleotide
  Sense strand starting at position 612 of SEQ ID NO: 916197
acagaaaguugcucugucu

SEQ ID NO: 1137813 - RNA, 19 nt, Artificial Sequence
  Description of Artificial Sequence: Synthetic oligonucleotide
  Antisense strand to SEQ ID NO: 1137812
agacagagcaacuuucugu

SEQ ID NO: 1137814 - RNA, 19 nt, Artificial Sequence
  Description of Artificial Sequence: Synthetic oligonucleotide
  Sense strand starting at position 758 of SEQ ID NO: 916197
ggauuuaggucagaggacu

SEQ ID NO: 1137815 - RNA, 19 nt, Artificial Sequence
  Description of Artificial Sequence: Synthetic oligonucleotide
  Antisense strand to SEQ ID NO: 1137814
aguccucugaccuaaaucc

SEQ ID NO: 1137816 - RNA, 19 nt, Artificial Sequence
  Description of Artificial Sequence: Synthetic oligonucleotide
  Sense strand starting at position 970 of SEQ ID NO: 916197
cugcgaguuauuuguggga

SEQ ID NO: 1137817 - RNA, 19 nt, Artificial Sequence
  Description of Artificial Sequence: Synthetic oligonucleotide
  Antisense strand to SEQ ID NO: 1137816
ucccacaaauaacucgcag

SEQ ID NO: 1137818 - RNA, 19 nt, Artificial Sequence
  Description of Artificial Sequence: Synthetic oligonucleotide
  Sense strand starting at position 974 of SEQ ID NO: 916197
gaguuauuugugggaacgu

SEQ ID NO: 1137819 - RNA, 19 nt, Artificial Sequence
  Description of Artificial Sequence: Synthetic oligonucleotide
  Antisense strand to SEQ ID NO: 1137818
acguucccacaaauaacuc

SEQ ID NO: 1137820 - RNA, 19 nt, Artificial Sequence
  Description of Artificial Sequence: Synthetic oligonucleotide
  Sense strand starting at position 975 of SEQ ID NO: 916197
aguuauuugugggaacgug

SEQ ID NO: 1137821 - RNA, 19 nt, Artificial Sequence
  Description of Artificial Sequence: Synthetic oligonucleotide
  Antisense strand to SEQ ID NO: 1137820
cacguucccacaaauaacu

SEQ ID NO: 1137822 - RNA, 19 nt, Artificial Sequence
  Description of Artificial Sequence: Synthetic oligonucleotide
  Sense strand starting at position 983 of SEQ ID NO: 916197
gugggaacgugguuugaac

SEQ ID NO: 1137823 - RNA, 19 nt, Artificial Sequence
  Description of Artificial Sequence: Synthetic oligonucleotide
  Antisense strand to SEQ ID NO: 1137822
guucaaaccacguucccac

SEQ ID NO: 1137824 - RNA, 19 nt, Artificial Sequence
  Description of Artificial Sequence: Synthetic oligonucleotide
  Sense strand starting at position 1115 of SEQ ID NO: 916197
ucgggagacccucaacguu

SEQ ID NO: 1137825 - RNA, 19 nt, Artificial Sequence
  Description of Artificial Sequence: Synthetic oligonucleotide
  Antisense strand to SEQ ID NO: 1137824
aacguugagggucucccga

SEQ ID NO: 1137826 - RNA, 19 nt, Artificial Sequence
  Description of Artificial Sequence: Synthetic oligonucleotide
  Sense strand starting at position 1329 of SEQ ID NO: 916197
ugaacaaguuguguuugga

SEQ ID NO: 1137827 - RNA, 19 nt, Artificial Sequence
  Description of Artificial Sequence: Synthetic oligonucleotide
  Antisense strand to SEQ ID NO: 1137826
uccaaacacaacuuguuca

SEQ ID NO: 1137828 - RNA, 19 nt, Artificial Sequence
  Description of Artificial Sequence: Synthetic oligonucleotide
  Sense strand starting at position 1336 of SEQ ID NO: 916197
guuguguuuggagggagga

SEQ ID NO: 1137829 - RNA, 19 nt, Artificial Sequence
  Description of Artificial Sequence: Synthetic oligonucleotide
  Antisense strand to SEQ ID NO: 1137828
uccucccuccaaacacaac

SEQ ID NO: 1137830 - RNA, 19 nt, Artificial Sequence
  Description of Artificial Sequence: Synthetic oligonucleotide
  Sense strand starting at position 1337 of SEQ ID NO: 916197
uuguguuuggagggaggaa

SEQ ID NO: 1137831 - RNA, 19 nt, Artificial Sequence
  Description of Artificial Sequence: Synthetic oligonucleotide
  Antisense strand to SEQ ID NO: 1137830
uuccucccuccaaacacaa

SEQ ID NO: 1137832 - RNA, 19 nt, Artificial Sequence
  Description of Artificial Sequence: Synthetic oligonucleotide
  Sense strand starting at position 2923 of SEQ ID NO: 916197
gggacaaggcacuguauaa

SEQ ID NO: 1137833 - RNA, 19 nt, Artificial Sequence
  Description of Artificial Sequence: Synthetic oligonucleotide
  Antisense strand to SEQ ID NO: 1137832
uuauacagugccuuguccc

SEQ ID NO: 1137834 - RNA, 19 nt, Artificial Sequence
  Description of Artificial Sequence: Synthetic oligonucleotide
  Sense strand starting at position 2941 of SEQ ID NO: 916197
agugcauuaucggcauuau

SEQ ID NO: 1137835 - RNA, 19 nt, Artificial Sequence
  Description of Artificial Sequence: Synthetic oligonucleotide
  Antisense strand to SEQ ID NO: 1137834
auaaugccgauaaugcacu

SEQ ID NO: 1137836 - RNA, 19 nt, Artificial Sequence
  Description of Artificial Sequence: Synthetic oligonucleotide
  Sense strand starting at position 2942 of SEQ ID NO: 916197
gugcauuaucggcauuauu

SEQ ID NO: 1137837 - RNA, 19 nt, Artificial Sequence
  Description of Artificial Sequence: Synthetic oligonucleotide
  Antisense strand to SEQ ID NO: 1137836
aauaaugccgauaaugcac

SEQ ID NO: 1137838 - RNA, 19 nt, Artificial Sequence
  Description of Artificial Sequence: Synthetic oligonucleotide
  Sense strand starting at position 2981 of SEQ ID NO: 916197
ccaaccucaugaggaauuu

SEQ ID NO: 1137839 - RNA, 19 nt, Artificial Sequence
  Description of Artificial Sequence: Synthetic oligonucleotide
  Antisense strand to SEQ ID NO: 1137838
aaauuccucaugagguugg

SEQ ID NO: 1137840 - RNA, 19 nt, Artificial Sequence
  Description of Artificial Sequence: Synthetic oligonucleotide
  Sense strand starting at position 3177 of SEQ ID NO: 916197
ugacaugguccuggauguu

SEQ ID NO: 1137841 - RNA, 19 nt, Artificial Sequence
  Description of Artificial Sequence: Synthetic oligonucleotide
  Antisense strand to SEQ ID NO: 1137840
aacauccaggaccauguca

SEQ ID NO: 1137842 - RNA, 19 nt, Artificial Sequence
  Description of Artificial Sequence: Synthetic oligonucleotide
  Sense strand starting at position 3233 of SEQ ID NO: 916197
uggcaucacaguugugauc

SEQ ID NO: 1137843 - RNA, 19 nt, Artificial Sequence
  Description of Artificial Sequence: Synthetic oligonucleotide
  Antisense strand to SEQ ID NO: 1137842
gaucacaacugugaugcca

SEQ ID NO: 1137844 - RNA, 19 nt, Artificial Sequence
  Description of Artificial Sequence: Synthetic oligonucleotide
  Sense strand starting at position 3240 of SEQ ID NO: 916197
acaguugugaucuguggag

SEQ ID NO: 1137845 - RNA, 19 nt, Artificial Sequence
  Description of Artificial Sequence: Synthetic oligonucleotide
  Antisense strand to SEQ ID NO: 1137844
cuccacagaucacaacugu

SEQ ID NO: 1137846 - RNA, 19 nt, Artificial Sequence
  Description of Artificial Sequence: Synthetic oligonucleotide
  Sense strand starting at position 3285 of SEQ ID NO: 916197
cugagcaauuugcaagcua

SEQ ID NO: 1137847 - RNA, 19 nt, Artificial Sequence
  Description of Artificial Sequence: Synthetic oligonucleotide
  Antisense strand to SEQ ID NO: 1137846
uagcuugcaaauugcucag

SEQ ID NO: 1137848 - RNA, 19 nt, Artificial Sequence
  Description of Artificial Sequence: Synthetic oligonucleotide
  Sense strand starting at position 3359 of SEQ ID NO: 916197
cuuaauagauagggaaacu

SEQ ID NO: 1137849 - RNA, 19 nt, Artificial Sequence
  Description of Artificial Sequence: Synthetic oligonucleotide
  Antisense strand to SEQ ID NO: 1137848
aguuucccuaucuauuaag

SEQ ID NO: 1137850 - RNA, 19 nt, Artificial Sequence
  Description of Artificial Sequence: Synthetic oligonucleotide
  Sense strand starting at position 3452 of SEQ ID NO: 916197
uaaagaagcuuccuggguu

SEQ ID NO: 1137851 - RNA, 19 nt, Artificial Sequence
  Description of Artificial Sequence: Synthetic oligonucleotide
  Antisense strand to SEQ ID NO: 1137850
aacccaggaagcuucuuua

SEQ ID NO: 1137852 - RNA, 19 nt, Artificial Sequence
  Description of Artificial Sequence: Synthetic oligonucleotide
  Sense strand starting at position 3456 of SEQ ID NO: 916197
gaagcuuccuggguucuca

SEQ ID NO: 1137853 - RNA, 19 nt, Artificial Sequence
  Description of Artificial Sequence: Synthetic oligonucleotide
  Antisense strand to SEQ ID NO: 1137852
ugagaacccaggaagcuuc

SEQ ID NO: 1137854 - RNA, 19 nt, Artificial Sequence
  Description of Artificial Sequence: Synthetic oligonucleotide
  Sense strand starting at position 3584 of SEQ ID NO: 916197
gccagcuuuccgggauaau

SEQ ID NO: 1137855 - RNA, 19 nt, Artificial Sequence
  Description of Artificial Sequence: Synthetic oligonucleotide
  Antisense strand to SEQ ID NO: 1137854
auuaucccggaaagcuggc

SEQ ID NO: 1137856 - RNA, 19 nt, Artificial Sequence
  Description of Artificial Sequence: Synthetic oligonucleotide
  Sense strand starting at position 3585 of SEQ ID NO: 916197
ccagcuuuccgggauaaua

SEQ ID NO: 1137857 - RNA, 19 nt, Artificial Sequence
  Description of Artificial Sequence: Synthetic oligonucleotide
  Antisense strand to SEQ ID NO: 1137856
uauuaucccggaaagcugg

SEQ ID NO: 1137858 - RNA, 19 nt, Artificial Sequence
  Description of Artificial Sequence: Synthetic oligonucleotide
  Sense strand starting at position 3587 of SEQ ID NO: 916197
agcuuuccgggauaauaac

SEQ ID NO: 1137859 - RNA, 19 nt, Artificial Sequence
  Description of Artificial Sequence: Synthetic oligonucleotide
  Antisense strand to SEQ ID NO: 1137858
guuauuaucccggaaagcu

SEQ ID NO: 1137860 - RNA, 19 nt, Artificial Sequence
  Description of Artificial Sequence: Synthetic oligonucleotide
  Sense strand starting at position 3593 of SEQ ID NO: 916197
ccgggauaauaacaaagau

SEQ ID NO: 1137861 - RNA, 19 nt, Artificial Sequence
  Description of Artificial Sequence: Synthetic oligonucleotide
  Antisense strand to SEQ ID NO: 1137860
aucuuuguuauuaucccgg

SEQ ID NO: 1137862 - RNA, 19 nt, Artificial Sequence
  Description of Artificial Sequence: Synthetic oligonucleotide
  Sense strand starting at position 3653 of SEQ ID NO: 916197
caggcuaugcccgugugau

SEQ ID NO: 1137863 - RNA, 19 nt, Artificial Sequence
  Description of Artificial Sequence: Synthetic oligonucleotide
  Antisense strand to SEQ ID NO: 1137862
aucacacgggcauagccug

SEQ ID NO: 1137864 - RNA, 19 nt, Artificial Sequence
  Description of Artificial Sequence: Synthetic oligonucleotide
  Sense strand starting at position 3655 of SEQ ID NO: 916197
ggcuaugcccgugugauac

SEQ ID NO: 1137865 - RNA, 19 nt, Artificial Sequence
  Description of Artificial Sequence: Synthetic oligonucleotide
  Antisense strand to SEQ ID NO: 1137864
guaucacacgggcauagcc

SEQ ID NO: 1137866 - RNA, 19 nt, Artificial Sequence
  Description of Artificial Sequence: Synthetic oligonucleotide
  Sense strand starting at position 3663 of SEQ ID NO: 916197
ccgugugauaccuggaguc

SEQ ID NO: 1137867 - RNA, 19 nt, Artificial Sequence
  Description of Artificial Sequence: Synthetic oligonucleotide
  Antisense strand to SEQ ID NO: 1137866
gacuccagguaucacacgg

SEQ ID NO: 1137868 - RNA, 19 nt, Artificial Sequence
  Description of Artificial Sequence: Synthetic oligonucleotide
  Sense strand starting at position 3759 of SEQ ID NO: 916197
cucaguuucuugucuguga

SEQ ID NO: 1137869 - RNA, 19 nt, Artificial Sequence
  Description of Artificial Sequence: Synthetic oligonucleotide
  Antisense strand to SEQ ID NO: 1137868
ucacagacaagaaacugag

SEQ ID NO: 1137870 - RNA, 19 nt, Artificial Sequence
  Description of Artificial Sequence: Synthetic oligonucleotide
  Sense strand starting at position 3760 of SEQ ID NO: 916197
ucaguuucuugucugugaa

SEQ ID NO: 1137871 - RNA, 19 nt, Artificial Sequence
  Description of Artificial Sequence: Synthetic oligonucleotide
  Antisense strand to SEQ ID NO: 1137870
uucacagacaagaaacuga

SEQ ID NO: 1137872 - RNA, 19 nt, Artificial Sequence
  Description of Artificial Sequence: Synthetic oligonucleotide
  Sense strand starting at position 3762 of SEQ ID NO: 916197
aguuucuugucugugaaau

SEQ ID NO: 1137873 - RNA, 19 nt, Artificial Sequence
  Description of Artificial Sequence: Synthetic oligonucleotide
  Antisense strand to SEQ ID NO: 1137872
auuucacagacaagaaacu

SEQ ID NO: 1137874 - RNA, 19 nt, Artificial Sequence
  Description of Artificial Sequence: Synthetic oligonucleotide
  Sense strand starting at position 3763 of SEQ ID NO: 916197
guuucuugucugugaaaug

SEQ ID NO: 1137875 - RNA, 19 nt, Artificial Sequence
  Description of Artificial Sequence: Synthetic oligonucleotide
  Antisense strand to SEQ ID NO: 1137874
cauuucacagacaagaaac

SEQ ID NO: 1137876 - RNA, 19 nt, Artificial Sequence
  Description of Artificial Sequence: Synthetic oligonucleotide
  Sense strand starting at position 3807 of SEQ ID NO: 916197
agcguagauuugagggcaa

SEQ ID NO: 1137877 - RNA, 19 nt, Artificial Sequence
  Description of Artificial Sequence: Synthetic oligonucleotide
  Antisense strand to SEQ ID NO: 1137876
uugcccucaaaucuacgcu

SEQ ID NO: 1137878 - RNA, 19 nt, Artificial Sequence
  Description of Artificial Sequence: Synthetic oligonucleotide
  Sense strand starting at position 3828 of SEQ ID NO: 916197
ugaauucuugcauguaaag

SEQ ID NO: 1137879 - RNA, 19 nt, Artificial Sequence
  Description of Artificial Sequence: Synthetic oligonucleotide
  Antisense strand to SEQ ID NO: 1137878
cuuuacaugcaagaauuca

SEQ ID NO: 1137880 - RNA, 19 nt, Artificial Sequence
  Description of Artificial Sequence: Synthetic oligonucleotide
  Sense strand starting at position 3933 of SEQ ID NO: 916197
agcggacgggcugauuaua

SEQ ID NO: 1137881 - RNA, 19 nt, Artificial Sequence
  Description of Artificial Sequence: Synthetic oligonucleotide
  Antisense strand to SEQ ID NO: 1137880
uauaaucagcccguccgcu

SEQ ID NO: 1137882 - RNA, 19 nt, Artificial Sequence
  Description of Artificial Sequence: Synthetic oligonucleotide
  Sense strand starting at position 56 of SEQ ID NO: 916198
auggcuuugcccugacgua

SEQ ID NO: 1137883 - RNA, 19 nt, Artificial Sequence
  Description of Artificial Sequence: Synthetic oligonucleotide
  Antisense strand to SEQ ID NO: 1137882
uacgucagggcaaagccau

SEQ ID NO: 1137884 - RNA, 19 nt, Artificial Sequence
  Description of Artificial Sequence: Synthetic oligonucleotide
  Sense strand starting at position 57 of SEQ ID NO: 916198
uggcuuugcccugacguaa

SEQ ID NO: 1137885 - RNA, 19 nt, Artificial Sequence
  Description of Artificial Sequence: Synthetic oligonucleotide
  Antisense strand to SEQ ID NO: 1137884
uuacgucagggcaaagcca

SEQ ID NO: 1137886 - RNA, 19 nt, Artificial Sequence
  Description of Artificial Sequence: Synthetic oligonucleotide
  Sense strand starting at position 1782 of SEQ ID NO: 916198
aaaucaaagccucgugaga

SEQ ID NO: 1137887 - RNA, 19 nt, Artificial Sequence
  Description of Artificial Sequence: Synthetic oligonucleotide
  Antisense strand to SEQ ID NO: 1137886
ucucacgaggcuuugauuu

SEQ ID NO: 1137888 - RNA, 19 nt, Artificial Sequence
  Description of Artificial Sequence: Synthetic oligonucleotide
  Sense strand starting at position 1850 of SEQ ID NO: 916198
ccguuccacgcgcaauaau

SEQ ID NO: 1137889 - RNA, 19 nt, Artificial Sequence
  Description of Artificial Sequence: Synthetic oligonucleotide
  Antisense strand to SEQ ID NO: 1137888
auuauugcgcguggaacgg

SEQ ID NO: 1137890 - RNA, 19 nt, Artificial Sequence
  Description of Artificial Sequence: Synthetic oligonucleotide
  Sense strand starting at position 1925 of SEQ ID NO: 916198
ucaacugccuugucuagaa

SEQ ID NO: 1137891 - RNA, 19 nt, Artificial Sequence
  Description of Artificial Sequence: Synthetic oligonucleotide
  Antisense strand to SEQ ID NO: 1137890
uucuagacaaggcaguuga

SEQ ID NO: 1137892 - RNA, 19 nt, Artificial Sequence
  Description of Artificial Sequence: Synthetic oligonucleotide
  Sense strand starting at position 1929 of SEQ ID NO: 916198
cugccuugucuagaaagau

SEQ ID NO: 1137893 - RNA, 19 nt, Artificial Sequence
  Description of Artificial Sequence: Synthetic oligonucleotide
  Antisense strand to SEQ ID NO: 1137892
aucuuucuagacaaggcag

SEQ ID NO: 1137894 - RNA, 19 nt, Artificial Sequence
  Description of Artificial Sequence: Synthetic oligonucleotide
  Sense strand starting at position 1941 of SEQ ID NO: 916198
gaaagauagucuccugcag

SEQ ID NO: 1137895 - RNA, 19 nt, Artificial Sequence
  Description of Artificial Sequence: Synthetic oligonucleotide
  Antisense strand to SEQ ID NO: 1137894
cugcaggagacuaucuuuc

SEQ ID NO: 1137896 - RNA, 19 nt, Artificial Sequence
  Description of Artificial Sequence: Synthetic oligonucleotide
  Sense strand starting at position 1955 of SEQ ID NO: 916198
ugcaguucugcaguugcua

SEQ ID NO: 1137897 - RNA, 19 nt, Artificial Sequence
  Description of Artificial Sequence: Synthetic oligonucleotide
  Antisense strand to SEQ ID NO: 1137896
uagcaacugcagaacugca

SEQ ID NO: 1137898 - RNA, 19 nt, Artificial Sequence
  Description of Artificial Sequence: Synthetic oligonucleotide
  Sense strand starting at position 2215 of SEQ ID NO: 916198
gcggacgucacauaaacaa

SEQ ID NO: 1137899 - RNA, 19 nt, Artificial Sequence
  Description of Artificial Sequence: Synthetic oligonucleotide
  Antisense strand to SEQ ID NO: 1137898
uuguuuaugugacguccgc

SEQ ID NO: 1137900 - RNA, 19 nt, Artificial Sequence
  Description of Artificial Sequence: Synthetic oligonucleotide
  Sense strand starting at position 2569 of SEQ ID NO: 916198
guuguaaugagucguuuaa

SEQ ID NO: 1137901 - RNA, 19 nt, Artificial Sequence
  Description of Artificial Sequence: Synthetic oligonucleotide
  Antisense strand to SEQ ID NO: 1137900
uuaaacgacucauuacaac

SEQ ID NO: 1137902 - RNA, 19 nt, Artificial Sequence
  Description of Artificial Sequence: Synthetic oligonucleotide
  Sense strand starting at position 2571 of SEQ ID NO: 916198
uguaaugagucguuuaaua

SEQ ID NO: 1137903 - RNA, 19 nt, Artificial Sequence
  Description of Artificial Sequence: Synthetic oligonucleotide
  Antisense strand to SEQ ID NO: 1137902
uauuaaacgacucauuaca

SEQ ID NO: 1137904 - RNA, 19 nt, Artificial Sequence
  Description of Artificial Sequence: Synthetic oligonucleotide
  Sense strand starting at position 2679 of SEQ ID NO: 916198
ccacuucggccuuaagauu

SEQ ID NO: 1137905 - RNA, 19 nt, Artificial Sequence
  Description of Artificial Sequence: Synthetic oligonucleotide
  Antisense strand to SEQ ID NO: 1137904
aaucuuaaggccgaagugg

SEQ ID NO: 1137906 - RNA, 19 nt, Artificial Sequence
  Description of Artificial Sequence: Synthetic oligonucleotide
  Sense strand starting at position 2702 of SEQ ID NO: 916198
gucucuccgaauugaauga

SEQ ID NO: 1137907 - RNA, 19 nt, Artificial Sequence
  Description of Artificial Sequence: Synthetic oligonucleotide
  Antisense strand to SEQ ID NO: 1137906
ucauucaauucggagagac

SEQ ID NO: 1137908 - RNA, 19 nt, Artificial Sequence
  Description of Artificial Sequence: Synthetic oligonucleotide
  Sense strand starting at position 2706 of SEQ ID NO: 916198
cuccgaauugaaugauugu

SEQ ID NO: 1137909 - RNA, 19 nt, Artificial Sequence
  Description of Artificial Sequence: Synthetic oligonucleotide
  Antisense strand to SEQ ID NO: 1137908
acaaucauucaauucggag

SEQ ID NO: 1137910 - RNA, 19 nt, Artificial Sequence
  Description of Artificial Sequence: Synthetic oligonucleotide
  Sense strand starting at position 2707 of SEQ ID NO: 916198
uccgaauugaaugauuguu

SEQ ID NO: 1137911 - RNA, 19 nt, Artificial Sequence
  Description of Artificial Sequence: Synthetic oligonucleotide
  Antisense strand to SEQ ID NO: 1137910
aacaaucauucaauucgga

SEQ ID NO: 1137912 - RNA, 19 nt, Artificial Sequence
  Description of Artificial Sequence: Synthetic oligonucleotide
  Sense strand starting at position 2709 of SEQ ID NO: 916198
cgaauugaaugauuguuaa

SEQ ID NO: 1137913 - RNA, 19 nt, Artificial Sequence
  Description of Artificial Sequence: Synthetic oligonucleotide
  Antisense strand to SEQ ID NO: 1137912
uuaacaaucauucaauucg

SEQ ID NO: 1137914 - RNA, 19 nt, Artificial Sequence
  Description of Artificial Sequence: Synthetic oligonucleotide
  Sense strand starting at position 2720 of SEQ ID NO: 916198
auuguuaauuuccguggga

SEQ ID NO: 1137915 - RNA, 19 nt, Artificial Sequence
  Description of Artificial Sequence: Synthetic oligonucleotide
  Antisense strand to SEQ ID NO: 1137914
ucccacggaaauuaacaau

SEQ ID NO: 1137916 - RNA, 19 nt, Artificial Sequence
  Description of Artificial Sequence: Synthetic oligonucleotide
  Sense strand starting at position 2722 of SEQ ID NO: 916198
uguuaauuuccgugggaac

SEQ ID NO: 1137917 - RNA, 19 nt, Artificial Sequence
  Description of Artificial Sequence: Synthetic oligonucleotide
  Antisense strand to SEQ ID NO: 1137916
guucccacggaaauuaaca

SEQ ID NO: 1137918 - RNA, 19 nt, Artificial Sequence
  Description of Artificial Sequence: Synthetic oligonucleotide
  Sense strand starting at position 2725 of SEQ ID NO: 916198
uaauuuccgugggaacagu

SEQ ID NO: 1137919 - RNA, 19 nt, Artificial Sequence
  Description of Artificial Sequence: Synthetic oligonucleotide
  Antisense strand to SEQ ID NO: 1137918
acuguucccacggaaauua

SEQ ID NO: 1137920 - RNA, 19 nt, Artificial Sequence
  Description of Artificial Sequence: Synthetic oligonucleotide
  Sense strand starting at position 2740 of SEQ ID NO: 916198
cagugccgcuuucuuuaaa

SEQ ID NO: 1137921 - RNA, 19 nt, Artificial Sequence
  Description of Artificial Sequence: Synthetic oligonucleotide
  Antisense strand to SEQ ID NO: 1137920
uuuaaagaaagcggcacug

SEQ ID NO: 1137922 - RNA, 19 nt, Artificial Sequence
  Description of Artificial Sequence: Synthetic oligonucleotide
  Sense strand starting at position 2793 of SEQ ID NO: 916198
aggcauaccuccucuagca

SEQ ID NO: 1137923 - RNA, 19 nt, Artificial Sequence
  Description of Artificial Sequence: Synthetic oligonucleotide
  Antisense strand to SEQ ID NO: 1137922
ugcuagaggagguaugccu

SEQ ID NO: 1137924 - RNA, 19 nt, Artificial Sequence
  Description of Artificial Sequence: Synthetic oligonucleotide
  Sense strand starting at position 2812 of SEQ ID NO: 916198
gcuuguaaaggguguucca

SEQ ID NO: 1137925 - RNA, 19 nt, Artificial Sequence
  Description of Artificial Sequence: Synthetic oligonucleotide
  Antisense strand to SEQ ID NO: 1137924
uggaacacccuuuacaagc

SEQ ID NO: 1137926 - RNA, 19 nt, Artificial Sequence
  Description of Artificial Sequence: Synthetic oligonucleotide
  Sense strand starting at position 2856 of SEQ ID NO: 916198
ugguggucuugggaaugga

SEQ ID NO: 1137927 - RNA, 19 nt, Artificial Sequence
  Description of Artificial Sequence: Synthetic oligonucleotide
  Antisense strand to SEQ ID NO: 1137926
uccauucccaagaccacca

SEQ ID NO: 1137928 - RNA, 19 nt, Artificial Sequence
  Description of Artificial Sequence: Synthetic oligonucleotide
  Sense strand starting at position 2939 of SEQ ID NO: 916198
cuuucuagacuccggaaga

SEQ ID NO: 1137929 - RNA, 19 nt, Artificial Sequence
  Description of Artificial Sequence: Synthetic oligonucleotide
  Antisense strand to SEQ ID NO: 1137928
ucuuccggagucuagaaag

SEQ ID NO: 1137930 - RNA, 19 nt, Artificial Sequence
  Description of Artificial Sequence: Synthetic oligonucleotide
  Sense strand starting at position 2965 of SEQ ID NO: 916198
ugaaguaacucuucucaga

SEQ ID NO: 1137931 - RNA, 19 nt, Artificial Sequence
  Description of Artificial Sequence: Synthetic oligonucleotide
  Antisense strand to SEQ ID NO: 1137930
ucugagaagaguuacuuca

SEQ ID NO: 1137932 - RNA, 19 nt, Artificial Sequence
  Description of Artificial Sequence: Synthetic oligonucleotide
  Sense strand starting at position 2973 of SEQ ID NO: 916198
cucuucucagauugauaag

SEQ ID NO: 1137933 - RNA, 19 nt, Artificial Sequence
  Description of Artificial Sequence: Synthetic oligonucleotide
  Antisense strand to SEQ ID NO: 1137932
cuuaucaaucugagaagag

SEQ ID NO: 1137934 - RNA, 19 nt, Artificial Sequence
  Description of Artificial Sequence: Synthetic oligonucleotide
  Sense strand starting at position 2979 of SEQ ID NO: 916198
ucagauugauaagaggaaa

SEQ ID NO: 1137935 - RNA, 19 nt, Artificial Sequence
  Description of Artificial Sequence: Synthetic oligonucleotide
  Antisense strand to SEQ ID NO: 1137934
uuuccucuuaucaaucuga

SEQ ID NO: 1137936 - RNA, 19 nt, Artificial Sequence
  Description of Artificial Sequence: Synthetic oligonucleotide
  Sense strand starting at position 3009 of SEQ ID NO: 916198
augauugauucgccuuugu

SEQ ID NO: 1137937 - RNA, 19 nt, Artificial Sequence
  Description of Artificial Sequence: Synthetic oligonucleotide
  Antisense strand to SEQ ID NO: 1137936
acaaaggcgaaucaaucau

SEQ ID NO: 1137938 - RNA, 19 nt, Artificial Sequence
  Description of Artificial Sequence: Synthetic oligonucleotide
  Sense strand starting at position 3107 of SEQ ID NO: 916198
ccagaaacuugauauuggu

SEQ ID NO: 1137939 - RNA, 19 nt, Artificial Sequence
  Description of Artificial Sequence: Synthetic oligonucleotide
  Antisense strand to SEQ ID NO: 1137938
accaauaucaaguuucugg

SEQ ID NO: 1137940 - RNA, 19 nt, Artificial Sequence
  Description of Artificial Sequence: Synthetic oligonucleotide
  Sense strand starting at position 3113 of SEQ ID NO: 916198
acuugauauuggucccaag

SEQ ID NO: 1137941 - RNA, 19 nt, Artificial Sequence
  Description of Artificial Sequence: Synthetic oligonucleotide
  Antisense strand to SEQ ID NO: 1137940
cuugggaccaauaucaagu

SEQ ID NO: 1137942 - RNA, 19 nt, Artificial Sequence
  Description of Artificial Sequence: Synthetic oligonucleotide
  Sense strand starting at position 3252 of SEQ ID NO: 916198
acaggcaauuccuaguaca

SEQ ID NO: 1137943 - RNA, 19 nt, Artificial Sequence
  Description of Artificial Sequence: Synthetic oligonucleotide
  Antisense strand to SEQ ID NO: 1137942
uguacuaggaauugccugu

SEQ ID NO: 1137944 - RNA, 19 nt, Artificial Sequence
  Description of Artificial Sequence: Synthetic oligonucleotide
  Sense strand starting at position 3320 of SEQ ID NO: 916198
ucuuuagguucuguaacau

SEQ ID NO: 1137945 - RNA, 19 nt, Artificial Sequence
  Description of Artificial Sequence: Synthetic oligonucleotide
  Antisense strand to SEQ ID NO: 1137944
auguuacagaaccuaaaga

SEQ ID NO: 1137946 - RNA, 19 nt, Artificial Sequence
  Description of Artificial Sequence: Synthetic oligonucleotide
  Sense strand starting at position 3332 of SEQ ID NO: 916198
guaacauacuauuccugua

SEQ ID NO: 1137947 - RNA, 19 nt, Artificial Sequence
  Description of Artificial Sequence: Synthetic oligonucleotide
  Antisense strand to SEQ ID NO: 1137946
uacaggaauaguauguuac

SEQ ID NO: 1137948 - RNA, 19 nt, Artificial Sequence
  Description of Artificial Sequence: Synthetic oligonucleotide
  Sense strand starting at position 3337 of SEQ ID NO: 916198
auacuauuccuguaacugu

SEQ ID NO: 1137949 - RNA, 19 nt, Artificial Sequence
  Description of Artificial Sequence: Synthetic oligonucleotide
  Antisense strand to SEQ ID NO: 1137948
acaguuacaggaauaguau

SEQ ID NO: 1137950 - RNA, 19 nt, Artificial Sequence
  Description of Artificial Sequence: Synthetic oligonucleotide
  Sense strand starting at position 3340 of SEQ ID NO: 916198
cuauuccuguaacuguaua

SEQ ID NO: 1137951 - RNA, 19 nt, Artificial Sequence
  Description of Artificial Sequence: Synthetic oligonucleotide
  Antisense strand to SEQ ID NO: 1137950
uauacaguuacaggaauag

SEQ ID NO: 1137952 - RNA, 19 nt, Artificial Sequence
  Description of Artificial Sequence: Synthetic oligonucleotide
  Sense strand starting at position 3345 of SEQ ID NO: 916198
ccuguaacuguauaugaaa

SEQ ID NO: 1137953 - RNA, 19 nt, Artificial Sequence
  Description of Artificial Sequence: Synthetic oligonucleotide
  Antisense strand to SEQ ID NO: 1137952
uuucauauacaguuacagg

SEQ ID NO: 1137954 - RNA, 19 nt, Artificial Sequence
  Description of Artificial Sequence: Synthetic oligonucleotide
  Sense strand starting at position 3639 of SEQ ID NO: 916198
uuuguauuccagugccuga

SEQ ID NO: 1137955 - RNA, 19 nt, Artificial Sequence
  Description of Artificial Sequence: Synthetic oligonucleotide
  Antisense strand to SEQ ID NO: 1137954
ucaggcacuggaauacaaa

SEQ ID NO: 1137956 - RNA, 19 nt, Artificial Sequence
  Description of Artificial Sequence: Synthetic oligonucleotide
  Sense strand starting at position 3684 of SEQ ID NO: 916198
ugacaucuugcaugcauua

SEQ ID NO: 1137957 - RNA, 19 nt, Artificial Sequence
  Description of Artificial Sequence: Synthetic oligonucleotide
  Antisense strand to SEQ ID NO: 1137956
uaaugcaugcaagauguca

SEQ ID NO: 1137958 - RNA, 19 nt, Artificial Sequence
  Description of Artificial Sequence: Synthetic oligonucleotide
  Sense strand starting at position 3696 of SEQ ID NO: 916198
ugcauuaguuggcuaggaa

SEQ ID NO: 1137959 - RNA, 19 nt, Artificial Sequence
  Description of Artificial Sequence: Synthetic oligonucleotide
  Antisense strand to SEQ ID NO: 1137958
uuccuagccaacuaaugca

SEQ ID NO: 1137960 - RNA, 19 nt, Artificial Sequence
  Description of Artificial Sequence: Synthetic oligonucleotide
  Sense strand starting at position 3697 of SEQ ID NO: 916198
gcauuaguuggcuaggaaa

SEQ ID NO: 1137961 - RNA, 19 nt, Artificial Sequence
  Description of Artificial Sequence: Synthetic oligonucleotide
  Antisense strand to SEQ ID NO: 1137960
uuuccuagccaacuaaugc

SEQ ID NO: 1137962 - RNA, 19 nt, Artificial Sequence
  Description of Artificial Sequence: Synthetic oligonucleotide
  Sense strand starting at position 18 of SEQ ID NO: 916199
auggcuuugcccugacgua

SEQ ID NO: 1137963 - RNA, 19 nt, Artificial Sequence
  Description of Artificial Sequence: Synthetic oligonucleotide
  Antisense strand to SEQ ID NO: 1137962
uacgucagggcaaagccau

SEQ ID NO: 1137964 - RNA, 19 nt, Artificial Sequence
  Description of Artificial Sequence: Synthetic oligonucleotide
  Sense strand starting at position 19 of SEQ ID NO: 916199
uggcuuugcccugacguaa

SEQ ID NO: 1137965 - RNA, 19 nt, Artificial Sequence
  Description of Artificial Sequence: Synthetic oligonucleotide
  Antisense strand to SEQ ID NO: 1137964
uuacgucagggcaaagcca

SEQ ID NO: 1137966 - RNA, 19 nt, Artificial Sequence
  Description of Artificial Sequence: Synthetic oligonucleotide
  Sense strand starting at position 1744 of SEQ ID NO: 916199
aaaucaaagccucgugaga

SEQ ID NO: 1137967 - RNA, 19 nt, Artificial Sequence
  Description of Artificial Sequence: Synthetic oligonucleotide
  Antisense strand to SEQ ID NO: 1137966
ucucacgaggcuuugauuu

SEQ ID NO: 1137968 - RNA, 19 nt, Artificial Sequence
  Description of Artificial Sequence: Synthetic oligonucleotide
  Sense strand starting at position 1812 of SEQ ID NO: 916199
ccguuccacgcgcaauaau

SEQ ID NO: 1137969 - RNA, 19 nt, Artificial Sequence
  Description of Artificial Sequence: Synthetic oligonucleotide
  Antisense strand to SEQ ID NO: 1137968
auuauugcgcguggaacgg

SEQ ID NO: 1137970 - RNA, 19 nt, Artificial Sequence
  Description of Artificial Sequence: Synthetic oligonucleotide
  Sense strand starting at position 1887 of SEQ ID NO: 916199
ucaacugccuugucuagaa

SEQ ID NO: 1137971 - RNA, 19 nt, Artificial Sequence
  Description of Artificial Sequence: Synthetic oligonucleotide
  Antisense strand to SEQ ID NO: 1137970
uucuagacaaggcaguuga

SEQ ID NO: 1137972 - RNA, 19 nt, Artificial Sequence
  Description of Artificial Sequence: Synthetic oligonucleotide
  Sense strand starting at position 1891 of SEQ ID NO: 916199
cugccuugucuagaaagau

SEQ ID NO: 1137973 - RNA, 19 nt, Artificial Sequence
  Description of Artificial Sequence: Synthetic oligonucleotide
  Antisense strand to SEQ ID NO: 1137972
aucuuucuagacaaggcag

SEQ ID NO: 1137974 - RNA, 19 nt, Artificial Sequence
  Description of Artificial Sequence: Synthetic oligonucleotide
  Sense strand starting at position 1903 of SEQ ID NO: 916199
gaaagauagucuccugcag

SEQ ID NO: 1137975 - RNA, 19 nt, Artificial Sequence
  Description of Artificial Sequence: Synthetic oligonucleotide
  Antisense strand to SEQ ID NO: 1137974
cugcaggagacuaucuuuc

SEQ ID NO: 1137976 - RNA, 19 nt, Artificial Sequence
  Description of Artificial Sequence: Synthetic oligonucleotide
  Sense strand starting at position 1917 of SEQ ID NO: 916199
ugcaguucugcaguugcua

SEQ ID NO: 1137977 - RNA, 19 nt, Artificial Sequence
  Description of Artificial Sequence: Synthetic oligonucleotide
  Antisense strand to SEQ ID NO: 1137976
uagcaacugcagaacugca

SEQ ID NO: 1137978 - RNA, 19 nt, Artificial Sequence
  Description of Artificial Sequence: Synthetic oligonucleotide
  Sense strand starting at position 2177 of SEQ ID NO: 916199
gcggacgucacauaaacaa

SEQ ID NO: 1137979 - RNA, 19 nt, Artificial Sequence
  Description of Artificial Sequence: Synthetic oligonucleotide
  Antisense strand to SEQ ID NO: 1137978
uuguuuaugugacguccgc

SEQ ID NO: 1137980 - RNA, 19 nt, Artificial Sequence
  Description of Artificial Sequence: Synthetic oligonucleotide
  Sense strand starting at position 2531 of SEQ ID NO: 916199
guuguaaugagucguuuaa

SEQ ID NO: 1137981 - RNA, 19 nt, Artificial Sequence
  Description of Artificial Sequence: Synthetic oligonucleotide
  Antisense strand to SEQ ID NO: 1137980
uuaaacgacucauuacaac

SEQ ID NO: 1137982 - RNA, 19 nt, Artificial Sequence
  Description of Artificial Sequence: Synthetic oligonucleotide
  Sense strand starting at position 2533 of SEQ ID NO: 916199
uguaaugagucguuuaaua

SEQ ID NO: 1137983 - RNA, 19 nt, Artificial Sequence
  Description of Artificial Sequence: Synthetic oligonucleotide
  Antisense strand to SEQ ID NO: 1137982
uauuaaacgacucauuaca

SEQ ID NO: 1137984 - RNA, 19 nt, Artificial Sequence
  Description of Artificial Sequence: Synthetic oligonucleotide
  Sense strand starting at position 2641 of SEQ ID NO: 916199
ccacuucggccuuaagauu

SEQ ID NO: 1137985 - RNA, 19 nt, Artificial Sequence
  Description of Artificial Sequence: Synthetic oligonucleotide
  Antisense strand to SEQ ID NO: 1137984
aaucuuaaggccgaagugg

SEQ ID NO: 1137986 - RNA, 19 nt, Artificial Sequence
  Description of Artificial Sequence: Synthetic oligonucleotide
  Sense strand starting at position 2664 of SEQ ID NO: 916199
gucucuccgaauugaauga

SEQ ID NO: 1137987 - RNA, 19 nt, Artificial Sequence
  Description of Artificial Sequence: Synthetic oligonucleotide
  Antisense strand to SEQ ID NO: 1137986
ucauucaauucggagagac

SEQ ID NO: 1137988 - RNA, 19 nt, Artificial Sequence
  Description of Artificial Sequence: Synthetic oligonucleotide
  Sense strand starting at position 2668 of SEQ ID NO: 916199
cuccgaauugaaugauugu

SEQ ID NO: 1137989 - RNA, 19 nt, Artificial Sequence
  Description of Artificial Sequence: Synthetic oligonucleotide
  Antisense strand to SEQ ID NO: 1137988
acaaucauucaauucggag

SEQ ID NO: 1137990 - RNA, 19 nt, Artificial Sequence
  Description of Artificial Sequence: Synthetic oligonucleotide
  Sense strand starting at position 2669 of SEQ ID NO: 916199
uccgaauugaaugauuguu

SEQ ID NO: 1137991 - RNA, 19 nt, Artificial Sequence
  Description of Artificial Sequence: Synthetic oligonucleotide
  Antisense strand to SEQ ID NO: 1137990
aacaaucauucaauucgga

SEQ ID NO: 1137992 - RNA, 19 nt, Artificial Sequence
  Description of Artificial Sequence: Synthetic oligonucleotide
  Sense strand starting at position 2671 of SEQ ID NO: 916199
cgaauugaaugauuguuaa

SEQ ID NO: 1137993 - RNA, 19 nt, Artificial Sequence
  Description of Artificial Sequence: Synthetic oligonucleotide
  Antisense strand to SEQ ID NO: 1137992
uuaacaaucauucaauucg

SEQ ID NO: 1137994 - RNA, 19 nt, Artificial Sequence
  Description of Artificial Sequence: Synthetic oligonucleotide
  Sense strand starting at position 2682 of SEQ ID NO: 916199
auuguuaauuuccguggga

SEQ ID NO: 1137995 - RNA, 19 nt, Artificial Sequence
  Description of Artificial Sequence: Synthetic oligonucleotide
  Antisense strand to SEQ ID NO: 1137994
ucccacggaaauuaacaau

SEQ ID NO: 1137996 - RNA, 19 nt, Artificial Sequence
  Description of Artificial Sequence: Synthetic oligonucleotide
  Sense strand starting at position 2684 of SEQ ID NO: 916199
uguuaauuuccgugggaac

SEQ ID NO: 1137997 - RNA, 19 nt, Artificial Sequence
  Description of Artificial Sequence: Synthetic oligonucleotide
  Antisense strand to SEQ ID NO: 1137996
guucccacggaaauuaaca

SEQ ID NO: 1137998 - RNA, 19 nt, Artificial Sequence
  Description of Artificial Sequence: Synthetic oligonucleotide
  Sense strand starting at position 2687 of SEQ ID NO: 916199
uaauuuccgugggaacagu

SEQ ID NO: 1137999 - RNA, 19 nt, Artificial Sequence
  Description of Artificial Sequence: Synthetic oligonucleotide
  Antisense strand to SEQ ID NO: 1137998
acuguucccacggaaauua

SEQ ID NO: 1138000 - RNA, 19 nt, Artificial Sequence
  Description of Artificial Sequence: Synthetic oligonucleotide
  Sense strand starting at position 2702 of SEQ ID NO: 916199
cagugccgcuuucuuuaaa

SEQ ID NO: 1138001 - RNA, 19 nt, Artificial Sequence
  Description of Artificial Sequence: Synthetic oligonucleotide
  Antisense strand to SEQ ID NO: 1138000
uuuaaagaaagcggcacug

SEQ ID NO: 1138002 - RNA, 19 nt, Artificial Sequence
  Description of Artificial Sequence: Synthetic oligonucleotide
  Sense strand starting at position 2755 of SEQ ID NO: 916199
aggcauaccuccucuagca

SEQ ID NO: 1138003 - RNA, 19 nt, Artificial Sequence
  Description of Artificial Sequence: Synthetic oligonucleotide
  Antisense strand to SEQ ID NO: 1138002
ugcuagaggagguaugccu

SEQ ID NO: 1138004 - RNA, 19 nt, Artificial Sequence
  Description of Artificial Sequence: Synthetic oligonucleotide
  Sense strand starting at position 2774 of SEQ ID NO: 916199
gcuuguaaaggguguucca

SEQ ID NO: 1138005 - RNA, 19 nt, Artificial Sequence
  Description of Artificial Sequence: Synthetic oligonucleotide
  Antisense strand to SEQ ID NO: 1138004
uggaacacccuuuacaagc

SEQ ID NO: 1138006 - RNA, 19 nt, Artificial Sequence
  Description of Artificial Sequence: Synthetic oligonucleotide
  Sense strand starting at position 2818 of SEQ ID NO: 916199
ugguggucuugggaaugga

SEQ ID NO: 1138007 - RNA, 19 nt, Artificial Sequence
  Description of Artificial Sequence: Synthetic oligonucleotide
  Antisense strand to SEQ ID NO: 1138006
uccauucccaagaccacca

SEQ ID NO: 1138008 - RNA, 19 nt, Artificial Sequence
  Description of Artificial Sequence: Synthetic oligonucleotide
  Sense strand starting at position 2901 of SEQ ID NO: 916199
cuuucuagacuccggaaga

SEQ ID NO: 1138009 - RNA, 19 nt, Artificial Sequence
  Description of Artificial Sequence: Synthetic oligonucleotide
  Antisense strand to SEQ ID NO: 1138008
ucuuccggagucuagaaag

SEQ ID NO: 1138010 - RNA, 19 nt, Artificial Sequence
  Description of Artificial Sequence: Synthetic oligonucleotide
  Sense strand starting at position 2927 of SEQ ID NO: 916199
ugaaguaacucuucucaga

SEQ ID NO: 1138011 - RNA, 19 nt, Artificial Sequence
  Description of Artificial Sequence: Synthetic oligonucleotide
  Antisense strand to SEQ ID NO: 1138010
ucugagaagaguuacuuca

SEQ ID NO: 1138012 - RNA, 19 nt, Artificial Sequence
  Description of Artificial Sequence: Synthetic oligonucleotide
  Sense strand starting at position 2935 of SEQ ID NO: 916199
cucuucucagauugauaag

SEQ ID NO: 1138013 - RNA, 19 nt, Artificial Sequence
  Description of Artificial Sequence: Synthetic oligonucleotide
  Antisense strand to SEQ ID NO: 1138012
cuuaucaaucugagaagag

SEQ ID NO: 1138014 - RNA, 19 nt, Artificial Sequence
  Description of Artificial Sequence: Synthetic oligonucleotide
  Sense strand starting at position 2941 of SEQ ID NO: 916199
ucagauugauaagaggaaa

SEQ ID NO: 1138015 - RNA, 19 nt, Artificial Sequence
  Description of Artificial Sequence: Synthetic oligonucleotide
  Antisense strand to SEQ ID NO: 1138014
uuuccucuuaucaaucuga

SEQ ID NO: 1138016 - RNA, 19 nt, Artificial Sequence
  Description of Artificial Sequence: Synthetic oligonucleotide
  Sense strand starting at position 2971 of SEQ ID NO: 916199
augauugauucgccuuugu

SEQ ID NO: 1138017 - RNA, 19 nt, Artificial Sequence
  Description of Artificial Sequence: Synthetic oligonucleotide
  Antisense strand to SEQ ID NO: 1138016
acaaaggcgaaucaaucau

SEQ ID NO: 1138018 - RNA, 19 nt, Artificial Sequence
  Description of Artificial Sequence: Synthetic oligonucleotide
  Sense strand starting at position 3069 of SEQ ID NO: 916199
ccagaaacuugauauuggu

SEQ ID NO: 1138019 - RNA, 19 nt, Artificial Sequence
  Description of Artificial Sequence: Synthetic oligonucleotide
  Antisense strand to SEQ ID NO: 1138018
accaauaucaaguuucugg

SEQ ID NO: 1138020 - RNA, 19 nt, Artificial Sequence
  Description of Artificial Sequence: Synthetic oligonucleotide
  Sense strand starting at position 3075 of SEQ ID NO: 916199
acuugauauuggucccaag

SEQ ID NO: 1138021 - RNA, 19 nt, Artificial Sequence
  Description of Artificial Sequence: Synthetic oligonucleotide
  Antisense strand to SEQ ID NO: 1138020
cuugggaccaauaucaagu

SEQ ID NO: 1138022 - RNA, 19 nt, Artificial Sequence
  Description of Artificial Sequence: Synthetic oligonucleotide
  Sense strand starting at position 3214 of SEQ ID NO: 916199
acaggcaauuccuaguaca

SEQ ID NO: 1138023 - RNA, 19 nt, Artificial Sequence
  Description of Artificial Sequence: Synthetic oligonucleotide
  Antisense strand to SEQ ID NO: 1138022
uguacuaggaauugccugu

SEQ ID NO: 1138024 - RNA, 19 nt, Artificial Sequence
  Description of Artificial Sequence: Synthetic oligonucleotide
  Sense strand starting at position 3282 of SEQ ID NO: 916199
ucuuuagguucuguaacau

SEQ ID NO: 1138025 - RNA, 19 nt, Artificial Sequence
  Description of Artificial Sequence: Synthetic oligonucleotide
  Antisense strand to SEQ ID NO: 1138024
auguuacagaaccuaaaga

SEQ ID NO: 1138026 - RNA, 19 nt, Artificial Sequence
  Description of Artificial Sequence: Synthetic oligonucleotide
  Sense strand starting at position 3294 of SEQ ID NO: 916199
guaacauacuauuccugua

SEQ ID NO: 1138027 - RNA, 19 nt, Artificial Sequence
  Description of Artificial Sequence: Synthetic oligonucleotide
  Antisense strand to SEQ ID NO: 1138026
uacaggaauaguauguuac

SEQ ID NO: 1138028 - RNA, 19 nt, Artificial Sequence
  Description of Artificial Sequence: Synthetic oligonucleotide
  Sense strand starting at position 3299 of SEQ ID NO: 916199
auacuauuccuguaacugu

SEQ ID NO: 1138029 - RNA, 19 nt, Artificial Sequence
  Description of Artificial Sequence: Synthetic oligonucleotide
  Antisense strand to SEQ ID NO: 1138028
acaguuacaggaauaguau

SEQ ID NO: 1138030 - RNA, 19 nt, Artificial Sequence
  Description of Artificial Sequence: Synthetic oligonucleotide
  Sense strand starting at position 3302 of SEQ ID NO: 916199
cuauuccuguaacuguaua

SEQ ID NO: 1138031 - RNA, 19 nt, Artificial Sequence
  Description of Artificial Sequence: Synthetic oligonucleotide
  Antisense strand to SEQ ID NO: 1138030
uauacaguuacaggaauag

SEQ ID NO: 1138032 - RNA, 19 nt, Artificial Sequence
  Description of Artificial Sequence: Synthetic oligonucleotide
  Sense strand starting at position 3307 of SEQ ID NO: 916199
ccuguaacuguauaugaaa

SEQ ID NO: 1138033 - RNA, 19 nt, Artificial Sequence
  Description of Artificial Sequence: Synthetic oligonucleotide
  Antisense strand to SEQ ID NO: 1138032
uuucauauacaguuacagg

SEQ ID NO: 1138034 - RNA, 19 nt, Artificial Sequence
  Description of Artificial Sequence: Synthetic oligonucleotide
  Sense strand starting at position 3601 of SEQ ID NO: 916199
uuuguauuccagugccuga

SEQ ID NO: 1138035 - RNA, 19 nt, Artificial Sequence
  Description of Artificial Sequence: Synthetic oligonucleotide
  Antisense strand to SEQ ID NO: 1138034
ucaggcacuggaauacaaa

SEQ ID NO: 1138036 - RNA, 19 nt, Artificial Sequence
  Description of Artificial Sequence: Synthetic oligonucleotide
  Sense strand starting at position 3646 of SEQ ID NO: 916199
ugacaucuugcaugcauua

SEQ ID NO: 1138037 - RNA, 19 nt, Artificial Sequence
  Description of Artificial Sequence: Synthetic oligonucleotide
  Antisense strand to SEQ ID NO: 1138036
uaaugcaugcaagauguca

SEQ ID NO: 1138038 - RNA, 19 nt, Artificial Sequence
  Description of Artificial Sequence: Synthetic oligonucleotide
  Sense strand starting at position 3658 of SEQ ID NO: 916199
ugcauuaguuggcuaggaa

SEQ ID NO: 1138039 - RNA, 19 nt, Artificial Sequence
  Description of Artificial Sequence: Synthetic oligonucleotide
  Antisense strand to SEQ ID NO: 1138038
uuccuagccaacuaaugca

SEQ ID NO: 1138040 - RNA, 19 nt, Artificial Sequence
  Description of Artificial Sequence: Synthetic oligonucleotide
  Sense strand starting at position 3659 of SEQ ID NO: 916199
gcauuaguuggcuaggaaa

SEQ ID NO: 1138041 - RNA, 19 nt, Artificial Sequence
  Description of Artificial Sequence: Synthetic oligonucleotide
  Antisense strand to SEQ ID NO: 1138040
uuuccuagccaacuaaugc

SEQ ID NO: 1138042 - RNA, 19 nt, Artificial Sequence
  Description of Artificial Sequence: Synthetic oligonucleotide
  Sense strand starting at position 455 of SEQ ID NO: 916200
ggcauaucccuagggagag

SEQ ID NO: 1138043 - RNA, 19 nt, Artificial Sequence
  Description of Artificial Sequence: Synthetic oligonucleotide
  Antisense strand to SEQ ID NO: 1138042
cucucccuagggauaugcc

SEQ ID NO: 1138044 - RNA, 19 nt, Artificial Sequence
  Description of Artificial Sequence: Synthetic oligonucleotide
  Sense strand starting at position 569 of SEQ ID NO: 916200
uuguguugccaccaaugua

SEQ ID NO: 1138045 - RNA, 19 nt, Artificial Sequence
  Description of Artificial Sequence: Synthetic oligonucleotide
  Antisense strand to SEQ ID NO: 1138044
uacauugguggcaacacaa

SEQ ID NO: 1138046 - RNA, 19 nt, Artificial Sequence
  Description of Artificial Sequence: Synthetic oligonucleotide
  Sense strand starting at position 672 of SEQ ID NO: 916200
ggaugcuuuggacagcauu

SEQ ID NO: 1138047 - RNA, 19 nt, Artificial Sequence
  Description of Artificial Sequence: Synthetic oligonucleotide
  Antisense strand to SEQ ID NO: 1138046
aaugcuguccaaagcaucc

SEQ ID NO: 1138048 - RNA, 19 nt, Artificial Sequence
  Description of Artificial Sequence: Synthetic oligonucleotide
  Sense strand starting at position 706 of SEQ ID NO: 916200
aaugaacagcuguggauau

SEQ ID NO: 1138049 - RNA, 19 nt, Artificial Sequence
  Description of Artificial Sequence: Synthetic oligonucleotide
  Antisense strand to SEQ ID NO: 1138048
auauccacagcuguucauu

SEQ ID NO: 1138050 - RNA, 19 nt, Artificial Sequence
  Description of Artificial Sequence: Synthetic oligonucleotide
  Sense strand starting at position 729 of SEQ ID NO: 916200
ugaagaguugcugacagcu

SEQ ID NO: 1138051 - RNA, 19 nt, Artificial Sequence
  Description of Artificial Sequence: Synthetic oligonucleotide
  Antisense strand to SEQ ID NO: 1138050
agcugucagcaacucuuca

SEQ ID NO: 1138052 - RNA, 19 nt, Artificial Sequence
  Description of Artificial Sequence: Synthetic oligonucleotide
  Sense strand starting at position 735 of SEQ ID NO: 916200
guugcugacagcuaagaaa

SEQ ID NO: 1138053 - RNA, 19 nt, Artificial Sequence
  Description of Artificial Sequence: Synthetic oligonucleotide
  Antisense strand to SEQ ID NO: 1138052
uuucuuagcugucagcaac

SEQ ID NO: 1138054 - RNA, 19 nt, Artificial Sequence
  Description of Artificial Sequence: Synthetic oligonucleotide
  Sense strand starting at position 791 of SEQ ID NO: 916200
cuaggaaccuccucaaugu

SEQ ID NO: 1138055 - RNA, 19 nt, Artificial Sequence
  Description of Artificial Sequence: Synthetic oligonucleotide
  Antisense strand to SEQ ID NO: 1138054
acauugaggagguuccuag

SEQ ID NO: 1138056 - RNA, 19 nt, Artificial Sequence
  Description of Artificial Sequence: Synthetic oligonucleotide
  Sense strand starting at position 859 of SEQ ID NO: 916200
caaugcauuucccagguga

SEQ ID NO: 1138057 - RNA, 19 nt, Artificial Sequence
  Description of Artificial Sequence: Synthetic oligonucleotide
  Antisense strand to SEQ ID NO: 1138056
ucaccugggaaaugcauug

SEQ ID NO: 1138058 - RNA, 19 nt, Artificial Sequence
  Description of Artificial Sequence: Synthetic oligonucleotide
  Sense strand starting at position 936 of SEQ ID NO: 916200
cccaucuagucucugcaua

SEQ ID NO: 1138059 - RNA, 19 nt, Artificial Sequence
  Description of Artificial Sequence: Synthetic oligonucleotide
  Antisense strand to SEQ ID NO: 1138058
uaugcagagacuagauggg

SEQ ID NO: 1138060 - RNA, 19 nt, Artificial Sequence
  Description of Artificial Sequence: Synthetic oligonucleotide
  Sense strand starting at position 2322 of SEQ ID NO: 916200
aagagagaauuggauaaau

SEQ ID NO: 1138061 - RNA, 19 nt, Artificial Sequence
  Description of Artificial Sequence: Synthetic oligonucleotide
  Antisense strand to SEQ ID NO: 1138060
auuuauccaauucucucuu

SEQ ID NO: 1138062 - RNA, 19 nt, Artificial Sequence
  Description of Artificial Sequence: Synthetic oligonucleotide
  Sense strand starting at position 2341 of SEQ ID NO: 916200
ugguaaacagauugguaca

SEQ ID NO: 1138063 - RNA, 19 nt, Artificial Sequence
  Description of Artificial Sequence: Synthetic oligonucleotide
  Antisense strand to SEQ ID NO: 1138062
uguaccaaucuguuuacca

SEQ ID NO: 1138064 - RNA, 19 nt, Artificial Sequence
  Description of Artificial Sequence: Synthetic oligonucleotide
  Sense strand starting at position 2354 of SEQ ID NO: 916200
gguacaggauguuuaucaa

SEQ ID NO: 1138065 - RNA, 19 nt, Artificial Sequence
  Description of Artificial Sequence: Synthetic oligonucleotide
  Antisense strand to SEQ ID NO: 1138064
uugauaaacauccuguacc

SEQ ID NO: 1138066 - RNA, 19 nt, Artificial Sequence
  Description of Artificial Sequence: Synthetic oligonucleotide
  Sense strand starting at position 2357 of SEQ ID NO: 916200
acaggauguuuaucaaugu

SEQ ID NO: 1138067 - RNA, 19 nt, Artificial Sequence
  Description of Artificial Sequence: Synthetic oligonucleotide
  Antisense strand to SEQ ID NO: 1138066
acauugauaaacauccugu

SEQ ID NO: 1138068 - RNA, 19 nt, Artificial Sequence
  Description of Artificial Sequence: Synthetic oligonucleotide
  Sense strand starting at position 2361 of SEQ ID NO: 916200
gauguuuaucaauguuugu

SEQ ID NO: 1138069 - RNA, 19 nt, Artificial Sequence
  Description of Artificial Sequence: Synthetic oligonucleotide
  Antisense strand to SEQ ID NO: 1138068
acaaacauugauaaacauc

SEQ ID NO: 1138070 - RNA, 19 nt, Artificial Sequence
  Description of Artificial Sequence: Synthetic oligonucleotide
  Sense strand starting at position 2367 of SEQ ID NO: 916200
uaucaauguuuguuguaga

SEQ ID NO: 1138071 - RNA, 19 nt, Artificial Sequence
  Description of Artificial Sequence: Synthetic oligonucleotide
  Antisense strand to SEQ ID NO: 1138070
ucuacaacaaacauugaua

SEQ ID NO: 1138072 - RNA, 19 nt, Artificial Sequence
  Description of Artificial Sequence: Synthetic oligonucleotide
  Sense strand starting at position 2372 of SEQ ID NO: 916200
auguuuguuguagaguaaa

SEQ ID NO: 1138073 - RNA, 19 nt, Artificial Sequence
  Description of Artificial Sequence: Synthetic oligonucleotide
  Antisense strand to SEQ ID NO: 1138072
uuuacucuacaacaaacau

SEQ ID NO: 1138074 - RNA, 19 nt, Artificial Sequence
  Description of Artificial Sequence: Synthetic oligonucleotide
  Sense strand starting at position 2568 of SEQ ID NO: 916200
acucauaguauaggugaga

SEQ ID NO: 1138075 - RNA, 19 nt, Artificial Sequence
  Description of Artificial Sequence: Synthetic oligonucleotide
  Antisense strand to SEQ ID NO: 1138074
ucucaccuauacuaugagu

SEQ ID NO: 1138076 - RNA, 19 nt, Artificial Sequence
  Description of Artificial Sequence: Synthetic oligonucleotide
  Sense strand starting at position 2569 of SEQ ID NO: 916200
cucauaguauaggugagau

SEQ ID NO: 1138077 - RNA, 19 nt, Artificial Sequence
  Description of Artificial Sequence: Synthetic oligonucleotide
  Antisense strand to SEQ ID NO: 1138076
aucucaccuauacuaugag

SEQ ID NO: 1138078 - RNA, 19 nt, Artificial Sequence
  Description of Artificial Sequence: Synthetic oligonucleotide
  Sense strand starting at position 2594 of SEQ ID NO: 916200
uauguaagaccacguguau

SEQ ID NO: 1138079 - RNA, 19 nt, Artificial Sequence
  Description of Artificial Sequence: Synthetic oligonucleotide
  Antisense strand to SEQ ID NO: 1138078
auacacguggucuuacaua

SEQ ID NO: 1138080 - RNA, 19 nt, Artificial Sequence
  Description of Artificial Sequence: Synthetic oligonucleotide
  Sense strand starting at position 2612 of SEQ ID NO: 916200
uguguuuguggauauggaa

SEQ ID NO: 1138081 - RNA, 19 nt, Artificial Sequence
  Description of Artificial Sequence: Synthetic oligonucleotide
  Antisense strand to SEQ ID NO: 1138080
uuccauauccacaaacaca

SEQ ID NO: 1138082 - RNA, 19 nt, Artificial Sequence
  Description of Artificial Sequence: Synthetic oligonucleotide
  Sense strand starting at position 2647 of SEQ ID NO: 916200
guuuaaagugcuuagguau

SEQ ID NO: 1138083 - RNA, 19 nt, Artificial Sequence
  Description of Artificial Sequence: Synthetic oligonucleotide
  Antisense strand to SEQ ID NO: 1138082
auaccuaagcacuuuaaac

SEQ ID NO: 1138084 - RNA, 19 nt, Artificial Sequence
  Description of Artificial Sequence: Synthetic oligonucleotide
  Sense strand starting at position 2650 of SEQ ID NO: 916200
uaaagugcuuagguauaau

SEQ ID NO: 1138085 - RNA, 19 nt, Artificial Sequence
  Description of Artificial Sequence: Synthetic oligonucleotide
  Antisense strand to SEQ ID NO: 1138084
auuauaccuaagcacuuua

SEQ ID NO: 1138086 - RNA, 19 nt, Artificial Sequence
  Description of Artificial Sequence: Synthetic oligonucleotide
  Sense strand starting at position 2762 of SEQ ID NO: 916200
cuguuucuauagccaugau

SEQ ID NO: 1138087 - RNA, 19 nt, Artificial Sequence
  Description of Artificial Sequence: Synthetic oligonucleotide
  Antisense strand to SEQ ID NO: 1138086
aucauggcuauagaaacag

SEQ ID NO: 1138088 - RNA, 19 nt, Artificial Sequence
  Description of Artificial Sequence: Synthetic oligonucleotide
  Sense strand starting at position 3050 of SEQ ID NO: 916200
gagccauagccauaguuga

SEQ ID NO: 1138089 - RNA, 19 nt, Artificial Sequence
  Description of Artificial Sequence: Synthetic oligonucleotide
  Antisense strand to SEQ ID NO: 1138088
ucaacuauggcuauggcuc

SEQ ID NO: 1138090 - RNA, 19 nt, Artificial Sequence
  Description of Artificial Sequence: Synthetic oligonucleotide
  Sense strand starting at position 3374 of SEQ ID NO: 916200
ccacuugagucuuuaguug

SEQ ID NO: 1138091 - RNA, 19 nt, Artificial Sequence
  Description of Artificial Sequence: Synthetic oligonucleotide
  Antisense strand to SEQ ID NO: 1138090
caacuaaagacucaagugg

SEQ ID NO: 1138092 - RNA, 19 nt, Artificial Sequence
  Description of Artificial Sequence: Synthetic oligonucleotide
  Sense strand starting at position 3383 of SEQ ID NO: 916200
ucuuuaguugcauaaguca

SEQ ID NO: 1138093 - RNA, 19 nt, Artificial Sequence
  Description of Artificial Sequence: Synthetic oligonucleotide
  Antisense strand to SEQ ID NO: 1138092
ugacuuaugcaacuaaaga

SEQ ID NO: 1138094 - RNA, 19 nt, Artificial Sequence
  Description of Artificial Sequence: Synthetic oligonucleotide
  Sense strand starting at position 3391 of SEQ ID NO: 916200
ugcauaagucaaugcaaac

SEQ ID NO: 1138095 - RNA, 19 nt, Artificial Sequence
  Description of Artificial Sequence: Synthetic oligonucleotide
  Antisense strand to SEQ ID NO: 1138094
guuugcauugacuuaugca

SEQ ID NO: 1138096 - RNA, 19 nt, Artificial Sequence
  Description of Artificial Sequence: Synthetic oligonucleotide
  Sense strand starting at position 3470 of SEQ ID NO: 916200
uuuauuuauugagaugccu

SEQ ID NO: 1138097 - RNA, 19 nt, Artificial Sequence
  Description of Artificial Sequence: Synthetic oligonucleotide
  Antisense strand to SEQ ID NO: 1138096
aggcaucucaauaaauaaa

SEQ ID NO: 1138098 - RNA, 19 nt, Artificial Sequence
  Description of Artificial Sequence: Synthetic oligonucleotide
  Sense strand starting at position 3554 of SEQ ID NO: 916200
agucuauguuacuuaucuu

SEQ ID NO: 1138099 - RNA, 19 nt, Artificial Sequence
  Description of Artificial Sequence: Synthetic oligonucleotide
  Antisense strand to SEQ ID NO: 1138098
aagauaaguaacauagacu

SEQ ID NO: 1138100 - RNA, 19 nt, Artificial Sequence
  Description of Artificial Sequence: Synthetic oligonucleotide
  Sense strand starting at position 3557 of SEQ ID NO: 916200
cuauguuacuuaucuugua

SEQ ID NO: 1138101 - RNA, 19 nt, Artificial Sequence
  Description of Artificial Sequence: Synthetic oligonucleotide
  Antisense strand to SEQ ID NO: 1138100
uacaagauaaguaacauag

SEQ ID NO: 1138102 - RNA, 19 nt, Artificial Sequence
  Description of Artificial Sequence: Synthetic oligonucleotide
  Sense strand starting at position 3565 of SEQ ID NO: 916200
cuuaucuuguaauuggcaa

SEQ ID NO: 1138103 - RNA, 19 nt, Artificial Sequence
  Description of Artificial Sequence: Synthetic oligonucleotide
  Antisense strand to SEQ ID NO: 1138102
uugccaauuacaagauaag

SEQ ID NO: 1138104 - RNA, 19 nt, Artificial Sequence
  Description of Artificial Sequence: Synthetic oligonucleotide
  Sense strand starting at position 3659 of SEQ ID NO: 916200
ggauaacaggauugguagu

SEQ ID NO: 1138105 - RNA, 19 nt, Artificial Sequence
  Description of Artificial Sequence: Synthetic oligonucleotide
  Antisense strand to SEQ ID NO: 1138104
acuaccaauccuguuaucc

SEQ ID NO: 1138106 - RNA, 19 nt, Artificial Sequence
  Description of Artificial Sequence: Synthetic oligonucleotide
  Sense strand starting at position 3660 of SEQ ID NO: 916200
gauaacaggauugguagua

SEQ ID NO: 1138107 - RNA, 19 nt, Artificial Sequence
  Description of Artificial Sequence: Synthetic oligonucleotide
  Antisense strand to SEQ ID NO: 1138106
uacuaccaauccuguuauc

SEQ ID NO: 1138108 - RNA, 19 nt, Artificial Sequence
  Description of Artificial Sequence: Synthetic oligonucleotide
  Sense strand starting at position 3669 of SEQ ID NO: 916200
auugguaguauuggacaca

SEQ ID NO: 1138109 - RNA, 19 nt, Artificial Sequence
  Description of Artificial Sequence: Synthetic oligonucleotide
  Antisense strand to SEQ ID NO: 1138108
uguguccaauacuaccaau

SEQ ID NO: 1138110 - RNA, 19 nt, Artificial Sequence
  Description of Artificial Sequence: Synthetic oligonucleotide
  Sense strand starting at position 3672 of SEQ ID NO: 916200
gguaguauuggacacagca

SEQ ID NO: 1138111 - RNA, 19 nt, Artificial Sequence
  Description of Artificial Sequence: Synthetic oligonucleotide
  Antisense strand to SEQ ID NO: 1138110
ugcuguguccaauacuacc

SEQ ID NO: 1138112 - RNA, 19 nt, Artificial Sequence
  Description of Artificial Sequence: Synthetic oligonucleotide
  Sense strand starting at position 3770 of SEQ ID NO: 916200
agauauuugucuuagaguu

SEQ ID NO: 1138113 - RNA, 19 nt, Artificial Sequence
  Description of Artificial Sequence: Synthetic oligonucleotide
  Antisense strand to SEQ ID NO: 1138112
aacucuaagacaaauaucu

SEQ ID NO: 1138114 - RNA, 19 nt, Artificial Sequence
  Description of Artificial Sequence: Synthetic oligonucleotide
  Sense strand starting at position 3839 of SEQ ID NO: 916200
gccuauagauguuuggauu

SEQ ID NO: 1138115 - RNA, 19 nt, Artificial Sequence
  Description of Artificial Sequence: Synthetic oligonucleotide
  Antisense strand to SEQ ID NO: 1138114
aauccaaacaucuauaggc

SEQ ID NO: 1138116 - RNA, 19 nt, Artificial Sequence
  Description of Artificial Sequence: Synthetic oligonucleotide
  Sense strand starting at position 3968 of SEQ ID NO: 916200
gucugaaauuccucuagcu

SEQ ID NO: 1138117 - RNA, 19 nt, Artificial Sequence
  Description of Artificial Sequence: Synthetic oligonucleotide
  Antisense strand to SEQ ID NO: 1138116
agcuagaggaauuucagac

SEQ ID NO: 1138118 - RNA, 19 nt, Artificial Sequence
  Description of Artificial Sequence: Synthetic oligonucleotide
  Sense strand starting at position 3970 of SEQ ID NO: 916200
cugaaauuccucuagcugu

SEQ ID NO: 1138119 - RNA, 19 nt, Artificial Sequence
  Description of Artificial Sequence: Synthetic oligonucleotide
  Antisense strand to SEQ ID NO: 1138118
acagcuagaggaauuucag

SEQ ID NO: 1138120 - RNA, 19 nt, Artificial Sequence
  Description of Artificial Sequence: Synthetic oligonucleotide
  Sense strand starting at position 3977 of SEQ ID NO: 916200
uccucuagcuguuuagaaa

SEQ ID NO: 1138121 - RNA, 19 nt, Artificial Sequence
  Description of Artificial Sequence: Synthetic oligonucleotide
  Antisense strand to SEQ ID NO: 1138120
uuucuaaacagcuagagga

SEQ ID NO: 1138122 - RNA, 19 nt, Artificial Sequence
  Description of Artificial Sequence: Synthetic oligonucleotide
  Sense strand starting at position 28 of SEQ ID NO: 916201
uuggucuuaucccacacau

SEQ ID NO: 1138123 - RNA, 19 nt, Artificial Sequence
  Description of Artificial Sequence: Synthetic oligonucleotide
  Antisense strand to SEQ ID NO: 1138122
augugugggauaagaccaa

SEQ ID NO: 1138124 - RNA, 19 nt, Artificial Sequence
  Description of Artificial Sequence: Synthetic oligonucleotide
  Sense strand starting at position 125 of SEQ ID NO: 916201
cagugugaucgcuuucuuu

SEQ ID NO: 1138125 - RNA, 19 nt, Artificial Sequence
  Description of Artificial Sequence: Synthetic oligonucleotide
  Antisense strand to SEQ ID NO: 1138124
aaagaaagcgaucacacug

SEQ ID NO: 1138126 - RNA, 19 nt, Artificial Sequence
  Description of Artificial Sequence: Synthetic oligonucleotide
  Sense strand starting at position 400 of SEQ ID NO: 916201
aucaguuacauguagguua

SEQ ID NO: 1138127 - RNA, 19 nt, Artificial Sequence
  Description of Artificial Sequence: Synthetic oligonucleotide
  Antisense strand to SEQ ID NO: 1138126
uaaccuacauguaacugau

SEQ ID NO: 1138128 - RNA, 19 nt, Artificial Sequence
  Description of Artificial Sequence: Synthetic oligonucleotide
  Sense strand starting at position 402 of SEQ ID NO: 916201
caguuacauguagguuaau

SEQ ID NO: 1138129 - RNA, 19 nt, Artificial Sequence
  Description of Artificial Sequence: Synthetic oligonucleotide
  Antisense strand to SEQ ID NO: 1138128
auuaaccuacauguaacug

SEQ ID NO: 1138130 - RNA, 19 nt, Artificial Sequence
  Description of Artificial Sequence: Synthetic oligonucleotide
  Sense strand starting at position 403 of SEQ ID NO: 916201
aguuacauguagguuaauu

SEQ ID NO: 1138131 - RNA, 19 nt, Artificial Sequence
  Description of Artificial Sequence: Synthetic oligonucleotide
  Antisense strand to SEQ ID NO: 1138130
aauuaaccuacauguaacu

SEQ ID NO: 1138132 - RNA, 19 nt, Artificial Sequence
  Description of Artificial Sequence: Synthetic oligonucleotide
  Sense strand starting at position 436 of SEQ ID NO: 916201
ccaauuacaugacucggaa

SEQ ID NO: 1138133 - RNA, 19 nt, Artificial Sequence
  Description of Artificial Sequence: Synthetic oligonucleotide
  Antisense strand to SEQ ID NO: 1138132
uuccgagucauguaauugg

SEQ ID NO: 1138134 - RNA, 19 nt, Artificial Sequence
  Description of Artificial Sequence: Synthetic oligonucleotide
  Sense strand starting at position 440 of SEQ ID NO: 916201
uuacaugacucggaaaggu

SEQ ID NO: 1138135 - RNA, 19 nt, Artificial Sequence
  Description of Artificial Sequence: Synthetic oligonucleotide
  Antisense strand to SEQ ID NO: 1138134
accuuuccgagucauguaa

SEQ ID NO: 1138136 - RNA, 19 nt, Artificial Sequence
  Description of Artificial Sequence: Synthetic oligonucleotide
  Sense strand starting at position 671 of SEQ ID NO: 916201
uuuacucuaucucgacgua

SEQ ID NO: 1138137 - RNA, 19 nt, Artificial Sequence
  Description of Artificial Sequence: Synthetic oligonucleotide
  Antisense strand to SEQ ID NO: 1138136
uacgucgagauagaguaaa

SEQ ID NO: 1138138 - RNA, 19 nt, Artificial Sequence
  Description of Artificial Sequence: Synthetic oligonucleotide
  Sense strand starting at position 695 of SEQ ID NO: 916201
ccgugucaucauggagauu

SEQ ID NO: 1138139 - RNA, 19 nt, Artificial Sequence
  Description of Artificial Sequence: Synthetic oligonucleotide
  Antisense strand to SEQ ID NO: 1138138
aaucuccaugaugacacgg

SEQ ID NO: 1138140 - RNA, 19 nt, Artificial Sequence
  Description of Artificial Sequence: Synthetic oligonucleotide
  Sense strand starting at position 696 of SEQ ID NO: 916201
cgugucaucauggagauuc

SEQ ID NO: 1138141 - RNA, 19 nt, Artificial Sequence
  Description of Artificial Sequence: Synthetic oligonucleotide
  Antisense strand to SEQ ID NO: 1138140
gaaucuccaugaugacacg

SEQ ID NO: 1138142 - RNA, 19 nt, Artificial Sequence
  Description of Artificial Sequence: Synthetic oligonucleotide
  Sense strand starting at position 706 of SEQ ID NO: 916201
uggagauucuccuugacau

SEQ ID NO: 1138143 - RNA, 19 nt, Artificial Sequence
  Description of Artificial Sequence: Synthetic oligonucleotide
  Antisense strand to SEQ ID NO: 1138142
augucaaggagaaucucca

SEQ ID NO: 1138144 - RNA, 19 nt, Artificial Sequence
  Description of Artificial Sequence: Synthetic oligonucleotide
  Sense strand starting at position 798 of SEQ ID NO: 916201
accacacacucauguguuu

SEQ ID NO: 1138145 - RNA, 19 nt, Artificial Sequence
  Description of Artificial Sequence: Synthetic oligonucleotide
  Antisense strand to SEQ ID NO: 1138144
aaacacaugaguguguggu

SEQ ID NO: 1138146 - RNA, 19 nt, Artificial Sequence
  Description of Artificial Sequence: Synthetic oligonucleotide
  Sense strand starting at position 823 of SEQ ID NO: 916201
ccagaaugcgcuuggaaac

SEQ ID NO: 1138147 - RNA, 19 nt, Artificial Sequence
  Description of Artificial Sequence: Synthetic oligonucleotide
  Antisense strand to SEQ ID NO: 1138146
guuuccaagcgcauucugg

SEQ ID NO: 1138148 - RNA, 19 nt, Artificial Sequence
  Description of Artificial Sequence: Synthetic oligonucleotide
  Sense strand starting at position 1031 of SEQ ID NO: 916201
agggucuuauacugcuuua

SEQ ID NO: 1138149 - RNA, 19 nt, Artificial Sequence
  Description of Artificial Sequence: Synthetic oligonucleotide
  Antisense strand to SEQ ID NO: 1138148
uaaagcaguauaagacccu

SEQ ID NO: 1138150 - RNA, 19 nt, Artificial Sequence
  Description of Artificial Sequence: Synthetic oligonucleotide
  Sense strand starting at position 1099 of SEQ ID NO: 916201
agaugugaaucuguacaua

SEQ ID NO: 1138151 - RNA, 19 nt, Artificial Sequence
  Description of Artificial Sequence: Synthetic oligonucleotide
  Antisense strand to SEQ ID NO: 1138150
uauguacagauucacaucu

SEQ ID NO: 1138152 - RNA, 19 nt, Artificial Sequence
  Description of Artificial Sequence: Synthetic oligonucleotide
  Sense strand starting at position 1102 of SEQ ID NO: 916201
ugugaaucuguacauacca

SEQ ID NO: 1138153 - RNA, 19 nt, Artificial Sequence
  Description of Artificial Sequence: Synthetic oligonucleotide
  Antisense strand to SEQ ID NO: 1138152
ugguauguacagauucaca

SEQ ID NO: 1138154 - RNA, 19 nt, Artificial Sequence
  Description of Artificial Sequence: Synthetic oligonucleotide
  Sense strand starting at position 1483 of SEQ ID NO: 916201
ucaugucauuguugccuua

SEQ ID NO: 1138155 - RNA, 19 nt, Artificial Sequence
  Description of Artificial Sequence: Synthetic oligonucleotide
  Antisense strand to SEQ ID NO: 1138154
uaaggcaacaaugacauga

SEQ ID NO: 1138156 - RNA, 19 nt, Artificial Sequence
  Description of Artificial Sequence: Synthetic oligonucleotide
  Sense strand starting at position 1485 of SEQ ID NO: 916201
augucauuguugccuuaac

SEQ ID NO: 1138157 - RNA, 19 nt, Artificial Sequence
  Description of Artificial Sequence: Synthetic oligonucleotide
  Antisense strand to SEQ ID NO: 1138156
guuaaggcaacaaugacau

SEQ ID NO: 1138158 - RNA, 19 nt, Artificial Sequence
  Description of Artificial Sequence: Synthetic oligonucleotide
  Sense strand starting at position 2623 of SEQ ID NO: 916201
cgucucuuuccgcguugau

SEQ ID NO: 1138159 - RNA, 19 nt, Artificial Sequence
  Description of Artificial Sequence: Synthetic oligonucleotide
  Antisense strand to SEQ ID NO: 1138158
aucaacgcggaaagagacg

SEQ ID NO: 1138160 - RNA, 19 nt, Artificial Sequence
  Description of Artificial Sequence: Synthetic oligonucleotide
  Sense strand starting at position 2624 of SEQ ID NO: 916201
gucucuuuccgcguugauu

SEQ ID NO: 1138161 - RNA, 19 nt, Artificial Sequence
  Description of Artificial Sequence: Synthetic oligonucleotide
  Antisense strand to SEQ ID NO: 1138160
aaucaacgcggaaagagac

SEQ ID NO: 1138162 - RNA, 19 nt, Artificial Sequence
  Description of Artificial Sequence: Synthetic oligonucleotide
  Sense strand starting at position 2633 of SEQ ID NO: 916201
cgcguugauuucuccaagu

SEQ ID NO: 1138163 - RNA, 19 nt, Artificial Sequence
  Description of Artificial Sequence: Synthetic oligonucleotide
  Antisense strand to SEQ ID NO: 1138162
acuuggagaaaucaacgcg

SEQ ID NO: 1138164 - RNA, 19 nt, Artificial Sequence
  Description of Artificial Sequence: Synthetic oligonucleotide
  Sense strand starting at position 3110 of SEQ ID NO: 916201
gugggugugaugugguuua

SEQ ID NO: 1138165 - RNA, 19 nt, Artificial Sequence
  Description of Artificial Sequence: Synthetic oligonucleotide
  Antisense strand to SEQ ID NO: 1138164
uaaaccacaucacacccac

SEQ ID NO: 1138166 - RNA, 19 nt, Artificial Sequence
  Description of Artificial Sequence: Synthetic oligonucleotide
  Sense strand starting at position 3115 of SEQ ID NO: 916201
ugugaugugguuuauuauu

SEQ ID NO: 1138167 - RNA, 19 nt, Artificial Sequence
  Description of Artificial Sequence: Synthetic oligonucleotide
  Antisense strand to SEQ ID NO: 1138166
aauaauaaaccacaucaca

SEQ ID NO: 1138168 - RNA, 19 nt, Artificial Sequence
  Description of Artificial Sequence: Synthetic oligonucleotide
  Sense strand starting at position 3169 of SEQ ID NO: 916201
uuucgcucuuguuauuauu

SEQ ID NO: 1138169 - RNA, 19 nt, Artificial Sequence
  Description of Artificial Sequence: Synthetic oligonucleotide
  Antisense strand to SEQ ID NO: 1138168
aauaauaacaagagcgaaa

SEQ ID NO: 1138170 - RNA, 19 nt, Artificial Sequence
  Description of Artificial Sequence: Synthetic oligonucleotide
  Sense strand starting at position 3171 of SEQ ID NO: 916201
ucgcucuuguuauuauuau

SEQ ID NO: 1138171 - RNA, 19 nt, Artificial Sequence
  Description of Artificial Sequence: Synthetic oligonucleotide
  Antisense strand to SEQ ID NO: 1138170
auaauaauaacaagagcga

SEQ ID NO: 1138172 - RNA, 19 nt, Artificial Sequence
  Description of Artificial Sequence: Synthetic oligonucleotide
  Sense strand starting at position 3172 of SEQ ID NO: 916201
cgcucuuguuauuauuauu

SEQ ID NO: 1138173 - RNA, 19 nt, Artificial Sequence
  Description of Artificial Sequence: Synthetic oligonucleotide
  Antisense strand to SEQ ID NO: 1138172
aauaauaauaacaagagcg

SEQ ID NO: 1138174 - RNA, 19 nt, Artificial Sequence
  Description of Artificial Sequence: Synthetic oligonucleotide
  Sense strand starting at position 3362 of SEQ ID NO: 916201
acgaauuagcuucgcuaau

SEQ ID NO: 1138175 - RNA, 19 nt, Artificial Sequence
  Description of Artificial Sequence: Synthetic oligonucleotide
  Antisense strand to SEQ ID NO: 1138174
auuagcgaagcuaauucgu

SEQ ID NO: 1138176 - RNA, 19 nt, Artificial Sequence
  Description of Artificial Sequence: Synthetic oligonucleotide
  Sense strand starting at position 3363 of SEQ ID NO: 916201
cgaauuagcuucgcuaauu

SEQ ID NO: 1138177 - RNA, 19 nt, Artificial Sequence
  Description of Artificial Sequence: Synthetic oligonucleotide
  Antisense strand to SEQ ID NO: 1138176
aauuagcgaagcuaauucg

SEQ ID NO: 1138178 - RNA, 19 nt, Artificial Sequence
  Description of Artificial Sequence: Synthetic oligonucleotide
  Sense strand starting at position 3612 of SEQ ID NO: 916201
aacaaauuguggcuaugua

SEQ ID NO: 1138179 - RNA, 19 nt, Artificial Sequence
  Description of Artificial Sequence: Synthetic oligonucleotide
  Antisense strand to SEQ ID NO: 1138178
uacauagccacaauuuguu

SEQ ID NO: 1138180 - RNA, 19 nt, Artificial Sequence
  Description of Artificial Sequence: Synthetic oligonucleotide
  Sense strand starting at position 3616 of SEQ ID NO: 916201
aauuguggcuauguagaaa

SEQ ID NO: 1138181 - RNA, 19 nt, Artificial Sequence
  Description of Artificial Sequence: Synthetic oligonucleotide
  Antisense strand to SEQ ID NO: 1138180
uuucuacauagccacaauu

SEQ ID NO: 1138182 - RNA, 19 nt, Artificial Sequence
  Description of Artificial Sequence: Synthetic oligonucleotide
  Sense strand starting at position 31 of SEQ ID NO: 916202
ucuguaacuggaugucaca

SEQ ID NO: 1138183 - RNA, 19 nt, Artificial Sequence
  Description of Artificial Sequence: Synthetic oligonucleotide
  Antisense strand to SEQ ID NO: 1138182
ugugacauccaguuacaga

SEQ ID NO: 1138184 - RNA, 19 nt, Artificial Sequence
  Description of Artificial Sequence: Synthetic oligonucleotide
  Sense strand starting at position 34 of SEQ ID NO: 916202
guaacuggaugucacauuu

SEQ ID NO: 1138185 - RNA, 19 nt, Artificial Sequence
  Description of Artificial Sequence: Synthetic oligonucleotide
  Antisense strand to SEQ ID NO: 1138184
aaaugugacauccaguuac

SEQ ID NO: 1138186 - RNA, 19 nt, Artificial Sequence
  Description of Artificial Sequence: Synthetic oligonucleotide
  Sense strand starting at position 95 of SEQ ID NO: 916202
cucuaauagcuguaugauu

SEQ ID NO: 1138187 - RNA, 19 nt, Artificial Sequence
  Description of Artificial Sequence: Synthetic oligonucleotide
  Antisense strand to SEQ ID NO: 1138186
aaucauacagcuauuagag

SEQ ID NO: 1138188 - RNA, 19 nt, Artificial Sequence
  Description of Artificial Sequence: Synthetic oligonucleotide
  Sense strand starting at position 113 of SEQ ID NO: 916202
uuaccaacucauggugauu

SEQ ID NO: 1138189 - RNA, 19 nt, Artificial Sequence
  Description of Artificial Sequence: Synthetic oligonucleotide
  Antisense strand to SEQ ID NO: 1138188
aaucaccaugaguugguaa

SEQ ID NO: 1138190 - RNA, 19 nt, Artificial Sequence
  Description of Artificial Sequence: Synthetic oligonucleotide
  Sense strand starting at position 146 of SEQ ID NO: 916202
agauaauuauagcccaaug

SEQ ID NO: 1138191 - RNA, 19 nt, Artificial Sequence
  Description of Artificial Sequence: Synthetic oligonucleotide
  Antisense strand to SEQ ID NO: 1138190
cauugggcuauaauuaucu

SEQ ID NO: 1138192 - RNA, 19 nt, Artificial Sequence
  Description of Artificial Sequence: Synthetic oligonucleotide
  Sense strand starting at position 151 of SEQ ID NO: 916202
auuauagcccaauguuaga

SEQ ID NO: 1138193 - RNA, 19 nt, Artificial Sequence
  Description of Artificial Sequence: Synthetic oligonucleotide
  Antisense strand to SEQ ID NO: 1138192
ucuaacauugggcuauaau

SEQ ID NO: 1138194 - RNA, 19 nt, Artificial Sequence
  Description of Artificial Sequence: Synthetic oligonucleotide
  Sense strand starting at position 173 of SEQ ID NO: 916202
aggaguaagugaggaauuu

SEQ ID NO: 1138195 - RNA, 19 nt, Artificial Sequence
  Description of Artificial Sequence: Synthetic oligonucleotide
  Antisense strand to SEQ ID NO: 1138194
aaauuccucacuuacuccu

SEQ ID NO: 1138196 - RNA, 19 nt, Artificial Sequence
  Description of Artificial Sequence: Synthetic oligonucleotide
  Sense strand starting at position 185 of SEQ ID NO: 916202
ggaauuuguuaauacagca

SEQ ID NO: 1138197 - RNA, 19 nt, Artificial Sequence
  Description of Artificial Sequence: Synthetic oligonucleotide
  Antisense strand to SEQ ID NO: 1138196
ugcuguauuaacaaauucc

SEQ ID NO: 1138198 - RNA, 19 nt, Artificial Sequence
  Description of Artificial Sequence: Synthetic oligonucleotide
  Sense strand starting at position 209 of SEQ ID NO: 916202
agaagcagcccucagaauu

SEQ ID NO: 1138199 - RNA, 19 nt, Artificial Sequence
  Description of Artificial Sequence: Synthetic oligonucleotide
  Antisense strand to SEQ ID NO: 1138198
aauucugagggcugcuucu

SEQ ID NO: 1138200 - RNA, 19 nt, Artificial Sequence
  Description of Artificial Sequence: Synthetic oligonucleotide
  Sense strand starting at position 342 of SEQ ID NO: 916202
auaucccuucugcggaaau

SEQ ID NO: 1138201 - RNA, 19 nt, Artificial Sequence
  Description of Artificial Sequence: Synthetic oligonucleotide
  Antisense strand to SEQ ID NO: 1138200
auuuccgcagaagggauau

SEQ ID NO: 1138202 - RNA, 19 nt, Artificial Sequence
  Description of Artificial Sequence: Synthetic oligonucleotide
  Sense strand starting at position 437 of SEQ ID NO: 916202
cuacaccugucagucaaau

SEQ ID NO: 1138203 - RNA, 19 nt, Artificial Sequence
  Description of Artificial Sequence: Synthetic oligonucleotide
  Antisense strand to SEQ ID NO: 1138202
auuugacugacagguguag

SEQ ID NO: 1138204 - RNA, 19 nt, Artificial Sequence
  Description of Artificial Sequence: Synthetic oligonucleotide
  Sense strand starting at position 523 of SEQ ID NO: 916202
ccauuugcccagugucaaa

SEQ ID NO: 1138205 - RNA, 19 nt, Artificial Sequence
  Description of Artificial Sequence: Synthetic oligonucleotide
  Antisense strand to SEQ ID NO: 1138204
uuugacacugggcaaaugg

SEQ ID NO: 1138206 - RNA, 19 nt, Artificial Sequence
  Description of Artificial Sequence: Synthetic oligonucleotide
  Sense strand starting at position 578 of SEQ ID NO: 916202
ccugaauucccuggucacu

SEQ ID NO: 1138207 - RNA, 19 nt, Artificial Sequence
  Description of Artificial Sequence: Synthetic oligonucleotide
  Antisense strand to SEQ ID NO: 1138206
agugaccagggaauucagg

SEQ ID NO: 1138208 - RNA, 19 nt, Artificial Sequence
  Description of Artificial Sequence: Synthetic oligonucleotide
  Sense strand starting at position 580 of SEQ ID NO: 916202
ugaauucccuggucacuuu

SEQ ID NO: 1138209 - RNA, 19 nt, Artificial Sequence
  Description of Artificial Sequence: Synthetic oligonucleotide
  Antisense strand to SEQ ID NO: 1138208
aaagugaccagggaauuca

SEQ ID NO: 1138210 - RNA, 19 nt, Artificial Sequence
  Description of Artificial Sequence: Synthetic oligonucleotide
  Sense strand starting at position 707 of SEQ ID NO: 916202
auaacucaaccguggaaga

SEQ ID NO: 1138211 - RNA, 19 nt, Artificial Sequence
  Description of Artificial Sequence: Synthetic oligonucleotide
  Antisense strand to SEQ ID NO: 1138210
ucuuccacgguugaguuau

SEQ ID NO: 1138212 - RNA, 19 nt, Artificial Sequence
  Description of Artificial Sequence: Synthetic oligonucleotide
  Sense strand starting at position 708 of SEQ ID NO: 916202
uaacucaaccguggaagaa

SEQ ID NO: 1138213 - RNA, 19 nt, Artificial Sequence
  Description of Artificial Sequence: Synthetic oligonucleotide
  Antisense strand to SEQ ID NO: 1138212
uucuuccacgguugaguua

SEQ ID NO: 1138214 - RNA, 19 nt, Artificial Sequence
  Description of Artificial Sequence: Synthetic oligonucleotide
  Sense strand starting at position 762 of SEQ ID NO: 916202
ugguuuguaggauacgauu

SEQ ID NO: 1138215 - RNA, 19 nt, Artificial Sequence
  Description of Artificial Sequence: Synthetic oligonucleotide
  Antisense strand to SEQ ID NO: 1138214
aaucguauccuacaaacca

SEQ ID NO: 1138216 - RNA, 19 nt, Artificial Sequence
  Description of Artificial Sequence: Synthetic oligonucleotide
  Sense strand starting at position 768 of SEQ ID NO: 916202
guaggauacgauugggcau

SEQ ID NO: 1138217 - RNA, 19 nt, Artificial Sequence
  Description of Artificial Sequence: Synthetic oligonucleotide
  Antisense strand to SEQ ID NO: 1138216
augcccaaucguauccuac

SEQ ID NO: 1138218 - RNA, 19 nt, Artificial Sequence
  Description of Artificial Sequence: Synthetic oligonucleotide
  Sense strand starting at position 774 of SEQ ID NO: 916202
uacgauugggcaugaauug

SEQ ID NO: 1138219 - RNA, 19 nt, Artificial Sequence
  Description of Artificial Sequence: Synthetic oligonucleotide
  Antisense strand to SEQ ID NO: 1138218
caauucaugcccaaucgua

SEQ ID NO: 1138220 - RNA, 19 nt, Artificial Sequence
  Description of Artificial Sequence: Synthetic oligonucleotide
  Sense strand starting at position 818 of SEQ ID NO: 916202
ggguaauucuacuugcuag

SEQ ID NO: 1138221 - RNA, 19 nt, Artificial Sequence
  Description of Artificial Sequence: Synthetic oligonucleotide
  Antisense strand to SEQ ID NO: 1138220
cuagcaaguagaauuaccc

SEQ ID NO: 1138222 - RNA, 19 nt, Artificial Sequence
  Description of Artificial Sequence: Synthetic oligonucleotide
  Sense strand starting at position 2145 of SEQ ID NO: 916202
cccucucuggugugggaaa

SEQ ID NO: 1138223 - RNA, 19 nt, Artificial Sequence
  Description of Artificial Sequence: Synthetic oligonucleotide
  Antisense strand to SEQ ID NO: 1138222
uuucccacaccagagaggg

SEQ ID NO: 1138224 - RNA, 19 nt, Artificial Sequence
  Description of Artificial Sequence: Synthetic oligonucleotide
  Sense strand starting at position 2449 of SEQ ID NO: 916202
gggugaugcgaggacuuca

SEQ ID NO: 1138225 - RNA, 19 nt, Artificial Sequence
  Description of Artificial Sequence: Synthetic oligonucleotide
  Antisense strand to SEQ ID NO: 1138224
ugaaguccucgcaucaccc

SEQ ID NO: 1138226 - RNA, 19 nt, Artificial Sequence
  Description of Artificial Sequence: Synthetic oligonucleotide
  Sense strand starting at position 2607 of SEQ ID NO: 916202
agcacuucuccggacuuaa

SEQ ID NO: 1138227 - RNA, 19 nt, Artificial Sequence
  Description of Artificial Sequence: Synthetic oligonucleotide
  Antisense strand to SEQ ID NO: 1138226
uuaaguccggagaagugcu

SEQ ID NO: 1138228 - RNA, 19 nt, Artificial Sequence
  Description of Artificial Sequence: Synthetic oligonucleotide
  Sense strand starting at position 2835 of SEQ ID NO: 916202
auaaauaugguguguuaag

SEQ ID NO: 1138229 - RNA, 19 nt, Artificial Sequence
  Description of Artificial Sequence: Synthetic oligonucleotide
  Antisense strand to SEQ ID NO: 1138228
cuuaacacaccauauuuau

SEQ ID NO: 1138230 - RNA, 19 nt, Artificial Sequence
  Description of Artificial Sequence: Synthetic oligonucleotide
  Sense strand starting at position 2836 of SEQ ID NO: 916202
uaaauaugguguguuaaga

SEQ ID NO: 1138231 - RNA, 19 nt, Artificial Sequence
  Description of Artificial Sequence: Synthetic oligonucleotide
  Antisense strand to SEQ ID NO: 1138230
ucuuaacacaccauauuua

SEQ ID NO: 1138232 - RNA, 19 nt, Artificial Sequence
  Description of Artificial Sequence: Synthetic oligonucleotide
  Sense strand starting at position 2885 of SEQ ID NO: 916202
uguucugauucuccucauu

SEQ ID NO: 1138233 - RNA, 19 nt, Artificial Sequence
  Description of Artificial Sequence: Synthetic oligonucleotide
  Antisense strand to SEQ ID NO: 1138232
aaugaggagaaucagaaca

SEQ ID NO: 1138234 - RNA, 19 nt, Artificial Sequence
  Description of Artificial Sequence: Synthetic oligonucleotide
  Sense strand starting at position 3015 of SEQ ID NO: 916202
gggcucuuuaaugaaaugu

SEQ ID NO: 1138235 - RNA, 19 nt, Artificial Sequence
  Description of Artificial Sequence: Synthetic oligonucleotide
  Antisense strand to SEQ ID NO: 1138234
acauuucauuaaagagccc

SEQ ID NO: 1138236 - RNA, 19 nt, Artificial Sequence
  Description of Artificial Sequence: Synthetic oligonucleotide
  Sense strand starting at position 3208 of SEQ ID NO: 916202
augucaaaugcuggugaaa

SEQ ID NO: 1138237 - RNA, 19 nt, Artificial Sequence
  Description of Artificial Sequence: Synthetic oligonucleotide
  Antisense strand to SEQ ID NO: 1138236
uuucaccagcauuugacau

SEQ ID NO: 1138238 - RNA, 19 nt, Artificial Sequence
  Description of Artificial Sequence: Synthetic oligonucleotide
  Sense strand starting at position 3349 of SEQ ID NO: 916202
ccuagauucccaugucuua

SEQ ID NO: 1138239 - RNA, 19 nt, Artificial Sequence
  Description of Artificial Sequence: Synthetic oligonucleotide
  Antisense strand to SEQ ID NO: 1138238
uaagacaugggaaucuagg

SEQ ID NO: 1138240 - RNA, 19 nt, Artificial Sequence
  Description of Artificial Sequence: Synthetic oligonucleotide
  Sense strand starting at position 3397 of SEQ ID NO: 916202
agagaaaugccgcauguac

SEQ ID NO: 1138241 - RNA, 19 nt, Artificial Sequence
  Description of Artificial Sequence: Synthetic oligonucleotide
  Antisense strand to SEQ ID NO: 1138240
guacaugcggcauuucucu

SEQ ID NO: 1138242 - RNA, 19 nt, Artificial Sequence
  Description of Artificial Sequence: Synthetic oligonucleotide
  Sense strand starting at position 3419 of SEQ ID NO: 916202
guugcauauuuauuaccga

SEQ ID NO: 1138243 - RNA, 19 nt, Artificial Sequence
  Description of Artificial Sequence: Synthetic oligonucleotide
  Antisense strand to SEQ ID NO: 1138242
ucgguaauaaauaugcaac

SEQ ID NO: 1138244 - RNA, 19 nt, Artificial Sequence
  Description of Artificial Sequence: Synthetic oligonucleotide
  Sense strand starting at position 3422 of SEQ ID NO: 916202
gcauauuuauuaccgaguu

SEQ ID NO: 1138245 - RNA, 19 nt, Artificial Sequence
  Description of Artificial Sequence: Synthetic oligonucleotide
  Antisense strand to SEQ ID NO: 1138244
aacucgguaauaaauaugc

SEQ ID NO: 1138246 - RNA, 19 nt, Artificial Sequence
  Description of Artificial Sequence: Synthetic oligonucleotide
  Sense strand starting at position 3430 of SEQ ID NO: 916202
auuaccgaguuguuuauaa

SEQ ID NO: 1138247 - RNA, 19 nt, Artificial Sequence
  Description of Artificial Sequence: Synthetic oligonucleotide
  Antisense strand to SEQ ID NO: 1138246
uuauaaacaacucgguaau

SEQ ID NO: 1138248 - RNA, 19 nt, Artificial Sequence
  Description of Artificial Sequence: Synthetic oligonucleotide
  Sense strand starting at position 3432 of SEQ ID NO: 916202
uaccgaguuguuuauaaag

SEQ ID NO: 1138249 - RNA, 19 nt, Artificial Sequence
  Description of Artificial Sequence: Synthetic oligonucleotide
  Antisense strand to SEQ ID NO: 1138248
cuuuauaaacaacucggua

SEQ ID NO: 1138250 - RNA, 19 nt, Artificial Sequence
  Description of Artificial Sequence: Synthetic oligonucleotide
  Sense strand starting at position 3464 of SEQ ID NO: 916202
gcauacuuucagugggaug

SEQ ID NO: 1138251 - RNA, 19 nt, Artificial Sequence
  Description of Artificial Sequence: Synthetic oligonucleotide
  Antisense strand to SEQ ID NO: 1138250
caucccacugaaaguaugc

SEQ ID NO: 1138252 - RNA, 19 nt, Artificial Sequence
  Description of Artificial Sequence: Synthetic oligonucleotide
  Sense strand starting at position 3587 of SEQ ID NO: 916202
cugucauaaggaugcacau

SEQ ID NO: 1138253 - RNA, 19 nt, Artificial Sequence
  Description of Artificial Sequence: Synthetic oligonucleotide
  Antisense strand to SEQ ID NO: 1138252
augugcauccuuaugacag

SEQ ID NO: 1138254 - RNA, 19 nt, Artificial Sequence
  Description of Artificial Sequence: Synthetic oligonucleotide
  Sense strand starting at position 3601 of SEQ ID NO: 916202
cacauaaacuggguggauu

SEQ ID NO: 1138255 - RNA, 19 nt, Artificial Sequence
  Description of Artificial Sequence: Synthetic oligonucleotide
  Antisense strand to SEQ ID NO: 1138254
aauccacccaguuuaugug

SEQ ID NO: 1138256 - RNA, 19 nt, Artificial Sequence
  Description of Artificial Sequence: Synthetic oligonucleotide
  Sense strand starting at position 3695 of SEQ ID NO: 916202
uuaugagggcuuugagaga

SEQ ID NO: 1138257 - RNA, 19 nt, Artificial Sequence
  Description of Artificial Sequence: Synthetic oligonucleotide
  Antisense strand to SEQ ID NO: 1138256
ucucucaaagcccucauaa

SEQ ID NO: 1138258 - RNA, 19 nt, Artificial Sequence
  Description of Artificial Sequence: Synthetic oligonucleotide
  Sense strand starting at position 3856 of SEQ ID NO: 916202
auauaugauuuagagcuca

SEQ ID NO: 1138259 - RNA, 19 nt, Artificial Sequence
  Description of Artificial Sequence: Synthetic oligonucleotide
  Antisense strand to SEQ ID NO: 1138258
ugagcucuaaaucauauau

SEQ ID NO: 1138260 - RNA, 19 nt, Artificial Sequence
  Description of Artificial Sequence: Synthetic oligonucleotide
  Sense strand starting at position 3943 of SEQ ID NO: 916202
ucuagaguacugggaguua

SEQ ID NO: 1138261 - RNA, 19 nt, Artificial Sequence
  Description of Artificial Sequence: Synthetic oligonucleotide
  Antisense strand to SEQ ID NO: 1138260
uaacucccaguacucuaga

SEQ ID NO: 1138262 - RNA, 19 nt, Artificial Sequence
  Description of Artificial Sequence: Synthetic oligonucleotide
  Sense strand starting at position 14 of SEQ ID NO: 916203
gguguacucugacuagaaa

SEQ ID NO: 1138263 - RNA, 19 nt, Artificial Sequence
  Description of Artificial Sequence: Synthetic oligonucleotide
  Antisense strand to SEQ ID NO: 1138262
uuucuagucagaguacacc

SEQ ID NO: 1138264 - RNA, 19 nt, Artificial Sequence
  Description of Artificial Sequence: Synthetic oligonucleotide
  Sense strand starting at position 15 of SEQ ID NO: 916203
guguacucugacuagaaau

SEQ ID NO: 1138265 - RNA, 19 nt, Artificial Sequence
  Description of Artificial Sequence: Synthetic oligonucleotide
  Antisense strand to SEQ ID NO: 1138264
auuucuagucagaguacac

SEQ ID NO: 1138266 - RNA, 19 nt, Artificial Sequence
  Description of Artificial Sequence: Synthetic oligonucleotide
  Sense strand starting at position 137 of SEQ ID NO: 916203
guaagcuuugaucaacaac

SEQ ID NO: 1138267 - RNA, 19 nt, Artificial Sequence
  Description of Artificial Sequence: Synthetic oligonucleotide
  Antisense strand to SEQ ID NO: 1138266
guuguugaucaaagcuuac

SEQ ID NO: 1138268 - RNA, 19 nt, Artificial Sequence
  Description of Artificial Sequence: Synthetic oligonucleotide
  Sense strand starting at position 271 of SEQ ID NO: 916203
ggcagaccucauuauuaca

SEQ ID NO: 1138269 - RNA, 19 nt, Artificial Sequence
  Description of Artificial Sequence: Synthetic oligonucleotide
  Antisense strand to SEQ ID NO: 1138268
uguaauaaugaggucugcc

SEQ ID NO: 1138270 - RNA, 19 nt, Artificial Sequence
  Description of Artificial Sequence: Synthetic oligonucleotide
  Sense strand starting at position 327 of SEQ ID NO: 916203
gucuaaacguucuuuauuu

SEQ ID NO: 1138271 - RNA, 19 nt, Artificial Sequence
  Description of Artificial Sequence: Synthetic oligonucleotide
  Antisense strand to SEQ ID NO: 1138270
aaauaaagaacguuuagac

SEQ ID NO: 1138272 - RNA, 19 nt, Artificial Sequence
  Description of Artificial Sequence: Synthetic oligonucleotide
  Sense strand starting at position 719 of SEQ ID NO: 916203
augccuuugccucaaggaa

SEQ ID NO: 1138273 - RNA, 19 nt, Artificial Sequence
  Description of Artificial Sequence: Synthetic oligonucleotide
  Antisense strand to SEQ ID NO: 1138272
uuccuugaggcaaaggcau

SEQ ID NO: 1138274 - RNA, 19 nt, Artificial Sequence
  Description of Artificial Sequence: Synthetic oligonucleotide
  Sense strand starting at position 982 of SEQ ID NO: 916203
gcccauacccagcagaaua

SEQ ID NO: 1138275 - RNA, 19 nt, Artificial Sequence
  Description of Artificial Sequence: Synthetic oligonucleotide
  Antisense strand to SEQ ID NO: 1138274
uauucugcuggguaugggc

SEQ ID NO: 1138276 - RNA, 19 nt, Artificial Sequence
  Description of Artificial Sequence: Synthetic oligonucleotide
  Sense strand starting at position 1011 of SEQ ID NO: 916203
ccuucugaguacuuugaag

SEQ ID NO: 1138277 - RNA, 19 nt, Artificial Sequence
  Description of Artificial Sequence: Synthetic oligonucleotide
  Antisense strand to SEQ ID NO: 1138276
cuucaaaguacucagaagg

SEQ ID NO: 1138278 - RNA, 19 nt, Artificial Sequence
  Description of Artificial Sequence: Synthetic oligonucleotide
  Sense strand starting at position 1258 of SEQ ID NO: 916203
auaaauaugcacgagguau

SEQ ID NO: 1138279 - RNA, 19 nt, Artificial Sequence
  Description of Artificial Sequence: Synthetic oligonucleotide
  Antisense strand to SEQ ID NO: 1138278
auaccucgugcauauuuau

SEQ ID NO: 1138280 - RNA, 19 nt, Artificial Sequence
  Description of Artificial Sequence: Synthetic oligonucleotide
  Sense strand starting at position 1579 of SEQ ID NO: 916203
augaguucugcugaucuac

SEQ ID NO: 1138281 - RNA, 19 nt, Artificial Sequence
  Description of Artificial Sequence: Synthetic oligonucleotide
  Antisense strand to SEQ ID NO: 1138280
guagaucagcagaacucau

SEQ ID NO: 1138282 - RNA, 19 nt, Artificial Sequence
  Description of Artificial Sequence: Synthetic oligonucleotide
  Sense strand starting at position 2000 of SEQ ID NO: 916203
gugaaauccaaguaaugug

SEQ ID NO: 1138283 - RNA, 19 nt, Artificial Sequence
  Description of Artificial Sequence: Synthetic oligonucleotide
  Antisense strand to SEQ ID NO: 1138282
cacauuacuuggauuucac

SEQ ID NO: 1138284 - RNA, 19 nt, Artificial Sequence
  Description of Artificial Sequence: Synthetic oligonucleotide
  Sense strand starting at position 2086 of SEQ ID NO: 916203
ucucuauggugaucagaaa

SEQ ID NO: 1138285 - RNA, 19 nt, Artificial Sequence
  Description of Artificial Sequence: Synthetic oligonucleotide
  Antisense strand to SEQ ID NO: 1138284
uuucugaucaccauagaga

SEQ ID NO: 1138286 - RNA, 19 nt, Artificial Sequence
  Description of Artificial Sequence: Synthetic oligonucleotide
  Sense strand starting at position 2093 of SEQ ID NO: 916203
ggugaucagaaauggagua

SEQ ID NO: 1138287 - RNA, 19 nt, Artificial Sequence
  Description of Artificial Sequence: Synthetic oligonucleotide
  Antisense strand to SEQ ID NO: 1138286
uacuccauuucugaucacc

SEQ ID NO: 1138288 - RNA, 19 nt, Artificial Sequence
  Description of Artificial Sequence: Synthetic oligonucleotide
  Sense strand starting at position 2094 of SEQ ID NO: 916203
gugaucagaaauggaguau

SEQ ID NO: 1138289 - RNA, 19 nt, Artificial Sequence
  Description of Artificial Sequence: Synthetic oligonucleotide
  Antisense strand to SEQ ID NO: 1138288
auacuccauuucugaucac

SEQ ID NO: 1138290 - RNA, 19 nt, Artificial Sequence
  Description of Artificial Sequence: Synthetic oligonucleotide
  Sense strand starting at position 2337 of SEQ ID NO: 916203
aggaaugcacuguaguaaa

SEQ ID NO: 1138291 - RNA, 19 nt, Artificial Sequence
  Description of Artificial Sequence: Synthetic oligonucleotide
  Antisense strand to SEQ ID NO: 1138290
uuuacuacagugcauuccu

SEQ ID NO: 1138292 - RNA, 19 nt, Artificial Sequence
  Description of Artificial Sequence: Synthetic oligonucleotide
  Sense strand starting at position 2423 of SEQ ID NO: 916203
ucagacaagcuuugaaacu

SEQ ID NO: 1138293 - RNA, 19 nt, Artificial Sequence
  Description of Artificial Sequence: Synthetic oligonucleotide
  Antisense strand to SEQ ID NO: 1138292
aguuucaaagcuugucuga

SEQ ID NO: 1138294 - RNA, 19 nt, Artificial Sequence
  Description of Artificial Sequence: Synthetic oligonucleotide
  Sense strand starting at position 2440 of SEQ ID NO: 916203
cugcuaugugucucaguuu

SEQ ID NO: 1138295 - RNA, 19 nt, Artificial Sequence
  Description of Artificial Sequence: Synthetic oligonucleotide
  Antisense strand to SEQ ID NO: 1138294
aaacugagacacauagcag

SEQ ID NO: 1138296 - RNA, 19 nt, Artificial Sequence
  Description of Artificial Sequence: Synthetic oligonucleotide
  Sense strand starting at position 2572 of SEQ ID NO: 916203
aggacaguaccuggcaaau

SEQ ID NO: 1138297 - RNA, 19 nt, Artificial Sequence
  Description of Artificial Sequence: Synthetic oligonucleotide
  Antisense strand to SEQ ID NO: 1138296
auuugccagguacuguccu

SEQ ID NO: 1138298 - RNA, 19 nt, Artificial Sequence
  Description of Artificial Sequence: Synthetic oligonucleotide
  Sense strand starting at position 2584 of SEQ ID NO: 916203
ggcaaauacuaagcacaau

SEQ ID NO: 1138299 - RNA, 19 nt, Artificial Sequence
  Description of Artificial Sequence: Synthetic oligonucleotide
  Antisense strand to SEQ ID NO: 1138298
auugugcuuaguauuugcc

SEQ ID NO: 1138300 - RNA, 19 nt, Artificial Sequence
  Description of Artificial Sequence: Synthetic oligonucleotide
  Sense strand starting at position 2630 of SEQ ID NO: 916203
cucugaguuuaaucagauu

SEQ ID NO: 1138301 - RNA, 19 nt, Artificial Sequence
  Description of Artificial Sequence: Synthetic oligonucleotide
  Antisense strand to SEQ ID NO: 1138300
aaucugauuaaacucagag

SEQ ID NO: 1138302 - RNA, 19 nt, Artificial Sequence
  Description of Artificial Sequence: Synthetic oligonucleotide
  Sense strand starting at position 2686 of SEQ ID NO: 916203
gcaauucugcuagauaauu

SEQ ID NO: 1138303 - RNA, 19 nt, Artificial Sequence
  Description of Artificial Sequence: Synthetic oligonucleotide
  Antisense strand to SEQ ID NO: 1138302
aauuaucuagcagaauugc

SEQ ID NO: 1138304 - RNA, 19 nt, Artificial Sequence
  Description of Artificial Sequence: Synthetic oligonucleotide
  Sense strand starting at position 2736 of SEQ ID NO: 916203
ccuauaaugucauuaugag

SEQ ID NO: 1138305 - RNA, 19 nt, Artificial Sequence
  Description of Artificial Sequence: Synthetic oligonucleotide
  Antisense strand to SEQ ID NO: 1138304
cucauaaugacauuauagg

SEQ ID NO: 1138306 - RNA, 19 nt, Artificial Sequence
  Description of Artificial Sequence: Synthetic oligonucleotide
  Sense strand starting at position 2737 of SEQ ID NO: 916203
cuauaaugucauuaugagu

SEQ ID NO: 1138307 - RNA, 19 nt, Artificial Sequence
  Description of Artificial Sequence: Synthetic oligonucleotide
  Antisense strand to SEQ ID NO: 1138306
acucauaaugacauuauag

SEQ ID NO: 1138308 - RNA, 19 nt, Artificial Sequence
  Description of Artificial Sequence: Synthetic oligonucleotide
  Sense strand starting at position 2742 of SEQ ID NO: 916203
augucauuaugaguaauga

SEQ ID NO: 1138309 - RNA, 19 nt, Artificial Sequence
  Description of Artificial Sequence: Synthetic oligonucleotide
  Antisense strand to SEQ ID NO: 1138308
ucauuacucauaaugacau

SEQ ID NO: 1138310 - RNA, 19 nt, Artificial Sequence
  Description of Artificial Sequence: Synthetic oligonucleotide
  Sense strand starting at position 2743 of SEQ ID NO: 916203
ugucauuaugaguaaugau

SEQ ID NO: 1138311 - RNA, 19 nt, Artificial Sequence
  Description of Artificial Sequence: Synthetic oligonucleotide
  Antisense strand to SEQ ID NO: 1138310
aucauuacucauaaugaca

SEQ ID NO: 1138312 - RNA, 19 nt, Artificial Sequence
  Description of Artificial Sequence: Synthetic oligonucleotide
  Sense strand starting at position 2750 of SEQ ID NO: 916203
augaguaaugauggagcuu

SEQ ID NO: 1138313 - RNA, 19 nt, Artificial Sequence
  Description of Artificial Sequence: Synthetic oligonucleotide
  Antisense strand to SEQ ID NO: 1138312
aagcuccaucauuacucau

SEQ ID NO: 1138314 - RNA, 19 nt, Artificial Sequence
  Description of Artificial Sequence: Synthetic oligonucleotide
  Sense strand starting at position 2813 of SEQ ID NO: 916203
cuaaauugguccuuauuag

SEQ ID NO: 1138315 - RNA, 19 nt, Artificial Sequence
  Description of Artificial Sequence: Synthetic oligonucleotide
  Antisense strand to SEQ ID NO: 1138314
cuaauaaggaccaauuuag

SEQ ID NO: 1138316 - RNA, 19 nt, Artificial Sequence
  Description of Artificial Sequence: Synthetic oligonucleotide
  Sense strand starting at position 2908 of SEQ ID NO: 916203
ugaacuaagccuugacauu

SEQ ID NO: 1138317 - RNA, 19 nt, Artificial Sequence
  Description of Artificial Sequence: Synthetic oligonucleotide
  Antisense strand to SEQ ID NO: 1138316
aaugucaaggcuuaguuca

SEQ ID NO: 1138318 - RNA, 19 nt, Artificial Sequence
  Description of Artificial Sequence: Synthetic oligonucleotide
  Sense strand starting at position 2934 of SEQ ID NO: 916203
ugaacccugcuuuagcaaa

SEQ ID NO: 1138319 - RNA, 19 nt, Artificial Sequence
  Description of Artificial Sequence: Synthetic oligonucleotide
  Antisense strand to SEQ ID NO: 1138318
uuugcuaaagcaggguuca

SEQ ID NO: 1138320 - RNA, 19 nt, Artificial Sequence
  Description of Artificial Sequence: Synthetic oligonucleotide
  Sense strand starting at position 2994 of SEQ ID NO: 916203
ugauaucuagagugauauc

SEQ ID NO: 1138321 - RNA, 19 nt, Artificial Sequence
  Description of Artificial Sequence: Synthetic oligonucleotide
  Antisense strand to SEQ ID NO: 1138320
gauaucacucuagauauca

SEQ ID NO: 1138322 - RNA, 19 nt, Artificial Sequence
  Description of Artificial Sequence: Synthetic oligonucleotide
  Sense strand starting at position 3012 of SEQ ID NO: 916203
caaggugucccaugaagaa

SEQ ID NO: 1138323 - RNA, 19 nt, Artificial Sequence
  Description of Artificial Sequence: Synthetic oligonucleotide
  Antisense strand to SEQ ID NO: 1138322
uucuucaugggacaccuug

SEQ ID NO: 1138324 - RNA, 19 nt, Artificial Sequence
  Description of Artificial Sequence: Synthetic oligonucleotide
  Sense strand starting at position 3174 of SEQ ID NO: 916203
acuugucccuauuuguauu

SEQ ID NO: 1138325 - RNA, 19 nt, Artificial Sequence
  Description of Artificial Sequence: Synthetic oligonucleotide
  Antisense strand to SEQ ID NO: 1138324
aauacaaauagggacaagu

SEQ ID NO: 1138326 - RNA, 19 nt, Artificial Sequence
  Description of Artificial Sequence: Synthetic oligonucleotide
  Sense strand starting at position 3343 of SEQ ID NO: 916203
auuaguaagucucuacaca

SEQ ID NO: 1138327 - RNA, 19 nt, Artificial Sequence
  Description of Artificial Sequence: Synthetic oligonucleotide
  Antisense strand to SEQ ID NO: 1138326
uguguagagacuuacuaau

SEQ ID NO: 1138328 - RNA, 19 nt, Artificial Sequence
  Description of Artificial Sequence: Synthetic oligonucleotide
  Sense strand starting at position 3344 of SEQ ID NO: 916203
uuaguaagucucuacacaa

SEQ ID NO: 1138329 - RNA, 19 nt, Artificial Sequence
  Description of Artificial Sequence: Synthetic oligonucleotide
  Antisense strand to SEQ ID NO: 1138328
uuguguagagacuuacuaa

SEQ ID NO: 1138330 - RNA, 19 nt, Artificial Sequence
  Description of Artificial Sequence: Synthetic oligonucleotide
  Sense strand starting at position 3387 of SEQ ID NO: 916203
auuggaagaguauguaaug

SEQ ID NO: 1138331 - RNA, 19 nt, Artificial Sequence
  Description of Artificial Sequence: Synthetic oligonucleotide
  Antisense strand to SEQ ID NO: 1138330
cauuacauacucuuccaau

SEQ ID NO: 1138332 - RNA, 19 nt, Artificial Sequence
  Description of Artificial Sequence: Synthetic oligonucleotide
  Sense strand starting at position 3396 of SEQ ID NO: 916203
guauguaaugcucagagac

SEQ ID NO: 1138333 - RNA, 19 nt, Artificial Sequence
  Description of Artificial Sequence: Synthetic oligonucleotide
  Antisense strand to SEQ ID NO: 1138332
gucucugagcauuacauac

SEQ ID NO: 1138334 - RNA, 19 nt, Artificial Sequence
  Description of Artificial Sequence: Synthetic oligonucleotide
  Sense strand starting at position 3423 of SEQ ID NO: 916203
uuauaacagugagugauga

SEQ ID NO: 1138335 - RNA, 19 nt, Artificial Sequence
  Description of Artificial Sequence: Synthetic oligonucleotide
  Antisense strand to SEQ ID NO: 1138334
ucaucacucacuguuauaa

SEQ ID NO: 1138336 - RNA, 19 nt, Artificial Sequence
  Description of Artificial Sequence: Synthetic oligonucleotide
  Sense strand starting at position 3424 of SEQ ID NO: 916203
uauaacagugagugaugaa

SEQ ID NO: 1138337 - RNA, 19 nt, Artificial Sequence
  Description of Artificial Sequence: Synthetic oligonucleotide
  Antisense strand to SEQ ID NO: 1138336
uucaucacucacuguuaua

SEQ ID NO: 1138338 - RNA, 19 nt, Artificial Sequence
  Description of Artificial Sequence: Synthetic oligonucleotide
  Sense strand starting at position 3431 of SEQ ID NO: 916203
gugagugaugaaugugaag

SEQ ID NO: 1138339 - RNA, 19 nt, Artificial Sequence
  Description of Artificial Sequence: Synthetic oligonucleotide
  Antisense strand to SEQ ID NO: 1138338
cuucacauucaucacucac

SEQ ID NO: 1138340 - RNA, 19 nt, Artificial Sequence
  Description of Artificial Sequence: Synthetic oligonucleotide
  Sense strand starting at position 3445 of SEQ ID NO: 916203
ugaagaguggucgaucaua

SEQ ID NO: 1138341 - RNA, 19 nt, Artificial Sequence
  Description of Artificial Sequence: Synthetic oligonucleotide
  Antisense strand to SEQ ID NO: 1138340
uaugaucgaccacucuuca

SEQ ID NO: 1138342 - RNA, 19 nt, Artificial Sequence
  Description of Artificial Sequence: Synthetic oligonucleotide
  Sense strand starting at position 133 of SEQ ID NO: 916204
cuuacaaguucuuguggga

SEQ ID NO: 1138343 - RNA, 19 nt, Artificial Sequence
  Description of Artificial Sequence: Synthetic oligonucleotide
  Antisense strand to SEQ ID NO: 1138342
ucccacaagaacuuguaag

SEQ ID NO: 1138344 - RNA, 19 nt, Artificial Sequence
  Description of Artificial Sequence: Synthetic oligonucleotide
  Sense strand starting at position 140 of SEQ ID NO: 916204
guucuugugggagacgaaa

SEQ ID NO: 1138345 - RNA, 19 nt, Artificial Sequence
  Description of Artificial Sequence: Synthetic oligonucleotide
  Antisense strand to SEQ ID NO: 1138344
uuucgucucccacaagaac

SEQ ID NO: 1138346 - RNA, 19 nt, Artificial Sequence
  Description of Artificial Sequence: Synthetic oligonucleotide
  Sense strand starting at position 253 of SEQ ID NO: 916204
aggagucugaggugacguu

SEQ ID NO: 1138347 - RNA, 19 nt, Artificial Sequence
  Description of Artificial Sequence: Synthetic oligonucleotide
  Antisense strand to SEQ ID NO: 1138346
aacgucaccucagacuccu

SEQ ID NO: 1138348 - RNA, 19 nt, Artificial Sequence
  Description of Artificial Sequence: Synthetic oligonucleotide
  Sense strand starting at position 390 of SEQ ID NO: 916204
ggcgacagcucuggaaagu

SEQ ID NO: 1138349 - RNA, 19 nt, Artificial Sequence
  Description of Artificial Sequence: Synthetic oligonucleotide
  Antisense strand to SEQ ID NO: 1138348
acuuuccagagcugucgcc

SEQ ID NO: 1138350 - RNA, 19 nt, Artificial Sequence
  Description of Artificial Sequence: Synthetic oligonucleotide
  Sense strand starting at position 460 of SEQ ID NO: 916204
cuugcaguauugcucagua

SEQ ID NO: 1138351 - RNA, 19 nt, Artificial Sequence
  Description of Artificial Sequence: Synthetic oligonucleotide
  Antisense strand to SEQ ID NO: 1138350
uacugagcaauacugcaag

SEQ ID NO: 1138352 - RNA, 19 nt, Artificial Sequence
  Description of Artificial Sequence: Synthetic oligonucleotide
  Sense strand starting at position 462 of SEQ ID NO: 916204
ugcaguauugcucaguaca

SEQ ID NO: 1138353 - RNA, 19 nt, Artificial Sequence
  Description of Artificial Sequence: Synthetic oligonucleotide
  Antisense strand to SEQ ID NO: 1138352
uguacugagcaauacugca

SEQ ID NO: 1138354 - RNA, 19 nt, Artificial Sequence
  Description of Artificial Sequence: Synthetic oligonucleotide
  Sense strand starting at position 480 of SEQ ID NO: 916204
acguacagucugugucauu

SEQ ID NO: 1138355 - RNA, 19 nt, Artificial Sequence
  Description of Artificial Sequence: Synthetic oligonucleotide
  Antisense strand to SEQ ID NO: 1138354
aaugacacagacuguacgu

SEQ ID NO: 1138356 - RNA, 19 nt, Artificial Sequence
  Description of Artificial Sequence: Synthetic oligonucleotide
  Sense strand starting at position 481 of SEQ ID NO: 916204
cguacagucugugucauua

SEQ ID NO: 1138357 - RNA, 19 nt, Artificial Sequence
  Description of Artificial Sequence: Synthetic oligonucleotide
  Antisense strand to SEQ ID NO: 1138356
uaaugacacagacuguacg

SEQ ID NO: 1138358 - RNA, 19 nt, Artificial Sequence
  Description of Artificial Sequence: Synthetic oligonucleotide
  Sense strand starting at position 485 of SEQ ID NO: 916204
cagucugugucauuaucac

SEQ ID NO: 1138359 - RNA, 19 nt, Artificial Sequence
  Description of Artificial Sequence: Synthetic oligonucleotide
  Antisense strand to SEQ ID NO: 1138358
gugauaaugacacagacug

SEQ ID NO: 1138360 - RNA, 19 nt, Artificial Sequence
  Description of Artificial Sequence: Synthetic oligonucleotide
  Sense strand starting at position 491 of SEQ ID NO: 916204
gugucauuaucaccacuga

SEQ ID NO: 1138361 - RNA, 19 nt, Artificial Sequence
  Description of Artificial Sequence: Synthetic oligonucleotide
  Antisense strand to SEQ ID NO: 1138360
ucaguggugauaaugacac

SEQ ID NO: 1138362 - RNA, 19 nt, Artificial Sequence
  Description of Artificial Sequence: Synthetic oligonucleotide
  Sense strand starting at position 583 of SEQ ID NO: 916204
uaauaaugugcaggacaga

SEQ ID NO: 1138363 - RNA, 19 nt, Artificial Sequence
  Description of Artificial Sequence: Synthetic oligonucleotide
  Antisense strand to SEQ ID NO: 1138362
ucuguccugcacauuauua

SEQ ID NO: 1138364 - RNA, 19 nt, Artificial Sequence
  Description of Artificial Sequence: Synthetic oligonucleotide
  Sense strand starting at position 940 of SEQ ID NO: 916204
gggugauucugggagucaa

SEQ ID NO: 1138365 - RNA, 19 nt, Artificial Sequence
  Description of Artificial Sequence: Synthetic oligonucleotide
  Antisense strand to SEQ ID NO: 1138364
uugacucccagaaucaccc

SEQ ID NO: 1138366 - RNA, 19 nt, Artificial Sequence
  Description of Artificial Sequence: Synthetic oligonucleotide
  Sense strand starting at position 1035 of SEQ ID NO: 916204
agggcaacuugcuagcauu

SEQ ID NO: 1138367 - RNA, 19 nt, Artificial Sequence
  Description of Artificial Sequence: Synthetic oligonucleotide
  Antisense strand to SEQ ID NO: 1138366
aaugcuagcaaguugcccu

SEQ ID NO: 1138368 - RNA, 19 nt, Artificial Sequence
  Description of Artificial Sequence: Synthetic oligonucleotide
  Sense strand starting at position 1137 of SEQ ID NO: 916204
auguaagaggagcaguauu

SEQ ID NO: 1138369 - RNA, 19 nt, Artificial Sequence
  Description of Artificial Sequence: Synthetic oligonucleotide
  Antisense strand to SEQ ID NO: 1138368
aauacugcuccucuuacau

SEQ ID NO: 1138370 - RNA, 19 nt, Artificial Sequence
  Description of Artificial Sequence: Synthetic oligonucleotide
  Sense strand starting at position 1147 of SEQ ID NO: 916204
agcaguauuugcucagcaa

SEQ ID NO: 1138371 - RNA, 19 nt, Artificial Sequence
  Description of Artificial Sequence: Synthetic oligonucleotide
  Antisense strand to SEQ ID NO: 1138370
uugcugagcaaauacugcu

SEQ ID NO: 1138372 - RNA, 19 nt, Artificial Sequence
  Description of Artificial Sequence: Synthetic oligonucleotide
  Sense strand starting at position 1148 of SEQ ID NO: 916204
gcaguauuugcucagcaaa

SEQ ID NO: 1138373 - RNA, 19 nt, Artificial Sequence
  Description of Artificial Sequence: Synthetic oligonucleotide
  Antisense strand to SEQ ID NO: 1138372
uuugcugagcaaauacugc

SEQ ID NO: 1138374 - RNA, 19 nt, Artificial Sequence
  Description of Artificial Sequence: Synthetic oligonucleotide
  Sense strand starting at position 1383 of SEQ ID NO: 916204
gagcgauaugcuggccaca

SEQ ID NO: 1138375 - RNA, 19 nt, Artificial Sequence
  Description of Artificial Sequence: Synthetic oligonucleotide
  Antisense strand to SEQ ID NO: 1138374
uguggccagcauaucgcuc

SEQ ID NO: 1138376 - RNA, 19 nt, Artificial Sequence
  Description of Artificial Sequence: Synthetic oligonucleotide
  Sense strand starting at position 1385 of SEQ ID NO: 916204
gcgauaugcuggccacaga

SEQ ID NO: 1138377 - RNA, 19 nt, Artificial Sequence
  Description of Artificial Sequence: Synthetic oligonucleotide
  Antisense strand to SEQ ID NO: 1138376
ucuguggccagcauaucgc

SEQ ID NO: 1138378 - RNA, 19 nt, Artificial Sequence
  Description of Artificial Sequence: Synthetic oligonucleotide
  Sense strand starting at position 1386 of SEQ ID NO: 916204
cgauaugcuggccacagaa

SEQ ID NO: 1138379 - RNA, 19 nt, Artificial Sequence
  Description of Artificial Sequence: Synthetic oligonucleotide
  Antisense strand to SEQ ID NO: 1138378
uucuguggccagcauaucg

SEQ ID NO: 1138380 - RNA, 19 nt, Artificial Sequence
  Description of Artificial Sequence: Synthetic oligonucleotide
  Sense strand starting at position 1445 of SEQ ID NO: 916204
ccaauuucgaagcguagau

SEQ ID NO: 1138381 - RNA, 19 nt, Artificial Sequence
  Description of Artificial Sequence: Synthetic oligonucleotide
  Antisense strand to SEQ ID NO: 1138380
aucuacgcuucgaaauugg

SEQ ID NO: 1138382 - RNA, 19 nt, Artificial Sequence
  Description of Artificial Sequence: Synthetic oligonucleotide
  Sense strand starting at position 1507 of SEQ ID NO: 916204
gcugcugggucuuccagau

SEQ ID NO: 1138383 - RNA, 19 nt, Artificial Sequence
  Description of Artificial Sequence: Synthetic oligonucleotide
  Antisense strand to SEQ ID NO: 1138382
aucuggaagacccagcagc

SEQ ID NO: 1138384 - RNA, 19 nt, Artificial Sequence
  Description of Artificial Sequence: Synthetic oligonucleotide
  Sense strand starting at position 1511 of SEQ ID NO: 916204
cugggucuuccagaugcga

SEQ ID NO: 1138385 - RNA, 19 nt, Artificial Sequence
  Description of Artificial Sequence: Synthetic oligonucleotide
  Antisense strand to SEQ ID NO: 1138384
ucgcaucuggaagacccag

SEQ ID NO: 1138386 - RNA, 19 nt, Artificial Sequence
  Description of Artificial Sequence: Synthetic oligonucleotide
  Sense strand starting at position 2662 of SEQ ID NO: 916204
gggcgcucccgcuaauuca

SEQ ID NO: 1138387 - RNA, 19 nt, Artificial Sequence
  Description of Artificial Sequence: Synthetic oligonucleotide
  Antisense strand to SEQ ID NO: 1138386
ugaauuagcgggagcgccc

SEQ ID NO: 1138388 - RNA, 19 nt, Artificial Sequence
  Description of Artificial Sequence: Synthetic oligonucleotide
  Sense strand starting at position 3354 of SEQ ID NO: 916204
gggcacuggagucauugau

SEQ ID NO: 1138389 - RNA, 19 nt, Artificial Sequence
  Description of Artificial Sequence: Synthetic oligonucleotide
  Antisense strand to SEQ ID NO: 1138388
aucaaugacuccagugccc

SEQ ID NO: 1138390 - RNA, 19 nt, Artificial Sequence
  Description of Artificial Sequence: Synthetic oligonucleotide
  Sense strand starting at position 3382 of SEQ ID NO: 916204
gcguauuugccagaugccu

SEQ ID NO: 1138391 - RNA, 19 nt, Artificial Sequence
  Description of Artificial Sequence: Synthetic oligonucleotide
  Antisense strand to SEQ ID NO: 1138390
aggcaucuggcaaauacgc

SEQ ID NO: 1138392 - RNA, 19 nt, Artificial Sequence
  Description of Artificial Sequence: Synthetic oligonucleotide
  Sense strand starting at position 3443 of SEQ ID NO: 916204
agacuacccucuuagaagu

SEQ ID NO: 1138393 - RNA, 19 nt, Artificial Sequence
  Description of Artificial Sequence: Synthetic oligonucleotide
  Antisense strand to SEQ ID NO: 1138392
acuucuaagaggguagucu

SEQ ID NO: 1138394 - RNA, 19 nt, Artificial Sequence
  Description of Artificial Sequence: Synthetic oligonucleotide
  Sense strand starting at position 3449 of SEQ ID NO: 916204
cccucuuagaagugggaga

SEQ ID NO: 1138395 - RNA, 19 nt, Artificial Sequence
  Description of Artificial Sequence: Synthetic oligonucleotide
  Antisense strand to SEQ ID NO: 1138394
ucucccacuucuaagaggg

SEQ ID NO: 1138396 - RNA, 19 nt, Artificial Sequence
  Description of Artificial Sequence: Synthetic oligonucleotide
  Sense strand starting at position 3531 of SEQ ID NO: 916204
ggaggugucacagagagug

SEQ ID NO: 1138397 - RNA, 19 nt, Artificial Sequence
  Description of Artificial Sequence: Synthetic oligonucleotide
  Antisense strand to SEQ ID NO: 1138396
cacucucugugacaccucc

SEQ ID NO: 1138398 - RNA, 19 nt, Artificial Sequence
  Description of Artificial Sequence: Synthetic oligonucleotide
  Sense strand starting at position 3658 of SEQ ID NO: 916204
gaagaauggugguuugcug

SEQ ID NO: 1138399 - RNA, 19 nt, Artificial Sequence
  Description of Artificial Sequence: Synthetic oligonucleotide
  Antisense strand to SEQ ID NO: 1138398
cagcaaaccaccauucuuc

SEQ ID NO: 1138400 - RNA, 19 nt, Artificial Sequence
  Description of Artificial Sequence: Synthetic oligonucleotide
  Sense strand starting at position 157 of SEQ ID NO: 916205
gcaugaauagcagaguacu

SEQ ID NO: 1138401 - RNA, 19 nt, Artificial Sequence
  Description of Artificial Sequence: Synthetic oligonucleotide
  Antisense strand to SEQ ID NO: 1138400
aguacucugcuauucaugc

SEQ ID NO: 1138402 - RNA, 19 nt, Artificial Sequence
  Description of Artificial Sequence: Synthetic oligonucleotide
  Sense strand starting at position 160 of SEQ ID NO: 916205
ugaauagcagaguacugua

SEQ ID NO: 1138403 - RNA, 19 nt, Artificial Sequence
  Description of Artificial Sequence: Synthetic oligonucleotide
  Antisense strand to SEQ ID NO: 1138402
uacaguacucugcuauuca

SEQ ID NO: 1138404 - RNA, 19 nt, Artificial Sequence
  Description of Artificial Sequence: Synthetic oligonucleotide
  Sense strand starting at position 194 of SEQ ID NO: 916205
agaagagacugggauuagu

SEQ ID NO: 1138405 - RNA, 19 nt, Artificial Sequence
  Description of Artificial Sequence: Synthetic oligonucleotide
  Antisense strand to SEQ ID NO: 1138404
acuaaucccagucucuucu

SEQ ID NO: 1138406 - RNA, 19 nt, Artificial Sequence
  Description of Artificial Sequence: Synthetic oligonucleotide
  Sense strand starting at position 717 of SEQ ID NO: 916205
guccgucaucugccagagu

SEQ ID NO: 1138407 - RNA, 19 nt, Artificial Sequence
  Description of Artificial Sequence: Synthetic oligonucleotide
  Antisense strand to SEQ ID NO: 1138406
acucuggcagaugacggac

SEQ ID NO: 1138408 - RNA, 19 nt, Artificial Sequence
  Description of Artificial Sequence: Synthetic oligonucleotide
  Sense strand starting at position 740 of SEQ ID NO: 916205
gguugaguaccuugaggca

SEQ ID NO: 1138409 - RNA, 19 nt, Artificial Sequence
  Description of Artificial Sequence: Synthetic oligonucleotide
  Antisense strand to SEQ ID NO: 1138408
ugccucaagguacucaacc

SEQ ID NO: 1138410 - RNA, 19 nt, Artificial Sequence
  Description of Artificial Sequence: Synthetic oligonucleotide
  Sense strand starting at position 932 of SEQ ID NO: 916205
gguugaugccaucaucacu

SEQ ID NO: 1138411 - RNA, 19 nt, Artificial Sequence
  Description of Artificial Sequence: Synthetic oligonucleotide
  Antisense strand to SEQ ID NO: 1138410
agugaugauggcaucaacc

SEQ ID NO: 1138412 - RNA, 19 nt, Artificial Sequence
  Description of Artificial Sequence: Synthetic oligonucleotide
  Sense strand starting at position 1238 of SEQ ID NO: 916205
gcuuuagagaaagaucugu

SEQ ID NO: 1138413 - RNA, 19 nt, Artificial Sequence
  Description of Artificial Sequence: Synthetic oligonucleotide
  Antisense strand to SEQ ID NO: 1138412
acagaucuuucucuaaagc

SEQ ID NO: 1138414 - RNA, 19 nt, Artificial Sequence
  Description of Artificial Sequence: Synthetic oligonucleotide
  Sense strand starting at position 1243 of SEQ ID NO: 916205
agagaaagaucugugagcu

SEQ ID NO: 1138415 - RNA, 19 nt, Artificial Sequence
  Description of Artificial Sequence: Synthetic oligonucleotide
  Antisense strand to SEQ ID NO: 1138414
agcucacagaucuuucucu

SEQ ID NO: 1138416 - RNA, 19 nt, Artificial Sequence
  Description of Artificial Sequence: Synthetic oligonucleotide
  Sense strand starting at position 1244 of SEQ ID NO: 916205
gagaaagaucugugagcuu

SEQ ID NO: 1138417 - RNA, 19 nt, Artificial Sequence
  Description of Artificial Sequence: Synthetic oligonucleotide
  Antisense strand to SEQ ID NO: 1138416
aagcucacagaucuuucuc

SEQ ID NO: 1138418 - RNA, 19 nt, Artificial Sequence
  Description of Artificial Sequence: Synthetic oligonucleotide
  Sense strand starting at position 1508 of SEQ ID NO: 916205
cagugaucugcuugcagag

SEQ ID NO: 1138419 - RNA, 19 nt, Artificial Sequence
  Description of Artificial Sequence: Synthetic oligonucleotide
  Antisense strand to SEQ ID NO: 1138418
cucugcaagcagaucacug

SEQ ID NO: 1138420 - RNA, 19 nt, Artificial Sequence
  Description of Artificial Sequence: Synthetic oligonucleotide
  Sense strand starting at position 2850 of SEQ ID NO: 916205
cccgguagcccguuauuga

SEQ ID NO: 1138421 - RNA, 19 nt, Artificial Sequence
  Description of Artificial Sequence: Synthetic oligonucleotide
  Antisense strand to SEQ ID NO: 1138420
ucaauaacgggcuaccggg

SEQ ID NO: 1138422 - RNA, 19 nt, Artificial Sequence
  Description of Artificial Sequence: Synthetic oligonucleotide
  Sense strand starting at position 2958 of SEQ ID NO: 916205
ugcaauucguuacccuuau

SEQ ID NO: 1138423 - RNA, 19 nt, Artificial Sequence
  Description of Artificial Sequence: Synthetic oligonucleotide
  Antisense strand to SEQ ID NO: 1138422
auaaggguaacgaauugca

SEQ ID NO: 1138424 - RNA, 19 nt, Artificial Sequence
  Description of Artificial Sequence: Synthetic oligonucleotide
  Sense strand starting at position 2959 of SEQ ID NO: 916205
gcaauucguuacccuuauu

SEQ ID NO: 1138425 - RNA, 19 nt, Artificial Sequence
  Description of Artificial Sequence: Synthetic oligonucleotide
  Antisense strand to SEQ ID NO: 1138424
aauaaggguaacgaauugc

SEQ ID NO: 1138426 - RNA, 19 nt, Artificial Sequence
  Description of Artificial Sequence: Synthetic oligonucleotide
  Sense strand starting at position 2991 of SEQ ID NO: 916205
ccuugauuaucccugcgag

SEQ ID NO: 1138427 - RNA, 19 nt, Artificial Sequence
  Description of Artificial Sequence: Synthetic oligonucleotide
  Antisense strand to SEQ ID NO: 1138426
cucgcagggauaaucaagg

SEQ ID NO: 1138428 - RNA, 19 nt, Artificial Sequence
  Description of Artificial Sequence: Synthetic oligonucleotide
  Sense strand starting at position 2992 of SEQ ID NO: 916205
cuugauuaucccugcgaga

SEQ ID NO: 1138429 - RNA, 19 nt, Artificial Sequence
  Description of Artificial Sequence: Synthetic oligonucleotide
  Antisense strand to SEQ ID NO: 1138428
ucucgcagggauaaucaag

SEQ ID NO: 1138430 - RNA, 19 nt, Artificial Sequence
  Description of Artificial Sequence: Synthetic oligonucleotide
  Sense strand starting at position 2994 of SEQ ID NO: 916205
ugauuaucccugcgagagc

SEQ ID NO: 1138431 - RNA, 19 nt, Artificial Sequence
  Description of Artificial Sequence: Synthetic oligonucleotide
  Antisense strand to SEQ ID NO: 1138430
gcucucgcagggauaauca

SEQ ID NO: 1138432 - RNA, 19 nt, Artificial Sequence
  Description of Artificial Sequence: Synthetic oligonucleotide
  Sense strand starting at position 3005 of SEQ ID NO: 916205
gcgagagccgccuccuaua

SEQ ID NO: 1138433 - RNA, 19 nt, Artificial Sequence
  Description of Artificial Sequence: Synthetic oligonucleotide
  Antisense strand to SEQ ID NO: 1138432
uauaggaggcggcucucgc

SEQ ID NO: 1138434 - RNA, 19 nt, Artificial Sequence
  Description of Artificial Sequence: Synthetic oligonucleotide
  Sense strand starting at position 3016 of SEQ ID NO: 916205
cuccuauagcagugcucaa

SEQ ID NO: 1138435 - RNA, 19 nt, Artificial Sequence
  Description of Artificial Sequence: Synthetic oligonucleotide
  Antisense strand to SEQ ID NO: 1138434
uugagcacugcuauaggag

SEQ ID NO: 1138436 - RNA, 19 nt, Artificial Sequence
  Description of Artificial Sequence: Synthetic oligonucleotide
  Sense strand starting at position 3023 of SEQ ID NO: 916205
agcagugcucaauaaucgu

SEQ ID NO: 1138437 - RNA, 19 nt, Artificial Sequence
  Description of Artificial Sequence: Synthetic oligonucleotide
  Antisense strand to SEQ ID NO: 1138436
acgauuauugagcacugcu

SEQ ID NO: 1138438 - RNA, 19 nt, Artificial Sequence
  Description of Artificial Sequence: Synthetic oligonucleotide
  Sense strand starting at position 3153 of SEQ ID NO: 916205
gugucuuaaauuggagaga

SEQ ID NO: 1138439 - RNA, 19 nt, Artificial Sequence
  Description of Artificial Sequence: Synthetic oligonucleotide
  Antisense strand to SEQ ID NO: 1138438
ucucuccaauuuaagacac

SEQ ID NO: 1138440 - RNA, 19 nt, Artificial Sequence
  Description of Artificial Sequence: Synthetic oligonucleotide
  Sense strand starting at position 3154 of SEQ ID NO: 916205
ugucuuaaauuggagagaa

SEQ ID NO: 1138441 - RNA, 19 nt, Artificial Sequence
  Description of Artificial Sequence: Synthetic oligonucleotide
  Antisense strand to SEQ ID NO: 1138440
uucucuccaauuuaagaca

SEQ ID NO: 1138442 - RNA, 19 nt, Artificial Sequence
  Description of Artificial Sequence: Synthetic oligonucleotide
  Sense strand starting at position 3168 of SEQ ID NO: 916205
gagaaacucggcuguacuc

SEQ ID NO: 1138443 - RNA, 19 nt, Artificial Sequence
  Description of Artificial Sequence: Synthetic oligonucleotide
  Antisense strand to SEQ ID NO: 1138442
gaguacagccgaguuucuc

SEQ ID NO: 1138444 - RNA, 19 nt, Artificial Sequence
  Description of Artificial Sequence: Synthetic oligonucleotide
  Sense strand starting at position 3170 of SEQ ID NO: 916205
gaaacucggcuguacucau

SEQ ID NO: 1138445 - RNA, 19 nt, Artificial Sequence
  Description of Artificial Sequence: Synthetic oligonucleotide
  Antisense strand to SEQ ID NO: 1138444
augaguacagccgaguuuc

SEQ ID NO: 1138446 - RNA, 19 nt, Artificial Sequence
  Description of Artificial Sequence: Synthetic oligonucleotide
  Sense strand starting at position 3206 of SEQ ID NO: 916205
uccagucgguguucuagaa

SEQ ID NO: 1138447 - RNA, 19 nt, Artificial Sequence
  Description of Artificial Sequence: Synthetic oligonucleotide
  Antisense strand to SEQ ID NO: 1138446
uucuagaacaccgacugga

SEQ ID NO: 1138448 - RNA, 19 nt, Artificial Sequence
  Description of Artificial Sequence: Synthetic oligonucleotide
  Sense strand starting at position 3410 of SEQ ID NO: 916205
ggagcuuucuccuugucau

SEQ ID NO: 1138449 - RNA, 19 nt, Artificial Sequence
  Description of Artificial Sequence: Synthetic oligonucleotide
  Antisense strand to SEQ ID NO: 1138448
augacaaggagaaagcucc

SEQ ID NO: 1138450 - RNA, 19 nt, Artificial Sequence
  Description of Artificial Sequence: Synthetic oligonucleotide
  Sense strand starting at position 3423 of SEQ ID NO: 916205
ugucaucagccuuagacua

SEQ ID NO: 1138451 - RNA, 19 nt, Artificial Sequence
  Description of Artificial Sequence: Synthetic oligonucleotide
  Antisense strand to SEQ ID NO: 1138450
uagucuaaggcugaugaca

SEQ ID NO: 1138452 - RNA, 19 nt, Artificial Sequence
  Description of Artificial Sequence: Synthetic oligonucleotide
  Sense strand starting at position 3433 of SEQ ID NO: 916205
cuuagacuaucaguuguau

SEQ ID NO: 1138453 - RNA, 19 nt, Artificial Sequence
  Description of Artificial Sequence: Synthetic oligonucleotide
  Antisense strand to SEQ ID NO: 1138452
auacaacugauagucuaag

SEQ ID NO: 1138454 - RNA, 19 nt, Artificial Sequence
  Description of Artificial Sequence: Synthetic oligonucleotide
  Sense strand starting at position 3439 of SEQ ID NO: 916205
cuaucaguuguauggcuca

SEQ ID NO: 1138455 - RNA, 19 nt, Artificial Sequence
  Description of Artificial Sequence: Synthetic oligonucleotide
  Antisense strand to SEQ ID NO: 1138454
ugagccauacaacugauag

SEQ ID NO: 1138456 - RNA, 19 nt, Artificial Sequence
  Description of Artificial Sequence: Synthetic oligonucleotide
  Sense strand starting at position 3444 of SEQ ID NO: 916205
aguuguauggcucaguugu

SEQ ID NO: 1138457 - RNA, 19 nt, Artificial Sequence
  Description of Artificial Sequence: Synthetic oligonucleotide
  Antisense strand to SEQ ID NO: 1138456
acaacugagccauacaacu

SEQ ID NO: 1138458 - RNA, 19 nt, Artificial Sequence
  Description of Artificial Sequence: Synthetic oligonucleotide
  Sense strand starting at position 3459 of SEQ ID NO: 916205
uuguacugauagucaauau

SEQ ID NO: 1138459 - RNA, 19 nt, Artificial Sequence
  Description of Artificial Sequence: Synthetic oligonucleotide
  Antisense strand to SEQ ID NO: 1138458
auauugacuaucaguacaa

SEQ ID NO: 1138460 - RNA, 19 nt, Artificial Sequence
  Description of Artificial Sequence: Synthetic oligonucleotide
  Sense strand starting at position 3470 of SEQ ID NO: 916205
gucaauauauucguauaug

SEQ ID NO: 1138461 - RNA, 19 nt, Artificial Sequence
  Description of Artificial Sequence: Synthetic oligonucleotide
  Antisense strand to SEQ ID NO: 1138460
cauauacgaauauauugac

SEQ ID NO: 1138462 - RNA, 19 nt, Artificial Sequence
  Description of Artificial Sequence: Synthetic oligonucleotide
  Sense strand starting at position 3517 of SEQ ID NO: 916205
uggaaugacaguugaacuu

SEQ ID NO: 1138463 - RNA, 19 nt, Artificial Sequence
  Description of Artificial Sequence: Synthetic oligonucleotide
  Antisense strand to SEQ ID NO: 1138462
aaguucaacugucauucca

SEQ ID NO: 1138464 - RNA, 19 nt, Artificial Sequence
  Description of Artificial Sequence: Synthetic oligonucleotide
  Sense strand starting at position 3524 of SEQ ID NO: 916205
acaguugaacuugguuuaa

SEQ ID NO: 1138465 - RNA, 19 nt, Artificial Sequence
  Description of Artificial Sequence: Synthetic oligonucleotide
  Antisense strand to SEQ ID NO: 1138464
uuaaaccaaguucaacugu

SEQ ID NO: 1138466 - RNA, 19 nt, Artificial Sequence
  Description of Artificial Sequence: Synthetic oligonucleotide
  Sense strand starting at position 3526 of SEQ ID NO: 916205
aguugaacuugguuuaaga

SEQ ID NO: 1138467 - RNA, 19 nt, Artificial Sequence
  Description of Artificial Sequence: Synthetic oligonucleotide
  Antisense strand to SEQ ID NO: 1138466
ucuuaaaccaaguucaacu

SEQ ID NO: 1138468 - RNA, 19 nt, Artificial Sequence
  Description of Artificial Sequence: Synthetic oligonucleotide
  Sense strand starting at position 3623 of SEQ ID NO: 916205
guccuaaauguccguacua

SEQ ID NO: 1138469 - RNA, 19 nt, Artificial Sequence
  Description of Artificial Sequence: Synthetic oligonucleotide
  Antisense strand to SEQ ID NO: 1138468
uaguacggacauuuaggac

SEQ ID NO: 1138470 - RNA, 19 nt, Artificial Sequence
  Description of Artificial Sequence: Synthetic oligonucleotide
  Sense strand starting at position 3624 of SEQ ID NO: 916205
uccuaaauguccguacuaa

SEQ ID NO: 1138471 - RNA, 19 nt, Artificial Sequence
  Description of Artificial Sequence: Synthetic oligonucleotide
  Antisense strand to SEQ ID NO: 1138470
uuaguacggacauuuagga

SEQ ID NO: 1138472 - RNA, 19 nt, Artificial Sequence
  Description of Artificial Sequence: Synthetic oligonucleotide
  Sense strand starting at position 3625 of SEQ ID NO: 916205
ccuaaauguccguacuaag

SEQ ID NO: 1138473 - RNA, 19 nt, Artificial Sequence
  Description of Artificial Sequence: Synthetic oligonucleotide
  Antisense strand to SEQ ID NO: 1138472
cuuaguacggacauuuagg

SEQ ID NO: 1138474 - RNA, 19 nt, Artificial Sequence
  Description of Artificial Sequence: Synthetic oligonucleotide
  Sense strand starting at position 3632 of SEQ ID NO: 916205
guccguacuaaggauagaa

SEQ ID NO: 1138475 - RNA, 19 nt, Artificial Sequence
  Description of Artificial Sequence: Synthetic oligonucleotide
  Antisense strand to SEQ ID NO: 1138474
uucuauccuuaguacggac

SEQ ID NO: 1138476 - RNA, 19 nt, Artificial Sequence
  Description of Artificial Sequence: Synthetic oligonucleotide
  Sense strand starting at position 3757 of SEQ ID NO: 916205
gcggauuuaucagaaaggg

SEQ ID NO: 1138477 - RNA, 19 nt, Artificial Sequence
  Description of Artificial Sequence: Synthetic oligonucleotide
  Antisense strand to SEQ ID NO: 1138476
cccuuucugauaaauccgc

SEQ ID NO: 1138478 - RNA, 19 nt, Artificial Sequence
  Description of Artificial Sequence: Synthetic oligonucleotide
  Sense strand starting at position 3835 of SEQ ID NO: 916205
aguguaggagaguaacuuu

SEQ ID NO: 1138479 - RNA, 19 nt, Artificial Sequence
  Description of Artificial Sequence: Synthetic oligonucleotide
  Antisense strand to SEQ ID NO: 1138478
aaaguuacucuccuacacu

SEQ ID NO: 1138480 - RNA, 19 nt, Artificial Sequence
  Description of Artificial Sequence: Synthetic oligonucleotide
  Sense strand starting at position 425 of SEQ ID NO: 916206
uugaacccauuugagaaau

SEQ ID NO: 1138481 - RNA, 19 nt, Artificial Sequence
  Description of Artificial Sequence: Synthetic oligonucleotide
  Antisense strand to SEQ ID NO: 1138480
auuucucaaauggguucaa

SEQ ID NO: 1138482 - RNA, 19 nt, Artificial Sequence
  Description of Artificial Sequence: Synthetic oligonucleotide
  Sense strand starting at position 544 of SEQ ID NO: 916206
gacaaauggcuucguguug

SEQ ID NO: 1138483 - RNA, 19 nt, Artificial Sequence
  Description of Artificial Sequence: Synthetic oligonucleotide
  Antisense strand to SEQ ID NO: 1138482
caacacgaagccauuuguc

SEQ ID NO: 1138484 - RNA, 19 nt, Artificial Sequence
  Description of Artificial Sequence: Synthetic oligonucleotide
  Sense strand starting at position 595 of SEQ ID NO: 916206
gcagccaucuaagugagua

SEQ ID NO: 1138485 - RNA, 19 nt, Artificial Sequence
  Description of Artificial Sequence: Synthetic oligonucleotide
  Antisense strand to SEQ ID NO: 1138484
uacucacuuagauggcugc

SEQ ID NO: 1138486 - RNA, 19 nt, Artificial Sequence
  Description of Artificial Sequence: Synthetic oligonucleotide
  Sense strand starting at position 608 of SEQ ID NO: 916206
ugaguaagggauugugaga

SEQ ID NO: 1138487 - RNA, 19 nt, Artificial Sequence
  Description of Artificial Sequence: Synthetic oligonucleotide
  Antisense strand to SEQ ID NO: 1138486
ucucacaaucccuuacuca

SEQ ID NO: 1138488 - RNA, 19 nt, Artificial Sequence
  Description of Artificial Sequence: Synthetic oligonucleotide
  Sense strand starting at position 766 of SEQ ID NO: 916206
acaaucuuccgcgcuucua

SEQ ID NO: 1138489 - RNA, 19 nt, Artificial Sequence
  Description of Artificial Sequence: Synthetic oligonucleotide
  Antisense strand to SEQ ID NO: 1138488
uagaagcgcggaagauugu

SEQ ID NO: 1138490 - RNA, 19 nt, Artificial Sequence
  Description of Artificial Sequence: Synthetic oligonucleotide
  Sense strand starting at position 1130 of SEQ ID NO: 916206
gacagugagcacugauuga

SEQ ID NO: 1138491 - RNA, 19 nt, Artificial Sequence
  Description of Artificial Sequence: Synthetic oligonucleotide
  Antisense strand to SEQ ID NO: 1138490
ucaaucagugcucacuguc

SEQ ID NO: 1138492 - RNA, 19 nt, Artificial Sequence
  Description of Artificial Sequence: Synthetic oligonucleotide
  Sense strand starting at position 1201 of SEQ ID NO: 916206
uuuaauaaacacggugaaa

SEQ ID NO: 1138493 - RNA, 19 nt, Artificial Sequence
  Description of Artificial Sequence: Synthetic oligonucleotide
  Antisense strand to SEQ ID NO: 1138492
uuucaccguguuuauuaaa

SEQ ID NO: 1138494 - RNA, 19 nt, Artificial Sequence
  Description of Artificial Sequence: Synthetic oligonucleotide
  Sense strand starting at position 1212 of SEQ ID NO: 916206
cggugaaagguaggucuaa

SEQ ID NO: 1138495 - RNA, 19 nt, Artificial Sequence
  Description of Artificial Sequence: Synthetic oligonucleotide
  Antisense strand to SEQ ID NO: 1138494
uuagaccuaccuuucaccg

SEQ ID NO: 1138496 - RNA, 19 nt, Artificial Sequence
  Description of Artificial Sequence: Synthetic oligonucleotide
  Sense strand starting at position 1213 of SEQ ID NO: 916206
ggugaaagguaggucuaau

SEQ ID NO: 1138497 - RNA, 19 nt, Artificial Sequence
  Description of Artificial Sequence: Synthetic oligonucleotide
  Antisense strand to SEQ ID NO: 1138496
auuagaccuaccuuucacc

SEQ ID NO: 1138498 - RNA, 19 nt, Artificial Sequence
  Description of Artificial Sequence: Synthetic oligonucleotide
  Sense strand starting at position 1242 of SEQ ID NO: 916206
acucaaagucuaugaacga

SEQ ID NO: 1138499 - RNA, 19 nt, Artificial Sequence
  Description of Artificial Sequence: Synthetic oligonucleotide
  Antisense strand to SEQ ID NO: 1138498
ucguucauagacuuugagu

SEQ ID NO: 1138500 - RNA, 19 nt, Artificial Sequence
  Description of Artificial Sequence: Synthetic oligonucleotide
  Sense strand starting at position 2135 of SEQ ID NO: 916206
ggacauaauugggcucugu

SEQ ID NO: 1138501 - RNA, 19 nt, Artificial Sequence
  Description of Artificial Sequence: Synthetic oligonucleotide
  Antisense strand to SEQ ID NO: 1138500
acagagcccaauuaugucc

SEQ ID NO: 1138502 - RNA, 19 nt, Artificial Sequence
  Description of Artificial Sequence: Synthetic oligonucleotide
  Sense strand starting at position 2302 of SEQ ID NO: 916206
uccgaauuacccugcgaac

SEQ ID NO: 1138503 - RNA, 19 nt, Artificial Sequence
  Description of Artificial Sequence: Synthetic oligonucleotide
  Antisense strand to SEQ ID NO: 1138502
guucgcaggguaauucgga

SEQ ID NO: 1138504 - RNA, 19 nt, Artificial Sequence
  Description of Artificial Sequence: Synthetic oligonucleotide
  Sense strand starting at position 2304 of SEQ ID NO: 916206
cgaauuacccugcgaacuu

SEQ ID NO: 1138505 - RNA, 19 nt, Artificial Sequence
  Description of Artificial Sequence: Synthetic oligonucleotide
  Antisense strand to SEQ ID NO: 1138504
aaguucgcaggguaauucg

SEQ ID NO: 1138506 - RNA, 19 nt, Artificial Sequence
  Description of Artificial Sequence: Synthetic oligonucleotide
  Sense strand starting at position 2412 of SEQ ID NO: 916206
gaaggagucuugcucucac

SEQ ID NO: 1138507 - RNA, 19 nt, Artificial Sequence
  Description of Artificial Sequence: Synthetic oligonucleotide
  Antisense strand to SEQ ID NO: 1138506
gugagagcaagacuccuuc

SEQ ID NO: 1138508 - RNA, 19 nt, Artificial Sequence
  Description of Artificial Sequence: Synthetic oligonucleotide
  Sense strand starting at position 2842 of SEQ ID NO: 916206
uuugcuugucaguaaucuu

SEQ ID NO: 1138509 - RNA, 19 nt, Artificial Sequence
  Description of Artificial Sequence: Synthetic oligonucleotide
  Antisense strand to SEQ ID NO: 1138508
aagauuacugacaagcaaa

SEQ ID NO: 1138510 - RNA, 19 nt, Artificial Sequence
  Description of Artificial Sequence: Synthetic oligonucleotide
  Sense strand starting at position 2845 of SEQ ID NO: 916206
gcuugucaguaaucuuaac

SEQ ID NO: 1138511 - RNA, 19 nt, Artificial Sequence
  Description of Artificial Sequence: Synthetic oligonucleotide
  Antisense strand to SEQ ID NO: 1138510
guuaagauuacugacaagc

SEQ ID NO: 1138512 - RNA, 19 nt, Artificial Sequence
  Description of Artificial Sequence: Synthetic oligonucleotide
  Sense strand starting at position 2946 of SEQ ID NO: 916206
ucaaaugugugcccugauu

SEQ ID NO: 1138513 - RNA, 19 nt, Artificial Sequence
  Description of Artificial Sequence: Synthetic oligonucleotide
  Antisense strand to SEQ ID NO: 1138512
aaucagggcacacauuuga

SEQ ID NO: 1138514 - RNA, 19 nt, Artificial Sequence
  Description of Artificial Sequence: Synthetic oligonucleotide
  Sense strand starting at position 2997 of SEQ ID NO: 916206
cuguacugguuucuuaauu

SEQ ID NO: 1138515 - RNA, 19 nt, Artificial Sequence
  Description of Artificial Sequence: Synthetic oligonucleotide
  Antisense strand to SEQ ID NO: 1138514
aauuaagaaaccaguacag

SEQ ID NO: 1138516 - RNA, 19 nt, Artificial Sequence
  Description of Artificial Sequence: Synthetic oligonucleotide
  Sense strand starting at position 3080 of SEQ ID NO: 916206
aguuauaccuauucuacag

SEQ ID NO: 1138517 - RNA, 19 nt, Artificial Sequence
  Description of Artificial Sequence: Synthetic oligonucleotide
  Antisense strand to SEQ ID NO: 1138516
cuguagaauagguauaacu

SEQ ID NO: 1138518 - RNA, 19 nt, Artificial Sequence
  Description of Artificial Sequence: Synthetic oligonucleotide
  Sense strand starting at position 3102 of SEQ ID NO: 916206
aggcaaaguucuuccaggu

SEQ ID NO: 1138519 - RNA, 19 nt, Artificial Sequence
  Description of Artificial Sequence: Synthetic oligonucleotide
  Antisense strand to SEQ ID NO: 1138518
accuggaagaacuuugccu

SEQ ID NO: 1138520 - RNA, 19 nt, Artificial Sequence
  Description of Artificial Sequence: Synthetic oligonucleotide
  Sense strand starting at position 3106 of SEQ ID NO: 916206
aaaguucuuccagguggca

SEQ ID NO: 1138521 - RNA, 19 nt, Artificial Sequence
  Description of Artificial Sequence: Synthetic oligonucleotide
  Antisense strand to SEQ ID NO: 1138520
ugccaccuggaagaacuuu

SEQ ID NO: 1138522 - RNA, 19 nt, Artificial Sequence
  Description of Artificial Sequence: Synthetic oligonucleotide
  Sense strand starting at position 3154 of SEQ ID NO: 916206
gugcuaaagccuggauuug

SEQ ID NO: 1138523 - RNA, 19 nt, Artificial Sequence
  Description of Artificial Sequence: Synthetic oligonucleotide
  Antisense strand to SEQ ID NO: 1138522
caaauccaggcuuuagcac

SEQ ID NO: 1138524 - RNA, 19 nt, Artificial Sequence
  Description of Artificial Sequence: Synthetic oligonucleotide
  Sense strand starting at position 3174 of SEQ ID NO: 916206
gucuucaaagcgggaguua

SEQ ID NO: 1138525 - RNA, 19 nt, Artificial Sequence
  Description of Artificial Sequence: Synthetic oligonucleotide
  Antisense strand to SEQ ID NO: 1138524
uaacucccgcuuugaagac

SEQ ID NO: 1138526 - RNA, 19 nt, Artificial Sequence
  Description of Artificial Sequence: Synthetic oligonucleotide
  Sense strand starting at position 3175 of SEQ ID NO: 916206
ucuucaaagcgggaguuau

SEQ ID NO: 1138527 - RNA, 19 nt, Artificial Sequence
  Description of Artificial Sequence: Synthetic oligonucleotide
  Antisense strand to SEQ ID NO: 1138526
auaacucccgcuuugaaga

SEQ ID NO: 1138528 - RNA, 19 nt, Artificial Sequence
  Description of Artificial Sequence: Synthetic oligonucleotide
  Sense strand starting at position 3336 of SEQ ID NO: 916206
caauuacaguuagaaggau

SEQ ID NO: 1138529 - RNA, 19 nt, Artificial Sequence
  Description of Artificial Sequence: Synthetic oligonucleotide
  Antisense strand to SEQ ID NO: 1138528
auccuucuaacuguaauug

SEQ ID NO: 1138530 - RNA, 19 nt, Artificial Sequence
  Description of Artificial Sequence: Synthetic oligonucleotide
  Sense strand starting at position 3344 of SEQ ID NO: 916206
guuagaaggaucuguuguc

SEQ ID NO: 1138531 - RNA, 19 nt, Artificial Sequence
  Description of Artificial Sequence: Synthetic oligonucleotide
  Antisense strand to SEQ ID NO: 1138530
gacaacagauccuucuaac

SEQ ID NO: 1138532 - RNA, 19 nt, Artificial Sequence
  Description of Artificial Sequence: Synthetic oligonucleotide
  Sense strand starting at position 3345 of SEQ ID NO: 916206
uuagaaggaucuguuguca

SEQ ID NO: 1138533 - RNA, 19 nt, Artificial Sequence
  Description of Artificial Sequence: Synthetic oligonucleotide
  Antisense strand to SEQ ID NO: 1138532
ugacaacagauccuucuaa

SEQ ID NO: 1138534 - RNA, 19 nt, Artificial Sequence
  Description of Artificial Sequence: Synthetic oligonucleotide
  Sense strand starting at position 3381 of SEQ ID NO: 916206
ugaaguacuccuggcaacu

SEQ ID NO: 1138535 - RNA, 19 nt, Artificial Sequence
  Description of Artificial Sequence: Synthetic oligonucleotide
  Antisense strand to SEQ ID NO: 1138534
aguugccaggaguacuuca

SEQ ID NO: 1138536 - RNA, 19 nt, Artificial Sequence
  Description of Artificial Sequence: Synthetic oligonucleotide
  Sense strand starting at position 3414 of SEQ ID NO: 916206
cccugagagagcugaacua

SEQ ID NO: 1138537 - RNA, 19 nt, Artificial Sequence
  Description of Artificial Sequence: Synthetic oligonucleotide
  Antisense strand to SEQ ID NO: 1138536
uaguucagcucucucaggg

SEQ ID NO: 1138538 - RNA, 19 nt, Artificial Sequence
  Description of Artificial Sequence: Synthetic oligonucleotide
  Sense strand starting at position 3430 of SEQ ID NO: 916206
cuaguaaagugacucucaa

SEQ ID NO: 1138539 - RNA, 19 nt, Artificial Sequence
  Description of Artificial Sequence: Synthetic oligonucleotide
  Antisense strand to SEQ ID NO: 1138538
uugagagucacuuuacuag

SEQ ID NO: 1138540 - RNA, 19 nt, Artificial Sequence
  Description of Artificial Sequence: Synthetic oligonucleotide
  Sense strand starting at position 3485 of SEQ ID NO: 916206
cguagaaaugaaugugaca

SEQ ID NO: 1138541 - RNA, 19 nt, Artificial Sequence
  Description of Artificial Sequence: Synthetic oligonucleotide
  Antisense strand to SEQ ID NO: 1138540
ugucacauucauuucuacg

SEQ ID NO: 1138542 - RNA, 19 nt, Artificial Sequence
  Description of Artificial Sequence: Synthetic oligonucleotide
  Sense strand starting at position 3781 of SEQ ID NO: 916206
gcagucuuguaauuacuua

SEQ ID NO: 1138543 - RNA, 19 nt, Artificial Sequence
  Description of Artificial Sequence: Synthetic oligonucleotide
  Antisense strand to SEQ ID NO: 1138542
uaaguaauuacaagacugc

SEQ ID NO: 1138544 - RNA, 19 nt, Artificial Sequence
  Description of Artificial Sequence: Synthetic oligonucleotide
  Sense strand starting at position 3827 of SEQ ID NO: 916206
cccacuaaaucugaaggga

SEQ ID NO: 1138545 - RNA, 19 nt, Artificial Sequence
  Description of Artificial Sequence: Synthetic oligonucleotide
  Antisense strand to SEQ ID NO: 1138544
ucccuucagauuuaguggg

SEQ ID NO: 1138546 - RNA, 19 nt, Artificial Sequence
  Description of Artificial Sequence: Synthetic oligonucleotide
  Sense strand starting at position 3855 of SEQ ID NO: 916206
uaggacugugucugaguca

SEQ ID NO: 1138547 - RNA, 19 nt, Artificial Sequence
  Description of Artificial Sequence: Synthetic oligonucleotide
  Antisense strand to SEQ ID NO: 1138546
ugacucagacacaguccua

SEQ ID NO: 1138548 - RNA, 19 nt, Artificial Sequence
  Description of Artificial Sequence: Synthetic oligonucleotide
  Sense strand starting at position 3925 of SEQ ID NO: 916206
auuaucuauugauugcgau

SEQ ID NO: 1138549 - RNA, 19 nt, Artificial Sequence
  Description of Artificial Sequence: Synthetic oligonucleotide
  Antisense strand to SEQ ID NO: 1138548
aucgcaaucaauagauaau

SEQ ID NO: 1138550 - RNA, 19 nt, Artificial Sequence
  Description of Artificial Sequence: Synthetic oligonucleotide
  Sense strand starting at position 3926 of SEQ ID NO: 916206
uuaucuauugauugcgaua

SEQ ID NO: 1138551 - RNA, 19 nt, Artificial Sequence
  Description of Artificial Sequence: Synthetic oligonucleotide
  Antisense strand to SEQ ID NO: 1138550
uaucgcaaucaauagauaa

SEQ ID NO: 1138552 - RNA, 19 nt, Artificial Sequence
  Description of Artificial Sequence: Synthetic oligonucleotide
  Sense strand starting at position 3931 of SEQ ID NO: 916206
uauugauugcgauagucua

SEQ ID NO: 1138553 - RNA, 19 nt, Artificial Sequence
  Description of Artificial Sequence: Synthetic oligonucleotide
  Antisense strand to SEQ ID NO: 1138552
uagacuaucgcaaucaaua

SEQ ID NO: 1138554 - RNA, 19 nt, Artificial Sequence
  Description of Artificial Sequence: Synthetic oligonucleotide
  Sense strand starting at position 3947 of SEQ ID NO: 916206
cuaaccagcuguuugacua

SEQ ID NO: 1138555 - RNA, 19 nt, Artificial Sequence
  Description of Artificial Sequence: Synthetic oligonucleotide
  Antisense strand to SEQ ID NO: 1138554
uagucaaacagcugguuag

SEQ ID NO: 1138556 - RNA, 19 nt, Artificial Sequence
  Description of Artificial Sequence: Synthetic oligonucleotide
  Sense strand starting at position 3954 of SEQ ID NO: 916206
gcuguuugacuagggaagu

SEQ ID NO: 1138557 - RNA, 19 nt, Artificial Sequence
  Description of Artificial Sequence: Synthetic oligonucleotide
  Antisense strand to SEQ ID NO: 1138556
acuucccuagucaaacagc

SEQ ID NO: 1138558 - RNA, 19 nt, Artificial Sequence
  Description of Artificial Sequence: Synthetic oligonucleotide
  Sense strand starting at position 3965 of SEQ ID NO: 916206
agggaaguuacuuagccuu

SEQ ID NO: 1138559 - RNA, 19 nt, Artificial Sequence
  Description of Artificial Sequence: Synthetic oligonucleotide
  Antisense strand to SEQ ID NO: 1138558
aaggcuaaguaacuucccu

SEQ ID NO: 1138560 - RNA, 19 nt, Artificial Sequence
  Description of Artificial Sequence: Synthetic oligonucleotide
  Sense strand starting at position 32 of SEQ ID NO: 916207
accucacaggauuguuaua

SEQ ID NO: 1138561 - RNA, 19 nt, Artificial Sequence
  Description of Artificial Sequence: Synthetic oligonucleotide
  Antisense strand to SEQ ID NO: 1138560
uauaacaauccugugaggu

SEQ ID NO: 1138562 - RNA, 19 nt, Artificial Sequence
  Description of Artificial Sequence: Synthetic oligonucleotide
  Sense strand starting at position 34 of SEQ ID NO: 916207
cucacaggauuguuauauu

SEQ ID NO: 1138563 - RNA, 19 nt, Artificial Sequence
  Description of Artificial Sequence: Synthetic oligonucleotide
  Antisense strand to SEQ ID NO: 1138562
aauauaacaauccugugag

SEQ ID NO: 1138564 - RNA, 19 nt, Artificial Sequence
  Description of Artificial Sequence: Synthetic oligonucleotide
  Sense strand starting at position 103 of SEQ ID NO: 916207
agcuauuaaugcuauuuga

SEQ ID NO: 1138565 - RNA, 19 nt, Artificial Sequence
  Description of Artificial Sequence: Synthetic oligonucleotide
  Antisense strand to SEQ ID NO: 1138564
ucaaauagcauuaauagcu

SEQ ID NO: 1138566 - RNA, 19 nt, Artificial Sequence
  Description of Artificial Sequence: Synthetic oligonucleotide
  Sense strand starting at position 510 of SEQ ID NO: 916207
gauucucaauugggaggau

SEQ ID NO: 1138567 - RNA, 19 nt, Artificial Sequence
  Description of Artificial Sequence: Synthetic oligonucleotide
  Antisense strand to SEQ ID NO: 1138566
auccucccaauugagaauc

SEQ ID NO: 1138568 - RNA, 19 nt, Artificial Sequence
  Description of Artificial Sequence: Synthetic oligonucleotide
  Sense strand starting at position 801 of SEQ ID NO: 916207
uggguucccaauuguaaag

SEQ ID NO: 1138569 - RNA, 19 nt, Artificial Sequence
  Description of Artificial Sequence: Synthetic oligonucleotide
  Antisense strand to SEQ ID NO: 1138568
cuuuacaauugggaaccca

SEQ ID NO: 1138570 - RNA, 19 nt, Artificial Sequence
  Description of Artificial Sequence: Synthetic oligonucleotide
  Sense strand starting at position 868 of SEQ ID NO: 916207
ggagccuuguccucuuaac

SEQ ID NO: 1138571 - RNA, 19 nt, Artificial Sequence
  Description of Artificial Sequence: Synthetic oligonucleotide
  Antisense strand to SEQ ID NO: 1138570
guuaagaggacaaggcucc

SEQ ID NO: 1138572 - RNA, 19 nt, Artificial Sequence
  Description of Artificial Sequence: Synthetic oligonucleotide
  Sense strand starting at position 1272 of SEQ ID NO: 916207
gugcgugguguccuguaca

SEQ ID NO: 1138573 - RNA, 19 nt, Artificial Sequence
  Description of Artificial Sequence: Synthetic oligonucleotide
  Antisense strand to SEQ ID NO: 1138572
uguacaggacaccacgcac

SEQ ID NO: 1138574 - RNA, 19 nt, Artificial Sequence
  Description of Artificial Sequence: Synthetic oligonucleotide
  Sense strand starting at position 1328 of SEQ ID NO: 916207
cuagaugcccaguaacaug

SEQ ID NO: 1138575 - RNA, 19 nt, Artificial Sequence
  Description of Artificial Sequence: Synthetic oligonucleotide
  Antisense strand to SEQ ID NO: 1138574
cauguuacugggcaucuag

SEQ ID NO: 1138576 - RNA, 19 nt, Artificial Sequence
  Description of Artificial Sequence: Synthetic oligonucleotide
  Sense strand starting at position 1471 of SEQ ID NO: 916207
gguguuugugcgucuacuc

SEQ ID NO: 1138577 - RNA, 19 nt, Artificial Sequence
  Description of Artificial Sequence: Synthetic oligonucleotide
  Antisense strand to SEQ ID NO: 1138576
gaguagacgcacaaacacc

SEQ ID NO: 1138578 - RNA, 19 nt, Artificial Sequence
  Description of Artificial Sequence: Synthetic oligonucleotide
  Sense strand starting at position 1472 of SEQ ID NO: 916207
guguuugugcgucuacuca

SEQ ID NO: 1138579 - RNA, 19 nt, Artificial Sequence
  Description of Artificial Sequence: Synthetic oligonucleotide
  Antisense strand to SEQ ID NO: 1138578
ugaguagacgcacaaacac

SEQ ID NO: 1138580 - RNA, 19 nt, Artificial Sequence
  Description of Artificial Sequence: Synthetic oligonucleotide
  Sense strand starting at position 2175 of SEQ ID NO: 916207
uuugcuaagcucugacuuu

SEQ ID NO: 1138581 - RNA, 19 nt, Artificial Sequence
  Description of Artificial Sequence: Synthetic oligonucleotide
  Antisense strand to SEQ ID NO: 1138580
aaagucagagcuuagcaaa

SEQ ID NO: 1138582 - RNA, 19 nt, Artificial Sequence
  Description of Artificial Sequence: Synthetic oligonucleotide
  Sense strand starting at position 2186 of SEQ ID NO: 916207
cugacuuugcgccaagcau

SEQ ID NO: 1138583 - RNA, 19 nt, Artificial Sequence
  Description of Artificial Sequence: Synthetic oligonucleotide
  Antisense strand to SEQ ID NO: 1138582
augcuuggcgcaaagucag

SEQ ID NO: 1138584 - RNA, 19 nt, Artificial Sequence
  Description of Artificial Sequence: Synthetic oligonucleotide
  Sense strand starting at position 2295 of SEQ ID NO: 916207
cucugacgucuuggagcau

SEQ ID NO: 1138585 - RNA, 19 nt, Artificial Sequence
  Description of Artificial Sequence: Synthetic oligonucleotide
  Antisense strand to SEQ ID NO: 1138584
augcuccaagacgucagag

SEQ ID NO: 1138586 - RNA, 19 nt, Artificial Sequence
  Description of Artificial Sequence: Synthetic oligonucleotide
  Sense strand starting at position 2307 of SEQ ID NO: 916207
ggagcaugcguuuaaguag

SEQ ID NO: 1138587 - RNA, 19 nt, Artificial Sequence
  Description of Artificial Sequence: Synthetic oligonucleotide
  Antisense strand to SEQ ID NO: 1138586
cuacuuaaacgcaugcucc

SEQ ID NO: 1138588 - RNA, 19 nt, Artificial Sequence
  Description of Artificial Sequence: Synthetic oligonucleotide
  Sense strand starting at position 2315 of SEQ ID NO: 916207
cguuuaaguagggagacuu

SEQ ID NO: 1138589 - RNA, 19 nt, Artificial Sequence
  Description of Artificial Sequence: Synthetic oligonucleotide
  Antisense strand to SEQ ID NO: 1138588
aagucucccuacuuaaacg

SEQ ID NO: 1138590 - RNA, 19 nt, Artificial Sequence
  Description of Artificial Sequence: Synthetic oligonucleotide
  Sense strand starting at position 2355 of SEQ ID NO: 916207
uuaaaucagugauagguau

SEQ ID NO: 1138591 - RNA, 19 nt, Artificial Sequence
  Description of Artificial Sequence: Synthetic oligonucleotide
  Antisense strand to SEQ ID NO: 1138590
auaccuaucacugauuuaa

SEQ ID NO: 1138592 - RNA, 19 nt, Artificial Sequence
  Description of Artificial Sequence: Synthetic oligonucleotide
  Sense strand starting at position 2362 of SEQ ID NO: 916207
agugauagguauuaggaag

SEQ ID NO: 1138593 - RNA, 19 nt, Artificial Sequence
  Description of Artificial Sequence: Synthetic oligonucleotide
  Antisense strand to SEQ ID NO: 1138592
cuuccuaauaccuaucacu

SEQ ID NO: 1138594 - RNA, 19 nt, Artificial Sequence
  Description of Artificial Sequence: Synthetic oligonucleotide
  Sense strand starting at position 2404 of SEQ ID NO: 916207
gggaguaaggauugauagu

SEQ ID NO: 1138595 - RNA, 19 nt, Artificial Sequence
  Description of Artificial Sequence: Synthetic oligonucleotide
  Antisense strand to SEQ ID NO: 1138594
acuaucaauccuuacuccc

SEQ ID NO: 1138596 - RNA, 19 nt, Artificial Sequence
  Description of Artificial Sequence: Synthetic oligonucleotide
  Sense strand starting at position 2419 of SEQ ID NO: 916207
uagugaaagucuguuuaag

SEQ ID NO: 1138597 - RNA, 19 nt, Artificial Sequence
  Description of Artificial Sequence: Synthetic oligonucleotide
  Antisense strand to SEQ ID NO: 1138596
cuuaaacagacuuucacua

SEQ ID NO: 1138598 - RNA, 19 nt, Artificial Sequence
  Description of Artificial Sequence: Synthetic oligonucleotide
  Sense strand starting at position 2421 of SEQ ID NO: 916207
gugaaagucuguuuaagau

SEQ ID NO: 1138599 - RNA, 19 nt, Artificial Sequence
  Description of Artificial Sequence: Synthetic oligonucleotide
  Antisense strand to SEQ ID NO: 1138598
aucuuaaacagacuuucac

SEQ ID NO: 1138600 - RNA, 19 nt, Artificial Sequence
  Description of Artificial Sequence: Synthetic oligonucleotide
  Sense strand starting at position 2427 of SEQ ID NO: 916207
gucuguuuaagauguuauu

SEQ ID NO: 1138601 - RNA, 19 nt, Artificial Sequence
  Description of Artificial Sequence: Synthetic oligonucleotide
  Antisense strand to SEQ ID NO: 1138600
aauaacaucuuaaacagac

SEQ ID NO: 1138602 - RNA, 19 nt, Artificial Sequence
  Description of Artificial Sequence: Synthetic oligonucleotide
  Sense strand starting at position 2670 of SEQ ID NO: 916207
aagaaugacuuaugggacu

SEQ ID NO: 1138603 - RNA, 19 nt, Artificial Sequence
  Description of Artificial Sequence: Synthetic oligonucleotide
  Antisense strand to SEQ ID NO: 1138602
agucccauaagucauucuu

SEQ ID NO: 1138604 - RNA, 19 nt, Artificial Sequence
  Description of Artificial Sequence: Synthetic oligonucleotide
  Sense strand starting at position 2902 of SEQ ID NO: 916207
aagggaaggucagaucuua

SEQ ID NO: 1138605 - RNA, 19 nt, Artificial Sequence
  Description of Artificial Sequence: Synthetic oligonucleotide
  Antisense strand to SEQ ID NO: 1138604
uaagaucugaccuucccuu

SEQ ID NO: 1138606 - RNA, 19 nt, Artificial Sequence
  Description of Artificial Sequence: Synthetic oligonucleotide
  Sense strand starting at position 2907 of SEQ ID NO: 916207
aaggucagaucuuaggaga

SEQ ID NO: 1138607 - RNA, 19 nt, Artificial Sequence
  Description of Artificial Sequence: Synthetic oligonucleotide
  Antisense strand to SEQ ID NO: 1138606
ucuccuaagaucugaccuu

SEQ ID NO: 1138608 - RNA, 19 nt, Artificial Sequence
  Description of Artificial Sequence: Synthetic oligonucleotide
  Sense strand starting at position 2937 of SEQ ID NO: 916207
aaggaaauccaagggcuuu

SEQ ID NO: 1138609 - RNA, 19 nt, Artificial Sequence
  Description of Artificial Sequence: Synthetic oligonucleotide
  Antisense strand to SEQ ID NO: 1138608
aaagcccuuggauuuccuu

SEQ ID NO: 1138610 - RNA, 19 nt, Artificial Sequence
  Description of Artificial Sequence: Synthetic oligonucleotide
  Sense strand starting at position 2951 of SEQ ID NO: 916207
gcuuuaagaugggaaagaa

SEQ ID NO: 1138611 - RNA, 19 nt, Artificial Sequence
  Description of Artificial Sequence: Synthetic oligonucleotide
  Antisense strand to SEQ ID NO: 1138610
uucuuucccaucuuaaagc

SEQ ID NO: 1138612 - RNA, 19 nt, Artificial Sequence
  Description of Artificial Sequence: Synthetic oligonucleotide
  Sense strand starting at position 3251 of SEQ ID NO: 916207
uagcuuugagacuggugau

SEQ ID NO: 1138613 - RNA, 19 nt, Artificial Sequence
  Description of Artificial Sequence: Synthetic oligonucleotide
  Antisense strand to SEQ ID NO: 1138612
aucaccagucucaaagcua

SEQ ID NO: 1138614 - RNA, 19 nt, Artificial Sequence
  Description of Artificial Sequence: Synthetic oligonucleotide
  Sense strand starting at position 3252 of SEQ ID NO: 916207
agcuuugagacuggugauu

SEQ ID NO: 1138615 - RNA, 19 nt, Artificial Sequence
  Description of Artificial Sequence: Synthetic oligonucleotide
  Antisense strand to SEQ ID NO: 1138614
aaucaccagucucaaagcu

SEQ ID NO: 1138616 - RNA, 19 nt, Artificial Sequence
  Description of Artificial Sequence: Synthetic oligonucleotide
  Sense strand starting at position 3609 of SEQ ID NO: 916207
gcucaaagaugcucuugca

SEQ ID NO: 1138617 - RNA, 19 nt, Artificial Sequence
  Description of Artificial Sequence: Synthetic oligonucleotide
  Antisense strand to SEQ ID NO: 1138616
ugcaagagcaucuuugagc

SEQ ID NO: 1138618 - RNA, 19 nt, Artificial Sequence
  Description of Artificial Sequence: Synthetic oligonucleotide
  Sense strand starting at position 3635 of SEQ ID NO: 916207
gucccuuauuccuugucua

SEQ ID NO: 1138619 - RNA, 19 nt, Artificial Sequence
  Description of Artificial Sequence: Synthetic oligonucleotide
  Antisense strand to SEQ ID NO: 1138618
uagacaaggaauaagggac

SEQ ID NO: 1138620 - RNA, 19 nt, Artificial Sequence
  Description of Artificial Sequence: Synthetic oligonucleotide
  Sense strand starting at position 3649 of SEQ ID NO: 916207
gucuaacucuucuuagucu

SEQ ID NO: 1138621 - RNA, 19 nt, Artificial Sequence
  Description of Artificial Sequence: Synthetic oligonucleotide
  Antisense strand to SEQ ID NO: 1138620
agacuaagaagaguuagac

SEQ ID NO: 1138622 - RNA, 19 nt, Artificial Sequence
  Description of Artificial Sequence: Synthetic oligonucleotide
  Sense strand starting at position 3669 of SEQ ID NO: 916207
ucaggccucuucucuagaa

SEQ ID NO: 1138623 - RNA, 19 nt, Artificial Sequence
  Description of Artificial Sequence: Synthetic oligonucleotide
  Antisense strand to SEQ ID NO: 1138622
uucuagagaagaggccuga

SEQ ID NO: 1138624 - RNA, 19 nt, Artificial Sequence
  Description of Artificial Sequence: Synthetic oligonucleotide
  Sense strand starting at position 3671 of SEQ ID NO: 916207
aggccucuucucuagaauc

SEQ ID NO: 1138625 - RNA, 19 nt, Artificial Sequence
  Description of Artificial Sequence: Synthetic oligonucleotide
  Antisense strand to SEQ ID NO: 1138624
gauucuagagaagaggccu

SEQ ID NO: 1138626 - RNA, 19 nt, Artificial Sequence
  Description of Artificial Sequence: Synthetic oligonucleotide
  Sense strand starting at position 3732 of SEQ ID NO: 916207
gcuugcuuacugugggaaa

SEQ ID NO: 1138627 - RNA, 19 nt, Artificial Sequence
  Description of Artificial Sequence: Synthetic oligonucleotide
  Antisense strand to SEQ ID NO: 1138626
uuucccacaguaagcaagc

SEQ ID NO: 1138628 - RNA, 19 nt, Artificial Sequence
  Description of Artificial Sequence: Synthetic oligonucleotide
  Sense strand starting at position 3784 of SEQ ID NO: 916207
gaguauaugguugggcgua

SEQ ID NO: 1138629 - RNA, 19 nt, Artificial Sequence
  Description of Artificial Sequence: Synthetic oligonucleotide
  Antisense strand to SEQ ID NO: 1138628
uacgcccaaccauauacuc

SEQ ID NO: 1138630 - RNA, 19 nt, Artificial Sequence
  Description of Artificial Sequence: Synthetic oligonucleotide
  Sense strand starting at position 3786 of SEQ ID NO: 916207
guauaugguugggcguaua

SEQ ID NO: 1138631 - RNA, 19 nt, Artificial Sequence
  Description of Artificial Sequence: Synthetic oligonucleotide
  Antisense strand to SEQ ID NO: 1138630
uauacgcccaaccauauac

SEQ ID NO: 1138632 - RNA, 19 nt, Artificial Sequence
  Description of Artificial Sequence: Synthetic oligonucleotide
  Sense strand starting at position 3869 of SEQ ID NO: 916207
gaaagagcaucucugaguu

SEQ ID NO: 1138633 - RNA, 19 nt, Artificial Sequence
  Description of Artificial Sequence: Synthetic oligonucleotide
  Antisense strand to SEQ ID NO: 1138632
aacucagagaugcucuuuc

SEQ ID NO: 1138634 - RNA, 19 nt, Artificial Sequence
  Description of Artificial Sequence: Synthetic oligonucleotide
  Sense strand starting at position 3889 of SEQ ID NO: 916207
guccuacuguggcaauuua

SEQ ID NO: 1138635 - RNA, 19 nt, Artificial Sequence
  Description of Artificial Sequence: Synthetic oligonucleotide
  Antisense strand to SEQ ID NO: 1138634
uaaauugccacaguaggac

SEQ ID NO: 1138636 - RNA, 19 nt, Artificial Sequence
  Description of Artificial Sequence: Synthetic oligonucleotide
  Sense strand starting at position 3897 of SEQ ID NO: 916207
guggcaauuuaggcucauu

SEQ ID NO: 1138637 - RNA, 19 nt, Artificial Sequence
  Description of Artificial Sequence: Synthetic oligonucleotide
  Antisense strand to SEQ ID NO: 1138636
aaugagccuaaauugccac

SEQ ID NO: 1138638 - RNA, 19 nt, Artificial Sequence
  Description of Artificial Sequence: Synthetic oligonucleotide
  Sense strand starting at position 3951 of SEQ ID NO: 916207
ucagaauuguccucccaag

SEQ ID NO: 1138639 - RNA, 19 nt, Artificial Sequence
  Description of Artificial Sequence: Synthetic oligonucleotide
  Antisense strand to SEQ ID NO: 1138638
cuugggaggacaauucuga

SEQ ID NO: 1138640 - RNA, 19 nt, Artificial Sequence
  Description of Artificial Sequence: Synthetic oligonucleotide
  Sense strand starting at position 13 of SEQ ID NO: 916208
aaaugcugggucuaacauu

SEQ ID NO: 1138641 - RNA, 19 nt, Artificial Sequence
  Description of Artificial Sequence: Synthetic oligonucleotide
  Antisense strand to SEQ ID NO: 1138640
aauguuagacccagcauuu

SEQ ID NO: 1138642 - RNA, 19 nt, Artificial Sequence
  Description of Artificial Sequence: Synthetic oligonucleotide
  Sense strand starting at position 113 of SEQ ID NO: 916208
acuugagaaguguacggau

SEQ ID NO: 1138643 - RNA, 19 nt, Artificial Sequence
  Description of Artificial Sequence: Synthetic oligonucleotide
  Antisense strand to SEQ ID NO: 1138642
auccguacacuucucaagu

SEQ ID NO: 1138644 - RNA, 19 nt, Artificial Sequence
  Description of Artificial Sequence: Synthetic oligonucleotide
  Sense strand starting at position 317 of SEQ ID NO: 916208
augaaagacugacauuuau

SEQ ID NO: 1138645 - RNA, 19 nt, Artificial Sequence
  Description of Artificial Sequence: Synthetic oligonucleotide
  Antisense strand to SEQ ID NO: 1138644
auaaaugucagucuuucau

SEQ ID NO: 1138646 - RNA, 19 nt, Artificial Sequence
  Description of Artificial Sequence: Synthetic oligonucleotide
  Sense strand starting at position 323 of SEQ ID NO: 916208
gacugacauuuauggguga

SEQ ID NO: 1138647 - RNA, 19 nt, Artificial Sequence
  Description of Artificial Sequence: Synthetic oligonucleotide
  Antisense strand to SEQ ID NO: 1138646
ucacccauaaaugucaguc

SEQ ID NO: 1138648 - RNA, 19 nt, Artificial Sequence
  Description of Artificial Sequence: Synthetic oligonucleotide
  Sense strand starting at position 324 of SEQ ID NO: 916208
acugacauuuaugggugaa

SEQ ID NO: 1138649 - RNA, 19 nt, Artificial Sequence
  Description of Artificial Sequence: Synthetic oligonucleotide
  Antisense strand to SEQ ID NO: 1138648
uucacccauaaaugucagu

SEQ ID NO: 1138650 - RNA, 19 nt, Artificial Sequence
  Description of Artificial Sequence: Synthetic oligonucleotide
  Sense strand starting at position 358 of SEQ ID NO: 916208
acuauuacauuggcuugaa

SEQ ID NO: 1138651 - RNA, 19 nt, Artificial Sequence
  Description of Artificial Sequence: Synthetic oligonucleotide
  Antisense strand to SEQ ID NO: 1138650
uucaagccaauguaauagu

SEQ ID NO: 1138652 - RNA, 19 nt, Artificial Sequence
  Description of Artificial Sequence: Synthetic oligonucleotide
  Sense strand starting at position 359 of SEQ ID NO: 916208
cuauuacauuggcuugaaa

SEQ ID NO: 1138653 - RNA, 19 nt, Artificial Sequence
  Description of Artificial Sequence: Synthetic oligonucleotide
  Antisense strand to SEQ ID NO: 1138652
uuucaagccaauguaauag

SEQ ID NO: 1138654 - RNA, 19 nt, Artificial Sequence
  Description of Artificial Sequence: Synthetic oligonucleotide
  Sense strand starting at position 438 of SEQ ID NO: 916208
gcuucuuagagcuaguaug

SEQ ID NO: 1138655 - RNA, 19 nt, Artificial Sequence
  Description of Artificial Sequence: Synthetic oligonucleotide
  Antisense strand to SEQ ID NO: 1138654
cauacuagcucuaagaagc

SEQ ID NO: 1138656 - RNA, 19 nt, Artificial Sequence
  Description of Artificial Sequence: Synthetic oligonucleotide
  Sense strand starting at position 445 of SEQ ID NO: 916208
agagcuaguauguagcuaa

SEQ ID NO: 1138657 - RNA, 19 nt, Artificial Sequence
  Description of Artificial Sequence: Synthetic oligonucleotide
  Antisense strand to SEQ ID NO: 1138656
uuagcuacauacuagcucu

SEQ ID NO: 1138658 - RNA, 19 nt, Artificial Sequence
  Description of Artificial Sequence: Synthetic oligonucleotide
  Sense strand starting at position 618 of SEQ ID NO: 916208
gaacaugaguccuugacua

SEQ ID NO: 1138659 - RNA, 19 nt, Artificial Sequence
  Description of Artificial Sequence: Synthetic oligonucleotide
  Antisense strand to SEQ ID NO: 1138658
uagucaaggacucauguuc

SEQ ID NO: 1138660 - RNA, 19 nt, Artificial Sequence
  Description of Artificial Sequence: Synthetic oligonucleotide
  Sense strand starting at position 622 of SEQ ID NO: 916208
augaguccuugacuaauau

SEQ ID NO: 1138661 - RNA, 19 nt, Artificial Sequence
  Description of Artificial Sequence: Synthetic oligonucleotide
  Antisense strand to SEQ ID NO: 1138660
auauuagucaaggacucau

SEQ ID NO: 1138662 - RNA, 19 nt, Artificial Sequence
  Description of Artificial Sequence: Synthetic oligonucleotide
  Sense strand starting at position 1012 of SEQ ID NO: 916208
auagaagucccuuguuuga

SEQ ID NO: 1138663 - RNA, 19 nt, Artificial Sequence
  Description of Artificial Sequence: Synthetic oligonucleotide
  Antisense strand to SEQ ID NO: 1138662
ucaaacaagggacuucuau

SEQ ID NO: 1138664 - RNA, 19 nt, Artificial Sequence
  Description of Artificial Sequence: Synthetic oligonucleotide
  Sense strand starting at position 1339 of SEQ ID NO: 916208
ucagucaugugggccagaa

SEQ ID NO: 1138665 - RNA, 19 nt, Artificial Sequence
  Description of Artificial Sequence: Synthetic oligonucleotide
  Antisense strand to SEQ ID NO: 1138664
uucuggcccacaugacuga

SEQ ID NO: 1138666 - RNA, 19 nt, Artificial Sequence
  Description of Artificial Sequence: Synthetic oligonucleotide
  Sense strand starting at position 1341 of SEQ ID NO: 916208
agucaugugggccagaaua

SEQ ID NO: 1138667 - RNA, 19 nt, Artificial Sequence
  Description of Artificial Sequence: Synthetic oligonucleotide
  Antisense strand to SEQ ID NO: 1138666
uauucuggcccacaugacu

SEQ ID NO: 1138668 - RNA, 19 nt, Artificial Sequence
  Description of Artificial Sequence: Synthetic oligonucleotide
  Sense strand starting at position 1343 of SEQ ID NO: 916208
ucaugugggccagaauaau

SEQ ID NO: 1138669 - RNA, 19 nt, Artificial Sequence
  Description of Artificial Sequence: Synthetic oligonucleotide
  Antisense strand to SEQ ID NO: 1138668
auuauucuggcccacauga

SEQ ID NO: 1138670 - RNA, 19 nt, Artificial Sequence
  Description of Artificial Sequence: Synthetic oligonucleotide
  Sense strand starting at position 1443 of SEQ ID NO: 916208
gggccaugggcguauuuca

SEQ ID NO: 1138671 - RNA, 19 nt, Artificial Sequence
  Description of Artificial Sequence: Synthetic oligonucleotide
  Antisense strand to SEQ ID NO: 1138670
ugaaauacgcccauggccc

SEQ ID NO: 1138672 - RNA, 19 nt, Artificial Sequence
  Description of Artificial Sequence: Synthetic oligonucleotide
  Sense strand starting at position 1450 of SEQ ID NO: 916208
gggcguauuucagaaagaa

SEQ ID NO: 1138673 - RNA, 19 nt, Artificial Sequence
  Description of Artificial Sequence: Synthetic oligonucleotide
  Antisense strand to SEQ ID NO: 1138672
uucuuucugaaauacgccc

SEQ ID NO: 1138674 - RNA, 19 nt, Artificial Sequence
  Description of Artificial Sequence: Synthetic oligonucleotide
  Sense strand starting at position 1599 of SEQ ID NO: 916208
cauguaauugcauaggcau

SEQ ID NO: 1138675 - RNA, 19 nt, Artificial Sequence
  Description of Artificial Sequence: Synthetic oligonucleotide
  Antisense strand to SEQ ID NO: 1138674
augccuaugcaauuacaug

SEQ ID NO: 1138676 - RNA, 19 nt, Artificial Sequence
  Description of Artificial Sequence: Synthetic oligonucleotide
  Sense strand starting at position 1606 of SEQ ID NO: 916208
uugcauaggcauuauugaa

SEQ ID NO: 1138677 - RNA, 19 nt, Artificial Sequence
  Description of Artificial Sequence: Synthetic oligonucleotide
  Antisense strand to SEQ ID NO: 1138676
uucaauaaugccuaugcaa

SEQ ID NO: 1138678 - RNA, 19 nt, Artificial Sequence
  Description of Artificial Sequence: Synthetic oligonucleotide
  Sense strand starting at position 1758 of SEQ ID NO: 916208
aggguuacuuaccuuauaa

SEQ ID NO: 1138679 - RNA, 19 nt, Artificial Sequence
  Description of Artificial Sequence: Synthetic oligonucleotide
  Antisense strand to SEQ ID NO: 1138678
uuauaagguaaguaacccu

SEQ ID NO: 1138680 - RNA, 19 nt, Artificial Sequence
  Description of Artificial Sequence: Synthetic oligonucleotide
  Sense strand starting at position 1999 of SEQ ID NO: 916208
uccuaaggcgauugguaga

SEQ ID NO: 1138681 - RNA, 19 nt, Artificial Sequence
  Description of Artificial Sequence: Synthetic oligonucleotide
  Antisense strand to SEQ ID NO: 1138680
ucuaccaaucgccuuagga

SEQ ID NO: 1138682 - RNA, 19 nt, Artificial Sequence
  Description of Artificial Sequence: Synthetic oligonucleotide
  Sense strand starting at position 2004 of SEQ ID NO: 916208
aggcgauugguagaagugu

SEQ ID NO: 1138683 - RNA, 19 nt, Artificial Sequence
  Description of Artificial Sequence: Synthetic oligonucleotide
  Antisense strand to SEQ ID NO: 1138682
acacuucuaccaaucgccu

SEQ ID NO: 1138684 - RNA, 19 nt, Artificial Sequence
  Description of Artificial Sequence: Synthetic oligonucleotide
  Sense strand starting at position 2029 of SEQ ID NO: 916208
acugcuuauuggguaacaa

SEQ ID NO: 1138685 - RNA, 19 nt, Artificial Sequence
  Description of Artificial Sequence: Synthetic oligonucleotide
  Antisense strand to SEQ ID NO: 1138684
uuguuacccaauaagcagu

SEQ ID NO: 1138686 - RNA, 19 nt, Artificial Sequence
  Description of Artificial Sequence: Synthetic oligonucleotide
  Sense strand starting at position 2030 of SEQ ID NO: 916208
cugcuuauuggguaacaau

SEQ ID NO: 1138687 - RNA, 19 nt, Artificial Sequence
  Description of Artificial Sequence: Synthetic oligonucleotide
  Antisense strand to SEQ ID NO: 1138686
auuguuacccaauaagcag

SEQ ID NO: 1138688 - RNA, 19 nt, Artificial Sequence
  Description of Artificial Sequence: Synthetic oligonucleotide
  Sense strand starting at position 2127 of SEQ ID NO: 916208
gcagguguuuggcuauuua

SEQ ID NO: 1138689 - RNA, 19 nt, Artificial Sequence
  Description of Artificial Sequence: Synthetic oligonucleotide
  Antisense strand to SEQ ID NO: 1138688
uaaauagccaaacaccugc

SEQ ID NO: 1138690 - RNA, 19 nt, Artificial Sequence
  Description of Artificial Sequence: Synthetic oligonucleotide
  Sense strand starting at position 2131 of SEQ ID NO: 916208
guguuuggcuauuuaaaca

SEQ ID NO: 1138691 - RNA, 19 nt, Artificial Sequence
  Description of Artificial Sequence: Synthetic oligonucleotide
  Antisense strand to SEQ ID NO: 1138690
uguuuaaauagccaaacac

SEQ ID NO: 1138692 - RNA, 19 nt, Artificial Sequence
  Description of Artificial Sequence: Synthetic oligonucleotide
  Sense strand starting at position 2256 of SEQ ID NO: 916208
agaggcuugacuugacaaa

SEQ ID NO: 1138693 - RNA, 19 nt, Artificial Sequence
  Description of Artificial Sequence: Synthetic oligonucleotide
  Antisense strand to SEQ ID NO: 1138692
uuugucaagucaagccucu

SEQ ID NO: 1138694 - RNA, 19 nt, Artificial Sequence
  Description of Artificial Sequence: Synthetic oligonucleotide
  Sense strand starting at position 2570 of SEQ ID NO: 916208
ucuagagucuuacccaguu

SEQ ID NO: 1138695 - RNA, 19 nt, Artificial Sequence
  Description of Artificial Sequence: Synthetic oligonucleotide
  Antisense strand to SEQ ID NO: 1138694
aacuggguaagacucuaga

SEQ ID NO: 1138696 - RNA, 19 nt, Artificial Sequence
  Description of Artificial Sequence: Synthetic oligonucleotide
  Sense strand starting at position 2639 of SEQ ID NO: 916208
ucaccaugugaagguuaaa

SEQ ID NO: 1138697 - RNA, 19 nt, Artificial Sequence
  Description of Artificial Sequence: Synthetic oligonucleotide
  Antisense strand to SEQ ID NO: 1138696
uuuaaccuucacaugguga

SEQ ID NO: 1138698 - RNA, 19 nt, Artificial Sequence
  Description of Artificial Sequence: Synthetic oligonucleotide
  Sense strand starting at position 2652 of SEQ ID NO: 916208
guuaaauacugauucugca

SEQ ID NO: 1138699 - RNA, 19 nt, Artificial Sequence
  Description of Artificial Sequence: Synthetic oligonucleotide
  Antisense strand to SEQ ID NO: 1138698
ugcagaaucaguauuuaac

SEQ ID NO: 1138700 - RNA, 19 nt, Artificial Sequence
  Description of Artificial Sequence: Synthetic oligonucleotide
  Sense strand starting at position 2710 of SEQ ID NO: 916208
gagguuaaguccuuggaag

SEQ ID NO: 1138701 - RNA, 19 nt, Artificial Sequence
  Description of Artificial Sequence: Synthetic oligonucleotide
  Antisense strand to SEQ ID NO: 1138700
cuuccaaggacuuaaccuc

SEQ ID NO: 1138702 - RNA, 19 nt, Artificial Sequence
  Description of Artificial Sequence: Synthetic oligonucleotide
  Sense strand starting at position 2711 of SEQ ID NO: 916208
agguuaaguccuuggaaga

SEQ ID NO: 1138703 - RNA, 19 nt, Artificial Sequence
  Description of Artificial Sequence: Synthetic oligonucleotide
  Antisense strand to SEQ ID NO: 1138702
ucuuccaaggacuuaaccu

SEQ ID NO: 1138704 - RNA, 19 nt, Artificial Sequence
  Description of Artificial Sequence: Synthetic oligonucleotide
  Sense strand starting at position 2712 of SEQ ID NO: 916208
gguuaaguccuuggaagau

SEQ ID NO: 1138705 - RNA, 19 nt, Artificial Sequence
  Description of Artificial Sequence: Synthetic oligonucleotide
  Antisense strand to SEQ ID NO: 1138704
aucuuccaaggacuuaacc

SEQ ID NO: 1138706 - RNA, 19 nt, Artificial Sequence
  Description of Artificial Sequence: Synthetic oligonucleotide
  Sense strand starting at position 3035 of SEQ ID NO: 916208
cuaggcagagucugacauu

SEQ ID NO: 1138707 - RNA, 19 nt, Artificial Sequence
  Description of Artificial Sequence: Synthetic oligonucleotide
  Antisense strand to SEQ ID NO: 1138706
aaugucagacucugccuag

SEQ ID NO: 1138708 - RNA, 19 nt, Artificial Sequence
  Description of Artificial Sequence: Synthetic oligonucleotide
  Sense strand starting at position 3199 of SEQ ID NO: 916208
agccaagguccuugaacau

SEQ ID NO: 1138709 - RNA, 19 nt, Artificial Sequence
  Description of Artificial Sequence: Synthetic oligonucleotide
  Antisense strand to SEQ ID NO: 1138708
auguucaaggaccuuggcu

SEQ ID NO: 1138710 - RNA, 19 nt, Artificial Sequence
  Description of Artificial Sequence: Synthetic oligonucleotide
  Sense strand starting at position 3211 of SEQ ID NO: 916208
ugaacauagugugaauuua

SEQ ID NO: 1138711 - RNA, 19 nt, Artificial Sequence
  Description of Artificial Sequence: Synthetic oligonucleotide
  Antisense strand to SEQ ID NO: 1138710
uaaauucacacuauguuca

SEQ ID NO: 1138712 - RNA, 19 nt, Artificial Sequence
  Description of Artificial Sequence: Synthetic oligonucleotide
  Sense strand starting at position 3798 of SEQ ID NO: 916208
ugugcuagacacuauaaua

SEQ ID NO: 1138713 - RNA, 19 nt, Artificial Sequence
  Description of Artificial Sequence: Synthetic oligonucleotide
  Antisense strand to SEQ ID NO: 1138712
uauuauagugucuagcaca

SEQ ID NO: 1138714 - RNA, 19 nt, Artificial Sequence
  Description of Artificial Sequence: Synthetic oligonucleotide
  Sense strand starting at position 3850 of SEQ ID NO: 916208
gggccuaugaaguagguau

SEQ ID NO: 1138715 - RNA, 19 nt, Artificial Sequence
  Description of Artificial Sequence: Synthetic oligonucleotide
  Antisense strand to SEQ ID NO: 1138714
auaccuacuucauaggccc

SEQ ID NO: 1138716 - RNA, 19 nt, Artificial Sequence
  Description of Artificial Sequence: Synthetic oligonucleotide
  Sense strand starting at position 3951 of SEQ ID NO: 916208
ucauuugucugagaccaaa

SEQ ID NO: 1138717 - RNA, 19 nt, Artificial Sequence
  Description of Artificial Sequence: Synthetic oligonucleotide
  Antisense strand to SEQ ID NO: 1138716
uuuggucucagacaaauga

SEQ ID NO: 1138718 - RNA, 19 nt, Artificial Sequence
  Description of Artificial Sequence: Synthetic oligonucleotide
  Sense strand starting at position 3962 of SEQ ID NO: 916208
agaccaaagcuuggaucua

SEQ ID NO: 1138719 - RNA, 19 nt, Artificial Sequence
  Description of Artificial Sequence: Synthetic oligonucleotide
  Antisense strand to SEQ ID NO: 1138718
uagauccaagcuuuggucu

SEQ ID NO: 1138720 - RNA, 19 nt, Artificial Sequence
  Description of Artificial Sequence: Synthetic oligonucleotide
  Sense strand starting at position 266 of SEQ ID NO: 916209
cagucugggcccuagaaau

SEQ ID NO: 1138721 - RNA, 19 nt, Artificial Sequence
  Description of Artificial Sequence: Synthetic oligonucleotide
  Antisense strand to SEQ ID NO: 1138720
auuucuagggcccagacug

SEQ ID NO: 1138722 - RNA, 19 nt, Artificial Sequence
  Description of Artificial Sequence: Synthetic oligonucleotide
  Sense strand starting at position 274 of SEQ ID NO: 916209
gcccuagaaauuggguuua

SEQ ID NO: 1138723 - RNA, 19 nt, Artificial Sequence
  Description of Artificial Sequence: Synthetic oligonucleotide
  Antisense strand to SEQ ID NO: 1138722
uaaacccaauuucuagggc

SEQ ID NO: 1138724 - RNA, 19 nt, Artificial Sequence
  Description of Artificial Sequence: Synthetic oligonucleotide
  Sense strand starting at position 276 of SEQ ID NO: 916209
ccuagaaauuggguuuaca

SEQ ID NO: 1138725 - RNA, 19 nt, Artificial Sequence
  Description of Artificial Sequence: Synthetic oligonucleotide
  Antisense strand to SEQ ID NO: 1138724
uguaaacccaauuucuagg

SEQ ID NO: 1138726 - RNA, 19 nt, Artificial Sequence
  Description of Artificial Sequence: Synthetic oligonucleotide
  Sense strand starting at position 318 of SEQ ID NO: 916209
gugccuguuccuuauaaac

SEQ ID NO: 1138727 - RNA, 19 nt, Artificial Sequence
  Description of Artificial Sequence: Synthetic oligonucleotide
  Antisense strand to SEQ ID NO: 1138726
guuuauaaggaacaggcac

SEQ ID NO: 1138728 - RNA, 19 nt, Artificial Sequence
  Description of Artificial Sequence: Synthetic oligonucleotide
  Sense strand starting at position 364 of SEQ ID NO: 916209
cauauaagacacgguuauu

SEQ ID NO: 1138729 - RNA, 19 nt, Artificial Sequence
  Description of Artificial Sequence: Synthetic oligonucleotide
  Antisense strand to SEQ ID NO: 1138728
aauaaccgugucuuauaug

SEQ ID NO: 1138730 - RNA, 19 nt, Artificial Sequence
  Description of Artificial Sequence: Synthetic oligonucleotide
  Sense strand starting at position 492 of SEQ ID NO: 916209
acagaaauguaggaugaaa

SEQ ID NO: 1138731 - RNA, 19 nt, Artificial Sequence
  Description of Artificial Sequence: Synthetic oligonucleotide
  Antisense strand to SEQ ID NO: 1138730
uuucauccuacauuucugu

SEQ ID NO: 1138732 - RNA, 19 nt, Artificial Sequence
  Description of Artificial Sequence: Synthetic oligonucleotide
  Sense strand starting at position 668 of SEQ ID NO: 916209
guuguaaucugaucacagg

SEQ ID NO: 1138733 - RNA, 19 nt, Artificial Sequence
  Description of Artificial Sequence: Synthetic oligonucleotide
  Antisense strand to SEQ ID NO: 1138732
ccugugaucagauuacaac

SEQ ID NO: 1138734 - RNA, 19 nt, Artificial Sequence
  Description of Artificial Sequence: Synthetic oligonucleotide
  Sense strand starting at position 674 of SEQ ID NO: 916209
aucugaucacagggagcaa

SEQ ID NO: 1138735 - RNA, 19 nt, Artificial Sequence
  Description of Artificial Sequence: Synthetic oligonucleotide
  Antisense strand to SEQ ID NO: 1138734
uugcucccugugaucagau

SEQ ID NO: 1138736 - RNA, 19 nt, Artificial Sequence
  Description of Artificial Sequence: Synthetic oligonucleotide
  Sense strand starting at position 839 of SEQ ID NO: 916209
aaguaaccuugagaagaag

SEQ ID NO: 1138737 - RNA, 19 nt, Artificial Sequence
  Description of Artificial Sequence: Synthetic oligonucleotide
  Antisense strand to SEQ ID NO: 1138736
cuucuucucaagguuacuu

SEQ ID NO: 1138738 - RNA, 19 nt, Artificial Sequence
  Description of Artificial Sequence: Synthetic oligonucleotide
  Sense strand starting at position 989 of SEQ ID NO: 916209
guaacaccacuuugguaau

SEQ ID NO: 1138739 - RNA, 19 nt, Artificial Sequence
  Description of Artificial Sequence: Synthetic oligonucleotide
  Antisense strand to SEQ ID NO: 1138738
auuaccaaagugguguuac

SEQ ID NO: 1138740 - RNA, 19 nt, Artificial Sequence
  Description of Artificial Sequence: Synthetic oligonucleotide
  Sense strand starting at position 1149 of SEQ ID NO: 916209
uguuuacccuaaucaggua

SEQ ID NO: 1138741 - RNA, 19 nt, Artificial Sequence
  Description of Artificial Sequence: Synthetic oligonucleotide
  Antisense strand to SEQ ID NO: 1138740
uaccugauuaggguaaaca

SEQ ID NO: 1138742 - RNA, 19 nt, Artificial Sequence
  Description of Artificial Sequence: Synthetic oligonucleotide
  Sense strand starting at position 1182 of SEQ ID NO: 916209
aauuguaauugggugcaga

SEQ ID NO: 1138743 - RNA, 19 nt, Artificial Sequence
  Description of Artificial Sequence: Synthetic oligonucleotide
  Antisense strand to SEQ ID NO: 1138742
ucugcacccaauuacaauu

SEQ ID NO: 1138744 - RNA, 19 nt, Artificial Sequence
  Description of Artificial Sequence: Synthetic oligonucleotide
  Sense strand starting at position 1185 of SEQ ID NO: 916209
uguaauugggugcagacaa

SEQ ID NO: 1138745 - RNA, 19 nt, Artificial Sequence
  Description of Artificial Sequence: Synthetic oligonucleotide
  Antisense strand to SEQ ID NO: 1138744
uugucugcacccaauuaca

SEQ ID NO: 1138746 - RNA, 19 nt, Artificial Sequence
  Description of Artificial Sequence: Synthetic oligonucleotide
  Sense strand starting at position 1319 of SEQ ID NO: 916209
gguuuaccagcagauacaa

SEQ ID NO: 1138747 - RNA, 19 nt, Artificial Sequence
  Description of Artificial Sequence: Synthetic oligonucleotide
  Antisense strand to SEQ ID NO: 1138746
uuguaucugcugguaaacc

SEQ ID NO: 1138748 - RNA, 19 nt, Artificial Sequence
  Description of Artificial Sequence: Synthetic oligonucleotide
  Sense strand starting at position 1350 of SEQ ID NO: 916209
cucacuuaguggccaaauu

SEQ ID NO: 1138749 - RNA, 19 nt, Artificial Sequence
  Description of Artificial Sequence: Synthetic oligonucleotide
  Antisense strand to SEQ ID NO: 1138748
aauuuggccacuaagugag

SEQ ID NO: 1138750 - RNA, 19 nt, Artificial Sequence
  Description of Artificial Sequence: Synthetic oligonucleotide
  Sense strand starting at position 1404 of SEQ ID NO: 916209
cugaucuauuaacuuggga

SEQ ID NO: 1138751 - RNA, 19 nt, Artificial Sequence
  Description of Artificial Sequence: Synthetic oligonucleotide
  Antisense strand to SEQ ID NO: 1138750
ucccaaguuaauagaucag

SEQ ID NO: 1138752 - RNA, 19 nt, Artificial Sequence
  Description of Artificial Sequence: Synthetic oligonucleotide
  Sense strand starting at position 1407 of SEQ ID NO: 916209
aucuauuaacuugggaauc

SEQ ID NO: 1138753 - RNA, 19 nt, Artificial Sequence
  Description of Artificial Sequence: Synthetic oligonucleotide
  Antisense strand to SEQ ID NO: 1138752
gauucccaaguuaauagau

SEQ ID NO: 1138754 - RNA, 19 nt, Artificial Sequence
  Description of Artificial Sequence: Synthetic oligonucleotide
  Sense strand starting at position 1762 of SEQ ID NO: 916209
ggcugcagaagucaugauu

SEQ ID NO: 1138755 - RNA, 19 nt, Artificial Sequence
  Description of Artificial Sequence: Synthetic oligonucleotide
  Antisense strand to SEQ ID NO: 1138754
aaucaugacuucugcagcc

SEQ ID NO: 1138756 - RNA, 19 nt, Artificial Sequence
  Description of Artificial Sequence: Synthetic oligonucleotide
  Sense strand starting at position 2449 of SEQ ID NO: 916209
gauugccuuuguuugagaa

SEQ ID NO: 1138757 - RNA, 19 nt, Artificial Sequence
  Description of Artificial Sequence: Synthetic oligonucleotide
  Antisense strand to SEQ ID NO: 1138756
uucucaaacaaaggcaauc

SEQ ID NO: 1138758 - RNA, 19 nt, Artificial Sequence
  Description of Artificial Sequence: Synthetic oligonucleotide
  Sense strand starting at position 2450 of SEQ ID NO: 916209
auugccuuuguuugagaag

SEQ ID NO: 1138759 - RNA, 19 nt, Artificial Sequence
  Description of Artificial Sequence: Synthetic oligonucleotide
  Antisense strand to SEQ ID NO: 1138758
cuucucaaacaaaggcaau

SEQ ID NO: 1138760 - RNA, 19 nt, Artificial Sequence
  Description of Artificial Sequence: Synthetic oligonucleotide
  Sense strand starting at position 2690 of SEQ ID NO: 916209
gucucuuccuuccugggaa

SEQ ID NO: 1138761 - RNA, 19 nt, Artificial Sequence
  Description of Artificial Sequence: Synthetic oligonucleotide
  Antisense strand to SEQ ID NO: 1138760
uucccaggaaggaagagac

SEQ ID NO: 1138762 - RNA, 19 nt, Artificial Sequence
  Description of Artificial Sequence: Synthetic oligonucleotide
  Sense strand starting at position 2920 of SEQ ID NO: 916209
gaccuacuguggguaguua

SEQ ID NO: 1138763 - RNA, 19 nt, Artificial Sequence
  Description of Artificial Sequence: Synthetic oligonucleotide
  Antisense strand to SEQ ID NO: 1138762
uaacuacccacaguagguc

SEQ ID NO: 1138764 - RNA, 19 nt, Artificial Sequence
  Description of Artificial Sequence: Synthetic oligonucleotide
  Sense strand starting at position 3065 of SEQ ID NO: 916209
cucugccaucuugaaugaa

SEQ ID NO: 1138765 - RNA, 19 nt, Artificial Sequence
  Description of Artificial Sequence: Synthetic oligonucleotide
  Antisense strand to SEQ ID NO: 1138764
uucauucaagauggcagag

SEQ ID NO: 1138766 - RNA, 19 nt, Artificial Sequence
  Description of Artificial Sequence: Synthetic oligonucleotide
  Sense strand starting at position 3295 of SEQ ID NO: 916209
acugucauugaaggauuaa

SEQ ID NO: 1138767 - RNA, 19 nt, Artificial Sequence
  Description of Artificial Sequence: Synthetic oligonucleotide
  Antisense strand to SEQ ID NO: 1138766
uuaauccuucaaugacagu

SEQ ID NO: 1138768 - RNA, 19 nt, Artificial Sequence
  Description of Artificial Sequence: Synthetic oligonucleotide
  Sense strand starting at position 3351 of SEQ ID NO: 916209
acgcgauauccgaggugaa

SEQ ID NO: 1138769 - RNA, 19 nt, Artificial Sequence
  Description of Artificial Sequence: Synthetic oligonucleotide
  Antisense strand to SEQ ID NO: 1138768
uucaccucggauaucgcgu

SEQ ID NO: 1138770 - RNA, 19 nt, Artificial Sequence
  Description of Artificial Sequence: Synthetic oligonucleotide
  Sense strand starting at position 3354 of SEQ ID NO: 916209
cgauauccgaggugaaucu

SEQ ID NO: 1138771 - RNA, 19 nt, Artificial Sequence
  Description of Artificial Sequence: Synthetic oligonucleotide
  Antisense strand to SEQ ID NO: 1138770
agauucaccucggauaucg

SEQ ID NO: 1138772 - RNA, 19 nt, Artificial Sequence
  Description of Artificial Sequence: Synthetic oligonucleotide
  Sense strand starting at position 3361 of SEQ ID NO: 916209
cgaggugaaucuuuaacua

SEQ ID NO: 1138773 - RNA, 19 nt, Artificial Sequence
  Description of Artificial Sequence: Synthetic oligonucleotide
  Antisense strand to SEQ ID NO: 1138772
uaguuaaagauucaccucg

SEQ ID NO: 1138774 - RNA, 19 nt, Artificial Sequence
  Description of Artificial Sequence: Synthetic oligonucleotide
  Sense strand starting at position 3365 of SEQ ID NO: 916209
gugaaucuuuaacuaugaa

SEQ ID NO: 1138775 - RNA, 19 nt, Artificial Sequence
  Description of Artificial Sequence: Synthetic oligonucleotide
  Antisense strand to SEQ ID NO: 1138774
uucauaguuaaagauucac

SEQ ID NO: 1138776 - RNA, 19 nt, Artificial Sequence
  Description of Artificial Sequence: Synthetic oligonucleotide
  Sense strand starting at position 3443 of SEQ ID NO: 916209
aagcuugggaagugugaaa

SEQ ID NO: 1138777 - RNA, 19 nt, Artificial Sequence
  Description of Artificial Sequence: Synthetic oligonucleotide
  Antisense strand to SEQ ID NO: 1138776
uuucacacuucccaagcuu

SEQ ID NO: 1138778 - RNA, 19 nt, Artificial Sequence
  Description of Artificial Sequence: Synthetic oligonucleotide
  Sense strand starting at position 3496 of SEQ ID NO: 916209
gaggguggcuauguaaagu

SEQ ID NO: 1138779 - RNA, 19 nt, Artificial Sequence
  Description of Artificial Sequence: Synthetic oligonucleotide
  Antisense strand to SEQ ID NO: 1138778
acuuuacauagccacccuc

SEQ ID NO: 1138780 - RNA, 19 nt, Artificial Sequence
  Description of Artificial Sequence: Synthetic oligonucleotide
  Sense strand starting at position 3585 of SEQ ID NO: 916209
ugaggcguucauuagggaa

SEQ ID NO: 1138781 - RNA, 19 nt, Artificial Sequence
  Description of Artificial Sequence: Synthetic oligonucleotide
  Antisense strand to SEQ ID NO: 1138780
uucccuaaugaacgccuca

SEQ ID NO: 1138782 - RNA, 19 nt, Artificial Sequence
  Description of Artificial Sequence: Synthetic oligonucleotide
  Sense strand starting at position 3637 of SEQ ID NO: 916209
ggaauaauggcuuggacag

SEQ ID NO: 1138783 - RNA, 19 nt, Artificial Sequence
  Description of Artificial Sequence: Synthetic oligonucleotide
  Antisense strand to SEQ ID NO: 1138782
cuguccaagccauuauucc

SEQ ID NO: 1138784 - RNA, 19 nt, Artificial Sequence
  Description of Artificial Sequence: Synthetic oligonucleotide
  Sense strand starting at position 3649 of SEQ ID NO: 916209
uggacagacacuuguaagu

SEQ ID NO: 1138785 - RNA, 19 nt, Artificial Sequence
  Description of Artificial Sequence: Synthetic oligonucleotide
  Antisense strand to SEQ ID NO: 1138784
acuuacaagugucugucca

SEQ ID NO: 1138786 - RNA, 19 nt, Artificial Sequence
  Description of Artificial Sequence: Synthetic oligonucleotide
  Sense strand starting at position 3674 of SEQ ID NO: 916209
cgaggcaauguuuauagau

SEQ ID NO: 1138787 - RNA, 19 nt, Artificial Sequence
  Description of Artificial Sequence: Synthetic oligonucleotide
  Antisense strand to SEQ ID NO: 1138786
aucuauaaacauugccucg

SEQ ID NO: 1138788 - RNA, 19 nt, Artificial Sequence
  Description of Artificial Sequence: Synthetic oligonucleotide
  Sense strand starting at position 3735 of SEQ ID NO: 916209
aggguaacugaugggugua

SEQ ID NO: 1138789 - RNA, 19 nt, Artificial Sequence
  Description of Artificial Sequence: Synthetic oligonucleotide
  Antisense strand to SEQ ID NO: 1138788
uacacccaucaguuacccu

SEQ ID NO: 1138790 - RNA, 19 nt, Artificial Sequence
  Description of Artificial Sequence: Synthetic oligonucleotide
  Sense strand starting at position 3736 of SEQ ID NO: 916209
ggguaacugauggguguau

SEQ ID NO: 1138791 - RNA, 19 nt, Artificial Sequence
  Description of Artificial Sequence: Synthetic oligonucleotide
  Antisense strand to SEQ ID NO: 1138790
auacacccaucaguuaccc

SEQ ID NO: 1138792 - RNA, 19 nt, Artificial Sequence
  Description of Artificial Sequence: Synthetic oligonucleotide
  Sense strand starting at position 3737 of SEQ ID NO: 916209
gguaacugauggguguauu

SEQ ID NO: 1138793 - RNA, 19 nt, Artificial Sequence
  Description of Artificial Sequence: Synthetic oligonucleotide
  Antisense strand to SEQ ID NO: 1138792
aauacacccaucaguuacc

SEQ ID NO: 1138794 - RNA, 19 nt, Artificial Sequence
  Description of Artificial Sequence: Synthetic oligonucleotide
  Sense strand starting at position 3791 of SEQ ID NO: 916209
aguaauauaugcucaagga

SEQ ID NO: 1138795 - RNA, 19 nt, Artificial Sequence
  Description of Artificial Sequence: Synthetic oligonucleotide
  Antisense strand to SEQ ID NO: 1138794
uccuugagcauauauuacu

SEQ ID NO: 1138796 - RNA, 19 nt, Artificial Sequence
  Description of Artificial Sequence: Synthetic oligonucleotide
  Sense strand starting at position 3795 of SEQ ID NO: 916209
auauaugcucaaggaacau

SEQ ID NO: 1138797 - RNA, 19 nt, Artificial Sequence
  Description of Artificial Sequence: Synthetic oligonucleotide
  Antisense strand to SEQ ID NO: 1138796
auguuccuugagcauauau

SEQ ID NO: 1138798 - RNA, 19 nt, Artificial Sequence
  Description of Artificial Sequence: Synthetic oligonucleotide
  Sense strand starting at position 3876 of SEQ ID NO: 916209
aacuauuaacaguacggua

SEQ ID NO: 1138799 - RNA, 19 nt, Artificial Sequence
  Description of Artificial Sequence: Synthetic oligonucleotide
  Antisense strand to SEQ ID NO: 1138798
uaccguacuguuaauaguu

SEQ ID NO: 1138800 - RNA, 19 nt, Artificial Sequence
  Description of Artificial Sequence: Synthetic oligonucleotide
  Sense strand starting at position 273 of SEQ ID NO: 916210
cuugguuuccaagauguug

SEQ ID NO: 1138801 - RNA, 19 nt, Artificial Sequence
  Description of Artificial Sequence: Synthetic oligonucleotide
  Antisense strand to SEQ ID NO: 1138800
caacaucuuggaaaccaag

SEQ ID NO: 1138802 - RNA, 19 nt, Artificial Sequence
  Description of Artificial Sequence: Synthetic oligonucleotide
  Sense strand starting at position 281 of SEQ ID NO: 916210
ccaagauguugacuccuga

SEQ ID NO: 1138803 - RNA, 19 nt, Artificial Sequence
  Description of Artificial Sequence: Synthetic oligonucleotide
  Antisense strand to SEQ ID NO: 1138802
ucaggagucaacaucuugg

SEQ ID NO: 1138804 - RNA, 19 nt, Artificial Sequence
  Description of Artificial Sequence: Synthetic oligonucleotide
  Sense strand starting at position 334 of SEQ ID NO: 916210
uugguauucggagagaacu

SEQ ID NO: 1138805 - RNA, 19 nt, Artificial Sequence
  Description of Artificial Sequence: Synthetic oligonucleotide
  Antisense strand to SEQ ID NO: 1138804
aguucucuccgaauaccaa

SEQ ID NO: 1138806 - RNA, 19 nt, Artificial Sequence
  Description of Artificial Sequence: Synthetic oligonucleotide
  Sense strand starting at position 336 of SEQ ID NO: 916210
gguauucggagagaacuuu

SEQ ID NO: 1138807 - RNA, 19 nt, Artificial Sequence
  Description of Artificial Sequence: Synthetic oligonucleotide
  Antisense strand to SEQ ID NO: 1138806
aaaguucucuccgaauacc

SEQ ID NO: 1138808 - RNA, 19 nt, Artificial Sequence
  Description of Artificial Sequence: Synthetic oligonucleotide
  Sense strand starting at position 389 of SEQ ID NO: 916210
aguacuugaagagguuaaa

SEQ ID NO: 1138809 - RNA, 19 nt, Artificial Sequence
  Description of Artificial Sequence: Synthetic oligonucleotide
  Antisense strand to SEQ ID NO: 1138808
uuuaaccucuucaaguacu

SEQ ID NO: 1138810 - RNA, 19 nt, Artificial Sequence
  Description of Artificial Sequence: Synthetic oligonucleotide
  Sense strand starting at position 410 of SEQ ID NO: 916210
gucaauuucgcauguuaua

SEQ ID NO: 1138811 - RNA, 19 nt, Artificial Sequence
  Description of Artificial Sequence: Synthetic oligonucleotide
  Antisense strand to SEQ ID NO: 1138810
uauaacaugcgaaauugac

SEQ ID NO: 1138812 - RNA, 19 nt, Artificial Sequence
  Description of Artificial Sequence: Synthetic oligonucleotide
  Sense strand starting at position 590 of SEQ ID NO: 916210
uuaguuagagauugucuaa

SEQ ID NO: 1138813 - RNA, 19 nt, Artificial Sequence
  Description of Artificial Sequence: Synthetic oligonucleotide
  Antisense strand to SEQ ID NO: 1138812
uuagacaaucucuaacuaa

SEQ ID NO: 1138814 - RNA, 19 nt, Artificial Sequence
  Description of Artificial Sequence: Synthetic oligonucleotide
  Sense strand starting at position 593 of SEQ ID NO: 916210
guuagagauugucuaacua

SEQ ID NO: 1138815 - RNA, 19 nt, Artificial Sequence
  Description of Artificial Sequence: Synthetic oligonucleotide
  Antisense strand to SEQ ID NO: 1138814
uaguuagacaaucucuaac

SEQ ID NO: 1138816 - RNA, 19 nt, Artificial Sequence
  Description of Artificial Sequence: Synthetic oligonucleotide
  Sense strand starting at position 634 of SEQ ID NO: 916210
gcuauauuggaucaguuug

SEQ ID NO: 1138817 - RNA, 19 nt, Artificial Sequence
  Description of Artificial Sequence: Synthetic oligonucleotide
  Antisense strand to SEQ ID NO: 1138816
caaacugauccaauauagc

SEQ ID NO: 1138818 - RNA, 19 nt, Artificial Sequence
  Description of Artificial Sequence: Synthetic oligonucleotide
  Sense strand starting at position 770 of SEQ ID NO: 916210
ggacccucauuugaaucau

SEQ ID NO: 1138819 - RNA, 19 nt, Artificial Sequence
  Description of Artificial Sequence: Synthetic oligonucleotide
  Antisense strand to SEQ ID NO: 1138818
augauucaaaugagggucc

SEQ ID NO: 1138820 - RNA, 19 nt, Artificial Sequence
  Description of Artificial Sequence: Synthetic oligonucleotide
  Sense strand starting at position 788 of SEQ ID NO: 916210
uugcuaauggauugauuau

SEQ ID NO: 1138821 - RNA, 19 nt, Artificial Sequence
  Description of Artificial Sequence: Synthetic oligonucleotide
  Antisense strand to SEQ ID NO: 1138820
auaaucaauccauuagcaa

SEQ ID NO: 1138822 - RNA, 19 nt, Artificial Sequence
  Description of Artificial Sequence: Synthetic oligonucleotide
  Sense strand starting at position 807 of SEQ ID NO: 916210
uguggauugugauccaauu

SEQ ID NO: 1138823 - RNA, 19 nt, Artificial Sequence
  Description of Artificial Sequence: Synthetic oligonucleotide
  Antisense strand to SEQ ID NO: 1138822
aauuggaucacaauccaca

SEQ ID NO: 1138824 - RNA, 19 nt, Artificial Sequence
  Description of Artificial Sequence: Synthetic oligonucleotide
  Sense strand starting at position 1085 of SEQ ID NO: 916210
ggccauucucaccaagaca

SEQ ID NO: 1138825 - RNA, 19 nt, Artificial Sequence
  Description of Artificial Sequence: Synthetic oligonucleotide
  Antisense strand to SEQ ID NO: 1138824
ugucuuggugagaauggcc

SEQ ID NO: 1138826 - RNA, 19 nt, Artificial Sequence
  Description of Artificial Sequence: Synthetic oligonucleotide
  Sense strand starting at position 1114 of SEQ ID NO: 916210
acagucugucuuuaauaca

SEQ ID NO: 1138827 - RNA, 19 nt, Artificial Sequence
  Description of Artificial Sequence: Synthetic oligonucleotide
  Antisense strand to SEQ ID NO: 1138826
uguauuaaagacagacugu

SEQ ID NO: 1138828 - RNA, 19 nt, Artificial Sequence
  Description of Artificial Sequence: Synthetic oligonucleotide
  Sense strand starting at position 1186 of SEQ ID NO: 916210
uauaacaaucuggguauga

SEQ ID NO: 1138829 - RNA, 19 nt, Artificial Sequence
  Description of Artificial Sequence: Synthetic oligonucleotide
  Antisense strand to SEQ ID NO: 1138828
ucauacccagauuguuaua

SEQ ID NO: 1138830 - RNA, 19 nt, Artificial Sequence
  Description of Artificial Sequence: Synthetic oligonucleotide
  Sense strand starting at position 1242 of SEQ ID NO: 916210
caaaguccaugagcugaaa

SEQ ID NO: 1138831 - RNA, 19 nt, Artificial Sequence
  Description of Artificial Sequence: Synthetic oligonucleotide
  Antisense strand to SEQ ID NO: 1138830
uuucagcucauggacuuug

SEQ ID NO: 1138832 - RNA, 19 nt, Artificial Sequence
  Description of Artificial Sequence: Synthetic oligonucleotide
  Sense strand starting at position 1245 of SEQ ID NO: 916210
aguccaugagcugaaacuu

SEQ ID NO: 1138833 - RNA, 19 nt, Artificial Sequence
  Description of Artificial Sequence: Synthetic oligonucleotide
  Antisense strand to SEQ ID NO: 1138832
aaguuucagcucauggacu

SEQ ID NO: 1138834 - RNA, 19 nt, Artificial Sequence
  Description of Artificial Sequence: Synthetic oligonucleotide
  Sense strand starting at position 1548 of SEQ ID NO: 916210
ggauuagcccuccagucua

SEQ ID NO: 1138835 - RNA, 19 nt, Artificial Sequence
  Description of Artificial Sequence: Synthetic oligonucleotide
  Antisense strand to SEQ ID NO: 1138834
uagacuggagggcuaaucc

SEQ ID NO: 1138836 - RNA, 19 nt, Artificial Sequence
  Description of Artificial Sequence: Synthetic oligonucleotide
  Sense strand starting at position 2067 of SEQ ID NO: 916210
uuguaaucagcccauugaa

SEQ ID NO: 1138837 - RNA, 19 nt, Artificial Sequence
  Description of Artificial Sequence: Synthetic oligonucleotide
  Antisense strand to SEQ ID NO: 1138836
uucaaugggcugauuacaa

SEQ ID NO: 1138838 - RNA, 19 nt, Artificial Sequence
  Description of Artificial Sequence: Synthetic oligonucleotide
  Sense strand starting at position 2383 of SEQ ID NO: 916210
cuuaaucugugagcaggau

SEQ ID NO: 1138839 - RNA, 19 nt, Artificial Sequence
  Description of Artificial Sequence: Synthetic oligonucleotide
  Antisense strand to SEQ ID NO: 1138838
auccugcucacagauuaag

SEQ ID NO: 1138840 - RNA, 19 nt, Artificial Sequence
  Description of Artificial Sequence: Synthetic oligonucleotide
  Sense strand starting at position 2384 of SEQ ID NO: 916210
uuaaucugugagcaggauu

SEQ ID NO: 1138841 - RNA, 19 nt, Artificial Sequence
  Description of Artificial Sequence: Synthetic oligonucleotide
  Antisense strand to SEQ ID NO: 1138840
aauccugcucacagauuaa

SEQ ID NO: 1138842 - RNA, 19 nt, Artificial Sequence
  Description of Artificial Sequence: Synthetic oligonucleotide
  Sense strand starting at position 2412 of SEQ ID NO: 916210
gcuugcaggauauagagau

SEQ ID NO: 1138843 - RNA, 19 nt, Artificial Sequence
  Description of Artificial Sequence: Synthetic oligonucleotide
  Antisense strand to SEQ ID NO: 1138842
aucucuauauccugcaagc

SEQ ID NO: 1138844 - RNA, 19 nt, Artificial Sequence
  Description of Artificial Sequence: Synthetic oligonucleotide
  Sense strand starting at position 2560 of SEQ ID NO: 916210
aggccuugaggucagugaa

SEQ ID NO: 1138845 - RNA, 19 nt, Artificial Sequence
  Description of Artificial Sequence: Synthetic oligonucleotide
  Antisense strand to SEQ ID NO: 1138844
uucacugaccucaaggccu

SEQ ID NO: 1138846 - RNA, 19 nt, Artificial Sequence
  Description of Artificial Sequence: Synthetic oligonucleotide
  Sense strand starting at position 2563 of SEQ ID NO: 916210
ccuugaggucagugaacau

SEQ ID NO: 1138847 - RNA, 19 nt, Artificial Sequence
  Description of Artificial Sequence: Synthetic oligonucleotide
  Antisense strand to SEQ ID NO: 1138846
auguucacugaccucaagg

SEQ ID NO: 1138848 - RNA, 19 nt, Artificial Sequence
  Description of Artificial Sequence: Synthetic oligonucleotide
  Sense strand starting at position 2687 of SEQ ID NO: 916210
uagucucuccaguaguaag

SEQ ID NO: 1138849 - RNA, 19 nt, Artificial Sequence
  Description of Artificial Sequence: Synthetic oligonucleotide
  Antisense strand to SEQ ID NO: 1138848
cuuacuacuggagagacua

SEQ ID NO: 1138850 - RNA, 19 nt, Artificial Sequence
  Description of Artificial Sequence: Synthetic oligonucleotide
  Sense strand starting at position 2788 of SEQ ID NO: 916210
cacauuuagugucuguaca

SEQ ID NO: 1138851 - RNA, 19 nt, Artificial Sequence
  Description of Artificial Sequence: Synthetic oligonucleotide
  Antisense strand to SEQ ID NO: 1138850
uguacagacacuaaaugug

SEQ ID NO: 1138852 - RNA, 19 nt, Artificial Sequence
  Description of Artificial Sequence: Synthetic oligonucleotide
  Sense strand starting at position 2789 of SEQ ID NO: 916210
acauuuagugucuguacau

SEQ ID NO: 1138853 - RNA, 19 nt, Artificial Sequence
  Description of Artificial Sequence: Synthetic oligonucleotide
  Antisense strand to SEQ ID NO: 1138852
auguacagacacuaaaugu

SEQ ID NO: 1138854 - RNA, 19 nt, Artificial Sequence
  Description of Artificial Sequence: Synthetic oligonucleotide
  Sense strand starting at position 2790 of SEQ ID NO: 916210
cauuuagugucuguacaug

SEQ ID NO: 1138855 - RNA, 19 nt, Artificial Sequence
  Description of Artificial Sequence: Synthetic oligonucleotide
  Antisense strand to SEQ ID NO: 1138854
cauguacagacacuaaaug

SEQ ID NO: 1138856 - RNA, 19 nt, Artificial Sequence
  Description of Artificial Sequence: Synthetic oligonucleotide
  Sense strand starting at position 2879 of SEQ ID NO: 916210
ugaugucggguggaauagu

SEQ ID NO: 1138857 - RNA, 19 nt, Artificial Sequence
  Description of Artificial Sequence: Synthetic oligonucleotide
  Antisense strand to SEQ ID NO: 1138856
acuauuccacccgacauca

SEQ ID NO: 1138858 - RNA, 19 nt, Artificial Sequence
  Description of Artificial Sequence: Synthetic oligonucleotide
  Sense strand starting at position 2954 of SEQ ID NO: 916210
acacaaggaguuugcuauu

SEQ ID NO: 1138859 - RNA, 19 nt, Artificial Sequence
  Description of Artificial Sequence: Synthetic oligonucleotide
  Antisense strand to SEQ ID NO: 1138858
aauagcaaacuccuugugu

SEQ ID NO: 1138860 - RNA, 19 nt, Artificial Sequence
  Description of Artificial Sequence: Synthetic oligonucleotide
  Sense strand starting at position 3018 of SEQ ID NO: 916210
gcuagacucauguacaggu

SEQ ID NO: 1138861 - RNA, 19 nt, Artificial Sequence
  Description of Artificial Sequence: Synthetic oligonucleotide
  Antisense strand to SEQ ID NO: 1138860
accuguacaugagucuagc

SEQ ID NO: 1138862 - RNA, 19 nt, Artificial Sequence
  Description of Artificial Sequence: Synthetic oligonucleotide
  Sense strand starting at position 3025 of SEQ ID NO: 916210
ucauguacagguugauaua

SEQ ID NO: 1138863 - RNA, 19 nt, Artificial Sequence
  Description of Artificial Sequence: Synthetic oligonucleotide
  Antisense strand to SEQ ID NO: 1138862
uauaucaaccuguacauga

SEQ ID NO: 1138864 - RNA, 19 nt, Artificial Sequence
  Description of Artificial Sequence: Synthetic oligonucleotide
  Sense strand starting at position 3068 of SEQ ID NO: 916210
ucuugaggagcucaaaucu

SEQ ID NO: 1138865 - RNA, 19 nt, Artificial Sequence
  Description of Artificial Sequence: Synthetic oligonucleotide
  Antisense strand to SEQ ID NO: 1138864
agauuugagcuccucaaga

SEQ ID NO: 1138866 - RNA, 19 nt, Artificial Sequence
  Description of Artificial Sequence: Synthetic oligonucleotide
  Sense strand starting at position 3162 of SEQ ID NO: 916210
uggcauuuguuacccuaca

SEQ ID NO: 1138867 - RNA, 19 nt, Artificial Sequence
  Description of Artificial Sequence: Synthetic oligonucleotide
  Antisense strand to SEQ ID NO: 1138866
uguaggguaacaaaugcca

SEQ ID NO: 1138868 - RNA, 19 nt, Artificial Sequence
  Description of Artificial Sequence: Synthetic oligonucleotide
  Sense strand starting at position 3163 of SEQ ID NO: 916210
ggcauuuguuacccuacau

SEQ ID NO: 1138869 - RNA, 19 nt, Artificial Sequence
  Description of Artificial Sequence: Synthetic oligonucleotide
  Antisense strand to SEQ ID NO: 1138868
auguaggguaacaaaugcc

SEQ ID NO: 1138870 - RNA, 19 nt, Artificial Sequence
  Description of Artificial Sequence: Synthetic oligonucleotide
  Sense strand starting at position 3307 of SEQ ID NO: 916210
auggaaaucuuaguguuuc

SEQ ID NO: 1138871 - RNA, 19 nt, Artificial Sequence
  Description of Artificial Sequence: Synthetic oligonucleotide
  Antisense strand to SEQ ID NO: 1138870
gaaacacuaagauuuccau

SEQ ID NO: 1138872 - RNA, 19 nt, Artificial Sequence
  Description of Artificial Sequence: Synthetic oligonucleotide
  Sense strand starting at position 3564 of SEQ ID NO: 916210
guaacuugccuagagauag

SEQ ID NO: 1138873 - RNA, 19 nt, Artificial Sequence
  Description of Artificial Sequence: Synthetic oligonucleotide
  Antisense strand to SEQ ID NO: 1138872
cuaucucuaggcaaguuac

SEQ ID NO: 1138874 - RNA, 19 nt, Artificial Sequence
  Description of Artificial Sequence: Synthetic oligonucleotide
  Sense strand starting at position 3807 of SEQ ID NO: 916210
aggguugaguggaagaagu

SEQ ID NO: 1138875 - RNA, 19 nt, Artificial Sequence
  Description of Artificial Sequence: Synthetic oligonucleotide
  Antisense strand to SEQ ID NO: 1138874
acuucuuccacucaacccu

SEQ ID NO: 1138876 - RNA, 19 nt, Artificial Sequence
  Description of Artificial Sequence: Synthetic oligonucleotide
  Sense strand starting at position 3815 of SEQ ID NO: 916210
guggaagaaguaugacaug

SEQ ID NO: 1138877 - RNA, 19 nt, Artificial Sequence
  Description of Artificial Sequence: Synthetic oligonucleotide
  Antisense strand to SEQ ID NO: 1138876
caugucauacuucuuccac

SEQ ID NO: 1138878 - RNA, 19 nt, Artificial Sequence
  Description of Artificial Sequence: Synthetic oligonucleotide
  Sense strand starting at position 3982 of SEQ ID NO: 916210
cugguugugaaagguaaag

SEQ ID NO: 1138879 - RNA, 19 nt, Artificial Sequence
  Description of Artificial Sequence: Synthetic oligonucleotide
  Antisense strand to SEQ ID NO: 1138878
cuuuaccuuucacaaccag

SEQ ID NO: 1138880 - RNA, 19 nt, Artificial Sequence
  Description of Artificial Sequence: Synthetic oligonucleotide
  Sense strand starting at position 263 of SEQ ID NO: 916211
ugugguuuccguuuaagca

SEQ ID NO: 1138881 - RNA, 19 nt, Artificial Sequence
  Description of Artificial Sequence: Synthetic oligonucleotide
  Antisense strand to SEQ ID NO: 1138880
ugcuuaaacggaaaccaca

SEQ ID NO: 1138882 - RNA, 19 nt, Artificial Sequence
  Description of Artificial Sequence: Synthetic oligonucleotide
  Sense strand starting at position 417 of SEQ ID NO: 916211
uuuagauagucacuucucu

SEQ ID NO: 1138883 - RNA, 19 nt, Artificial Sequence
  Description of Artificial Sequence: Synthetic oligonucleotide
  Antisense strand to SEQ ID NO: 1138882
agagaagugacuaucuaaa

SEQ ID NO: 1138884 - RNA, 19 nt, Artificial Sequence
  Description of Artificial Sequence: Synthetic oligonucleotide
  Sense strand starting at position 509 of SEQ ID NO: 916211
gugaacucaccguugcgua

SEQ ID NO: 1138885 - RNA, 19 nt, Artificial Sequence
  Description of Artificial Sequence: Synthetic oligonucleotide
  Antisense strand to SEQ ID NO: 1138884
uacgcaacggugaguucac

SEQ ID NO: 1138886 - RNA, 19 nt, Artificial Sequence
  Description of Artificial Sequence: Synthetic oligonucleotide
  Sense strand starting at position 560 of SEQ ID NO: 916211
gggcacuucucacuccaaa

SEQ ID NO: 1138887 - RNA, 19 nt, Artificial Sequence
  Description of Artificial Sequence: Synthetic oligonucleotide
  Antisense strand to SEQ ID NO: 1138886
uuuggagugagaagugccc

SEQ ID NO: 1138888 - RNA, 19 nt, Artificial Sequence
  Description of Artificial Sequence: Synthetic oligonucleotide
  Sense strand starting at position 815 of SEQ ID NO: 916211
aauccaguucugcaaggga

SEQ ID NO: 1138889 - RNA, 19 nt, Artificial Sequence
  Description of Artificial Sequence: Synthetic oligonucleotide
  Antisense strand to SEQ ID NO: 1138888
ucccuugcagaacuggauu

SEQ ID NO: 1138890 - RNA, 19 nt, Artificial Sequence
  Description of Artificial Sequence: Synthetic oligonucleotide
  Sense strand starting at position 872 of SEQ ID NO: 916211
uagcuaucuguuuaagaug

SEQ ID NO: 1138891 - RNA, 19 nt, Artificial Sequence
  Description of Artificial Sequence: Synthetic oligonucleotide
  Antisense strand to SEQ ID NO: 1138890
caucuuaaacagauagcua

SEQ ID NO: 1138892 - RNA, 19 nt, Artificial Sequence
  Description of Artificial Sequence: Synthetic oligonucleotide
  Sense strand starting at position 880 of SEQ ID NO: 916211
uguuuaagaugagcuuuga

SEQ ID NO: 1138893 - RNA, 19 nt, Artificial Sequence
  Description of Artificial Sequence: Synthetic oligonucleotide
  Antisense strand to SEQ ID NO: 1138892
ucaaagcucaucuuaaaca

SEQ ID NO: 1138894 - RNA, 19 nt, Artificial Sequence
  Description of Artificial Sequence: Synthetic oligonucleotide
  Sense strand starting at position 913 of SEQ ID NO: 916211
ugacauaauuacuugaggu

SEQ ID NO: 1138895 - RNA, 19 nt, Artificial Sequence
  Description of Artificial Sequence: Synthetic oligonucleotide
  Antisense strand to SEQ ID NO: 1138894
accucaaguaauuauguca

SEQ ID NO: 1138896 - RNA, 19 nt, Artificial Sequence
  Description of Artificial Sequence: Synthetic oligonucleotide
  Sense strand starting at position 923 of SEQ ID NO: 916211
acuugagguccuugacuug

SEQ ID NO: 1138897 - RNA, 19 nt, Artificial Sequence
  Description of Artificial Sequence: Synthetic oligonucleotide
  Antisense strand to SEQ ID NO: 1138896
caagucaaggaccucaagu

SEQ ID NO: 1138898 - RNA, 19 nt, Artificial Sequence
  Description of Artificial Sequence: Synthetic oligonucleotide
  Sense strand starting at position 928 of SEQ ID NO: 916211
agguccuugacuugaguaa

SEQ ID NO: 1138899 - RNA, 19 nt, Artificial Sequence
  Description of Artificial Sequence: Synthetic oligonucleotide
  Antisense strand to SEQ ID NO: 1138898
uuacucaagucaaggaccu

SEQ ID NO: 1138900 - RNA, 19 nt, Artificial Sequence
  Description of Artificial Sequence: Synthetic oligonucleotide
  Sense strand starting at position 929 of SEQ ID NO: 916211
gguccuugacuugaguaaa

SEQ ID NO: 1138901 - RNA, 19 nt, Artificial Sequence
  Description of Artificial Sequence: Synthetic oligonucleotide
  Antisense strand to SEQ ID NO: 1138900
uuuacucaagucaaggacc

SEQ ID NO: 1138902 - RNA, 19 nt, Artificial Sequence
  Description of Artificial Sequence: Synthetic oligonucleotide
  Sense strand starting at position 973 of SEQ ID NO: 916211
cuucuuaauguguacucua

SEQ ID NO: 1138903 - RNA, 19 nt, Artificial Sequence
  Description of Artificial Sequence: Synthetic oligonucleotide
  Antisense strand to SEQ ID NO: 1138902
uagaguacacauuaagaag

SEQ ID NO: 1138904 - RNA, 19 nt, Artificial Sequence
  Description of Artificial Sequence: Synthetic oligonucleotide
  Sense strand starting at position 1128 of SEQ ID NO: 916211
ggcagcuugcaggauaaga

SEQ ID NO: 1138905 - RNA, 19 nt, Artificial Sequence
  Description of Artificial Sequence: Synthetic oligonucleotide
  Antisense strand to SEQ ID NO: 1138904
ucuuauccugcaagcugcc

SEQ ID NO: 1138906 - RNA, 19 nt, Artificial Sequence
  Description of Artificial Sequence: Synthetic oligonucleotide
  Sense strand starting at position 1158 of SEQ ID NO: 916211
gagggagccgcugaaauaa

SEQ ID NO: 1138907 - RNA, 19 nt, Artificial Sequence
  Description of Artificial Sequence: Synthetic oligonucleotide
  Antisense strand to SEQ ID NO: 1138906
uuauuucagcggcucccuc

SEQ ID NO: 1138908 - RNA, 19 nt, Artificial Sequence
  Description of Artificial Sequence: Synthetic oligonucleotide
  Sense strand starting at position 1250 of SEQ ID NO: 916211
aaaugagcuugugucaaau

SEQ ID NO: 1138909 - RNA, 19 nt, Artificial Sequence
  Description of Artificial Sequence: Synthetic oligonucleotide
  Antisense strand to SEQ ID NO: 1138908
auuugacacaagcucauuu

SEQ ID NO: 1138910 - RNA, 19 nt, Artificial Sequence
  Description of Artificial Sequence: Synthetic oligonucleotide
  Sense strand starting at position 1319 of SEQ ID NO: 916211
ccagacuaaugguuccuaa

SEQ ID NO: 1138911 - RNA, 19 nt, Artificial Sequence
  Description of Artificial Sequence: Synthetic oligonucleotide
  Antisense strand to SEQ ID NO: 1138910
uuaggaaccauuagucugg

SEQ ID NO: 1138912 - RNA, 19 nt, Artificial Sequence
  Description of Artificial Sequence: Synthetic oligonucleotide
  Sense strand starting at position 1339 of SEQ ID NO: 916211
ggucuuacaaggcaucaga

SEQ ID NO: 1138913 - RNA, 19 nt, Artificial Sequence
  Description of Artificial Sequence: Synthetic oligonucleotide
  Antisense strand to SEQ ID NO: 1138912
ucugaugccuuguaagacc

SEQ ID NO: 1138914 - RNA, 19 nt, Artificial Sequence
  Description of Artificial Sequence: Synthetic oligonucleotide
  Sense strand starting at position 1361 of SEQ ID NO: 916211
gccaguaaugcugaaauag

SEQ ID NO: 1138915 - RNA, 19 nt, Artificial Sequence
  Description of Artificial Sequence: Synthetic oligonucleotide
  Antisense strand to SEQ ID NO: 1138914
cuauuucagcauuacuggc

SEQ ID NO: 1138916 - RNA, 19 nt, Artificial Sequence
  Description of Artificial Sequence: Synthetic oligonucleotide
  Sense strand starting at position 1474 of SEQ ID NO: 916211
ggaaucaucuaagugguga

SEQ ID NO: 1138917 - RNA, 19 nt, Artificial Sequence
  Description of Artificial Sequence: Synthetic oligonucleotide
  Antisense strand to SEQ ID NO: 1138916
ucaccacuuagaugauucc

SEQ ID NO: 1138918 - RNA, 19 nt, Artificial Sequence
  Description of Artificial Sequence: Synthetic oligonucleotide
  Sense strand starting at position 2195 of SEQ ID NO: 916211
ccuaguugaugauauuuga

SEQ ID NO: 1138919 - RNA, 19 nt, Artificial Sequence
  Description of Artificial Sequence: Synthetic oligonucleotide
  Antisense strand to SEQ ID NO: 1138918
ucaaauaucaucaacuagg

SEQ ID NO: 1138920 - RNA, 19 nt, Artificial Sequence
  Description of Artificial Sequence: Synthetic oligonucleotide
  Sense strand starting at position 2214 of SEQ ID NO: 916211
uuugaccuaucuuuauagu

SEQ ID NO: 1138921 - RNA, 19 nt, Artificial Sequence
  Description of Artificial Sequence: Synthetic oligonucleotide
  Antisense strand to SEQ ID NO: 1138920
acuauaaagauaggucaaa

SEQ ID NO: 1138922 - RNA, 19 nt, Artificial Sequence
  Description of Artificial Sequence: Synthetic oligonucleotide
  Sense strand starting at position 2215 of SEQ ID NO: 916211
uugaccuaucuuuauaguu

SEQ ID NO: 1138923 - RNA, 19 nt, Artificial Sequence
  Description of Artificial Sequence: Synthetic oligonucleotide
  Antisense strand to SEQ ID NO: 1138922
aacuauaaagauaggucaa

SEQ ID NO: 1138924 - RNA, 19 nt, Artificial Sequence
  Description of Artificial Sequence: Synthetic oligonucleotide
  Sense strand starting at position 2298 of SEQ ID NO: 916211
uauccagggcuguaacauu

SEQ ID NO: 1138925 - RNA, 19 nt, Artificial Sequence
  Description of Artificial Sequence: Synthetic oligonucleotide
  Antisense strand to SEQ ID NO: 1138924
aauguuacagcccuggaua

SEQ ID NO: 1138926 - RNA, 19 nt, Artificial Sequence
  Description of Artificial Sequence: Synthetic oligonucleotide
  Sense strand starting at position 2498 of SEQ ID NO: 916211
acccauauugggcagaagu

SEQ ID NO: 1138927 - RNA, 19 nt, Artificial Sequence
  Description of Artificial Sequence: Synthetic oligonucleotide
  Antisense strand to SEQ ID NO: 1138926
acuucugcccaauaugggu

SEQ ID NO: 1138928 - RNA, 19 nt, Artificial Sequence
  Description of Artificial Sequence: Synthetic oligonucleotide
  Sense strand starting at position 2607 of SEQ ID NO: 916211
ucaagucacccuugagauc

SEQ ID NO: 1138929 - RNA, 19 nt, Artificial Sequence
  Description of Artificial Sequence: Synthetic oligonucleotide
  Antisense strand to SEQ ID NO: 1138928
gaucucaagggugacuuga

SEQ ID NO: 1138930 - RNA, 19 nt, Artificial Sequence
  Description of Artificial Sequence: Synthetic oligonucleotide
  Sense strand starting at position 2730 of SEQ ID NO: 916211
gagcuuuaagauuguggag

SEQ ID NO: 1138931 - RNA, 19 nt, Artificial Sequence
  Description of Artificial Sequence: Synthetic oligonucleotide
  Antisense strand to SEQ ID NO: 1138930
cuccacaaucuuaaagcuc

SEQ ID NO: 1138932 - RNA, 19 nt, Artificial Sequence
  Description of Artificial Sequence: Synthetic oligonucleotide
  Sense strand starting at position 2868 of SEQ ID NO: 916211
uggcaugugacugauauua

SEQ ID NO: 1138933 - RNA, 19 nt, Artificial Sequence
  Description of Artificial Sequence: Synthetic oligonucleotide
  Antisense strand to SEQ ID NO: 1138932
uaauaucagucacaugcca

SEQ ID NO: 1138934 - RNA, 19 nt, Artificial Sequence
  Description of Artificial Sequence: Synthetic oligonucleotide
  Sense strand starting at position 2924 of SEQ ID NO: 916211
ggauaaaugaccugcccga

SEQ ID NO: 1138935 - RNA, 19 nt, Artificial Sequence
  Description of Artificial Sequence: Synthetic oligonucleotide
  Antisense strand to SEQ ID NO: 1138934
ucgggcaggucauuuaucc

SEQ ID NO: 1138936 - RNA, 19 nt, Artificial Sequence
  Description of Artificial Sequence: Synthetic oligonucleotide
  Sense strand starting at position 3124 of SEQ ID NO: 916211
aaacuugagugucuuugau

SEQ ID NO: 1138937 - RNA, 19 nt, Artificial Sequence
  Description of Artificial Sequence: Synthetic oligonucleotide
  Antisense strand to SEQ ID NO: 1138936
aucaaagacacucaaguuu

SEQ ID NO: 1138938 - RNA, 19 nt, Artificial Sequence
  Description of Artificial Sequence: Synthetic oligonucleotide
  Sense strand starting at position 3132 of SEQ ID NO: 916211
gugucuuugauguacauga

SEQ ID NO: 1138939 - RNA, 19 nt, Artificial Sequence
  Description of Artificial Sequence: Synthetic oligonucleotide
  Antisense strand to SEQ ID NO: 1138938
ucauguacaucaaagacac

SEQ ID NO: 1138940 - RNA, 19 nt, Artificial Sequence
  Description of Artificial Sequence: Synthetic oligonucleotide
  Sense strand starting at position 3134 of SEQ ID NO: 916211
gucuuugauguacaugaga

SEQ ID NO: 1138941 - RNA, 19 nt, Artificial Sequence
  Description of Artificial Sequence: Synthetic oligonucleotide
  Antisense strand to SEQ ID NO: 1138940
ucucauguacaucaaagac

SEQ ID NO: 1138942 - RNA, 19 nt, Artificial Sequence
  Description of Artificial Sequence: Synthetic oligonucleotide
  Sense strand starting at position 3221 of SEQ ID NO: 916211
ccaggaaguuauuccuaca

SEQ ID NO: 1138943 - RNA, 19 nt, Artificial Sequence
  Description of Artificial Sequence: Synthetic oligonucleotide
  Antisense strand to SEQ ID NO: 1138942
uguaggaauaacuuccugg

SEQ ID NO: 1138944 - RNA, 19 nt, Artificial Sequence
  Description of Artificial Sequence: Synthetic oligonucleotide
  Sense strand starting at position 3276 of SEQ ID NO: 916211
uuacaugucuaacugaagu

SEQ ID NO: 1138945 - RNA, 19 nt, Artificial Sequence
  Description of Artificial Sequence: Synthetic oligonucleotide
  Antisense strand to SEQ ID NO: 1138944
acuucaguuagacauguaa

SEQ ID NO: 1138946 - RNA, 19 nt, Artificial Sequence
  Description of Artificial Sequence: Synthetic oligonucleotide
  Sense strand starting at position 3282 of SEQ ID NO: 916211
gucuaacugaagugagaaa

SEQ ID NO: 1138947 - RNA, 19 nt, Artificial Sequence
  Description of Artificial Sequence: Synthetic oligonucleotide
  Antisense strand to SEQ ID NO: 1138946
uuucucacuucaguuagac

SEQ ID NO: 1138948 - RNA, 19 nt, Artificial Sequence
  Description of Artificial Sequence: Synthetic oligonucleotide
  Sense strand starting at position 3369 of SEQ ID NO: 916211
cgucucugagggugaauaa

SEQ ID NO: 1138949 - RNA, 19 nt, Artificial Sequence
  Description of Artificial Sequence: Synthetic oligonucleotide
  Antisense strand to SEQ ID NO: 1138948
uuauucacccucagagacg

SEQ ID NO: 1138950 - RNA, 19 nt, Artificial Sequence
  Description of Artificial Sequence: Synthetic oligonucleotide
  Sense strand starting at position 3458 of SEQ ID NO: 916211
ccuuaaucuguuggugaga

SEQ ID NO: 1138951 - RNA, 19 nt, Artificial Sequence
  Description of Artificial Sequence: Synthetic oligonucleotide
  Antisense strand to SEQ ID NO: 1138950
ucucaccaacagauuaagg

SEQ ID NO: 1138952 - RNA, 19 nt, Artificial Sequence
  Description of Artificial Sequence: Synthetic oligonucleotide
  Sense strand starting at position 3461 of SEQ ID NO: 916211
uaaucuguuggugagacau

SEQ ID NO: 1138953 - RNA, 19 nt, Artificial Sequence
  Description of Artificial Sequence: Synthetic oligonucleotide
  Antisense strand to SEQ ID NO: 1138952
augucucaccaacagauua

SEQ ID NO: 1138954 - RNA, 19 nt, Artificial Sequence
  Description of Artificial Sequence: Synthetic oligonucleotide
  Sense strand starting at position 3518 of SEQ ID NO: 916211
gggugaugacaguggcaua

SEQ ID NO: 1138955 - RNA, 19 nt, Artificial Sequence
  Description of Artificial Sequence: Synthetic oligonucleotide
  Antisense strand to SEQ ID NO: 1138954
uaugccacugucaucaccc

SEQ ID NO: 1138956 - RNA, 19 nt, Artificial Sequence
  Description of Artificial Sequence: Synthetic oligonucleotide
  Sense strand starting at position 3548 of SEQ ID NO: 916211
gaguguccugagcaguaga

SEQ ID NO: 1138957 - RNA, 19 nt, Artificial Sequence
  Description of Artificial Sequence: Synthetic oligonucleotide
  Antisense strand to SEQ ID NO: 1138956
ucuacugcucaggacacuc

SEQ ID NO: 1138958 - RNA, 19 nt, Artificial Sequence
  Description of Artificial Sequence: Synthetic oligonucleotide
  Sense strand starting at position 3858 of SEQ ID NO: 916211
cugugaagcccagaugucu

SEQ ID NO: 1138959 - RNA, 19 nt, Artificial Sequence
  Description of Artificial Sequence: Synthetic oligonucleotide
  Antisense strand to SEQ ID NO: 1138958
agacaucugggcuucacag

SEQ ID NO: 1138960 - RNA, 19 nt, Artificial Sequence
  Description of Artificial Sequence: Synthetic oligonucleotide
  Sense strand starting at position 86 of SEQ ID NO: 916212
auuacacguucccuuagaa

SEQ ID NO: 1138961 - RNA, 19 nt, Artificial Sequence
  Description of Artificial Sequence: Synthetic oligonucleotide
  Antisense strand to SEQ ID NO: 1138960
uucuaagggaacguguaau

SEQ ID NO: 1138962 - RNA, 19 nt, Artificial Sequence
  Description of Artificial Sequence: Synthetic oligonucleotide
  Sense strand starting at position 99 of SEQ ID NO: 916212
uuagaauuguggcugaaua

SEQ ID NO: 1138963 - RNA, 19 nt, Artificial Sequence
  Description of Artificial Sequence: Synthetic oligonucleotide
  Antisense strand to SEQ ID NO: 1138962
uauucagccacaauucuaa

SEQ ID NO: 1138964 - RNA, 19 nt, Artificial Sequence
  Description of Artificial Sequence: Synthetic oligonucleotide
  Sense strand starting at position 100 of SEQ ID NO: 916212
uagaauuguggcugaauau

SEQ ID NO: 1138965 - RNA, 19 nt, Artificial Sequence
  Description of Artificial Sequence: Synthetic oligonucleotide
  Antisense strand to SEQ ID NO: 1138964
auauucagccacaauucua

SEQ ID NO: 1138966 - RNA, 19 nt, Artificial Sequence
  Description of Artificial Sequence: Synthetic oligonucleotide
  Sense strand starting at position 201 of SEQ ID NO: 916212
aggcuaaggagucaguaga

SEQ ID NO: 1138967 - RNA, 19 nt, Artificial Sequence
  Description of Artificial Sequence: Synthetic oligonucleotide
  Antisense strand to SEQ ID NO: 1138966
ucuacugacuccuuagccu

SEQ ID NO: 1138968 - RNA, 19 nt, Artificial Sequence
  Description of Artificial Sequence: Synthetic oligonucleotide
  Sense strand starting at position 405 of SEQ ID NO: 916212
aguacaggguuucucauaa

SEQ ID NO: 1138969 - RNA, 19 nt, Artificial Sequence
  Description of Artificial Sequence: Synthetic oligonucleotide
  Antisense strand to SEQ ID NO: 1138968
uuaugagaaacccuguacu

SEQ ID NO: 1138970 - RNA, 19 nt, Artificial Sequence
  Description of Artificial Sequence: Synthetic oligonucleotide
  Sense strand starting at position 500 of SEQ ID NO: 916212
gaacucuuacggugaauuc

SEQ ID NO: 1138971 - RNA, 19 nt, Artificial Sequence
  Description of Artificial Sequence: Synthetic oligonucleotide
  Antisense strand to SEQ ID NO: 1138970
gaauucaccguaagaguuc

SEQ ID NO: 1138972 - RNA, 19 nt, Artificial Sequence
  Description of Artificial Sequence: Synthetic oligonucleotide
  Sense strand starting at position 507 of SEQ ID NO: 916212
uacggugaauuccuuagaa

SEQ ID NO: 1138973 - RNA, 19 nt, Artificial Sequence
  Description of Artificial Sequence: Synthetic oligonucleotide
  Antisense strand to SEQ ID NO: 1138972
uucuaaggaauucaccgua

SEQ ID NO: 1138974 - RNA, 19 nt, Artificial Sequence
  Description of Artificial Sequence: Synthetic oligonucleotide
  Sense strand starting at position 509 of SEQ ID NO: 916212
cggugaauuccuuagaacu

SEQ ID NO: 1138975 - RNA, 19 nt, Artificial Sequence
  Description of Artificial Sequence: Synthetic oligonucleotide
  Antisense strand to SEQ ID NO: 1138974
aguucuaaggaauucaccg

SEQ ID NO: 1138976 - RNA, 19 nt, Artificial Sequence
  Description of Artificial Sequence: Synthetic oligonucleotide
  Sense strand starting at position 559 of SEQ ID NO: 916212
auaaauaaugcuugcuaug

SEQ ID NO: 1138977 - RNA, 19 nt, Artificial Sequence
  Description of Artificial Sequence: Synthetic oligonucleotide
  Antisense strand to SEQ ID NO: 1138976
cauagcaagcauuauuuau

SEQ ID NO: 1138978 - RNA, 19 nt, Artificial Sequence
  Description of Artificial Sequence: Synthetic oligonucleotide
  Sense strand starting at position 568 of SEQ ID NO: 916212
gcuugcuaugugccaagua

SEQ ID NO: 1138979 - RNA, 19 nt, Artificial Sequence
  Description of Artificial Sequence: Synthetic oligonucleotide
  Antisense strand to SEQ ID NO: 1138978
uacuuggcacauagcaagc

SEQ ID NO: 1138980 - RNA, 19 nt, Artificial Sequence
  Description of Artificial Sequence: Synthetic oligonucleotide
  Sense strand starting at position 713 of SEQ ID NO: 916212
ggagcacagcgguaucaau

SEQ ID NO: 1138981 - RNA, 19 nt, Artificial Sequence
  Description of Artificial Sequence: Synthetic oligonucleotide
  Antisense strand to SEQ ID NO: 1138980
auugauaccgcugugcucc

SEQ ID NO: 1138982 - RNA, 19 nt, Artificial Sequence
  Description of Artificial Sequence: Synthetic oligonucleotide
  Sense strand starting at position 867 of SEQ ID NO: 916212
ggaaauagccaguauaguc

SEQ ID NO: 1138983 - RNA, 19 nt, Artificial Sequence
  Description of Artificial Sequence: Synthetic oligonucleotide
  Antisense strand to SEQ ID NO: 1138982
gacuauacuggcuauuucc

SEQ ID NO: 1138984 - RNA, 19 nt, Artificial Sequence
  Description of Artificial Sequence: Synthetic oligonucleotide
  Sense strand starting at position 884 of SEQ ID NO: 916212
ucuuguaugguaggauauu

SEQ ID NO: 1138985 - RNA, 19 nt, Artificial Sequence
  Description of Artificial Sequence: Synthetic oligonucleotide
  Antisense strand to SEQ ID NO: 1138984
aauauccuaccauacaaga

SEQ ID NO: 1138986 - RNA, 19 nt, Artificial Sequence
  Description of Artificial Sequence: Synthetic oligonucleotide
  Sense strand starting at position 953 of SEQ ID NO: 916212
gaaugaugaugugcuuaac

SEQ ID NO: 1138987 - RNA, 19 nt, Artificial Sequence
  Description of Artificial Sequence: Synthetic oligonucleotide
  Antisense strand to SEQ ID NO: 1138986
guuaagcacaucaucauuc

SEQ ID NO: 1138988 - RNA, 19 nt, Artificial Sequence
  Description of Artificial Sequence: Synthetic oligonucleotide
  Sense strand starting at position 956 of SEQ ID NO: 916212
ugaugaugugcuuaacaau

SEQ ID NO: 1138989 - RNA, 19 nt, Artificial Sequence
  Description of Artificial Sequence: Synthetic oligonucleotide
  Antisense strand to SEQ ID NO: 1138988
auuguuaagcacaucauca

SEQ ID NO: 1138990 - RNA, 19 nt, Artificial Sequence
  Description of Artificial Sequence: Synthetic oligonucleotide
  Sense strand starting at position 991 of SEQ ID NO: 916212
cagcaauacgguuacuaaa

SEQ ID NO: 1138991 - RNA, 19 nt, Artificial Sequence
  Description of Artificial Sequence: Synthetic oligonucleotide
  Antisense strand to SEQ ID NO: 1138990
uuuaguaaccguauugcug

SEQ ID NO: 1138992 - RNA, 19 nt, Artificial Sequence
  Description of Artificial Sequence: Synthetic oligonucleotide
  Sense strand starting at position 1147 of SEQ ID NO: 916212
caguguuaaguggaaauga

SEQ ID NO: 1138993 - RNA, 19 nt, Artificial Sequence
  Description of Artificial Sequence: Synthetic oligonucleotide
  Antisense strand to SEQ ID NO: 1138992
ucauuuccacuuaacacug

SEQ ID NO: 1138994 - RNA, 19 nt, Artificial Sequence
  Description of Artificial Sequence: Synthetic oligonucleotide
  Sense strand starting at position 1171 of SEQ ID NO: 916212
caaugaugauuccugguuu

SEQ ID NO: 1138995 - RNA, 19 nt, Artificial Sequence
  Description of Artificial Sequence: Synthetic oligonucleotide
  Antisense strand to SEQ ID NO: 1138994
aaaccaggaaucaucauug

SEQ ID NO: 1138996 - RNA, 19 nt, Artificial Sequence
  Description of Artificial Sequence: Synthetic oligonucleotide
  Sense strand starting at position 2038 of SEQ ID NO: 916212
ucgcaaagucucgcgaguu

SEQ ID NO: 1138997 - RNA, 19 nt, Artificial Sequence
  Description of Artificial Sequence: Synthetic oligonucleotide
  Antisense strand to SEQ ID NO: 1138996
aacucgcgagacuuugcga

SEQ ID NO: 1138998 - RNA, 19 nt, Artificial Sequence
  Description of Artificial Sequence: Synthetic oligonucleotide
  Sense strand starting at position 2387 of SEQ ID NO: 916212
gcgcuccugcucuuaggaa

SEQ ID NO: 1138999 - RNA, 19 nt, Artificial Sequence
  Description of Artificial Sequence: Synthetic oligonucleotide
  Antisense strand to SEQ ID NO: 1138998
uuccuaagagcaggagcgc

SEQ ID NO: 1139000 - RNA, 19 nt, Artificial Sequence
  Description of Artificial Sequence: Synthetic oligonucleotide
  Sense strand starting at position 2596 of SEQ ID NO: 916212
ugaggucuucccuauccac

SEQ ID NO: 1139001 - RNA, 19 nt, Artificial Sequence
  Description of Artificial Sequence: Synthetic oligonucleotide
  Antisense strand to SEQ ID NO: 1139000
guggauagggaagaccuca

SEQ ID NO: 1139002 - RNA, 19 nt, Artificial Sequence
  Description of Artificial Sequence: Synthetic oligonucleotide
  Sense strand starting at position 2656 of SEQ ID NO: 916212
ucuagaagguuucucaaag

SEQ ID NO: 1139003 - RNA, 19 nt, Artificial Sequence
  Description of Artificial Sequence: Synthetic oligonucleotide
  Antisense strand to SEQ ID NO: 1139002
cuuugagaaaccuucuaga

SEQ ID NO: 1139004 - RNA, 19 nt, Artificial Sequence
  Description of Artificial Sequence: Synthetic oligonucleotide
  Sense strand starting at position 2657 of SEQ ID NO: 916212
cuagaagguuucucaaaga

SEQ ID NO: 1139005 - RNA, 19 nt, Artificial Sequence
  Description of Artificial Sequence: Synthetic oligonucleotide
  Antisense strand to SEQ ID NO: 1139004
ucuuugagaaaccuucuag

SEQ ID NO: 1139006 - RNA, 19 nt, Artificial Sequence
  Description of Artificial Sequence: Synthetic oligonucleotide
  Sense strand starting at position 2936 of SEQ ID NO: 916212
ccugguaaauuacugugau

SEQ ID NO: 1139007 - RNA, 19 nt, Artificial Sequence
  Description of Artificial Sequence: Synthetic oligonucleotide
  Antisense strand to SEQ ID NO: 1139006
aucacaguaauuuaccagg

SEQ ID NO: 1139008 - RNA, 19 nt, Artificial Sequence
  Description of Artificial Sequence: Synthetic oligonucleotide
  Sense strand starting at position 3021 of SEQ ID NO: 916212
guuaucuuaggagauguuu

SEQ ID NO: 1139009 - RNA, 19 nt, Artificial Sequence
  Description of Artificial Sequence: Synthetic oligonucleotide
  Antisense strand to SEQ ID NO: 1139008
aaacaucuccuaagauaac

SEQ ID NO: 1139010 - RNA, 19 nt, Artificial Sequence
  Description of Artificial Sequence: Synthetic oligonucleotide
  Sense strand starting at position 3027 of SEQ ID NO: 916212
uuaggagauguuuaucuuu

SEQ ID NO: 1139011 - RNA, 19 nt, Artificial Sequence
  Description of Artificial Sequence: Synthetic oligonucleotide
  Antisense strand to SEQ ID NO: 1139010
aaagauaaacaucuccuaa

SEQ ID NO: 1139012 - RNA, 19 nt, Artificial Sequence
  Description of Artificial Sequence: Synthetic oligonucleotide
  Sense strand starting at position 3029 of SEQ ID NO: 916212
aggagauguuuaucuuugu

SEQ ID NO: 1139013 - RNA, 19 nt, Artificial Sequence
  Description of Artificial Sequence: Synthetic oligonucleotide
  Antisense strand to SEQ ID NO: 1139012
acaaagauaaacaucuccu

SEQ ID NO: 1139014 - RNA, 19 nt, Artificial Sequence
  Description of Artificial Sequence: Synthetic oligonucleotide
  Sense strand starting at position 3161 of SEQ ID NO: 916212
uuuauaugugacuaauguc

SEQ ID NO: 1139015 - RNA, 19 nt, Artificial Sequence
  Description of Artificial Sequence: Synthetic oligonucleotide
  Antisense strand to SEQ ID NO: 1139014
gacauuagucacauauaaa

SEQ ID NO: 1139016 - RNA, 19 nt, Artificial Sequence
  Description of Artificial Sequence: Synthetic oligonucleotide
  Sense strand starting at position 3177 of SEQ ID NO: 916212
gucaauuagcaaggaucau

SEQ ID NO: 1139017 - RNA, 19 nt, Artificial Sequence
  Description of Artificial Sequence: Synthetic oligonucleotide
  Antisense strand to SEQ ID NO: 1139016
augauccuugcuaauugac

SEQ ID NO: 1139018 - RNA, 19 nt, Artificial Sequence
  Description of Artificial Sequence: Synthetic oligonucleotide
  Sense strand starting at position 3232 of SEQ ID NO: 916212
cguauauguaagggaauca

SEQ ID NO: 1139019 - RNA, 19 nt, Artificial Sequence
  Description of Artificial Sequence: Synthetic oligonucleotide
  Antisense strand to SEQ ID NO: 1139018
ugauucccuuacauauacg

SEQ ID NO: 1139020 - RNA, 19 nt, Artificial Sequence
  Description of Artificial Sequence: Synthetic oligonucleotide
  Sense strand starting at position 3361 of SEQ ID NO: 916212
ccuaauaugguguauugau

SEQ ID NO: 1139021 - RNA, 19 nt, Artificial Sequence
  Description of Artificial Sequence: Synthetic oligonucleotide
  Antisense strand to SEQ ID NO: 1139020
aucaauacaccauauuagg

SEQ ID NO: 1139022 - RNA, 19 nt, Artificial Sequence
  Description of Artificial Sequence: Synthetic oligonucleotide
  Sense strand starting at position 3510 of SEQ ID NO: 916212
guaagauguuauguacaaa

SEQ ID NO: 1139023 - RNA, 19 nt, Artificial Sequence
  Description of Artificial Sequence: Synthetic oligonucleotide
  Antisense strand to SEQ ID NO: 1139022
uuuguacauaacaucuuac

SEQ ID NO: 1139024 - RNA, 19 nt, Artificial Sequence
  Description of Artificial Sequence: Synthetic oligonucleotide
  Sense strand starting at position 3621 of SEQ ID NO: 916212
ccuuauauggcagaaucuu

SEQ ID NO: 1139025 - RNA, 19 nt, Artificial Sequence
  Description of Artificial Sequence: Synthetic oligonucleotide
  Antisense strand to SEQ ID NO: 1139024
aagauucugccauauaagg

SEQ ID NO: 1139026 - RNA, 19 nt, Artificial Sequence
  Description of Artificial Sequence: Synthetic oligonucleotide
  Sense strand starting at position 3708 of SEQ ID NO: 916212
auaucuaaaucauugugga

SEQ ID NO: 1139027 - RNA, 19 nt, Artificial Sequence
  Description of Artificial Sequence: Synthetic oligonucleotide
  Antisense strand to SEQ ID NO: 1139026
uccacaaugauuuagauau

SEQ ID NO: 1139028 - RNA, 19 nt, Artificial Sequence
  Description of Artificial Sequence: Synthetic oligonucleotide
  Sense strand starting at position 3721 of SEQ ID NO: 916212
uguggacuugcucaguaga

SEQ ID NO: 1139029 - RNA, 19 nt, Artificial Sequence
  Description of Artificial Sequence: Synthetic oligonucleotide
  Antisense strand to SEQ ID NO: 1139028
ucuacugagcaaguccaca

SEQ ID NO: 1139030 - RNA, 19 nt, Artificial Sequence
  Description of Artificial Sequence: Synthetic oligonucleotide
  Sense strand starting at position 3723 of SEQ ID NO: 916212
uggacuugcucaguagaau

SEQ ID NO: 1139031 - RNA, 19 nt, Artificial Sequence
  Description of Artificial Sequence: Synthetic oligonucleotide
  Antisense strand to SEQ ID NO: 1139030
auucuacugagcaagucca

SEQ ID NO: 1139032 - RNA, 19 nt, Artificial Sequence
  Description of Artificial Sequence: Synthetic oligonucleotide
  Sense strand starting at position 3724 of SEQ ID NO: 916212
ggacuugcucaguagaauc

SEQ ID NO: 1139033 - RNA, 19 nt, Artificial Sequence
  Description of Artificial Sequence: Synthetic oligonucleotide
  Antisense strand to SEQ ID NO: 1139032
gauucuacugagcaagucc

SEQ ID NO: 1139034 - RNA, 19 nt, Artificial Sequence
  Description of Artificial Sequence: Synthetic oligonucleotide
  Sense strand starting at position 3830 of SEQ ID NO: 916212
ggauguacuuaacugcaua

SEQ ID NO: 1139035 - RNA, 19 nt, Artificial Sequence
  Description of Artificial Sequence: Synthetic oligonucleotide
  Antisense strand to SEQ ID NO: 1139034
uaugcaguuaaguacaucc

SEQ ID NO: 1139036 - RNA, 19 nt, Artificial Sequence
  Description of Artificial Sequence: Synthetic oligonucleotide
  Sense strand starting at position 3876 of SEQ ID NO: 916212
gauaaugacuguguguuua

SEQ ID NO: 1139037 - RNA, 19 nt, Artificial Sequence
  Description of Artificial Sequence: Synthetic oligonucleotide
  Antisense strand to SEQ ID NO: 1139036
uaaacacacagucauuauc

SEQ ID NO: 1139038 - RNA, 19 nt, Artificial Sequence
  Description of Artificial Sequence: Synthetic oligonucleotide
  Sense strand starting at position 3922 of SEQ ID NO: 916212
gcccuuugggauuaauaua

SEQ ID NO: 1139039 - RNA, 19 nt, Artificial Sequence
  Description of Artificial Sequence: Synthetic oligonucleotide
  Antisense strand to SEQ ID NO: 1139038
uauauuaaucccaaagggc

SEQ ID NO: 1139040 - RNA, 19 nt, Artificial Sequence
  Description of Artificial Sequence: Synthetic oligonucleotide
  Sense strand starting at position 371 of SEQ ID NO: 916213
ccaagagucgcaggagaaa

SEQ ID NO: 1139041 - RNA, 19 nt, Artificial Sequence
  Description of Artificial Sequence: Synthetic oligonucleotide
  Antisense strand to SEQ ID NO: 1139040
uuucuccugcgacucuugg

SEQ ID NO: 1139042 - RNA, 19 nt, Artificial Sequence
  Description of Artificial Sequence: Synthetic oligonucleotide
  Sense strand starting at position 434 of SEQ ID NO: 916213
uuuggagacuucugcucuu

SEQ ID NO: 1139043 - RNA, 19 nt, Artificial Sequence
  Description of Artificial Sequence: Synthetic oligonucleotide
  Antisense strand to SEQ ID NO: 1139042
aagagcagaagucuccaaa

SEQ ID NO: 1139044 - RNA, 19 nt, Artificial Sequence
  Description of Artificial Sequence: Synthetic oligonucleotide
  Sense strand starting at position 488 of SEQ ID NO: 916213
aggacuggaucucacuaga

SEQ ID NO: 1139045 - RNA, 19 nt, Artificial Sequence
  Description of Artificial Sequence: Synthetic oligonucleotide
  Antisense strand to SEQ ID NO: 1139044
ucuagugagauccaguccu

SEQ ID NO: 1139046 - RNA, 19 nt, Artificial Sequence
  Description of Artificial Sequence: Synthetic oligonucleotide
  Sense strand starting at position 537 of SEQ ID NO: 916213
ccuccugggcaguaugaau

SEQ ID NO: 1139047 - RNA, 19 nt, Artificial Sequence
  Description of Artificial Sequence: Synthetic oligonucleotide
  Antisense strand to SEQ ID NO: 1139046
auucauacugcccaggagg

SEQ ID NO: 1139048 - RNA, 19 nt, Artificial Sequence
  Description of Artificial Sequence: Synthetic oligonucleotide
  Sense strand starting at position 564 of SEQ ID NO: 916213
acugcugugguccaacaau

SEQ ID NO: 1139049 - RNA, 19 nt, Artificial Sequence
  Description of Artificial Sequence: Synthetic oligonucleotide
  Antisense strand to SEQ ID NO: 1139048
auuguuggaccacagcagu

SEQ ID NO: 1139050 - RNA, 19 nt, Artificial Sequence
  Description of Artificial Sequence: Synthetic oligonucleotide
  Sense strand starting at position 715 of SEQ ID NO: 916213
ggugaagucccuugccgaa

SEQ ID NO: 1139051 - RNA, 19 nt, Artificial Sequence
  Description of Artificial Sequence: Synthetic oligonucleotide
  Antisense strand to SEQ ID NO: 1139050
uucggcaagggacuucacc

SEQ ID NO: 1139052 - RNA, 19 nt, Artificial Sequence
  Description of Artificial Sequence: Synthetic oligonucleotide
  Sense strand starting at position 749 of SEQ ID NO: 916213
aagugacagccuuaggacu

SEQ ID NO: 1139053 - RNA, 19 nt, Artificial Sequence
  Description of Artificial Sequence: Synthetic oligonucleotide
  Antisense strand to SEQ ID NO: 1139052
aguccuaaggcugucacuu

SEQ ID NO: 1139054 - RNA, 19 nt, Artificial Sequence
  Description of Artificial Sequence: Synthetic oligonucleotide
  Sense strand starting at position 807 of SEQ ID NO: 916213
cccauauaucccuguggcu

SEQ ID NO: 1139055 - RNA, 19 nt, Artificial Sequence
  Description of Artificial Sequence: Synthetic oligonucleotide
  Antisense strand to SEQ ID NO: 1139054
agccacagggauauauggg

SEQ ID NO: 1139056 - RNA, 19 nt, Artificial Sequence
  Description of Artificial Sequence: Synthetic oligonucleotide
  Sense strand starting at position 819 of SEQ ID NO: 916213
uguggcuucugaccacaaa

SEQ ID NO: 1139057 - RNA, 19 nt, Artificial Sequence
  Description of Artificial Sequence: Synthetic oligonucleotide
  Antisense strand to SEQ ID NO: 1139056
uuuguggucagaagccaca

SEQ ID NO: 1139058 - RNA, 19 nt, Artificial Sequence
  Description of Artificial Sequence: Synthetic oligonucleotide
  Sense strand starting at position 848 of SEQ ID NO: 916213
guggacauaugucaaacau

SEQ ID NO: 1139059 - RNA, 19 nt, Artificial Sequence
  Description of Artificial Sequence: Synthetic oligonucleotide
  Antisense strand to SEQ ID NO: 1139058
auguuugacauauguccac

SEQ ID NO: 1139060 - RNA, 19 nt, Artificial Sequence
  Description of Artificial Sequence: Synthetic oligonucleotide
  Sense strand starting at position 857 of SEQ ID NO: 916213
ugucaaacauuugggacau

SEQ ID NO: 1139061 - RNA, 19 nt, Artificial Sequence
  Description of Artificial Sequence: Synthetic oligonucleotide
  Antisense strand to SEQ ID NO: 1139060
augucccaaauguuugaca

SEQ ID NO: 1139062 - RNA, 19 nt, Artificial Sequence
  Description of Artificial Sequence: Synthetic oligonucleotide
  Sense strand starting at position 858 of SEQ ID NO: 916213
gucaaacauuugggacaua

SEQ ID NO: 1139063 - RNA, 19 nt, Artificial Sequence
  Description of Artificial Sequence: Synthetic oligonucleotide
  Antisense strand to SEQ ID NO: 1139062
uaugucccaaauguuugac

SEQ ID NO: 1139064 - RNA, 19 nt, Artificial Sequence
  Description of Artificial Sequence: Synthetic oligonucleotide
  Sense strand starting at position 859 of SEQ ID NO: 916213
ucaaacauuugggacauaa

SEQ ID NO: 1139065 - RNA, 19 nt, Artificial Sequence
  Description of Artificial Sequence: Synthetic oligonucleotide
  Antisense strand to SEQ ID NO: 1139064
uuaugucccaaauguuuga

SEQ ID NO: 1139066 - RNA, 19 nt, Artificial Sequence
  Description of Artificial Sequence: Synthetic oligonucleotide
  Sense strand starting at position 929 of SEQ ID NO: 916213
cuuugauaagcacaauugu

SEQ ID NO: 1139067 - RNA, 19 nt, Artificial Sequence
  Description of Artificial Sequence: Synthetic oligonucleotide
  Antisense strand to SEQ ID NO: 1139066
acaauugugcuuaucaaag

SEQ ID NO: 1139068 - RNA, 19 nt, Artificial Sequence
  Description of Artificial Sequence: Synthetic oligonucleotide
  Sense strand starting at position 1059 of SEQ ID NO: 916213
agaugagcaguucgagcau

SEQ ID NO: 1139069 - RNA, 19 nt, Artificial Sequence
  Description of Artificial Sequence: Synthetic oligonucleotide
  Antisense strand to SEQ ID NO: 1139068
augcucgaacugcucaucu

SEQ ID NO: 1139070 - RNA, 19 nt, Artificial Sequence
  Description of Artificial Sequence: Synthetic oligonucleotide
  Sense strand starting at position 1120 of SEQ ID NO: 916213
gugacaacauggcuuguau

SEQ ID NO: 1139071 - RNA, 19 nt, Artificial Sequence
  Description of Artificial Sequence: Synthetic oligonucleotide
  Antisense strand to SEQ ID NO: 1139070
auacaagccauguugucac

SEQ ID NO: 1139072 - RNA, 19 nt, Artificial Sequence
  Description of Artificial Sequence: Synthetic oligonucleotide
  Sense strand starting at position 1122 of SEQ ID NO: 916213
gacaacauggcuuguaugu

SEQ ID NO: 1139073 - RNA, 19 nt, Artificial Sequence
  Description of Artificial Sequence: Synthetic oligonucleotide
  Antisense strand to SEQ ID NO: 1139072
acauacaagccauguuguc

SEQ ID NO: 1139074 - RNA, 19 nt, Artificial Sequence
  Description of Artificial Sequence: Synthetic oligonucleotide
  Sense strand starting at position 1339 of SEQ ID NO: 916213
cagagagcauaaguuaaau

SEQ ID NO: 1139075 - RNA, 19 nt, Artificial Sequence
  Description of Artificial Sequence: Synthetic oligonucleotide
  Antisense strand to SEQ ID NO: 1139074
auuuaacuuaugcucucug

SEQ ID NO: 1139076 - RNA, 19 nt, Artificial Sequence
  Description of Artificial Sequence: Synthetic oligonucleotide
  Sense strand starting at position 1429 of SEQ ID NO: 916213
ggucucgauuucuaccuua

SEQ ID NO: 1139077 - RNA, 19 nt, Artificial Sequence
  Description of Artificial Sequence: Synthetic oligonucleotide
  Antisense strand to SEQ ID NO: 1139076
uaagguagaaaucgagacc

SEQ ID NO: 1139078 - RNA, 19 nt, Artificial Sequence
  Description of Artificial Sequence: Synthetic oligonucleotide
  Sense strand starting at position 1482 of SEQ ID NO: 916213
gguccugacccgggaauga

SEQ ID NO: 1139079 - RNA, 19 nt, Artificial Sequence
  Description of Artificial Sequence: Synthetic oligonucleotide
  Antisense strand to SEQ ID NO: 1139078
ucauucccgggucaggacc

SEQ ID NO: 1139080 - RNA, 19 nt, Artificial Sequence
  Description of Artificial Sequence: Synthetic oligonucleotide
  Sense strand starting at position 1493 of SEQ ID NO: 916213
gggaaugacugauggauca

SEQ ID NO: 1139081 - RNA, 19 nt, Artificial Sequence
  Description of Artificial Sequence: Synthetic oligonucleotide
  Antisense strand to SEQ ID NO: 1139080
ugauccaucagucauuccc

SEQ ID NO: 1139082 - RNA, 19 nt, Artificial Sequence
  Description of Artificial Sequence: Synthetic oligonucleotide
  Sense strand starting at position 1539 of SEQ ID NO: 916213
ggcccauugccacagaaca

SEQ ID NO: 1139083 - RNA, 19 nt, Artificial Sequence
  Description of Artificial Sequence: Synthetic oligonucleotide
  Antisense strand to SEQ ID NO: 1139082
uguucuguggcaaugggcc

SEQ ID NO: 1139084 - RNA, 19 nt, Artificial Sequence
  Description of Artificial Sequence: Synthetic oligonucleotide
  Sense strand starting at position 2162 of SEQ ID NO: 916213
gcguuugucucguucacgu

SEQ ID NO: 1139085 - RNA, 19 nt, Artificial Sequence
  Description of Artificial Sequence: Synthetic oligonucleotide
  Antisense strand to SEQ ID NO: 1139084
acgugaacgagacaaacgc

SEQ ID NO: 1139086 - RNA, 19 nt, Artificial Sequence
  Description of Artificial Sequence: Synthetic oligonucleotide
  Sense strand starting at position 2365 of SEQ ID NO: 916213
ccgguugugaaaugaagau

SEQ ID NO: 1139087 - RNA, 19 nt, Artificial Sequence
  Description of Artificial Sequence: Synthetic oligonucleotide
  Antisense strand to SEQ ID NO: 1139086
aucuucauuucacaaccgg

SEQ ID NO: 1139088 - RNA, 19 nt, Artificial Sequence
  Description of Artificial Sequence: Synthetic oligonucleotide
  Sense strand starting at position 2371 of SEQ ID NO: 916213
gugaaaugaagaugcugau

SEQ ID NO: 1139089 - RNA, 19 nt, Artificial Sequence
  Description of Artificial Sequence: Synthetic oligonucleotide
  Antisense strand to SEQ ID NO: 1139088
aucagcaucuucauuucac

SEQ ID NO: 1139090 - RNA, 19 nt, Artificial Sequence
  Description of Artificial Sequence: Synthetic oligonucleotide
  Sense strand starting at position 3186 of SEQ ID NO: 916213
cucgguucucccugacuuu

SEQ ID NO: 1139091 - RNA, 19 nt, Artificial Sequence
  Description of Artificial Sequence: Synthetic oligonucleotide
  Antisense strand to SEQ ID NO: 1139090
aaagucagggagaaccgag

SEQ ID NO: 1139092 - RNA, 19 nt, Artificial Sequence
  Description of Artificial Sequence: Synthetic oligonucleotide
  Sense strand starting at position 3418 of SEQ ID NO: 916213
ccauuuacucuccguguca

SEQ ID NO: 1139093 - RNA, 19 nt, Artificial Sequence
  Description of Artificial Sequence: Synthetic oligonucleotide
  Antisense strand to SEQ ID NO: 1139092
ugacacggagaguaaaugg

SEQ ID NO: 1139094 - RNA, 19 nt, Artificial Sequence
  Description of Artificial Sequence: Synthetic oligonucleotide
  Sense strand starting at position 3526 of SEQ ID NO: 916213
ugcagaaggcuugaugcuu

SEQ ID NO: 1139095 - RNA, 19 nt, Artificial Sequence
  Description of Artificial Sequence: Synthetic oligonucleotide
  Antisense strand to SEQ ID NO: 1139094
aagcaucaagccuucugca

SEQ ID NO: 1139096 - RNA, 19 nt, Artificial Sequence
  Description of Artificial Sequence: Synthetic oligonucleotide
  Sense strand starting at position 3569 of SEQ ID NO: 916213
uguauugcucuuggaggca

SEQ ID NO: 1139097 - RNA, 19 nt, Artificial Sequence
  Description of Artificial Sequence: Synthetic oligonucleotide
  Antisense strand to SEQ ID NO: 1139096
ugccuccaagagcaauaca

SEQ ID NO: 1139098 - RNA, 19 nt, Artificial Sequence
  Description of Artificial Sequence: Synthetic oligonucleotide
  Sense strand starting at position 3607 of SEQ ID NO: 916213
gggugucacuguugggagu

SEQ ID NO: 1139099 - RNA, 19 nt, Artificial Sequence
  Description of Artificial Sequence: Synthetic oligonucleotide
  Antisense strand to SEQ ID NO: 1139098
acucccaacagugacaccc

SEQ ID NO: 1139100 - RNA, 19 nt, Artificial Sequence
  Description of Artificial Sequence: Synthetic oligonucleotide
  Sense strand starting at position 3686 of SEQ ID NO: 916213
gugacuugaucuuguugau

SEQ ID NO: 1139101 - RNA, 19 nt, Artificial Sequence
  Description of Artificial Sequence: Synthetic oligonucleotide
  Antisense strand to SEQ ID NO: 1139100
aucaacaagaucaagucac

SEQ ID NO: 1139102 - RNA, 19 nt, Artificial Sequence
  Description of Artificial Sequence: Synthetic oligonucleotide
  Sense strand starting at position 3701 of SEQ ID NO: 916213
ugaucaucugucuaggcuu

SEQ ID NO: 1139103 - RNA, 19 nt, Artificial Sequence
  Description of Artificial Sequence: Synthetic oligonucleotide
  Antisense strand to SEQ ID NO: 1139102
aagccuagacagaugauca

SEQ ID NO: 1139104 - RNA, 19 nt, Artificial Sequence
  Description of Artificial Sequence: Synthetic oligonucleotide
  Sense strand starting at position 3730 of SEQ ID NO: 916213
ugugcacagugugaugaua

SEQ ID NO: 1139105 - RNA, 19 nt, Artificial Sequence
  Description of Artificial Sequence: Synthetic oligonucleotide
  Antisense strand to SEQ ID NO: 1139104
uaucaucacacugugcaca

SEQ ID NO: 1139106 - RNA, 19 nt, Artificial Sequence
  Description of Artificial Sequence: Synthetic oligonucleotide
  Sense strand starting at position 3732 of SEQ ID NO: 916213
ugcacagugugaugauauu

SEQ ID NO: 1139107 - RNA, 19 nt, Artificial Sequence
  Description of Artificial Sequence: Synthetic oligonucleotide
  Antisense strand to SEQ ID NO: 1139106
aauaucaucacacugugca

SEQ ID NO: 1139108 - RNA, 19 nt, Artificial Sequence
  Description of Artificial Sequence: Synthetic oligonucleotide
  Sense strand starting at position 3738 of SEQ ID NO: 916213
gugugaugauauuaccacu

SEQ ID NO: 1139109 - RNA, 19 nt, Artificial Sequence
  Description of Artificial Sequence: Synthetic oligonucleotide
  Antisense strand to SEQ ID NO: 1139108
agugguaauaucaucacac

SEQ ID NO: 1139110 - RNA, 19 nt, Artificial Sequence
  Description of Artificial Sequence: Synthetic oligonucleotide
  Sense strand starting at position 28 of SEQ ID NO: 916214
uguuaaauauggugacuag

SEQ ID NO: 1139111 - RNA, 19 nt, Artificial Sequence
  Description of Artificial Sequence: Synthetic oligonucleotide
  Antisense strand to SEQ ID NO: 1139110
cuagucaccauauuuaaca

SEQ ID NO: 1139112 - RNA, 19 nt, Artificial Sequence
  Description of Artificial Sequence: Synthetic oligonucleotide
  Sense strand starting at position 31 of SEQ ID NO: 916214
uaaauauggugacuagagu

SEQ ID NO: 1139113 - RNA, 19 nt, Artificial Sequence
  Description of Artificial Sequence: Synthetic oligonucleotide
  Antisense strand to SEQ ID NO: 1139112
acucuagucaccauauuua

SEQ ID NO: 1139114 - RNA, 19 nt, Artificial Sequence
  Description of Artificial Sequence: Synthetic oligonucleotide
  Sense strand starting at position 59 of SEQ ID NO: 916214
ugcauuguauacuugaaga

SEQ ID NO: 1139115 - RNA, 19 nt, Artificial Sequence
  Description of Artificial Sequence: Synthetic oligonucleotide
  Antisense strand to SEQ ID NO: 1139114
ucuucaaguauacaaugca

SEQ ID NO: 1139116 - RNA, 19 nt, Artificial Sequence
  Description of Artificial Sequence: Synthetic oligonucleotide
  Sense strand starting at position 70 of SEQ ID NO: 916214
cuugaagauuacugagagu

SEQ ID NO: 1139117 - RNA, 19 nt, Artificial Sequence
  Description of Artificial Sequence: Synthetic oligonucleotide
  Antisense strand to SEQ ID NO: 1139116
acucucaguaaucuucaag

SEQ ID NO: 1139118 - RNA, 19 nt, Artificial Sequence
  Description of Artificial Sequence: Synthetic oligonucleotide
  Sense strand starting at position 73 of SEQ ID NO: 916214
gaagauuacugagaguagg

SEQ ID NO: 1139119 - RNA, 19 nt, Artificial Sequence
  Description of Artificial Sequence: Synthetic oligonucleotide
  Antisense strand to SEQ ID NO: 1139118
ccuacucucaguaaucuuc

SEQ ID NO: 1139120 - RNA, 19 nt, Artificial Sequence
  Description of Artificial Sequence: Synthetic oligonucleotide
  Sense strand starting at position 415 of SEQ ID NO: 916214
agguguucuuaccacaaau

SEQ ID NO: 1139121 - RNA, 19 nt, Artificial Sequence
  Description of Artificial Sequence: Synthetic oligonucleotide
  Antisense strand to SEQ ID NO: 1139120
auuugugguaagaacaccu

SEQ ID NO: 1139122 - RNA, 19 nt, Artificial Sequence
  Description of Artificial Sequence: Synthetic oligonucleotide
  Sense strand starting at position 430 of SEQ ID NO: 916214
aaauaaguaugugagggaa

SEQ ID NO: 1139123 - RNA, 19 nt, Artificial Sequence
  Description of Artificial Sequence: Synthetic oligonucleotide
  Antisense strand to SEQ ID NO: 1139122
uucccucacauacuuauuu

SEQ ID NO: 1139124 - RNA, 19 nt, Artificial Sequence
  Description of Artificial Sequence: Synthetic oligonucleotide
  Sense strand starting at position 487 of SEQ ID NO: 916214
ggguacauauuucgaaaca

SEQ ID NO: 1139125 - RNA, 19 nt, Artificial Sequence
  Description of Artificial Sequence: Synthetic oligonucleotide
  Antisense strand to SEQ ID NO: 1139124
uguuucgaaauauguaccc

SEQ ID NO: 1139126 - RNA, 19 nt, Artificial Sequence
  Description of Artificial Sequence: Synthetic oligonucleotide
  Sense strand starting at position 488 of SEQ ID NO: 916214
gguacauauuucgaaacac

SEQ ID NO: 1139127 - RNA, 19 nt, Artificial Sequence
  Description of Artificial Sequence: Synthetic oligonucleotide
  Antisense strand to SEQ ID NO: 1139126
guguuucgaaauauguacc

SEQ ID NO: 1139128 - RNA, 19 nt, Artificial Sequence
  Description of Artificial Sequence: Synthetic oligonucleotide
  Sense strand starting at position 1031 of SEQ ID NO: 916214
uuggcuaauguuuguguuu

SEQ ID NO: 1139129 - RNA, 19 nt, Artificial Sequence
  Description of Artificial Sequence: Synthetic oligonucleotide
  Antisense strand to SEQ ID NO: 1139128
aaacacaaacauuagccaa

SEQ ID NO: 1139130 - RNA, 19 nt, Artificial Sequence
  Description of Artificial Sequence: Synthetic oligonucleotide
  Sense strand starting at position 1034 of SEQ ID NO: 916214
gcuaauguuuguguuuguu

SEQ ID NO: 1139131 - RNA, 19 nt, Artificial Sequence
  Description of Artificial Sequence: Synthetic oligonucleotide
  Antisense strand to SEQ ID NO: 1139130
aacaaacacaaacauuagc

SEQ ID NO: 1139132 - RNA, 19 nt, Artificial Sequence
  Description of Artificial Sequence: Synthetic oligonucleotide
  Sense strand starting at position 1338 of SEQ ID NO: 916214
gagguacuuucgcuaggga

SEQ ID NO: 1139133 - RNA, 19 nt, Artificial Sequence
  Description of Artificial Sequence: Synthetic oligonucleotide
  Antisense strand to SEQ ID NO: 1139132
ucccuagcgaaaguaccuc

SEQ ID NO: 1139134 - RNA, 19 nt, Artificial Sequence
  Description of Artificial Sequence: Synthetic oligonucleotide
  Sense strand starting at position 1340 of SEQ ID NO: 916214
gguacuuucgcuagggagu

SEQ ID NO: 1139135 - RNA, 19 nt, Artificial Sequence
  Description of Artificial Sequence: Synthetic oligonucleotide
  Antisense strand to SEQ ID NO: 1139134
acucccuagcgaaaguacc

SEQ ID NO: 1139136 - RNA, 19 nt, Artificial Sequence
  Description of Artificial Sequence: Synthetic oligonucleotide
  Sense strand starting at position 1347 of SEQ ID NO: 916214
ucgcuagggagucaggaau

SEQ ID NO: 1139137 - RNA, 19 nt, Artificial Sequence
  Description of Artificial Sequence: Synthetic oligonucleotide
  Antisense strand to SEQ ID NO: 1139136
auuccugacucccuagcga

SEQ ID NO: 1139138 - RNA, 19 nt, Artificial Sequence
  Description of Artificial Sequence: Synthetic oligonucleotide
  Sense strand starting at position 1496 of SEQ ID NO: 916214
cccaguuaagcagguauua

SEQ ID NO: 1139139 - RNA, 19 nt, Artificial Sequence
  Description of Artificial Sequence: Synthetic oligonucleotide
  Antisense strand to SEQ ID NO: 1139138
uaauaccugcuuaacuggg

SEQ ID NO: 1139140 - RNA, 19 nt, Artificial Sequence
  Description of Artificial Sequence: Synthetic oligonucleotide
  Sense strand starting at position 1505 of SEQ ID NO: 916214
gcagguauuauuugcagau

SEQ ID NO: 1139141 - RNA, 19 nt, Artificial Sequence
  Description of Artificial Sequence: Synthetic oligonucleotide
  Antisense strand to SEQ ID NO: 1139140
aucugcaaauaauaccugc

SEQ ID NO: 1139142 - RNA, 19 nt, Artificial Sequence
  Description of Artificial Sequence: Synthetic oligonucleotide
  Sense strand starting at position 1507 of SEQ ID NO: 916214
agguauuauuugcagauaa

SEQ ID NO: 1139143 - RNA, 19 nt, Artificial Sequence
  Description of Artificial Sequence: Synthetic oligonucleotide
  Antisense strand to SEQ ID NO: 1139142
uuaucugcaaauaauaccu

SEQ ID NO: 1139144 - RNA, 19 nt, Artificial Sequence
  Description of Artificial Sequence: Synthetic oligonucleotide
  Sense strand starting at position 1752 of SEQ ID NO: 916214
gggugagcugucugaaguc

SEQ ID NO: 1139145 - RNA, 19 nt, Artificial Sequence
  Description of Artificial Sequence: Synthetic oligonucleotide
  Antisense strand to SEQ ID NO: 1139144
gacuucagacagcucaccc

SEQ ID NO: 1139146 - RNA, 19 nt, Artificial Sequence
  Description of Artificial Sequence: Synthetic oligonucleotide
  Sense strand starting at position 1868 of SEQ ID NO: 916214
cucucaucagcucgcaaau

SEQ ID NO: 1139147 - RNA, 19 nt, Artificial Sequence
  Description of Artificial Sequence: Synthetic oligonucleotide
  Antisense strand to SEQ ID NO: 1139146
auuugcgagcugaugagag

SEQ ID NO: 1139148 - RNA, 19 nt, Artificial Sequence
  Description of Artificial Sequence: Synthetic oligonucleotide
  Sense strand starting at position 2468 of SEQ ID NO: 916214
cuaugcuacuguuucuuau

SEQ ID NO: 1139149 - RNA, 19 nt, Artificial Sequence
  Description of Artificial Sequence: Synthetic oligonucleotide
  Antisense strand to SEQ ID NO: 1139148
auaagaaacaguagcauag

SEQ ID NO: 1139150 - RNA, 19 nt, Artificial Sequence
  Description of Artificial Sequence: Synthetic oligonucleotide
  Sense strand starting at position 2734 of SEQ ID NO: 916214
augguaauuccgugcauga

SEQ ID NO: 1139151 - RNA, 19 nt, Artificial Sequence
  Description of Artificial Sequence: Synthetic oligonucleotide
  Antisense strand to SEQ ID NO: 1139150
ucaugcacggaauuaccau

SEQ ID NO: 1139152 - RNA, 19 nt, Artificial Sequence
  Description of Artificial Sequence: Synthetic oligonucleotide
  Sense strand starting at position 2736 of SEQ ID NO: 916214
gguaauuccgugcaugauc

SEQ ID NO: 1139153 - RNA, 19 nt, Artificial Sequence
  Description of Artificial Sequence: Synthetic oligonucleotide
  Antisense strand to SEQ ID NO: 1139152
gaucaugcacggaauuacc

SEQ ID NO: 1139154 - RNA, 19 nt, Artificial Sequence
  Description of Artificial Sequence: Synthetic oligonucleotide
  Sense strand starting at position 2777 of SEQ ID NO: 916214
ccaucaccuguguauugau

SEQ ID NO: 1139155 - RNA, 19 nt, Artificial Sequence
  Description of Artificial Sequence: Synthetic oligonucleotide
  Antisense strand to SEQ ID NO: 1139154
aucaauacacaggugaugg

SEQ ID NO: 1139156 - RNA, 19 nt, Artificial Sequence
  Description of Artificial Sequence: Synthetic oligonucleotide
  Sense strand starting at position 2786 of SEQ ID NO: 916214
guguauugauguuucccaa

SEQ ID NO: 1139157 - RNA, 19 nt, Artificial Sequence
  Description of Artificial Sequence: Synthetic oligonucleotide
  Antisense strand to SEQ ID NO: 1139156
uugggaaacaucaauacac

SEQ ID NO: 1139158 - RNA, 19 nt, Artificial Sequence
  Description of Artificial Sequence: Synthetic oligonucleotide
  Sense strand starting at position 3160 of SEQ ID NO: 916214
ucacuuugcugaccagacu

SEQ ID NO: 1139159 - RNA, 19 nt, Artificial Sequence
  Description of Artificial Sequence: Synthetic oligonucleotide
  Antisense strand to SEQ ID NO: 1139158
agucuggucagcaaaguga

SEQ ID NO: 1139160 - RNA, 19 nt, Artificial Sequence
  Description of Artificial Sequence: Synthetic oligonucleotide
  Sense strand starting at position 3485 of SEQ ID NO: 916214
cacaguugccaguguaacu

SEQ ID NO: 1139161 - RNA, 19 nt, Artificial Sequence
  Description of Artificial Sequence: Synthetic oligonucleotide
  Antisense strand to SEQ ID NO: 1139160
aguuacacuggcaacugug

SEQ ID NO: 1139162 - RNA, 19 nt, Artificial Sequence
  Description of Artificial Sequence: Synthetic oligonucleotide
  Sense strand starting at position 3495 of SEQ ID NO: 916214
aguguaacucuugaaagca

SEQ ID NO: 1139163 - RNA, 19 nt, Artificial Sequence
  Description of Artificial Sequence: Synthetic oligonucleotide
  Antisense strand to SEQ ID NO: 1139162
ugcuuucaagaguuacacu

SEQ ID NO: 1139164 - RNA, 19 nt, Artificial Sequence
  Description of Artificial Sequence: Synthetic oligonucleotide
  Sense strand starting at position 3505 of SEQ ID NO: 916214
uugaaagcauguuccauaa

SEQ ID NO: 1139165 - RNA, 19 nt, Artificial Sequence
  Description of Artificial Sequence: Synthetic oligonucleotide
  Antisense strand to SEQ ID NO: 1139164
uuauggaacaugcuuucaa

SEQ ID NO: 1139166 - RNA, 19 nt, Artificial Sequence
  Description of Artificial Sequence: Synthetic oligonucleotide
  Sense strand starting at position 3507 of SEQ ID NO: 916214
gaaagcauguuccauaagu

SEQ ID NO: 1139167 - RNA, 19 nt, Artificial Sequence
  Description of Artificial Sequence: Synthetic oligonucleotide
  Antisense strand to SEQ ID NO: 1139166
acuuauggaacaugcuuuc

SEQ ID NO: 1139168 - RNA, 19 nt, Artificial Sequence
  Description of Artificial Sequence: Synthetic oligonucleotide
  Sense strand starting at position 3776 of SEQ ID NO: 916214
agcaucaagucucugcuua

SEQ ID NO: 1139169 - RNA, 19 nt, Artificial Sequence
  Description of Artificial Sequence: Synthetic oligonucleotide
  Antisense strand to SEQ ID NO: 1139168
uaagcagagacuugaugcu

SEQ ID NO: 1139170 - RNA, 19 nt, Artificial Sequence
  Description of Artificial Sequence: Synthetic oligonucleotide
  Sense strand starting at position 3777 of SEQ ID NO: 916214
gcaucaagucucugcuuag

SEQ ID NO: 1139171 - RNA, 19 nt, Artificial Sequence
  Description of Artificial Sequence: Synthetic oligonucleotide
  Antisense strand to SEQ ID NO: 1139170
cuaagcagagacuugaugc

SEQ ID NO: 1139172 - RNA, 19 nt, Artificial Sequence
  Description of Artificial Sequence: Synthetic oligonucleotide
  Sense strand starting at position 3826 of SEQ ID NO: 916214
accugauguucccuguaac

SEQ ID NO: 1139173 - RNA, 19 nt, Artificial Sequence
  Description of Artificial Sequence: Synthetic oligonucleotide
  Antisense strand to SEQ ID NO: 1139172
guuacagggaacaucaggu

SEQ ID NO: 1139174 - RNA, 19 nt, Artificial Sequence
  Description of Artificial Sequence: Synthetic oligonucleotide
  Sense strand starting at position 3827 of SEQ ID NO: 916214
ccugauguucccuguaaca

SEQ ID NO: 1139175 - RNA, 19 nt, Artificial Sequence
  Description of Artificial Sequence: Synthetic oligonucleotide
  Antisense strand to SEQ ID NO: 1139174
uguuacagggaacaucagg

SEQ ID NO: 1139176 - RNA, 19 nt, Artificial Sequence
  Description of Artificial Sequence: Synthetic oligonucleotide
  Sense strand starting at position 3829 of SEQ ID NO: 916214
ugauguucccuguaacacu

SEQ ID NO: 1139177 - RNA, 19 nt, Artificial Sequence
  Description of Artificial Sequence: Synthetic oligonucleotide
  Antisense strand to SEQ ID NO: 1139176
aguguuacagggaacauca

SEQ ID NO: 1139178 - RNA, 19 nt, Artificial Sequence
  Description of Artificial Sequence: Synthetic oligonucleotide
  Sense strand starting at position 3850 of SEQ ID NO: 916214
uccaucagauuauggaaca

SEQ ID NO: 1139179 - RNA, 19 nt, Artificial Sequence
  Description of Artificial Sequence: Synthetic oligonucleotide
  Antisense strand to SEQ ID NO: 1139178
uguuccauaaucugaugga

SEQ ID NO: 1139180 - RNA, 19 nt, Artificial Sequence
  Description of Artificial Sequence: Synthetic oligonucleotide
  Sense strand starting at position 3851 of SEQ ID NO: 916214
ccaucagauuauggaacaa

SEQ ID NO: 1139181 - RNA, 19 nt, Artificial Sequence
  Description of Artificial Sequence: Synthetic oligonucleotide
  Antisense strand to SEQ ID NO: 1139180
uuguuccauaaucugaugg

SEQ ID NO: 1139182 - RNA, 19 nt, Artificial Sequence
  Description of Artificial Sequence: Synthetic oligonucleotide
  Sense strand starting at position 3885 of SEQ ID NO: 916214
aguccuauuuguugcuuua

SEQ ID NO: 1139183 - RNA, 19 nt, Artificial Sequence
  Description of Artificial Sequence: Synthetic oligonucleotide
  Antisense strand to SEQ ID NO: 1139182
uaaagcaacaaauaggacu

SEQ ID NO: 1139184 - RNA, 19 nt, Artificial Sequence
  Description of Artificial Sequence: Synthetic oligonucleotide
  Sense strand starting at position 3887 of SEQ ID NO: 916214
uccuauuuguugcuuuauu

SEQ ID NO: 1139185 - RNA, 19 nt, Artificial Sequence
  Description of Artificial Sequence: Synthetic oligonucleotide
  Antisense strand to SEQ ID NO: 1139184
aauaaagcaacaaauagga

SEQ ID NO: 1139186 - RNA, 19 nt, Artificial Sequence
  Description of Artificial Sequence: Synthetic oligonucleotide
  Sense strand starting at position 3896 of SEQ ID NO: 916214
uugcuuuauugucugugua

SEQ ID NO: 1139187 - RNA, 19 nt, Artificial Sequence
  Description of Artificial Sequence: Synthetic oligonucleotide
  Antisense strand to SEQ ID NO: 1139186
uacacagacaauaaagcaa

SEQ ID NO: 1139188 - RNA, 19 nt, Artificial Sequence
  Description of Artificial Sequence: Synthetic oligonucleotide
  Sense strand starting at position 3908 of SEQ ID NO: 916214
cuguguacccacuagaaag

SEQ ID NO: 1139189 - RNA, 19 nt, Artificial Sequence
  Description of Artificial Sequence: Synthetic oligonucleotide
  Antisense strand to SEQ ID NO: 1139188
cuuucuaguggguacacag

SEQ ID NO: 1139190 - RNA, 19 nt, Artificial Sequence
  Description of Artificial Sequence: Synthetic oligonucleotide
  Sense strand starting at position 209 of SEQ ID NO: 916215
gugagugaagauugcacua

SEQ ID NO: 1139191 - RNA, 19 nt, Artificial Sequence
  Description of Artificial Sequence: Synthetic oligonucleotide
  Antisense strand to SEQ ID NO: 1139190
uagugcaaucuucacucac

SEQ ID NO: 1139192 - RNA, 19 nt, Artificial Sequence
  Description of Artificial Sequence: Synthetic oligonucleotide
  Sense strand starting at position 214 of SEQ ID NO: 916215
ugaagauugcacuauugca

SEQ ID NO: 1139193 - RNA, 19 nt, Artificial Sequence
  Description of Artificial Sequence: Synthetic oligonucleotide
  Antisense strand to SEQ ID NO: 1139192
ugcaauagugcaaucuuca

SEQ ID NO: 1139194 - RNA, 19 nt, Artificial Sequence
  Description of Artificial Sequence: Synthetic oligonucleotide
  Sense strand starting at position 291 of SEQ ID NO: 916215
cccaauacucuguggagua

SEQ ID NO: 1139195 - RNA, 19 nt, Artificial Sequence
  Description of Artificial Sequence: Synthetic oligonucleotide
  Antisense strand to SEQ ID NO: 1139194
uacuccacagaguauuggg

SEQ ID NO: 1139196 - RNA, 19 nt, Artificial Sequence
  Description of Artificial Sequence: Synthetic oligonucleotide
  Sense strand starting at position 293 of SEQ ID NO: 916215
caauacucuguggaguaca

SEQ ID NO: 1139197 - RNA, 19 nt, Artificial Sequence
  Description of Artificial Sequence: Synthetic oligonucleotide
  Antisense strand to SEQ ID NO: 1139196
uguacuccacagaguauug

SEQ ID NO: 1139198 - RNA, 19 nt, Artificial Sequence
  Description of Artificial Sequence: Synthetic oligonucleotide
  Sense strand starting at position 329 of SEQ ID NO: 916215
gaacauuuguuagaacuga

SEQ ID NO: 1139199 - RNA, 19 nt, Artificial Sequence
  Description of Artificial Sequence: Synthetic oligonucleotide
  Antisense strand to SEQ ID NO: 1139198
ucaguucuaacaaauguuc

SEQ ID NO: 1139200 - RNA, 19 nt, Artificial Sequence
  Description of Artificial Sequence: Synthetic oligonucleotide
  Sense strand starting at position 367 of SEQ ID NO: 916215
ugggaaaucuguccaucuc

SEQ ID NO: 1139201 - RNA, 19 nt, Artificial Sequence
  Description of Artificial Sequence: Synthetic oligonucleotide
  Antisense strand to SEQ ID NO: 1139200
gagauggacagauuuccca

SEQ ID NO: 1139202 - RNA, 19 nt, Artificial Sequence
  Description of Artificial Sequence: Synthetic oligonucleotide
  Sense strand starting at position 442 of SEQ ID NO: 916215
cagacuuggcuuuaacagu

SEQ ID NO: 1139203 - RNA, 19 nt, Artificial Sequence
  Description of Artificial Sequence: Synthetic oligonucleotide
  Antisense strand to SEQ ID NO: 1139202
acuguuaaagccaagucug

SEQ ID NO: 1139204 - RNA, 19 nt, Artificial Sequence
  Description of Artificial Sequence: Synthetic oligonucleotide
  Sense strand starting at position 478 of SEQ ID NO: 916215
ugaaucacuugacugugau

SEQ ID NO: 1139205 - RNA, 19 nt, Artificial Sequence
  Description of Artificial Sequence: Synthetic oligonucleotide
  Antisense strand to SEQ ID NO: 1139204
aucacagucaagugauuca

SEQ ID NO: 1139206 - RNA, 19 nt, Artificial Sequence
  Description of Artificial Sequence: Synthetic oligonucleotide
  Sense strand starting at position 479 of SEQ ID NO: 916215
gaaucacuugacugugauu

SEQ ID NO: 1139207 - RNA, 19 nt, Artificial Sequence
  Description of Artificial Sequence: Synthetic oligonucleotide
  Antisense strand to SEQ ID NO: 1139206
aaucacagucaagugauuc

SEQ ID NO: 1139208 - RNA, 19 nt, Artificial Sequence
  Description of Artificial Sequence: Synthetic oligonucleotide
  Sense strand starting at position 481 of SEQ ID NO: 916215
aucacuugacugugauuau

SEQ ID NO: 1139209 - RNA, 19 nt, Artificial Sequence
  Description of Artificial Sequence: Synthetic oligonucleotide
  Antisense strand to SEQ ID NO: 1139208
auaaucacagucaagugau

SEQ ID NO: 1139210 - RNA, 19 nt, Artificial Sequence
  Description of Artificial Sequence: Synthetic oligonucleotide
  Sense strand starting at position 505 of SEQ ID NO: 916215
cugucucuucccugaugga

SEQ ID NO: 1139211 - RNA, 19 nt, Artificial Sequence
  Description of Artificial Sequence: Synthetic oligonucleotide
  Antisense strand to SEQ ID NO: 1139210
uccaucagggaagagacag

SEQ ID NO: 1139212 - RNA, 19 nt, Artificial Sequence
  Description of Artificial Sequence: Synthetic oligonucleotide
  Sense strand starting at position 588 of SEQ ID NO: 916215
aggaaagaaguccaguguu

SEQ ID NO: 1139213 - RNA, 19 nt, Artificial Sequence
  Description of Artificial Sequence: Synthetic oligonucleotide
  Antisense strand to SEQ ID NO: 1139212
aacacuggacuucuuuccu

SEQ ID NO: 1139214 - RNA, 19 nt, Artificial Sequence
  Description of Artificial Sequence: Synthetic oligonucleotide
  Sense strand starting at position 652 of SEQ ID NO: 916215
aggucucuucccuaacaag

SEQ ID NO: 1139215 - RNA, 19 nt, Artificial Sequence
  Description of Artificial Sequence: Synthetic oligonucleotide
  Antisense strand to SEQ ID NO: 1139214
cuuguuagggaagagaccu

SEQ ID NO: 1139216 - RNA, 19 nt, Artificial Sequence
  Description of Artificial Sequence: Synthetic oligonucleotide
  Sense strand starting at position 720 of SEQ ID NO: 916215
gucccuguuggugauauga

SEQ ID NO: 1139217 - RNA, 19 nt, Artificial Sequence
  Description of Artificial Sequence: Synthetic oligonucleotide
  Antisense strand to SEQ ID NO: 1139216
ucauaucaccaacagggac

SEQ ID NO: 1139218 - RNA, 19 nt, Artificial Sequence
  Description of Artificial Sequence: Synthetic oligonucleotide
  Sense strand starting at position 791 of SEQ ID NO: 916215
aaacaaacuuggucuggau

SEQ ID NO: 1139219 - RNA, 19 nt, Artificial Sequence
  Description of Artificial Sequence: Synthetic oligonucleotide
  Antisense strand to SEQ ID NO: 1139218
auccagaccaaguuuguuu

SEQ ID NO: 1139220 - RNA, 19 nt, Artificial Sequence
  Description of Artificial Sequence: Synthetic oligonucleotide
  Sense strand starting at position 891 of SEQ ID NO: 916215
gucagauuaccugggacag

SEQ ID NO: 1139221 - RNA, 19 nt, Artificial Sequence
  Description of Artificial Sequence: Synthetic oligonucleotide
  Antisense strand to SEQ ID NO: 1139220
cugucccagguaaucugac

SEQ ID NO: 1139222 - RNA, 19 nt, Artificial Sequence
  Description of Artificial Sequence: Synthetic oligonucleotide
  Sense strand starting at position 978 of SEQ ID NO: 916215
gaaggaaugucagucacag

SEQ ID NO: 1139223 - RNA, 19 nt, Artificial Sequence
  Description of Artificial Sequence: Synthetic oligonucleotide
  Antisense strand to SEQ ID NO: 1139222
cugugacugacauuccuuc

SEQ ID NO: 1139224 - RNA, 19 nt, Artificial Sequence
  Description of Artificial Sequence: Synthetic oligonucleotide
  Sense strand starting at position 1187 of SEQ ID NO: 916215
uuugaaugcccucagaggu

SEQ ID NO: 1139225 - RNA, 19 nt, Artificial Sequence
  Description of Artificial Sequence: Synthetic oligonucleotide
  Antisense strand to SEQ ID NO: 1139224
accucugagggcauucaaa

SEQ ID NO: 1139226 - RNA, 19 nt, Artificial Sequence
  Description of Artificial Sequence: Synthetic oligonucleotide
  Sense strand starting at position 1252 of SEQ ID NO: 916215
acauucuccugcuuaagga

SEQ ID NO: 1139227 - RNA, 19 nt, Artificial Sequence
  Description of Artificial Sequence: Synthetic oligonucleotide
  Antisense strand to SEQ ID NO: 1139226
uccuuaagcaggagaaugu

SEQ ID NO: 1139228 - RNA, 19 nt, Artificial Sequence
  Description of Artificial Sequence: Synthetic oligonucleotide
  Sense strand starting at position 1260 of SEQ ID NO: 916215
cugcuuaaggagugaggau

SEQ ID NO: 1139229 - RNA, 19 nt, Artificial Sequence
  Description of Artificial Sequence: Synthetic oligonucleotide
  Antisense strand to SEQ ID NO: 1139228
auccucacuccuuaagcag

SEQ ID NO: 1139230 - RNA, 19 nt, Artificial Sequence
  Description of Artificial Sequence: Synthetic oligonucleotide
  Sense strand starting at position 1282 of SEQ ID NO: 916215
cgagaaagccucuacccau

SEQ ID NO: 1139231 - RNA, 19 nt, Artificial Sequence
  Description of Artificial Sequence: Synthetic oligonucleotide
  Antisense strand to SEQ ID NO: 1139230
auggguagaggcuuucucg

SEQ ID NO: 1139232 - RNA, 19 nt, Artificial Sequence
  Description of Artificial Sequence: Synthetic oligonucleotide
  Sense strand starting at position 1354 of SEQ ID NO: 916215
ucgagaagacucugcucca

SEQ ID NO: 1139233 - RNA, 19 nt, Artificial Sequence
  Description of Artificial Sequence: Synthetic oligonucleotide
  Antisense strand to SEQ ID NO: 1139232
uggagcagagucuucucga

SEQ ID NO: 1139234 - RNA, 19 nt, Artificial Sequence
  Description of Artificial Sequence: Synthetic oligonucleotide
  Sense strand starting at position 1366 of SEQ ID NO: 916215
ugcuccagaccuugaagaa

SEQ ID NO: 1139235 - RNA, 19 nt, Artificial Sequence
  Description of Artificial Sequence: Synthetic oligonucleotide
  Antisense strand to SEQ ID NO: 1139234
uucuucaaggucuggagca

SEQ ID NO: 1139236 - RNA, 19 nt, Artificial Sequence
  Description of Artificial Sequence: Synthetic oligonucleotide
  Sense strand starting at position 1493 of SEQ ID NO: 916215
ucuggcuuccaauaggaua

SEQ ID NO: 1139237 - RNA, 19 nt, Artificial Sequence
  Description of Artificial Sequence: Synthetic oligonucleotide
  Antisense strand to SEQ ID NO: 1139236
uauccuauuggaagccaga

SEQ ID NO: 1139238 - RNA, 19 nt, Artificial Sequence
  Description of Artificial Sequence: Synthetic oligonucleotide
  Sense strand starting at position 1523 of SEQ ID NO: 916215
gaguacuagaagugagguu

SEQ ID NO: 1139239 - RNA, 19 nt, Artificial Sequence
  Description of Artificial Sequence: Synthetic oligonucleotide
  Antisense strand to SEQ ID NO: 1139238
aaccucacuucuaguacuc

SEQ ID NO: 1139240 - RNA, 19 nt, Artificial Sequence
  Description of Artificial Sequence: Synthetic oligonucleotide
  Sense strand starting at position 1670 of SEQ ID NO: 916215
ggucacauaccuggaauca

SEQ ID NO: 1139241 - RNA, 19 nt, Artificial Sequence
  Description of Artificial Sequence: Synthetic oligonucleotide
  Antisense strand to SEQ ID NO: 1139240
ugauuccagguaugugacc

SEQ ID NO: 1139242 - RNA, 19 nt, Artificial Sequence
  Description of Artificial Sequence: Synthetic oligonucleotide
  Sense strand starting at position 1698 of SEQ ID NO: 916215
ggccaaguucuauaaccag

SEQ ID NO: 1139243 - RNA, 19 nt, Artificial Sequence
  Description of Artificial Sequence: Synthetic oligonucleotide
  Antisense strand to SEQ ID NO: 1139242
cugguuauagaacuuggcc

SEQ ID NO: 1139244 - RNA, 19 nt, Artificial Sequence
  Description of Artificial Sequence: Synthetic oligonucleotide
  Sense strand starting at position 1725 of SEQ ID NO: 916215
uggucagggaggugucaau

SEQ ID NO: 1139245 - RNA, 19 nt, Artificial Sequence
  Description of Artificial Sequence: Synthetic oligonucleotide
  Antisense strand to SEQ ID NO: 1139244
auugacaccucccugacca

SEQ ID NO: 1139246 - RNA, 19 nt, Artificial Sequence
  Description of Artificial Sequence: Synthetic oligonucleotide
  Sense strand starting at position 1886 of SEQ ID NO: 916215
cccuuaccgcuguaaggaa

SEQ ID NO: 1139247 - RNA, 19 nt, Artificial Sequence
  Description of Artificial Sequence: Synthetic oligonucleotide
  Antisense strand to SEQ ID NO: 1139246
uuccuuacagcgguaaggg

SEQ ID NO: 1139248 - RNA, 19 nt, Artificial Sequence
  Description of Artificial Sequence: Synthetic oligonucleotide
  Sense strand starting at position 2252 of SEQ ID NO: 916215
cacggaugcucuuccaaag

SEQ ID NO: 1139249 - RNA, 19 nt, Artificial Sequence
  Description of Artificial Sequence: Synthetic oligonucleotide
  Antisense strand to SEQ ID NO: 1139248
cuuuggaagagcauccgug

SEQ ID NO: 1139250 - RNA, 19 nt, Artificial Sequence
  Description of Artificial Sequence: Synthetic oligonucleotide
  Sense strand starting at position 2768 of SEQ ID NO: 916215
gguucugacgcauccguua

SEQ ID NO: 1139251 - RNA, 19 nt, Artificial Sequence
  Description of Artificial Sequence: Synthetic oligonucleotide
  Antisense strand to SEQ ID NO: 1139250
uaacggaugcgucagaacc

SEQ ID NO: 1139252 - RNA, 19 nt, Artificial Sequence
  Description of Artificial Sequence: Synthetic oligonucleotide
  Sense strand starting at position 2856 of SEQ ID NO: 916215
ggagcuagucucuaauccu

SEQ ID NO: 1139253 - RNA, 19 nt, Artificial Sequence
  Description of Artificial Sequence: Synthetic oligonucleotide
  Antisense strand to SEQ ID NO: 1139252
aggauuagagacuagcucc

SEQ ID NO: 1139254 - RNA, 19 nt, Artificial Sequence
  Description of Artificial Sequence: Synthetic oligonucleotide
  Sense strand starting at position 2884 of SEQ ID NO: 916215
ccugaaaggucggcaugau

SEQ ID NO: 1139255 - RNA, 19 nt, Artificial Sequence
  Description of Artificial Sequence: Synthetic oligonucleotide
  Antisense strand to SEQ ID NO: 1139254
aucaugccgaccuuucagg

SEQ ID NO: 1139256 - RNA, 19 nt, Artificial Sequence
  Description of Artificial Sequence: Synthetic oligonucleotide
  Sense strand starting at position 2885 of SEQ ID NO: 916215
cugaaaggucggcaugauu

SEQ ID NO: 1139257 - RNA, 19 nt, Artificial Sequence
  Description of Artificial Sequence: Synthetic oligonucleotide
  Antisense strand to SEQ ID NO: 1139256
aaucaugccgaccuuucag

SEQ ID NO: 1139258 - RNA, 19 nt, Artificial Sequence
  Description of Artificial Sequence: Synthetic oligonucleotide
  Sense strand starting at position 3142 of SEQ ID NO: 916215
agauccaaguauccgaaau

SEQ ID NO: 1139259 - RNA, 19 nt, Artificial Sequence
  Description of Artificial Sequence: Synthetic oligonucleotide
  Antisense strand to SEQ ID NO: 1139258
auuucggauacuuggaucu

SEQ ID NO: 1139260 - RNA, 19 nt, Artificial Sequence
  Description of Artificial Sequence: Synthetic oligonucleotide
  Sense strand starting at position 3218 of SEQ ID NO: 916215
gcuguuauccuguaagaac

SEQ ID NO: 1139261 - RNA, 19 nt, Artificial Sequence
  Description of Artificial Sequence: Synthetic oligonucleotide
  Antisense strand to SEQ ID NO: 1139260
guucuuacaggauaacagc

SEQ ID NO: 1139262 - RNA, 19 nt, Artificial Sequence
  Description of Artificial Sequence: Synthetic oligonucleotide
  Sense strand starting at position 3227 of SEQ ID NO: 916215
cuguaagaacaggguaaau

SEQ ID NO: 1139263 - RNA, 19 nt, Artificial Sequence
  Description of Artificial Sequence: Synthetic oligonucleotide
  Antisense strand to SEQ ID NO: 1139262
auuuacccuguucuuacag

SEQ ID NO: 1139264 - RNA, 19 nt, Artificial Sequence
  Description of Artificial Sequence: Synthetic oligonucleotide
  Sense strand starting at position 3236 of SEQ ID NO: 916215
caggguaaaucccugaucu

SEQ ID NO: 1139265 - RNA, 19 nt, Artificial Sequence
  Description of Artificial Sequence: Synthetic oligonucleotide
  Antisense strand to SEQ ID NO: 1139264
agaucagggauuuacccug

SEQ ID NO: 1139266 - RNA, 19 nt, Artificial Sequence
  Description of Artificial Sequence: Synthetic oligonucleotide
  Sense strand starting at position 3237 of SEQ ID NO: 916215
aggguaaaucccugaucuu

SEQ ID NO: 1139267 - RNA, 19 nt, Artificial Sequence
  Description of Artificial Sequence: Synthetic oligonucleotide
  Antisense strand to SEQ ID NO: 1139266
aagaucagggauuuacccu

SEQ ID NO: 1139268 - RNA, 19 nt, Artificial Sequence
  Description of Artificial Sequence: Synthetic oligonucleotide
  Sense strand starting at position 3238 of SEQ ID NO: 916215
ggguaaaucccugaucuuu

SEQ ID NO: 1139269 - RNA, 19 nt, Artificial Sequence
  Description of Artificial Sequence: Synthetic oligonucleotide
  Antisense strand to SEQ ID NO: 1139268
aaagaucagggauuuaccc

SEQ ID NO: 1139270 - RNA, 19 nt, Artificial Sequence
  Description of Artificial Sequence: Synthetic oligonucleotide
  Sense strand starting at position 37 of SEQ ID NO: 916216
ucaucagguugucuuuagu

SEQ ID NO: 1139271 - RNA, 19 nt, Artificial Sequence
  Description of Artificial Sequence: Synthetic oligonucleotide
  Antisense strand to SEQ ID NO: 1139270
acuaaagacaaccugauga

SEQ ID NO: 1139272 - RNA, 19 nt, Artificial Sequence
  Description of Artificial Sequence: Synthetic oligonucleotide
  Sense strand starting at position 54 of SEQ ID NO: 916216
gucccuguuggugauauga

SEQ ID NO: 1139273 - RNA, 19 nt, Artificial Sequence
  Description of Artificial Sequence: Synthetic oligonucleotide
  Antisense strand to SEQ ID NO: 1139272
ucauaucaccaacagggac

SEQ ID NO: 1139274 - RNA, 19 nt, Artificial Sequence
  Description of Artificial Sequence: Synthetic oligonucleotide
  Sense strand starting at position 125 of SEQ ID NO: 916216
aaacaaacuuggucuggau

SEQ ID NO: 1139275 - RNA, 19 nt, Artificial Sequence
  Description of Artificial Sequence: Synthetic oligonucleotide
  Antisense strand to SEQ ID NO: 1139274
auccagaccaaguuuguuu

SEQ ID NO: 1139276 - RNA, 19 nt, Artificial Sequence
  Description of Artificial Sequence: Synthetic oligonucleotide
  Sense strand starting at position 164 of SEQ ID NO: 916216
guauauagcuccuuauagc

SEQ ID NO: 1139277 - RNA, 19 nt, Artificial Sequence
  Description of Artificial Sequence: Synthetic oligonucleotide
  Antisense strand to SEQ ID NO: 1139276
gcuauaaggagcuauauac

SEQ ID NO: 1139278 - RNA, 19 nt, Artificial Sequence
  Description of Artificial Sequence: Synthetic oligonucleotide
  Sense strand starting at position 225 of SEQ ID NO: 916216
gucagauuaccugggacag

SEQ ID NO: 1139279 - RNA, 19 nt, Artificial Sequence
  Description of Artificial Sequence: Synthetic oligonucleotide
  Antisense strand to SEQ ID NO: 1139278
cugucccagguaaucugac

SEQ ID NO: 1139280 - RNA, 19 nt, Artificial Sequence
  Description of Artificial Sequence: Synthetic oligonucleotide
  Sense strand starting at position 227 of SEQ ID NO: 916216
cagauuaccugggacagau

SEQ ID NO: 1139281 - RNA, 19 nt, Artificial Sequence
  Description of Artificial Sequence: Synthetic oligonucleotide
  Antisense strand to SEQ ID NO: 1139280
aucugucccagguaaucug

SEQ ID NO: 1139282 - RNA, 19 nt, Artificial Sequence
  Description of Artificial Sequence: Synthetic oligonucleotide
  Sense strand starting at position 295 of SEQ ID NO: 916216
uucgcuucucucugaggga

SEQ ID NO: 1139283 - RNA, 19 nt, Artificial Sequence
  Description of Artificial Sequence: Synthetic oligonucleotide
  Antisense strand to SEQ ID NO: 1139282
ucccucagagagaagcgaa

SEQ ID NO: 1139284 - RNA, 19 nt, Artificial Sequence
  Description of Artificial Sequence: Synthetic oligonucleotide
  Sense strand starting at position 312 of SEQ ID NO: 916216
gaaggaaugucagucacag

SEQ ID NO: 1139285 - RNA, 19 nt, Artificial Sequence
  Description of Artificial Sequence: Synthetic oligonucleotide
  Antisense strand to SEQ ID NO: 1139284
cugugacugacauuccuuc

SEQ ID NO: 1139286 - RNA, 19 nt, Artificial Sequence
  Description of Artificial Sequence: Synthetic oligonucleotide
  Sense strand starting at position 518 of SEQ ID NO: 916216
ggcuuugaaugcccucaga

SEQ ID NO: 1139287 - RNA, 19 nt, Artificial Sequence
  Description of Artificial Sequence: Synthetic oligonucleotide
  Antisense strand to SEQ ID NO: 1139286
ucugagggcauucaaagcc

SEQ ID NO: 1139288 - RNA, 19 nt, Artificial Sequence
  Description of Artificial Sequence: Synthetic oligonucleotide
  Sense strand starting at position 521 of SEQ ID NO: 916216
uuugaaugcccucagaggu

SEQ ID NO: 1139289 - RNA, 19 nt, Artificial Sequence
  Description of Artificial Sequence: Synthetic oligonucleotide
  Antisense strand to SEQ ID NO: 1139288
accucugagggcauucaaa

SEQ ID NO: 1139290 - RNA, 19 nt, Artificial Sequence
  Description of Artificial Sequence: Synthetic oligonucleotide
  Sense strand starting at position 586 of SEQ ID NO: 916216
acauucuccugcuuaagga

SEQ ID NO: 1139291 - RNA, 19 nt, Artificial Sequence
  Description of Artificial Sequence: Synthetic oligonucleotide
  Antisense strand to SEQ ID NO: 1139290
uccuuaagcaggagaaugu

SEQ ID NO: 1139292 - RNA, 19 nt, Artificial Sequence
  Description of Artificial Sequence: Synthetic oligonucleotide
  Sense strand starting at position 594 of SEQ ID NO: 916216
cugcuuaaggagugaggau

SEQ ID NO: 1139293 - RNA, 19 nt, Artificial Sequence
  Description of Artificial Sequence: Synthetic oligonucleotide
  Antisense strand to SEQ ID NO: 1139292
auccucacuccuuaagcag

SEQ ID NO: 1139294 - RNA, 19 nt, Artificial Sequence
  Description of Artificial Sequence: Synthetic oligonucleotide
  Sense strand starting at position 616 of SEQ ID NO: 916216
cgagaaagccucuacccau

SEQ ID NO: 1139295 - RNA, 19 nt, Artificial Sequence
  Description of Artificial Sequence: Synthetic oligonucleotide
  Antisense strand to SEQ ID NO: 1139294
auggguagaggcuuucucg

SEQ ID NO: 1139296 - RNA, 19 nt, Artificial Sequence
  Description of Artificial Sequence: Synthetic oligonucleotide
  Sense strand starting at position 688 of SEQ ID NO: 916216
ucgagaagacucugcucca

SEQ ID NO: 1139297 - RNA, 19 nt, Artificial Sequence
  Description of Artificial Sequence: Synthetic oligonucleotide
  Antisense strand to SEQ ID NO: 1139296
uggagcagagucuucucga

SEQ ID NO: 1139298 - RNA, 19 nt, Artificial Sequence
  Description of Artificial Sequence: Synthetic oligonucleotide
  Sense strand starting at position 700 of SEQ ID NO: 916216
ugcuccagaccuugaagaa

SEQ ID NO: 1139299 - RNA, 19 nt, Artificial Sequence
  Description of Artificial Sequence: Synthetic oligonucleotide
  Antisense strand to SEQ ID NO: 1139298
uucuucaaggucuggagca

SEQ ID NO: 1139300 - RNA, 19 nt, Artificial Sequence
  Description of Artificial Sequence: Synthetic oligonucleotide
  Sense strand starting at position 827 of SEQ ID NO: 916216
ucuggcuuccaauaggaua

SEQ ID NO: 1139301 - RNA, 19 nt, Artificial Sequence
  Description of Artificial Sequence: Synthetic oligonucleotide
  Antisense strand to SEQ ID NO: 1139300
uauccuauuggaagccaga

SEQ ID NO: 1139302 - RNA, 19 nt, Artificial Sequence
  Description of Artificial Sequence: Synthetic oligonucleotide
  Sense strand starting at position 857 of SEQ ID NO: 916216
gaguacuagaagugagguu

SEQ ID NO: 1139303 - RNA, 19 nt, Artificial Sequence
  Description of Artificial Sequence: Synthetic oligonucleotide
  Antisense strand to SEQ ID NO: 1139302
aaccucacuucuaguacuc

SEQ ID NO: 1139304 - RNA, 19 nt, Artificial Sequence
  Description of Artificial Sequence: Synthetic oligonucleotide
  Sense strand starting at position 1004 of SEQ ID NO: 916216
ggucacauaccuggaauca

SEQ ID NO: 1139305 - RNA, 19 nt, Artificial Sequence
  Description of Artificial Sequence: Synthetic oligonucleotide
  Antisense strand to SEQ ID NO: 1139304
ugauuccagguaugugacc

SEQ ID NO: 1139306 - RNA, 19 nt, Artificial Sequence
  Description of Artificial Sequence: Synthetic oligonucleotide
  Sense strand starting at position 1032 of SEQ ID NO: 916216
ggccaaguucuauaaccag

SEQ ID NO: 1139307 - RNA, 19 nt, Artificial Sequence
  Description of Artificial Sequence: Synthetic oligonucleotide
  Antisense strand to SEQ ID NO: 1139306
cugguuauagaacuuggcc

SEQ ID NO: 1139308 - RNA, 19 nt, Artificial Sequence
  Description of Artificial Sequence: Synthetic oligonucleotide
  Sense strand starting at position 1059 of SEQ ID NO: 916216
uggucagggaggugucaau

SEQ ID NO: 1139309 - RNA, 19 nt, Artificial Sequence
  Description of Artificial Sequence: Synthetic oligonucleotide
  Antisense strand to SEQ ID NO: 1139308
auugacaccucccugacca

SEQ ID NO: 1139310 - RNA, 19 nt, Artificial Sequence
  Description of Artificial Sequence: Synthetic oligonucleotide
  Sense strand starting at position 1220 of SEQ ID NO: 916216
cccuuaccgcuguaaggaa

SEQ ID NO: 1139311 - RNA, 19 nt, Artificial Sequence
  Description of Artificial Sequence: Synthetic oligonucleotide
  Antisense strand to SEQ ID NO: 1139310
uuccuuacagcgguaaggg

SEQ ID NO: 1139312 - RNA, 19 nt, Artificial Sequence
  Description of Artificial Sequence: Synthetic oligonucleotide
  Sense strand starting at position 1390 of SEQ ID NO: 916216
ccgaguuucuucucccgaa

SEQ ID NO: 1139313 - RNA, 19 nt, Artificial Sequence
  Description of Artificial Sequence: Synthetic oligonucleotide
  Antisense strand to SEQ ID NO: 1139312
uucgggagaagaaacucgg

SEQ ID NO: 1139314 - RNA, 19 nt, Artificial Sequence
  Description of Artificial Sequence: Synthetic oligonucleotide
  Sense strand starting at position 1391 of SEQ ID NO: 916216
cgaguuucuucucccgaac

SEQ ID NO: 1139315 - RNA, 19 nt, Artificial Sequence
  Description of Artificial Sequence: Synthetic oligonucleotide
  Antisense strand to SEQ ID NO: 1139314
guucgggagaagaaacucg

SEQ ID NO: 1139316 - RNA, 19 nt, Artificial Sequence
  Description of Artificial Sequence: Synthetic oligonucleotide
  Sense strand starting at position 1586 of SEQ ID NO: 916216
cacggaugcucuuccaaag

SEQ ID NO: 1139317 - RNA, 19 nt, Artificial Sequence
  Description of Artificial Sequence: Synthetic oligonucleotide
  Antisense strand to SEQ ID NO: 1139316
cuuuggaagagcauccgug

SEQ ID NO: 1139318 - RNA, 19 nt, Artificial Sequence
  Description of Artificial Sequence: Synthetic oligonucleotide
  Sense strand starting at position 2102 of SEQ ID NO: 916216
gguucugacgcauccguua

SEQ ID NO: 1139319 - RNA, 19 nt, Artificial Sequence
  Description of Artificial Sequence: Synthetic oligonucleotide
  Antisense strand to SEQ ID NO: 1139318
uaacggaugcgucagaacc

SEQ ID NO: 1139320 - RNA, 19 nt, Artificial Sequence
  Description of Artificial Sequence: Synthetic oligonucleotide
  Sense strand starting at position 2190 of SEQ ID NO: 916216
ggagcuagucucuaauccu

SEQ ID NO: 1139321 - RNA, 19 nt, Artificial Sequence
  Description of Artificial Sequence: Synthetic oligonucleotide
  Antisense strand to SEQ ID NO: 1139320
aggauuagagacuagcucc

SEQ ID NO: 1139322 - RNA, 19 nt, Artificial Sequence
  Description of Artificial Sequence: Synthetic oligonucleotide
  Sense strand starting at position 2217 of SEQ ID NO: 916216
cccugaaaggucggcauga

SEQ ID NO: 1139323 - RNA, 19 nt, Artificial Sequence
  Description of Artificial Sequence: Synthetic oligonucleotide
  Antisense strand to SEQ ID NO: 1139322
ucaugccgaccuuucaggg

SEQ ID NO: 1139324 - RNA, 19 nt, Artificial Sequence
  Description of Artificial Sequence: Synthetic oligonucleotide
  Sense strand starting at position 2218 of SEQ ID NO: 916216
ccugaaaggucggcaugau

SEQ ID NO: 1139325 - RNA, 19 nt, Artificial Sequence
  Description of Artificial Sequence: Synthetic oligonucleotide
  Antisense strand to SEQ ID NO: 1139324
aucaugccgaccuuucagg

SEQ ID NO: 1139326 - RNA, 19 nt, Artificial Sequence
  Description of Artificial Sequence: Synthetic oligonucleotide
  Sense strand starting at position 2219 of SEQ ID NO: 916216
cugaaaggucggcaugauu

SEQ ID NO: 1139327 - RNA, 19 nt, Artificial Sequence
  Description of Artificial Sequence: Synthetic oligonucleotide
  Antisense strand to SEQ ID NO: 1139326
aaucaugccgaccuuucag

SEQ ID NO: 1139328 - RNA, 19 nt, Artificial Sequence
  Description of Artificial Sequence: Synthetic oligonucleotide
  Sense strand starting at position 2228 of SEQ ID NO: 916216
cggcaugauuguuuccauu

SEQ ID NO: 1139329 - RNA, 19 nt, Artificial Sequence
  Description of Artificial Sequence: Synthetic oligonucleotide
  Antisense strand to SEQ ID NO: 1139328
aauggaaacaaucaugccg

SEQ ID NO: 1139330 - RNA, 19 nt, Artificial Sequence
  Description of Artificial Sequence: Synthetic oligonucleotide
  Sense strand starting at position 2476 of SEQ ID NO: 916216
agauccaaguauccgaaau

SEQ ID NO: 1139331 - RNA, 19 nt, Artificial Sequence
  Description of Artificial Sequence: Synthetic oligonucleotide
  Antisense strand to SEQ ID NO: 1139330
auuucggauacuuggaucu

SEQ ID NO: 1139332 - RNA, 19 nt, Artificial Sequence
  Description of Artificial Sequence: Synthetic oligonucleotide
  Sense strand starting at position 2548 of SEQ ID NO: 916216
aggagcuguuauccuguaa

SEQ ID NO: 1139333 - RNA, 19 nt, Artificial Sequence
  Description of Artificial Sequence: Synthetic oligonucleotide
  Antisense strand to SEQ ID NO: 1139332
uuacaggauaacagcuccu

SEQ ID NO: 1139334 - RNA, 19 nt, Artificial Sequence
  Description of Artificial Sequence: Synthetic oligonucleotide
  Sense strand starting at position 2552 of SEQ ID NO: 916216
gcuguuauccuguaagaac

SEQ ID NO: 1139335 - RNA, 19 nt, Artificial Sequence
  Description of Artificial Sequence: Synthetic oligonucleotide
  Antisense strand to SEQ ID NO: 1139334
guucuuacaggauaacagc

SEQ ID NO: 1139336 - RNA, 19 nt, Artificial Sequence
  Description of Artificial Sequence: Synthetic oligonucleotide
  Sense strand starting at position 2561 of SEQ ID NO: 916216
cuguaagaacaggguaaau

SEQ ID NO: 1139337 - RNA, 19 nt, Artificial Sequence
  Description of Artificial Sequence: Synthetic oligonucleotide
  Antisense strand to SEQ ID NO: 1139336
auuuacccuguucuuacag

SEQ ID NO: 1139338 - RNA, 19 nt, Artificial Sequence
  Description of Artificial Sequence: Synthetic oligonucleotide
  Sense strand starting at position 2570 of SEQ ID NO: 916216
caggguaaaucccugaucu

SEQ ID NO: 1139339 - RNA, 19 nt, Artificial Sequence
  Description of Artificial Sequence: Synthetic oligonucleotide
  Antisense strand to SEQ ID NO: 1139338
agaucagggauuuacccug

SEQ ID NO: 1139340 - RNA, 19 nt, Artificial Sequence
  Description of Artificial Sequence: Synthetic oligonucleotide
  Sense strand starting at position 2571 of SEQ ID NO: 916216
aggguaaaucccugaucuu

SEQ ID NO: 1139341 - RNA, 19 nt, Artificial Sequence
  Description of Artificial Sequence: Synthetic oligonucleotide
  Antisense strand to SEQ ID NO: 1139340
aagaucagggauuuacccu

SEQ ID NO: 1139342 - RNA, 19 nt, Artificial Sequence
  Description of Artificial Sequence: Synthetic oligonucleotide
  Sense strand starting at position 2572 of SEQ ID NO: 916216
ggguaaaucccugaucuuu

SEQ ID NO: 1139343 - RNA, 19 nt, Artificial Sequence
  Description of Artificial Sequence: Synthetic oligonucleotide
  Antisense strand to SEQ ID NO: 1139342
aaagaucagggauuuaccc

SEQ ID NO: 1139344 - RNA, 19 nt, Artificial Sequence
  Description of Artificial Sequence: Synthetic oligonucleotide
  Sense strand starting at position 2652 of SEQ ID NO: 916216
guaauccauuuauguaaag

SEQ ID NO: 1139345 - RNA, 19 nt, Artificial Sequence
  Description of Artificial Sequence: Synthetic oligonucleotide
  Antisense strand to SEQ ID NO: 1139344
cuuuacauaaauggauuac

SEQ ID NO: 1139346 - RNA, 19 nt, Artificial Sequence
  Description of Artificial Sequence: Synthetic oligonucleotide
  Sense strand starting at position 3889 of SEQ ID NO: 916216
augcauuugucagaacuua

SEQ ID NO: 1139347 - RNA, 19 nt, Artificial Sequence
  Description of Artificial Sequence: Synthetic oligonucleotide
  Antisense strand to SEQ ID NO: 1139346
uaaguucugacaaaugcau

SEQ ID NO: 1139348 - RNA, 19 nt, Artificial Sequence
  Description of Artificial Sequence: Synthetic oligonucleotide
  Sense strand starting at position 3944 of SEQ ID NO: 916216
uugcgaauuacguaucaag

SEQ ID NO: 1139349 - RNA, 19 nt, Artificial Sequence
  Description of Artificial Sequence: Synthetic oligonucleotide
  Antisense strand to SEQ ID NO: 1139348
cuugauacguaauucgcaa

SEQ ID NO: 1139350 - RNA, 19 nt, Artificial Sequence
  Description of Artificial Sequence: Synthetic oligonucleotide
  Sense strand starting at position 32 of SEQ ID NO: 916217
ggcugagagaucugaguuc

SEQ ID NO: 1139351 - RNA, 19 nt, Artificial Sequence
  Description of Artificial Sequence: Synthetic oligonucleotide
  Antisense strand to SEQ ID NO: 1139350
gaacucagaucucucagcc

SEQ ID NO: 1139352 - RNA, 19 nt, Artificial Sequence
  Description of Artificial Sequence: Synthetic oligonucleotide
  Sense strand starting at position 51 of SEQ ID NO: 916217
aaguuuccgcuguauggua

SEQ ID NO: 1139353 - RNA, 19 nt, Artificial Sequence
  Description of Artificial Sequence: Synthetic oligonucleotide
  Antisense strand to SEQ ID NO: 1139352
uaccauacagcggaaacuu

SEQ ID NO: 1139354 - RNA, 19 nt, Artificial Sequence
  Description of Artificial Sequence: Synthetic oligonucleotide
  Sense strand starting at position 95 of SEQ ID NO: 916217
uuuguaaagcagugaugau

SEQ ID NO: 1139355 - RNA, 19 nt, Artificial Sequence
  Description of Artificial Sequence: Synthetic oligonucleotide
  Antisense strand to SEQ ID NO: 1139354
aucaucacugcuuuacaaa

SEQ ID NO: 1139356 - RNA, 19 nt, Artificial Sequence
  Description of Artificial Sequence: Synthetic oligonucleotide
  Sense strand starting at position 96 of SEQ ID NO: 916217
uuguaaagcagugaugaua

SEQ ID NO: 1139357 - RNA, 19 nt, Artificial Sequence
  Description of Artificial Sequence: Synthetic oligonucleotide
  Antisense strand to SEQ ID NO: 1139356
uaucaucacugcuuuacaa

SEQ ID NO: 1139358 - RNA, 19 nt, Artificial Sequence
  Description of Artificial Sequence: Synthetic oligonucleotide
  Sense strand starting at position 125 of SEQ ID NO: 916217
ccuacaguuguuggaagau

SEQ ID NO: 1139359 - RNA, 19 nt, Artificial Sequence
  Description of Artificial Sequence: Synthetic oligonucleotide
  Antisense strand to SEQ ID NO: 1139358
aucuuccaacaacuguagg

SEQ ID NO: 1139360 - RNA, 19 nt, Artificial Sequence
  Description of Artificial Sequence: Synthetic oligonucleotide
  Sense strand starting at position 232 of SEQ ID NO: 916217
gccaguggucgucagacua

SEQ ID NO: 1139361 - RNA, 19 nt, Artificial Sequence
  Description of Artificial Sequence: Synthetic oligonucleotide
  Antisense strand to SEQ ID NO: 1139360
uagucugacgaccacuggc

SEQ ID NO: 1139362 - RNA, 19 nt, Artificial Sequence
  Description of Artificial Sequence: Synthetic oligonucleotide
  Sense strand starting at position 272 of SEQ ID NO: 916217
gagcgagaggaguaugagu

SEQ ID NO: 1139363 - RNA, 19 nt, Artificial Sequence
  Description of Artificial Sequence: Synthetic oligonucleotide
  Antisense strand to SEQ ID NO: 1139362
acucauacuccucucgcuc

SEQ ID NO: 1139364 - RNA, 19 nt, Artificial Sequence
  Description of Artificial Sequence: Synthetic oligonucleotide
  Sense strand starting at position 388 of SEQ ID NO: 916217
ugaguauuccucugguagu

SEQ ID NO: 1139365 - RNA, 19 nt, Artificial Sequence
  Description of Artificial Sequence: Synthetic oligonucleotide
  Antisense strand to SEQ ID NO: 1139364
acuaccagaggaauacuca

SEQ ID NO: 1139366 - RNA, 19 nt, Artificial Sequence
  Description of Artificial Sequence: Synthetic oligonucleotide
  Sense strand starting at position 418 of SEQ ID NO: 916217
uggaguauuucccagaaac

SEQ ID NO: 1139367 - RNA, 19 nt, Artificial Sequence
  Description of Artificial Sequence: Synthetic oligonucleotide
  Antisense strand to SEQ ID NO: 1139366
guuucugggaaauacucca

SEQ ID NO: 1139368 - RNA, 19 nt, Artificial Sequence
  Description of Artificial Sequence: Synthetic oligonucleotide
  Sense strand starting at position 466 of SEQ ID NO: 916217
gugugugguuacccuccaa

SEQ ID NO: 1139369 - RNA, 19 nt, Artificial Sequence
  Description of Artificial Sequence: Synthetic oligonucleotide
  Antisense strand to SEQ ID NO: 1139368
uuggaggguaaccacacac

SEQ ID NO: 1139370 - RNA, 19 nt, Artificial Sequence
  Description of Artificial Sequence: Synthetic oligonucleotide
  Sense strand starting at position 470 of SEQ ID NO: 916217
gugguuacccuccaaggga

SEQ ID NO: 1139371 - RNA, 19 nt, Artificial Sequence
  Description of Artificial Sequence: Synthetic oligonucleotide
  Antisense strand to SEQ ID NO: 1139370
ucccuuggaggguaaccac

SEQ ID NO: 1139372 - RNA, 19 nt, Artificial Sequence
  Description of Artificial Sequence: Synthetic oligonucleotide
  Sense strand starting at position 565 of SEQ ID NO: 916217
augagcuuuccuggaauaa

SEQ ID NO: 1139373 - RNA, 19 nt, Artificial Sequence
  Description of Artificial Sequence: Synthetic oligonucleotide
  Antisense strand to SEQ ID NO: 1139372
uuauuccaggaaagcucau

SEQ ID NO: 1139374 - RNA, 19 nt, Artificial Sequence
  Description of Artificial Sequence: Synthetic oligonucleotide
  Sense strand starting at position 566 of SEQ ID NO: 916217
ugagcuuuccuggaauaac

SEQ ID NO: 1139375 - RNA, 19 nt, Artificial Sequence
  Description of Artificial Sequence: Synthetic oligonucleotide
  Antisense strand to SEQ ID NO: 1139374
guuauuccaggaaagcuca

SEQ ID NO: 1139376 - RNA, 19 nt, Artificial Sequence
  Description of Artificial Sequence: Synthetic oligonucleotide
  Sense strand starting at position 569 of SEQ ID NO: 916217
gcuuuccuggaauaacaau

SEQ ID NO: 1139377 - RNA, 19 nt, Artificial Sequence
  Description of Artificial Sequence: Synthetic oligonucleotide
  Antisense strand to SEQ ID NO: 1139376
auuguuauuccaggaaagc

SEQ ID NO: 1139378 - RNA, 19 nt, Artificial Sequence
  Description of Artificial Sequence: Synthetic oligonucleotide
  Sense strand starting at position 696 of SEQ ID NO: 916217
gcacuucuggaccagguaa

SEQ ID NO: 1139379 - RNA, 19 nt, Artificial Sequence
  Description of Artificial Sequence: Synthetic oligonucleotide
  Antisense strand to SEQ ID NO: 1139378
uuaccugguccagaagugc

SEQ ID NO: 1139380 - RNA, 19 nt, Artificial Sequence
  Description of Artificial Sequence: Synthetic oligonucleotide
  Sense strand starting at position 826 of SEQ ID NO: 916217
cucugauucucccuggaac

SEQ ID NO: 1139381 - RNA, 19 nt, Artificial Sequence
  Description of Artificial Sequence: Synthetic oligonucleotide
  Antisense strand to SEQ ID NO: 1139380
guuccagggagaaucagag

SEQ ID NO: 1139382 - RNA, 19 nt, Artificial Sequence
  Description of Artificial Sequence: Synthetic oligonucleotide
  Sense strand starting at position 2271 of SEQ ID NO: 916217
ccugucuaaccggauucuu

SEQ ID NO: 1139383 - RNA, 19 nt, Artificial Sequence
  Description of Artificial Sequence: Synthetic oligonucleotide
  Antisense strand to SEQ ID NO: 1139382
aagaauccgguuagacagg

SEQ ID NO: 1139384 - RNA, 19 nt, Artificial Sequence
  Description of Artificial Sequence: Synthetic oligonucleotide
  Sense strand starting at position 2281 of SEQ ID NO: 916217
cggauucuuccagauucuu

SEQ ID NO: 1139385 - RNA, 19 nt, Artificial Sequence
  Description of Artificial Sequence: Synthetic oligonucleotide
  Antisense strand to SEQ ID NO: 1139384
aagaaucuggaagaauccg

SEQ ID NO: 1139386 - RNA, 19 nt, Artificial Sequence
  Description of Artificial Sequence: Synthetic oligonucleotide
  Sense strand starting at position 2287 of SEQ ID NO: 916217
cuuccagauucuucucgau

SEQ ID NO: 1139387 - RNA, 19 nt, Artificial Sequence
  Description of Artificial Sequence: Synthetic oligonucleotide
  Antisense strand to SEQ ID NO: 1139386
aucgagaagaaucuggaag

SEQ ID NO: 1139388 - RNA, 19 nt, Artificial Sequence
  Description of Artificial Sequence: Synthetic oligonucleotide
  Sense strand starting at position 2291 of SEQ ID NO: 916217
cagauucuucucgaucgau

SEQ ID NO: 1139389 - RNA, 19 nt, Artificial Sequence
  Description of Artificial Sequence: Synthetic oligonucleotide
  Antisense strand to SEQ ID NO: 1139388
aucgaucgagaagaaucug

SEQ ID NO: 1139390 - RNA, 19 nt, Artificial Sequence
  Description of Artificial Sequence: Synthetic oligonucleotide
  Sense strand starting at position 2303 of SEQ ID NO: 916217
gaucgaucucccgacauca

SEQ ID NO: 1139391 - RNA, 19 nt, Artificial Sequence
  Description of Artificial Sequence: Synthetic oligonucleotide
  Antisense strand to SEQ ID NO: 1139390
ugaugucgggagaucgauc

SEQ ID NO: 1139392 - RNA, 19 nt, Artificial Sequence
  Description of Artificial Sequence: Synthetic oligonucleotide
  Sense strand starting at position 2433 of SEQ ID NO: 916217
cugcuaugacccgcguaga

SEQ ID NO: 1139393 - RNA, 19 nt, Artificial Sequence
  Description of Artificial Sequence: Synthetic oligonucleotide
  Antisense strand to SEQ ID NO: 1139392
ucuacgcgggucauagcag

SEQ ID NO: 1139394 - RNA, 19 nt, Artificial Sequence
  Description of Artificial Sequence: Synthetic oligonucleotide
  Sense strand starting at position 2708 of SEQ ID NO: 916217
gccguuuccgcgaaugcuu

SEQ ID NO: 1139395 - RNA, 19 nt, Artificial Sequence
  Description of Artificial Sequence: Synthetic oligonucleotide
  Antisense strand to SEQ ID NO: 1139394
aagcauucgcggaaacggc

SEQ ID NO: 1139396 - RNA, 19 nt, Artificial Sequence
  Description of Artificial Sequence: Synthetic oligonucleotide
  Sense strand starting at position 2713 of SEQ ID NO: 916217
uuccgcgaaugcuuacaaa

SEQ ID NO: 1139397 - RNA, 19 nt, Artificial Sequence
  Description of Artificial Sequence: Synthetic oligonucleotide
  Antisense strand to SEQ ID NO: 1139396
uuuguaagcauucgcggaa

SEQ ID NO: 1139398 - RNA, 19 nt, Artificial Sequence
  Description of Artificial Sequence: Synthetic oligonucleotide
  Sense strand starting at position 2964 of SEQ ID NO: 916217
aguuacuggcugcaugaau

SEQ ID NO: 1139399 - RNA, 19 nt, Artificial Sequence
  Description of Artificial Sequence: Synthetic oligonucleotide
  Antisense strand to SEQ ID NO: 1139398
auucaugcagccaguaacu

SEQ ID NO: 1139400 - RNA, 19 nt, Artificial Sequence
  Description of Artificial Sequence: Synthetic oligonucleotide
  Sense strand starting at position 3003 of SEQ ID NO: 916217
uuuccaagucuuggcugau

SEQ ID NO: 1139401 - RNA, 19 nt, Artificial Sequence
  Description of Artificial Sequence: Synthetic oligonucleotide
  Antisense strand to SEQ ID NO: 1139400
aucagccaagacuuggaaa

SEQ ID NO: 1139402 - RNA, 19 nt, Artificial Sequence
  Description of Artificial Sequence: Synthetic oligonucleotide
  Sense strand starting at position 3004 of SEQ ID NO: 916217
uuccaagucuuggcugauu

SEQ ID NO: 1139403 - RNA, 19 nt, Artificial Sequence
  Description of Artificial Sequence: Synthetic oligonucleotide
  Antisense strand to SEQ ID NO: 1139402
aaucagccaagacuuggaa

SEQ ID NO: 1139404 - RNA, 19 nt, Artificial Sequence
  Description of Artificial Sequence: Synthetic oligonucleotide
  Sense strand starting at position 3196 of SEQ ID NO: 916217
ucgaacaucuggucucaaa

SEQ ID NO: 1139405 - RNA, 19 nt, Artificial Sequence
  Description of Artificial Sequence: Synthetic oligonucleotide
  Antisense strand to SEQ ID NO: 1139404
uuugagaccagauguucga

SEQ ID NO: 1139406 - RNA, 19 nt, Artificial Sequence
  Description of Artificial Sequence: Synthetic oligonucleotide
  Sense strand starting at position 3338 of SEQ ID NO: 916217
gcgauuggacgccauuagu

SEQ ID NO: 1139407 - RNA, 19 nt, Artificial Sequence
  Description of Artificial Sequence: Synthetic oligonucleotide
  Antisense strand to SEQ ID NO: 1139406
acuaauggcguccaaucgc

SEQ ID NO: 1139408 - RNA, 19 nt, Artificial Sequence
  Description of Artificial Sequence: Synthetic oligonucleotide
  Sense strand starting at position 3398 of SEQ ID NO: 916217
agcgucauaaugugaugau

SEQ ID NO: 1139409 - RNA, 19 nt, Artificial Sequence
  Description of Artificial Sequence: Synthetic oligonucleotide
  Antisense strand to SEQ ID NO: 1139408
aucaucacauuaugacgcu

SEQ ID NO: 1139410 - RNA, 19 nt, Artificial Sequence
  Description of Artificial Sequence: Synthetic oligonucleotide
  Sense strand starting at position 3401 of SEQ ID NO: 916217
gucauaaugugaugauuua

SEQ ID NO: 1139411 - RNA, 19 nt, Artificial Sequence
  Description of Artificial Sequence: Synthetic oligonucleotide
  Antisense strand to SEQ ID NO: 1139410
uaaaucaucacauuaugac

SEQ ID NO: 1139412 - RNA, 19 nt, Artificial Sequence
  Description of Artificial Sequence: Synthetic oligonucleotide
  Sense strand starting at position 3488 of SEQ ID NO: 916217
gcccaaaugaguugagcca

SEQ ID NO: 1139413 - RNA, 19 nt, Artificial Sequence
  Description of Artificial Sequence: Synthetic oligonucleotide
  Antisense strand to SEQ ID NO: 1139412
uggcucaacucauuugggc

SEQ ID NO: 1139414 - RNA, 19 nt, Artificial Sequence
  Description of Artificial Sequence: Synthetic oligonucleotide
  Sense strand starting at position 3812 of SEQ ID NO: 916217
gauugccugccguuacauu

SEQ ID NO: 1139415 - RNA, 19 nt, Artificial Sequence
  Description of Artificial Sequence: Synthetic oligonucleotide
  Antisense strand to SEQ ID NO: 1139414
aauguaacggcaggcaauc

SEQ ID NO: 1139416 - RNA, 19 nt, Artificial Sequence
  Description of Artificial Sequence: Synthetic oligonucleotide
  Sense strand starting at position 3852 of SEQ ID NO: 916217
guggaaugagcaugugcuu

SEQ ID NO: 1139417 - RNA, 19 nt, Artificial Sequence
  Description of Artificial Sequence: Synthetic oligonucleotide
  Antisense strand to SEQ ID NO: 1139416
aagcacaugcucauuccac

SEQ ID NO: 1139418 - RNA, 19 nt, Artificial Sequence
  Description of Artificial Sequence: Synthetic oligonucleotide
  Sense strand starting at position 3859 of SEQ ID NO: 916217
gagcaugugcuuuggagua

SEQ ID NO: 1139419 - RNA, 19 nt, Artificial Sequence
  Description of Artificial Sequence: Synthetic oligonucleotide
  Antisense strand to SEQ ID NO: 1139418
uacuccaaagcacaugcuc

SEQ ID NO: 1139420 - RNA, 19 nt, Artificial Sequence
  Description of Artificial Sequence: Synthetic oligonucleotide
  Sense strand starting at position 3864 of SEQ ID NO: 916217
ugugcuuuggaguaaggga

SEQ ID NO: 1139421 - RNA, 19 nt, Artificial Sequence
  Description of Artificial Sequence: Synthetic oligonucleotide
  Antisense strand to SEQ ID NO: 1139420
ucccuuacuccaaagcaca

SEQ ID NO: 1139422 - RNA, 19 nt, Artificial Sequence
  Description of Artificial Sequence: Synthetic oligonucleotide
  Sense strand starting at position 3903 of SEQ ID NO: 916217
auguuagcuguuuaaauug

SEQ ID NO: 1139423 - RNA, 19 nt, Artificial Sequence
  Description of Artificial Sequence: Synthetic oligonucleotide
  Antisense strand to SEQ ID NO: 1139422
caauuuaaacagcuaacau

SEQ ID NO: 1139424 - RNA, 19 nt, Artificial Sequence
  Description of Artificial Sequence: Synthetic oligonucleotide
  Sense strand starting at position 3946 of SEQ ID NO: 916217
cucgauuucuugucuguaa

SEQ ID NO: 1139425 - RNA, 19 nt, Artificial Sequence
  Description of Artificial Sequence: Synthetic oligonucleotide
  Antisense strand to SEQ ID NO: 1139424
uuacagacaagaaaucgag

SEQ ID NO: 1139426 - RNA, 19 nt, Artificial Sequence
  Description of Artificial Sequence: Synthetic oligonucleotide
  Sense strand starting at position 3947 of SEQ ID NO: 916217
ucgauuucuugucuguaaa

SEQ ID NO: 1139427 - RNA, 19 nt, Artificial Sequence
  Description of Artificial Sequence: Synthetic oligonucleotide
  Antisense strand to SEQ ID NO: 1139426
uuuacagacaagaaaucga

SEQ ID NO: 1139428 - RNA, 19 nt, Artificial Sequence
  Description of Artificial Sequence: Synthetic oligonucleotide
  Sense strand starting at position 3967 of SEQ ID NO: 916217
uagagauaguaacauuugu

SEQ ID NO: 1139429 - RNA, 19 nt, Artificial Sequence
  Description of Artificial Sequence: Synthetic oligonucleotide
  Antisense strand to SEQ ID NO: 1139428
acaaauguuacuaucucua

SEQ ID NO: 1139430 - RNA, 19 nt, Artificial Sequence
  Description of Artificial Sequence: Synthetic oligonucleotide
  Sense strand starting at position 241 of SEQ ID NO: 916218
gucacagcacauugguaau

SEQ ID NO: 1139431 - RNA, 19 nt, Artificial Sequence
  Description of Artificial Sequence: Synthetic oligonucleotide
  Antisense strand to SEQ ID NO: 1139430
auuaccaaugugcugugac

SEQ ID NO: 1139432 - RNA, 19 nt, Artificial Sequence
  Description of Artificial Sequence: Synthetic oligonucleotide
  Sense strand starting at position 247 of SEQ ID NO: 916218
gcacauugguaaucacuga

SEQ ID NO: 1139433 - RNA, 19 nt, Artificial Sequence
  Description of Artificial Sequence: Synthetic oligonucleotide
  Antisense strand to SEQ ID NO: 1139432
ucagugauuaccaaugugc

SEQ ID NO: 1139434 - RNA, 19 nt, Artificial Sequence
  Description of Artificial Sequence: Synthetic oligonucleotide
  Sense strand starting at position 251 of SEQ ID NO: 916218
auugguaaucacugacuca

SEQ ID NO: 1139435 - RNA, 19 nt, Artificial Sequence
  Description of Artificial Sequence: Synthetic oligonucleotide
  Antisense strand to SEQ ID NO: 1139434
ugagucagugauuaccaau

SEQ ID NO: 1139436 - RNA, 19 nt, Artificial Sequence
  Description of Artificial Sequence: Synthetic oligonucleotide
  Sense strand starting at position 435 of SEQ ID NO: 916218
augucagauucucuaccau

SEQ ID NO: 1139437 - RNA, 19 nt, Artificial Sequence
  Description of Artificial Sequence: Synthetic oligonucleotide
  Antisense strand to SEQ ID NO: 1139436
augguagagaaucugacau

SEQ ID NO: 1139438 - RNA, 19 nt, Artificial Sequence
  Description of Artificial Sequence: Synthetic oligonucleotide
  Sense strand starting at position 459 of SEQ ID NO: 916218
aggccaagaucucuagaca

SEQ ID NO: 1139439 - RNA, 19 nt, Artificial Sequence
  Description of Artificial Sequence: Synthetic oligonucleotide
  Antisense strand to SEQ ID NO: 1139438
ugucuagagaucuuggccu

SEQ ID NO: 1139440 - RNA, 19 nt, Artificial Sequence
  Description of Artificial Sequence: Synthetic oligonucleotide
  Sense strand starting at position 462 of SEQ ID NO: 916218
ccaagaucucuagacagcu

SEQ ID NO: 1139441 - RNA, 19 nt, Artificial Sequence
  Description of Artificial Sequence: Synthetic oligonucleotide
  Antisense strand to SEQ ID NO: 1139440
agcugucuagagaucuugg

SEQ ID NO: 1139442 - RNA, 19 nt, Artificial Sequence
  Description of Artificial Sequence: Synthetic oligonucleotide
  Sense strand starting at position 505 of SEQ ID NO: 916218
uccuuauuccaaggcagau

SEQ ID NO: 1139443 - RNA, 19 nt, Artificial Sequence
  Description of Artificial Sequence: Synthetic oligonucleotide
  Antisense strand to SEQ ID NO: 1139442
aucugccuuggaauaagga

SEQ ID NO: 1139444 - RNA, 19 nt, Artificial Sequence
  Description of Artificial Sequence: Synthetic oligonucleotide
  Sense strand starting at position 992 of SEQ ID NO: 916218
agugaaaugguuuauccac

SEQ ID NO: 1139445 - RNA, 19 nt, Artificial Sequence
  Description of Artificial Sequence: Synthetic oligonucleotide
  Antisense strand to SEQ ID NO: 1139444
guggauaaaccauuucacu

SEQ ID NO: 1139446 - RNA, 19 nt, Artificial Sequence
  Description of Artificial Sequence: Synthetic oligonucleotide
  Sense strand starting at position 994 of SEQ ID NO: 916218
ugaaaugguuuauccacau

SEQ ID NO: 1139447 - RNA, 19 nt, Artificial Sequence
  Description of Artificial Sequence: Synthetic oligonucleotide
  Antisense strand to SEQ ID NO: 1139446
auguggauaaaccauuuca

SEQ ID NO: 1139448 - RNA, 19 nt, Artificial Sequence
  Description of Artificial Sequence: Synthetic oligonucleotide
  Sense strand starting at position 998 of SEQ ID NO: 916218
augguuuauccacauguuc

SEQ ID NO: 1139449 - RNA, 19 nt, Artificial Sequence
  Description of Artificial Sequence: Synthetic oligonucleotide
  Antisense strand to SEQ ID NO: 1139448
gaacauguggauaaaccau

SEQ ID NO: 1139450 - RNA, 19 nt, Artificial Sequence
  Description of Artificial Sequence: Synthetic oligonucleotide
  Sense strand starting at position 1076 of SEQ ID NO: 916218
agcagaauggcauacucuu

SEQ ID NO: 1139451 - RNA, 19 nt, Artificial Sequence
  Description of Artificial Sequence: Synthetic oligonucleotide
  Antisense strand to SEQ ID NO: 1139450
aagaguaugccauucugcu

SEQ ID NO: 1139452 - RNA, 19 nt, Artificial Sequence
  Description of Artificial Sequence: Synthetic oligonucleotide
  Sense strand starting at position 1374 of SEQ ID NO: 916218
ggagaagccugguuccuag

SEQ ID NO: 1139453 - RNA, 19 nt, Artificial Sequence
  Description of Artificial Sequence: Synthetic oligonucleotide
  Antisense strand to SEQ ID NO: 1139452
cuaggaaccaggcuucucc

SEQ ID NO: 1139454 - RNA, 19 nt, Artificial Sequence
  Description of Artificial Sequence: Synthetic oligonucleotide
  Sense strand starting at position 2409 of SEQ ID NO: 916218
acucaugauguauacaagu

SEQ ID NO: 1139455 - RNA, 19 nt, Artificial Sequence
  Description of Artificial Sequence: Synthetic oligonucleotide
  Antisense strand to SEQ ID NO: 1139454
acuuguauacaucaugagu

SEQ ID NO: 1139456 - RNA, 19 nt, Artificial Sequence
  Description of Artificial Sequence: Synthetic oligonucleotide
  Sense strand starting at position 2508 of SEQ ID NO: 916218
gagagauaguaccuguuaa

SEQ ID NO: 1139457 - RNA, 19 nt, Artificial Sequence
  Description of Artificial Sequence: Synthetic oligonucleotide
  Antisense strand to SEQ ID NO: 1139456
uuaacagguacuaucucuc

SEQ ID NO: 1139458 - RNA, 19 nt, Artificial Sequence
  Description of Artificial Sequence: Synthetic oligonucleotide
  Sense strand starting at position 2509 of SEQ ID NO: 916218
agagauaguaccuguuaag

SEQ ID NO: 1139459 - RNA, 19 nt, Artificial Sequence
  Description of Artificial Sequence: Synthetic oligonucleotide
  Antisense strand to SEQ ID NO: 1139458
cuuaacagguacuaucucu

SEQ ID NO: 1139460 - RNA, 19 nt, Artificial Sequence
  Description of Artificial Sequence: Synthetic oligonucleotide
  Sense strand starting at position 2900 of SEQ ID NO: 916218
gggauugucacuugaccca

SEQ ID NO: 1139461 - RNA, 19 nt, Artificial Sequence
  Description of Artificial Sequence: Synthetic oligonucleotide
  Antisense strand to SEQ ID NO: 1139460
ugggucaagugacaauccc

SEQ ID NO: 1139462 - RNA, 19 nt, Artificial Sequence
  Description of Artificial Sequence: Synthetic oligonucleotide
  Sense strand starting at position 2932 of SEQ ID NO: 916218
ugauauauccaaggcuuuc

SEQ ID NO: 1139463 - RNA, 19 nt, Artificial Sequence
  Description of Artificial Sequence: Synthetic oligonucleotide
  Antisense strand to SEQ ID NO: 1139462
gaaagccuuggauauauca

SEQ ID NO: 1139464 - RNA, 19 nt, Artificial Sequence
  Description of Artificial Sequence: Synthetic oligonucleotide
  Sense strand starting at position 2938 of SEQ ID NO: 916218
auccaaggcuuucucugaa

SEQ ID NO: 1139465 - RNA, 19 nt, Artificial Sequence
  Description of Artificial Sequence: Synthetic oligonucleotide
  Antisense strand to SEQ ID NO: 1139464
uucagagaaagccuuggau

SEQ ID NO: 1139466 - RNA, 19 nt, Artificial Sequence
  Description of Artificial Sequence: Synthetic oligonucleotide
  Sense strand starting at position 3028 of SEQ ID NO: 916218
gcugguggccgucuuauca

SEQ ID NO: 1139467 - RNA, 19 nt, Artificial Sequence
  Description of Artificial Sequence: Synthetic oligonucleotide
  Antisense strand to SEQ ID NO: 1139466
ugauaagacggccaccagc

SEQ ID NO: 1139468 - RNA, 19 nt, Artificial Sequence
  Description of Artificial Sequence: Synthetic oligonucleotide
  Sense strand starting at position 3038 of SEQ ID NO: 916218
gucuuaucaucaccuguaa

SEQ ID NO: 1139469 - RNA, 19 nt, Artificial Sequence
  Description of Artificial Sequence: Synthetic oligonucleotide
  Antisense strand to SEQ ID NO: 1139468
uuacaggugaugauaagac

SEQ ID NO: 1139470 - RNA, 19 nt, Artificial Sequence
  Description of Artificial Sequence: Synthetic oligonucleotide
  Sense strand starting at position 3144 of SEQ ID NO: 916218
uggaucuaaccaugccuga

SEQ ID NO: 1139471 - RNA, 19 nt, Artificial Sequence
  Description of Artificial Sequence: Synthetic oligonucleotide
  Antisense strand to SEQ ID NO: 1139470
ucaggcaugguuagaucca

SEQ ID NO: 1139472 - RNA, 19 nt, Artificial Sequence
  Description of Artificial Sequence: Synthetic oligonucleotide
  Sense strand starting at position 3149 of SEQ ID NO: 916218
cuaaccaugccugaaguua

SEQ ID NO: 1139473 - RNA, 19 nt, Artificial Sequence
  Description of Artificial Sequence: Synthetic oligonucleotide
  Antisense strand to SEQ ID NO: 1139472
uaacuucaggcaugguuag

SEQ ID NO: 1139474 - RNA, 19 nt, Artificial Sequence
  Description of Artificial Sequence: Synthetic oligonucleotide
  Sense strand starting at position 3215 of SEQ ID NO: 916218
aguuuauucuaugccagau

SEQ ID NO: 1139475 - RNA, 19 nt, Artificial Sequence
  Description of Artificial Sequence: Synthetic oligonucleotide
  Antisense strand to SEQ ID NO: 1139474
aucuggcauagaauaaacu

SEQ ID NO: 1139476 - RNA, 19 nt, Artificial Sequence
  Description of Artificial Sequence: Synthetic oligonucleotide
  Sense strand starting at position 3232 of SEQ ID NO: 916218
auacuauucugggcauuga

SEQ ID NO: 1139477 - RNA, 19 nt, Artificial Sequence
  Description of Artificial Sequence: Synthetic oligonucleotide
  Antisense strand to SEQ ID NO: 1139476
ucaaugcccagaauaguau

SEQ ID NO: 1139478 - RNA, 19 nt, Artificial Sequence
  Description of Artificial Sequence: Synthetic oligonucleotide
  Sense strand starting at position 3249 of SEQ ID NO: 916218
gaagguacaucugcgaaca

SEQ ID NO: 1139479 - RNA, 19 nt, Artificial Sequence
  Description of Artificial Sequence: Synthetic oligonucleotide
  Antisense strand to SEQ ID NO: 1139478
uguucgcagauguaccuuc

SEQ ID NO: 1139480 - RNA, 19 nt, Artificial Sequence
  Description of Artificial Sequence: Synthetic oligonucleotide
  Sense strand starting at position 3250 of SEQ ID NO: 916218
aagguacaucugcgaacaa

SEQ ID NO: 1139481 - RNA, 19 nt, Artificial Sequence
  Description of Artificial Sequence: Synthetic oligonucleotide
  Antisense strand to SEQ ID NO: 1139480
uuguucgcagauguaccuu

SEQ ID NO: 1139482 - RNA, 19 nt, Artificial Sequence
  Description of Artificial Sequence: Synthetic oligonucleotide
  Sense strand starting at position 3277 of SEQ ID NO: 916218
uacauuguguccucuugga

SEQ ID NO: 1139483 - RNA, 19 nt, Artificial Sequence
  Description of Artificial Sequence: Synthetic oligonucleotide
  Antisense strand to SEQ ID NO: 1139482
uccaagaggacacaaugua

SEQ ID NO: 1139484 - RNA, 19 nt, Artificial Sequence
  Description of Artificial Sequence: Synthetic oligonucleotide
  Sense strand starting at position 3281 of SEQ ID NO: 916218
uuguguccucuuggaauuc

SEQ ID NO: 1139485 - RNA, 19 nt, Artificial Sequence
  Description of Artificial Sequence: Synthetic oligonucleotide
  Antisense strand to SEQ ID NO: 1139484
gaauuccaagaggacacaa

SEQ ID NO: 1139486 - RNA, 19 nt, Artificial Sequence
  Description of Artificial Sequence: Synthetic oligonucleotide
  Sense strand starting at position 3350 of SEQ ID NO: 916218
auagauguuagugaucagu

SEQ ID NO: 1139487 - RNA, 19 nt, Artificial Sequence
  Description of Artificial Sequence: Synthetic oligonucleotide
  Antisense strand to SEQ ID NO: 1139486
acugaucacuaacaucuau

SEQ ID NO: 1139488 - RNA, 19 nt, Artificial Sequence
  Description of Artificial Sequence: Synthetic oligonucleotide
  Sense strand starting at position 3352 of SEQ ID NO: 916218
agauguuagugaucagugu

SEQ ID NO: 1139489 - RNA, 19 nt, Artificial Sequence
  Description of Artificial Sequence: Synthetic oligonucleotide
  Antisense strand to SEQ ID NO: 1139488
acacugaucacuaacaucu

SEQ ID NO: 1139490 - RNA, 19 nt, Artificial Sequence
  Description of Artificial Sequence: Synthetic oligonucleotide
  Sense strand starting at position 3353 of SEQ ID NO: 916218
gauguuagugaucaguguu

SEQ ID NO: 1139491 - RNA, 19 nt, Artificial Sequence
  Description of Artificial Sequence: Synthetic oligonucleotide
  Antisense strand to SEQ ID NO: 1139490
aacacugaucacuaacauc

SEQ ID NO: 1139492 - RNA, 19 nt, Artificial Sequence
  Description of Artificial Sequence: Synthetic oligonucleotide
  Sense strand starting at position 3384 of SEQ ID NO: 916218
acugaaaggugauagagau

SEQ ID NO: 1139493 - RNA, 19 nt, Artificial Sequence
  Description of Artificial Sequence: Synthetic oligonucleotide
  Antisense strand to SEQ ID NO: 1139492
aucucuaucaccuuucagu

SEQ ID NO: 1139494 - RNA, 19 nt, Artificial Sequence
  Description of Artificial Sequence: Synthetic oligonucleotide
  Sense strand starting at position 3426 of SEQ ID NO: 916218
uagaguugcuuacuuggga

SEQ ID NO: 1139495 - RNA, 19 nt, Artificial Sequence
  Description of Artificial Sequence: Synthetic oligonucleotide
  Antisense strand to SEQ ID NO: 1139494
ucccaaguaagcaacucua

SEQ ID NO: 1139496 - RNA, 19 nt, Artificial Sequence
  Description of Artificial Sequence: Synthetic oligonucleotide
  Sense strand starting at position 3572 of SEQ ID NO: 916218
gcuugucacaggcaugaug

SEQ ID NO: 1139497 - RNA, 19 nt, Artificial Sequence
  Description of Artificial Sequence: Synthetic oligonucleotide
  Antisense strand to SEQ ID NO: 1139496
caucaugccugugacaagc

SEQ ID NO: 1139498 - RNA, 19 nt, Artificial Sequence
  Description of Artificial Sequence: Synthetic oligonucleotide
  Sense strand starting at position 3583 of SEQ ID NO: 916218
gcaugauggcuucaagguu

SEQ ID NO: 1139499 - RNA, 19 nt, Artificial Sequence
  Description of Artificial Sequence: Synthetic oligonucleotide
  Antisense strand to SEQ ID NO: 1139498
aaccuugaagccaucaugc

SEQ ID NO: 1139500 - RNA, 19 nt, Artificial Sequence
  Description of Artificial Sequence: Synthetic oligonucleotide
  Sense strand starting at position 3692 of SEQ ID NO: 916218
ggcguuccuacugaugaca

SEQ ID NO: 1139501 - RNA, 19 nt, Artificial Sequence
  Description of Artificial Sequence: Synthetic oligonucleotide
  Antisense strand to SEQ ID NO: 1139500
ugucaucaguaggaacgcc

SEQ ID NO: 1139502 - RNA, 19 nt, Artificial Sequence
  Description of Artificial Sequence: Synthetic oligonucleotide
  Sense strand starting at position 3738 of SEQ ID NO: 916218
ucaugacagccauguauga

SEQ ID NO: 1139503 - RNA, 19 nt, Artificial Sequence
  Description of Artificial Sequence: Synthetic oligonucleotide
  Antisense strand to SEQ ID NO: 1139502
ucauacauggcugucauga

SEQ ID NO: 1139504 - RNA, 19 nt, Artificial Sequence
  Description of Artificial Sequence: Synthetic oligonucleotide
  Sense strand starting at position 3742 of SEQ ID NO: 916218
gacagccauguaugagauu

SEQ ID NO: 1139505 - RNA, 19 nt, Artificial Sequence
  Description of Artificial Sequence: Synthetic oligonucleotide
  Antisense strand to SEQ ID NO: 1139504
aaucucauacauggcuguc

SEQ ID NO: 1139506 - RNA, 19 nt, Artificial Sequence
  Description of Artificial Sequence: Synthetic oligonucleotide
  Sense strand starting at position 3836 of SEQ ID NO: 916218
agauaauagugagcugcau

SEQ ID NO: 1139507 - RNA, 19 nt, Artificial Sequence
  Description of Artificial Sequence: Synthetic oligonucleotide
  Antisense strand to SEQ ID NO: 1139506
augcagcucacuauuaucu

SEQ ID NO: 1139508 - RNA, 19 nt, Artificial Sequence
  Description of Artificial Sequence: Synthetic oligonucleotide
  Sense strand starting at position 3845 of SEQ ID NO: 916218
ugagcugcaucggugaaga

SEQ ID NO: 1139509 - RNA, 19 nt, Artificial Sequence
  Description of Artificial Sequence: Synthetic oligonucleotide
  Antisense strand to SEQ ID NO: 1139508
ucuucaccgaugcagcuca

SEQ ID NO: 1139510 - RNA, 19 nt, Artificial Sequence
  Description of Artificial Sequence: Synthetic oligonucleotide
  Sense strand starting at position 6 of SEQ ID NO: 916219
gggagaggaugagacuauu

SEQ ID NO: 1139511 - RNA, 19 nt, Artificial Sequence
  Description of Artificial Sequence: Synthetic oligonucleotide
  Antisense strand to SEQ ID NO: 1139510
aauagucucauccucuccc

SEQ ID NO: 1139512 - RNA, 19 nt, Artificial Sequence
  Description of Artificial Sequence: Synthetic oligonucleotide
  Sense strand starting at position 65 of SEQ ID NO: 916219
gugaaaucucuccaguggu

SEQ ID NO: 1139513 - RNA, 19 nt, Artificial Sequence
  Description of Artificial Sequence: Synthetic oligonucleotide
  Antisense strand to SEQ ID NO: 1139512
accacuggagagauuucac

SEQ ID NO: 1139514 - RNA, 19 nt, Artificial Sequence
  Description of Artificial Sequence: Synthetic oligonucleotide
  Sense strand starting at position 79 of SEQ ID NO: 916219
guggucaacuuguuuaacu

SEQ ID NO: 1139515 - RNA, 19 nt, Artificial Sequence
  Description of Artificial Sequence: Synthetic oligonucleotide
  Antisense strand to SEQ ID NO: 1139514
aguuaaacaaguugaccac

SEQ ID NO: 1139516 - RNA, 19 nt, Artificial Sequence
  Description of Artificial Sequence: Synthetic oligonucleotide
  Sense strand starting at position 135 of SEQ ID NO: 916219
cuucguauccaggaucuaa

SEQ ID NO: 1139517 - RNA, 19 nt, Artificial Sequence
  Description of Artificial Sequence: Synthetic oligonucleotide
  Antisense strand to SEQ ID NO: 1139516
uuagauccuggauacgaag

SEQ ID NO: 1139518 - RNA, 19 nt, Artificial Sequence
  Description of Artificial Sequence: Synthetic oligonucleotide
  Sense strand starting at position 233 of SEQ ID NO: 916219
gcacuuuaacccgggaguu

SEQ ID NO: 1139519 - RNA, 19 nt, Artificial Sequence
  Description of Artificial Sequence: Synthetic oligonucleotide
  Antisense strand to SEQ ID NO: 1139518
aacucccggguuaaagugc

SEQ ID NO: 1139520 - RNA, 19 nt, Artificial Sequence
  Description of Artificial Sequence: Synthetic oligonucleotide
  Sense strand starting at position 270 of SEQ ID NO: 916219
uucuucucgccucagaaca

SEQ ID NO: 1139521 - RNA, 19 nt, Artificial Sequence
  Description of Artificial Sequence: Synthetic oligonucleotide
  Antisense strand to SEQ ID NO: 1139520
uguucugaggcgagaagaa

SEQ ID NO: 1139522 - RNA, 19 nt, Artificial Sequence
  Description of Artificial Sequence: Synthetic oligonucleotide
  Sense strand starting at position 336 of SEQ ID NO: 916219
uccagcuaggaauggaaau

SEQ ID NO: 1139523 - RNA, 19 nt, Artificial Sequence
  Description of Artificial Sequence: Synthetic oligonucleotide
  Antisense strand to SEQ ID NO: 1139522
auuuccauuccuagcugga

SEQ ID NO: 1139524 - RNA, 19 nt, Artificial Sequence
  Description of Artificial Sequence: Synthetic oligonucleotide
  Sense strand starting at position 368 of SEQ ID NO: 916219
gccucuugguaucugagau

SEQ ID NO: 1139525 - RNA, 19 nt, Artificial Sequence
  Description of Artificial Sequence: Synthetic oligonucleotide
  Antisense strand to SEQ ID NO: 1139524
aucucagauaccaagaggc

SEQ ID NO: 1139526 - RNA, 19 nt, Artificial Sequence
  Description of Artificial Sequence: Synthetic oligonucleotide
  Sense strand starting at position 410 of SEQ ID NO: 916219
uuucuugucaagggagcua

SEQ ID NO: 1139527 - RNA, 19 nt, Artificial Sequence
  Description of Artificial Sequence: Synthetic oligonucleotide
  Antisense strand to SEQ ID NO: 1139526
uagcucccuugacaagaaa

SEQ ID NO: 1139528 - RNA, 19 nt, Artificial Sequence
  Description of Artificial Sequence: Synthetic oligonucleotide
  Sense strand starting at position 415 of SEQ ID NO: 916219
ugucaagggagcuauaauu

SEQ ID NO: 1139529 - RNA, 19 nt, Artificial Sequence
  Description of Artificial Sequence: Synthetic oligonucleotide
  Antisense strand to SEQ ID NO: 1139528
aauuauagcucccuugaca

SEQ ID NO: 1139530 - RNA, 19 nt, Artificial Sequence
  Description of Artificial Sequence: Synthetic oligonucleotide
  Sense strand starting at position 421 of SEQ ID NO: 916219
gggagcuauaauugcagua

SEQ ID NO: 1139531 - RNA, 19 nt, Artificial Sequence
  Description of Artificial Sequence: Synthetic oligonucleotide
  Antisense strand to SEQ ID NO: 1139530
uacugcaauuauagcuccc

SEQ ID NO: 1139532 - RNA, 19 nt, Artificial Sequence
  Description of Artificial Sequence: Synthetic oligonucleotide
  Sense strand starting at position 599 of SEQ ID NO: 916219
uguguaaaucacugcuaca

SEQ ID NO: 1139533 - RNA, 19 nt, Artificial Sequence
  Description of Artificial Sequence: Synthetic oligonucleotide
  Antisense strand to SEQ ID NO: 1139532
uguagcagugauuuacaca

SEQ ID NO: 1139534 - RNA, 19 nt, Artificial Sequence
  Description of Artificial Sequence: Synthetic oligonucleotide
  Sense strand starting at position 751 of SEQ ID NO: 916219
gagcuucugcagcaagaug

SEQ ID NO: 1139535 - RNA, 19 nt, Artificial Sequence
  Description of Artificial Sequence: Synthetic oligonucleotide
  Antisense strand to SEQ ID NO: 1139534
caucuugcugcagaagcuc

SEQ ID NO: 1139536 - RNA, 19 nt, Artificial Sequence
  Description of Artificial Sequence: Synthetic oligonucleotide
  Sense strand starting at position 883 of SEQ ID NO: 916219
ccacuagugccagacaaug

SEQ ID NO: 1139537 - RNA, 19 nt, Artificial Sequence
  Description of Artificial Sequence: Synthetic oligonucleotide
  Antisense strand to SEQ ID NO: 1139536
cauugucuggcacuagugg

SEQ ID NO: 1139538 - RNA, 19 nt, Artificial Sequence
  Description of Artificial Sequence: Synthetic oligonucleotide
  Sense strand starting at position 2300 of SEQ ID NO: 916219
ccgucuacccgggaugaca

SEQ ID NO: 1139539 - RNA, 19 nt, Artificial Sequence
  Description of Artificial Sequence: Synthetic oligonucleotide
  Antisense strand to SEQ ID NO: 1139538
ugucaucccggguagacgg

SEQ ID NO: 1139540 - RNA, 19 nt, Artificial Sequence
  Description of Artificial Sequence: Synthetic oligonucleotide
  Sense strand starting at position 2403 of SEQ ID NO: 916219
cuguuaaacuccguauaca

SEQ ID NO: 1139541 - RNA, 19 nt, Artificial Sequence
  Description of Artificial Sequence: Synthetic oligonucleotide
  Antisense strand to SEQ ID NO: 1139540
uguauacggaguuuaacag

SEQ ID NO: 1139542 - RNA, 19 nt, Artificial Sequence
  Description of Artificial Sequence: Synthetic oligonucleotide
  Sense strand starting at position 2404 of SEQ ID NO: 916219
uguuaaacuccguauacag

SEQ ID NO: 1139543 - RNA, 19 nt, Artificial Sequence
  Description of Artificial Sequence: Synthetic oligonucleotide
  Antisense strand to SEQ ID NO: 1139542
cuguauacggaguuuaaca

SEQ ID NO: 1139544 - RNA, 19 nt, Artificial Sequence
  Description of Artificial Sequence: Synthetic oligonucleotide
  Sense strand starting at position 2406 of SEQ ID NO: 916219
uuaaacuccguauacagau

SEQ ID NO: 1139545 - RNA, 19 nt, Artificial Sequence
  Description of Artificial Sequence: Synthetic oligonucleotide
  Antisense strand to SEQ ID NO: 1139544
aucuguauacggaguuuaa

SEQ ID NO: 1139546 - RNA, 19 nt, Artificial Sequence
  Description of Artificial Sequence: Synthetic oligonucleotide
  Sense strand starting at position 2463 of SEQ ID NO: 916219
uucucuuucccucgagaua

SEQ ID NO: 1139547 - RNA, 19 nt, Artificial Sequence
  Description of Artificial Sequence: Synthetic oligonucleotide
  Antisense strand to SEQ ID NO: 1139546
uaucucgagggaaagagaa

SEQ ID NO: 1139548 - RNA, 19 nt, Artificial Sequence
  Description of Artificial Sequence: Synthetic oligonucleotide
  Sense strand starting at position 2464 of SEQ ID NO: 916219
ucucuuucccucgagauaa

SEQ ID NO: 1139549 - RNA, 19 nt, Artificial Sequence
  Description of Artificial Sequence: Synthetic oligonucleotide
  Antisense strand to SEQ ID NO: 1139548
uuaucucgagggaaagaga

SEQ ID NO: 1139550 - RNA, 19 nt, Artificial Sequence
  Description of Artificial Sequence: Synthetic oligonucleotide
  Sense strand starting at position 2466 of SEQ ID NO: 916219
ucuuucccucgagauaauu

SEQ ID NO: 1139551 - RNA, 19 nt, Artificial Sequence
  Description of Artificial Sequence: Synthetic oligonucleotide
  Antisense strand to SEQ ID NO: 1139550
aauuaucucgagggaaaga

SEQ ID NO: 1139552 - RNA, 19 nt, Artificial Sequence
  Description of Artificial Sequence: Synthetic oligonucleotide
  Sense strand starting at position 2497 of SEQ ID NO: 916219
ugagcauugaggugaagau

SEQ ID NO: 1139553 - RNA, 19 nt, Artificial Sequence
  Description of Artificial Sequence: Synthetic oligonucleotide
  Antisense strand to SEQ ID NO: 1139552
aucuucaccucaaugcuca

SEQ ID NO: 1139554 - RNA, 19 nt, Artificial Sequence
  Description of Artificial Sequence: Synthetic oligonucleotide
  Sense strand starting at position 2525 of SEQ ID NO: 916219
guuuauauguuacccuuau

SEQ ID NO: 1139555 - RNA, 19 nt, Artificial Sequence
  Description of Artificial Sequence: Synthetic oligonucleotide
  Antisense strand to SEQ ID NO: 1139554
auaaggguaacauauaaac

SEQ ID NO: 1139556 - RNA, 19 nt, Artificial Sequence
  Description of Artificial Sequence: Synthetic oligonucleotide
  Sense strand starting at position 2559 of SEQ ID NO: 916219
aguaaaugcuccuugaaug

SEQ ID NO: 1139557 - RNA, 19 nt, Artificial Sequence
  Description of Artificial Sequence: Synthetic oligonucleotide
  Antisense strand to SEQ ID NO: 1139556
cauucaaggagcauuuacu

SEQ ID NO: 1139558 - RNA, 19 nt, Artificial Sequence
  Description of Artificial Sequence: Synthetic oligonucleotide
  Sense strand starting at position 2560 of SEQ ID NO: 916219
guaaaugcuccuugaauga

SEQ ID NO: 1139559 - RNA, 19 nt, Artificial Sequence
  Description of Artificial Sequence: Synthetic oligonucleotide
  Antisense strand to SEQ ID NO: 1139558
ucauucaaggagcauuuac

SEQ ID NO: 1139560 - RNA, 19 nt, Artificial Sequence
  Description of Artificial Sequence: Synthetic oligonucleotide
  Sense strand starting at position 2567 of SEQ ID NO: 916219
cuccuugaaugaguggaua

SEQ ID NO: 1139561 - RNA, 19 nt, Artificial Sequence
  Description of Artificial Sequence: Synthetic oligonucleotide
  Antisense strand to SEQ ID NO: 1139560
uauccacucauucaaggag

SEQ ID NO: 1139562 - RNA, 19 nt, Artificial Sequence
  Description of Artificial Sequence: Synthetic oligonucleotide
  Sense strand starting at position 2569 of SEQ ID NO: 916219
ccuugaaugaguggauaca

SEQ ID NO: 1139563 - RNA, 19 nt, Artificial Sequence
  Description of Artificial Sequence: Synthetic oligonucleotide
  Antisense strand to SEQ ID NO: 1139562
uguauccacucauucaagg

SEQ ID NO: 1139564 - RNA, 19 nt, Artificial Sequence
  Description of Artificial Sequence: Synthetic oligonucleotide
  Sense strand starting at position 2579 of SEQ ID NO: 916219
guggauacaugauaaauga

SEQ ID NO: 1139565 - RNA, 19 nt, Artificial Sequence
  Description of Artificial Sequence: Synthetic oligonucleotide
  Antisense strand to SEQ ID NO: 1139564
ucauuuaucauguauccac

SEQ ID NO: 1139566 - RNA, 19 nt, Artificial Sequence
  Description of Artificial Sequence: Synthetic oligonucleotide
  Sense strand starting at position 2586 of SEQ ID NO: 916219
caugauaaaugagcgugua

SEQ ID NO: 1139567 - RNA, 19 nt, Artificial Sequence
  Description of Artificial Sequence: Synthetic oligonucleotide
  Antisense strand to SEQ ID NO: 1139566
uacacgcucauuuaucaug

SEQ ID NO: 1139568 - RNA, 19 nt, Artificial Sequence
  Description of Artificial Sequence: Synthetic oligonucleotide
  Sense strand starting at position 2587 of SEQ ID NO: 916219
augauaaaugagcguguaa

SEQ ID NO: 1139569 - RNA, 19 nt, Artificial Sequence
  Description of Artificial Sequence: Synthetic oligonucleotide
  Antisense strand to SEQ ID NO: 1139568
uuacacgcucauuuaucau

SEQ ID NO: 1139570 - RNA, 19 nt, Artificial Sequence
  Description of Artificial Sequence: Synthetic oligonucleotide
  Sense strand starting at position 2589 of SEQ ID NO: 916219
gauaaaugagcguguaacg

SEQ ID NO: 1139571 - RNA, 19 nt, Artificial Sequence
  Description of Artificial Sequence: Synthetic oligonucleotide
  Antisense strand to SEQ ID NO: 1139570
cguuacacgcucauuuauc

SEQ ID NO: 1139572 - RNA, 19 nt, Artificial Sequence
  Description of Artificial Sequence: Synthetic oligonucleotide
  Sense strand starting at position 2598 of SEQ ID NO: 916219
gcguguaacggugaaauaa

SEQ ID NO: 1139573 - RNA, 19 nt, Artificial Sequence
  Description of Artificial Sequence: Synthetic oligonucleotide
  Antisense strand to SEQ ID NO: 1139572
uuauuucaccguuacacgc

SEQ ID NO: 1139574 - RNA, 19 nt, Artificial Sequence
  Description of Artificial Sequence: Synthetic oligonucleotide
  Sense strand starting at position 2685 of SEQ ID NO: 916219
caaucuugcucagcgaaga

SEQ ID NO: 1139575 - RNA, 19 nt, Artificial Sequence
  Description of Artificial Sequence: Synthetic oligonucleotide
  Antisense strand to SEQ ID NO: 1139574
ucuucgcugagcaagauug

SEQ ID NO: 1139576 - RNA, 19 nt, Artificial Sequence
  Description of Artificial Sequence: Synthetic oligonucleotide
  Sense strand starting at position 2686 of SEQ ID NO: 916219
aaucuugcucagcgaagaa

SEQ ID NO: 1139577 - RNA, 19 nt, Artificial Sequence
  Description of Artificial Sequence: Synthetic oligonucleotide
  Antisense strand to SEQ ID NO: 1139576
uucuucgcugagcaagauu

SEQ ID NO: 1139578 - RNA, 19 nt, Artificial Sequence
  Description of Artificial Sequence: Synthetic oligonucleotide
  Sense strand starting at position 2740 of SEQ ID NO: 916219
cugucacauccugaaguca

SEQ ID NO: 1139579 - RNA, 19 nt, Artificial Sequence
  Description of Artificial Sequence: Synthetic oligonucleotide
  Antisense strand to SEQ ID NO: 1139578
ugacuucaggaugugacag

SEQ ID NO: 1139580 - RNA, 19 nt, Artificial Sequence
  Description of Artificial Sequence: Synthetic oligonucleotide
  Sense strand starting at position 3245 of SEQ ID NO: 916219
ucuuuaauuccuggguuua

SEQ ID NO: 1139581 - RNA, 19 nt, Artificial Sequence
  Description of Artificial Sequence: Synthetic oligonucleotide
  Antisense strand to SEQ ID NO: 1139580
uaaacccaggaauuaaaga

SEQ ID NO: 1139582 - RNA, 19 nt, Artificial Sequence
  Description of Artificial Sequence: Synthetic oligonucleotide
  Sense strand starting at position 3246 of SEQ ID NO: 916219
cuuuaauuccuggguuuaa

SEQ ID NO: 1139583 - RNA, 19 nt, Artificial Sequence
  Description of Artificial Sequence: Synthetic oligonucleotide
  Antisense strand to SEQ ID NO: 1139582
uuaaacccaggaauuaaag

SEQ ID NO: 1139584 - RNA, 19 nt, Artificial Sequence
  Description of Artificial Sequence: Synthetic oligonucleotide
  Sense strand starting at position 3247 of SEQ ID NO: 916219
uuuaauuccuggguuuaaa

SEQ ID NO: 1139585 - RNA, 19 nt, Artificial Sequence
  Description of Artificial Sequence: Synthetic oligonucleotide
  Antisense strand to SEQ ID NO: 1139584
uuuaaacccaggaauuaaa

SEQ ID NO: 1139586 - RNA, 19 nt, Artificial Sequence
  Description of Artificial Sequence: Synthetic oligonucleotide
  Sense strand starting at position 3322 of SEQ ID NO: 916219
cggccuacucucuacuuua

SEQ ID NO: 1139587 - RNA, 19 nt, Artificial Sequence
  Description of Artificial Sequence: Synthetic oligonucleotide
  Antisense strand to SEQ ID NO: 1139586
uaaaguagagaguaggccg

SEQ ID NO: 1139588 - RNA, 19 nt, Artificial Sequence
  Description of Artificial Sequence: Synthetic oligonucleotide
  Sense strand starting at position 3961 of SEQ ID NO: 916219
ugucacauugaugauucua

SEQ ID NO: 1139589 - RNA, 19 nt, Artificial Sequence
  Description of Artificial Sequence: Synthetic oligonucleotide
  Antisense strand to SEQ ID NO: 1139588
uagaaucaucaaugugaca

SEQ ID NO: 1139590 - RNA, 19 nt, Artificial Sequence
  Description of Artificial Sequence: Synthetic oligonucleotide
  Sense strand starting at position 209 of SEQ ID NO: 916220
guacuauugccacacuacu

SEQ ID NO: 1139591 - RNA, 19 nt, Artificial Sequence
  Description of Artificial Sequence: Synthetic oligonucleotide
  Antisense strand to SEQ ID NO: 1139590
aguaguguggcaauaguac

SEQ ID NO: 1139592 - RNA, 19 nt, Artificial Sequence
  Description of Artificial Sequence: Synthetic oligonucleotide
  Sense strand starting at position 302 of SEQ ID NO: 916220
cagcuugugcacugaacaa

SEQ ID NO: 1139593 - RNA, 19 nt, Artificial Sequence
  Description of Artificial Sequence: Synthetic oligonucleotide
  Antisense strand to SEQ ID NO: 1139592
uuguucagugcacaagcug

SEQ ID NO: 1139594 - RNA, 19 nt, Artificial Sequence
  Description of Artificial Sequence: Synthetic oligonucleotide
  Sense strand starting at position 319 of SEQ ID NO: 916220
aacucuagagggugacauu

SEQ ID NO: 1139595 - RNA, 19 nt, Artificial Sequence
  Description of Artificial Sequence: Synthetic oligonucleotide
  Antisense strand to SEQ ID NO: 1139594
aaugucacccucuagaguu

SEQ ID NO: 1139596 - RNA, 19 nt, Artificial Sequence
  Description of Artificial Sequence: Synthetic oligonucleotide
  Sense strand starting at position 322 of SEQ ID NO: 916220
ucuagagggugacauuuau

SEQ ID NO: 1139597 - RNA, 19 nt, Artificial Sequence
  Description of Artificial Sequence: Synthetic oligonucleotide
  Antisense strand to SEQ ID NO: 1139596
auaaaugucacccucuaga

SEQ ID NO: 1139598 - RNA, 19 nt, Artificial Sequence
  Description of Artificial Sequence: Synthetic oligonucleotide
  Sense strand starting at position 401 of SEQ ID NO: 916220
guauuuauacaguggcauu

SEQ ID NO: 1139599 - RNA, 19 nt, Artificial Sequence
  Description of Artificial Sequence: Synthetic oligonucleotide
  Antisense strand to SEQ ID NO: 1139598
aaugccacuguauaaauac

SEQ ID NO: 1139600 - RNA, 19 nt, Artificial Sequence
  Description of Artificial Sequence: Synthetic oligonucleotide
  Sense strand starting at position 425 of SEQ ID NO: 916220
acuugcaugugguuauaua

SEQ ID NO: 1139601 - RNA, 19 nt, Artificial Sequence
  Description of Artificial Sequence: Synthetic oligonucleotide
  Antisense strand to SEQ ID NO: 1139600
uauauaaccacaugcaagu

SEQ ID NO: 1139602 - RNA, 19 nt, Artificial Sequence
  Description of Artificial Sequence: Synthetic oligonucleotide
  Sense strand starting at position 426 of SEQ ID NO: 916220
cuugcaugugguuauauau

SEQ ID NO: 1139603 - RNA, 19 nt, Artificial Sequence
  Description of Artificial Sequence: Synthetic oligonucleotide
  Antisense strand to SEQ ID NO: 1139602
auauauaaccacaugcaag

SEQ ID NO: 1139604 - RNA, 19 nt, Artificial Sequence
  Description of Artificial Sequence: Synthetic oligonucleotide
  Sense strand starting at position 537 of SEQ ID NO: 916220
acacuaaggugguucugaa

SEQ ID NO: 1139605 - RNA, 19 nt, Artificial Sequence
  Description of Artificial Sequence: Synthetic oligonucleotide
  Antisense strand to SEQ ID NO: 1139604
uucagaaccaccuuagugu

SEQ ID NO: 1139606 - RNA, 19 nt, Artificial Sequence
  Description of Artificial Sequence: Synthetic oligonucleotide
  Sense strand starting at position 545 of SEQ ID NO: 916220
gugguucugaaaugcuaac

SEQ ID NO: 1139607 - RNA, 19 nt, Artificial Sequence
  Description of Artificial Sequence: Synthetic oligonucleotide
  Antisense strand to SEQ ID NO: 1139606
guuagcauuucagaaccac

SEQ ID NO: 1139608 - RNA, 19 nt, Artificial Sequence
  Description of Artificial Sequence: Synthetic oligonucleotide
  Sense strand starting at position 988 of SEQ ID NO: 916220
agaggaauuggcugucucu

SEQ ID NO: 1139609 - RNA, 19 nt, Artificial Sequence
  Description of Artificial Sequence: Synthetic oligonucleotide
  Antisense strand to SEQ ID NO: 1139608
agagacagccaauuccucu

SEQ ID NO: 1139610 - RNA, 19 nt, Artificial Sequence
  Description of Artificial Sequence: Synthetic oligonucleotide
  Sense strand starting at position 1052 of SEQ ID NO: 916220
ugacauuugucaucugcau

SEQ ID NO: 1139611 - RNA, 19 nt, Artificial Sequence
  Description of Artificial Sequence: Synthetic oligonucleotide
  Antisense strand to SEQ ID NO: 1139610
augcagaugacaaauguca

SEQ ID NO: 1139612 - RNA, 19 nt, Artificial Sequence
  Description of Artificial Sequence: Synthetic oligonucleotide
  Sense strand starting at position 1058 of SEQ ID NO: 916220
uugucaucugcauagaguu

SEQ ID NO: 1139613 - RNA, 19 nt, Artificial Sequence
  Description of Artificial Sequence: Synthetic oligonucleotide
  Antisense strand to SEQ ID NO: 1139612
aacucuaugcagaugacaa

SEQ ID NO: 1139614 - RNA, 19 nt, Artificial Sequence
  Description of Artificial Sequence: Synthetic oligonucleotide
  Sense strand starting at position 1377 of SEQ ID NO: 916220
cgguguugccuagugguga

SEQ ID NO: 1139615 - RNA, 19 nt, Artificial Sequence
  Description of Artificial Sequence: Synthetic oligonucleotide
  Antisense strand to SEQ ID NO: 1139614
ucaccacuaggcaacaccg

SEQ ID NO: 1139616 - RNA, 19 nt, Artificial Sequence
  Description of Artificial Sequence: Synthetic oligonucleotide
  Sense strand starting at position 1425 of SEQ ID NO: 916220
cagguuggucuuugacuca

SEQ ID NO: 1139617 - RNA, 19 nt, Artificial Sequence
  Description of Artificial Sequence: Synthetic oligonucleotide
  Antisense strand to SEQ ID NO: 1139616
ugagucaaagaccaaccug

SEQ ID NO: 1139618 - RNA, 19 nt, Artificial Sequence
  Description of Artificial Sequence: Synthetic oligonucleotide
  Sense strand starting at position 1428 of SEQ ID NO: 916220
guuggucuuugacucaaug

SEQ ID NO: 1139619 - RNA, 19 nt, Artificial Sequence
  Description of Artificial Sequence: Synthetic oligonucleotide
  Antisense strand to SEQ ID NO: 1139618
cauugagucaaagaccaac

SEQ ID NO: 1139620 - RNA, 19 nt, Artificial Sequence
  Description of Artificial Sequence: Synthetic oligonucleotide
  Sense strand starting at position 2429 of SEQ ID NO: 916220
cgauuagacuaaguuccuu

SEQ ID NO: 1139621 - RNA, 19 nt, Artificial Sequence
  Description of Artificial Sequence: Synthetic oligonucleotide
  Antisense strand to SEQ ID NO: 1139620
aaggaacuuagucuaaucg

SEQ ID NO: 1139622 - RNA, 19 nt, Artificial Sequence
  Description of Artificial Sequence: Synthetic oligonucleotide
  Sense strand starting at position 2454 of SEQ ID NO: 916220
cugcguauuaucuccgcuu

SEQ ID NO: 1139623 - RNA, 19 nt, Artificial Sequence
  Description of Artificial Sequence: Synthetic oligonucleotide
  Antisense strand to SEQ ID NO: 1139622
aagcggagauaauacgcag

SEQ ID NO: 1139624 - RNA, 19 nt, Artificial Sequence
  Description of Artificial Sequence: Synthetic oligonucleotide
  Sense strand starting at position 2546 of SEQ ID NO: 916220
aagccaagccuucggauau

SEQ ID NO: 1139625 - RNA, 19 nt, Artificial Sequence
  Description of Artificial Sequence: Synthetic oligonucleotide
  Antisense strand to SEQ ID NO: 1139624
auauccgaaggcuuggcuu

SEQ ID NO: 1139626 - RNA, 19 nt, Artificial Sequence
  Description of Artificial Sequence: Synthetic oligonucleotide
  Sense strand starting at position 2552 of SEQ ID NO: 916220
agccuucggauauaauaga

SEQ ID NO: 1139627 - RNA, 19 nt, Artificial Sequence
  Description of Artificial Sequence: Synthetic oligonucleotide
  Antisense strand to SEQ ID NO: 1139626
ucuauuauauccgaaggcu

SEQ ID NO: 1139628 - RNA, 19 nt, Artificial Sequence
  Description of Artificial Sequence: Synthetic oligonucleotide
  Sense strand starting at position 2570 of SEQ ID NO: 916220
accguagugcuuuauuuau

SEQ ID NO: 1139629 - RNA, 19 nt, Artificial Sequence
  Description of Artificial Sequence: Synthetic oligonucleotide
  Antisense strand to SEQ ID NO: 1139628
auaaauaaagcacuacggu

SEQ ID NO: 1139630 - RNA, 19 nt, Artificial Sequence
  Description of Artificial Sequence: Synthetic oligonucleotide
  Sense strand starting at position 2576 of SEQ ID NO: 916220
gugcuuuauuuauugacuu

SEQ ID NO: 1139631 - RNA, 19 nt, Artificial Sequence
  Description of Artificial Sequence: Synthetic oligonucleotide
  Antisense strand to SEQ ID NO: 1139630
aagucaauaaauaaagcac

SEQ ID NO: 1139632 - RNA, 19 nt, Artificial Sequence
  Description of Artificial Sequence: Synthetic oligonucleotide
  Sense strand starting at position 2635 of SEQ ID NO: 916220
ccgcuaggcccugaagaua

SEQ ID NO: 1139633 - RNA, 19 nt, Artificial Sequence
  Description of Artificial Sequence: Synthetic oligonucleotide
  Antisense strand to SEQ ID NO: 1139632
uaucuucagggccuagcgg

SEQ ID NO: 1139634 - RNA, 19 nt, Artificial Sequence
  Description of Artificial Sequence: Synthetic oligonucleotide
  Sense strand starting at position 3031 of SEQ ID NO: 916220
guugaauuauugcuguaaa

SEQ ID NO: 1139635 - RNA, 19 nt, Artificial Sequence
  Description of Artificial Sequence: Synthetic oligonucleotide
  Antisense strand to SEQ ID NO: 1139634
uuuacagcaauaauucaac

SEQ ID NO: 1139636 - RNA, 19 nt, Artificial Sequence
  Description of Artificial Sequence: Synthetic oligonucleotide
  Sense strand starting at position 3034 of SEQ ID NO: 916220
gaauuauugcuguaaauug

SEQ ID NO: 1139637 - RNA, 19 nt, Artificial Sequence
  Description of Artificial Sequence: Synthetic oligonucleotide
  Antisense strand to SEQ ID NO: 1139636
caauuuacagcaauaauuc

SEQ ID NO: 1139638 - RNA, 19 nt, Artificial Sequence
  Description of Artificial Sequence: Synthetic oligonucleotide
  Sense strand starting at position 3063 of SEQ ID NO: 916220
gguuaaugauacuuugagu

SEQ ID NO: 1139639 - RNA, 19 nt, Artificial Sequence
  Description of Artificial Sequence: Synthetic oligonucleotide
  Antisense strand to SEQ ID NO: 1139638
acucaaaguaucauuaacc

SEQ ID NO: 1139640 - RNA, 19 nt, Artificial Sequence
  Description of Artificial Sequence: Synthetic oligonucleotide
  Sense strand starting at position 3128 of SEQ ID NO: 916220
uaaugagagcuugguguga

SEQ ID NO: 1139641 - RNA, 19 nt, Artificial Sequence
  Description of Artificial Sequence: Synthetic oligonucleotide
  Antisense strand to SEQ ID NO: 1139640
ucacaccaagcucucauua

SEQ ID NO: 1139642 - RNA, 19 nt, Artificial Sequence
  Description of Artificial Sequence: Synthetic oligonucleotide
  Sense strand starting at position 3132 of SEQ ID NO: 916220
gagagcuuggugugagauc

SEQ ID NO: 1139643 - RNA, 19 nt, Artificial Sequence
  Description of Artificial Sequence: Synthetic oligonucleotide
  Antisense strand to SEQ ID NO: 1139642
gaucucacaccaagcucuc

SEQ ID NO: 1139644 - RNA, 19 nt, Artificial Sequence
  Description of Artificial Sequence: Synthetic oligonucleotide
  Sense strand starting at position 3191 of SEQ ID NO: 916220
gagggaaucaggcgugcaa

SEQ ID NO: 1139645 - RNA, 19 nt, Artificial Sequence
  Description of Artificial Sequence: Synthetic oligonucleotide
  Antisense strand to SEQ ID NO: 1139644
uugcacgccugauucccuc

SEQ ID NO: 1139646 - RNA, 19 nt, Artificial Sequence
  Description of Artificial Sequence: Synthetic oligonucleotide
  Sense strand starting at position 3193 of SEQ ID NO: 916220
gggaaucaggcgugcaaag

SEQ ID NO: 1139647 - RNA, 19 nt, Artificial Sequence
  Description of Artificial Sequence: Synthetic oligonucleotide
  Antisense strand to SEQ ID NO: 1139646
cuuugcacgccugauuccc

SEQ ID NO: 1139648 - RNA, 19 nt, Artificial Sequence
  Description of Artificial Sequence: Synthetic oligonucleotide
  Sense strand starting at position 3272 of SEQ ID NO: 916220
gcuaaucgaccugaaugga

SEQ ID NO: 1139649 - RNA, 19 nt, Artificial Sequence
  Description of Artificial Sequence: Synthetic oligonucleotide
  Antisense strand to SEQ ID NO: 1139648
uccauucaggucgauuagc

SEQ ID NO: 1139650 - RNA, 19 nt, Artificial Sequence
  Description of Artificial Sequence: Synthetic oligonucleotide
  Sense strand starting at position 3321 of SEQ ID NO: 916220
gaagcagagccuuagccau

SEQ ID NO: 1139651 - RNA, 19 nt, Artificial Sequence
  Description of Artificial Sequence: Synthetic oligonucleotide
  Antisense strand to SEQ ID NO: 1139650
auggcuaaggcucugcuuc

SEQ ID NO: 1139652 - RNA, 19 nt, Artificial Sequence
  Description of Artificial Sequence: Synthetic oligonucleotide
  Sense strand starting at position 3333 of SEQ ID NO: 916220
uagccauaccgagaaguuu

SEQ ID NO: 1139653 - RNA, 19 nt, Artificial Sequence
  Description of Artificial Sequence: Synthetic oligonucleotide
  Antisense strand to SEQ ID NO: 1139652
aaacuucucgguauggcua

SEQ ID NO: 1139654 - RNA, 19 nt, Artificial Sequence
  Description of Artificial Sequence: Synthetic oligonucleotide
  Sense strand starting at position 3353 of SEQ ID NO: 916220
gugcuuauccaagaauuaa

SEQ ID NO: 1139655 - RNA, 19 nt, Artificial Sequence
  Description of Artificial Sequence: Synthetic oligonucleotide
  Antisense strand to SEQ ID NO: 1139654
uuaauucuuggauaagcac

SEQ ID NO: 1139656 - RNA, 19 nt, Artificial Sequence
  Description of Artificial Sequence: Synthetic oligonucleotide
  Sense strand starting at position 3386 of SEQ ID NO: 916220
aagcuuuaagcagaaguga

SEQ ID NO: 1139657 - RNA, 19 nt, Artificial Sequence
  Description of Artificial Sequence: Synthetic oligonucleotide
  Antisense strand to SEQ ID NO: 1139656
ucacuucugcuuaaagcuu

SEQ ID NO: 1139658 - RNA, 19 nt, Artificial Sequence
  Description of Artificial Sequence: Synthetic oligonucleotide
  Sense strand starting at position 3467 of SEQ ID NO: 916220
ggcagaacaguuggauguu

SEQ ID NO: 1139659 - RNA, 19 nt, Artificial Sequence
  Description of Artificial Sequence: Synthetic oligonucleotide
  Antisense strand to SEQ ID NO: 1139658
aacauccaacuguucugcc

SEQ ID NO: 1139660 - RNA, 19 nt, Artificial Sequence
  Description of Artificial Sequence: Synthetic oligonucleotide
  Sense strand starting at position 3483 of SEQ ID NO: 916220
guugcaauacuccaggcaa

SEQ ID NO: 1139661 - RNA, 19 nt, Artificial Sequence
  Description of Artificial Sequence: Synthetic oligonucleotide
  Antisense strand to SEQ ID NO: 1139660
uugccuggaguauugcaac

SEQ ID NO: 1139662 - RNA, 19 nt, Artificial Sequence
  Description of Artificial Sequence: Synthetic oligonucleotide
  Sense strand starting at position 3593 of SEQ ID NO: 916220
acauguuuaagagguaaag

SEQ ID NO: 1139663 - RNA, 19 nt, Artificial Sequence
  Description of Artificial Sequence: Synthetic oligonucleotide
  Antisense strand to SEQ ID NO: 1139662
cuuuaccucuuaaacaugu

SEQ ID NO: 1139664 - RNA, 19 nt, Artificial Sequence
  Description of Artificial Sequence: Synthetic oligonucleotide
  Sense strand starting at position 3595 of SEQ ID NO: 916220
auguuuaagagguaaaguu

SEQ ID NO: 1139665 - RNA, 19 nt, Artificial Sequence
  Description of Artificial Sequence: Synthetic oligonucleotide
  Antisense strand to SEQ ID NO: 1139664
aacuuuaccucuuaaacau

SEQ ID NO: 1139666 - RNA, 19 nt, Artificial Sequence
  Description of Artificial Sequence: Synthetic oligonucleotide
  Sense strand starting at position 3620 of SEQ ID NO: 916220
gcuugaugguggguuggau

SEQ ID NO: 1139667 - RNA, 19 nt, Artificial Sequence
  Description of Artificial Sequence: Synthetic oligonucleotide
  Antisense strand to SEQ ID NO: 1139666
auccaacccaccaucaagc

SEQ ID NO: 1139668 - RNA, 19 nt, Artificial Sequence
  Description of Artificial Sequence: Synthetic oligonucleotide
  Sense strand starting at position 3716 of SEQ ID NO: 916220
agauaaucacuuuggccaa

SEQ ID NO: 1139669 - RNA, 19 nt, Artificial Sequence
  Description of Artificial Sequence: Synthetic oligonucleotide
  Antisense strand to SEQ ID NO: 1139668
uuggccaaagugauuaucu

SEQ ID NO: 1139670 - RNA, 19 nt, Artificial Sequence
  Description of Artificial Sequence: Synthetic oligonucleotide
  Sense strand starting at position 548 of SEQ ID NO: 916221
gggcaaaggacuugcugaa

SEQ ID NO: 1139671 - RNA, 19 nt, Artificial Sequence
  Description of Artificial Sequence: Synthetic oligonucleotide
  Antisense strand to SEQ ID NO: 1139670
uucagcaaguccuuugccc

SEQ ID NO: 1139672 - RNA, 19 nt, Artificial Sequence
  Description of Artificial Sequence: Synthetic oligonucleotide
  Sense strand starting at position 555 of SEQ ID NO: 916221
ggacuugcugaaugucaca

SEQ ID NO: 1139673 - RNA, 19 nt, Artificial Sequence
  Description of Artificial Sequence: Synthetic oligonucleotide
  Antisense strand to SEQ ID NO: 1139672
ugugacauucagcaagucc

SEQ ID NO: 1139674 - RNA, 19 nt, Artificial Sequence
  Description of Artificial Sequence: Synthetic oligonucleotide
  Sense strand starting at position 609 of SEQ ID NO: 916221
ucuuaacaucuguggagga

SEQ ID NO: 1139675 - RNA, 19 nt, Artificial Sequence
  Description of Artificial Sequence: Synthetic oligonucleotide
  Antisense strand to SEQ ID NO: 1139674
uccuccacagauguuaaga

SEQ ID NO: 1139676 - RNA, 19 nt, Artificial Sequence
  Description of Artificial Sequence: Synthetic oligonucleotide
  Sense strand starting at position 921 of SEQ ID NO: 916221
acaauaguucuugggcagu

SEQ ID NO: 1139677 - RNA, 19 nt, Artificial Sequence
  Description of Artificial Sequence: Synthetic oligonucleotide
  Antisense strand to SEQ ID NO: 1139676
acugcccaagaacuauugu

SEQ ID NO: 1139678 - RNA, 19 nt, Artificial Sequence
  Description of Artificial Sequence: Synthetic oligonucleotide
  Sense strand starting at position 923 of SEQ ID NO: 916221
aauaguucuugggcaguuu

SEQ ID NO: 1139679 - RNA, 19 nt, Artificial Sequence
  Description of Artificial Sequence: Synthetic oligonucleotide
  Antisense strand to SEQ ID NO: 1139678
aaacugcccaagaacuauu

SEQ ID NO: 1139680 - RNA, 19 nt, Artificial Sequence
  Description of Artificial Sequence: Synthetic oligonucleotide
  Sense strand starting at position 1015 of SEQ ID NO: 916221
ccuguauuccuguggagag

SEQ ID NO: 1139681 - RNA, 19 nt, Artificial Sequence
  Description of Artificial Sequence: Synthetic oligonucleotide
  Antisense strand to SEQ ID NO: 1139680
cucuccacaggaauacagg

SEQ ID NO: 1139682 - RNA, 19 nt, Artificial Sequence
  Description of Artificial Sequence: Synthetic oligonucleotide
  Sense strand starting at position 1056 of SEQ ID NO: 916221
uucgaauaauuccugacau

SEQ ID NO: 1139683 - RNA, 19 nt, Artificial Sequence
  Description of Artificial Sequence: Synthetic oligonucleotide
  Antisense strand to SEQ ID NO: 1139682
augucaggaauuauucgaa

SEQ ID NO: 1139684 - RNA, 19 nt, Artificial Sequence
  Description of Artificial Sequence: Synthetic oligonucleotide
  Sense strand starting at position 1083 of SEQ ID NO: 916221
aggugucacuuucuaucau

SEQ ID NO: 1139685 - RNA, 19 nt, Artificial Sequence
  Description of Artificial Sequence: Synthetic oligonucleotide
  Antisense strand to SEQ ID NO: 1139684
augauagaaagugacaccu

SEQ ID NO: 1139686 - RNA, 19 nt, Artificial Sequence
  Description of Artificial Sequence: Synthetic oligonucleotide
  Sense strand starting at position 1094 of SEQ ID NO: 916221
ucuaucaucuccuugggaa

SEQ ID NO: 1139687 - RNA, 19 nt, Artificial Sequence
  Description of Artificial Sequence: Synthetic oligonucleotide
  Antisense strand to SEQ ID NO: 1139686
uucccaaggagaugauaga

SEQ ID NO: 1139688 - RNA, 19 nt, Artificial Sequence
  Description of Artificial Sequence: Synthetic oligonucleotide
  Sense strand starting at position 1095 of SEQ ID NO: 916221
cuaucaucuccuugggaaa

SEQ ID NO: 1139689 - RNA, 19 nt, Artificial Sequence
  Description of Artificial Sequence: Synthetic oligonucleotide
  Antisense strand to SEQ ID NO: 1139688
uuucccaaggagaugauag

SEQ ID NO: 1139690 - RNA, 19 nt, Artificial Sequence
  Description of Artificial Sequence: Synthetic oligonucleotide
  Sense strand starting at position 1248 of SEQ ID NO: 916221
agaggauuccugggcaucu

SEQ ID NO: 1139691 - RNA, 19 nt, Artificial Sequence
  Description of Artificial Sequence: Synthetic oligonucleotide
  Antisense strand to SEQ ID NO: 1139690
agaugcccaggaauccucu

SEQ ID NO: 1139692 - RNA, 19 nt, Artificial Sequence
  Description of Artificial Sequence: Synthetic oligonucleotide
  Sense strand starting at position 1270 of SEQ ID NO: 916221
gucacuuucccagggcaau

SEQ ID NO: 1139693 - RNA, 19 nt, Artificial Sequence
  Description of Artificial Sequence: Synthetic oligonucleotide
  Antisense strand to SEQ ID NO: 1139692
auugcccugggaaagugac

SEQ ID NO: 1139694 - RNA, 19 nt, Artificial Sequence
  Description of Artificial Sequence: Synthetic oligonucleotide
  Sense strand starting at position 1271 of SEQ ID NO: 916221
ucacuuucccagggcaauu

SEQ ID NO: 1139695 - RNA, 19 nt, Artificial Sequence
  Description of Artificial Sequence: Synthetic oligonucleotide
  Antisense strand to SEQ ID NO: 1139694
aauugcccugggaaaguga

SEQ ID NO: 1139696 - RNA, 19 nt, Artificial Sequence
  Description of Artificial Sequence: Synthetic oligonucleotide
  Sense strand starting at position 1323 of SEQ ID NO: 916221
aaugaaauucccgguucuu

SEQ ID NO: 1139697 - RNA, 19 nt, Artificial Sequence
  Description of Artificial Sequence: Synthetic oligonucleotide
  Antisense strand to SEQ ID NO: 1139696
aagaaccgggaauuucauu

SEQ ID NO: 1139698 - RNA, 19 nt, Artificial Sequence
  Description of Artificial Sequence: Synthetic oligonucleotide
  Sense strand starting at position 1459 of SEQ ID NO: 916221
accucaguuugguuaugau

SEQ ID NO: 1139699 - RNA, 19 nt, Artificial Sequence
  Description of Artificial Sequence: Synthetic oligonucleotide
  Antisense strand to SEQ ID NO: 1139698
aucauaaccaaacugaggu

SEQ ID NO: 1139700 - RNA, 19 nt, Artificial Sequence
  Description of Artificial Sequence: Synthetic oligonucleotide
  Sense strand starting at position 1499 of SEQ ID NO: 916221
cuggaugugacauguguau

SEQ ID NO: 1139701 - RNA, 19 nt, Artificial Sequence
  Description of Artificial Sequence: Synthetic oligonucleotide
  Antisense strand to SEQ ID NO: 1139700
auacacaugucacauccag

SEQ ID NO: 1139702 - RNA, 19 nt, Artificial Sequence
  Description of Artificial Sequence: Synthetic oligonucleotide
  Sense strand starting at position 1824 of SEQ ID NO: 916221
gggucucuacccuggaaau

SEQ ID NO: 1139703 - RNA, 19 nt, Artificial Sequence
  Description of Artificial Sequence: Synthetic oligonucleotide
  Antisense strand to SEQ ID NO: 1139702
auuuccaggguagagaccc

SEQ ID NO: 1139704 - RNA, 19 nt, Artificial Sequence
  Description of Artificial Sequence: Synthetic oligonucleotide
  Sense strand starting at position 1825 of SEQ ID NO: 916221
ggucucuacccuggaaaug

SEQ ID NO: 1139705 - RNA, 19 nt, Artificial Sequence
  Description of Artificial Sequence: Synthetic oligonucleotide
  Antisense strand to SEQ ID NO: 1139704
cauuuccaggguagagacc

SEQ ID NO: 1139706 - RNA, 19 nt, Artificial Sequence
  Description of Artificial Sequence: Synthetic oligonucleotide
  Sense strand starting at position 2333 of SEQ ID NO: 916221
ggaggcugggugcauuaaa

SEQ ID NO: 1139707 - RNA, 19 nt, Artificial Sequence
  Description of Artificial Sequence: Synthetic oligonucleotide
  Antisense strand to SEQ ID NO: 1139706
uuuaaugcacccagccucc

SEQ ID NO: 1139708 - RNA, 19 nt, Artificial Sequence
  Description of Artificial Sequence: Synthetic oligonucleotide
  Sense strand starting at position 3085 of SEQ ID NO: 916221
ccauucuuucguuacuuau

SEQ ID NO: 1139709 - RNA, 19 nt, Artificial Sequence
  Description of Artificial Sequence: Synthetic oligonucleotide
  Antisense strand to SEQ ID NO: 1139708
auaaguaacgaaagaaugg

SEQ ID NO: 1139710 - RNA, 19 nt, Artificial Sequence
  Description of Artificial Sequence: Synthetic oligonucleotide
  Sense strand starting at position 3130 of SEQ ID NO: 916221
gcaucagcccuugaugaca

SEQ ID NO: 1139711 - RNA, 19 nt, Artificial Sequence
  Description of Artificial Sequence: Synthetic oligonucleotide
  Antisense strand to SEQ ID NO: 1139710
ugucaucaagggcugaugc

SEQ ID NO: 1139712 - RNA, 19 nt, Artificial Sequence
  Description of Artificial Sequence: Synthetic oligonucleotide
  Sense strand starting at position 3327 of SEQ ID NO: 916221
gaggcuguccucgcguuau

SEQ ID NO: 1139713 - RNA, 19 nt, Artificial Sequence
  Description of Artificial Sequence: Synthetic oligonucleotide
  Antisense strand to SEQ ID NO: 1139712
auaacgcgaggacagccuc

SEQ ID NO: 1139714 - RNA, 19 nt, Artificial Sequence
  Description of Artificial Sequence: Synthetic oligonucleotide
  Sense strand starting at position 3330 of SEQ ID NO: 916221
gcuguccucgcguuaucua

SEQ ID NO: 1139715 - RNA, 19 nt, Artificial Sequence
  Description of Artificial Sequence: Synthetic oligonucleotide
  Antisense strand to SEQ ID NO: 1139714
uagauaacgcgaggacagc

SEQ ID NO: 1139716 - RNA, 19 nt, Artificial Sequence
  Description of Artificial Sequence: Synthetic oligonucleotide
  Sense strand starting at position 3337 of SEQ ID NO: 916221
ucgcguuaucuacuucgca

SEQ ID NO: 1139717 - RNA, 19 nt, Artificial Sequence
  Description of Artificial Sequence: Synthetic oligonucleotide
  Antisense strand to SEQ ID NO: 1139716
ugcgaaguagauaacgcga

SEQ ID NO: 1139718 - RNA, 19 nt, Artificial Sequence
  Description of Artificial Sequence: Synthetic oligonucleotide
  Sense strand starting at position 3411 of SEQ ID NO: 916221
aguguuuaaguucaggaag

SEQ ID NO: 1139719 - RNA, 19 nt, Artificial Sequence
  Description of Artificial Sequence: Synthetic oligonucleotide
  Antisense strand to SEQ ID NO: 1139718
cuuccugaacuuaaacacu

SEQ ID NO: 1139720 - RNA, 19 nt, Artificial Sequence
  Description of Artificial Sequence: Synthetic oligonucleotide
  Sense strand starting at position 3501 of SEQ ID NO: 916221
ugguccauguccucacaaa

SEQ ID NO: 1139721 - RNA, 19 nt, Artificial Sequence
  Description of Artificial Sequence: Synthetic oligonucleotide
  Antisense strand to SEQ ID NO: 1139720
uuugugaggacauggacca

SEQ ID NO: 1139722 - RNA, 19 nt, Artificial Sequence
  Description of Artificial Sequence: Synthetic oligonucleotide
  Sense strand starting at position 3502 of SEQ ID NO: 916221
gguccauguccucacaaau

SEQ ID NO: 1139723 - RNA, 19 nt, Artificial Sequence
  Description of Artificial Sequence: Synthetic oligonucleotide
  Antisense strand to SEQ ID NO: 1139722
auuugugaggacauggacc

SEQ ID NO: 1139724 - RNA, 19 nt, Artificial Sequence
  Description of Artificial Sequence: Synthetic oligonucleotide
  Sense strand starting at position 3556 of SEQ ID NO: 916221
ucuucucugccaggaguaa

SEQ ID NO: 1139725 - RNA, 19 nt, Artificial Sequence
  Description of Artificial Sequence: Synthetic oligonucleotide
  Antisense strand to SEQ ID NO: 1139724
uuacuccuggcagagaaga

SEQ ID NO: 1139726 - RNA, 19 nt, Artificial Sequence
  Description of Artificial Sequence: Synthetic oligonucleotide
  Sense strand starting at position 3557 of SEQ ID NO: 916221
cuucucugccaggaguaaa

SEQ ID NO: 1139727 - RNA, 19 nt, Artificial Sequence
  Description of Artificial Sequence: Synthetic oligonucleotide
  Antisense strand to SEQ ID NO: 1139726
uuuacuccuggcagagaag

SEQ ID NO: 1139728 - RNA, 19 nt, Artificial Sequence
  Description of Artificial Sequence: Synthetic oligonucleotide
  Sense strand starting at position 3569 of SEQ ID NO: 916221
gaguaaauagaucagcuuu

SEQ ID NO: 1139729 - RNA, 19 nt, Artificial Sequence
  Description of Artificial Sequence: Synthetic oligonucleotide
  Antisense strand to SEQ ID NO: 1139728
aaagcugaucuauuuacuc

SEQ ID NO: 1139730 - RNA, 19 nt, Artificial Sequence
  Description of Artificial Sequence: Synthetic oligonucleotide
  Sense strand starting at position 3617 of SEQ ID NO: 916221
uacagauguuaguugaggu

SEQ ID NO: 1139731 - RNA, 19 nt, Artificial Sequence
  Description of Artificial Sequence: Synthetic oligonucleotide
  Antisense strand to SEQ ID NO: 1139730
accucaacuaacaucugua

SEQ ID NO: 1139732 - RNA, 19 nt, Artificial Sequence
  Description of Artificial Sequence: Synthetic oligonucleotide
  Sense strand starting at position 3633 of SEQ ID NO: 916221
ggucacagucaugaaacuu

SEQ ID NO: 1139733 - RNA, 19 nt, Artificial Sequence
  Description of Artificial Sequence: Synthetic oligonucleotide
  Antisense strand to SEQ ID NO: 1139732
aaguuucaugacugugacc

SEQ ID NO: 1139734 - RNA, 19 nt, Artificial Sequence
  Description of Artificial Sequence: Synthetic oligonucleotide
  Sense strand starting at position 3668 of SEQ ID NO: 916221
ccgcgaccagcauguauuu

SEQ ID NO: 1139735 - RNA, 19 nt, Artificial Sequence
  Description of Artificial Sequence: Synthetic oligonucleotide
  Antisense strand to SEQ ID NO: 1139734
aaauacaugcuggucgcgg

SEQ ID NO: 1139736 - RNA, 19 nt, Artificial Sequence
  Description of Artificial Sequence: Synthetic oligonucleotide
  Sense strand starting at position 3704 of SEQ ID NO: 916221
cgguuaggaaagugguuua

SEQ ID NO: 1139737 - RNA, 19 nt, Artificial Sequence
  Description of Artificial Sequence: Synthetic oligonucleotide
  Antisense strand to SEQ ID NO: 1139736
uaaaccacuuuccuaaccg

SEQ ID NO: 1139738 - RNA, 19 nt, Artificial Sequence
  Description of Artificial Sequence: Synthetic oligonucleotide
  Sense strand starting at position 3707 of SEQ ID NO: 916221
uuaggaaagugguuuacau

SEQ ID NO: 1139739 - RNA, 19 nt, Artificial Sequence
  Description of Artificial Sequence: Synthetic oligonucleotide
  Antisense strand to SEQ ID NO: 1139738
auguaaaccacuuuccuaa

SEQ ID NO: 1139740 - RNA, 19 nt, Artificial Sequence
  Description of Artificial Sequence: Synthetic oligonucleotide
  Sense strand starting at position 3735 of SEQ ID NO: 916221
ugcuuugaaugucccugaa

SEQ ID NO: 1139741 - RNA, 19 nt, Artificial Sequence
  Description of Artificial Sequence: Synthetic oligonucleotide
  Antisense strand to SEQ ID NO: 1139740
uucagggacauucaaagca

SEQ ID NO: 1139742 - RNA, 19 nt, Artificial Sequence
  Description of Artificial Sequence: Synthetic oligonucleotide
  Sense strand starting at position 3737 of SEQ ID NO: 916221
cuuugaaugucccugaaug

SEQ ID NO: 1139743 - RNA, 19 nt, Artificial Sequence
  Description of Artificial Sequence: Synthetic oligonucleotide
  Antisense strand to SEQ ID NO: 1139742
cauucagggacauucaaag

SEQ ID NO: 1139744 - RNA, 19 nt, Artificial Sequence
  Description of Artificial Sequence: Synthetic oligonucleotide
  Sense strand starting at position 3738 of SEQ ID NO: 916221
uuugaaugucccugaauga

SEQ ID NO: 1139745 - RNA, 19 nt, Artificial Sequence
  Description of Artificial Sequence: Synthetic oligonucleotide
  Antisense strand to SEQ ID NO: 1139744
ucauucagggacauucaaa

SEQ ID NO: 1139746 - RNA, 19 nt, Artificial Sequence
  Description of Artificial Sequence: Synthetic oligonucleotide
  Sense strand starting at position 3813 of SEQ ID NO: 916221
uguuaauccuucuuggagu

SEQ ID NO: 1139747 - RNA, 19 nt, Artificial Sequence
  Description of Artificial Sequence: Synthetic oligonucleotide
  Antisense strand to SEQ ID NO: 1139746
acuccaagaaggauuaaca

SEQ ID NO: 1139748 - RNA, 19 nt, Artificial Sequence
  Description of Artificial Sequence: Synthetic oligonucleotide
  Sense strand starting at position 3826 of SEQ ID NO: 916221
uggaguuguaaggaaacgu

SEQ ID NO: 1139749 - RNA, 19 nt, Artificial Sequence
  Description of Artificial Sequence: Synthetic oligonucleotide
  Antisense strand to SEQ ID NO: 1139748
acguuuccuuacaacucca

SEQ ID NO: 1139750 - RNA, 19 nt, Artificial Sequence
  Description of Artificial Sequence: Synthetic oligonucleotide
  Sense strand starting at position 229 of SEQ ID NO: 916222
gaaugaggcugucucgaaa

SEQ ID NO: 1139751 - RNA, 19 nt, Artificial Sequence
  Description of Artificial Sequence: Synthetic oligonucleotide
  Antisense strand to SEQ ID NO: 1139750
uuucgagacagccucauuc

SEQ ID NO: 1139752 - RNA, 19 nt, Artificial Sequence
  Description of Artificial Sequence: Synthetic oligonucleotide
  Sense strand starting at position 468 of SEQ ID NO: 916222
gaaagagaaugacauaagu

SEQ ID NO: 1139753 - RNA, 19 nt, Artificial Sequence
  Description of Artificial Sequence: Synthetic oligonucleotide
  Antisense strand to SEQ ID NO: 1139752
acuuaugucauucucuuuc

SEQ ID NO: 1139754 - RNA, 19 nt, Artificial Sequence
  Description of Artificial Sequence: Synthetic oligonucleotide
  Sense strand starting at position 550 of SEQ ID NO: 916222
ugguuucaagaaggugauu

SEQ ID NO: 1139755 - RNA, 19 nt, Artificial Sequence
  Description of Artificial Sequence: Synthetic oligonucleotide
  Antisense strand to SEQ ID NO: 1139754
aaucaccuucuugaaacca

SEQ ID NO: 1139756 - RNA, 19 nt, Artificial Sequence
  Description of Artificial Sequence: Synthetic oligonucleotide
  Sense strand starting at position 559 of SEQ ID NO: 916222
gaaggugauuugugaauac

SEQ ID NO: 1139757 - RNA, 19 nt, Artificial Sequence
  Description of Artificial Sequence: Synthetic oligonucleotide
  Antisense strand to SEQ ID NO: 1139756
guauucacaaaucaccuuc

SEQ ID NO: 1139758 - RNA, 19 nt, Artificial Sequence
  Description of Artificial Sequence: Synthetic oligonucleotide
  Sense strand starting at position 571 of SEQ ID NO: 916222
ugaauacuuuacgcugcaa

SEQ ID NO: 1139759 - RNA, 19 nt, Artificial Sequence
  Description of Artificial Sequence: Synthetic oligonucleotide
  Antisense strand to SEQ ID NO: 1139758
uugcagcguaaaguauuca

SEQ ID NO: 1139760 - RNA, 19 nt, Artificial Sequence
  Description of Artificial Sequence: Synthetic oligonucleotide
  Sense strand starting at position 611 of SEQ ID NO: 916222
agcaauaaucugcaguaac

SEQ ID NO: 1139761 - RNA, 19 nt, Artificial Sequence
  Description of Artificial Sequence: Synthetic oligonucleotide
  Antisense strand to SEQ ID NO: 1139760
guuacugcagauuauugcu

SEQ ID NO: 1139762 - RNA, 19 nt, Artificial Sequence
  Description of Artificial Sequence: Synthetic oligonucleotide
  Sense strand starting at position 656 of SEQ ID NO: 916222
aucaccauuuauuguggaa

SEQ ID NO: 1139763 - RNA, 19 nt, Artificial Sequence
  Description of Artificial Sequence: Synthetic oligonucleotide
  Antisense strand to SEQ ID NO: 1139762
uuccacaauaaauggugau

SEQ ID NO: 1139764 - RNA, 19 nt, Artificial Sequence
  Description of Artificial Sequence: Synthetic oligonucleotide
  Sense strand starting at position 761 of SEQ ID NO: 916222
aggaaauccucaguuuauc

SEQ ID NO: 1139765 - RNA, 19 nt, Artificial Sequence
  Description of Artificial Sequence: Synthetic oligonucleotide
  Antisense strand to SEQ ID NO: 1139764
gauaaacugaggauuuccu

SEQ ID NO: 1139766 - RNA, 19 nt, Artificial Sequence
  Description of Artificial Sequence: Synthetic oligonucleotide
  Sense strand starting at position 767 of SEQ ID NO: 916222
uccucaguuuauccgaagu

SEQ ID NO: 1139767 - RNA, 19 nt, Artificial Sequence
  Description of Artificial Sequence: Synthetic oligonucleotide
  Antisense strand to SEQ ID NO: 1139766
acuucggauaaacugagga

SEQ ID NO: 1139768 - RNA, 19 nt, Artificial Sequence
  Description of Artificial Sequence: Synthetic oligonucleotide
  Sense strand starting at position 820 of SEQ ID NO: 916222
ucugcccaccugugugaaa

SEQ ID NO: 1139769 - RNA, 19 nt, Artificial Sequence
  Description of Artificial Sequence: Synthetic oligonucleotide
  Antisense strand to SEQ ID NO: 1139768
uuucacacaggugggcaga

SEQ ID NO: 1139770 - RNA, 19 nt, Artificial Sequence
  Description of Artificial Sequence: Synthetic oligonucleotide
  Sense strand starting at position 832 of SEQ ID NO: 916222
ugugaaacucugcauugca

SEQ ID NO: 1139771 - RNA, 19 nt, Artificial Sequence
  Description of Artificial Sequence: Synthetic oligonucleotide
  Antisense strand to SEQ ID NO: 1139770
ugcaaugcagaguuucaca

SEQ ID NO: 1139772 - RNA, 19 nt, Artificial Sequence
  Description of Artificial Sequence: Synthetic oligonucleotide
  Sense strand starting at position 840 of SEQ ID NO: 916222
ucugcauugcagcaacaau

SEQ ID NO: 1139773 - RNA, 19 nt, Artificial Sequence
  Description of Artificial Sequence: Synthetic oligonucleotide
  Antisense strand to SEQ ID NO: 1139772
auuguugcugcaaugcaga

SEQ ID NO: 1139774 - RNA, 19 nt, Artificial Sequence
  Description of Artificial Sequence: Synthetic oligonucleotide
  Sense strand starting at position 958 of SEQ ID NO: 916222
ggauauaacuguccaacuc

SEQ ID NO: 1139775 - RNA, 19 nt, Artificial Sequence
  Description of Artificial Sequence: Synthetic oligonucleotide
  Antisense strand to SEQ ID NO: 1139774
gaguuggacaguuauaucc

SEQ ID NO: 1139776 - RNA, 19 nt, Artificial Sequence
  Description of Artificial Sequence: Synthetic oligonucleotide
  Sense strand starting at position 989 of SEQ ID NO: 916222
ucguacagccucugaauga

SEQ ID NO: 1139777 - RNA, 19 nt, Artificial Sequence
  Description of Artificial Sequence: Synthetic oligonucleotide
  Antisense strand to SEQ ID NO: 1139776
ucauucagaggcuguacga

SEQ ID NO: 1139778 - RNA, 19 nt, Artificial Sequence
  Description of Artificial Sequence: Synthetic oligonucleotide
  Sense strand starting at position 1114 of SEQ ID NO: 916222
gggugucuaaacuacugau

SEQ ID NO: 1139779 - RNA, 19 nt, Artificial Sequence
  Description of Artificial Sequence: Synthetic oligonucleotide
  Antisense strand to SEQ ID NO: 1139778
aucaguaguuuagacaccc

SEQ ID NO: 1139780 - RNA, 19 nt, Artificial Sequence
  Description of Artificial Sequence: Synthetic oligonucleotide
  Sense strand starting at position 2220 of SEQ ID NO: 916222
cggagaauuaggugcaaga

SEQ ID NO: 1139781 - RNA, 19 nt, Artificial Sequence
  Description of Artificial Sequence: Synthetic oligonucleotide
  Antisense strand to SEQ ID NO: 1139780
ucuugcaccuaauucuccg

SEQ ID NO: 1139782 - RNA, 19 nt, Artificial Sequence
  Description of Artificial Sequence: Synthetic oligonucleotide
  Sense strand starting at position 2233 of SEQ ID NO: 916222
gcaagaauccagugccuac

SEQ ID NO: 1139783 - RNA, 19 nt, Artificial Sequence
  Description of Artificial Sequence: Synthetic oligonucleotide
  Antisense strand to SEQ ID NO: 1139782
guaggcacuggauucuugc

SEQ ID NO: 1139784 - RNA, 19 nt, Artificial Sequence
  Description of Artificial Sequence: Synthetic oligonucleotide
  Sense strand starting at position 2418 of SEQ ID NO: 916222
ggugcuauuaucuacgucu

SEQ ID NO: 1139785 - RNA, 19 nt, Artificial Sequence
  Description of Artificial Sequence: Synthetic oligonucleotide
  Antisense strand to SEQ ID NO: 1139784
agacguagauaauagcacc

SEQ ID NO: 1139786 - RNA, 19 nt, Artificial Sequence
  Description of Artificial Sequence: Synthetic oligonucleotide
  Sense strand starting at position 2475 of SEQ ID NO: 916222
cucacaaauguugguugau

SEQ ID NO: 1139787 - RNA, 19 nt, Artificial Sequence
  Description of Artificial Sequence: Synthetic oligonucleotide
  Antisense strand to SEQ ID NO: 1139786
aucaaccaacauuugugag

SEQ ID NO: 1139788 - RNA, 19 nt, Artificial Sequence
  Description of Artificial Sequence: Synthetic oligonucleotide
  Sense strand starting at position 2476 of SEQ ID NO: 916222
ucacaaauguugguugauu

SEQ ID NO: 1139789 - RNA, 19 nt, Artificial Sequence
  Description of Artificial Sequence: Synthetic oligonucleotide
  Antisense strand to SEQ ID NO: 1139788
aaucaaccaacauuuguga

SEQ ID NO: 1139790 - RNA, 19 nt, Artificial Sequence
  Description of Artificial Sequence: Synthetic oligonucleotide
  Sense strand starting at position 2715 of SEQ ID NO: 916222
ucaucucugcauuguagga

SEQ ID NO: 1139791 - RNA, 19 nt, Artificial Sequence
  Description of Artificial Sequence: Synthetic oligonucleotide
  Antisense strand to SEQ ID NO: 1139790
uccuacaaugcagagauga

SEQ ID NO: 1139792 - RNA, 19 nt, Artificial Sequence
  Description of Artificial Sequence: Synthetic oligonucleotide
  Sense strand starting at position 2767 of SEQ ID NO: 916222
aaugucuggcauuggauaa

SEQ ID NO: 1139793 - RNA, 19 nt, Artificial Sequence
  Description of Artificial Sequence: Synthetic oligonucleotide
  Antisense strand to SEQ ID NO: 1139792
uuauccaaugccagacauu

SEQ ID NO: 1139794 - RNA, 19 nt, Artificial Sequence
  Description of Artificial Sequence: Synthetic oligonucleotide
  Sense strand starting at position 2768 of SEQ ID NO: 916222
augucuggcauuggauaaa

SEQ ID NO: 1139795 - RNA, 19 nt, Artificial Sequence
  Description of Artificial Sequence: Synthetic oligonucleotide
  Antisense strand to SEQ ID NO: 1139794
uuuauccaaugccagacau

SEQ ID NO: 1139796 - RNA, 19 nt, Artificial Sequence
  Description of Artificial Sequence: Synthetic oligonucleotide
  Sense strand starting at position 3203 of SEQ ID NO: 916222
aauacaggugcuugugaag

SEQ ID NO: 1139797 - RNA, 19 nt, Artificial Sequence
  Description of Artificial Sequence: Synthetic oligonucleotide
  Antisense strand to SEQ ID NO: 1139796
cuucacaagcaccuguauu

SEQ ID NO: 1139798 - RNA, 19 nt, Artificial Sequence
  Description of Artificial Sequence: Synthetic oligonucleotide
  Sense strand starting at position 3220 of SEQ ID NO: 916222
agcuccaugcagugauaau

SEQ ID NO: 1139799 - RNA, 19 nt, Artificial Sequence
  Description of Artificial Sequence: Synthetic oligonucleotide
  Antisense strand to SEQ ID NO: 1139798
auuaucacugcauggagcu

SEQ ID NO: 1139800 - RNA, 19 nt, Artificial Sequence
  Description of Artificial Sequence: Synthetic oligonucleotide
  Sense strand starting at position 3297 of SEQ ID NO: 916222
ugggauuccucagccacaa

SEQ ID NO: 1139801 - RNA, 19 nt, Artificial Sequence
  Description of Artificial Sequence: Synthetic oligonucleotide
  Antisense strand to SEQ ID NO: 1139800
uuguggcugaggaauccca

SEQ ID NO: 1139802 - RNA, 19 nt, Artificial Sequence
  Description of Artificial Sequence: Synthetic oligonucleotide
  Sense strand starting at position 3326 of SEQ ID NO: 916222
gcaccagauaucugaggca

SEQ ID NO: 1139803 - RNA, 19 nt, Artificial Sequence
  Description of Artificial Sequence: Synthetic oligonucleotide
  Antisense strand to SEQ ID NO: 1139802
ugccucagauaucuggugc

SEQ ID NO: 1139804 - RNA, 19 nt, Artificial Sequence
  Description of Artificial Sequence: Synthetic oligonucleotide
  Sense strand starting at position 3568 of SEQ ID NO: 916222
agggcuuucuuacuuuauu

SEQ ID NO: 1139805 - RNA, 19 nt, Artificial Sequence
  Description of Artificial Sequence: Synthetic oligonucleotide
  Antisense strand to SEQ ID NO: 1139804
aauaaaguaagaaagcccu

SEQ ID NO: 1139806 - RNA, 19 nt, Artificial Sequence
  Description of Artificial Sequence: Synthetic oligonucleotide
  Sense strand starting at position 3569 of SEQ ID NO: 916222
gggcuuucuuacuuuauuu

SEQ ID NO: 1139807 - RNA, 19 nt, Artificial Sequence
  Description of Artificial Sequence: Synthetic oligonucleotide
  Antisense strand to SEQ ID NO: 1139806
aaauaaaguaagaaagccc

SEQ ID NO: 1139808 - RNA, 19 nt, Artificial Sequence
  Description of Artificial Sequence: Synthetic oligonucleotide
  Sense strand starting at position 3596 of SEQ ID NO: 916222
gcagaaguguuggcaaaua

SEQ ID NO: 1139809 - RNA, 19 nt, Artificial Sequence
  Description of Artificial Sequence: Synthetic oligonucleotide
  Antisense strand to SEQ ID NO: 1139808
uauuugccaacacuucugc

SEQ ID NO: 1139810 - RNA, 19 nt, Artificial Sequence
  Description of Artificial Sequence: Synthetic oligonucleotide
  Sense strand starting at position 3608 of SEQ ID NO: 916222
gcaaauacuuccguaauac

SEQ ID NO: 1139811 - RNA, 19 nt, Artificial Sequence
  Description of Artificial Sequence: Synthetic oligonucleotide
  Antisense strand to SEQ ID NO: 1139810
guauuacggaaguauuugc

SEQ ID NO: 1139812 - RNA, 19 nt, Artificial Sequence
  Description of Artificial Sequence: Synthetic oligonucleotide
  Sense strand starting at position 3648 of SEQ ID NO: 916222
ugccucagagugugaagaa

SEQ ID NO: 1139813 - RNA, 19 nt, Artificial Sequence
  Description of Artificial Sequence: Synthetic oligonucleotide
  Antisense strand to SEQ ID NO: 1139812
uucuucacacucugaggca

SEQ ID NO: 1139814 - RNA, 19 nt, Artificial Sequence
  Description of Artificial Sequence: Synthetic oligonucleotide
  Sense strand starting at position 3724 of SEQ ID NO: 916222
aagggauagugagaggaau

SEQ ID NO: 1139815 - RNA, 19 nt, Artificial Sequence
  Description of Artificial Sequence: Synthetic oligonucleotide
  Antisense strand to SEQ ID NO: 1139814
auuccucucacuaucccuu

SEQ ID NO: 1139816 - RNA, 19 nt, Artificial Sequence
  Description of Artificial Sequence: Synthetic oligonucleotide
  Sense strand starting at position 3784 of SEQ ID NO: 916222
ggugcuagagguuagucau

SEQ ID NO: 1139817 - RNA, 19 nt, Artificial Sequence
  Description of Artificial Sequence: Synthetic oligonucleotide
  Antisense strand to SEQ ID NO: 1139816
augacuaaccucuagcacc

SEQ ID NO: 1139818 - RNA, 19 nt, Artificial Sequence
  Description of Artificial Sequence: Synthetic oligonucleotide
  Sense strand starting at position 3808 of SEQ ID NO: 916222
cuggucaucuaacugguaa

SEQ ID NO: 1139819 - RNA, 19 nt, Artificial Sequence
  Description of Artificial Sequence: Synthetic oligonucleotide
  Antisense strand to SEQ ID NO: 1139818
uuaccaguuagaugaccag

SEQ ID NO: 1139820 - RNA, 19 nt, Artificial Sequence
  Description of Artificial Sequence: Synthetic oligonucleotide
  Sense strand starting at position 3878 of SEQ ID NO: 916222
ccacuaucccagugguucu

SEQ ID NO: 1139821 - RNA, 19 nt, Artificial Sequence
  Description of Artificial Sequence: Synthetic oligonucleotide
  Antisense strand to SEQ ID NO: 1139820
agaaccacugggauagugg

SEQ ID NO: 1139822 - RNA, 19 nt, Artificial Sequence
  Description of Artificial Sequence: Synthetic oligonucleotide
  Sense strand starting at position 3885 of SEQ ID NO: 916222
cccagugguucucaaauuu

SEQ ID NO: 1139823 - RNA, 19 nt, Artificial Sequence
  Description of Artificial Sequence: Synthetic oligonucleotide
  Antisense strand to SEQ ID NO: 1139822
aaauuugagaaccacuggg

SEQ ID NO: 1139824 - RNA, 19 nt, Artificial Sequence
  Description of Artificial Sequence: Synthetic oligonucleotide
  Sense strand starting at position 3894 of SEQ ID NO: 916222
ucucaaauuugagagugca

SEQ ID NO: 1139825 - RNA, 19 nt, Artificial Sequence
  Description of Artificial Sequence: Synthetic oligonucleotide
  Antisense strand to SEQ ID NO: 1139824
ugcacucucaaauuugaga

SEQ ID NO: 1139826 - RNA, 19 nt, Artificial Sequence
  Description of Artificial Sequence: Synthetic oligonucleotide
  Sense strand starting at position 3960 of SEQ ID NO: 916222
ccuagaagucccuggacua

SEQ ID NO: 1139827 - RNA, 19 nt, Artificial Sequence
  Description of Artificial Sequence: Synthetic oligonucleotide
  Antisense strand to SEQ ID NO: 1139826
uaguccagggacuucuagg

SEQ ID NO: 1139828 - RNA, 19 nt, Artificial Sequence
  Description of Artificial Sequence: Synthetic oligonucleotide
  Sense strand starting at position 3961 of SEQ ID NO: 916222
cuagaagucccuggacuaa

SEQ ID NO: 1139829 - RNA, 19 nt, Artificial Sequence
  Description of Artificial Sequence: Synthetic oligonucleotide
  Antisense strand to SEQ ID NO: 1139828
uuaguccagggacuucuag

SEQ ID NO: 1139830 - RNA, 19 nt, Artificial Sequence
  Description of Artificial Sequence: Synthetic oligonucleotide
  Sense strand starting at position 2072 of SEQ ID NO: 916223
gccgcugcuuugcaugaga

SEQ ID NO: 1139831 - RNA, 19 nt, Artificial Sequence
  Description of Artificial Sequence: Synthetic oligonucleotide
  Antisense strand to SEQ ID NO: 1139830
ucucaugcaaagcagcggc

SEQ ID NO: 1139832 - RNA, 19 nt, Artificial Sequence
  Description of Artificial Sequence: Synthetic oligonucleotide
  Sense strand starting at position 2074 of SEQ ID NO: 916223
cgcugcuuugcaugagaaa

SEQ ID NO: 1139833 - RNA, 19 nt, Artificial Sequence
  Description of Artificial Sequence: Synthetic oligonucleotide
  Antisense strand to SEQ ID NO: 1139832
uuucucaugcaaagcagcg

SEQ ID NO: 1139834 - RNA, 19 nt, Artificial Sequence
  Description of Artificial Sequence: Synthetic oligonucleotide
  Sense strand starting at position 2075 of SEQ ID NO: 916223
gcugcuuugcaugagaaag

SEQ ID NO: 1139835 - RNA, 19 nt, Artificial Sequence
  Description of Artificial Sequence: Synthetic oligonucleotide
  Antisense strand to SEQ ID NO: 1139834
cuuucucaugcaaagcagc

SEQ ID NO: 1139836 - RNA, 19 nt, Artificial Sequence
  Description of Artificial Sequence: Synthetic oligonucleotide
  Sense strand starting at position 2550 of SEQ ID NO: 916223
uagccugggccauaaagua

SEQ ID NO: 1139837 - RNA, 19 nt, Artificial Sequence
  Description of Artificial Sequence: Synthetic oligonucleotide
  Antisense strand to SEQ ID NO: 1139836
uacuuuauggcccaggcua

SEQ ID NO: 1139838 - RNA, 19 nt, Artificial Sequence
  Description of Artificial Sequence: Synthetic oligonucleotide
  Sense strand starting at position 2566 of SEQ ID NO: 916223
guaggcccuugcuuguaaa

SEQ ID NO: 1139839 - RNA, 19 nt, Artificial Sequence
  Description of Artificial Sequence: Synthetic oligonucleotide
  Antisense strand to SEQ ID NO: 1139838
uuuacaagcaagggccuac

SEQ ID NO: 1139840 - RNA, 19 nt, Artificial Sequence
  Description of Artificial Sequence: Synthetic oligonucleotide
  Sense strand starting at position 2728 of SEQ ID NO: 916223
cgaggucuccucuaagaag

SEQ ID NO: 1139841 - RNA, 19 nt, Artificial Sequence
  Description of Artificial Sequence: Synthetic oligonucleotide
  Antisense strand to SEQ ID NO: 1139840
cuucuuagaggagaccucg

SEQ ID NO: 1139842 - RNA, 19 nt, Artificial Sequence
  Description of Artificial Sequence: Synthetic oligonucleotide
  Sense strand starting at position 2766 of SEQ ID NO: 916223
ggaagcgucccgggacuuu

SEQ ID NO: 1139843 - RNA, 19 nt, Artificial Sequence
  Description of Artificial Sequence: Synthetic oligonucleotide
  Antisense strand to SEQ ID NO: 1139842
aaagucccgggacgcuucc

SEQ ID NO: 1139844 - RNA, 19 nt, Artificial Sequence
  Description of Artificial Sequence: Synthetic oligonucleotide
  Sense strand starting at position 2902 of SEQ ID NO: 916223
ggcggcugaguuuauuuau

SEQ ID NO: 1139845 - RNA, 19 nt, Artificial Sequence
  Description of Artificial Sequence: Synthetic oligonucleotide
  Antisense strand to SEQ ID NO: 1139844
auaaauaaacucagccgcc

SEQ ID NO: 1139846 - RNA, 19 nt, Artificial Sequence
  Description of Artificial Sequence: Synthetic oligonucleotide
  Sense strand starting at position 2954 of SEQ ID NO: 916223
ugauuuggcgagugaugug

SEQ ID NO: 1139847 - RNA, 19 nt, Artificial Sequence
  Description of Artificial Sequence: Synthetic oligonucleotide
  Antisense strand to SEQ ID NO: 1139846
cacaucacucgccaaauca

SEQ ID NO: 1139848 - RNA, 19 nt, Artificial Sequence
  Description of Artificial Sequence: Synthetic oligonucleotide
  Sense strand starting at position 3395 of SEQ ID NO: 916223
cuuccaaaguucggaaacu

SEQ ID NO: 1139849 - RNA, 19 nt, Artificial Sequence
  Description of Artificial Sequence: Synthetic oligonucleotide
  Antisense strand to SEQ ID NO: 1139848
aguuuccgaacuuuggaag

SEQ ID NO: 1139850 - RNA, 19 nt, Artificial Sequence
  Description of Artificial Sequence: Synthetic oligonucleotide
  Sense strand starting at position 3414 of SEQ ID NO: 916223
cgcaggaucgcgugugcaa

SEQ ID NO: 1139851 - RNA, 19 nt, Artificial Sequence
  Description of Artificial Sequence: Synthetic oligonucleotide
  Antisense strand to SEQ ID NO: 1139850
uugcacacgcgauccugcg

SEQ ID NO: 1139852 - RNA, 19 nt, Artificial Sequence
  Description of Artificial Sequence: Synthetic oligonucleotide
  Sense strand starting at position 3415 of SEQ ID NO: 916223
gcaggaucgcgugugcaau

SEQ ID NO: 1139853 - RNA, 19 nt, Artificial Sequence
  Description of Artificial Sequence: Synthetic oligonucleotide
  Antisense strand to SEQ ID NO: 1139852
auugcacacgcgauccugc

SEQ ID NO: 1139854 - RNA, 19 nt, Artificial Sequence
  Description of Artificial Sequence: Synthetic oligonucleotide
  Sense strand starting at position 3518 of SEQ ID NO: 916223
aggauaguuccagggagca

SEQ ID NO: 1139855 - RNA, 19 nt, Artificial Sequence
  Description of Artificial Sequence: Synthetic oligonucleotide
  Antisense strand to SEQ ID NO: 1139854
ugcucccuggaacuauccu

SEQ ID NO: 1139856 - RNA, 19 nt, Artificial Sequence
  Description of Artificial Sequence: Synthetic oligonucleotide
  Sense strand starting at position 3744 of SEQ ID NO: 916223
ggccacuuccucggagagu

SEQ ID NO: 1139857 - RNA, 19 nt, Artificial Sequence
  Description of Artificial Sequence: Synthetic oligonucleotide
  Antisense strand to SEQ ID NO: 1139856
acucuccgaggaaguggcc

SEQ ID NO: 1139858 - RNA, 19 nt, Artificial Sequence
  Description of Artificial Sequence: Synthetic oligonucleotide
  Sense strand starting at position 3745 of SEQ ID NO: 916223
gccacuuccucggagagua

SEQ ID NO: 1139859 - RNA, 19 nt, Artificial Sequence
  Description of Artificial Sequence: Synthetic oligonucleotide
  Antisense strand to SEQ ID NO: 1139858
uacucuccgaggaaguggc

SEQ ID NO: 1139860 - RNA, 19 nt, Artificial Sequence
  Description of Artificial Sequence: Synthetic oligonucleotide
  Sense strand starting at position 3747 of SEQ ID NO: 916223
cacuuccucggagaguauu

SEQ ID NO: 1139861 - RNA, 19 nt, Artificial Sequence
  Description of Artificial Sequence: Synthetic oligonucleotide
  Antisense strand to SEQ ID NO: 1139860
aauacucuccgaggaagug

SEQ ID NO: 1139862 - RNA, 19 nt, Artificial Sequence
  Description of Artificial Sequence: Synthetic oligonucleotide
  Sense strand starting at position 3753 of SEQ ID NO: 916223
cucggagaguauuggcuuu

SEQ ID NO: 1139863 - RNA, 19 nt, Artificial Sequence
  Description of Artificial Sequence: Synthetic oligonucleotide
  Antisense strand to SEQ ID NO: 1139862
aaagccaauacucuccgag

SEQ ID NO: 1139864 - RNA, 19 nt, Artificial Sequence
  Description of Artificial Sequence: Synthetic oligonucleotide
  Sense strand starting at position 3868 of SEQ ID NO: 916223
cgcccagaaucccagaauu

SEQ ID NO: 1139865 - RNA, 19 nt, Artificial Sequence
  Description of Artificial Sequence: Synthetic oligonucleotide
  Antisense strand to SEQ ID NO: 1139864
aauucugggauucugggcg

SEQ ID NO: 1139866 - RNA, 19 nt, Artificial Sequence
  Description of Artificial Sequence: Synthetic oligonucleotide
  Sense strand starting at position 34 of SEQ ID NO: 916224
uccacagcacgucauuaau

SEQ ID NO: 1139867 - RNA, 19 nt, Artificial Sequence
  Description of Artificial Sequence: Synthetic oligonucleotide
  Antisense strand to SEQ ID NO: 1139866
auuaaugacgugcugugga

SEQ ID NO: 1139868 - RNA, 19 nt, Artificial Sequence
  Description of Artificial Sequence: Synthetic oligonucleotide
  Sense strand starting at position 71 of SEQ ID NO: 916224
auuagaaacugagaaacaa

SEQ ID NO: 1139869 - RNA, 19 nt, Artificial Sequence
  Description of Artificial Sequence: Synthetic oligonucleotide
  Antisense strand to SEQ ID NO: 1139868
uuguuucucaguuucuaau

SEQ ID NO: 1139870 - RNA, 19 nt, Artificial Sequence
  Description of Artificial Sequence: Synthetic oligonucleotide
  Sense strand starting at position 86 of SEQ ID NO: 916224
acaauauggcauggagguu

SEQ ID NO: 1139871 - RNA, 19 nt, Artificial Sequence
  Description of Artificial Sequence: Synthetic oligonucleotide
  Antisense strand to SEQ ID NO: 1139870
aaccuccaugccauauugu

SEQ ID NO: 1139872 - RNA, 19 nt, Artificial Sequence
  Description of Artificial Sequence: Synthetic oligonucleotide
  Sense strand starting at position 130 of SEQ ID NO: 916224
uucagacaggguuggaauu

SEQ ID NO: 1139873 - RNA, 19 nt, Artificial Sequence
  Description of Artificial Sequence: Synthetic oligonucleotide
  Antisense strand to SEQ ID NO: 1139872
aauuccaacccugucugaa

SEQ ID NO: 1139874 - RNA, 19 nt, Artificial Sequence
  Description of Artificial Sequence: Synthetic oligonucleotide
  Sense strand starting at position 160 of SEQ ID NO: 916224
acagaucagcaaugugaaa

SEQ ID NO: 1139875 - RNA, 19 nt, Artificial Sequence
  Description of Artificial Sequence: Synthetic oligonucleotide
  Antisense strand to SEQ ID NO: 1139874
uuucacauugcugaucugu

SEQ ID NO: 1139876 - RNA, 19 nt, Artificial Sequence
  Description of Artificial Sequence: Synthetic oligonucleotide
  Sense strand starting at position 192 of SEQ ID NO: 916224
acugcauuucuuugugcuu

SEQ ID NO: 1139877 - RNA, 19 nt, Artificial Sequence
  Description of Artificial Sequence: Synthetic oligonucleotide
  Antisense strand to SEQ ID NO: 1139876
aagcacaaagaaaugcagu

SEQ ID NO: 1139878 - RNA, 19 nt, Artificial Sequence
  Description of Artificial Sequence: Synthetic oligonucleotide
  Sense strand starting at position 195 of SEQ ID NO: 916224
gcauuucuuugugcuuuga

SEQ ID NO: 1139879 - RNA, 19 nt, Artificial Sequence
  Description of Artificial Sequence: Synthetic oligonucleotide
  Antisense strand to SEQ ID NO: 1139878
ucaaagcacaaagaaaugc

SEQ ID NO: 1139880 - RNA, 19 nt, Artificial Sequence
  Description of Artificial Sequence: Synthetic oligonucleotide
  Sense strand starting at position 197 of SEQ ID NO: 916224
auuucuuugugcuuugaau

SEQ ID NO: 1139881 - RNA, 19 nt, Artificial Sequence
  Description of Artificial Sequence: Synthetic oligonucleotide
  Antisense strand to SEQ ID NO: 1139880
auucaaagcacaaagaaau

SEQ ID NO: 1139882 - RNA, 19 nt, Artificial Sequence
  Description of Artificial Sequence: Synthetic oligonucleotide
  Sense strand starting at position 231 of SEQ ID NO: 916224
cggguaaucguguaaggaa

SEQ ID NO: 1139883 - RNA, 19 nt, Artificial Sequence
  Description of Artificial Sequence: Synthetic oligonucleotide
  Antisense strand to SEQ ID NO: 1139882
uuccuuacacgauuacccg

SEQ ID NO: 1139884 - RNA, 19 nt, Artificial Sequence
  Description of Artificial Sequence: Synthetic oligonucleotide
  Sense strand starting at position 232 of SEQ ID NO: 916224
ggguaaucguguaaggaag

SEQ ID NO: 1139885 - RNA, 19 nt, Artificial Sequence
  Description of Artificial Sequence: Synthetic oligonucleotide
  Antisense strand to SEQ ID NO: 1139884
cuuccuuacacgauuaccc

SEQ ID NO: 1139886 - RNA, 19 nt, Artificial Sequence
  Description of Artificial Sequence: Synthetic oligonucleotide
  Sense strand starting at position 247 of SEQ ID NO: 916224
gaaguaagucaaugauuac

SEQ ID NO: 1139887 - RNA, 19 nt, Artificial Sequence
  Description of Artificial Sequence: Synthetic oligonucleotide
  Antisense strand to SEQ ID NO: 1139886
guaaucauugacuuacuuc

SEQ ID NO: 1139888 - RNA, 19 nt, Artificial Sequence
  Description of Artificial Sequence: Synthetic oligonucleotide
  Sense strand starting at position 250 of SEQ ID NO: 916224
guaagucaaugauuacaga

SEQ ID NO: 1139889 - RNA, 19 nt, Artificial Sequence
  Description of Artificial Sequence: Synthetic oligonucleotide
  Antisense strand to SEQ ID NO: 1139888
ucuguaaucauugacuuac

SEQ ID NO: 1139890 - RNA, 19 nt, Artificial Sequence
  Description of Artificial Sequence: Synthetic oligonucleotide
  Sense strand starting at position 261 of SEQ ID NO: 916224
auuacagacugaguacuua

SEQ ID NO: 1139891 - RNA, 19 nt, Artificial Sequence
  Description of Artificial Sequence: Synthetic oligonucleotide
  Antisense strand to SEQ ID NO: 1139890
uaaguacucagucuguaau

SEQ ID NO: 1139892 - RNA, 19 nt, Artificial Sequence
  Description of Artificial Sequence: Synthetic oligonucleotide
  Sense strand starting at position 277 of SEQ ID NO: 916224
uuauaauaccgcuagggua

SEQ ID NO: 1139893 - RNA, 19 nt, Artificial Sequence
  Description of Artificial Sequence: Synthetic oligonucleotide
  Antisense strand to SEQ ID NO: 1139892
uacccuagcgguauuauaa

SEQ ID NO: 1139894 - RNA, 19 nt, Artificial Sequence
  Description of Artificial Sequence: Synthetic oligonucleotide
  Sense strand starting at position 279 of SEQ ID NO: 916224
auaauaccgcuaggguaaa

SEQ ID NO: 1139895 - RNA, 19 nt, Artificial Sequence
  Description of Artificial Sequence: Synthetic oligonucleotide
  Antisense strand to SEQ ID NO: 1139894
uuuacccuagcgguauuau

SEQ ID NO: 1139896 - RNA, 19 nt, Artificial Sequence
  Description of Artificial Sequence: Synthetic oligonucleotide
  Sense strand starting at position 400 of SEQ ID NO: 916224
gaaaguaauuuguaaagga

SEQ ID NO: 1139897 - RNA, 19 nt, Artificial Sequence
  Description of Artificial Sequence: Synthetic oligonucleotide
  Antisense strand to SEQ ID NO: 1139896
uccuuuacaaauuacuuuc

SEQ ID NO: 1139898 - RNA, 19 nt, Artificial Sequence
  Description of Artificial Sequence: Synthetic oligonucleotide
  Sense strand starting at position 413 of SEQ ID NO: 916224
aaaggauccuuucccgagu

SEQ ID NO: 1139899 - RNA, 19 nt, Artificial Sequence
  Description of Artificial Sequence: Synthetic oligonucleotide
  Antisense strand to SEQ ID NO: 1139898
acucgggaaaggauccuuu

SEQ ID NO: 1139900 - RNA, 19 nt, Artificial Sequence
  Description of Artificial Sequence: Synthetic oligonucleotide
  Sense strand starting at position 414 of SEQ ID NO: 916224
aaggauccuuucccgagua

SEQ ID NO: 1139901 - RNA, 19 nt, Artificial Sequence
  Description of Artificial Sequence: Synthetic oligonucleotide
  Antisense strand to SEQ ID NO: 1139900
uacucgggaaaggauccuu

SEQ ID NO: 1139902 - RNA, 19 nt, Artificial Sequence
  Description of Artificial Sequence: Synthetic oligonucleotide
  Sense strand starting at position 416 of SEQ ID NO: 916224
ggauccuuucccgaguaag

SEQ ID NO: 1139903 - RNA, 19 nt, Artificial Sequence
  Description of Artificial Sequence: Synthetic oligonucleotide
  Antisense strand to SEQ ID NO: 1139902
cuuacucgggaaaggaucc

SEQ ID NO: 1139904 - RNA, 19 nt, Artificial Sequence
  Description of Artificial Sequence: Synthetic oligonucleotide
  Sense strand starting at position 419 of SEQ ID NO: 916224
uccuuucccgaguaaggga

SEQ ID NO: 1139905 - RNA, 19 nt, Artificial Sequence
  Description of Artificial Sequence: Synthetic oligonucleotide
  Antisense strand to SEQ ID NO: 1139904
ucccuuacucgggaaagga

SEQ ID NO: 1139906 - RNA, 19 nt, Artificial Sequence
  Description of Artificial Sequence: Synthetic oligonucleotide
  Sense strand starting at position 427 of SEQ ID NO: 916224
cgaguaagggauuagcuca

SEQ ID NO: 1139907 - RNA, 19 nt, Artificial Sequence
  Description of Artificial Sequence: Synthetic oligonucleotide
  Antisense strand to SEQ ID NO: 1139906
ugagcuaaucccuuacucg

SEQ ID NO: 1139908 - RNA, 19 nt, Artificial Sequence
  Description of Artificial Sequence: Synthetic oligonucleotide
  Sense strand starting at position 593 of SEQ ID NO: 916224
acguuagguaaggauuaga

SEQ ID NO: 1139909 - RNA, 19 nt, Artificial Sequence
  Description of Artificial Sequence: Synthetic oligonucleotide
  Antisense strand to SEQ ID NO: 1139908
ucuaauccuuaccuaacgu

SEQ ID NO: 1139910 - RNA, 19 nt, Artificial Sequence
  Description of Artificial Sequence: Synthetic oligonucleotide
  Sense strand starting at position 598 of SEQ ID NO: 916224
agguaaggauuagagaaga

SEQ ID NO: 1139911 - RNA, 19 nt, Artificial Sequence
  Description of Artificial Sequence: Synthetic oligonucleotide
  Antisense strand to SEQ ID NO: 1139910
ucuucucuaauccuuaccu

SEQ ID NO: 1139912 - RNA, 19 nt, Artificial Sequence
  Description of Artificial Sequence: Synthetic oligonucleotide
  Sense strand starting at position 625 of SEQ ID NO: 916224
guggcugugagucaagaaa

SEQ ID NO: 1139913 - RNA, 19 nt, Artificial Sequence
  Description of Artificial Sequence: Synthetic oligonucleotide
  Antisense strand to SEQ ID NO: 1139912
uuucuugacucacagccac

SEQ ID NO: 1139914 - RNA, 19 nt, Artificial Sequence
  Description of Artificial Sequence: Synthetic oligonucleotide
  Sense strand starting at position 880 of SEQ ID NO: 916224
gcugaaagauaccuaauac

SEQ ID NO: 1139915 - RNA, 19 nt, Artificial Sequence
  Description of Artificial Sequence: Synthetic oligonucleotide
  Antisense strand to SEQ ID NO: 1139914
guauuagguaucuuucagc

SEQ ID NO: 1139916 - RNA, 19 nt, Artificial Sequence
  Description of Artificial Sequence: Synthetic oligonucleotide
  Sense strand starting at position 968 of SEQ ID NO: 916224
cgucucaguccugccuuau

SEQ ID NO: 1139917 - RNA, 19 nt, Artificial Sequence
  Description of Artificial Sequence: Synthetic oligonucleotide
  Antisense strand to SEQ ID NO: 1139916
auaaggcaggacugagacg

SEQ ID NO: 1139918 - RNA, 19 nt, Artificial Sequence
  Description of Artificial Sequence: Synthetic oligonucleotide
  Sense strand starting at position 980 of SEQ ID NO: 916224
gccuuaucgcgaccaggua

SEQ ID NO: 1139919 - RNA, 19 nt, Artificial Sequence
  Description of Artificial Sequence: Synthetic oligonucleotide
  Antisense strand to SEQ ID NO: 1139918
uaccuggucgcgauaaggc

SEQ ID NO: 1139920 - RNA, 19 nt, Artificial Sequence
  Description of Artificial Sequence: Synthetic oligonucleotide
  Sense strand starting at position 995 of SEQ ID NO: 916224
gguaccaggugaucagaaa

SEQ ID NO: 1139921 - RNA, 19 nt, Artificial Sequence
  Description of Artificial Sequence: Synthetic oligonucleotide
  Antisense strand to SEQ ID NO: 1139920
uuucugaucaccugguacc

SEQ ID NO: 1139922 - RNA, 19 nt, Artificial Sequence
  Description of Artificial Sequence: Synthetic oligonucleotide
  Sense strand starting at position 1242 of SEQ ID NO: 916224
gcagaaaucgacuggguuu

SEQ ID NO: 1139923 - RNA, 19 nt, Artificial Sequence
  Description of Artificial Sequence: Synthetic oligonucleotide
  Antisense strand to SEQ ID NO: 1139922
aaacccagucgauuucugc

SEQ ID NO: 1139924 - RNA, 19 nt, Artificial Sequence
  Description of Artificial Sequence: Synthetic oligonucleotide
  Sense strand starting at position 1406 of SEQ ID NO: 916224
guugcugagucacugaaga

SEQ ID NO: 1139925 - RNA, 19 nt, Artificial Sequence
  Description of Artificial Sequence: Synthetic oligonucleotide
  Antisense strand to SEQ ID NO: 1139924
ucuucagugacucagcaac

SEQ ID NO: 1139926 - RNA, 19 nt, Artificial Sequence
  Description of Artificial Sequence: Synthetic oligonucleotide
  Sense strand starting at position 1536 of SEQ ID NO: 916224
ggcguucaggauuaaguaa

SEQ ID NO: 1139927 - RNA, 19 nt, Artificial Sequence
  Description of Artificial Sequence: Synthetic oligonucleotide
  Antisense strand to SEQ ID NO: 1139926
uuacuuaauccugaacgcc

SEQ ID NO: 1139928 - RNA, 19 nt, Artificial Sequence
  Description of Artificial Sequence: Synthetic oligonucleotide
  Sense strand starting at position 2147 of SEQ ID NO: 916224
aaucgaugucacugcaaac

SEQ ID NO: 1139929 - RNA, 19 nt, Artificial Sequence
  Description of Artificial Sequence: Synthetic oligonucleotide
  Antisense strand to SEQ ID NO: 1139928
guuugcagugacaucgauu

SEQ ID NO: 1139930 - RNA, 19 nt, Artificial Sequence
  Description of Artificial Sequence: Synthetic oligonucleotide
  Sense strand starting at position 2479 of SEQ ID NO: 916224
gccgcaguucgcuccugaa

SEQ ID NO: 1139931 - RNA, 19 nt, Artificial Sequence
  Description of Artificial Sequence: Synthetic oligonucleotide
  Antisense strand to SEQ ID NO: 1139930
uucaggagcgaacugcggc

SEQ ID NO: 1139932 - RNA, 19 nt, Artificial Sequence
  Description of Artificial Sequence: Synthetic oligonucleotide
  Sense strand starting at position 2481 of SEQ ID NO: 916224
cgcaguucgcuccugaaca

SEQ ID NO: 1139933 - RNA, 19 nt, Artificial Sequence
  Description of Artificial Sequence: Synthetic oligonucleotide
  Antisense strand to SEQ ID NO: 1139932
uguucaggagcgaacugcg

SEQ ID NO: 1139934 - RNA, 19 nt, Artificial Sequence
  Description of Artificial Sequence: Synthetic oligonucleotide
  Sense strand starting at position 2510 of SEQ ID NO: 916224
cagagcgugacucaggaau

SEQ ID NO: 1139935 - RNA, 19 nt, Artificial Sequence
  Description of Artificial Sequence: Synthetic oligonucleotide
  Antisense strand to SEQ ID NO: 1139934
auuccugagucacgcucug

SEQ ID NO: 1139936 - RNA, 19 nt, Artificial Sequence
  Description of Artificial Sequence: Synthetic oligonucleotide
  Sense strand starting at position 2554 of SEQ ID NO: 916224
cacggaguguaaucaaagu

SEQ ID NO: 1139937 - RNA, 19 nt, Artificial Sequence
  Description of Artificial Sequence: Synthetic oligonucleotide
  Antisense strand to SEQ ID NO: 1139936
acuuugauuacacuccgug

SEQ ID NO: 1139938 - RNA, 19 nt, Artificial Sequence
  Description of Artificial Sequence: Synthetic oligonucleotide
  Sense strand starting at position 3020 of SEQ ID NO: 916224
aggugaugaccucaguugu

SEQ ID NO: 1139939 - RNA, 19 nt, Artificial Sequence
  Description of Artificial Sequence: Synthetic oligonucleotide
  Antisense strand to SEQ ID NO: 1139938
acaacugaggucaucaccu

SEQ ID NO: 1139940 - RNA, 19 nt, Artificial Sequence
  Description of Artificial Sequence: Synthetic oligonucleotide
  Sense strand starting at position 3067 of SEQ ID NO: 916224
uuagguaucccucacguga

SEQ ID NO: 1139941 - RNA, 19 nt, Artificial Sequence
  Description of Artificial Sequence: Synthetic oligonucleotide
  Antisense strand to SEQ ID NO: 1139940
ucacgugagggauaccuaa

SEQ ID NO: 1139942 - RNA, 19 nt, Artificial Sequence
  Description of Artificial Sequence: Synthetic oligonucleotide
  Sense strand starting at position 3074 of SEQ ID NO: 916224
ucccucacgugacuagaaa

SEQ ID NO: 1139943 - RNA, 19 nt, Artificial Sequence
  Description of Artificial Sequence: Synthetic oligonucleotide
  Antisense strand to SEQ ID NO: 1139942
uuucuagucacgugaggga

SEQ ID NO: 1139944 - RNA, 19 nt, Artificial Sequence
  Description of Artificial Sequence: Synthetic oligonucleotide
  Sense strand starting at position 3342 of SEQ ID NO: 916224
gucucagugucucuaauuu

SEQ ID NO: 1139945 - RNA, 19 nt, Artificial Sequence
  Description of Artificial Sequence: Synthetic oligonucleotide
  Antisense strand to SEQ ID NO: 1139944
aaauuagagacacugagac

SEQ ID NO: 1139946 - RNA, 19 nt, Artificial Sequence
  Description of Artificial Sequence: Synthetic oligonucleotide
  Sense strand starting at position 87 of SEQ ID NO: 916225
uccgauaagcacuaagaca

SEQ ID NO: 1139947 - RNA, 19 nt, Artificial Sequence
  Description of Artificial Sequence: Synthetic oligonucleotide
  Antisense strand to SEQ ID NO: 1139946
ugucuuagugcuuaucgga

SEQ ID NO: 1139948 - RNA, 19 nt, Artificial Sequence
  Description of Artificial Sequence: Synthetic oligonucleotide
  Sense strand starting at position 345 of SEQ ID NO: 916225
gguuguugucaggagaauu

SEQ ID NO: 1139949 - RNA, 19 nt, Artificial Sequence
  Description of Artificial Sequence: Synthetic oligonucleotide
  Antisense strand to SEQ ID NO: 1139948
aauucuccugacaacaacc

SEQ ID NO: 1139950 - RNA, 19 nt, Artificial Sequence
  Description of Artificial Sequence: Synthetic oligonucleotide
  Sense strand starting at position 416 of SEQ ID NO: 916225
ccuggucuauccucuggaa

SEQ ID NO: 1139951 - RNA, 19 nt, Artificial Sequence
  Description of Artificial Sequence: Synthetic oligonucleotide
  Antisense strand to SEQ ID NO: 1139950
uuccagaggauagaccagg

SEQ ID NO: 1139952 - RNA, 19 nt, Artificial Sequence
  Description of Artificial Sequence: Synthetic oligonucleotide
  Sense strand starting at position 418 of SEQ ID NO: 916225
uggucuauccucuggaaca

SEQ ID NO: 1139953 - RNA, 19 nt, Artificial Sequence
  Description of Artificial Sequence: Synthetic oligonucleotide
  Antisense strand to SEQ ID NO: 1139952
uguuccagaggauagacca

SEQ ID NO: 1139954 - RNA, 19 nt, Artificial Sequence
  Description of Artificial Sequence: Synthetic oligonucleotide
  Sense strand starting at position 599 of SEQ ID NO: 916225
gcccgagcaguauucugua

SEQ ID NO: 1139955 - RNA, 19 nt, Artificial Sequence
  Description of Artificial Sequence: Synthetic oligonucleotide
  Antisense strand to SEQ ID NO: 1139954
uacagaauacugcucgggc

SEQ ID NO: 1139956 - RNA, 19 nt, Artificial Sequence
  Description of Artificial Sequence: Synthetic oligonucleotide
  Sense strand starting at position 604 of SEQ ID NO: 916225
agcaguauucuguaggaaa

SEQ ID NO: 1139957 - RNA, 19 nt, Artificial Sequence
  Description of Artificial Sequence: Synthetic oligonucleotide
  Antisense strand to SEQ ID NO: 1139956
uuuccuacagaauacugcu

SEQ ID NO: 1139958 - RNA, 19 nt, Artificial Sequence
  Description of Artificial Sequence: Synthetic oligonucleotide
  Sense strand starting at position 606 of SEQ ID NO: 916225
caguauucuguaggaaauu

SEQ ID NO: 1139959 - RNA, 19 nt, Artificial Sequence
  Description of Artificial Sequence: Synthetic oligonucleotide
  Antisense strand to SEQ ID NO: 1139958
aauuuccuacagaauacug

SEQ ID NO: 1139960 - RNA, 19 nt, Artificial Sequence
  Description of Artificial Sequence: Synthetic oligonucleotide
  Sense strand starting at position 893 of SEQ ID NO: 916225
aauguuaaacgccagucaa

SEQ ID NO: 1139961 - RNA, 19 nt, Artificial Sequence
  Description of Artificial Sequence: Synthetic oligonucleotide
  Antisense strand to SEQ ID NO: 1139960
uugacuggcguuuaacauu

SEQ ID NO: 1139962 - RNA, 19 nt, Artificial Sequence
  Description of Artificial Sequence: Synthetic oligonucleotide
  Sense strand starting at position 961 of SEQ ID NO: 916225
ccaaucaauugugucuaua

SEQ ID NO: 1139963 - RNA, 19 nt, Artificial Sequence
  Description of Artificial Sequence: Synthetic oligonucleotide
  Antisense strand to SEQ ID NO: 1139962
uauagacacaauugauugg

SEQ ID NO: 1139964 - RNA, 19 nt, Artificial Sequence
  Description of Artificial Sequence: Synthetic oligonucleotide
  Sense strand starting at position 964 of SEQ ID NO: 916225
aucaauugugucuauaaca

SEQ ID NO: 1139965 - RNA, 19 nt, Artificial Sequence
  Description of Artificial Sequence: Synthetic oligonucleotide
  Antisense strand to SEQ ID NO: 1139964
uguuauagacacaauugau

SEQ ID NO: 1139966 - RNA, 19 nt, Artificial Sequence
  Description of Artificial Sequence: Synthetic oligonucleotide
  Sense strand starting at position 1056 of SEQ ID NO: 916225
agugacaauccaggaaagu

SEQ ID NO: 1139967 - RNA, 19 nt, Artificial Sequence
  Description of Artificial Sequence: Synthetic oligonucleotide
  Antisense strand to SEQ ID NO: 1139966
acuuuccuggauugucacu

SEQ ID NO: 1139968 - RNA, 19 nt, Artificial Sequence
  Description of Artificial Sequence: Synthetic oligonucleotide
  Sense strand starting at position 1144 of SEQ ID NO: 916225
ccuaaucaagcguacucua

SEQ ID NO: 1139969 - RNA, 19 nt, Artificial Sequence
  Description of Artificial Sequence: Synthetic oligonucleotide
  Antisense strand to SEQ ID NO: 1139968
uagaguacgcuugauuagg

SEQ ID NO: 1139970 - RNA, 19 nt, Artificial Sequence
  Description of Artificial Sequence: Synthetic oligonucleotide
  Sense strand starting at position 1155 of SEQ ID NO: 916225
guacucuaucaagauugcu

SEQ ID NO: 1139971 - RNA, 19 nt, Artificial Sequence
  Description of Artificial Sequence: Synthetic oligonucleotide
  Antisense strand to SEQ ID NO: 1139970
agcaaucuugauagaguac

SEQ ID NO: 1139972 - RNA, 19 nt, Artificial Sequence
  Description of Artificial Sequence: Synthetic oligonucleotide
  Sense strand starting at position 1158 of SEQ ID NO: 916225
cucuaucaagauugcugau

SEQ ID NO: 1139973 - RNA, 19 nt, Artificial Sequence
  Description of Artificial Sequence: Synthetic oligonucleotide
  Antisense strand to SEQ ID NO: 1139972
aucagcaaucuugauagag

SEQ ID NO: 1139974 - RNA, 19 nt, Artificial Sequence
  Description of Artificial Sequence: Synthetic oligonucleotide
  Sense strand starting at position 1276 of SEQ ID NO: 916225
gugaaugguacggagcaaa

SEQ ID NO: 1139975 - RNA, 19 nt, Artificial Sequence
  Description of Artificial Sequence: Synthetic oligonucleotide
  Antisense strand to SEQ ID NO: 1139974
uuugcuccguaccauucac

SEQ ID NO: 1139976 - RNA, 19 nt, Artificial Sequence
  Description of Artificial Sequence: Synthetic oligonucleotide
  Sense strand starting at position 1303 of SEQ ID NO: 916225
ggcuucguuauagaaagca

SEQ ID NO: 1139977 - RNA, 19 nt, Artificial Sequence
  Description of Artificial Sequence: Synthetic oligonucleotide
  Antisense strand to SEQ ID NO: 1139976
ugcuuucuauaacgaagcc

SEQ ID NO: 1139978 - RNA, 19 nt, Artificial Sequence
  Description of Artificial Sequence: Synthetic oligonucleotide
  Sense strand starting at position 1308 of SEQ ID NO: 916225
cguuauagaaagcaaugau

SEQ ID NO: 1139979 - RNA, 19 nt, Artificial Sequence
  Description of Artificial Sequence: Synthetic oligonucleotide
  Antisense strand to SEQ ID NO: 1139978
aucauugcuuucuauaacg

SEQ ID NO: 1139980 - RNA, 19 nt, Artificial Sequence
  Description of Artificial Sequence: Synthetic oligonucleotide
  Sense strand starting at position 1340 of SEQ ID NO: 916225
ggaaguguccuauaguuga

SEQ ID NO: 1139981 - RNA, 19 nt, Artificial Sequence
  Description of Artificial Sequence: Synthetic oligonucleotide
  Antisense strand to SEQ ID NO: 1139980
ucaacuauaggacacuucc

SEQ ID NO: 1139982 - RNA, 19 nt, Artificial Sequence
  Description of Artificial Sequence: Synthetic oligonucleotide
  Sense strand starting at position 1354 of SEQ ID NO: 916225
guugaacuucugggacuua

SEQ ID NO: 1139983 - RNA, 19 nt, Artificial Sequence
  Description of Artificial Sequence: Synthetic oligonucleotide
  Antisense strand to SEQ ID NO: 1139982
uaagucccagaaguucaac

SEQ ID NO: 1139984 - RNA, 19 nt, Artificial Sequence
  Description of Artificial Sequence: Synthetic oligonucleotide
  Sense strand starting at position 1413 of SEQ ID NO: 916225
aaauccugucacugaggua

SEQ ID NO: 1139985 - RNA, 19 nt, Artificial Sequence
  Description of Artificial Sequence: Synthetic oligonucleotide
  Antisense strand to SEQ ID NO: 1139984
uaccucagugacaggauuu

SEQ ID NO: 1139986 - RNA, 19 nt, Artificial Sequence
  Description of Artificial Sequence: Synthetic oligonucleotide
  Sense strand starting at position 1553 of SEQ ID NO: 916225
uaaagcggucgagacaaau

SEQ ID NO: 1139987 - RNA, 19 nt, Artificial Sequence
  Description of Artificial Sequence: Synthetic oligonucleotide
  Antisense strand to SEQ ID NO: 1139986
auuugucucgaccgcuuua

SEQ ID NO: 1139988 - RNA, 19 nt, Artificial Sequence
  Description of Artificial Sequence: Synthetic oligonucleotide
  Sense strand starting at position 1659 of SEQ ID NO: 916225
ccaagagcuccacgaagau

SEQ ID NO: 1139989 - RNA, 19 nt, Artificial Sequence
  Description of Artificial Sequence: Synthetic oligonucleotide
  Antisense strand to SEQ ID NO: 1139988
aucuucguggagcucuugg

SEQ ID NO: 1139990 - RNA, 19 nt, Artificial Sequence
  Description of Artificial Sequence: Synthetic oligonucleotide
  Sense strand starting at position 1675 of SEQ ID NO: 916225
gauauaggccacuguuaaa

SEQ ID NO: 1139991 - RNA, 19 nt, Artificial Sequence
  Description of Artificial Sequence: Synthetic oligonucleotide
  Antisense strand to SEQ ID NO: 1139990
uuuaacaguggccuauauc

SEQ ID NO: 1139992 - RNA, 19 nt, Artificial Sequence
  Description of Artificial Sequence: Synthetic oligonucleotide
  Sense strand starting at position 2060 of SEQ ID NO: 916225
guuaguuugcgaaagucgu

SEQ ID NO: 1139993 - RNA, 19 nt, Artificial Sequence
  Description of Artificial Sequence: Synthetic oligonucleotide
  Antisense strand to SEQ ID NO: 1139992
acgacuuucgcaaacuaac

SEQ ID NO: 1139994 - RNA, 19 nt, Artificial Sequence
  Description of Artificial Sequence: Synthetic oligonucleotide
  Sense strand starting at position 2212 of SEQ ID NO: 916225
gcccuuagccguucuccua

SEQ ID NO: 1139995 - RNA, 19 nt, Artificial Sequence
  Description of Artificial Sequence: Synthetic oligonucleotide
  Antisense strand to SEQ ID NO: 1139994
uaggagaacggcuaagggc

SEQ ID NO: 1139996 - RNA, 19 nt, Artificial Sequence
  Description of Artificial Sequence: Synthetic oligonucleotide
  Sense strand starting at position 2267 of SEQ ID NO: 916225
cauggaguuuagucucauu

SEQ ID NO: 1139997 - RNA, 19 nt, Artificial Sequence
  Description of Artificial Sequence: Synthetic oligonucleotide
  Antisense strand to SEQ ID NO: 1139996
aaugagacuaaacuccaug

SEQ ID NO: 1139998 - RNA, 19 nt, Artificial Sequence
  Description of Artificial Sequence: Synthetic oligonucleotide
  Sense strand starting at position 2272 of SEQ ID NO: 916225
aguuuagucucauuacaaa

SEQ ID NO: 1139999 - RNA, 19 nt, Artificial Sequence
  Description of Artificial Sequence: Synthetic oligonucleotide
  Antisense strand to SEQ ID NO: 1139998
uuuguaaugagacuaaacu

SEQ ID NO: 1140000 - RNA, 19 nt, Artificial Sequence
  Description of Artificial Sequence: Synthetic oligonucleotide
  Sense strand starting at position 2403 of SEQ ID NO: 916225
aaaggaaaguugucaaguu

SEQ ID NO: 1140001 - RNA, 19 nt, Artificial Sequence
  Description of Artificial Sequence: Synthetic oligonucleotide
  Antisense strand to SEQ ID NO: 1140000
aacuugacaacuuuccuuu

SEQ ID NO: 1140002 - RNA, 19 nt, Artificial Sequence
  Description of Artificial Sequence: Synthetic oligonucleotide
  Sense strand starting at position 2793 of SEQ ID NO: 916225
acggaaacccuccgagaau

SEQ ID NO: 1140003 - RNA, 19 nt, Artificial Sequence
  Description of Artificial Sequence: Synthetic oligonucleotide
  Antisense strand to SEQ ID NO: 1140002
auucucggaggguuuccgu

SEQ ID NO: 1140004 - RNA, 19 nt, Artificial Sequence
  Description of Artificial Sequence: Synthetic oligonucleotide
  Sense strand starting at position 3364 of SEQ ID NO: 916225
gcguucucccugguuugau

SEQ ID NO: 1140005 - RNA, 19 nt, Artificial Sequence
  Description of Artificial Sequence: Synthetic oligonucleotide
  Antisense strand to SEQ ID NO: 1140004
aucaaaccagggagaacgc

SEQ ID NO: 1140006 - RNA, 19 nt, Artificial Sequence
  Description of Artificial Sequence: Synthetic oligonucleotide
  Sense strand starting at position 3409 of SEQ ID NO: 916225
cuggaauaagagcgaugaa

SEQ ID NO: 1140007 - RNA, 19 nt, Artificial Sequence
  Description of Artificial Sequence: Synthetic oligonucleotide
  Antisense strand to SEQ ID NO: 1140006
uucaucgcucuuauuccag

SEQ ID NO: 1140008 - RNA, 19 nt, Artificial Sequence
  Description of Artificial Sequence: Synthetic oligonucleotide
  Sense strand starting at position 3434 of SEQ ID NO: 916225
ggcguugugagccugugau

SEQ ID NO: 1140009 - RNA, 19 nt, Artificial Sequence
  Description of Artificial Sequence: Synthetic oligonucleotide
  Antisense strand to SEQ ID NO: 1140008
aucacaggcucacaacgcc

SEQ ID NO: 1140010 - RNA, 19 nt, Artificial Sequence
  Description of Artificial Sequence: Synthetic oligonucleotide
  Sense strand starting at position 3450 of SEQ ID NO: 916225
gaucgaugcgaucagaguu

SEQ ID NO: 1140011 - RNA, 19 nt, Artificial Sequence
  Description of Artificial Sequence: Synthetic oligonucleotide
  Antisense strand to SEQ ID NO: 1140010
aacucugaucgcaucgauc

SEQ ID NO: 1140012 - RNA, 19 nt, Artificial Sequence
  Description of Artificial Sequence: Synthetic oligonucleotide
  Sense strand starting at position 3533 of SEQ ID NO: 916225
gacguaaagcuuugacaug

SEQ ID NO: 1140013 - RNA, 19 nt, Artificial Sequence
  Description of Artificial Sequence: Synthetic oligonucleotide
  Antisense strand to SEQ ID NO: 1140012
caugucaaagcuuuacguc

SEQ ID NO: 1140014 - RNA, 19 nt, Artificial Sequence
  Description of Artificial Sequence: Synthetic oligonucleotide
  Sense strand starting at position 3671 of SEQ ID NO: 916225
cuggaugugcgugaugaau

SEQ ID NO: 1140015 - RNA, 19 nt, Artificial Sequence
  Description of Artificial Sequence: Synthetic oligonucleotide
  Antisense strand to SEQ ID NO: 1140014
auucaucacgcacauccag

SEQ ID NO: 1140016 - RNA, 19 nt, Artificial Sequence
  Description of Artificial Sequence: Synthetic oligonucleotide
  Sense strand starting at position 3762 of SEQ ID NO: 916225
ugcuuauuugcguauaccu

SEQ ID NO: 1140017 - RNA, 19 nt, Artificial Sequence
  Description of Artificial Sequence: Synthetic oligonucleotide
  Antisense strand to SEQ ID NO: 1140016
agguauacgcaaauaagca

SEQ ID NO: 1140018 - RNA, 19 nt, Artificial Sequence
  Description of Artificial Sequence: Synthetic oligonucleotide
  Sense strand starting at position 3764 of SEQ ID NO: 916225
cuuauuugcguauaccuua

SEQ ID NO: 1140019 - RNA, 19 nt, Artificial Sequence
  Description of Artificial Sequence: Synthetic oligonucleotide
  Antisense strand to SEQ ID NO: 1140018
uaagguauacgcaaauaag

SEQ ID NO: 1140020 - RNA, 19 nt, Artificial Sequence
  Description of Artificial Sequence: Synthetic oligonucleotide
  Sense strand starting at position 3798 of SEQ ID NO: 916225
acagcuggauacuuaaagu

SEQ ID NO: 1140021 - RNA, 19 nt, Artificial Sequence
  Description of Artificial Sequence: Synthetic oligonucleotide
  Antisense strand to SEQ ID NO: 1140020
acuuuaaguauccagcugu

SEQ ID NO: 1140022 - RNA, 19 nt, Artificial Sequence
  Description of Artificial Sequence: Synthetic oligonucleotide
  Sense strand starting at position 3820 of SEQ ID NO: 916225
uaggaagacuuggaaacau

SEQ ID NO: 1140023 - RNA, 19 nt, Artificial Sequence
  Description of Artificial Sequence: Synthetic oligonucleotide
  Antisense strand to SEQ ID NO: 1140022
auguuuccaagucuuccua

SEQ ID NO: 1140024 - RNA, 19 nt, Artificial Sequence
  Description of Artificial Sequence: Synthetic oligonucleotide
  Sense strand starting at position 3979 of SEQ ID NO: 916225
ccuagauauuggucuuaga

SEQ ID NO: 1140025 - RNA, 19 nt, Artificial Sequence
  Description of Artificial Sequence: Synthetic oligonucleotide
  Antisense strand to SEQ ID NO: 1140024
ucuaagaccaauaucuagg

SEQ ID NO: 1140026 - RNA, 19 nt, Artificial Sequence
  Description of Artificial Sequence: Synthetic oligonucleotide
  Sense strand starting at position 37 of SEQ ID NO: 916226
aggccuauguaucuccaaa

SEQ ID NO: 1140027 - RNA, 19 nt, Artificial Sequence
  Description of Artificial Sequence: Synthetic oligonucleotide
  Antisense strand to SEQ ID NO: 1140026
uuuggagauacauaggccu

SEQ ID NO: 1140028 - RNA, 19 nt, Artificial Sequence
  Description of Artificial Sequence: Synthetic oligonucleotide
  Sense strand starting at position 292 of SEQ ID NO: 916226
gguccugaggucuguucga

SEQ ID NO: 1140029 - RNA, 19 nt, Artificial Sequence
  Description of Artificial Sequence: Synthetic oligonucleotide
  Antisense strand to SEQ ID NO: 1140028
ucgaacagaccucaggacc

SEQ ID NO: 1140030 - RNA, 19 nt, Artificial Sequence
  Description of Artificial Sequence: Synthetic oligonucleotide
  Sense strand starting at position 299 of SEQ ID NO: 916226
aggucuguucgaggcaaug

SEQ ID NO: 1140031 - RNA, 19 nt, Artificial Sequence
  Description of Artificial Sequence: Synthetic oligonucleotide
  Antisense strand to SEQ ID NO: 1140030
cauugccucgaacagaccu

SEQ ID NO: 1140032 - RNA, 19 nt, Artificial Sequence
  Description of Artificial Sequence: Synthetic oligonucleotide
  Sense strand starting at position 301 of SEQ ID NO: 916226
gucuguucgaggcaauggu

SEQ ID NO: 1140033 - RNA, 19 nt, Artificial Sequence
  Description of Artificial Sequence: Synthetic oligonucleotide
  Antisense strand to SEQ ID NO: 1140032
accauugccucgaacagac

SEQ ID NO: 1140034 - RNA, 19 nt, Artificial Sequence
  Description of Artificial Sequence: Synthetic oligonucleotide
  Sense strand starting at position 366 of SEQ ID NO: 916226
agcugaacuugggcaaaua

SEQ ID NO: 1140035 - RNA, 19 nt, Artificial Sequence
  Description of Artificial Sequence: Synthetic oligonucleotide
  Antisense strand to SEQ ID NO: 1140034
uauuugcccaaguucagcu

SEQ ID NO: 1140036 - RNA, 19 nt, Artificial Sequence
  Description of Artificial Sequence: Synthetic oligonucleotide
  Sense strand starting at position 367 of SEQ ID NO: 916226
gcugaacuugggcaaauau

SEQ ID NO: 1140037 - RNA, 19 nt, Artificial Sequence
  Description of Artificial Sequence: Synthetic oligonucleotide
  Antisense strand to SEQ ID NO: 1140036
auauuugcccaaguucagc

SEQ ID NO: 1140038 - RNA, 19 nt, Artificial Sequence
  Description of Artificial Sequence: Synthetic oligonucleotide
  Sense strand starting at position 376 of SEQ ID NO: 916226
gggcaaauauguuucugac

SEQ ID NO: 1140039 - RNA, 19 nt, Artificial Sequence
  Description of Artificial Sequence: Synthetic oligonucleotide
  Antisense strand to SEQ ID NO: 1140038
gucagaaacauauuugccc

SEQ ID NO: 1140040 - RNA, 19 nt, Artificial Sequence
  Description of Artificial Sequence: Synthetic oligonucleotide
  Sense strand starting at position 378 of SEQ ID NO: 916226
gcaaauauguuucugaccu

SEQ ID NO: 1140041 - RNA, 19 nt, Artificial Sequence
  Description of Artificial Sequence: Synthetic oligonucleotide
  Antisense strand to SEQ ID NO: 1140040
aggucagaaacauauuugc

SEQ ID NO: 1140042 - RNA, 19 nt, Artificial Sequence
  Description of Artificial Sequence: Synthetic oligonucleotide
  Sense strand starting at position 382 of SEQ ID NO: 916226
auauguuucugaccucaca

SEQ ID NO: 1140043 - RNA, 19 nt, Artificial Sequence
  Description of Artificial Sequence: Synthetic oligonucleotide
  Antisense strand to SEQ ID NO: 1140042
ugugaggucagaaacauau

SEQ ID NO: 1140044 - RNA, 19 nt, Artificial Sequence
  Description of Artificial Sequence: Synthetic oligonucleotide
  Sense strand starting at position 440 of SEQ ID NO: 916226
ugaguucuuccaugcugcu

SEQ ID NO: 1140045 - RNA, 19 nt, Artificial Sequence
  Description of Artificial Sequence: Synthetic oligonucleotide
  Antisense strand to SEQ ID NO: 1140044
agcagcauggaagaacuca

SEQ ID NO: 1140046 - RNA, 19 nt, Artificial Sequence
  Description of Artificial Sequence: Synthetic oligonucleotide
  Sense strand starting at position 463 of SEQ ID NO: 916226
guaggagucagcuguucca

SEQ ID NO: 1140047 - RNA, 19 nt, Artificial Sequence
  Description of Artificial Sequence: Synthetic oligonucleotide
  Antisense strand to SEQ ID NO: 1140046
uggaacagcugacuccuac

SEQ ID NO: 1140048 - RNA, 19 nt, Artificial Sequence
  Description of Artificial Sequence: Synthetic oligonucleotide
  Sense strand starting at position 499 of SEQ ID NO: 916226
ggcagcauuacugagguga

SEQ ID NO: 1140049 - RNA, 19 nt, Artificial Sequence
  Description of Artificial Sequence: Synthetic oligonucleotide
  Antisense strand to SEQ ID NO: 1140048
ucaccucaguaaugcugcc

SEQ ID NO: 1140050 - RNA, 19 nt, Artificial Sequence
  Description of Artificial Sequence: Synthetic oligonucleotide
  Sense strand starting at position 503 of SEQ ID NO: 916226
gcauuacugaggugagguc

SEQ ID NO: 1140051 - RNA, 19 nt, Artificial Sequence
  Description of Artificial Sequence: Synthetic oligonucleotide
  Antisense strand to SEQ ID NO: 1140050
gaccucaccucaguaaugc

SEQ ID NO: 1140052 - RNA, 19 nt, Artificial Sequence
  Description of Artificial Sequence: Synthetic oligonucleotide
  Sense strand starting at position 600 of SEQ ID NO: 916226
ggaagcaacuuucucugau

SEQ ID NO: 1140053 - RNA, 19 nt, Artificial Sequence
  Description of Artificial Sequence: Synthetic oligonucleotide
  Antisense strand to SEQ ID NO: 1140052
aucagagaaaguugcuucc

SEQ ID NO: 1140054 - RNA, 19 nt, Artificial Sequence
  Description of Artificial Sequence: Synthetic oligonucleotide
  Sense strand starting at position 620 of SEQ ID NO: 916226
accucuggguuccuaaagu

SEQ ID NO: 1140055 - RNA, 19 nt, Artificial Sequence
  Description of Artificial Sequence: Synthetic oligonucleotide
  Antisense strand to SEQ ID NO: 1140054
acuuuaggaacccagaggu

SEQ ID NO: 1140056 - RNA, 19 nt, Artificial Sequence
  Description of Artificial Sequence: Synthetic oligonucleotide
  Sense strand starting at position 665 of SEQ ID NO: 916226
uagggaaaugccugcaaug

SEQ ID NO: 1140057 - RNA, 19 nt, Artificial Sequence
  Description of Artificial Sequence: Synthetic oligonucleotide
  Antisense strand to SEQ ID NO: 1140056
cauugcaggcauuucccua

SEQ ID NO: 1140058 - RNA, 19 nt, Artificial Sequence
  Description of Artificial Sequence: Synthetic oligonucleotide
  Sense strand starting at position 667 of SEQ ID NO: 916226
gggaaaugccugcaaugcu

SEQ ID NO: 1140059 - RNA, 19 nt, Artificial Sequence
  Description of Artificial Sequence: Synthetic oligonucleotide
  Antisense strand to SEQ ID NO: 1140058
agcauugcaggcauuuccc

SEQ ID NO: 1140060 - RNA, 19 nt, Artificial Sequence
  Description of Artificial Sequence: Synthetic oligonucleotide
  Sense strand starting at position 1159 of SEQ ID NO: 916226
cugucuggagcggagaaua

SEQ ID NO: 1140061 - RNA, 19 nt, Artificial Sequence
  Description of Artificial Sequence: Synthetic oligonucleotide
  Antisense strand to SEQ ID NO: 1140060
uauucuccgcuccagacag

SEQ ID NO: 1140062 - RNA, 19 nt, Artificial Sequence
  Description of Artificial Sequence: Synthetic oligonucleotide
  Sense strand starting at position 1230 of SEQ ID NO: 916226
gcucuuugguguguccaga

SEQ ID NO: 1140063 - RNA, 19 nt, Artificial Sequence
  Description of Artificial Sequence: Synthetic oligonucleotide
  Antisense strand to SEQ ID NO: 1140062
ucuggacacaccaaagagc

SEQ ID NO: 1140064 - RNA, 19 nt, Artificial Sequence
  Description of Artificial Sequence: Synthetic oligonucleotide
  Sense strand starting at position 1259 of SEQ ID NO: 916226
ucacccagugccuguaaau

SEQ ID NO: 1140065 - RNA, 19 nt, Artificial Sequence
  Description of Artificial Sequence: Synthetic oligonucleotide
  Antisense strand to SEQ ID NO: 1140064
auuuacaggcacuggguga

SEQ ID NO: 1140066 - RNA, 19 nt, Artificial Sequence
  Description of Artificial Sequence: Synthetic oligonucleotide
  Sense strand starting at position 1316 of SEQ ID NO: 916226
uuaacauccuuucugagag

SEQ ID NO: 1140067 - RNA, 19 nt, Artificial Sequence
  Description of Artificial Sequence: Synthetic oligonucleotide
  Antisense strand to SEQ ID NO: 1140066
cucucagaaaggauguuaa

SEQ ID NO: 1140068 - RNA, 19 nt, Artificial Sequence
  Description of Artificial Sequence: Synthetic oligonucleotide
  Sense strand starting at position 1343 of SEQ ID NO: 916226
uggguugucggcugcuaga

SEQ ID NO: 1140069 - RNA, 19 nt, Artificial Sequence
  Description of Artificial Sequence: Synthetic oligonucleotide
  Antisense strand to SEQ ID NO: 1140068
ucuagcagccgacaaccca

SEQ ID NO: 1140070 - RNA, 19 nt, Artificial Sequence
  Description of Artificial Sequence: Synthetic oligonucleotide
  Sense strand starting at position 1374 of SEQ ID NO: 916226
uaagcuuugugggcaaacu

SEQ ID NO: 1140071 - RNA, 19 nt, Artificial Sequence
  Description of Artificial Sequence: Synthetic oligonucleotide
  Antisense strand to SEQ ID NO: 1140070
aguuugcccacaaagcuua

SEQ ID NO: 1140072 - RNA, 19 nt, Artificial Sequence
  Description of Artificial Sequence: Synthetic oligonucleotide
  Sense strand starting at position 1444 of SEQ ID NO: 916226
cgucugggucugcgaugau

SEQ ID NO: 1140073 - RNA, 19 nt, Artificial Sequence
  Description of Artificial Sequence: Synthetic oligonucleotide
  Antisense strand to SEQ ID NO: 1140072
aucaucgcagacccagacg

SEQ ID NO: 1140074 - RNA, 19 nt, Artificial Sequence
  Description of Artificial Sequence: Synthetic oligonucleotide
  Sense strand starting at position 1514 of SEQ ID NO: 916226
cugaacaacugaggaaaua

SEQ ID NO: 1140075 - RNA, 19 nt, Artificial Sequence
  Description of Artificial Sequence: Synthetic oligonucleotide
  Antisense strand to SEQ ID NO: 1140074
uauuuccucaguuguucag

SEQ ID NO: 1140076 - RNA, 19 nt, Artificial Sequence
  Description of Artificial Sequence: Synthetic oligonucleotide
  Sense strand starting at position 1531 of SEQ ID NO: 916226
uagggaagucggugacagu

SEQ ID NO: 1140077 - RNA, 19 nt, Artificial Sequence
  Description of Artificial Sequence: Synthetic oligonucleotide
  Antisense strand to SEQ ID NO: 1140076
acugucaccgacuucccua

SEQ ID NO: 1140078 - RNA, 19 nt, Artificial Sequence
  Description of Artificial Sequence: Synthetic oligonucleotide
  Sense strand starting at position 1727 of SEQ ID NO: 916226
gaggaaaccucucugcaag

SEQ ID NO: 1140079 - RNA, 19 nt, Artificial Sequence
  Description of Artificial Sequence: Synthetic oligonucleotide
  Antisense strand to SEQ ID NO: 1140078
cuugcagagagguuuccuc

SEQ ID NO: 1140080 - RNA, 19 nt, Artificial Sequence
  Description of Artificial Sequence: Synthetic oligonucleotide
  Sense strand starting at position 1728 of SEQ ID NO: 916226
aggaaaccucucugcaaga

SEQ ID NO: 1140081 - RNA, 19 nt, Artificial Sequence
  Description of Artificial Sequence: Synthetic oligonucleotide
  Antisense strand to SEQ ID NO: 1140080
ucuugcagagagguuuccu

SEQ ID NO: 1140082 - RNA, 19 nt, Artificial Sequence
  Description of Artificial Sequence: Synthetic oligonucleotide
  Sense strand starting at position 1730 of SEQ ID NO: 916226
gaaaccucucugcaagagu

SEQ ID NO: 1140083 - RNA, 19 nt, Artificial Sequence
  Description of Artificial Sequence: Synthetic oligonucleotide
  Antisense strand to SEQ ID NO: 1140082
acucuugcagagagguuuc

SEQ ID NO: 1140084 - RNA, 19 nt, Artificial Sequence
  Description of Artificial Sequence: Synthetic oligonucleotide
  Sense strand starting at position 2096 of SEQ ID NO: 916226
gcgagauccgccgaaggga

SEQ ID NO: 1140085 - RNA, 19 nt, Artificial Sequence
  Description of Artificial Sequence: Synthetic oligonucleotide
  Antisense strand to SEQ ID NO: 1140084
ucccuucggcggaucucgc

SEQ ID NO: 1140086 - RNA, 19 nt, Artificial Sequence
  Description of Artificial Sequence: Synthetic oligonucleotide
  Sense strand starting at position 2670 of SEQ ID NO: 916226
cucguauuccgugugccau

SEQ ID NO: 1140087 - RNA, 19 nt, Artificial Sequence
  Description of Artificial Sequence: Synthetic oligonucleotide
  Antisense strand to SEQ ID NO: 1140086
auggcacacggaauacgag

SEQ ID NO: 1140088 - RNA, 19 nt, Artificial Sequence
  Description of Artificial Sequence: Synthetic oligonucleotide
  Sense strand starting at position 2683 of SEQ ID NO: 916226
ugccaugaacugugucaag

SEQ ID NO: 1140089 - RNA, 19 nt, Artificial Sequence
  Description of Artificial Sequence: Synthetic oligonucleotide
  Antisense strand to SEQ ID NO: 1140088
cuugacacaguucauggca

SEQ ID NO: 1140090 - RNA, 19 nt, Artificial Sequence
  Description of Artificial Sequence: Synthetic oligonucleotide
  Sense strand starting at position 2753 of SEQ ID NO: 916226
cuacuaugauuauuccgaa

SEQ ID NO: 1140091 - RNA, 19 nt, Artificial Sequence
  Description of Artificial Sequence: Synthetic oligonucleotide
  Antisense strand to SEQ ID NO: 1140090
uucggaauaaucauaguag

SEQ ID NO: 1140092 - RNA, 19 nt, Artificial Sequence
  Description of Artificial Sequence: Synthetic oligonucleotide
  Sense strand starting at position 2798 of SEQ ID NO: 916226
agcagaggguguuucucaa

SEQ ID NO: 1140093 - RNA, 19 nt, Artificial Sequence
  Description of Artificial Sequence: Synthetic oligonucleotide
  Antisense strand to SEQ ID NO: 1140092
uugagaaacacccucugcu

SEQ ID NO: 1140094 - RNA, 19 nt, Artificial Sequence
  Description of Artificial Sequence: Synthetic oligonucleotide
  Sense strand starting at position 2841 of SEQ ID NO: 916226
cagucagaaucaccugaga

SEQ ID NO: 1140095 - RNA, 19 nt, Artificial Sequence
  Description of Artificial Sequence: Synthetic oligonucleotide
  Antisense strand to SEQ ID NO: 1140094
ucucaggugauucugacug

SEQ ID NO: 1140096 - RNA, 19 nt, Artificial Sequence
  Description of Artificial Sequence: Synthetic oligonucleotide
  Sense strand starting at position 3326 of SEQ ID NO: 916226
gaaugagaauccugguaaa

SEQ ID NO: 1140097 - RNA, 19 nt, Artificial Sequence
  Description of Artificial Sequence: Synthetic oligonucleotide
  Antisense strand to SEQ ID NO: 1140096
uuuaccaggauucucauuc

SEQ ID NO: 1140098 - RNA, 19 nt, Artificial Sequence
  Description of Artificial Sequence: Synthetic oligonucleotide
  Sense strand starting at position 3417 of SEQ ID NO: 916226
ccucgugugcugcaaucuu

SEQ ID NO: 1140099 - RNA, 19 nt, Artificial Sequence
  Description of Artificial Sequence: Synthetic oligonucleotide
  Antisense strand to SEQ ID NO: 1140098
aagauugcagcacacgagg

SEQ ID NO: 1140100 - RNA, 19 nt, Artificial Sequence
  Description of Artificial Sequence: Synthetic oligonucleotide
  Sense strand starting at position 3496 of SEQ ID NO: 916226
cuuucuaugguagaaacuu

SEQ ID NO: 1140101 - RNA, 19 nt, Artificial Sequence
  Description of Artificial Sequence: Synthetic oligonucleotide
  Antisense strand to SEQ ID NO: 1140100
aaguuucuaccauagaaag

SEQ ID NO: 1140102 - RNA, 19 nt, Artificial Sequence
  Description of Artificial Sequence: Synthetic oligonucleotide
  Sense strand starting at position 3504 of SEQ ID NO: 916226
gguagaaacuucuaccacu

SEQ ID NO: 1140103 - RNA, 19 nt, Artificial Sequence
  Description of Artificial Sequence: Synthetic oligonucleotide
  Antisense strand to SEQ ID NO: 1140102
agugguagaaguuucuacc

SEQ ID NO: 1140104 - RNA, 19 nt, Artificial Sequence
  Description of Artificial Sequence: Synthetic oligonucleotide
  Sense strand starting at position 3968 of SEQ ID NO: 916226
cgaguccagccaugaauuu

SEQ ID NO: 1140105 - RNA, 19 nt, Artificial Sequence
  Description of Artificial Sequence: Synthetic oligonucleotide
  Antisense strand to SEQ ID NO: 1140104
aaauucauggcuggacucg

SEQ ID NO: 1140106 - RNA, 19 nt, Artificial Sequence
  Description of Artificial Sequence: Synthetic oligonucleotide
  Sense strand starting at position 5 of SEQ ID NO: 916227
auuagacuuccauggugag

SEQ ID NO: 1140107 - RNA, 19 nt, Artificial Sequence
  Description of Artificial Sequence: Synthetic oligonucleotide
  Antisense strand to SEQ ID NO: 1140106
cucaccauggaagucuaau

SEQ ID NO: 1140108 - RNA, 19 nt, Artificial Sequence
  Description of Artificial Sequence: Synthetic oligonucleotide
  Sense strand starting at position 43 of SEQ ID NO: 916227
ccagaauguguugaaaucu

SEQ ID NO: 1140109 - RNA, 19 nt, Artificial Sequence
  Description of Artificial Sequence: Synthetic oligonucleotide
  Antisense strand to SEQ ID NO: 1140108
agauuucaacacauucugg

SEQ ID NO: 1140110 - RNA, 19 nt, Artificial Sequence
  Description of Artificial Sequence: Synthetic oligonucleotide
  Sense strand starting at position 97 of SEQ ID NO: 916227
cacagagcaguuuauagau

SEQ ID NO: 1140111 - RNA, 19 nt, Artificial Sequence
  Description of Artificial Sequence: Synthetic oligonucleotide
  Antisense strand to SEQ ID NO: 1140110
aucuauaaacugcucugug

SEQ ID NO: 1140112 - RNA, 19 nt, Artificial Sequence
  Description of Artificial Sequence: Synthetic oligonucleotide
  Sense strand starting at position 144 of SEQ ID NO: 916227
uuaggucagguugauaacu

SEQ ID NO: 1140113 - RNA, 19 nt, Artificial Sequence
  Description of Artificial Sequence: Synthetic oligonucleotide
  Antisense strand to SEQ ID NO: 1140112
aguuaucaaccugaccuaa

SEQ ID NO: 1140114 - RNA, 19 nt, Artificial Sequence
  Description of Artificial Sequence: Synthetic oligonucleotide
  Sense strand starting at position 219 of SEQ ID NO: 916227
agaagcacuugcucaaagu

SEQ ID NO: 1140115 - RNA, 19 nt, Artificial Sequence
  Description of Artificial Sequence: Synthetic oligonucleotide
  Antisense strand to SEQ ID NO: 1140114
acuuugagcaagugcuucu

SEQ ID NO: 1140116 - RNA, 19 nt, Artificial Sequence
  Description of Artificial Sequence: Synthetic oligonucleotide
  Sense strand starting at position 255 of SEQ ID NO: 916227
acaucaggauucgaucuua

SEQ ID NO: 1140117 - RNA, 19 nt, Artificial Sequence
  Description of Artificial Sequence: Synthetic oligonucleotide
  Antisense strand to SEQ ID NO: 1140116
uaagaucgaauccugaugu

SEQ ID NO: 1140118 - RNA, 19 nt, Artificial Sequence
  Description of Artificial Sequence: Synthetic oligonucleotide
  Sense strand starting at position 739 of SEQ ID NO: 916227
augugaccaucugaaauau

SEQ ID NO: 1140119 - RNA, 19 nt, Artificial Sequence
  Description of Artificial Sequence: Synthetic oligonucleotide
  Antisense strand to SEQ ID NO: 1140118
auauuucagauggucacau

SEQ ID NO: 1140120 - RNA, 19 nt, Artificial Sequence
  Description of Artificial Sequence: Synthetic oligonucleotide
  Sense strand starting at position 1360 of SEQ ID NO: 916227
ggccuaaggacaggucuau

SEQ ID NO: 1140121 - RNA, 19 nt, Artificial Sequence
  Description of Artificial Sequence: Synthetic oligonucleotide
  Antisense strand to SEQ ID NO: 1140120
auagaccuguccuuaggcc

SEQ ID NO: 1140122 - RNA, 19 nt, Artificial Sequence
  Description of Artificial Sequence: Synthetic oligonucleotide
  Sense strand starting at position 1373 of SEQ ID NO: 916227
gucuauggcccuugggauu

SEQ ID NO: 1140123 - RNA, 19 nt, Artificial Sequence
  Description of Artificial Sequence: Synthetic oligonucleotide
  Antisense strand to SEQ ID NO: 1140122
aaucccaagggccauagac

SEQ ID NO: 1140124 - RNA, 19 nt, Artificial Sequence
  Description of Artificial Sequence: Synthetic oligonucleotide
  Sense strand starting at position 1384 of SEQ ID NO: 916227
uugggauucuuauucuucu

SEQ ID NO: 1140125 - RNA, 19 nt, Artificial Sequence
  Description of Artificial Sequence: Synthetic oligonucleotide
  Antisense strand to SEQ ID NO: 1140124
agaagaauaagaaucccaa

SEQ ID NO: 1140126 - RNA, 19 nt, Artificial Sequence
  Description of Artificial Sequence: Synthetic oligonucleotide
  Sense strand starting at position 1400 of SEQ ID NO: 916227
ucucguugccugcacauau

SEQ ID NO: 1140127 - RNA, 19 nt, Artificial Sequence
  Description of Artificial Sequence: Synthetic oligonucleotide
  Antisense strand to SEQ ID NO: 1140126
auaugugcaggcaacgaga

SEQ ID NO: 1140128 - RNA, 19 nt, Artificial Sequence
  Description of Artificial Sequence: Synthetic oligonucleotide
  Sense strand starting at position 1407 of SEQ ID NO: 916227
gccugcacauauguagaua

SEQ ID NO: 1140129 - RNA, 19 nt, Artificial Sequence
  Description of Artificial Sequence: Synthetic oligonucleotide
  Antisense strand to SEQ ID NO: 1140128
uaucuacauaugugcaggc

SEQ ID NO: 1140130 - RNA, 19 nt, Artificial Sequence
  Description of Artificial Sequence: Synthetic oligonucleotide
  Sense strand starting at position 1410 of SEQ ID NO: 916227
ugcacauauguagauauaa

SEQ ID NO: 1140131 - RNA, 19 nt, Artificial Sequence
  Description of Artificial Sequence: Synthetic oligonucleotide
  Antisense strand to SEQ ID NO: 1140130
uuauaucuacauaugugca

SEQ ID NO: 1140132 - RNA, 19 nt, Artificial Sequence
  Description of Artificial Sequence: Synthetic oligonucleotide
  Sense strand starting at position 1676 of SEQ ID NO: 916227
ccagguuagcauuguaaac

SEQ ID NO: 1140133 - RNA, 19 nt, Artificial Sequence
  Description of Artificial Sequence: Synthetic oligonucleotide
  Antisense strand to SEQ ID NO: 1140132
guuuacaaugcuaaccugg

SEQ ID NO: 1140134 - RNA, 19 nt, Artificial Sequence
  Description of Artificial Sequence: Synthetic oligonucleotide
  Sense strand starting at position 2001 of SEQ ID NO: 916227
aagagaguucuaggugcca

SEQ ID NO: 1140135 - RNA, 19 nt, Artificial Sequence
  Description of Artificial Sequence: Synthetic oligonucleotide
  Antisense strand to SEQ ID NO: 1140134
uggcaccuagaacucucuu

SEQ ID NO: 1140136 - RNA, 19 nt, Artificial Sequence
  Description of Artificial Sequence: Synthetic oligonucleotide
  Sense strand starting at position 2003 of SEQ ID NO: 916227
gagaguucuaggugccagu

SEQ ID NO: 1140137 - RNA, 19 nt, Artificial Sequence
  Description of Artificial Sequence: Synthetic oligonucleotide
  Antisense strand to SEQ ID NO: 1140136
acuggcaccuagaacucuc

SEQ ID NO: 1140138 - RNA, 19 nt, Artificial Sequence
  Description of Artificial Sequence: Synthetic oligonucleotide
  Sense strand starting at position 2192 of SEQ ID NO: 916227
ccuugaagcagaggaguau

SEQ ID NO: 1140139 - RNA, 19 nt, Artificial Sequence
  Description of Artificial Sequence: Synthetic oligonucleotide
  Antisense strand to SEQ ID NO: 1140138
auacuccucugcuucaagg

SEQ ID NO: 1140140 - RNA, 19 nt, Artificial Sequence
  Description of Artificial Sequence: Synthetic oligonucleotide
  Sense strand starting at position 2337 of SEQ ID NO: 916227
ucgaaugacucacugauua

SEQ ID NO: 1140141 - RNA, 19 nt, Artificial Sequence
  Description of Artificial Sequence: Synthetic oligonucleotide
  Antisense strand to SEQ ID NO: 1140140
uaaucagugagucauucga

SEQ ID NO: 1140142 - RNA, 19 nt, Artificial Sequence
  Description of Artificial Sequence: Synthetic oligonucleotide
  Sense strand starting at position 2625 of SEQ ID NO: 916227
ccagauguucuccggccaa

SEQ ID NO: 1140143 - RNA, 19 nt, Artificial Sequence
  Description of Artificial Sequence: Synthetic oligonucleotide
  Antisense strand to SEQ ID NO: 1140142
uuggccggagaacaucugg

SEQ ID NO: 1140144 - RNA, 19 nt, Artificial Sequence
  Description of Artificial Sequence: Synthetic oligonucleotide
  Sense strand starting at position 2895 of SEQ ID NO: 916227
ucugguccuguggguauaa

SEQ ID NO: 1140145 - RNA, 19 nt, Artificial Sequence
  Description of Artificial Sequence: Synthetic oligonucleotide
  Antisense strand to SEQ ID NO: 1140144
uuauacccacaggaccaga

SEQ ID NO: 1140146 - RNA, 19 nt, Artificial Sequence
  Description of Artificial Sequence: Synthetic oligonucleotide
  Sense strand starting at position 2897 of SEQ ID NO: 916227
ugguccuguggguauaaga

SEQ ID NO: 1140147 - RNA, 19 nt, Artificial Sequence
  Description of Artificial Sequence: Synthetic oligonucleotide
  Antisense strand to SEQ ID NO: 1140146
ucuuauacccacaggacca

SEQ ID NO: 1140148 - RNA, 19 nt, Artificial Sequence
  Description of Artificial Sequence: Synthetic oligonucleotide
  Sense strand starting at position 2949 of SEQ ID NO: 916227
gcaagaagucucuguacac

SEQ ID NO: 1140149 - RNA, 19 nt, Artificial Sequence
  Description of Artificial Sequence: Synthetic oligonucleotide
  Antisense strand to SEQ ID NO: 1140148
guguacagagacuucuugc

SEQ ID NO: 1140150 - RNA, 19 nt, Artificial Sequence
  Description of Artificial Sequence: Synthetic oligonucleotide
  Sense strand starting at position 2983 of SEQ ID NO: 916227
uuuggagagcugggaucua

SEQ ID NO: 1140151 - RNA, 19 nt, Artificial Sequence
  Description of Artificial Sequence: Synthetic oligonucleotide
  Antisense strand to SEQ ID NO: 1140150
uagaucccagcucuccaaa

SEQ ID NO: 1140152 - RNA, 19 nt, Artificial Sequence
  Description of Artificial Sequence: Synthetic oligonucleotide
  Sense strand starting at position 2993 of SEQ ID NO: 916227
ugggaucuaagaugucuuu

SEQ ID NO: 1140153 - RNA, 19 nt, Artificial Sequence
  Description of Artificial Sequence: Synthetic oligonucleotide
  Antisense strand to SEQ ID NO: 1140152
aaagacaucuuagauccca

SEQ ID NO: 1140154 - RNA, 19 nt, Artificial Sequence
  Description of Artificial Sequence: Synthetic oligonucleotide
  Sense strand starting at position 3038 of SEQ ID NO: 916227
auaguaggugugcaacaaa

SEQ ID NO: 1140155 - RNA, 19 nt, Artificial Sequence
  Description of Artificial Sequence: Synthetic oligonucleotide
  Antisense strand to SEQ ID NO: 1140154
uuuguugcacaccuacuau

SEQ ID NO: 1140156 - RNA, 19 nt, Artificial Sequence
  Description of Artificial Sequence: Synthetic oligonucleotide
  Sense strand starting at position 3049 of SEQ ID NO: 916227
gcaacaaaugcuuguccca

SEQ ID NO: 1140157 - RNA, 19 nt, Artificial Sequence
  Description of Artificial Sequence: Synthetic oligonucleotide
  Antisense strand to SEQ ID NO: 1140156
ugggacaagcauuuguugc

SEQ ID NO: 1140158 - RNA, 19 nt, Artificial Sequence
  Description of Artificial Sequence: Synthetic oligonucleotide
  Sense strand starting at position 3076 of SEQ ID NO: 916227
aggacagacuuucuugcua

SEQ ID NO: 1140159 - RNA, 19 nt, Artificial Sequence
  Description of Artificial Sequence: Synthetic oligonucleotide
  Antisense strand to SEQ ID NO: 1140158
uagcaagaaagucuguccu

SEQ ID NO: 1140160 - RNA, 19 nt, Artificial Sequence
  Description of Artificial Sequence: Synthetic oligonucleotide
  Sense strand starting at position 3196 of SEQ ID NO: 916227
uugcuuguccucugcacaa

SEQ ID NO: 1140161 - RNA, 19 nt, Artificial Sequence
  Description of Artificial Sequence: Synthetic oligonucleotide
  Antisense strand to SEQ ID NO: 1140160
uugugcagaggacaagcaa

SEQ ID NO: 1140162 - RNA, 19 nt, Artificial Sequence
  Description of Artificial Sequence: Synthetic oligonucleotide
  Sense strand starting at position 3303 of SEQ ID NO: 916227
accagugaucaucauugua

SEQ ID NO: 1140163 - RNA, 19 nt, Artificial Sequence
  Description of Artificial Sequence: Synthetic oligonucleotide
  Antisense strand to SEQ ID NO: 1140162
uacaaugaugaucacuggu

SEQ ID NO: 1140164 - RNA, 19 nt, Artificial Sequence
  Description of Artificial Sequence: Synthetic oligonucleotide
  Sense strand starting at position 3305 of SEQ ID NO: 916227
cagugaucaucauuguaga

SEQ ID NO: 1140165 - RNA, 19 nt, Artificial Sequence
  Description of Artificial Sequence: Synthetic oligonucleotide
  Antisense strand to SEQ ID NO: 1140164
ucuacaaugaugaucacug

SEQ ID NO: 1140166 - RNA, 19 nt, Artificial Sequence
  Description of Artificial Sequence: Synthetic oligonucleotide
  Sense strand starting at position 3306 of SEQ ID NO: 916227
agugaucaucauuguagaa

SEQ ID NO: 1140167 - RNA, 19 nt, Artificial Sequence
  Description of Artificial Sequence: Synthetic oligonucleotide
  Antisense strand to SEQ ID NO: 1140166
uucuacaaugaugaucacu

SEQ ID NO: 1140168 - RNA, 19 nt, Artificial Sequence
  Description of Artificial Sequence: Synthetic oligonucleotide
  Sense strand starting at position 3308 of SEQ ID NO: 916227
ugaucaucauuguagaaua

SEQ ID NO: 1140169 - RNA, 19 nt, Artificial Sequence
  Description of Artificial Sequence: Synthetic oligonucleotide
  Antisense strand to SEQ ID NO: 1140168
uauucuacaaugaugauca

SEQ ID NO: 1140170 - RNA, 19 nt, Artificial Sequence
  Description of Artificial Sequence: Synthetic oligonucleotide
  Sense strand starting at position 3470 of SEQ ID NO: 916227
ggcggacauguggauuaaa

SEQ ID NO: 1140171 - RNA, 19 nt, Artificial Sequence
  Description of Artificial Sequence: Synthetic oligonucleotide
  Antisense strand to SEQ ID NO: 1140170
uuuaauccacauguccgcc

SEQ ID NO: 1140172 - RNA, 19 nt, Artificial Sequence
  Description of Artificial Sequence: Synthetic oligonucleotide
  Sense strand starting at position 3488 of SEQ ID NO: 916227
aggaaaguaauguggcuuu

SEQ ID NO: 1140173 - RNA, 19 nt, Artificial Sequence
  Description of Artificial Sequence: Synthetic oligonucleotide
  Antisense strand to SEQ ID NO: 1140172
aaagccacauuacuuuccu

SEQ ID NO: 1140174 - RNA, 19 nt, Artificial Sequence
  Description of Artificial Sequence: Synthetic oligonucleotide
  Sense strand starting at position 3541 of SEQ ID NO: 916227
ggaaucacuucuucuguuu

SEQ ID NO: 1140175 - RNA, 19 nt, Artificial Sequence
  Description of Artificial Sequence: Synthetic oligonucleotide
  Antisense strand to SEQ ID NO: 1140174
aaacagaagaagugauucc

SEQ ID NO: 1140176 - RNA, 19 nt, Artificial Sequence
  Description of Artificial Sequence: Synthetic oligonucleotide
  Sense strand starting at position 3552 of SEQ ID NO: 916227
uucuguuucgcagggauag

SEQ ID NO: 1140177 - RNA, 19 nt, Artificial Sequence
  Description of Artificial Sequence: Synthetic oligonucleotide
  Antisense strand to SEQ ID NO: 1140176
cuaucccugcgaaacagaa

SEQ ID NO: 1140178 - RNA, 19 nt, Artificial Sequence
  Description of Artificial Sequence: Synthetic oligonucleotide
  Sense strand starting at position 3553 of SEQ ID NO: 916227
ucuguuucgcagggauaga

SEQ ID NO: 1140179 - RNA, 19 nt, Artificial Sequence
  Description of Artificial Sequence: Synthetic oligonucleotide
  Antisense strand to SEQ ID NO: 1140178
ucuaucccugcgaaacaga

SEQ ID NO: 1140180 - RNA, 19 nt, Artificial Sequence
  Description of Artificial Sequence: Synthetic oligonucleotide
  Sense strand starting at position 3554 of SEQ ID NO: 916227
cuguuucgcagggauagaa

SEQ ID NO: 1140181 - RNA, 19 nt, Artificial Sequence
  Description of Artificial Sequence: Synthetic oligonucleotide
  Antisense strand to SEQ ID NO: 1140180
uucuaucccugcgaaacag

SEQ ID NO: 1140182 - RNA, 19 nt, Artificial Sequence
  Description of Artificial Sequence: Synthetic oligonucleotide
  Sense strand starting at position 3613 of SEQ ID NO: 916227
auaagaaacgcaugaucca

SEQ ID NO: 1140183 - RNA, 19 nt, Artificial Sequence
  Description of Artificial Sequence: Synthetic oligonucleotide
  Antisense strand to SEQ ID NO: 1140182
uggaucaugcguuucuuau

SEQ ID NO: 1140184 - RNA, 19 nt, Artificial Sequence
  Description of Artificial Sequence: Synthetic oligonucleotide
  Sense strand starting at position 3788 of SEQ ID NO: 916227
cuguaauccgagcgacuug

SEQ ID NO: 1140185 - RNA, 19 nt, Artificial Sequence
  Description of Artificial Sequence: Synthetic oligonucleotide
  Antisense strand to SEQ ID NO: 1140184
caagucgcucggauuacag

SEQ ID NO: 1140186 - RNA, 19 nt, Artificial Sequence
  Description of Artificial Sequence: Synthetic oligonucleotide
  Sense strand starting at position 73 of SEQ ID NO: 916228
agccgauucucaccuugaa

SEQ ID NO: 1140187 - RNA, 19 nt, Artificial Sequence
  Description of Artificial Sequence: Synthetic oligonucleotide
  Antisense strand to SEQ ID NO: 1140186
uucaaggugagaaucggcu

SEQ ID NO: 1140188 - RNA, 19 nt, Artificial Sequence
  Description of Artificial Sequence: Synthetic oligonucleotide
  Sense strand starting at position 228 of SEQ ID NO: 916228
ucaauagagccaugugcua

SEQ ID NO: 1140189 - RNA, 19 nt, Artificial Sequence
  Description of Artificial Sequence: Synthetic oligonucleotide
  Antisense strand to SEQ ID NO: 1140188
uagcacauggcucuauuga

SEQ ID NO: 1140190 - RNA, 19 nt, Artificial Sequence
  Description of Artificial Sequence: Synthetic oligonucleotide
  Sense strand starting at position 260 of SEQ ID NO: 916228
cgccuuccgggagaugaau

SEQ ID NO: 1140191 - RNA, 19 nt, Artificial Sequence
  Description of Artificial Sequence: Synthetic oligonucleotide
  Antisense strand to SEQ ID NO: 1140190
auucaucucccggaaggcg

SEQ ID NO: 1140192 - RNA, 19 nt, Artificial Sequence
  Description of Artificial Sequence: Synthetic oligonucleotide
  Sense strand starting at position 333 of SEQ ID NO: 916228
ccagcugaaucagaaagau

SEQ ID NO: 1140193 - RNA, 19 nt, Artificial Sequence
  Description of Artificial Sequence: Synthetic oligonucleotide
  Antisense strand to SEQ ID NO: 1140192
aucuuucugauucagcugg

SEQ ID NO: 1140194 - RNA, 19 nt, Artificial Sequence
  Description of Artificial Sequence: Synthetic oligonucleotide
  Sense strand starting at position 377 of SEQ ID NO: 916228
cacagcucugcgggaaagu

SEQ ID NO: 1140195 - RNA, 19 nt, Artificial Sequence
  Description of Artificial Sequence: Synthetic oligonucleotide
  Antisense strand to SEQ ID NO: 1140194
acuuucccgcagagcugug

SEQ ID NO: 1140196 - RNA, 19 nt, Artificial Sequence
  Description of Artificial Sequence: Synthetic oligonucleotide
  Sense strand starting at position 387 of SEQ ID NO: 916228
cgggaaagucagggauucu

SEQ ID NO: 1140197 - RNA, 19 nt, Artificial Sequence
  Description of Artificial Sequence: Synthetic oligonucleotide
  Antisense strand to SEQ ID NO: 1140196
agaaucccugacuuucccg

SEQ ID NO: 1140198 - RNA, 19 nt, Artificial Sequence
  Description of Artificial Sequence: Synthetic oligonucleotide
  Sense strand starting at position 397 of SEQ ID NO: 916228
agggauucugugggugaug

SEQ ID NO: 1140199 - RNA, 19 nt, Artificial Sequence
  Description of Artificial Sequence: Synthetic oligonucleotide
  Antisense strand to SEQ ID NO: 1140198
caucacccacagaaucccu

SEQ ID NO: 1140200 - RNA, 19 nt, Artificial Sequence
  Description of Artificial Sequence: Synthetic oligonucleotide
  Sense strand starting at position 437 of SEQ ID NO: 916228
ggugcucugagucagacaa

SEQ ID NO: 1140201 - RNA, 19 nt, Artificial Sequence
  Description of Artificial Sequence: Synthetic oligonucleotide
  Antisense strand to SEQ ID NO: 1140200
uugucugacucagagcacc

SEQ ID NO: 1140202 - RNA, 19 nt, Artificial Sequence
  Description of Artificial Sequence: Synthetic oligonucleotide
  Sense strand starting at position 663 of SEQ ID NO: 916228
augcuuucuggaggagguu

SEQ ID NO: 1140203 - RNA, 19 nt, Artificial Sequence
  Description of Artificial Sequence: Synthetic oligonucleotide
  Antisense strand to SEQ ID NO: 1140202
aaccuccuccagaaagcau

SEQ ID NO: 1140204 - RNA, 19 nt, Artificial Sequence
  Description of Artificial Sequence: Synthetic oligonucleotide
  Sense strand starting at position 706 of SEQ ID NO: 916228
cugaaucaucggcacggaa

SEQ ID NO: 1140205 - RNA, 19 nt, Artificial Sequence
  Description of Artificial Sequence: Synthetic oligonucleotide
  Antisense strand to SEQ ID NO: 1140204
uuccgugccgaugauucag

SEQ ID NO: 1140206 - RNA, 19 nt, Artificial Sequence
  Description of Artificial Sequence: Synthetic oligonucleotide
  Sense strand starting at position 740 of SEQ ID NO: 916228
gcuagugauguaggcacau

SEQ ID NO: 1140207 - RNA, 19 nt, Artificial Sequence
  Description of Artificial Sequence: Synthetic oligonucleotide
  Antisense strand to SEQ ID NO: 1140206
augugccuacaucacuagc

SEQ ID NO: 1140208 - RNA, 19 nt, Artificial Sequence
  Description of Artificial Sequence: Synthetic oligonucleotide
  Sense strand starting at position 870 of SEQ ID NO: 916228
ggcccugaccuguggugau

SEQ ID NO: 1140209 - RNA, 19 nt, Artificial Sequence
  Description of Artificial Sequence: Synthetic oligonucleotide
  Antisense strand to SEQ ID NO: 1140208
aucaccacaggucagggcc

SEQ ID NO: 1140210 - RNA, 19 nt, Artificial Sequence
  Description of Artificial Sequence: Synthetic oligonucleotide
  Sense strand starting at position 915 of SEQ ID NO: 916228
acguccgcucgugaugaaa

SEQ ID NO: 1140211 - RNA, 19 nt, Artificial Sequence
  Description of Artificial Sequence: Synthetic oligonucleotide
  Antisense strand to SEQ ID NO: 1140210
uuucaucacgagcggacgu

SEQ ID NO: 1140212 - RNA, 19 nt, Artificial Sequence
  Description of Artificial Sequence: Synthetic oligonucleotide
  Sense strand starting at position 1359 of SEQ ID NO: 916228
aaagauccucugcagaagu

SEQ ID NO: 1140213 - RNA, 19 nt, Artificial Sequence
  Description of Artificial Sequence: Synthetic oligonucleotide
  Antisense strand to SEQ ID NO: 1140212
acuucugcagaggaucuuu

SEQ ID NO: 1140214 - RNA, 19 nt, Artificial Sequence
  Description of Artificial Sequence: Synthetic oligonucleotide
  Sense strand starting at position 1387 of SEQ ID NO: 916228
gagcaaguuugcgucauug

SEQ ID NO: 1140215 - RNA, 19 nt, Artificial Sequence
  Description of Artificial Sequence: Synthetic oligonucleotide
  Antisense strand to SEQ ID NO: 1140214
caaugacgcaaacuugcuc

SEQ ID NO: 1140216 - RNA, 19 nt, Artificial Sequence
  Description of Artificial Sequence: Synthetic oligonucleotide
  Sense strand starting at position 3091 of SEQ ID NO: 916228
uguguucccagagauugga

SEQ ID NO: 1140217 - RNA, 19 nt, Artificial Sequence
  Description of Artificial Sequence: Synthetic oligonucleotide
  Antisense strand to SEQ ID NO: 1140216
uccaaucucugggaacaca

SEQ ID NO: 1140218 - RNA, 19 nt, Artificial Sequence
  Description of Artificial Sequence: Synthetic oligonucleotide
  Sense strand starting at position 3147 of SEQ ID NO: 916228
ugaauaaaugacggagcau

SEQ ID NO: 1140219 - RNA, 19 nt, Artificial Sequence
  Description of Artificial Sequence: Synthetic oligonucleotide
  Antisense strand to SEQ ID NO: 1140218
augcuccgucauuuauuca

SEQ ID NO: 1140220 - RNA, 19 nt, Artificial Sequence
  Description of Artificial Sequence: Synthetic oligonucleotide
  Sense strand starting at position 3183 of SEQ ID NO: 916228
gugcuuggcucuccauaca

SEQ ID NO: 1140221 - RNA, 19 nt, Artificial Sequence
  Description of Artificial Sequence: Synthetic oligonucleotide
  Antisense strand to SEQ ID NO: 1140220
uguauggagagccaagcac

SEQ ID NO: 1140222 - RNA, 19 nt, Artificial Sequence
  Description of Artificial Sequence: Synthetic oligonucleotide
  Sense strand starting at position 3338 of SEQ ID NO: 916228
gugcauguguccacguguu

SEQ ID NO: 1140223 - RNA, 19 nt, Artificial Sequence
  Description of Artificial Sequence: Synthetic oligonucleotide
  Antisense strand to SEQ ID NO: 1140222
aacacguggacacaugcac

SEQ ID NO: 1140224 - RNA, 19 nt, Artificial Sequence
  Description of Artificial Sequence: Synthetic oligonucleotide
  Sense strand starting at position 3475 of SEQ ID NO: 916228
guauuuguguaugugucua

SEQ ID NO: 1140225 - RNA, 19 nt, Artificial Sequence
  Description of Artificial Sequence: Synthetic oligonucleotide
  Antisense strand to SEQ ID NO: 1140224
uagacacauacacaaauac

SEQ ID NO: 1140226 - RNA, 19 nt, Artificial Sequence
  Description of Artificial Sequence: Synthetic oligonucleotide
  Sense strand starting at position 3543 of SEQ ID NO: 916228
cuguuuguucaugugugca

SEQ ID NO: 1140227 - RNA, 19 nt, Artificial Sequence
  Description of Artificial Sequence: Synthetic oligonucleotide
  Antisense strand to SEQ ID NO: 1140226
ugcacacaugaacaaacag

SEQ ID NO: 1140228 - RNA, 19 nt, Artificial Sequence
  Description of Artificial Sequence: Synthetic oligonucleotide
  Sense strand starting at position 3557 of SEQ ID NO: 916228
gugcaugugucucuauauc

SEQ ID NO: 1140229 - RNA, 19 nt, Artificial Sequence
  Description of Artificial Sequence: Synthetic oligonucleotide
  Antisense strand to SEQ ID NO: 1140228
gauauagagacacaugcac

SEQ ID NO: 1140230 - RNA, 19 nt, Artificial Sequence
  Description of Artificial Sequence: Synthetic oligonucleotide
  Sense strand starting at position 3566 of SEQ ID NO: 916228
ucucuauaucugugugcau

SEQ ID NO: 1140231 - RNA, 19 nt, Artificial Sequence
  Description of Artificial Sequence: Synthetic oligonucleotide
  Antisense strand to SEQ ID NO: 1140230
augcacacagauauagaga

SEQ ID NO: 1140232 - RNA, 19 nt, Artificial Sequence
  Description of Artificial Sequence: Synthetic oligonucleotide
  Sense strand starting at position 3568 of SEQ ID NO: 916228
ucuauaucugugugcaucu

SEQ ID NO: 1140233 - RNA, 19 nt, Artificial Sequence
  Description of Artificial Sequence: Synthetic oligonucleotide
  Antisense strand to SEQ ID NO: 1140232
agaugcacacagauauaga

SEQ ID NO: 1140234 - RNA, 19 nt, Artificial Sequence
  Description of Artificial Sequence: Synthetic oligonucleotide
  Sense strand starting at position 3569 of SEQ ID NO: 916228
cuauaucugugugcaucua

SEQ ID NO: 1140235 - RNA, 19 nt, Artificial Sequence
  Description of Artificial Sequence: Synthetic oligonucleotide
  Antisense strand to SEQ ID NO: 1140234
uagaugcacacagauauag

SEQ ID NO: 1140236 - RNA, 19 nt, Artificial Sequence
  Description of Artificial Sequence: Synthetic oligonucleotide
  Sense strand starting at position 3611 of SEQ ID NO: 916228
gugugcauuugucugugua

SEQ ID NO: 1140237 - RNA, 19 nt, Artificial Sequence
  Description of Artificial Sequence: Synthetic oligonucleotide
  Antisense strand to SEQ ID NO: 1140236
uacacagacaaaugcacac

SEQ ID NO: 1140238 - RNA, 19 nt, Artificial Sequence
  Description of Artificial Sequence: Synthetic oligonucleotide
  Sense strand starting at position 3613 of SEQ ID NO: 916228
gugcauuugucuguguauc

SEQ ID NO: 1140239 - RNA, 19 nt, Artificial Sequence
  Description of Artificial Sequence: Synthetic oligonucleotide
  Antisense strand to SEQ ID NO: 1140238
gauacacagacaaaugcac

SEQ ID NO: 1140240 - RNA, 19 nt, Artificial Sequence
  Description of Artificial Sequence: Synthetic oligonucleotide
  Sense strand starting at position 3614 of SEQ ID NO: 916228
ugcauuugucuguguaucu

SEQ ID NO: 1140241 - RNA, 19 nt, Artificial Sequence
  Description of Artificial Sequence: Synthetic oligonucleotide
  Antisense strand to SEQ ID NO: 1140240
agauacacagacaaaugca

SEQ ID NO: 1140242 - RNA, 19 nt, Artificial Sequence
  Description of Artificial Sequence: Synthetic oligonucleotide
  Sense strand starting at position 3615 of SEQ ID NO: 916228
gcauuugucuguguaucug

SEQ ID NO: 1140243 - RNA, 19 nt, Artificial Sequence
  Description of Artificial Sequence: Synthetic oligonucleotide
  Antisense strand to SEQ ID NO: 1140242
cagauacacagacaaaugc

SEQ ID NO: 1140244 - RNA, 19 nt, Artificial Sequence
  Description of Artificial Sequence: Synthetic oligonucleotide
  Sense strand starting at position 3624 of SEQ ID NO: 916228
uguguaucuguguacgagu

SEQ ID NO: 1140245 - RNA, 19 nt, Artificial Sequence
  Description of Artificial Sequence: Synthetic oligonucleotide
  Antisense strand to SEQ ID NO: 1140244
acucguacacagauacaca

SEQ ID NO: 1140246 - RNA, 19 nt, Artificial Sequence
  Description of Artificial Sequence: Synthetic oligonucleotide
  Sense strand starting at position 3685 of SEQ ID NO: 916228
augugcauguuucuaugua

SEQ ID NO: 1140247 - RNA, 19 nt, Artificial Sequence
  Description of Artificial Sequence: Synthetic oligonucleotide
  Antisense strand to SEQ ID NO: 1140246
uacauagaaacaugcacau

SEQ ID NO: 1140248 - RNA, 19 nt, Artificial Sequence
  Description of Artificial Sequence: Synthetic oligonucleotide
  Sense strand starting at position 3701 of SEQ ID NO: 916228
guauauaugucucuguguu

SEQ ID NO: 1140249 - RNA, 19 nt, Artificial Sequence
  Description of Artificial Sequence: Synthetic oligonucleotide
  Antisense strand to SEQ ID NO: 1140248
aacacagagacauauauac

SEQ ID NO: 1140250 - RNA, 19 nt, Artificial Sequence
  Description of Artificial Sequence: Synthetic oligonucleotide
  Sense strand starting at position 3702 of SEQ ID NO: 916228
uauauaugucucuguguuc

SEQ ID NO: 1140251 - RNA, 19 nt, Artificial Sequence
  Description of Artificial Sequence: Synthetic oligonucleotide
  Antisense strand to SEQ ID NO: 1140250
gaacacagagacauauaua

SEQ ID NO: 1140252 - RNA, 19 nt, Artificial Sequence
  Description of Artificial Sequence: Synthetic oligonucleotide
  Sense strand starting at position 3711 of SEQ ID NO: 916228
cucuguguucauguguguu

SEQ ID NO: 1140253 - RNA, 19 nt, Artificial Sequence
  Description of Artificial Sequence: Synthetic oligonucleotide
  Antisense strand to SEQ ID NO: 1140252
aacacacaugaacacagag

SEQ ID NO: 1140254 - RNA, 19 nt, Artificial Sequence
  Description of Artificial Sequence: Synthetic oligonucleotide
  Sense strand starting at position 3786 of SEQ ID NO: 916228
cauguuucuguguauguau

SEQ ID NO: 1140255 - RNA, 19 nt, Artificial Sequence
  Description of Artificial Sequence: Synthetic oligonucleotide
  Antisense strand to SEQ ID NO: 1140254
auacauacacagaaacaug

SEQ ID NO: 1140256 - RNA, 19 nt, Artificial Sequence
  Description of Artificial Sequence: Synthetic oligonucleotide
  Sense strand starting at position 3795 of SEQ ID NO: 916228
guguauguaugucuguuca

SEQ ID NO: 1140257 - RNA, 19 nt, Artificial Sequence
  Description of Artificial Sequence: Synthetic oligonucleotide
  Antisense strand to SEQ ID NO: 1140256
ugaacagacauacauacac

SEQ ID NO: 1140258 - RNA, 19 nt, Artificial Sequence
  Description of Artificial Sequence: Synthetic oligonucleotide
  Sense strand starting at position 3797 of SEQ ID NO: 916228
guauguaugucuguucaug

SEQ ID NO: 1140259 - RNA, 19 nt, Artificial Sequence
  Description of Artificial Sequence: Synthetic oligonucleotide
  Antisense strand to SEQ ID NO: 1140258
caugaacagacauacauac

SEQ ID NO: 1140260 - RNA, 19 nt, Artificial Sequence
  Description of Artificial Sequence: Synthetic oligonucleotide
  Sense strand starting at position 3877 of SEQ ID NO: 916228
uguguucaugugucuaugu

SEQ ID NO: 1140261 - RNA, 19 nt, Artificial Sequence
  Description of Artificial Sequence: Synthetic oligonucleotide
  Antisense strand to SEQ ID NO: 1140260
acauagacacaugaacaca

SEQ ID NO: 1140262 - RNA, 19 nt, Artificial Sequence
  Description of Artificial Sequence: Synthetic oligonucleotide
  Sense strand starting at position 3897 of SEQ ID NO: 916228
uguguuuguauguauaucu

SEQ ID NO: 1140263 - RNA, 19 nt, Artificial Sequence
  Description of Artificial Sequence: Synthetic oligonucleotide
  Antisense strand to SEQ ID NO: 1140262
agauauacauacaaacaca

SEQ ID NO: 1140264 - RNA, 19 nt, Artificial Sequence
  Description of Artificial Sequence: Synthetic oligonucleotide
  Sense strand starting at position 3977 of SEQ ID NO: 916228
ggguucuggcucugagcuu

SEQ ID NO: 1140265 - RNA, 19 nt, Artificial Sequence
  Description of Artificial Sequence: Synthetic oligonucleotide
  Antisense strand to SEQ ID NO: 1140264
aagcucagagccagaaccc

SEQ ID NO: 1140266 - RNA, 19 nt, Artificial Sequence
  Description of Artificial Sequence: Synthetic oligonucleotide
  Sense strand starting at position 72 of SEQ ID NO: 916229
gcugcuugccaugcagaca

SEQ ID NO: 1140267 - RNA, 19 nt, Artificial Sequence
  Description of Artificial Sequence: Synthetic oligonucleotide
  Antisense strand to SEQ ID NO: 1140266
ugucugcauggcaagcagc

SEQ ID NO: 1140268 - RNA, 19 nt, Artificial Sequence
  Description of Artificial Sequence: Synthetic oligonucleotide
  Sense strand starting at position 188 of SEQ ID NO: 916229
gcagcagaaacguguuugu

SEQ ID NO: 1140269 - RNA, 19 nt, Artificial Sequence
  Description of Artificial Sequence: Synthetic oligonucleotide
  Antisense strand to SEQ ID NO: 1140268
acaaacacguuucugcugc

SEQ ID NO: 1140270 - RNA, 19 nt, Artificial Sequence
  Description of Artificial Sequence: Synthetic oligonucleotide
  Sense strand starting at position 191 of SEQ ID NO: 916229
gcagaaacguguuugucac

SEQ ID NO: 1140271 - RNA, 19 nt, Artificial Sequence
  Description of Artificial Sequence: Synthetic oligonucleotide
  Antisense strand to SEQ ID NO: 1140270
gugacaaacacguuucugc

SEQ ID NO: 1140272 - RNA, 19 nt, Artificial Sequence
  Description of Artificial Sequence: Synthetic oligonucleotide
  Sense strand starting at position 192 of SEQ ID NO: 916229
cagaaacguguuugucacu

SEQ ID NO: 1140273 - RNA, 19 nt, Artificial Sequence
  Description of Artificial Sequence: Synthetic oligonucleotide
  Antisense strand to SEQ ID NO: 1140272
agugacaaacacguuucug

SEQ ID NO: 1140274 - RNA, 19 nt, Artificial Sequence
  Description of Artificial Sequence: Synthetic oligonucleotide
  Sense strand starting at position 197 of SEQ ID NO: 916229
acguguuugucacugcgua

SEQ ID NO: 1140275 - RNA, 19 nt, Artificial Sequence
  Description of Artificial Sequence: Synthetic oligonucleotide
  Antisense strand to SEQ ID NO: 1140274
uacgcagugacaaacacgu

SEQ ID NO: 1140276 - RNA, 19 nt, Artificial Sequence
  Description of Artificial Sequence: Synthetic oligonucleotide
  Sense strand starting at position 198 of SEQ ID NO: 916229
cguguuugucacugcguau

SEQ ID NO: 1140277 - RNA, 19 nt, Artificial Sequence
  Description of Artificial Sequence: Synthetic oligonucleotide
  Antisense strand to SEQ ID NO: 1140276
auacgcagugacaaacacg

SEQ ID NO: 1140278 - RNA, 19 nt, Artificial Sequence
  Description of Artificial Sequence: Synthetic oligonucleotide
  Sense strand starting at position 231 of SEQ ID NO: 916229
uuccgugucguuccacuua

SEQ ID NO: 1140279 - RNA, 19 nt, Artificial Sequence
  Description of Artificial Sequence: Synthetic oligonucleotide
  Antisense strand to SEQ ID NO: 1140278
uaaguggaacgacacggaa

SEQ ID NO: 1140280 - RNA, 19 nt, Artificial Sequence
  Description of Artificial Sequence: Synthetic oligonucleotide
  Sense strand starting at position 359 of SEQ ID NO: 916229
gacguuugcucucccgauu

SEQ ID NO: 1140281 - RNA, 19 nt, Artificial Sequence
  Description of Artificial Sequence: Synthetic oligonucleotide
  Antisense strand to SEQ ID NO: 1140280
aaucgggagagcaaacguc

SEQ ID NO: 1140282 - RNA, 19 nt, Artificial Sequence
  Description of Artificial Sequence: Synthetic oligonucleotide
  Sense strand starting at position 401 of SEQ ID NO: 916229
uggugggagccguguuuaa

SEQ ID NO: 1140283 - RNA, 19 nt, Artificial Sequence
  Description of Artificial Sequence: Synthetic oligonucleotide
  Antisense strand to SEQ ID NO: 1140282
uuaaacacggcucccacca

SEQ ID NO: 1140284 - RNA, 19 nt, Artificial Sequence
  Description of Artificial Sequence: Synthetic oligonucleotide
  Sense strand starting at position 405 of SEQ ID NO: 916229
gggagccguguuuaaaucu

SEQ ID NO: 1140285 - RNA, 19 nt, Artificial Sequence
  Description of Artificial Sequence: Synthetic oligonucleotide
  Antisense strand to SEQ ID NO: 1140284
agauuuaaacacggcuccc

SEQ ID NO: 1140286 - RNA, 19 nt, Artificial Sequence
  Description of Artificial Sequence: Synthetic oligonucleotide
  Sense strand starting at position 603 of SEQ ID NO: 916229
gugagucaauuccuuagau

SEQ ID NO: 1140287 - RNA, 19 nt, Artificial Sequence
  Description of Artificial Sequence: Synthetic oligonucleotide
  Antisense strand to SEQ ID NO: 1140286
aucuaaggaauugacucac

SEQ ID NO: 1140288 - RNA, 19 nt, Artificial Sequence
  Description of Artificial Sequence: Synthetic oligonucleotide
  Sense strand starting at position 604 of SEQ ID NO: 916229
ugagucaauuccuuagaug

SEQ ID NO: 1140289 - RNA, 19 nt, Artificial Sequence
  Description of Artificial Sequence: Synthetic oligonucleotide
  Antisense strand to SEQ ID NO: 1140288
caucuaaggaauugacuca

SEQ ID NO: 1140290 - RNA, 19 nt, Artificial Sequence
  Description of Artificial Sequence: Synthetic oligonucleotide
  Sense strand starting at position 607 of SEQ ID NO: 916229
gucaauuccuuagaugaac

SEQ ID NO: 1140291 - RNA, 19 nt, Artificial Sequence
  Description of Artificial Sequence: Synthetic oligonucleotide
  Antisense strand to SEQ ID NO: 1140290
guucaucuaaggaauugac

SEQ ID NO: 1140292 - RNA, 19 nt, Artificial Sequence
  Description of Artificial Sequence: Synthetic oligonucleotide
  Sense strand starting at position 662 of SEQ ID NO: 916229
uaaucuguuucccuggaga

SEQ ID NO: 1140293 - RNA, 19 nt, Artificial Sequence
  Description of Artificial Sequence: Synthetic oligonucleotide
  Antisense strand to SEQ ID NO: 1140292
ucuccagggaaacagauua

SEQ ID NO: 1140294 - RNA, 19 nt, Artificial Sequence
  Description of Artificial Sequence: Synthetic oligonucleotide
  Sense strand starting at position 789 of SEQ ID NO: 916229
aacaaaugggucugaucca

SEQ ID NO: 1140295 - RNA, 19 nt, Artificial Sequence
  Description of Artificial Sequence: Synthetic oligonucleotide
  Antisense strand to SEQ ID NO: 1140294
uggaucagacccauuuguu

SEQ ID NO: 1140296 - RNA, 19 nt, Artificial Sequence
  Description of Artificial Sequence: Synthetic oligonucleotide
  Sense strand starting at position 1100 of SEQ ID NO: 916229
ucuccaggccguuaucuua

SEQ ID NO: 1140297 - RNA, 19 nt, Artificial Sequence
  Description of Artificial Sequence: Synthetic oligonucleotide
  Antisense strand to SEQ ID NO: 1140296
uaagauaacggccuggaga

SEQ ID NO: 1140298 - RNA, 19 nt, Artificial Sequence
  Description of Artificial Sequence: Synthetic oligonucleotide
  Sense strand starting at position 1108 of SEQ ID NO: 916229
ccguuaucuuaaucauguc

SEQ ID NO: 1140299 - RNA, 19 nt, Artificial Sequence
  Description of Artificial Sequence: Synthetic oligonucleotide
  Antisense strand to SEQ ID NO: 1140298
gacaugauuaagauaacgg

SEQ ID NO: 1140300 - RNA, 19 nt, Artificial Sequence
  Description of Artificial Sequence: Synthetic oligonucleotide
  Sense strand starting at position 1116 of SEQ ID NO: 916229
uuaaucaugucugcaaaga

SEQ ID NO: 1140301 - RNA, 19 nt, Artificial Sequence
  Description of Artificial Sequence: Synthetic oligonucleotide
  Antisense strand to SEQ ID NO: 1140300
ucuuugcagacaugauuaa

SEQ ID NO: 1140302 - RNA, 19 nt, Artificial Sequence
  Description of Artificial Sequence: Synthetic oligonucleotide
  Sense strand starting at position 1313 of SEQ ID NO: 916229
ggccguaucgccgaucacu

SEQ ID NO: 1140303 - RNA, 19 nt, Artificial Sequence
  Description of Artificial Sequence: Synthetic oligonucleotide
  Antisense strand to SEQ ID NO: 1140302
agugaucggcgauacggcc

SEQ ID NO: 1140304 - RNA, 19 nt, Artificial Sequence
  Description of Artificial Sequence: Synthetic oligonucleotide
  Sense strand starting at position 1315 of SEQ ID NO: 916229
ccguaucgccgaucacuua

SEQ ID NO: 1140305 - RNA, 19 nt, Artificial Sequence
  Description of Artificial Sequence: Synthetic oligonucleotide
  Antisense strand to SEQ ID NO: 1140304
uaagugaucggcgauacgg

SEQ ID NO: 1140306 - RNA, 19 nt, Artificial Sequence
  Description of Artificial Sequence: Synthetic oligonucleotide
  Sense strand starting at position 1688 of SEQ ID NO: 916229
gggacaaccugccugagaa

SEQ ID NO: 1140307 - RNA, 19 nt, Artificial Sequence
  Description of Artificial Sequence: Synthetic oligonucleotide
  Antisense strand to SEQ ID NO: 1140306
uucucaggcagguuguccc

SEQ ID NO: 1140308 - RNA, 19 nt, Artificial Sequence
  Description of Artificial Sequence: Synthetic oligonucleotide
  Sense strand starting at position 1689 of SEQ ID NO: 916229
ggacaaccugccugagaaa

SEQ ID NO: 1140309 - RNA, 19 nt, Artificial Sequence
  Description of Artificial Sequence: Synthetic oligonucleotide
  Antisense strand to SEQ ID NO: 1140308
uuucucaggcagguugucc

SEQ ID NO: 1140310 - RNA, 19 nt, Artificial Sequence
  Description of Artificial Sequence: Synthetic oligonucleotide
  Sense strand starting at position 1861 of SEQ ID NO: 916229
cacccagguuucgugagaa

SEQ ID NO: 1140311 - RNA, 19 nt, Artificial Sequence
  Description of Artificial Sequence: Synthetic oligonucleotide
  Antisense strand to SEQ ID NO: 1140310
uucucacgaaaccugggug

SEQ ID NO: 1140312 - RNA, 19 nt, Artificial Sequence
  Description of Artificial Sequence: Synthetic oligonucleotide
  Sense strand starting at position 1865 of SEQ ID NO: 916229
cagguuucgugagaaggag

SEQ ID NO: 1140313 - RNA, 19 nt, Artificial Sequence
  Description of Artificial Sequence: Synthetic oligonucleotide
  Antisense strand to SEQ ID NO: 1140312
cuccuucucacgaaaccug

SEQ ID NO: 1140314 - RNA, 19 nt, Artificial Sequence
  Description of Artificial Sequence: Synthetic oligonucleotide
  Sense strand starting at position 2299 of SEQ ID NO: 916229
gcucuagugccagagagau

SEQ ID NO: 1140315 - RNA, 19 nt, Artificial Sequence
  Description of Artificial Sequence: Synthetic oligonucleotide
  Antisense strand to SEQ ID NO: 1140314
aucucucuggcacuagagc

SEQ ID NO: 1140316 - RNA, 19 nt, Artificial Sequence
  Description of Artificial Sequence: Synthetic oligonucleotide
  Sense strand starting at position 3000 of SEQ ID NO: 916229
cucuccaaccuggguuaaa

SEQ ID NO: 1140317 - RNA, 19 nt, Artificial Sequence
  Description of Artificial Sequence: Synthetic oligonucleotide
  Antisense strand to SEQ ID NO: 1140316
uuuaacccagguuggagag

SEQ ID NO: 1140318 - RNA, 19 nt, Artificial Sequence
  Description of Artificial Sequence: Synthetic oligonucleotide
  Sense strand starting at position 3074 of SEQ ID NO: 916229
ucaagucuucagggugagu

SEQ ID NO: 1140319 - RNA, 19 nt, Artificial Sequence
  Description of Artificial Sequence: Synthetic oligonucleotide
  Antisense strand to SEQ ID NO: 1140318
acucacccugaagacuuga

SEQ ID NO: 1140320 - RNA, 19 nt, Artificial Sequence
  Description of Artificial Sequence: Synthetic oligonucleotide
  Sense strand starting at position 3307 of SEQ ID NO: 916229
uugauaaauagcugcggaa

SEQ ID NO: 1140321 - RNA, 19 nt, Artificial Sequence
  Description of Artificial Sequence: Synthetic oligonucleotide
  Antisense strand to SEQ ID NO: 1140320
uuccgcagcuauuuaucaa

SEQ ID NO: 1140322 - RNA, 19 nt, Artificial Sequence
  Description of Artificial Sequence: Synthetic oligonucleotide
  Sense strand starting at position 3329 of SEQ ID NO: 916229
auguguucccuuuaggaac

SEQ ID NO: 1140323 - RNA, 19 nt, Artificial Sequence
  Description of Artificial Sequence: Synthetic oligonucleotide
  Antisense strand to SEQ ID NO: 1140322
guuccuaaagggaacacau

SEQ ID NO: 1140324 - RNA, 19 nt, Artificial Sequence
  Description of Artificial Sequence: Synthetic oligonucleotide
  Sense strand starting at position 3398 of SEQ ID NO: 916229
ggcgauuccacaugggaac

SEQ ID NO: 1140325 - RNA, 19 nt, Artificial Sequence
  Description of Artificial Sequence: Synthetic oligonucleotide
  Antisense strand to SEQ ID NO: 1140324
guucccauguggaaucgcc

SEQ ID NO: 1140326 - RNA, 19 nt, Artificial Sequence
  Description of Artificial Sequence: Synthetic oligonucleotide
  Sense strand starting at position 3778 of SEQ ID NO: 916229
gggccauuagcucaggagu

SEQ ID NO: 1140327 - RNA, 19 nt, Artificial Sequence
  Description of Artificial Sequence: Synthetic oligonucleotide
  Antisense strand to SEQ ID NO: 1140326
acuccugagcuaauggccc

SEQ ID NO: 1140328 - RNA, 19 nt, Artificial Sequence
  Description of Artificial Sequence: Synthetic oligonucleotide
  Sense strand starting at position 3780 of SEQ ID NO: 916229
gccauuagcucaggaguga

SEQ ID NO: 1140329 - RNA, 19 nt, Artificial Sequence
  Description of Artificial Sequence: Synthetic oligonucleotide
  Antisense strand to SEQ ID NO: 1140328
ucacuccugagcuaauggc

SEQ ID NO: 1140330 - RNA, 19 nt, Artificial Sequence
  Description of Artificial Sequence: Synthetic oligonucleotide
  Sense strand starting at position 3781 of SEQ ID NO: 916229
ccauuagcucaggagugau

SEQ ID NO: 1140331 - RNA, 19 nt, Artificial Sequence
  Description of Artificial Sequence: Synthetic oligonucleotide
  Antisense strand to SEQ ID NO: 1140330
aucacuccugagcuaaugg

SEQ ID NO: 1140332 - RNA, 19 nt, Artificial Sequence
  Description of Artificial Sequence: Synthetic oligonucleotide
  Sense strand starting at position 3784 of SEQ ID NO: 916229
uuagcucaggagugauaaa

SEQ ID NO: 1140333 - RNA, 19 nt, Artificial Sequence
  Description of Artificial Sequence: Synthetic oligonucleotide
  Antisense strand to SEQ ID NO: 1140332
uuuaucacuccugagcuaa

SEQ ID NO: 1140334 - RNA, 19 nt, Artificial Sequence
  Description of Artificial Sequence: Synthetic oligonucleotide
  Sense strand starting at position 3794 of SEQ ID NO: 916229
agugauaaagucggagagu

SEQ ID NO: 1140335 - RNA, 19 nt, Artificial Sequence
  Description of Artificial Sequence: Synthetic oligonucleotide
  Antisense strand to SEQ ID NO: 1140334
acucuccgacuuuaucacu

SEQ ID NO: 1140336 - RNA, 19 nt, Artificial Sequence
  Description of Artificial Sequence: Synthetic oligonucleotide
  Sense strand starting at position 3795 of SEQ ID NO: 916229
gugauaaagucggagagug

SEQ ID NO: 1140337 - RNA, 19 nt, Artificial Sequence
  Description of Artificial Sequence: Synthetic oligonucleotide
  Antisense strand to SEQ ID NO: 1140336
cacucuccgacuuuaucac

SEQ ID NO: 1140338 - RNA, 19 nt, Artificial Sequence
  Description of Artificial Sequence: Synthetic oligonucleotide
  Sense strand starting at position 3961 of SEQ ID NO: 916229
cagaguuaaugaccgugua

SEQ ID NO: 1140339 - RNA, 19 nt, Artificial Sequence
  Description of Artificial Sequence: Synthetic oligonucleotide
  Antisense strand to SEQ ID NO: 1140338
uacacggucauuaacucug

SEQ ID NO: 1140340 - RNA, 19 nt, Artificial Sequence
  Description of Artificial Sequence: Synthetic oligonucleotide
  Sense strand starting at position 3964 of SEQ ID NO: 916229
aguuaaugaccguguaguu

SEQ ID NO: 1140341 - RNA, 19 nt, Artificial Sequence
  Description of Artificial Sequence: Synthetic oligonucleotide
  Antisense strand to SEQ ID NO: 1140340
aacuacacggucauuaacu

SEQ ID NO: 1140342 - RNA, 19 nt, Artificial Sequence
  Description of Artificial Sequence: Synthetic oligonucleotide
  Sense strand starting at position 2 of SEQ ID NO: 916230
accugaugaucuugaggcu

SEQ ID NO: 1140343 - RNA, 19 nt, Artificial Sequence
  Description of Artificial Sequence: Synthetic oligonucleotide
  Antisense strand to SEQ ID NO: 1140342
agccucaagaucaucaggu

SEQ ID NO: 1140344 - RNA, 19 nt, Artificial Sequence
  Description of Artificial Sequence: Synthetic oligonucleotide
  Sense strand starting at position 422 of SEQ ID NO: 916230
ccacucacuccuggaagau

SEQ ID NO: 1140345 - RNA, 19 nt, Artificial Sequence
  Description of Artificial Sequence: Synthetic oligonucleotide
  Antisense strand to SEQ ID NO: 1140344
aucuuccaggagugagugg

SEQ ID NO: 1140346 - RNA, 19 nt, Artificial Sequence
  Description of Artificial Sequence: Synthetic oligonucleotide
  Sense strand starting at position 542 of SEQ ID NO: 916230
ggaauacgugaggguauga

SEQ ID NO: 1140347 - RNA, 19 nt, Artificial Sequence
  Description of Artificial Sequence: Synthetic oligonucleotide
  Antisense strand to SEQ ID NO: 1140346
ucauacccucacguauucc

SEQ ID NO: 1140348 - RNA, 19 nt, Artificial Sequence
  Description of Artificial Sequence: Synthetic oligonucleotide
  Sense strand starting at position 1003 of SEQ ID NO: 916230
gggcacaagcuuuguacau

SEQ ID NO: 1140349 - RNA, 19 nt, Artificial Sequence
  Description of Artificial Sequence: Synthetic oligonucleotide
  Antisense strand to SEQ ID NO: 1140348
auguacaaagcuugugccc

SEQ ID NO: 1140350 - RNA, 19 nt, Artificial Sequence
  Description of Artificial Sequence: Synthetic oligonucleotide
  Sense strand starting at position 1007 of SEQ ID NO: 916230
acaagcuuuguacauggua

SEQ ID NO: 1140351 - RNA, 19 nt, Artificial Sequence
  Description of Artificial Sequence: Synthetic oligonucleotide
  Antisense strand to SEQ ID NO: 1140350
uaccauguacaaagcuugu

SEQ ID NO: 1140352 - RNA, 19 nt, Artificial Sequence
  Description of Artificial Sequence: Synthetic oligonucleotide
  Sense strand starting at position 1135 of SEQ ID NO: 916230
gaguaaaggucagaaauua

SEQ ID NO: 1140353 - RNA, 19 nt, Artificial Sequence
  Description of Artificial Sequence: Synthetic oligonucleotide
  Antisense strand to SEQ ID NO: 1140352
uaauuucugaccuuuacuc

SEQ ID NO: 1140354 - RNA, 19 nt, Artificial Sequence
  Description of Artificial Sequence: Synthetic oligonucleotide
  Sense strand starting at position 1259 of SEQ ID NO: 916230
gggcuuugauuugccaagu

SEQ ID NO: 1140355 - RNA, 19 nt, Artificial Sequence
  Description of Artificial Sequence: Synthetic oligonucleotide
  Antisense strand to SEQ ID NO: 1140354
acuuggcaaaucaaagccc

SEQ ID NO: 1140356 - RNA, 19 nt, Artificial Sequence
  Description of Artificial Sequence: Synthetic oligonucleotide
  Sense strand starting at position 1260 of SEQ ID NO: 916230
ggcuuugauuugccaaguu

SEQ ID NO: 1140357 - RNA, 19 nt, Artificial Sequence
  Description of Artificial Sequence: Synthetic oligonucleotide
  Antisense strand to SEQ ID NO: 1140356
aacuuggcaaaucaaagcc

SEQ ID NO: 1140358 - RNA, 19 nt, Artificial Sequence
  Description of Artificial Sequence: Synthetic oligonucleotide
  Sense strand starting at position 1386 of SEQ ID NO: 916230
cagaaaggucagcagcuau

SEQ ID NO: 1140359 - RNA, 19 nt, Artificial Sequence
  Description of Artificial Sequence: Synthetic oligonucleotide
  Antisense strand to SEQ ID NO: 1140358
auagcugcugaccuuucug

SEQ ID NO: 1140360 - RNA, 19 nt, Artificial Sequence
  Description of Artificial Sequence: Synthetic oligonucleotide
  Sense strand starting at position 1433 of SEQ ID NO: 916230
agaucugguuuccggaaga

SEQ ID NO: 1140361 - RNA, 19 nt, Artificial Sequence
  Description of Artificial Sequence: Synthetic oligonucleotide
  Antisense strand to SEQ ID NO: 1140360
ucuuccggaaaccagaucu

SEQ ID NO: 1140362 - RNA, 19 nt, Artificial Sequence
  Description of Artificial Sequence: Synthetic oligonucleotide
  Sense strand starting at position 1493 of SEQ ID NO: 916230
cccaauccucccggugaca

SEQ ID NO: 1140363 - RNA, 19 nt, Artificial Sequence
  Description of Artificial Sequence: Synthetic oligonucleotide
  Antisense strand to SEQ ID NO: 1140362
ugucaccgggaggauuggg

SEQ ID NO: 1140364 - RNA, 19 nt, Artificial Sequence
  Description of Artificial Sequence: Synthetic oligonucleotide
  Sense strand starting at position 1495 of SEQ ID NO: 916230
caauccucccggugacauu

SEQ ID NO: 1140365 - RNA, 19 nt, Artificial Sequence
  Description of Artificial Sequence: Synthetic oligonucleotide
  Antisense strand to SEQ ID NO: 1140364
aaugucaccgggaggauug

SEQ ID NO: 1140366 - RNA, 19 nt, Artificial Sequence
  Description of Artificial Sequence: Synthetic oligonucleotide
  Sense strand starting at position 2805 of SEQ ID NO: 916230
ggucuugaggccugagcua

SEQ ID NO: 1140367 - RNA, 19 nt, Artificial Sequence
  Description of Artificial Sequence: Synthetic oligonucleotide
  Antisense strand to SEQ ID NO: 1140366
uagcucaggccucaagacc

SEQ ID NO: 1140368 - RNA, 19 nt, Artificial Sequence
  Description of Artificial Sequence: Synthetic oligonucleotide
  Sense strand starting at position 2947 of SEQ ID NO: 916230
ugagauuggcccgauggga

SEQ ID NO: 1140369 - RNA, 19 nt, Artificial Sequence
  Description of Artificial Sequence: Synthetic oligonucleotide
  Antisense strand to SEQ ID NO: 1140368
ucccaucgggccaaucuca

SEQ ID NO: 1140370 - RNA, 19 nt, Artificial Sequence
  Description of Artificial Sequence: Synthetic oligonucleotide
  Sense strand starting at position 3035 of SEQ ID NO: 916230
cuuacacgcuuggaugaaa

SEQ ID NO: 1140371 - RNA, 19 nt, Artificial Sequence
  Description of Artificial Sequence: Synthetic oligonucleotide
  Antisense strand to SEQ ID NO: 1140370
uuucauccaagcguguaag

SEQ ID NO: 1140372 - RNA, 19 nt, Artificial Sequence
  Description of Artificial Sequence: Synthetic oligonucleotide
  Sense strand starting at position 3059 of SEQ ID NO: 916230
ggacuuugggaacgacuga

SEQ ID NO: 1140373 - RNA, 19 nt, Artificial Sequence
  Description of Artificial Sequence: Synthetic oligonucleotide
  Antisense strand to SEQ ID NO: 1140372
ucagucguucccaaagucc

SEQ ID NO: 1140374 - RNA, 19 nt, Artificial Sequence
  Description of Artificial Sequence: Synthetic oligonucleotide
  Sense strand starting at position 3177 of SEQ ID NO: 916230
ggaacuucuccucgaggcu

SEQ ID NO: 1140375 - RNA, 19 nt, Artificial Sequence
  Description of Artificial Sequence: Synthetic oligonucleotide
  Antisense strand to SEQ ID NO: 1140374
agccucgaggagaaguucc

SEQ ID NO: 1140376 - RNA, 19 nt, Artificial Sequence
  Description of Artificial Sequence: Synthetic oligonucleotide
  Sense strand starting at position 3449 of SEQ ID NO: 916230
guagccuggaccugauaau

SEQ ID NO: 1140377 - RNA, 19 nt, Artificial Sequence
  Description of Artificial Sequence: Synthetic oligonucleotide
  Antisense strand to SEQ ID NO: 1140376
auuaucagguccaggcuac

SEQ ID NO: 1140378 - RNA, 19 nt, Artificial Sequence
  Description of Artificial Sequence: Synthetic oligonucleotide
  Sense strand starting at position 3458 of SEQ ID NO: 916230
accugauaauuagggcaga

SEQ ID NO: 1140379 - RNA, 19 nt, Artificial Sequence
  Description of Artificial Sequence: Synthetic oligonucleotide
  Antisense strand to SEQ ID NO: 1140378
ucugcccuaauuaucaggu

SEQ ID NO: 1140380 - RNA, 19 nt, Artificial Sequence
  Description of Artificial Sequence: Synthetic oligonucleotide
  Sense strand starting at position 3836 of SEQ ID NO: 916230
gggauccauucuucuggua

SEQ ID NO: 1140381 - RNA, 19 nt, Artificial Sequence
  Description of Artificial Sequence: Synthetic oligonucleotide
  Antisense strand to SEQ ID NO: 1140380
uaccagaagaauggauccc

SEQ ID NO: 1140382 - RNA, 19 nt, Artificial Sequence
  Description of Artificial Sequence: Synthetic oligonucleotide
  Sense strand starting at position 3839 of SEQ ID NO: 916230
auccauucuucugguagga

SEQ ID NO: 1140383 - RNA, 19 nt, Artificial Sequence
  Description of Artificial Sequence: Synthetic oligonucleotide
  Antisense strand to SEQ ID NO: 1140382
uccuaccagaagaauggau

SEQ ID NO: 1140384 - RNA, 19 nt, Artificial Sequence
  Description of Artificial Sequence: Synthetic oligonucleotide
  Sense strand starting at position 3869 of SEQ ID NO: 916230
cagguuugugaguguggga

SEQ ID NO: 1140385 - RNA, 19 nt, Artificial Sequence
  Description of Artificial Sequence: Synthetic oligonucleotide
  Antisense strand to SEQ ID NO: 1140384
ucccacacucacaaaccug

SEQ ID NO: 1140386 - RNA, 19 nt, Artificial Sequence
  Description of Artificial Sequence: Synthetic oligonucleotide
  Sense strand starting at position 3897 of SEQ ID NO: 916230
gcugaacacuuguaaggaa

SEQ ID NO: 1140387 - RNA, 19 nt, Artificial Sequence
  Description of Artificial Sequence: Synthetic oligonucleotide
  Antisense strand to SEQ ID NO: 1140386
uuccuuacaaguguucagc

SEQ ID NO: 1140388 - RNA, 19 nt, Artificial Sequence
  Description of Artificial Sequence: Synthetic oligonucleotide
  Sense strand starting at position 189 of SEQ ID NO: 916231
gggcacaagcuuuguacau

SEQ ID NO: 1140389 - RNA, 19 nt, Artificial Sequence
  Description of Artificial Sequence: Synthetic oligonucleotide
  Antisense strand to SEQ ID NO: 1140388
auguacaaagcuugugccc

SEQ ID NO: 1140390 - RNA, 19 nt, Artificial Sequence
  Description of Artificial Sequence: Synthetic oligonucleotide
  Sense strand starting at position 193 of SEQ ID NO: 916231
acaagcuuuguacauggua

SEQ ID NO: 1140391 - RNA, 19 nt, Artificial Sequence
  Description of Artificial Sequence: Synthetic oligonucleotide
  Antisense strand to SEQ ID NO: 1140390
uaccauguacaaagcuugu

SEQ ID NO: 1140392 - RNA, 19 nt, Artificial Sequence
  Description of Artificial Sequence: Synthetic oligonucleotide
  Sense strand starting at position 321 of SEQ ID NO: 916231
gaguaaaggucagaaauua

SEQ ID NO: 1140393 - RNA, 19 nt, Artificial Sequence
  Description of Artificial Sequence: Synthetic oligonucleotide
  Antisense strand to SEQ ID NO: 1140392
uaauuucugaccuuuacuc

SEQ ID NO: 1140394 - RNA, 19 nt, Artificial Sequence
  Description of Artificial Sequence: Synthetic oligonucleotide
  Sense strand starting at position 445 of SEQ ID NO: 916231
gggcuuugauuugccaagu

SEQ ID NO: 1140395 - RNA, 19 nt, Artificial Sequence
  Description of Artificial Sequence: Synthetic oligonucleotide
  Antisense strand to SEQ ID NO: 1140394
acuuggcaaaucaaagccc

SEQ ID NO: 1140396 - RNA, 19 nt, Artificial Sequence
  Description of Artificial Sequence: Synthetic oligonucleotide
  Sense strand starting at position 446 of SEQ ID NO: 916231
ggcuuugauuugccaaguu

SEQ ID NO: 1140397 - RNA, 19 nt, Artificial Sequence
  Description of Artificial Sequence: Synthetic oligonucleotide
  Antisense strand to SEQ ID NO: 1140396
aacuuggcaaaucaaagcc

SEQ ID NO: 1140398 - RNA, 19 nt, Artificial Sequence
  Description of Artificial Sequence: Synthetic oligonucleotide
  Sense strand starting at position 572 of SEQ ID NO: 916231
cagaaaggucagcagcuau

SEQ ID NO: 1140399 - RNA, 19 nt, Artificial Sequence
  Description of Artificial Sequence: Synthetic oligonucleotide
  Antisense strand to SEQ ID NO: 1140398
auagcugcugaccuuucug

SEQ ID NO: 1140400 - RNA, 19 nt, Artificial Sequence
  Description of Artificial Sequence: Synthetic oligonucleotide
  Sense strand starting at position 619 of SEQ ID NO: 916231
agaucugguuuccggaaga

SEQ ID NO: 1140401 - RNA, 19 nt, Artificial Sequence
  Description of Artificial Sequence: Synthetic oligonucleotide
  Antisense strand to SEQ ID NO: 1140400
ucuuccggaaaccagaucu

SEQ ID NO: 1140402 - RNA, 19 nt, Artificial Sequence
  Description of Artificial Sequence: Synthetic oligonucleotide
  Sense strand starting at position 679 of SEQ ID NO: 916231
cccaauccucccggugaca

SEQ ID NO: 1140403 - RNA, 19 nt, Artificial Sequence
  Description of Artificial Sequence: Synthetic oligonucleotide
  Antisense strand to SEQ ID NO: 1140402
ugucaccgggaggauuggg

SEQ ID NO: 1140404 - RNA, 19 nt, Artificial Sequence
  Description of Artificial Sequence: Synthetic oligonucleotide
  Sense strand starting at position 681 of SEQ ID NO: 916231
caauccucccggugacauu

SEQ ID NO: 1140405 - RNA, 19 nt, Artificial Sequence
  Description of Artificial Sequence: Synthetic oligonucleotide
  Antisense strand to SEQ ID NO: 1140404
aaugucaccgggaggauug

SEQ ID NO: 1140406 - RNA, 19 nt, Artificial Sequence
  Description of Artificial Sequence: Synthetic oligonucleotide
  Sense strand starting at position 1991 of SEQ ID NO: 916231
ggucuugaggccugagcua

SEQ ID NO: 1140407 - RNA, 19 nt, Artificial Sequence
  Description of Artificial Sequence: Synthetic oligonucleotide
  Antisense strand to SEQ ID NO: 1140406
uagcucaggccucaagacc

SEQ ID NO: 1140408 - RNA, 19 nt, Artificial Sequence
  Description of Artificial Sequence: Synthetic oligonucleotide
  Sense strand starting at position 2133 of SEQ ID NO: 916231
ugagauuggcccgauggga

SEQ ID NO: 1140409 - RNA, 19 nt, Artificial Sequence
  Description of Artificial Sequence: Synthetic oligonucleotide
  Antisense strand to SEQ ID NO: 1140408
ucccaucgggccaaucuca

SEQ ID NO: 1140410 - RNA, 19 nt, Artificial Sequence
  Description of Artificial Sequence: Synthetic oligonucleotide
  Sense strand starting at position 2221 of SEQ ID NO: 916231
cuuacacgcuuggaugaaa

SEQ ID NO: 1140411 - RNA, 19 nt, Artificial Sequence
  Description of Artificial Sequence: Synthetic oligonucleotide
  Antisense strand to SEQ ID NO: 1140410
uuucauccaagcguguaag

SEQ ID NO: 1140412 - RNA, 19 nt, Artificial Sequence
  Description of Artificial Sequence: Synthetic oligonucleotide
  Sense strand starting at position 2245 of SEQ ID NO: 916231
ggacuuugggaacgacuga

SEQ ID NO: 1140413 - RNA, 19 nt, Artificial Sequence
  Description of Artificial Sequence: Synthetic oligonucleotide
  Antisense strand to SEQ ID NO: 1140412
ucagucguucccaaagucc

SEQ ID NO: 1140414 - RNA, 19 nt, Artificial Sequence
  Description of Artificial Sequence: Synthetic oligonucleotide
  Sense strand starting at position 2363 of SEQ ID NO: 916231
ggaacuucuccucgaggcu

SEQ ID NO: 1140415 - RNA, 19 nt, Artificial Sequence
  Description of Artificial Sequence: Synthetic oligonucleotide
  Antisense strand to SEQ ID NO: 1140414
agccucgaggagaaguucc

SEQ ID NO: 1140416 - RNA, 19 nt, Artificial Sequence
  Description of Artificial Sequence: Synthetic oligonucleotide
  Sense strand starting at position 2635 of SEQ ID NO: 916231
guagccuggaccugauaau

SEQ ID NO: 1140417 - RNA, 19 nt, Artificial Sequence
  Description of Artificial Sequence: Synthetic oligonucleotide
  Antisense strand to SEQ ID NO: 1140416
auuaucagguccaggcuac

SEQ ID NO: 1140418 - RNA, 19 nt, Artificial Sequence
  Description of Artificial Sequence: Synthetic oligonucleotide
  Sense strand starting at position 2644 of SEQ ID NO: 916231
accugauaauuagggcaga

SEQ ID NO: 1140419 - RNA, 19 nt, Artificial Sequence
  Description of Artificial Sequence: Synthetic oligonucleotide
  Antisense strand to SEQ ID NO: 1140418
ucugcccuaauuaucaggu

SEQ ID NO: 1140420 - RNA, 19 nt, Artificial Sequence
  Description of Artificial Sequence: Synthetic oligonucleotide
  Sense strand starting at position 3022 of SEQ ID NO: 916231
gggauccauucuucuggua

SEQ ID NO: 1140421 - RNA, 19 nt, Artificial Sequence
  Description of Artificial Sequence: Synthetic oligonucleotide
  Antisense strand to SEQ ID NO: 1140420
uaccagaagaauggauccc

SEQ ID NO: 1140422 - RNA, 19 nt, Artificial Sequence
  Description of Artificial Sequence: Synthetic oligonucleotide
  Sense strand starting at position 3025 of SEQ ID NO: 916231
auccauucuucugguagga

SEQ ID NO: 1140423 - RNA, 19 nt, Artificial Sequence
  Description of Artificial Sequence: Synthetic oligonucleotide
  Antisense strand to SEQ ID NO: 1140422
uccuaccagaagaauggau

SEQ ID NO: 1140424 - RNA, 19 nt, Artificial Sequence
  Description of Artificial Sequence: Synthetic oligonucleotide
  Sense strand starting at position 3055 of SEQ ID NO: 916231
cagguuugugaguguggga

SEQ ID NO: 1140425 - RNA, 19 nt, Artificial Sequence
  Description of Artificial Sequence: Synthetic oligonucleotide
  Antisense strand to SEQ ID NO: 1140424
ucccacacucacaaaccug

SEQ ID NO: 1140426 - RNA, 19 nt, Artificial Sequence
  Description of Artificial Sequence: Synthetic oligonucleotide
  Sense strand starting at position 3083 of SEQ ID NO: 916231
gcugaacacuuguaaggaa

SEQ ID NO: 1140427 - RNA, 19 nt, Artificial Sequence
  Description of Artificial Sequence: Synthetic oligonucleotide
  Antisense strand to SEQ ID NO: 1140426
uuccuuacaaguguucagc

SEQ ID NO: 1140428 - RNA, 19 nt, Artificial Sequence
  Description of Artificial Sequence: Synthetic oligonucleotide
  Sense strand starting at position 3228 of SEQ ID NO: 916231
uuuagccugccuggugaua

SEQ ID NO: 1140429 - RNA, 19 nt, Artificial Sequence
  Description of Artificial Sequence: Synthetic oligonucleotide
  Antisense strand to SEQ ID NO: 1140428
uaucaccaggcaggcuaaa

SEQ ID NO: 1140430 - RNA, 19 nt, Artificial Sequence
  Description of Artificial Sequence: Synthetic oligonucleotide
  Sense strand starting at position 3230 of SEQ ID NO: 916231
uagccugccuggugauaau

SEQ ID NO: 1140431 - RNA, 19 nt, Artificial Sequence
  Description of Artificial Sequence: Synthetic oligonucleotide
  Antisense strand to SEQ ID NO: 1140430
auuaucaccaggcaggcua

SEQ ID NO: 1140432 - RNA, 19 nt, Artificial Sequence
  Description of Artificial Sequence: Synthetic oligonucleotide
  Sense strand starting at position 3239 of SEQ ID NO: 916231
uggugauaaucuuugcuua

SEQ ID NO: 1140433 - RNA, 19 nt, Artificial Sequence
  Description of Artificial Sequence: Synthetic oligonucleotide
  Antisense strand to SEQ ID NO: 1140432
uaagcaaagauuaucacca

SEQ ID NO: 1140434 - RNA, 19 nt, Artificial Sequence
  Description of Artificial Sequence: Synthetic oligonucleotide
  Sense strand starting at position 3240 of SEQ ID NO: 916231
ggugauaaucuuugcuuaa

SEQ ID NO: 1140435 - RNA, 19 nt, Artificial Sequence
  Description of Artificial Sequence: Synthetic oligonucleotide
  Antisense strand to SEQ ID NO: 1140434
uuaagcaaagauuaucacc

SEQ ID NO: 1140436 - RNA, 19 nt, Artificial Sequence
  Description of Artificial Sequence: Synthetic oligonucleotide
  Sense strand starting at position 3241 of SEQ ID NO: 916231
gugauaaucuuugcuuaaa

SEQ ID NO: 1140437 - RNA, 19 nt, Artificial Sequence
  Description of Artificial Sequence: Synthetic oligonucleotide
  Antisense strand to SEQ ID NO: 1140436
uuuaagcaaagauuaucac

SEQ ID NO: 1140438 - RNA, 19 nt, Artificial Sequence
  Description of Artificial Sequence: Synthetic oligonucleotide
  Sense strand starting at position 3419 of SEQ ID NO: 916231
gaaggucccuaauggugaa

SEQ ID NO: 1140439 - RNA, 19 nt, Artificial Sequence
  Description of Artificial Sequence: Synthetic oligonucleotide
  Antisense strand to SEQ ID NO: 1140438
uucaccauuagggaccuuc

SEQ ID NO: 1140440 - RNA, 19 nt, Artificial Sequence
  Description of Artificial Sequence: Synthetic oligonucleotide
  Sense strand starting at position 3509 of SEQ ID NO: 916231
cuuucucauugagagcauu

SEQ ID NO: 1140441 - RNA, 19 nt, Artificial Sequence
  Description of Artificial Sequence: Synthetic oligonucleotide
  Antisense strand to SEQ ID NO: 1140440
aaugcucucaaugagaaag

SEQ ID NO: 1140442 - RNA, 19 nt, Artificial Sequence
  Description of Artificial Sequence: Synthetic oligonucleotide
  Sense strand starting at position 3574 of SEQ ID NO: 916231
cugccucaugcuugucauu

SEQ ID NO: 1140443 - RNA, 19 nt, Artificial Sequence
  Description of Artificial Sequence: Synthetic oligonucleotide
  Antisense strand to SEQ ID NO: 1140442
aaugacaagcaugaggcag

SEQ ID NO: 1140444 - RNA, 19 nt, Artificial Sequence
  Description of Artificial Sequence: Synthetic oligonucleotide
  Sense strand starting at position 3651 of SEQ ID NO: 916231
cguagugugcuguugucau

SEQ ID NO: 1140445 - RNA, 19 nt, Artificial Sequence
  Description of Artificial Sequence: Synthetic oligonucleotide
  Antisense strand to SEQ ID NO: 1140444
augacaacagcacacuacg

SEQ ID NO: 1140446 - RNA, 19 nt, Artificial Sequence
  Description of Artificial Sequence: Synthetic oligonucleotide
  Sense strand starting at position 3655 of SEQ ID NO: 916231
gugugcuguugucaugaca

SEQ ID NO: 1140447 - RNA, 19 nt, Artificial Sequence
  Description of Artificial Sequence: Synthetic oligonucleotide
  Antisense strand to SEQ ID NO: 1140446
ugucaugacaacagcacac

SEQ ID NO: 1140448 - RNA, 19 nt, Artificial Sequence
  Description of Artificial Sequence: Synthetic oligonucleotide
  Sense strand starting at position 3658 of SEQ ID NO: 916231
ugcuguugucaugacagca

SEQ ID NO: 1140449 - RNA, 19 nt, Artificial Sequence
  Description of Artificial Sequence: Synthetic oligonucleotide
  Antisense strand to SEQ ID NO: 1140448
ugcugucaugacaacagca

SEQ ID NO: 1140450 - RNA, 19 nt, Artificial Sequence
  Description of Artificial Sequence: Synthetic oligonucleotide
  Sense strand starting at position 3722 of SEQ ID NO: 916231
gaaggugacucagcagaga

SEQ ID NO: 1140451 - RNA, 19 nt, Artificial Sequence
  Description of Artificial Sequence: Synthetic oligonucleotide
  Antisense strand to SEQ ID NO: 1140450
ucucugcugagucaccuuc

SEQ ID NO: 1140452 - RNA, 19 nt, Artificial Sequence
  Description of Artificial Sequence: Synthetic oligonucleotide
  Sense strand starting at position 3848 of SEQ ID NO: 916231
ggucuugucuccugcagag

SEQ ID NO: 1140453 - RNA, 19 nt, Artificial Sequence
  Description of Artificial Sequence: Synthetic oligonucleotide
  Antisense strand to SEQ ID NO: 1140452
cucugcaggagacaagacc

SEQ ID NO: 1140454 - RNA, 19 nt, Artificial Sequence
  Description of Artificial Sequence: Synthetic oligonucleotide
  Sense strand starting at position 3874 of SEQ ID NO: 916231
ggaucaugaucugaacuuc

SEQ ID NO: 1140455 - RNA, 19 nt, Artificial Sequence
  Description of Artificial Sequence: Synthetic oligonucleotide
  Antisense strand to SEQ ID NO: 1140454
gaaguucagaucaugaucc

SEQ ID NO: 1140456 - RNA, 19 nt, Artificial Sequence
  Description of Artificial Sequence: Synthetic oligonucleotide
  Sense strand starting at position 3912 of SEQ ID NO: 916231
gcugccaaccuuuggagau

SEQ ID NO: 1140457 - RNA, 19 nt, Artificial Sequence
  Description of Artificial Sequence: Synthetic oligonucleotide
  Antisense strand to SEQ ID NO: 1140456
aucuccaaagguuggcagc

SEQ ID NO: 1140458 - RNA, 19 nt, Artificial Sequence
  Description of Artificial Sequence: Synthetic oligonucleotide
  Sense strand starting at position 3974 of SEQ ID NO: 916231
gaaagcaacccuuggucua

SEQ ID NO: 1140459 - RNA, 19 nt, Artificial Sequence
  Description of Artificial Sequence: Synthetic oligonucleotide
  Antisense strand to SEQ ID NO: 1140458
uagaccaaggguugcuuuc

SEQ ID NO: 1140460 - RNA, 19 nt, Artificial Sequence
  Description of Artificial Sequence: Synthetic oligonucleotide
  Sense strand starting at position 443 of SEQ ID NO: 916232
gggcacaagcuuuguacau

SEQ ID NO: 1140461 - RNA, 19 nt, Artificial Sequence
  Description of Artificial Sequence: Synthetic oligonucleotide
  Antisense strand to SEQ ID NO: 1140460
auguacaaagcuugugccc

SEQ ID NO: 1140462 - RNA, 19 nt, Artificial Sequence
  Description of Artificial Sequence: Synthetic oligonucleotide
  Sense strand starting at position 447 of SEQ ID NO: 916232
acaagcuuuguacauggua

SEQ ID NO: 1140463 - RNA, 19 nt, Artificial Sequence
  Description of Artificial Sequence: Synthetic oligonucleotide
  Antisense strand to SEQ ID NO: 1140462
uaccauguacaaagcuugu

SEQ ID NO: 1140464 - RNA, 19 nt, Artificial Sequence
  Description of Artificial Sequence: Synthetic oligonucleotide
  Sense strand starting at position 575 of SEQ ID NO: 916232
gaguaaaggucagaaauua

SEQ ID NO: 1140465 - RNA, 19 nt, Artificial Sequence
  Description of Artificial Sequence: Synthetic oligonucleotide
  Antisense strand to SEQ ID NO: 1140464
uaauuucugaccuuuacuc

SEQ ID NO: 1140466 - RNA, 19 nt, Artificial Sequence
  Description of Artificial Sequence: Synthetic oligonucleotide
  Sense strand starting at position 699 of SEQ ID NO: 916232
gggcuuugauuugccaagu

SEQ ID NO: 1140467 - RNA, 19 nt, Artificial Sequence
  Description of Artificial Sequence: Synthetic oligonucleotide
  Antisense strand to SEQ ID NO: 1140466
acuuggcaaaucaaagccc

SEQ ID NO: 1140468 - RNA, 19 nt, Artificial Sequence
  Description of Artificial Sequence: Synthetic oligonucleotide
  Sense strand starting at position 700 of SEQ ID NO: 916232
ggcuuugauuugccaaguu

SEQ ID NO: 1140469 - RNA, 19 nt, Artificial Sequence
  Description of Artificial Sequence: Synthetic oligonucleotide
  Antisense strand to SEQ ID NO: 1140468
aacuuggcaaaucaaagcc

SEQ ID NO: 1140470 - RNA, 19 nt, Artificial Sequence
  Description of Artificial Sequence: Synthetic oligonucleotide
  Sense strand starting at position 826 of SEQ ID NO: 916232
cagaaaggucagcagcuau

SEQ ID NO: 1140471 - RNA, 19 nt, Artificial Sequence
  Description of Artificial Sequence: Synthetic oligonucleotide
  Antisense strand to SEQ ID NO: 1140470
auagcugcugaccuuucug

SEQ ID NO: 1140472 - RNA, 19 nt, Artificial Sequence
  Description of Artificial Sequence: Synthetic oligonucleotide
  Sense strand starting at position 873 of SEQ ID NO: 916232
agaucugguuuccggaaga

SEQ ID NO: 1140473 - RNA, 19 nt, Artificial Sequence
  Description of Artificial Sequence: Synthetic oligonucleotide
  Antisense strand to SEQ ID NO: 1140472
ucuuccggaaaccagaucu

SEQ ID NO: 1140474 - RNA, 19 nt, Artificial Sequence
  Description of Artificial Sequence: Synthetic oligonucleotide
  Sense strand starting at position 933 of SEQ ID NO: 916232
cccaauccucccggugaca

SEQ ID NO: 1140475 - RNA, 19 nt, Artificial Sequence
  Description of Artificial Sequence: Synthetic oligonucleotide
  Antisense strand to SEQ ID NO: 1140474
ugucaccgggaggauuggg

SEQ ID NO: 1140476 - RNA, 19 nt, Artificial Sequence
  Description of Artificial Sequence: Synthetic oligonucleotide
  Sense strand starting at position 935 of SEQ ID NO: 916232
caauccucccggugacauu

SEQ ID NO: 1140477 - RNA, 19 nt, Artificial Sequence
  Description of Artificial Sequence: Synthetic oligonucleotide
  Antisense strand to SEQ ID NO: 1140476
aaugucaccgggaggauug

SEQ ID NO: 1140478 - RNA, 19 nt, Artificial Sequence
  Description of Artificial Sequence: Synthetic oligonucleotide
  Sense strand starting at position 2245 of SEQ ID NO: 916232
ggucuugaggccugagcua

SEQ ID NO: 1140479 - RNA, 19 nt, Artificial Sequence
  Description of Artificial Sequence: Synthetic oligonucleotide
  Antisense strand to SEQ ID NO: 1140478
uagcucaggccucaagacc

SEQ ID NO: 1140480 - RNA, 19 nt, Artificial Sequence
  Description of Artificial Sequence: Synthetic oligonucleotide
  Sense strand starting at position 2387 of SEQ ID NO: 916232
ugagauuggcccgauggga

SEQ ID NO: 1140481 - RNA, 19 nt, Artificial Sequence
  Description of Artificial Sequence: Synthetic oligonucleotide
  Antisense strand to SEQ ID NO: 1140480
ucccaucgggccaaucuca

SEQ ID NO: 1140482 - RNA, 19 nt, Artificial Sequence
  Description of Artificial Sequence: Synthetic oligonucleotide
  Sense strand starting at position 2475 of SEQ ID NO: 916232
cuuacacgcuuggaugaaa

SEQ ID NO: 1140483 - RNA, 19 nt, Artificial Sequence
  Description of Artificial Sequence: Synthetic oligonucleotide
  Antisense strand to SEQ ID NO: 1140482
uuucauccaagcguguaag

SEQ ID NO: 1140484 - RNA, 19 nt, Artificial Sequence
  Description of Artificial Sequence: Synthetic oligonucleotide
  Sense strand starting at position 2499 of SEQ ID NO: 916232
ggacuuugggaacgacuga

SEQ ID NO: 1140485 - RNA, 19 nt, Artificial Sequence
  Description of Artificial Sequence: Synthetic oligonucleotide
  Antisense strand to SEQ ID NO: 1140484
ucagucguucccaaagucc

SEQ ID NO: 1140486 - RNA, 19 nt, Artificial Sequence
  Description of Artificial Sequence: Synthetic oligonucleotide
  Sense strand starting at position 2617 of SEQ ID NO: 916232
ggaacuucuccucgaggcu

SEQ ID NO: 1140487 - RNA, 19 nt, Artificial Sequence
  Description of Artificial Sequence: Synthetic oligonucleotide
  Antisense strand to SEQ ID NO: 1140486
agccucgaggagaaguucc

SEQ ID NO: 1140488 - RNA, 19 nt, Artificial Sequence
  Description of Artificial Sequence: Synthetic oligonucleotide
  Sense strand starting at position 2889 of SEQ ID NO: 916232
guagccuggaccugauaau

SEQ ID NO: 1140489 - RNA, 19 nt, Artificial Sequence
  Description of Artificial Sequence: Synthetic oligonucleotide
  Antisense strand to SEQ ID NO: 1140488
auuaucagguccaggcuac

SEQ ID NO: 1140490 - RNA, 19 nt, Artificial Sequence
  Description of Artificial Sequence: Synthetic oligonucleotide
  Sense strand starting at position 2898 of SEQ ID NO: 916232
accugauaauuagggcaga

SEQ ID NO: 1140491 - RNA, 19 nt, Artificial Sequence
  Description of Artificial Sequence: Synthetic oligonucleotide
  Antisense strand to SEQ ID NO: 1140490
ucugcccuaauuaucaggu

SEQ ID NO: 1140492 - RNA, 19 nt, Artificial Sequence
  Description of Artificial Sequence: Synthetic oligonucleotide
  Sense strand starting at position 3276 of SEQ ID NO: 916232
gggauccauucuucuggua

SEQ ID NO: 1140493 - RNA, 19 nt, Artificial Sequence
  Description of Artificial Sequence: Synthetic oligonucleotide
  Antisense strand to SEQ ID NO: 1140492
uaccagaagaauggauccc

SEQ ID NO: 1140494 - RNA, 19 nt, Artificial Sequence
  Description of Artificial Sequence: Synthetic oligonucleotide
  Sense strand starting at position 3279 of SEQ ID NO: 916232
auccauucuucugguagga

SEQ ID NO: 1140495 - RNA, 19 nt, Artificial Sequence
  Description of Artificial Sequence: Synthetic oligonucleotide
  Antisense strand to SEQ ID NO: 1140494
uccuaccagaagaauggau

SEQ ID NO: 1140496 - RNA, 19 nt, Artificial Sequence
  Description of Artificial Sequence: Synthetic oligonucleotide
  Sense strand starting at position 3309 of SEQ ID NO: 916232
cagguuugugaguguggga

SEQ ID NO: 1140497 - RNA, 19 nt, Artificial Sequence
  Description of Artificial Sequence: Synthetic oligonucleotide
  Antisense strand to SEQ ID NO: 1140496
ucccacacucacaaaccug

SEQ ID NO: 1140498 - RNA, 19 nt, Artificial Sequence
  Description of Artificial Sequence: Synthetic oligonucleotide
  Sense strand starting at position 3337 of SEQ ID NO: 916232
gcugaacacuuguaaggaa

SEQ ID NO: 1140499 - RNA, 19 nt, Artificial Sequence
  Description of Artificial Sequence: Synthetic oligonucleotide
  Antisense strand to SEQ ID NO: 1140498
uuccuuacaaguguucagc

SEQ ID NO: 1140500 - RNA, 19 nt, Artificial Sequence
  Description of Artificial Sequence: Synthetic oligonucleotide
  Sense strand starting at position 3482 of SEQ ID NO: 916232
uuuagccugccuggugaua

SEQ ID NO: 1140501 - RNA, 19 nt, Artificial Sequence
  Description of Artificial Sequence: Synthetic oligonucleotide
  Antisense strand to SEQ ID NO: 1140500
uaucaccaggcaggcuaaa

SEQ ID NO: 1140502 - RNA, 19 nt, Artificial Sequence
  Description of Artificial Sequence: Synthetic oligonucleotide
  Sense strand starting at position 3484 of SEQ ID NO: 916232
uagccugccuggugauaau

SEQ ID NO: 1140503 - RNA, 19 nt, Artificial Sequence
  Description of Artificial Sequence: Synthetic oligonucleotide
  Antisense strand to SEQ ID NO: 1140502
auuaucaccaggcaggcua

SEQ ID NO: 1140504 - RNA, 19 nt, Artificial Sequence
  Description of Artificial Sequence: Synthetic oligonucleotide
  Sense strand starting at position 3493 of SEQ ID NO: 916232
uggugauaaucuuugcuua

SEQ ID NO: 1140505 - RNA, 19 nt, Artificial Sequence
  Description of Artificial Sequence: Synthetic oligonucleotide
  Antisense strand to SEQ ID NO: 1140504
uaagcaaagauuaucacca

SEQ ID NO: 1140506 - RNA, 19 nt, Artificial Sequence
  Description of Artificial Sequence: Synthetic oligonucleotide
  Sense strand starting at position 3494 of SEQ ID NO: 916232
ggugauaaucuuugcuuaa

SEQ ID NO: 1140507 - RNA, 19 nt, Artificial Sequence
  Description of Artificial Sequence: Synthetic oligonucleotide
  Antisense strand to SEQ ID NO: 1140506
uuaagcaaagauuaucacc

SEQ ID NO: 1140508 - RNA, 19 nt, Artificial Sequence
  Description of Artificial Sequence: Synthetic oligonucleotide
  Sense strand starting at position 3495 of SEQ ID NO: 916232
gugauaaucuuugcuuaaa

SEQ ID NO: 1140509 - RNA, 19 nt, Artificial Sequence
  Description of Artificial Sequence: Synthetic oligonucleotide
  Antisense strand to SEQ ID NO: 1140508
uuuaagcaaagauuaucac

SEQ ID NO: 1140510 - RNA, 19 nt, Artificial Sequence
  Description of Artificial Sequence: Synthetic oligonucleotide
  Sense strand starting at position 3673 of SEQ ID NO: 916232
gaaggucccuaauggugaa

SEQ ID NO: 1140511 - RNA, 19 nt, Artificial Sequence
  Description of Artificial Sequence: Synthetic oligonucleotide
  Antisense strand to SEQ ID NO: 1140510
uucaccauuagggaccuuc

SEQ ID NO: 1140512 - RNA, 19 nt, Artificial Sequence
  Description of Artificial Sequence: Synthetic oligonucleotide
  Sense strand starting at position 3763 of SEQ ID NO: 916232
cuuucucauugagagcauu

SEQ ID NO: 1140513 - RNA, 19 nt, Artificial Sequence
  Description of Artificial Sequence: Synthetic oligonucleotide
  Antisense strand to SEQ ID NO: 1140512
aaugcucucaaugagaaag

SEQ ID NO: 1140514 - RNA, 19 nt, Artificial Sequence
  Description of Artificial Sequence: Synthetic oligonucleotide
  Sense strand starting at position 3828 of SEQ ID NO: 916232
cugccucaugcuugucauu

SEQ ID NO: 1140515 - RNA, 19 nt, Artificial Sequence
  Description of Artificial Sequence: Synthetic oligonucleotide
  Antisense strand to SEQ ID NO: 1140514
aaugacaagcaugaggcag

SEQ ID NO: 1140516 - RNA, 19 nt, Artificial Sequence
  Description of Artificial Sequence: Synthetic oligonucleotide
  Sense strand starting at position 3905 of SEQ ID NO: 916232
cguagugugcuguugucau

SEQ ID NO: 1140517 - RNA, 19 nt, Artificial Sequence
  Description of Artificial Sequence: Synthetic oligonucleotide
  Antisense strand to SEQ ID NO: 1140516
augacaacagcacacuacg

SEQ ID NO: 1140518 - RNA, 19 nt, Artificial Sequence
  Description of Artificial Sequence: Synthetic oligonucleotide
  Sense strand starting at position 3909 of SEQ ID NO: 916232
gugugcuguugucaugaca

SEQ ID NO: 1140519 - RNA, 19 nt, Artificial Sequence
  Description of Artificial Sequence: Synthetic oligonucleotide
  Antisense strand to SEQ ID NO: 1140518
ugucaugacaacagcacac

SEQ ID NO: 1140520 - RNA, 19 nt, Artificial Sequence
  Description of Artificial Sequence: Synthetic oligonucleotide
  Sense strand starting at position 3912 of SEQ ID NO: 916232
ugcuguugucaugacagca

SEQ ID NO: 1140521 - RNA, 19 nt, Artificial Sequence
  Description of Artificial Sequence: Synthetic oligonucleotide
  Antisense strand to SEQ ID NO: 1140520
ugcugucaugacaacagca

SEQ ID NO: 1140522 - RNA, 19 nt, Artificial Sequence
  Description of Artificial Sequence: Synthetic oligonucleotide
  Sense strand starting at position 3976 of SEQ ID NO: 916232
gaaggugacucagcagaga

SEQ ID NO: 1140523 - RNA, 19 nt, Artificial Sequence
  Description of Artificial Sequence: Synthetic oligonucleotide
  Antisense strand to SEQ ID NO: 1140522
ucucugcugagucaccuuc

SEQ ID NO: 1140524 - RNA, 19 nt, Artificial Sequence
  Description of Artificial Sequence: Synthetic oligonucleotide
  Sense strand starting at position 328 of SEQ ID NO: 916233
gauaaauaguaauccacgu

SEQ ID NO: 1140525 - RNA, 19 nt, Artificial Sequence
  Description of Artificial Sequence: Synthetic oligonucleotide
  Antisense strand to SEQ ID NO: 1140524
acguggauuacuauuuauc

SEQ ID NO: 1140526 - RNA, 19 nt, Artificial Sequence
  Description of Artificial Sequence: Synthetic oligonucleotide
  Sense strand starting at position 352 of SEQ ID NO: 916233
ugaugugucagauacuguu

SEQ ID NO: 1140527 - RNA, 19 nt, Artificial Sequence
  Description of Artificial Sequence: Synthetic oligonucleotide
  Antisense strand to SEQ ID NO: 1140526
aacaguaucugacacauca

SEQ ID NO: 1140528 - RNA, 19 nt, Artificial Sequence
  Description of Artificial Sequence: Synthetic oligonucleotide
  Sense strand starting at position 534 of SEQ ID NO: 916233
uaaauuaguuacguggaau

SEQ ID NO: 1140529 - RNA, 19 nt, Artificial Sequence
  Description of Artificial Sequence: Synthetic oligonucleotide
  Antisense strand to SEQ ID NO: 1140528
auuccacguaacuaauuua

SEQ ID NO: 1140530 - RNA, 19 nt, Artificial Sequence
  Description of Artificial Sequence: Synthetic oligonucleotide
  Sense strand starting at position 624 of SEQ ID NO: 916233
aauuuaggcuuagaaggau

SEQ ID NO: 1140531 - RNA, 19 nt, Artificial Sequence
  Description of Artificial Sequence: Synthetic oligonucleotide
  Antisense strand to SEQ ID NO: 1140530
auccuucuaagccuaaauu

SEQ ID NO: 1140532 - RNA, 19 nt, Artificial Sequence
  Description of Artificial Sequence: Synthetic oligonucleotide
  Sense strand starting at position 650 of SEQ ID NO: 916233
ugugucuaaagucagauau

SEQ ID NO: 1140533 - RNA, 19 nt, Artificial Sequence
  Description of Artificial Sequence: Synthetic oligonucleotide
  Antisense strand to SEQ ID NO: 1140532
auaucugacuuuagacaca

SEQ ID NO: 1140534 - RNA, 19 nt, Artificial Sequence
  Description of Artificial Sequence: Synthetic oligonucleotide
  Sense strand starting at position 661 of SEQ ID NO: 916233
ucagauauccaaugaaguc

SEQ ID NO: 1140535 - RNA, 19 nt, Artificial Sequence
  Description of Artificial Sequence: Synthetic oligonucleotide
  Antisense strand to SEQ ID NO: 1140534
gacuucauuggauaucuga

SEQ ID NO: 1140536 - RNA, 19 nt, Artificial Sequence
  Description of Artificial Sequence: Synthetic oligonucleotide
  Sense strand starting at position 775 of SEQ ID NO: 916233
caaugacaguugguuucua

SEQ ID NO: 1140537 - RNA, 19 nt, Artificial Sequence
  Description of Artificial Sequence: Synthetic oligonucleotide
  Antisense strand to SEQ ID NO: 1140536
uagaaaccaacugucauug

SEQ ID NO: 1140538 - RNA, 19 nt, Artificial Sequence
  Description of Artificial Sequence: Synthetic oligonucleotide
  Sense strand starting at position 776 of SEQ ID NO: 916233
aaugacaguugguuucuaa

SEQ ID NO: 1140539 - RNA, 19 nt, Artificial Sequence
  Description of Artificial Sequence: Synthetic oligonucleotide
  Antisense strand to SEQ ID NO: 1140538
uuagaaaccaacugucauu

SEQ ID NO: 1140540 - RNA, 19 nt, Artificial Sequence
  Description of Artificial Sequence: Synthetic oligonucleotide
  Sense strand starting at position 779 of SEQ ID NO: 916233
gacaguugguuucuaauga

SEQ ID NO: 1140541 - RNA, 19 nt, Artificial Sequence
  Description of Artificial Sequence: Synthetic oligonucleotide
  Antisense strand to SEQ ID NO: 1140540
ucauuagaaaccaacuguc

SEQ ID NO: 1140542 - RNA, 19 nt, Artificial Sequence
  Description of Artificial Sequence: Synthetic oligonucleotide
  Sense strand starting at position 855 of SEQ ID NO: 916233
guuuccacuucugucauuu

SEQ ID NO: 1140543 - RNA, 19 nt, Artificial Sequence
  Description of Artificial Sequence: Synthetic oligonucleotide
  Antisense strand to SEQ ID NO: 1140542
aaaugacagaaguggaaac

SEQ ID NO: 1140544 - RNA, 19 nt, Artificial Sequence
  Description of Artificial Sequence: Synthetic oligonucleotide
  Sense strand starting at position 900 of SEQ ID NO: 916233
ggaaucugagguggugaga

SEQ ID NO: 1140545 - RNA, 19 nt, Artificial Sequence
  Description of Artificial Sequence: Synthetic oligonucleotide
  Antisense strand to SEQ ID NO: 1140544
ucucaccaccucagauucc

SEQ ID NO: 1140546 - RNA, 19 nt, Artificial Sequence
  Description of Artificial Sequence: Synthetic oligonucleotide
  Sense strand starting at position 1459 of SEQ ID NO: 916233
aauucuuuccgaggaugau

SEQ ID NO: 1140547 - RNA, 19 nt, Artificial Sequence
  Description of Artificial Sequence: Synthetic oligonucleotide
  Antisense strand to SEQ ID NO: 1140546
aucauccucggaaagaauu

SEQ ID NO: 1140548 - RNA, 19 nt, Artificial Sequence
  Description of Artificial Sequence: Synthetic oligonucleotide
  Sense strand starting at position 1559 of SEQ ID NO: 916233
cugauaccgcucuggauuu

SEQ ID NO: 1140549 - RNA, 19 nt, Artificial Sequence
  Description of Artificial Sequence: Synthetic oligonucleotide
  Antisense strand to SEQ ID NO: 1140548
aaauccagagcgguaucag

SEQ ID NO: 1140550 - RNA, 19 nt, Artificial Sequence
  Description of Artificial Sequence: Synthetic oligonucleotide
  Sense strand starting at position 2313 of SEQ ID NO: 916233
aggccugagaggugaauga

SEQ ID NO: 1140551 - RNA, 19 nt, Artificial Sequence
  Description of Artificial Sequence: Synthetic oligonucleotide
  Antisense strand to SEQ ID NO: 1140550
ucauucaccucucaggccu

SEQ ID NO: 1140552 - RNA, 19 nt, Artificial Sequence
  Description of Artificial Sequence: Synthetic oligonucleotide
  Sense strand starting at position 2512 of SEQ ID NO: 916233
ggguccucagcagaaaucu

SEQ ID NO: 1140553 - RNA, 19 nt, Artificial Sequence
  Description of Artificial Sequence: Synthetic oligonucleotide
  Antisense strand to SEQ ID NO: 1140552
agauuucugcugaggaccc

SEQ ID NO: 1140554 - RNA, 19 nt, Artificial Sequence
  Description of Artificial Sequence: Synthetic oligonucleotide
  Sense strand starting at position 2600 of SEQ ID NO: 916233
ggaggauguugacucuuca

SEQ ID NO: 1140555 - RNA, 19 nt, Artificial Sequence
  Description of Artificial Sequence: Synthetic oligonucleotide
  Antisense strand to SEQ ID NO: 1140554
ugaagagucaacauccucc

SEQ ID NO: 1140556 - RNA, 19 nt, Artificial Sequence
  Description of Artificial Sequence: Synthetic oligonucleotide
  Sense strand starting at position 2693 of SEQ ID NO: 916233
agcucccaggguugaaaua

SEQ ID NO: 1140557 - RNA, 19 nt, Artificial Sequence
  Description of Artificial Sequence: Synthetic oligonucleotide
  Antisense strand to SEQ ID NO: 1140556
uauuucaacccugggagcu

SEQ ID NO: 1140558 - RNA, 19 nt, Artificial Sequence
  Description of Artificial Sequence: Synthetic oligonucleotide
  Sense strand starting at position 2694 of SEQ ID NO: 916233
gcucccaggguugaaauaa

SEQ ID NO: 1140559 - RNA, 19 nt, Artificial Sequence
  Description of Artificial Sequence: Synthetic oligonucleotide
  Antisense strand to SEQ ID NO: 1140558
uuauuucaacccugggagc

SEQ ID NO: 1140560 - RNA, 19 nt, Artificial Sequence
  Description of Artificial Sequence: Synthetic oligonucleotide
  Sense strand starting at position 2720 of SEQ ID NO: 916233
acuagacaucaguguaaca

SEQ ID NO: 1140561 - RNA, 19 nt, Artificial Sequence
  Description of Artificial Sequence: Synthetic oligonucleotide
  Antisense strand to SEQ ID NO: 1140560
uguuacacugaugucuagu

SEQ ID NO: 1140562 - RNA, 19 nt, Artificial Sequence
  Description of Artificial Sequence: Synthetic oligonucleotide
  Sense strand starting at position 2963 of SEQ ID NO: 916233
ccuugaucucacggacuca

SEQ ID NO: 1140563 - RNA, 19 nt, Artificial Sequence
  Description of Artificial Sequence: Synthetic oligonucleotide
  Antisense strand to SEQ ID NO: 1140562
ugaguccgugagaucaagg

SEQ ID NO: 1140564 - RNA, 19 nt, Artificial Sequence
  Description of Artificial Sequence: Synthetic oligonucleotide
  Sense strand starting at position 3408 of SEQ ID NO: 916233
uguggagguccaugaaaga

SEQ ID NO: 1140565 - RNA, 19 nt, Artificial Sequence
  Description of Artificial Sequence: Synthetic oligonucleotide
  Antisense strand to SEQ ID NO: 1140564
ucuuucauggaccuccaca

SEQ ID NO: 1140566 - RNA, 19 nt, Artificial Sequence
  Description of Artificial Sequence: Synthetic oligonucleotide
  Sense strand starting at position 3437 of SEQ ID NO: 916233
aagagucuugaagggugau

SEQ ID NO: 1140567 - RNA, 19 nt, Artificial Sequence
  Description of Artificial Sequence: Synthetic oligonucleotide
  Antisense strand to SEQ ID NO: 1140566
aucacccuucaagacucuu

SEQ ID NO: 1140568 - RNA, 19 nt, Artificial Sequence
  Description of Artificial Sequence: Synthetic oligonucleotide
  Sense strand starting at position 3514 of SEQ ID NO: 916233
agggauaacugggaauaag

SEQ ID NO: 1140569 - RNA, 19 nt, Artificial Sequence
  Description of Artificial Sequence: Synthetic oligonucleotide
  Antisense strand to SEQ ID NO: 1140568
cuuauucccaguuaucccu

SEQ ID NO: 1140570 - RNA, 19 nt, Artificial Sequence
  Description of Artificial Sequence: Synthetic oligonucleotide
  Sense strand starting at position 3567 of SEQ ID NO: 916233
agguuccagagaugugaga

SEQ ID NO: 1140571 - RNA, 19 nt, Artificial Sequence
  Description of Artificial Sequence: Synthetic oligonucleotide
  Antisense strand to SEQ ID NO: 1140570
ucucacaucucuggaaccu

SEQ ID NO: 1140572 - RNA, 19 nt, Artificial Sequence
  Description of Artificial Sequence: Synthetic oligonucleotide
  Sense strand starting at position 3580 of SEQ ID NO: 916233
gugagaguacaugaaaugu

SEQ ID NO: 1140573 - RNA, 19 nt, Artificial Sequence
  Description of Artificial Sequence: Synthetic oligonucleotide
  Antisense strand to SEQ ID NO: 1140572
acauuucauguacucucac

SEQ ID NO: 1140574 - RNA, 19 nt, Artificial Sequence
  Description of Artificial Sequence: Synthetic oligonucleotide
  Sense strand starting at position 3619 of SEQ ID NO: 916233
augacugaagucugcagau

SEQ ID NO: 1140575 - RNA, 19 nt, Artificial Sequence
  Description of Artificial Sequence: Synthetic oligonucleotide
  Antisense strand to SEQ ID NO: 1140574
aucugcagacuucagucau

SEQ ID NO: 1140576 - RNA, 19 nt, Artificial Sequence
  Description of Artificial Sequence: Synthetic oligonucleotide
  Sense strand starting at position 3621 of SEQ ID NO: 916233
gacugaagucugcagauug

SEQ ID NO: 1140577 - RNA, 19 nt, Artificial Sequence
  Description of Artificial Sequence: Synthetic oligonucleotide
  Antisense strand to SEQ ID NO: 1140576
caaucugcagacuucaguc

SEQ ID NO: 1140578 - RNA, 19 nt, Artificial Sequence
  Description of Artificial Sequence: Synthetic oligonucleotide
  Sense strand starting at position 3670 of SEQ ID NO: 916233
aaaugaaaggccugguaga

SEQ ID NO: 1140579 - RNA, 19 nt, Artificial Sequence
  Description of Artificial Sequence: Synthetic oligonucleotide
  Antisense strand to SEQ ID NO: 1140578
ucuaccaggccuuucauuu

SEQ ID NO: 1140580 - RNA, 19 nt, Artificial Sequence
  Description of Artificial Sequence: Synthetic oligonucleotide
  Sense strand starting at position 3671 of SEQ ID NO: 916233
aaugaaaggccugguagau

SEQ ID NO: 1140581 - RNA, 19 nt, Artificial Sequence
  Description of Artificial Sequence: Synthetic oligonucleotide
  Antisense strand to SEQ ID NO: 1140580
aucuaccaggccuuucauu

SEQ ID NO: 1140582 - RNA, 19 nt, Artificial Sequence
  Description of Artificial Sequence: Synthetic oligonucleotide
  Sense strand starting at position 3681 of SEQ ID NO: 916233
cugguagaugcugaggaau

SEQ ID NO: 1140583 - RNA, 19 nt, Artificial Sequence
  Description of Artificial Sequence: Synthetic oligonucleotide
  Antisense strand to SEQ ID NO: 1140582
auuccucagcaucuaccag

SEQ ID NO: 1140584 - RNA, 19 nt, Artificial Sequence
  Description of Artificial Sequence: Synthetic oligonucleotide
  Sense strand starting at position 3716 of SEQ ID NO: 916233
aggcaauugggaugauuau

SEQ ID NO: 1140585 - RNA, 19 nt, Artificial Sequence
  Description of Artificial Sequence: Synthetic oligonucleotide
  Antisense strand to SEQ ID NO: 1140584
auaaucaucccaauugccu

SEQ ID NO: 1140586 - RNA, 19 nt, Artificial Sequence
  Description of Artificial Sequence: Synthetic oligonucleotide
  Sense strand starting at position 3792 of SEQ ID NO: 916233
auguuugaagaugguagua

SEQ ID NO: 1140587 - RNA, 19 nt, Artificial Sequence
  Description of Artificial Sequence: Synthetic oligonucleotide
  Antisense strand to SEQ ID NO: 1140586
uacuaccaucuucaaacau

SEQ ID NO: 1140588 - RNA, 19 nt, Artificial Sequence
  Description of Artificial Sequence: Synthetic oligonucleotide
  Sense strand starting at position 3817 of SEQ ID NO: 916233
guggcaaucccuuaaauua

SEQ ID NO: 1140589 - RNA, 19 nt, Artificial Sequence
  Description of Artificial Sequence: Synthetic oligonucleotide
  Antisense strand to SEQ ID NO: 1140588
uaauuuaagggauugccac

SEQ ID NO: 1140590 - RNA, 19 nt, Artificial Sequence
  Description of Artificial Sequence: Synthetic oligonucleotide
  Sense strand starting at position 3838 of SEQ ID NO: 916233
agaugacgguuaccuaaau

SEQ ID NO: 1140591 - RNA, 19 nt, Artificial Sequence
  Description of Artificial Sequence: Synthetic oligonucleotide
  Antisense strand to SEQ ID NO: 1140590
auuuagguaaccgucaucu

SEQ ID NO: 1140592 - RNA, 19 nt, Artificial Sequence
  Description of Artificial Sequence: Synthetic oligonucleotide
  Sense strand starting at position 3839 of SEQ ID NO: 916233
gaugacgguuaccuaaauu

SEQ ID NO: 1140593 - RNA, 19 nt, Artificial Sequence
  Description of Artificial Sequence: Synthetic oligonucleotide
  Antisense strand to SEQ ID NO: 1140592
aauuuagguaaccgucauc

SEQ ID NO: 1140594 - RNA, 19 nt, Artificial Sequence
  Description of Artificial Sequence: Synthetic oligonucleotide
  Sense strand starting at position 3877 of SEQ ID NO: 916233
ggaagagguaucuggugau

SEQ ID NO: 1140595 - RNA, 19 nt, Artificial Sequence
  Description of Artificial Sequence: Synthetic oligonucleotide
  Antisense strand to SEQ ID NO: 1140594
aucaccagauaccucuucc

SEQ ID NO: 1140596 - RNA, 19 nt, Artificial Sequence
  Description of Artificial Sequence: Synthetic oligonucleotide
  Sense strand starting at position 3881 of SEQ ID NO: 916233
gagguaucuggugauaccu

SEQ ID NO: 1140597 - RNA, 19 nt, Artificial Sequence
  Description of Artificial Sequence: Synthetic oligonucleotide
  Antisense strand to SEQ ID NO: 1140596
agguaucaccagauaccuc

SEQ ID NO: 1140598 - RNA, 19 nt, Artificial Sequence
  Description of Artificial Sequence: Synthetic oligonucleotide
  Sense strand starting at position 3898 of SEQ ID NO: 916233
cuaagaagcugacucaucu

SEQ ID NO: 1140599 - RNA, 19 nt, Artificial Sequence
  Description of Artificial Sequence: Synthetic oligonucleotide
  Antisense strand to SEQ ID NO: 1140598
agaugagucagcuucuuag

SEQ ID NO: 1140600 - RNA, 19 nt, Artificial Sequence
  Description of Artificial Sequence: Synthetic oligonucleotide
  Sense strand starting at position 3924 of SEQ ID NO: 916233
guuauuaugugauugauga

SEQ ID NO: 1140601 - RNA, 19 nt, Artificial Sequence
  Description of Artificial Sequence: Synthetic oligonucleotide
  Antisense strand to SEQ ID NO: 1140600
ucaucaaucacauaauaac

SEQ ID NO: 1140602 - RNA, 19 nt, Artificial Sequence
  Description of Artificial Sequence: Synthetic oligonucleotide
  Sense strand starting at position 3932 of SEQ ID NO: 916233
gugauugaugaugguacca

SEQ ID NO: 1140603 - RNA, 19 nt, Artificial Sequence
  Description of Artificial Sequence: Synthetic oligonucleotide
  Antisense strand to SEQ ID NO: 1140602
ugguaccaucaucaaucac

SEQ ID NO: 1140604 - RNA, 19 nt, Artificial Sequence
  Description of Artificial Sequence: Synthetic oligonucleotide
  Sense strand starting at position 209 of SEQ ID NO: 916234
uuaaguauuagccaggugu

SEQ ID NO: 1140605 - RNA, 19 nt, Artificial Sequence
  Description of Artificial Sequence: Synthetic oligonucleotide
  Antisense strand to SEQ ID NO: 1140604
acaccuggcuaauacuuaa

SEQ ID NO: 1140606 - RNA, 19 nt, Artificial Sequence
  Description of Artificial Sequence: Synthetic oligonucleotide
  Sense strand starting at position 570 of SEQ ID NO: 916234
augggaggcucucuugagu

SEQ ID NO: 1140607 - RNA, 19 nt, Artificial Sequence
  Description of Artificial Sequence: Synthetic oligonucleotide
  Antisense strand to SEQ ID NO: 1140606
acucaagagagccucccau

SEQ ID NO: 1140608 - RNA, 19 nt, Artificial Sequence
  Description of Artificial Sequence: Synthetic oligonucleotide
  Sense strand starting at position 787 of SEQ ID NO: 916234
ccaauaggaugaguuacua

SEQ ID NO: 1140609 - RNA, 19 nt, Artificial Sequence
  Description of Artificial Sequence: Synthetic oligonucleotide
  Antisense strand to SEQ ID NO: 1140608
uaguaacucauccuauugg

SEQ ID NO: 1140610 - RNA, 19 nt, Artificial Sequence
  Description of Artificial Sequence: Synthetic oligonucleotide
  Sense strand starting at position 791 of SEQ ID NO: 916234
uaggaugaguuacuaacua

SEQ ID NO: 1140611 - RNA, 19 nt, Artificial Sequence
  Description of Artificial Sequence: Synthetic oligonucleotide
  Antisense strand to SEQ ID NO: 1140610
uaguuaguaacucauccua

SEQ ID NO: 1140612 - RNA, 19 nt, Artificial Sequence
  Description of Artificial Sequence: Synthetic oligonucleotide
  Sense strand starting at position 953 of SEQ ID NO: 916234
gaacuugucuugcuggaga

SEQ ID NO: 1140613 - RNA, 19 nt, Artificial Sequence
  Description of Artificial Sequence: Synthetic oligonucleotide
  Antisense strand to SEQ ID NO: 1140612
ucuccagcaagacaaguuc

SEQ ID NO: 1140614 - RNA, 19 nt, Artificial Sequence
  Description of Artificial Sequence: Synthetic oligonucleotide
  Sense strand starting at position 955 of SEQ ID NO: 916234
acuugucuugcuggagaag

SEQ ID NO: 1140615 - RNA, 19 nt, Artificial Sequence
  Description of Artificial Sequence: Synthetic oligonucleotide
  Antisense strand to SEQ ID NO: 1140614
cuucuccagcaagacaagu

SEQ ID NO: 1140616 - RNA, 19 nt, Artificial Sequence
  Description of Artificial Sequence: Synthetic oligonucleotide
  Sense strand starting at position 966 of SEQ ID NO: 916234
uggagaagcagucaaggua

SEQ ID NO: 1140617 - RNA, 19 nt, Artificial Sequence
  Description of Artificial Sequence: Synthetic oligonucleotide
  Antisense strand to SEQ ID NO: 1140616
uaccuugacugcuucucca

SEQ ID NO: 1140618 - RNA, 19 nt, Artificial Sequence
  Description of Artificial Sequence: Synthetic oligonucleotide
  Sense strand starting at position 1045 of SEQ ID NO: 916234
ggccuuaaaggcgaugauu

SEQ ID NO: 1140619 - RNA, 19 nt, Artificial Sequence
  Description of Artificial Sequence: Synthetic oligonucleotide
  Antisense strand to SEQ ID NO: 1140618
aaucaucgccuuuaaggcc

SEQ ID NO: 1140620 - RNA, 19 nt, Artificial Sequence
  Description of Artificial Sequence: Synthetic oligonucleotide
  Sense strand starting at position 1047 of SEQ ID NO: 916234
ccuuaaaggcgaugauuag

SEQ ID NO: 1140621 - RNA, 19 nt, Artificial Sequence
  Description of Artificial Sequence: Synthetic oligonucleotide
  Antisense strand to SEQ ID NO: 1140620
cuaaucaucgccuuuaagg

SEQ ID NO: 1140622 - RNA, 19 nt, Artificial Sequence
  Description of Artificial Sequence: Synthetic oligonucleotide
  Sense strand starting at position 1426 of SEQ ID NO: 916234
uagcgagagcaucaguaau

SEQ ID NO: 1140623 - RNA, 19 nt, Artificial Sequence
  Description of Artificial Sequence: Synthetic oligonucleotide
  Antisense strand to SEQ ID NO: 1140622
auuacugaugcucucgcua

SEQ ID NO: 1140624 - RNA, 19 nt, Artificial Sequence
  Description of Artificial Sequence: Synthetic oligonucleotide
  Sense strand starting at position 1428 of SEQ ID NO: 916234
gcgagagcaucaguaauga

SEQ ID NO: 1140625 - RNA, 19 nt, Artificial Sequence
  Description of Artificial Sequence: Synthetic oligonucleotide
  Antisense strand to SEQ ID NO: 1140624
ucauuacugaugcucucgc

SEQ ID NO: 1140626 - RNA, 19 nt, Artificial Sequence
  Description of Artificial Sequence: Synthetic oligonucleotide
  Sense strand starting at position 1488 of SEQ ID NO: 916234
gggcaaguuccugaaucuu

SEQ ID NO: 1140627 - RNA, 19 nt, Artificial Sequence
  Description of Artificial Sequence: Synthetic oligonucleotide
  Antisense strand to SEQ ID NO: 1140626
aagauucaggaacuugccc

SEQ ID NO: 1140628 - RNA, 19 nt, Artificial Sequence
  Description of Artificial Sequence: Synthetic oligonucleotide
  Sense strand starting at position 1867 of SEQ ID NO: 916234
cuggccuuuaccugaggau

SEQ ID NO: 1140629 - RNA, 19 nt, Artificial Sequence
  Description of Artificial Sequence: Synthetic oligonucleotide
  Antisense strand to SEQ ID NO: 1140628
auccucagguaaaggccag

SEQ ID NO: 1140630 - RNA, 19 nt, Artificial Sequence
  Description of Artificial Sequence: Synthetic oligonucleotide
  Sense strand starting at position 2009 of SEQ ID NO: 916234
gcgccugagagugaugaca

SEQ ID NO: 1140631 - RNA, 19 nt, Artificial Sequence
  Description of Artificial Sequence: Synthetic oligonucleotide
  Antisense strand to SEQ ID NO: 1140630
ugucaucacucucaggcgc

SEQ ID NO: 1140632 - RNA, 19 nt, Artificial Sequence
  Description of Artificial Sequence: Synthetic oligonucleotide
  Sense strand starting at position 2128 of SEQ ID NO: 916234
gcugguucgccgagaaauu

SEQ ID NO: 1140633 - RNA, 19 nt, Artificial Sequence
  Description of Artificial Sequence: Synthetic oligonucleotide
  Antisense strand to SEQ ID NO: 1140632
aauuucucggcgaaccagc

SEQ ID NO: 1140634 - RNA, 19 nt, Artificial Sequence
  Description of Artificial Sequence: Synthetic oligonucleotide
  Sense strand starting at position 2129 of SEQ ID NO: 916234
cugguucgccgagaaauuu

SEQ ID NO: 1140635 - RNA, 19 nt, Artificial Sequence
  Description of Artificial Sequence: Synthetic oligonucleotide
  Antisense strand to SEQ ID NO: 1140634
aaauuucucggcgaaccag

SEQ ID NO: 1140636 - RNA, 19 nt, Artificial Sequence
  Description of Artificial Sequence: Synthetic oligonucleotide
  Sense strand starting at position 2264 of SEQ ID NO: 916234
ccaccacacucaucguauu

SEQ ID NO: 1140637 - RNA, 19 nt, Artificial Sequence
  Description of Artificial Sequence: Synthetic oligonucleotide
  Antisense strand to SEQ ID NO: 1140636
aauacgaugaguguggugg

SEQ ID NO: 1140638 - RNA, 19 nt, Artificial Sequence
  Description of Artificial Sequence: Synthetic oligonucleotide
  Sense strand starting at position 2382 of SEQ ID NO: 916234
ugucucuccgaaugacaaa

SEQ ID NO: 1140639 - RNA, 19 nt, Artificial Sequence
  Description of Artificial Sequence: Synthetic oligonucleotide
  Antisense strand to SEQ ID NO: 1140638
uuugucauucggagagaca

SEQ ID NO: 1140640 - RNA, 19 nt, Artificial Sequence
  Description of Artificial Sequence: Synthetic oligonucleotide
  Sense strand starting at position 2475 of SEQ ID NO: 916234
ugggcauaguuacucauau

SEQ ID NO: 1140641 - RNA, 19 nt, Artificial Sequence
  Description of Artificial Sequence: Synthetic oligonucleotide
  Antisense strand to SEQ ID NO: 1140640
auaugaguaacuaugccca

SEQ ID NO: 1140642 - RNA, 19 nt, Artificial Sequence
  Description of Artificial Sequence: Synthetic oligonucleotide
  Sense strand starting at position 2476 of SEQ ID NO: 916234
gggcauaguuacucauauu

SEQ ID NO: 1140643 - RNA, 19 nt, Artificial Sequence
  Description of Artificial Sequence: Synthetic oligonucleotide
  Antisense strand to SEQ ID NO: 1140642
aauaugaguaacuaugccc

SEQ ID NO: 1140644 - RNA, 19 nt, Artificial Sequence
  Description of Artificial Sequence: Synthetic oligonucleotide
  Sense strand starting at position 2525 of SEQ ID NO: 916234
ggaagugauuaauccgagu

SEQ ID NO: 1140645 - RNA, 19 nt, Artificial Sequence
  Description of Artificial Sequence: Synthetic oligonucleotide
  Antisense strand to SEQ ID NO: 1140644
acucggauuaaucacuucc

SEQ ID NO: 1140646 - RNA, 19 nt, Artificial Sequence
  Description of Artificial Sequence: Synthetic oligonucleotide
  Sense strand starting at position 2606 of SEQ ID NO: 916234
gggucugggcgggauuaua

SEQ ID NO: 1140647 - RNA, 19 nt, Artificial Sequence
  Description of Artificial Sequence: Synthetic oligonucleotide
  Antisense strand to SEQ ID NO: 1140646
uauaaucccgcccagaccc

SEQ ID NO: 1140648 - RNA, 19 nt, Artificial Sequence
  Description of Artificial Sequence: Synthetic oligonucleotide
  Sense strand starting at position 2748 of SEQ ID NO: 916234
guggaacugcuuugaauug

SEQ ID NO: 1140649 - RNA, 19 nt, Artificial Sequence
  Description of Artificial Sequence: Synthetic oligonucleotide
  Antisense strand to SEQ ID NO: 1140648
caauucaaagcaguuccac

SEQ ID NO: 1140650 - RNA, 19 nt, Artificial Sequence
  Description of Artificial Sequence: Synthetic oligonucleotide
  Sense strand starting at position 2755 of SEQ ID NO: 916234
ugcuuugaauuguuaagaa

SEQ ID NO: 1140651 - RNA, 19 nt, Artificial Sequence
  Description of Artificial Sequence: Synthetic oligonucleotide
  Antisense strand to SEQ ID NO: 1140650
uucuuaacaauucaaagca

SEQ ID NO: 1140652 - RNA, 19 nt, Artificial Sequence
  Description of Artificial Sequence: Synthetic oligonucleotide
  Sense strand starting at position 3348 of SEQ ID NO: 916234
aaguaugugguuugaauca

SEQ ID NO: 1140653 - RNA, 19 nt, Artificial Sequence
  Description of Artificial Sequence: Synthetic oligonucleotide
  Antisense strand to SEQ ID NO: 1140652
ugauucaaaccacauacuu

SEQ ID NO: 1140654 - RNA, 19 nt, Artificial Sequence
  Description of Artificial Sequence: Synthetic oligonucleotide
  Sense strand starting at position 3353 of SEQ ID NO: 916234
ugugguuugaaucaugguu

SEQ ID NO: 1140655 - RNA, 19 nt, Artificial Sequence
  Description of Artificial Sequence: Synthetic oligonucleotide
  Antisense strand to SEQ ID NO: 1140654
aaccaugauucaaaccaca

SEQ ID NO: 1140656 - RNA, 19 nt, Artificial Sequence
  Description of Artificial Sequence: Synthetic oligonucleotide
  Sense strand starting at position 3358 of SEQ ID NO: 916234
uuugaaucaugguuauaag

SEQ ID NO: 1140657 - RNA, 19 nt, Artificial Sequence
  Description of Artificial Sequence: Synthetic oligonucleotide
  Antisense strand to SEQ ID NO: 1140656
cuuauaaccaugauucaaa

SEQ ID NO: 1140658 - RNA, 19 nt, Artificial Sequence
  Description of Artificial Sequence: Synthetic oligonucleotide
  Sense strand starting at position 3359 of SEQ ID NO: 916234
uugaaucaugguuauaagu

SEQ ID NO: 1140659 - RNA, 19 nt, Artificial Sequence
  Description of Artificial Sequence: Synthetic oligonucleotide
  Antisense strand to SEQ ID NO: 1140658
acuuauaaccaugauucaa

SEQ ID NO: 1140660 - RNA, 19 nt, Artificial Sequence
  Description of Artificial Sequence: Synthetic oligonucleotide
  Sense strand starting at position 3445 of SEQ ID NO: 916234
ucauguaggucuuuauaau

SEQ ID NO: 1140661 - RNA, 19 nt, Artificial Sequence
  Description of Artificial Sequence: Synthetic oligonucleotide
  Antisense strand to SEQ ID NO: 1140660
auuauaaagaccuacauga

SEQ ID NO: 1140662 - RNA, 19 nt, Artificial Sequence
  Description of Artificial Sequence: Synthetic oligonucleotide
  Sense strand starting at position 3446 of SEQ ID NO: 916234
cauguaggucuuuauaaug

SEQ ID NO: 1140663 - RNA, 19 nt, Artificial Sequence
  Description of Artificial Sequence: Synthetic oligonucleotide
  Antisense strand to SEQ ID NO: 1140662
cauuauaaagaccuacaug

SEQ ID NO: 1140664 - RNA, 19 nt, Artificial Sequence
  Description of Artificial Sequence: Synthetic oligonucleotide
  Sense strand starting at position 3568 of SEQ ID NO: 916234
ccuugacagucaccuugaa

SEQ ID NO: 1140665 - RNA, 19 nt, Artificial Sequence
  Description of Artificial Sequence: Synthetic oligonucleotide
  Antisense strand to SEQ ID NO: 1140664
uucaaggugacugucaagg

SEQ ID NO: 1140666 - RNA, 19 nt, Artificial Sequence
  Description of Artificial Sequence: Synthetic oligonucleotide
  Sense strand starting at position 3626 of SEQ ID NO: 916234
gucaacuaacucugugaac

SEQ ID NO: 1140667 - RNA, 19 nt, Artificial Sequence
  Description of Artificial Sequence: Synthetic oligonucleotide
  Antisense strand to SEQ ID NO: 1140666
guucacagaguuaguugac

SEQ ID NO: 1140668 - RNA, 19 nt, Artificial Sequence
  Description of Artificial Sequence: Synthetic oligonucleotide
  Sense strand starting at position 3653 of SEQ ID NO: 916234
cagauuugaugaggaacuu

SEQ ID NO: 1140669 - RNA, 19 nt, Artificial Sequence
  Description of Artificial Sequence: Synthetic oligonucleotide
  Antisense strand to SEQ ID NO: 1140668
aaguuccucaucaaaucug

SEQ ID NO: 1140670 - RNA, 19 nt, Artificial Sequence
  Description of Artificial Sequence: Synthetic oligonucleotide
  Sense strand starting at position 3799 of SEQ ID NO: 916234
uugagauuaugguugcaau

SEQ ID NO: 1140671 - RNA, 19 nt, Artificial Sequence
  Description of Artificial Sequence: Synthetic oligonucleotide
  Antisense strand to SEQ ID NO: 1140670
auugcaaccauaaucucaa

SEQ ID NO: 1140672 - RNA, 19 nt, Artificial Sequence
  Description of Artificial Sequence: Synthetic oligonucleotide
  Sense strand starting at position 3800 of SEQ ID NO: 916234
ugagauuaugguugcaaua

SEQ ID NO: 1140673 - RNA, 19 nt, Artificial Sequence
  Description of Artificial Sequence: Synthetic oligonucleotide
  Antisense strand to SEQ ID NO: 1140672
uauugcaaccauaaucuca

SEQ ID NO: 1140674 - RNA, 19 nt, Artificial Sequence
  Description of Artificial Sequence: Synthetic oligonucleotide
  Sense strand starting at position 3815 of SEQ ID NO: 916234
aauacuuggcguggaauca

SEQ ID NO: 1140675 - RNA, 19 nt, Artificial Sequence
  Description of Artificial Sequence: Synthetic oligonucleotide
  Antisense strand to SEQ ID NO: 1140674
ugauuccacgccaaguauu

SEQ ID NO: 1140676 - RNA, 19 nt, Artificial Sequence
  Description of Artificial Sequence: Synthetic oligonucleotide
  Sense strand starting at position 3851 of SEQ ID NO: 916234
cuuguaugcaaacgaugau

SEQ ID NO: 1140677 - RNA, 19 nt, Artificial Sequence
  Description of Artificial Sequence: Synthetic oligonucleotide
  Antisense strand to SEQ ID NO: 1140676
aucaucguuugcauacaag

SEQ ID NO: 1140678 - RNA, 19 nt, Artificial Sequence
  Description of Artificial Sequence: Synthetic oligonucleotide
  Sense strand starting at position 3852 of SEQ ID NO: 916234
uuguaugcaaacgaugaua

SEQ ID NO: 1140679 - RNA, 19 nt, Artificial Sequence
  Description of Artificial Sequence: Synthetic oligonucleotide
  Antisense strand to SEQ ID NO: 1140678
uaucaucguuugcauacaa

SEQ ID NO: 1140680 - RNA, 19 nt, Artificial Sequence
  Description of Artificial Sequence: Synthetic oligonucleotide
  Sense strand starting at position 3854 of SEQ ID NO: 916234
guaugcaaacgaugauaaa

SEQ ID NO: 1140681 - RNA, 19 nt, Artificial Sequence
  Description of Artificial Sequence: Synthetic oligonucleotide
  Antisense strand to SEQ ID NO: 1140680
uuuaucaucguuugcauac

SEQ ID NO: 1140682 - RNA, 19 nt, Artificial Sequence
  Description of Artificial Sequence: Synthetic oligonucleotide
  Sense strand starting at position 3942 of SEQ ID NO: 916234
gucacuauuuaugaaagca

SEQ ID NO: 1140683 - RNA, 19 nt, Artificial Sequence
  Description of Artificial Sequence: Synthetic oligonucleotide
  Antisense strand to SEQ ID NO: 1140682
ugcuuucauaaauagugac

SEQ ID NO: 1140684 - RNA, 19 nt, Artificial Sequence
  Description of Artificial Sequence: Synthetic oligonucleotide
  Sense strand starting at position 555 of SEQ ID NO: 916235
cuaacugugcacugaaaug

SEQ ID NO: 1140685 - RNA, 19 nt, Artificial Sequence
  Description of Artificial Sequence: Synthetic oligonucleotide
  Antisense strand to SEQ ID NO: 1140684
cauuucagugcacaguuag

SEQ ID NO: 1140686 - RNA, 19 nt, Artificial Sequence
  Description of Artificial Sequence: Synthetic oligonucleotide
  Sense strand starting at position 566 of SEQ ID NO: 916235
cugaaauguggcugguaca

SEQ ID NO: 1140687 - RNA, 19 nt, Artificial Sequence
  Description of Artificial Sequence: Synthetic oligonucleotide
  Antisense strand to SEQ ID NO: 1140686
uguaccagccacauuucag

SEQ ID NO: 1140688 - RNA, 19 nt, Artificial Sequence
  Description of Artificial Sequence: Synthetic oligonucleotide
  Sense strand starting at position 981 of SEQ ID NO: 916235
cccucaagugaguaucaau

SEQ ID NO: 1140689 - RNA, 19 nt, Artificial Sequence
  Description of Artificial Sequence: Synthetic oligonucleotide
  Antisense strand to SEQ ID NO: 1140688
auugauacucacuugaggg

SEQ ID NO: 1140690 - RNA, 19 nt, Artificial Sequence
  Description of Artificial Sequence: Synthetic oligonucleotide
  Sense strand starting at position 1093 of SEQ ID NO: 916235
auaggagucucaguaaaug

SEQ ID NO: 1140691 - RNA, 19 nt, Artificial Sequence
  Description of Artificial Sequence: Synthetic oligonucleotide
  Antisense strand to SEQ ID NO: 1140690
cauuuacugagacuccuau

SEQ ID NO: 1140692 - RNA, 19 nt, Artificial Sequence
  Description of Artificial Sequence: Synthetic oligonucleotide
  Sense strand starting at position 1223 of SEQ ID NO: 916235
gccucaugacaaugucuuu

SEQ ID NO: 1140693 - RNA, 19 nt, Artificial Sequence
  Description of Artificial Sequence: Synthetic oligonucleotide
  Antisense strand to SEQ ID NO: 1140692
aaagacauugucaugaggc

SEQ ID NO: 1140694 - RNA, 19 nt, Artificial Sequence
  Description of Artificial Sequence: Synthetic oligonucleotide
  Sense strand starting at position 1316 of SEQ ID NO: 916235
guaacacucuuccuggaca

SEQ ID NO: 1140695 - RNA, 19 nt, Artificial Sequence
  Description of Artificial Sequence: Synthetic oligonucleotide
  Antisense strand to SEQ ID NO: 1140694
uguccaggaagaguguuac

SEQ ID NO: 1140696 - RNA, 19 nt, Artificial Sequence
  Description of Artificial Sequence: Synthetic oligonucleotide
  Sense strand starting at position 1487 of SEQ ID NO: 916235
acuuguuuggcaugucaca

SEQ ID NO: 1140697 - RNA, 19 nt, Artificial Sequence
  Description of Artificial Sequence: Synthetic oligonucleotide
  Antisense strand to SEQ ID NO: 1140696
ugugacaugccaaacaagu

SEQ ID NO: 1140698 - RNA, 19 nt, Artificial Sequence
  Description of Artificial Sequence: Synthetic oligonucleotide
  Sense strand starting at position 1527 of SEQ ID NO: 916235
aagcccagaucuguaugaa

SEQ ID NO: 1140699 - RNA, 19 nt, Artificial Sequence
  Description of Artificial Sequence: Synthetic oligonucleotide
  Antisense strand to SEQ ID NO: 1140698
uucauacagaucugggcuu

SEQ ID NO: 1140700 - RNA, 19 nt, Artificial Sequence
  Description of Artificial Sequence: Synthetic oligonucleotide
  Sense strand starting at position 1528 of SEQ ID NO: 916235
agcccagaucuguaugaau

SEQ ID NO: 1140701 - RNA, 19 nt, Artificial Sequence
  Description of Artificial Sequence: Synthetic oligonucleotide
  Antisense strand to SEQ ID NO: 1140700
auucauacagaucugggcu

SEQ ID NO: 1140702 - RNA, 19 nt, Artificial Sequence
  Description of Artificial Sequence: Synthetic oligonucleotide
  Sense strand starting at position 1575 of SEQ ID NO: 916235
auaguaggugcucaaagaa

SEQ ID NO: 1140703 - RNA, 19 nt, Artificial Sequence
  Description of Artificial Sequence: Synthetic oligonucleotide
  Antisense strand to SEQ ID NO: 1140702
uucuuugagcaccuacuau

SEQ ID NO: 1140704 - RNA, 19 nt, Artificial Sequence
  Description of Artificial Sequence: Synthetic oligonucleotide
  Sense strand starting at position 1647 of SEQ ID NO: 916235
gccggagggcuuuggagaa

SEQ ID NO: 1140705 - RNA, 19 nt, Artificial Sequence
  Description of Artificial Sequence: Synthetic oligonucleotide
  Antisense strand to SEQ ID NO: 1140704
uucuccaaagcccuccggc

SEQ ID NO: 1140706 - RNA, 19 nt, Artificial Sequence
  Description of Artificial Sequence: Synthetic oligonucleotide
  Sense strand starting at position 1668 of SEQ ID NO: 916235
gaaguagaggcucgguaaa

SEQ ID NO: 1140707 - RNA, 19 nt, Artificial Sequence
  Description of Artificial Sequence: Synthetic oligonucleotide
  Antisense strand to SEQ ID NO: 1140706
uuuaccgagccucuacuuc

SEQ ID NO: 1140708 - RNA, 19 nt, Artificial Sequence
  Description of Artificial Sequence: Synthetic oligonucleotide
  Sense strand starting at position 1670 of SEQ ID NO: 916235
aguagaggcucgguaaagu

SEQ ID NO: 1140709 - RNA, 19 nt, Artificial Sequence
  Description of Artificial Sequence: Synthetic oligonucleotide
  Antisense strand to SEQ ID NO: 1140708
acuuuaccgagccucuacu

SEQ ID NO: 1140710 - RNA, 19 nt, Artificial Sequence
  Description of Artificial Sequence: Synthetic oligonucleotide
  Sense strand starting at position 2137 of SEQ ID NO: 916235
ggaucacgggcuuaaaguu

SEQ ID NO: 1140711 - RNA, 19 nt, Artificial Sequence
  Description of Artificial Sequence: Synthetic oligonucleotide
  Antisense strand to SEQ ID NO: 1140710
aacuuuaagcccgugaucc

SEQ ID NO: 1140712 - RNA, 19 nt, Artificial Sequence
  Description of Artificial Sequence: Synthetic oligonucleotide
  Sense strand starting at position 2318 of SEQ ID NO: 916235
ugggccuuuccugagugau

SEQ ID NO: 1140713 - RNA, 19 nt, Artificial Sequence
  Description of Artificial Sequence: Synthetic oligonucleotide
  Antisense strand to SEQ ID NO: 1140712
aucacucaggaaaggccca

SEQ ID NO: 1140714 - RNA, 19 nt, Artificial Sequence
  Description of Artificial Sequence: Synthetic oligonucleotide
  Sense strand starting at position 2320 of SEQ ID NO: 916235
ggccuuuccugagugauga

SEQ ID NO: 1140715 - RNA, 19 nt, Artificial Sequence
  Description of Artificial Sequence: Synthetic oligonucleotide
  Antisense strand to SEQ ID NO: 1140714
ucaucacucaggaaaggcc

SEQ ID NO: 1140716 - RNA, 19 nt, Artificial Sequence
  Description of Artificial Sequence: Synthetic oligonucleotide
  Sense strand starting at position 2321 of SEQ ID NO: 916235
gccuuuccugagugaugac

SEQ ID NO: 1140717 - RNA, 19 nt, Artificial Sequence
  Description of Artificial Sequence: Synthetic oligonucleotide
  Antisense strand to SEQ ID NO: 1140716
gucaucacucaggaaaggc

SEQ ID NO: 1140718 - RNA, 19 nt, Artificial Sequence
  Description of Artificial Sequence: Synthetic oligonucleotide
  Sense strand starting at position 2328 of SEQ ID NO: 916235
cugagugaugacuaaguuc

SEQ ID NO: 1140719 - RNA, 19 nt, Artificial Sequence
  Description of Artificial Sequence: Synthetic oligonucleotide
  Antisense strand to SEQ ID NO: 1140718
gaacuuagucaucacucag

SEQ ID NO: 1140720 - RNA, 19 nt, Artificial Sequence
  Description of Artificial Sequence: Synthetic oligonucleotide
  Sense strand starting at position 2331 of SEQ ID NO: 916235
agugaugacuaaguucuuu

SEQ ID NO: 1140721 - RNA, 19 nt, Artificial Sequence
  Description of Artificial Sequence: Synthetic oligonucleotide
  Antisense strand to SEQ ID NO: 1140720
aaagaacuuagucaucacu

SEQ ID NO: 1140722 - RNA, 19 nt, Artificial Sequence
  Description of Artificial Sequence: Synthetic oligonucleotide
  Sense strand starting at position 2335 of SEQ ID NO: 916235
augacuaaguucuuuagaa

SEQ ID NO: 1140723 - RNA, 19 nt, Artificial Sequence
  Description of Artificial Sequence: Synthetic oligonucleotide
  Antisense strand to SEQ ID NO: 1140722
uucuaaagaacuuagucau

SEQ ID NO: 1140724 - RNA, 19 nt, Artificial Sequence
  Description of Artificial Sequence: Synthetic oligonucleotide
  Sense strand starting at position 2336 of SEQ ID NO: 916235
ugacuaaguucuuuagaaa

SEQ ID NO: 1140725 - RNA, 19 nt, Artificial Sequence
  Description of Artificial Sequence: Synthetic oligonucleotide
  Antisense strand to SEQ ID NO: 1140724
uuucuaaagaacuuaguca

SEQ ID NO: 1140726 - RNA, 19 nt, Artificial Sequence
  Description of Artificial Sequence: Synthetic oligonucleotide
  Sense strand starting at position 2358 of SEQ ID NO: 916235
aaguguugcuuccuagaua

SEQ ID NO: 1140727 - RNA, 19 nt, Artificial Sequence
  Description of Artificial Sequence: Synthetic oligonucleotide
  Antisense strand to SEQ ID NO: 1140726
uaucuaggaagcaacacuu

SEQ ID NO: 1140728 - RNA, 19 nt, Artificial Sequence
  Description of Artificial Sequence: Synthetic oligonucleotide
  Sense strand starting at position 2361 of SEQ ID NO: 916235
uguugcuuccuagauagca

SEQ ID NO: 1140729 - RNA, 19 nt, Artificial Sequence
  Description of Artificial Sequence: Synthetic oligonucleotide
  Antisense strand to SEQ ID NO: 1140728
ugcuaucuaggaagcaaca

SEQ ID NO: 1140730 - RNA, 19 nt, Artificial Sequence
  Description of Artificial Sequence: Synthetic oligonucleotide
  Sense strand starting at position 2447 of SEQ ID NO: 916235
ggaugacuuguacaggguu

SEQ ID NO: 1140731 - RNA, 19 nt, Artificial Sequence
  Description of Artificial Sequence: Synthetic oligonucleotide
  Antisense strand to SEQ ID NO: 1140730
aacccuguacaagucaucc

SEQ ID NO: 1140732 - RNA, 19 nt, Artificial Sequence
  Description of Artificial Sequence: Synthetic oligonucleotide
  Sense strand starting at position 2465 of SEQ ID NO: 916235
uagcaaacguggcuggaua

SEQ ID NO: 1140733 - RNA, 19 nt, Artificial Sequence
  Description of Artificial Sequence: Synthetic oligonucleotide
  Antisense strand to SEQ ID NO: 1140732
uauccagccacguuugcua

SEQ ID NO: 1140734 - RNA, 19 nt, Artificial Sequence
  Description of Artificial Sequence: Synthetic oligonucleotide
  Sense strand starting at position 2492 of SEQ ID NO: 916235
agggaagguucagaacuga

SEQ ID NO: 1140735 - RNA, 19 nt, Artificial Sequence
  Description of Artificial Sequence: Synthetic oligonucleotide
  Antisense strand to SEQ ID NO: 1140734
ucaguucugaaccuucccu

SEQ ID NO: 1140736 - RNA, 19 nt, Artificial Sequence
  Description of Artificial Sequence: Synthetic oligonucleotide
  Sense strand starting at position 2670 of SEQ ID NO: 916235
cagaccuaguuagaaugaa

SEQ ID NO: 1140737 - RNA, 19 nt, Artificial Sequence
  Description of Artificial Sequence: Synthetic oligonucleotide
  Antisense strand to SEQ ID NO: 1140736
uucauucuaacuaggucug

SEQ ID NO: 1140738 - RNA, 19 nt, Artificial Sequence
  Description of Artificial Sequence: Synthetic oligonucleotide
  Sense strand starting at position 2694 of SEQ ID NO: 916235
cauguuccagcagacagau

SEQ ID NO: 1140739 - RNA, 19 nt, Artificial Sequence
  Description of Artificial Sequence: Synthetic oligonucleotide
  Antisense strand to SEQ ID NO: 1140738
aucugucugcuggaacaug

SEQ ID NO: 1140740 - RNA, 19 nt, Artificial Sequence
  Description of Artificial Sequence: Synthetic oligonucleotide
  Sense strand starting at position 2840 of SEQ ID NO: 916235
gguagaucaaccugauguu

SEQ ID NO: 1140741 - RNA, 19 nt, Artificial Sequence
  Description of Artificial Sequence: Synthetic oligonucleotide
  Antisense strand to SEQ ID NO: 1140740
aacaucagguugaucuacc

SEQ ID NO: 1140742 - RNA, 19 nt, Artificial Sequence
  Description of Artificial Sequence: Synthetic oligonucleotide
  Sense strand starting at position 2841 of SEQ ID NO: 916235
guagaucaaccugauguua

SEQ ID NO: 1140743 - RNA, 19 nt, Artificial Sequence
  Description of Artificial Sequence: Synthetic oligonucleotide
  Antisense strand to SEQ ID NO: 1140742
uaacaucagguugaucuac

SEQ ID NO: 1140744 - RNA, 19 nt, Artificial Sequence
  Description of Artificial Sequence: Synthetic oligonucleotide
  Sense strand starting at position 2951 of SEQ ID NO: 916235
guggcucacccuuguauaa

SEQ ID NO: 1140745 - RNA, 19 nt, Artificial Sequence
  Description of Artificial Sequence: Synthetic oligonucleotide
  Antisense strand to SEQ ID NO: 1140744
uuauacaagggugagccac

SEQ ID NO: 1140746 - RNA, 19 nt, Artificial Sequence
  Description of Artificial Sequence: Synthetic oligonucleotide
  Sense strand starting at position 3203 of SEQ ID NO: 916235
ggacgagacugucucaaca

SEQ ID NO: 1140747 - RNA, 19 nt, Artificial Sequence
  Description of Artificial Sequence: Synthetic oligonucleotide
  Antisense strand to SEQ ID NO: 1140746
uguugagacagucucgucc

SEQ ID NO: 1140748 - RNA, 19 nt, Artificial Sequence
  Description of Artificial Sequence: Synthetic oligonucleotide
  Sense strand starting at position 3463 of SEQ ID NO: 916235
gugccuaucucagcugaca

SEQ ID NO: 1140749 - RNA, 19 nt, Artificial Sequence
  Description of Artificial Sequence: Synthetic oligonucleotide
  Antisense strand to SEQ ID NO: 1140748
ugucagcugagauaggcac

SEQ ID NO: 1140750 - RNA, 19 nt, Artificial Sequence
  Description of Artificial Sequence: Synthetic oligonucleotide
  Sense strand starting at position 3519 of SEQ ID NO: 916235
guaauucuaguguaauagu

SEQ ID NO: 1140751 - RNA, 19 nt, Artificial Sequence
  Description of Artificial Sequence: Synthetic oligonucleotide
  Antisense strand to SEQ ID NO: 1140750
acuauuacacuagaauuac

SEQ ID NO: 1140752 - RNA, 19 nt, Artificial Sequence
  Description of Artificial Sequence: Synthetic oligonucleotide
  Sense strand starting at position 3535 of SEQ ID NO: 916235
aguuacaacugugucuaga

SEQ ID NO: 1140753 - RNA, 19 nt, Artificial Sequence
  Description of Artificial Sequence: Synthetic oligonucleotide
  Antisense strand to SEQ ID NO: 1140752
ucuagacacaguuguaacu

SEQ ID NO: 1140754 - RNA, 19 nt, Artificial Sequence
  Description of Artificial Sequence: Synthetic oligonucleotide
  Sense strand starting at position 3555 of SEQ ID NO: 916235
aacuguauaggauguuuga

SEQ ID NO: 1140755 - RNA, 19 nt, Artificial Sequence
  Description of Artificial Sequence: Synthetic oligonucleotide
  Antisense strand to SEQ ID NO: 1140754
ucaaacauccuauacaguu

SEQ ID NO: 1140756 - RNA, 19 nt, Artificial Sequence
  Description of Artificial Sequence: Synthetic oligonucleotide
  Sense strand starting at position 3564 of SEQ ID NO: 916235
ggauguuugauugguagcu

SEQ ID NO: 1140757 - RNA, 19 nt, Artificial Sequence
  Description of Artificial Sequence: Synthetic oligonucleotide
  Antisense strand to SEQ ID NO: 1140756
agcuaccaaucaaacaucc

SEQ ID NO: 1140758 - RNA, 19 nt, Artificial Sequence
  Description of Artificial Sequence: Synthetic oligonucleotide
  Sense strand starting at position 3565 of SEQ ID NO: 916235
gauguuugauugguagcuu

SEQ ID NO: 1140759 - RNA, 19 nt, Artificial Sequence
  Description of Artificial Sequence: Synthetic oligonucleotide
  Antisense strand to SEQ ID NO: 1140758
aagcuaccaaucaaacauc

SEQ ID NO: 1140760 - RNA, 19 nt, Artificial Sequence
  Description of Artificial Sequence: Synthetic oligonucleotide
  Sense strand starting at position 3802 of SEQ ID NO: 916235
auuaguagcugagugucau

SEQ ID NO: 1140761 - RNA, 19 nt, Artificial Sequence
  Description of Artificial Sequence: Synthetic oligonucleotide
  Antisense strand to SEQ ID NO: 1140760
augacacucagcuacuaau

SEQ ID NO: 1140762 - RNA, 19 nt, Artificial Sequence
  Description of Artificial Sequence: Synthetic oligonucleotide
  Sense strand starting at position 3862 of SEQ ID NO: 916235
cgaggaucccuugauccca

SEQ ID NO: 1140763 - RNA, 19 nt, Artificial Sequence
  Description of Artificial Sequence: Synthetic oligonucleotide
  Antisense strand to SEQ ID NO: 1140762
ugggaucaagggauccucg

SEQ ID NO: 1140764 - RNA, 19 nt, Artificial Sequence
  Description of Artificial Sequence: Synthetic oligonucleotide
  Sense strand starting at position 79 of SEQ ID NO: 916236
gcaaacucuugaucugaau

SEQ ID NO: 1140765 - RNA, 19 nt, Artificial Sequence
  Description of Artificial Sequence: Synthetic oligonucleotide
  Antisense strand to SEQ ID NO: 1140764
auucagaucaagaguuugc

SEQ ID NO: 1140766 - RNA, 19 nt, Artificial Sequence
  Description of Artificial Sequence: Synthetic oligonucleotide
  Sense strand starting at position 253 of SEQ ID NO: 916236
guuuccugguucuuugagu

SEQ ID NO: 1140767 - RNA, 19 nt, Artificial Sequence
  Description of Artificial Sequence: Synthetic oligonucleotide
  Antisense strand to SEQ ID NO: 1140766
acucaaagaaccaggaaac

SEQ ID NO: 1140768 - RNA, 19 nt, Artificial Sequence
  Description of Artificial Sequence: Synthetic oligonucleotide
  Sense strand starting at position 258 of SEQ ID NO: 916236
cugguucuuugaguuuaac

SEQ ID NO: 1140769 - RNA, 19 nt, Artificial Sequence
  Description of Artificial Sequence: Synthetic oligonucleotide
  Antisense strand to SEQ ID NO: 1140768
guuaaacucaaagaaccag

SEQ ID NO: 1140770 - RNA, 19 nt, Artificial Sequence
  Description of Artificial Sequence: Synthetic oligonucleotide
  Sense strand starting at position 270 of SEQ ID NO: 916236
guuuaacagcccugaccaa

SEQ ID NO: 1140771 - RNA, 19 nt, Artificial Sequence
  Description of Artificial Sequence: Synthetic oligonucleotide
  Antisense strand to SEQ ID NO: 1140770
uuggucagggcuguuaaac

SEQ ID NO: 1140772 - RNA, 19 nt, Artificial Sequence
  Description of Artificial Sequence: Synthetic oligonucleotide
  Sense strand starting at position 285 of SEQ ID NO: 916236
ccaagucuuguggaauuga

SEQ ID NO: 1140773 - RNA, 19 nt, Artificial Sequence
  Description of Artificial Sequence: Synthetic oligonucleotide
  Antisense strand to SEQ ID NO: 1140772
ucaauuccacaagacuugg

SEQ ID NO: 1140774 - RNA, 19 nt, Artificial Sequence
  Description of Artificial Sequence: Synthetic oligonucleotide
  Sense strand starting at position 296 of SEQ ID NO: 916236
ggaauugaggucugcagaa

SEQ ID NO: 1140775 - RNA, 19 nt, Artificial Sequence
  Description of Artificial Sequence: Synthetic oligonucleotide
  Antisense strand to SEQ ID NO: 1140774
uucugcagaccucaauucc

SEQ ID NO: 1140776 - RNA, 19 nt, Artificial Sequence
  Description of Artificial Sequence: Synthetic oligonucleotide
  Sense strand starting at position 641 of SEQ ID NO: 916236
guaguauucgccuggauuu

SEQ ID NO: 1140777 - RNA, 19 nt, Artificial Sequence
  Description of Artificial Sequence: Synthetic oligonucleotide
  Antisense strand to SEQ ID NO: 1140776
aaauccaggcgaauacuac

SEQ ID NO: 1140778 - RNA, 19 nt, Artificial Sequence
  Description of Artificial Sequence: Synthetic oligonucleotide
  Sense strand starting at position 680 of SEQ ID NO: 916236
agcagcucaugucuauuau

SEQ ID NO: 1140779 - RNA, 19 nt, Artificial Sequence
  Description of Artificial Sequence: Synthetic oligonucleotide
  Antisense strand to SEQ ID NO: 1140778
auaauagacaugagcugcu

SEQ ID NO: 1140780 - RNA, 19 nt, Artificial Sequence
  Description of Artificial Sequence: Synthetic oligonucleotide
  Sense strand starting at position 681 of SEQ ID NO: 916236
gcagcucaugucuauuaua

SEQ ID NO: 1140781 - RNA, 19 nt, Artificial Sequence
  Description of Artificial Sequence: Synthetic oligonucleotide
  Antisense strand to SEQ ID NO: 1140780
uauaauagacaugagcugc

SEQ ID NO: 1140782 - RNA, 19 nt, Artificial Sequence
  Description of Artificial Sequence: Synthetic oligonucleotide
  Sense strand starting at position 838 of SEQ ID NO: 916236
agguuugaguagccaauga

SEQ ID NO: 1140783 - RNA, 19 nt, Artificial Sequence
  Description of Artificial Sequence: Synthetic oligonucleotide
  Antisense strand to SEQ ID NO: 1140782
ucauuggcuacucaaaccu

SEQ ID NO: 1140784 - RNA, 19 nt, Artificial Sequence
  Description of Artificial Sequence: Synthetic oligonucleotide
  Sense strand starting at position 842 of SEQ ID NO: 916236
uugaguagccaaugagugu

SEQ ID NO: 1140785 - RNA, 19 nt, Artificial Sequence
  Description of Artificial Sequence: Synthetic oligonucleotide
  Antisense strand to SEQ ID NO: 1140784
acacucauuggcuacucaa

SEQ ID NO: 1140786 - RNA, 19 nt, Artificial Sequence
  Description of Artificial Sequence: Synthetic oligonucleotide
  Sense strand starting at position 891 of SEQ ID NO: 916236
cuccgagcucggucaguau

SEQ ID NO: 1140787 - RNA, 19 nt, Artificial Sequence
  Description of Artificial Sequence: Synthetic oligonucleotide
  Antisense strand to SEQ ID NO: 1140786
auacugaccgagcucggag

SEQ ID NO: 1140788 - RNA, 19 nt, Artificial Sequence
  Description of Artificial Sequence: Synthetic oligonucleotide
  Sense strand starting at position 894 of SEQ ID NO: 916236
cgagcucggucaguaucaa

SEQ ID NO: 1140789 - RNA, 19 nt, Artificial Sequence
  Description of Artificial Sequence: Synthetic oligonucleotide
  Antisense strand to SEQ ID NO: 1140788
uugauacugaccgagcucg

SEQ ID NO: 1140790 - RNA, 19 nt, Artificial Sequence
  Description of Artificial Sequence: Synthetic oligonucleotide
  Sense strand starting at position 1015 of SEQ ID NO: 916236
acccuauucuugggagaaa

SEQ ID NO: 1140791 - RNA, 19 nt, Artificial Sequence
  Description of Artificial Sequence: Synthetic oligonucleotide
  Antisense strand to SEQ ID NO: 1140790
uuucucccaagaauagggu

SEQ ID NO: 1140792 - RNA, 19 nt, Artificial Sequence
  Description of Artificial Sequence: Synthetic oligonucleotide
  Sense strand starting at position 1016 of SEQ ID NO: 916236
cccuauucuugggagaaag

SEQ ID NO: 1140793 - RNA, 19 nt, Artificial Sequence
  Description of Artificial Sequence: Synthetic oligonucleotide
  Antisense strand to SEQ ID NO: 1140792
cuuucucccaagaauaggg

SEQ ID NO: 1140794 - RNA, 19 nt, Artificial Sequence
  Description of Artificial Sequence: Synthetic oligonucleotide
  Sense strand starting at position 1386 of SEQ ID NO: 916236
cucccuaauucgucaaguu

SEQ ID NO: 1140795 - RNA, 19 nt, Artificial Sequence
  Description of Artificial Sequence: Synthetic oligonucleotide
  Antisense strand to SEQ ID NO: 1140794
aacuugacgaauuagggag

SEQ ID NO: 1140796 - RNA, 19 nt, Artificial Sequence
  Description of Artificial Sequence: Synthetic oligonucleotide
  Sense strand starting at position 1387 of SEQ ID NO: 916236
ucccuaauucgucaaguuu

SEQ ID NO: 1140797 - RNA, 19 nt, Artificial Sequence
  Description of Artificial Sequence: Synthetic oligonucleotide
  Antisense strand to SEQ ID NO: 1140796
aaacuugacgaauuaggga

SEQ ID NO: 1140798 - RNA, 19 nt, Artificial Sequence
  Description of Artificial Sequence: Synthetic oligonucleotide
  Sense strand starting at position 2253 of SEQ ID NO: 916236
gcugucauccgaggcgaga

SEQ ID NO: 1140799 - RNA, 19 nt, Artificial Sequence
  Description of Artificial Sequence: Synthetic oligonucleotide
  Antisense strand to SEQ ID NO: 1140798
ucucgccucggaugacagc

SEQ ID NO: 1140800 - RNA, 19 nt, Artificial Sequence
  Description of Artificial Sequence: Synthetic oligonucleotide
  Sense strand starting at position 2528 of SEQ ID NO: 916236
agggaaauugugugucugu

SEQ ID NO: 1140801 - RNA, 19 nt, Artificial Sequence
  Description of Artificial Sequence: Synthetic oligonucleotide
  Antisense strand to SEQ ID NO: 1140800
acagacacacaauuucccu

SEQ ID NO: 1140802 - RNA, 19 nt, Artificial Sequence
  Description of Artificial Sequence: Synthetic oligonucleotide
  Sense strand starting at position 2529 of SEQ ID NO: 916236
gggaaauugugugucugug

SEQ ID NO: 1140803 - RNA, 19 nt, Artificial Sequence
  Description of Artificial Sequence: Synthetic oligonucleotide
  Antisense strand to SEQ ID NO: 1140802
cacagacacacaauuuccc

SEQ ID NO: 1140804 - RNA, 19 nt, Artificial Sequence
  Description of Artificial Sequence: Synthetic oligonucleotide
  Sense strand starting at position 2724 of SEQ ID NO: 916236
agaagagugcccugggaaa

SEQ ID NO: 1140805 - RNA, 19 nt, Artificial Sequence
  Description of Artificial Sequence: Synthetic oligonucleotide
  Antisense strand to SEQ ID NO: 1140804
uuucccagggcacucuucu

SEQ ID NO: 1140806 - RNA, 19 nt, Artificial Sequence
  Description of Artificial Sequence: Synthetic oligonucleotide
  Sense strand starting at position 2944 of SEQ ID NO: 916236
uggagaacuugagaccaga

SEQ ID NO: 1140807 - RNA, 19 nt, Artificial Sequence
  Description of Artificial Sequence: Synthetic oligonucleotide
  Antisense strand to SEQ ID NO: 1140806
ucuggucucaaguucucca

SEQ ID NO: 1140808 - RNA, 19 nt, Artificial Sequence
  Description of Artificial Sequence: Synthetic oligonucleotide
  Sense strand starting at position 3031 of SEQ ID NO: 916236
aggcucaucagagggauua

SEQ ID NO: 1140809 - RNA, 19 nt, Artificial Sequence
  Description of Artificial Sequence: Synthetic oligonucleotide
  Antisense strand to SEQ ID NO: 1140808
uaaucccucugaugagccu

SEQ ID NO: 1140810 - RNA, 19 nt, Artificial Sequence
  Description of Artificial Sequence: Synthetic oligonucleotide
  Sense strand starting at position 3032 of SEQ ID NO: 916236
ggcucaucagagggauuaa

SEQ ID NO: 1140811 - RNA, 19 nt, Artificial Sequence
  Description of Artificial Sequence: Synthetic oligonucleotide
  Antisense strand to SEQ ID NO: 1140810
uuaaucccucugaugagcc

SEQ ID NO: 1140812 - RNA, 19 nt, Artificial Sequence
  Description of Artificial Sequence: Synthetic oligonucleotide
  Sense strand starting at position 3136 of SEQ ID NO: 916236
cugggaagacugugagcuu

SEQ ID NO: 1140813 - RNA, 19 nt, Artificial Sequence
  Description of Artificial Sequence: Synthetic oligonucleotide
  Antisense strand to SEQ ID NO: 1140812
aagcucacagucuucccag

SEQ ID NO: 1140814 - RNA, 19 nt, Artificial Sequence
  Description of Artificial Sequence: Synthetic oligonucleotide
  Sense strand starting at position 3139 of SEQ ID NO: 916236
ggaagacugugagcuugaa

SEQ ID NO: 1140815 - RNA, 19 nt, Artificial Sequence
  Description of Artificial Sequence: Synthetic oligonucleotide
  Antisense strand to SEQ ID NO: 1140814
uucaagcucacagucuucc

SEQ ID NO: 1140816 - RNA, 19 nt, Artificial Sequence
  Description of Artificial Sequence: Synthetic oligonucleotide
  Sense strand starting at position 3164 of SEQ ID NO: 916236
gcuuaacagggcuaaugua

SEQ ID NO: 1140817 - RNA, 19 nt, Artificial Sequence
  Description of Artificial Sequence: Synthetic oligonucleotide
  Antisense strand to SEQ ID NO: 1140816
uacauuagcccuguuaagc

SEQ ID NO: 1140818 - RNA, 19 nt, Artificial Sequence
  Description of Artificial Sequence: Synthetic oligonucleotide
  Sense strand starting at position 3239 of SEQ ID NO: 916236
auggcuggaggcuguuaua

SEQ ID NO: 1140819 - RNA, 19 nt, Artificial Sequence
  Description of Artificial Sequence: Synthetic oligonucleotide
  Antisense strand to SEQ ID NO: 1140818
uauaacagccuccagccau

SEQ ID NO: 1140820 - RNA, 19 nt, Artificial Sequence
  Description of Artificial Sequence: Synthetic oligonucleotide
  Sense strand starting at position 3287 of SEQ ID NO: 916236
cuagcuauaucuuuggauc

SEQ ID NO: 1140821 - RNA, 19 nt, Artificial Sequence
  Description of Artificial Sequence: Synthetic oligonucleotide
  Antisense strand to SEQ ID NO: 1140820
gauccaaagauauagcuag

SEQ ID NO: 1140822 - RNA, 19 nt, Artificial Sequence
  Description of Artificial Sequence: Synthetic oligonucleotide
  Sense strand starting at position 3312 of SEQ ID NO: 916236
gucuuagaagucugagaag

SEQ ID NO: 1140823 - RNA, 19 nt, Artificial Sequence
  Description of Artificial Sequence: Synthetic oligonucleotide
  Antisense strand to SEQ ID NO: 1140822
cuucucagacuucuaagac

SEQ ID NO: 1140824 - RNA, 19 nt, Artificial Sequence
  Description of Artificial Sequence: Synthetic oligonucleotide
  Sense strand starting at position 3360 of SEQ ID NO: 916236
aaagaagucugcgcucaga

SEQ ID NO: 1140825 - RNA, 19 nt, Artificial Sequence
  Description of Artificial Sequence: Synthetic oligonucleotide
  Antisense strand to SEQ ID NO: 1140824
ucugagcgcagacuucuuu

SEQ ID NO: 1140826 - RNA, 19 nt, Artificial Sequence
  Description of Artificial Sequence: Synthetic oligonucleotide
  Sense strand starting at position 3376 of SEQ ID NO: 916236
agaugcacgagaugaaaua

SEQ ID NO: 1140827 - RNA, 19 nt, Artificial Sequence
  Description of Artificial Sequence: Synthetic oligonucleotide
  Antisense strand to SEQ ID NO: 1140826
uauuucaucucgugcaucu

SEQ ID NO: 1140828 - RNA, 19 nt, Artificial Sequence
  Description of Artificial Sequence: Synthetic oligonucleotide
  Sense strand starting at position 3421 of SEQ ID NO: 916236
aggugugauccugggcagu

SEQ ID NO: 1140829 - RNA, 19 nt, Artificial Sequence
  Description of Artificial Sequence: Synthetic oligonucleotide
  Antisense strand to SEQ ID NO: 1140828
acugcccaggaucacaccu

SEQ ID NO: 1140830 - RNA, 19 nt, Artificial Sequence
  Description of Artificial Sequence: Synthetic oligonucleotide
  Sense strand starting at position 3423 of SEQ ID NO: 916236
gugugauccugggcaguca

SEQ ID NO: 1140831 - RNA, 19 nt, Artificial Sequence
  Description of Artificial Sequence: Synthetic oligonucleotide
  Antisense strand to SEQ ID NO: 1140830
ugacugcccaggaucacac

SEQ ID NO: 1140832 - RNA, 19 nt, Artificial Sequence
  Description of Artificial Sequence: Synthetic oligonucleotide
  Sense strand starting at position 3479 of SEQ ID NO: 916236
uuugaaugugcuuaacuuc

SEQ ID NO: 1140833 - RNA, 19 nt, Artificial Sequence
  Description of Artificial Sequence: Synthetic oligonucleotide
  Antisense strand to SEQ ID NO: 1140832
gaaguuaagcacauucaaa

SEQ ID NO: 1140834 - RNA, 19 nt, Artificial Sequence
  Description of Artificial Sequence: Synthetic oligonucleotide
  Sense strand starting at position 3482 of SEQ ID NO: 916236
gaaugugcuuaacuucuga

SEQ ID NO: 1140835 - RNA, 19 nt, Artificial Sequence
  Description of Artificial Sequence: Synthetic oligonucleotide
  Antisense strand to SEQ ID NO: 1140834
ucagaaguuaagcacauuc

SEQ ID NO: 1140836 - RNA, 19 nt, Artificial Sequence
  Description of Artificial Sequence: Synthetic oligonucleotide
  Sense strand starting at position 3513 of SEQ ID NO: 916236
caggcuuauuucuggaucu

SEQ ID NO: 1140837 - RNA, 19 nt, Artificial Sequence
  Description of Artificial Sequence: Synthetic oligonucleotide
  Antisense strand to SEQ ID NO: 1140836
agauccagaaauaagccug

SEQ ID NO: 1140838 - RNA, 19 nt, Artificial Sequence
  Description of Artificial Sequence: Synthetic oligonucleotide
  Sense strand starting at position 3530 of SEQ ID NO: 916236
cugaaagcccuggagcaau

SEQ ID NO: 1140839 - RNA, 19 nt, Artificial Sequence
  Description of Artificial Sequence: Synthetic oligonucleotide
  Antisense strand to SEQ ID NO: 1140838
auugcuccagggcuuucag

SEQ ID NO: 1140840 - RNA, 19 nt, Artificial Sequence
  Description of Artificial Sequence: Synthetic oligonucleotide
  Sense strand starting at position 3906 of SEQ ID NO: 916236
ugcuaauuuccuggcauuc

SEQ ID NO: 1140841 - RNA, 19 nt, Artificial Sequence
  Description of Artificial Sequence: Synthetic oligonucleotide
  Antisense strand to SEQ ID NO: 1140840
gaaugccaggaaauuagca

SEQ ID NO: 1140842 - RNA, 19 nt, Artificial Sequence
  Description of Artificial Sequence: Synthetic oligonucleotide
  Sense strand starting at position 3960 of SEQ ID NO: 916236
uugggcuucucagaauaga

SEQ ID NO: 1140843 - RNA, 19 nt, Artificial Sequence
  Description of Artificial Sequence: Synthetic oligonucleotide
  Antisense strand to SEQ ID NO: 1140842
ucuauucugagaagcccaa

SEQ ID NO: 1140844 - RNA, 19 nt, Artificial Sequence
  Description of Artificial Sequence: Synthetic oligonucleotide
  Sense strand starting at position 241 of SEQ ID NO: 916237
aguacuugaccaggcaaau

SEQ ID NO: 1140845 - RNA, 19 nt, Artificial Sequence
  Description of Artificial Sequence: Synthetic oligonucleotide
  Antisense strand to SEQ ID NO: 1140844
auuugccuggucaaguacu

SEQ ID NO: 1140846 - RNA, 19 nt, Artificial Sequence
  Description of Artificial Sequence: Synthetic oligonucleotide
  Sense strand starting at position 311 of SEQ ID NO: 916237
aagagugcaugcucuagaa

SEQ ID NO: 1140847 - RNA, 19 nt, Artificial Sequence
  Description of Artificial Sequence: Synthetic oligonucleotide
  Antisense strand to SEQ ID NO: 1140846
uucuagagcaugcacucuu

SEQ ID NO: 1140848 - RNA, 19 nt, Artificial Sequence
  Description of Artificial Sequence: Synthetic oligonucleotide
  Sense strand starting at position 315 of SEQ ID NO: 916237
gugcaugcucuagaaggaa

SEQ ID NO: 1140849 - RNA, 19 nt, Artificial Sequence
  Description of Artificial Sequence: Synthetic oligonucleotide
  Antisense strand to SEQ ID NO: 1140848
uuccuucuagagcaugcac

SEQ ID NO: 1140850 - RNA, 19 nt, Artificial Sequence
  Description of Artificial Sequence: Synthetic oligonucleotide
  Sense strand starting at position 338 of SEQ ID NO: 916237
cuacuaugagcuuggaguu

SEQ ID NO: 1140851 - RNA, 19 nt, Artificial Sequence
  Description of Artificial Sequence: Synthetic oligonucleotide
  Antisense strand to SEQ ID NO: 1140850
aacuccaagcucauaguag

SEQ ID NO: 1140852 - RNA, 19 nt, Artificial Sequence
  Description of Artificial Sequence: Synthetic oligonucleotide
  Sense strand starting at position 351 of SEQ ID NO: 916237
ggaguugagugugcaagga

SEQ ID NO: 1140853 - RNA, 19 nt, Artificial Sequence
  Description of Artificial Sequence: Synthetic oligonucleotide
  Antisense strand to SEQ ID NO: 1140852
uccuugcacacucaacucc

SEQ ID NO: 1140854 - RNA, 19 nt, Artificial Sequence
  Description of Artificial Sequence: Synthetic oligonucleotide
  Sense strand starting at position 506 of SEQ ID NO: 916237
agguaauucugggcugggu

SEQ ID NO: 1140855 - RNA, 19 nt, Artificial Sequence
  Description of Artificial Sequence: Synthetic oligonucleotide
  Antisense strand to SEQ ID NO: 1140854
acccagcccagaauuaccu

SEQ ID NO: 1140856 - RNA, 19 nt, Artificial Sequence
  Description of Artificial Sequence: Synthetic oligonucleotide
  Sense strand starting at position 827 of SEQ ID NO: 916237
aggcaaacuuuaucuugua

SEQ ID NO: 1140857 - RNA, 19 nt, Artificial Sequence
  Description of Artificial Sequence: Synthetic oligonucleotide
  Antisense strand to SEQ ID NO: 1140856
uacaagauaaaguuugccu

SEQ ID NO: 1140858 - RNA, 19 nt, Artificial Sequence
  Description of Artificial Sequence: Synthetic oligonucleotide
  Sense strand starting at position 828 of SEQ ID NO: 916237
ggcaaacuuuaucuuguau

SEQ ID NO: 1140859 - RNA, 19 nt, Artificial Sequence
  Description of Artificial Sequence: Synthetic oligonucleotide
  Antisense strand to SEQ ID NO: 1140858
auacaagauaaaguuugcc

SEQ ID NO: 1140860 - RNA, 19 nt, Artificial Sequence
  Description of Artificial Sequence: Synthetic oligonucleotide
  Sense strand starting at position 841 of SEQ ID NO: 916237
uuguauucucaaggccaua

SEQ ID NO: 1140861 - RNA, 19 nt, Artificial Sequence
  Description of Artificial Sequence: Synthetic oligonucleotide
  Antisense strand to SEQ ID NO: 1140860
uauggccuugagaauacaa

SEQ ID NO: 1140862 - RNA, 19 nt, Artificial Sequence
  Description of Artificial Sequence: Synthetic oligonucleotide
  Sense strand starting at position 867 of SEQ ID NO: 916237
ccuggcucaccauagguau

SEQ ID NO: 1140863 - RNA, 19 nt, Artificial Sequence
  Description of Artificial Sequence: Synthetic oligonucleotide
  Antisense strand to SEQ ID NO: 1140862
auaccuauggugagccagg

SEQ ID NO: 1140864 - RNA, 19 nt, Artificial Sequence
  Description of Artificial Sequence: Synthetic oligonucleotide
  Sense strand starting at position 893 of SEQ ID NO: 916237
gugcuucuuggacaaauaa

SEQ ID NO: 1140865 - RNA, 19 nt, Artificial Sequence
  Description of Artificial Sequence: Synthetic oligonucleotide
  Antisense strand to SEQ ID NO: 1140864
uuauuuguccaagaagcac

SEQ ID NO: 1140866 - RNA, 19 nt, Artificial Sequence
  Description of Artificial Sequence: Synthetic oligonucleotide
  Sense strand starting at position 985 of SEQ ID NO: 916237
guuguauagacaugcagau

SEQ ID NO: 1140867 - RNA, 19 nt, Artificial Sequence
  Description of Artificial Sequence: Synthetic oligonucleotide
  Antisense strand to SEQ ID NO: 1140866
aucugcaugucuauacaac

SEQ ID NO: 1140868 - RNA, 19 nt, Artificial Sequence
  Description of Artificial Sequence: Synthetic oligonucleotide
  Sense strand starting at position 1109 of SEQ ID NO: 916237
ggguggucaguuugggaaa

SEQ ID NO: 1140869 - RNA, 19 nt, Artificial Sequence
  Description of Artificial Sequence: Synthetic oligonucleotide
  Antisense strand to SEQ ID NO: 1140868
uuucccaaacugaccaccc

SEQ ID NO: 1140870 - RNA, 19 nt, Artificial Sequence
  Description of Artificial Sequence: Synthetic oligonucleotide
  Sense strand starting at position 1162 of SEQ ID NO: 916237
ggauaugacaguuguauau

SEQ ID NO: 1140871 - RNA, 19 nt, Artificial Sequence
  Description of Artificial Sequence: Synthetic oligonucleotide
  Antisense strand to SEQ ID NO: 1140870
auauacaacugucauaucc

SEQ ID NO: 1140872 - RNA, 19 nt, Artificial Sequence
  Description of Artificial Sequence: Synthetic oligonucleotide
  Sense strand starting at position 1298 of SEQ ID NO: 916237
cugcuugccacauggaaga

SEQ ID NO: 1140873 - RNA, 19 nt, Artificial Sequence
  Description of Artificial Sequence: Synthetic oligonucleotide
  Antisense strand to SEQ ID NO: 1140872
ucuuccauguggcaagcag

SEQ ID NO: 1140874 - RNA, 19 nt, Artificial Sequence
  Description of Artificial Sequence: Synthetic oligonucleotide
  Sense strand starting at position 1437 of SEQ ID NO: 916237
uccugacuuuguucucaca

SEQ ID NO: 1140875 - RNA, 19 nt, Artificial Sequence
  Description of Artificial Sequence: Synthetic oligonucleotide
  Antisense strand to SEQ ID NO: 1140874
ugugagaacaaagucagga

SEQ ID NO: 1140876 - RNA, 19 nt, Artificial Sequence
  Description of Artificial Sequence: Synthetic oligonucleotide
  Sense strand starting at position 1439 of SEQ ID NO: 916237
cugacuuuguucucacaca

SEQ ID NO: 1140877 - RNA, 19 nt, Artificial Sequence
  Description of Artificial Sequence: Synthetic oligonucleotide
  Antisense strand to SEQ ID NO: 1140876
ugugugagaacaaagucag

SEQ ID NO: 1140878 - RNA, 19 nt, Artificial Sequence
  Description of Artificial Sequence: Synthetic oligonucleotide
  Sense strand starting at position 1517 of SEQ ID NO: 916237
cuguuaggaacuugauaag

SEQ ID NO: 1140879 - RNA, 19 nt, Artificial Sequence
  Description of Artificial Sequence: Synthetic oligonucleotide
  Antisense strand to SEQ ID NO: 1140878
cuuaucaaguuccuaacag

SEQ ID NO: 1140880 - RNA, 19 nt, Artificial Sequence
  Description of Artificial Sequence: Synthetic oligonucleotide
  Sense strand starting at position 1523 of SEQ ID NO: 916237
ggaacuugauaagaauauc

SEQ ID NO: 1140881 - RNA, 19 nt, Artificial Sequence
  Description of Artificial Sequence: Synthetic oligonucleotide
  Antisense strand to SEQ ID NO: 1140880
gauauucuuaucaaguucc

SEQ ID NO: 1140882 - RNA, 19 nt, Artificial Sequence
  Description of Artificial Sequence: Synthetic oligonucleotide
  Sense strand starting at position 1552 of SEQ ID NO: 916237
ucaggaucguggcuggaau

SEQ ID NO: 1140883 - RNA, 19 nt, Artificial Sequence
  Description of Artificial Sequence: Synthetic oligonucleotide
  Antisense strand to SEQ ID NO: 1140882
auuccagccacgauccuga

SEQ ID NO: 1140884 - RNA, 19 nt, Artificial Sequence
  Description of Artificial Sequence: Synthetic oligonucleotide
  Sense strand starting at position 1553 of SEQ ID NO: 916237
caggaucguggcuggaauu

SEQ ID NO: 1140885 - RNA, 19 nt, Artificial Sequence
  Description of Artificial Sequence: Synthetic oligonucleotide
  Antisense strand to SEQ ID NO: 1140884
aauuccagccacgauccug

SEQ ID NO: 1140886 - RNA, 19 nt, Artificial Sequence
  Description of Artificial Sequence: Synthetic oligonucleotide
  Sense strand starting at position 1554 of SEQ ID NO: 916237
aggaucguggcuggaauua

SEQ ID NO: 1140887 - RNA, 19 nt, Artificial Sequence
  Description of Artificial Sequence: Synthetic oligonucleotide
  Antisense strand to SEQ ID NO: 1140886
uaauuccagccacgauccu

SEQ ID NO: 1140888 - RNA, 19 nt, Artificial Sequence
  Description of Artificial Sequence: Synthetic oligonucleotide
  Sense strand starting at position 1599 of SEQ ID NO: 916237
gcacaaggccaucaguaau

SEQ ID NO: 1140889 - RNA, 19 nt, Artificial Sequence
  Description of Artificial Sequence: Synthetic oligonucleotide
  Antisense strand to SEQ ID NO: 1140888
auuacugauggccuugugc

SEQ ID NO: 1140890 - RNA, 19 nt, Artificial Sequence
  Description of Artificial Sequence: Synthetic oligonucleotide
  Sense strand starting at position 1694 of SEQ ID NO: 916237
uaccuuggucugggagaaa

SEQ ID NO: 1140891 - RNA, 19 nt, Artificial Sequence
  Description of Artificial Sequence: Synthetic oligonucleotide
  Antisense strand to SEQ ID NO: 1140890
uuucucccagaccaaggua

SEQ ID NO: 1140892 - RNA, 19 nt, Artificial Sequence
  Description of Artificial Sequence: Synthetic oligonucleotide
  Sense strand starting at position 1907 of SEQ ID NO: 916237
ggcccaaagccagaauuaa

SEQ ID NO: 1140893 - RNA, 19 nt, Artificial Sequence
  Description of Artificial Sequence: Synthetic oligonucleotide
  Antisense strand to SEQ ID NO: 1140892
uuaauucuggcuuugggcc

SEQ ID NO: 1140894 - RNA, 19 nt, Artificial Sequence
  Description of Artificial Sequence: Synthetic oligonucleotide
  Sense strand starting at position 2028 of SEQ ID NO: 916237
gcugcuaauuuaucugaug

SEQ ID NO: 1140895 - RNA, 19 nt, Artificial Sequence
  Description of Artificial Sequence: Synthetic oligonucleotide
  Antisense strand to SEQ ID NO: 1140894
caucagauaaauuagcagc

SEQ ID NO: 1140896 - RNA, 19 nt, Artificial Sequence
  Description of Artificial Sequence: Synthetic oligonucleotide
  Sense strand starting at position 2029 of SEQ ID NO: 916237
cugcuaauuuaucugaugu

SEQ ID NO: 1140897 - RNA, 19 nt, Artificial Sequence
  Description of Artificial Sequence: Synthetic oligonucleotide
  Antisense strand to SEQ ID NO: 1140896
acaucagauaaauuagcag

SEQ ID NO: 1140898 - RNA, 19 nt, Artificial Sequence
  Description of Artificial Sequence: Synthetic oligonucleotide
  Sense strand starting at position 2043 of SEQ ID NO: 916237
gauguaagauaaucaagug

SEQ ID NO: 1140899 - RNA, 19 nt, Artificial Sequence
  Description of Artificial Sequence: Synthetic oligonucleotide
  Antisense strand to SEQ ID NO: 1140898
cacuugauuaucuuacauc

SEQ ID NO: 1140900 - RNA, 19 nt, Artificial Sequence
  Description of Artificial Sequence: Synthetic oligonucleotide
  Sense strand starting at position 2050 of SEQ ID NO: 916237
gauaaucaagugugaauug

SEQ ID NO: 1140901 - RNA, 19 nt, Artificial Sequence
  Description of Artificial Sequence: Synthetic oligonucleotide
  Antisense strand to SEQ ID NO: 1140900
caauucacacuugauuauc

SEQ ID NO: 1140902 - RNA, 19 nt, Artificial Sequence
  Description of Artificial Sequence: Synthetic oligonucleotide
  Sense strand starting at position 2169 of SEQ ID NO: 916237
uuaccaaugcauggacaua

SEQ ID NO: 1140903 - RNA, 19 nt, Artificial Sequence
  Description of Artificial Sequence: Synthetic oligonucleotide
  Antisense strand to SEQ ID NO: 1140902
uauguccaugcauugguaa

SEQ ID NO: 1140904 - RNA, 19 nt, Artificial Sequence
  Description of Artificial Sequence: Synthetic oligonucleotide
  Sense strand starting at position 2203 of SEQ ID NO: 916237
ugagguugucagcaguaga

SEQ ID NO: 1140905 - RNA, 19 nt, Artificial Sequence
  Description of Artificial Sequence: Synthetic oligonucleotide
  Antisense strand to SEQ ID NO: 1140904
ucuacugcugacaaccuca

SEQ ID NO: 1140906 - RNA, 19 nt, Artificial Sequence
  Description of Artificial Sequence: Synthetic oligonucleotide
  Sense strand starting at position 2451 of SEQ ID NO: 916237
uuaugaaacuuucuuguga

SEQ ID NO: 1140907 - RNA, 19 nt, Artificial Sequence
  Description of Artificial Sequence: Synthetic oligonucleotide
  Antisense strand to SEQ ID NO: 1140906
ucacaagaaaguuucauaa

SEQ ID NO: 1140908 - RNA, 19 nt, Artificial Sequence
  Description of Artificial Sequence: Synthetic oligonucleotide
  Sense strand starting at position 3521 of SEQ ID NO: 916237
ggaucagaacugugucucu

SEQ ID NO: 1140909 - RNA, 19 nt, Artificial Sequence
  Description of Artificial Sequence: Synthetic oligonucleotide
  Antisense strand to SEQ ID NO: 1140908
agagacacaguucugaucc

SEQ ID NO: 1140910 - RNA, 19 nt, Artificial Sequence
  Description of Artificial Sequence: Synthetic oligonucleotide
  Sense strand starting at position 3574 of SEQ ID NO: 916237
aaguaucuccacuggugaa

SEQ ID NO: 1140911 - RNA, 19 nt, Artificial Sequence
  Description of Artificial Sequence: Synthetic oligonucleotide
  Antisense strand to SEQ ID NO: 1140910
uucaccaguggagauacuu

SEQ ID NO: 1140912 - RNA, 19 nt, Artificial Sequence
  Description of Artificial Sequence: Synthetic oligonucleotide
  Sense strand starting at position 3620 of SEQ ID NO: 916237
ugauaaguaucugugcaaa

SEQ ID NO: 1140913 - RNA, 19 nt, Artificial Sequence
  Description of Artificial Sequence: Synthetic oligonucleotide
  Antisense strand to SEQ ID NO: 1140912
uuugcacagauacuuauca

SEQ ID NO: 1140914 - RNA, 19 nt, Artificial Sequence
  Description of Artificial Sequence: Synthetic oligonucleotide
  Sense strand starting at position 3649 of SEQ ID NO: 916237
aggaauuaauugguugcua

SEQ ID NO: 1140915 - RNA, 19 nt, Artificial Sequence
  Description of Artificial Sequence: Synthetic oligonucleotide
  Antisense strand to SEQ ID NO: 1140914
uagcaaccaauuaauuccu

SEQ ID NO: 1140916 - RNA, 19 nt, Artificial Sequence
  Description of Artificial Sequence: Synthetic oligonucleotide
  Sense strand starting at position 3650 of SEQ ID NO: 916237
ggaauuaauugguugcuau

SEQ ID NO: 1140917 - RNA, 19 nt, Artificial Sequence
  Description of Artificial Sequence: Synthetic oligonucleotide
  Antisense strand to SEQ ID NO: 1140916
auagcaaccaauuaauucc

SEQ ID NO: 1140918 - RNA, 19 nt, Artificial Sequence
  Description of Artificial Sequence: Synthetic oligonucleotide
  Sense strand starting at position 3651 of SEQ ID NO: 916237
gaauuaauugguugcuauu

SEQ ID NO: 1140919 - RNA, 19 nt, Artificial Sequence
  Description of Artificial Sequence: Synthetic oligonucleotide
  Antisense strand to SEQ ID NO: 1140918
aauagcaaccaauuaauuc

SEQ ID NO: 1140920 - RNA, 19 nt, Artificial Sequence
  Description of Artificial Sequence: Synthetic oligonucleotide
  Sense strand starting at position 3934 of SEQ ID NO: 916237
acaauaagaguagguugua

SEQ ID NO: 1140921 - RNA, 19 nt, Artificial Sequence
  Description of Artificial Sequence: Synthetic oligonucleotide
  Antisense strand to SEQ ID NO: 1140920
uacaaccuacucuuauugu

SEQ ID NO: 1140922 - RNA, 19 nt, Artificial Sequence
  Description of Artificial Sequence: Synthetic oligonucleotide
  Sense strand starting at position 3935 of SEQ ID NO: 916237
caauaagaguagguuguau

SEQ ID NO: 1140923 - RNA, 19 nt, Artificial Sequence
  Description of Artificial Sequence: Synthetic oligonucleotide
  Antisense strand to SEQ ID NO: 1140922
auacaaccuacucuuauug

SEQ ID NO: 1140924 - RNA, 19 nt, Artificial Sequence
  Description of Artificial Sequence: Synthetic oligonucleotide
  Sense strand starting at position 21 of SEQ ID NO: 916238
gggagaaggccuuagcauu

SEQ ID NO: 1140925 - RNA, 19 nt, Artificial Sequence
  Description of Artificial Sequence: Synthetic oligonucleotide
  Antisense strand to SEQ ID NO: 1140924
aaugcuaaggccuucuccc

SEQ ID NO: 1140926 - RNA, 19 nt, Artificial Sequence
  Description of Artificial Sequence: Synthetic oligonucleotide
  Sense strand starting at position 70 of SEQ ID NO: 916238
acagguaauucucucagua

SEQ ID NO: 1140927 - RNA, 19 nt, Artificial Sequence
  Description of Artificial Sequence: Synthetic oligonucleotide
  Antisense strand to SEQ ID NO: 1140926
uacugagagaauuaccugu

SEQ ID NO: 1140928 - RNA, 19 nt, Artificial Sequence
  Description of Artificial Sequence: Synthetic oligonucleotide
  Sense strand starting at position 181 of SEQ ID NO: 916238
ugacucaagucucugcaga

SEQ ID NO: 1140929 - RNA, 19 nt, Artificial Sequence
  Description of Artificial Sequence: Synthetic oligonucleotide
  Antisense strand to SEQ ID NO: 1140928
ucugcagagacuugaguca

SEQ ID NO: 1140930 - RNA, 19 nt, Artificial Sequence
  Description of Artificial Sequence: Synthetic oligonucleotide
  Sense strand starting at position 182 of SEQ ID NO: 916238
gacucaagucucugcagau

SEQ ID NO: 1140931 - RNA, 19 nt, Artificial Sequence
  Description of Artificial Sequence: Synthetic oligonucleotide
  Antisense strand to SEQ ID NO: 1140930
aucugcagagacuugaguc

SEQ ID NO: 1140932 - RNA, 19 nt, Artificial Sequence
  Description of Artificial Sequence: Synthetic oligonucleotide
  Sense strand starting at position 195 of SEQ ID NO: 916238
gcagauuaggcguaugaga

SEQ ID NO: 1140933 - RNA, 19 nt, Artificial Sequence
  Description of Artificial Sequence: Synthetic oligonucleotide
  Antisense strand to SEQ ID NO: 1140932
ucucauacgccuaaucugc

SEQ ID NO: 1140934 - RNA, 19 nt, Artificial Sequence
  Description of Artificial Sequence: Synthetic oligonucleotide
  Sense strand starting at position 197 of SEQ ID NO: 916238
agauuaggcguaugagaca

SEQ ID NO: 1140935 - RNA, 19 nt, Artificial Sequence
  Description of Artificial Sequence: Synthetic oligonucleotide
  Antisense strand to SEQ ID NO: 1140934
ugucucauacgccuaaucu

SEQ ID NO: 1140936 - RNA, 19 nt, Artificial Sequence
  Description of Artificial Sequence: Synthetic oligonucleotide
  Sense strand starting at position 318 of SEQ ID NO: 916238
guacccuaucaagaagcaa

SEQ ID NO: 1140937 - RNA, 19 nt, Artificial Sequence
  Description of Artificial Sequence: Synthetic oligonucleotide
  Antisense strand to SEQ ID NO: 1140936
uugcuucuugauaggguac

SEQ ID NO: 1140938 - RNA, 19 nt, Artificial Sequence
  Description of Artificial Sequence: Synthetic oligonucleotide
  Sense strand starting at position 384 of SEQ ID NO: 916238
caaauacaucacgguaagu

SEQ ID NO: 1140939 - RNA, 19 nt, Artificial Sequence
  Description of Artificial Sequence: Synthetic oligonucleotide
  Antisense strand to SEQ ID NO: 1140938
acuuaccgugauguauuug

SEQ ID NO: 1140940 - RNA, 19 nt, Artificial Sequence
  Description of Artificial Sequence: Synthetic oligonucleotide
  Sense strand starting at position 481 of SEQ ID NO: 916238
acacuaacuugguuuagaa

SEQ ID NO: 1140941 - RNA, 19 nt, Artificial Sequence
  Description of Artificial Sequence: Synthetic oligonucleotide
  Antisense strand to SEQ ID NO: 1140940
uucuaaaccaaguuagugu

SEQ ID NO: 1140942 - RNA, 19 nt, Artificial Sequence
  Description of Artificial Sequence: Synthetic oligonucleotide
  Sense strand starting at position 585 of SEQ ID NO: 916238
ccacaugagguuugaguua

SEQ ID NO: 1140943 - RNA, 19 nt, Artificial Sequence
  Description of Artificial Sequence: Synthetic oligonucleotide
  Antisense strand to SEQ ID NO: 1140942
uaacucaaaccucaugugg

SEQ ID NO: 1140944 - RNA, 19 nt, Artificial Sequence
  Description of Artificial Sequence: Synthetic oligonucleotide
  Sense strand starting at position 590 of SEQ ID NO: 916238
ugagguuugaguuaucaca

SEQ ID NO: 1140945 - RNA, 19 nt, Artificial Sequence
  Description of Artificial Sequence: Synthetic oligonucleotide
  Antisense strand to SEQ ID NO: 1140944
ugugauaacucaaaccuca

SEQ ID NO: 1140946 - RNA, 19 nt, Artificial Sequence
  Description of Artificial Sequence: Synthetic oligonucleotide
  Sense strand starting at position 694 of SEQ ID NO: 916238
uaagauuguuuaucggaca

SEQ ID NO: 1140947 - RNA, 19 nt, Artificial Sequence
  Description of Artificial Sequence: Synthetic oligonucleotide
  Antisense strand to SEQ ID NO: 1140946
uguccgauaaacaaucuua

SEQ ID NO: 1140948 - RNA, 19 nt, Artificial Sequence
  Description of Artificial Sequence: Synthetic oligonucleotide
  Sense strand starting at position 699 of SEQ ID NO: 916238
uuguuuaucggacacuauu

SEQ ID NO: 1140949 - RNA, 19 nt, Artificial Sequence
  Description of Artificial Sequence: Synthetic oligonucleotide
  Antisense strand to SEQ ID NO: 1140948
aauaguguccgauaaacaa

SEQ ID NO: 1140950 - RNA, 19 nt, Artificial Sequence
  Description of Artificial Sequence: Synthetic oligonucleotide
  Sense strand starting at position 708 of SEQ ID NO: 916238
ggacacuauugugccaaga

SEQ ID NO: 1140951 - RNA, 19 nt, Artificial Sequence
  Description of Artificial Sequence: Synthetic oligonucleotide
  Antisense strand to SEQ ID NO: 1140950
ucuuggcacaauagugucc

SEQ ID NO: 1140952 - RNA, 19 nt, Artificial Sequence
  Description of Artificial Sequence: Synthetic oligonucleotide
  Sense strand starting at position 868 of SEQ ID NO: 916238
acaguuaugcaucauuaug

SEQ ID NO: 1140953 - RNA, 19 nt, Artificial Sequence
  Description of Artificial Sequence: Synthetic oligonucleotide
  Antisense strand to SEQ ID NO: 1140952
cauaaugaugcauaacugu

SEQ ID NO: 1140954 - RNA, 19 nt, Artificial Sequence
  Description of Artificial Sequence: Synthetic oligonucleotide
  Sense strand starting at position 870 of SEQ ID NO: 916238
aguuaugcaucauuaugaa

SEQ ID NO: 1140955 - RNA, 19 nt, Artificial Sequence
  Description of Artificial Sequence: Synthetic oligonucleotide
  Antisense strand to SEQ ID NO: 1140954
uucauaaugaugcauaacu

SEQ ID NO: 1140956 - RNA, 19 nt, Artificial Sequence
  Description of Artificial Sequence: Synthetic oligonucleotide
  Sense strand starting at position 971 of SEQ ID NO: 916238
agucaaauauagcuuuaag

SEQ ID NO: 1140957 - RNA, 19 nt, Artificial Sequence
  Description of Artificial Sequence: Synthetic oligonucleotide
  Antisense strand to SEQ ID NO: 1140956
cuuaaagcuauauuugacu

SEQ ID NO: 1140958 - RNA, 19 nt, Artificial Sequence
  Description of Artificial Sequence: Synthetic oligonucleotide
  Sense strand starting at position 1089 of SEQ ID NO: 916238
cgugauacucccgauuauc

SEQ ID NO: 1140959 - RNA, 19 nt, Artificial Sequence
  Description of Artificial Sequence: Synthetic oligonucleotide
  Antisense strand to SEQ ID NO: 1140958
gauaaucgggaguaucacg

SEQ ID NO: 1140960 - RNA, 19 nt, Artificial Sequence
  Description of Artificial Sequence: Synthetic oligonucleotide
  Sense strand starting at position 1097 of SEQ ID NO: 916238
ucccgauuauccucauuga

SEQ ID NO: 1140961 - RNA, 19 nt, Artificial Sequence
  Description of Artificial Sequence: Synthetic oligonucleotide
  Antisense strand to SEQ ID NO: 1140960
ucaaugaggauaaucggga

SEQ ID NO: 1140962 - RNA, 19 nt, Artificial Sequence
  Description of Artificial Sequence: Synthetic oligonucleotide
  Sense strand starting at position 1098 of SEQ ID NO: 916238
cccgauuauccucauugaa

SEQ ID NO: 1140963 - RNA, 19 nt, Artificial Sequence
  Description of Artificial Sequence: Synthetic oligonucleotide
  Antisense strand to SEQ ID NO: 1140962
uucaaugaggauaaucggg

SEQ ID NO: 1140964 - RNA, 19 nt, Artificial Sequence
  Description of Artificial Sequence: Synthetic oligonucleotide
  Sense strand starting at position 1817 of SEQ ID NO: 916238
uccggagccguuucgacau

SEQ ID NO: 1140965 - RNA, 19 nt, Artificial Sequence
  Description of Artificial Sequence: Synthetic oligonucleotide
  Antisense strand to SEQ ID NO: 1140964
augucgaaacggcuccgga

SEQ ID NO: 1140966 - RNA, 19 nt, Artificial Sequence
  Description of Artificial Sequence: Synthetic oligonucleotide
  Sense strand starting at position 2017 of SEQ ID NO: 916238
caggucaugugaccggaaa

SEQ ID NO: 1140967 - RNA, 19 nt, Artificial Sequence
  Description of Artificial Sequence: Synthetic oligonucleotide
  Antisense strand to SEQ ID NO: 1140966
uuuccggucacaugaccug

SEQ ID NO: 1140968 - RNA, 19 nt, Artificial Sequence
  Description of Artificial Sequence: Synthetic oligonucleotide
  Sense strand starting at position 2217 of SEQ ID NO: 916238
ugaggcaaucaauggucaa

SEQ ID NO: 1140969 - RNA, 19 nt, Artificial Sequence
  Description of Artificial Sequence: Synthetic oligonucleotide
  Antisense strand to SEQ ID NO: 1140968
uugaccauugauugccuca

SEQ ID NO: 1140970 - RNA, 19 nt, Artificial Sequence
  Description of Artificial Sequence: Synthetic oligonucleotide
  Sense strand starting at position 2220 of SEQ ID NO: 916238
ggcaaucaauggucaaguu

SEQ ID NO: 1140971 - RNA, 19 nt, Artificial Sequence
  Description of Artificial Sequence: Synthetic oligonucleotide
  Antisense strand to SEQ ID NO: 1140970
aacuugaccauugauugcc

SEQ ID NO: 1140972 - RNA, 19 nt, Artificial Sequence
  Description of Artificial Sequence: Synthetic oligonucleotide
  Sense strand starting at position 2347 of SEQ ID NO: 916238
ccuuaugaagcuugcauuu

SEQ ID NO: 1140973 - RNA, 19 nt, Artificial Sequence
  Description of Artificial Sequence: Synthetic oligonucleotide
  Antisense strand to SEQ ID NO: 1140972
aaaugcaagcuucauaagg

SEQ ID NO: 1140974 - RNA, 19 nt, Artificial Sequence
  Description of Artificial Sequence: Synthetic oligonucleotide
  Sense strand starting at position 3034 of SEQ ID NO: 916238
uuagaugauuccuuaggcu

SEQ ID NO: 1140975 - RNA, 19 nt, Artificial Sequence
  Description of Artificial Sequence: Synthetic oligonucleotide
  Antisense strand to SEQ ID NO: 1140974
agccuaaggaaucaucuaa

SEQ ID NO: 1140976 - RNA, 19 nt, Artificial Sequence
  Description of Artificial Sequence: Synthetic oligonucleotide
  Sense strand starting at position 3094 of SEQ ID NO: 916238
uuacuucuaguccacgauu

SEQ ID NO: 1140977 - RNA, 19 nt, Artificial Sequence
  Description of Artificial Sequence: Synthetic oligonucleotide
  Antisense strand to SEQ ID NO: 1140976
aaucguggacuagaaguaa

SEQ ID NO: 1140978 - RNA, 19 nt, Artificial Sequence
  Description of Artificial Sequence: Synthetic oligonucleotide
  Sense strand starting at position 3122 of SEQ ID NO: 916238
auggcuugcuacuuaagaa

SEQ ID NO: 1140979 - RNA, 19 nt, Artificial Sequence
  Description of Artificial Sequence: Synthetic oligonucleotide
  Antisense strand to SEQ ID NO: 1140978
uucuuaaguagcaagccau

SEQ ID NO: 1140980 - RNA, 19 nt, Artificial Sequence
  Description of Artificial Sequence: Synthetic oligonucleotide
  Sense strand starting at position 3232 of SEQ ID NO: 916238
cuuguaugugaccagcaaa

SEQ ID NO: 1140981 - RNA, 19 nt, Artificial Sequence
  Description of Artificial Sequence: Synthetic oligonucleotide
  Antisense strand to SEQ ID NO: 1140980
uuugcuggucacauacaag

SEQ ID NO: 1140982 - RNA, 19 nt, Artificial Sequence
  Description of Artificial Sequence: Synthetic oligonucleotide
  Sense strand starting at position 3235 of SEQ ID NO: 916238
guaugugaccagcaaaguu

SEQ ID NO: 1140983 - RNA, 19 nt, Artificial Sequence
  Description of Artificial Sequence: Synthetic oligonucleotide
  Antisense strand to SEQ ID NO: 1140982
aacuuugcuggucacauac

SEQ ID NO: 1140984 - RNA, 19 nt, Artificial Sequence
  Description of Artificial Sequence: Synthetic oligonucleotide
  Sense strand starting at position 3300 of SEQ ID NO: 916238
augugauacaccugcugga

SEQ ID NO: 1140985 - RNA, 19 nt, Artificial Sequence
  Description of Artificial Sequence: Synthetic oligonucleotide
  Antisense strand to SEQ ID NO: 1140984
uccagcagguguaucacau

SEQ ID NO: 1140986 - RNA, 19 nt, Artificial Sequence
  Description of Artificial Sequence: Synthetic oligonucleotide
  Sense strand starting at position 3398 of SEQ ID NO: 916238
cguggaauuugagaauaac

SEQ ID NO: 1140987 - RNA, 19 nt, Artificial Sequence
  Description of Artificial Sequence: Synthetic oligonucleotide
  Antisense strand to SEQ ID NO: 1140986
guuauucucaaauuccacg

SEQ ID NO: 1140988 - RNA, 19 nt, Artificial Sequence
  Description of Artificial Sequence: Synthetic oligonucleotide
  Sense strand starting at position 3469 of SEQ ID NO: 916238
ugagguaaaucagugugaa

SEQ ID NO: 1140989 - RNA, 19 nt, Artificial Sequence
  Description of Artificial Sequence: Synthetic oligonucleotide
  Antisense strand to SEQ ID NO: 1140988
uucacacugauuuaccuca

SEQ ID NO: 1140990 - RNA, 19 nt, Artificial Sequence
  Description of Artificial Sequence: Synthetic oligonucleotide
  Sense strand starting at position 3470 of SEQ ID NO: 916238
gagguaaaucagugugaag

SEQ ID NO: 1140991 - RNA, 19 nt, Artificial Sequence
  Description of Artificial Sequence: Synthetic oligonucleotide
  Antisense strand to SEQ ID NO: 1140990
cuucacacugauuuaccuc

SEQ ID NO: 1140992 - RNA, 19 nt, Artificial Sequence
  Description of Artificial Sequence: Synthetic oligonucleotide
  Sense strand starting at position 3472 of SEQ ID NO: 916238
gguaaaucagugugaagga

SEQ ID NO: 1140993 - RNA, 19 nt, Artificial Sequence
  Description of Artificial Sequence: Synthetic oligonucleotide
  Antisense strand to SEQ ID NO: 1140992
uccuucacacugauuuacc

SEQ ID NO: 1140994 - RNA, 19 nt, Artificial Sequence
  Description of Artificial Sequence: Synthetic oligonucleotide
  Sense strand starting at position 3791 of SEQ ID NO: 916238
ccaucucuacagugugaua

SEQ ID NO: 1140995 - RNA, 19 nt, Artificial Sequence
  Description of Artificial Sequence: Synthetic oligonucleotide
  Antisense strand to SEQ ID NO: 1140994
uaucacacuguagagaugg

SEQ ID NO: 1140996 - RNA, 19 nt, Artificial Sequence
  Description of Artificial Sequence: Synthetic oligonucleotide
  Sense strand starting at position 3793 of SEQ ID NO: 916238
aucucuacagugugauaaa

SEQ ID NO: 1140997 - RNA, 19 nt, Artificial Sequence
  Description of Artificial Sequence: Synthetic oligonucleotide
  Antisense strand to SEQ ID NO: 1140996
uuuaucacacuguagagau

SEQ ID NO: 1140998 - RNA, 19 nt, Artificial Sequence
  Description of Artificial Sequence: Synthetic oligonucleotide
  Sense strand starting at position 3804 of SEQ ID NO: 916238
gugauaaaugugugaugga

SEQ ID NO: 1140999 - RNA, 19 nt, Artificial Sequence
  Description of Artificial Sequence: Synthetic oligonucleotide
  Antisense strand to SEQ ID NO: 1140998
uccaucacacauuuaucac

SEQ ID NO: 1141000 - RNA, 19 nt, Artificial Sequence
  Description of Artificial Sequence: Synthetic oligonucleotide
  Sense strand starting at position 3926 of SEQ ID NO: 916238
gcuccacaucuguggagaa

SEQ ID NO: 1141001 - RNA, 19 nt, Artificial Sequence
  Description of Artificial Sequence: Synthetic oligonucleotide
  Antisense strand to SEQ ID NO: 1141000
uucuccacagauguggagc

SEQ ID NO: 1141002 - RNA, 19 nt, Artificial Sequence
  Description of Artificial Sequence: Synthetic oligonucleotide
  Sense strand starting at position 3943 of SEQ ID NO: 916238
aauggauuagguugggauu

SEQ ID NO: 1141003 - RNA, 19 nt, Artificial Sequence
  Description of Artificial Sequence: Synthetic oligonucleotide
  Antisense strand to SEQ ID NO: 1141002
aaucccaaccuaauccauu

SEQ ID NO: 1141004 - RNA, 19 nt, Artificial Sequence
  Description of Artificial Sequence: Synthetic oligonucleotide
  Sense strand starting at position 215 of SEQ ID NO: 916239
gugagaguucgggauggga

SEQ ID NO: 1141005 - RNA, 19 nt, Artificial Sequence
  Description of Artificial Sequence: Synthetic oligonucleotide
  Antisense strand to SEQ ID NO: 1141004
ucccaucccgaacucucac

SEQ ID NO: 1141006 - RNA, 19 nt, Artificial Sequence
  Description of Artificial Sequence: Synthetic oligonucleotide
  Sense strand starting at position 217 of SEQ ID NO: 916239
gagaguucgggaugggaca

SEQ ID NO: 1141007 - RNA, 19 nt, Artificial Sequence
  Description of Artificial Sequence: Synthetic oligonucleotide
  Antisense strand to SEQ ID NO: 1141006
ugucccaucccgaacucuc

SEQ ID NO: 1141008 - RNA, 19 nt, Artificial Sequence
  Description of Artificial Sequence: Synthetic oligonucleotide
  Sense strand starting at position 635 of SEQ ID NO: 916239
gagaaagugacugggucaa

SEQ ID NO: 1141009 - RNA, 19 nt, Artificial Sequence
  Description of Artificial Sequence: Synthetic oligonucleotide
  Antisense strand to SEQ ID NO: 1141008
uugacccagucacuuucuc

SEQ ID NO: 1141010 - RNA, 19 nt, Artificial Sequence
  Description of Artificial Sequence: Synthetic oligonucleotide
  Sense strand starting at position 637 of SEQ ID NO: 916239
gaaagugacugggucaaua

SEQ ID NO: 1141011 - RNA, 19 nt, Artificial Sequence
  Description of Artificial Sequence: Synthetic oligonucleotide
  Antisense strand to SEQ ID NO: 1141010
uauugacccagucacuuuc

SEQ ID NO: 1141012 - RNA, 19 nt, Artificial Sequence
  Description of Artificial Sequence: Synthetic oligonucleotide
  Sense strand starting at position 693 of SEQ ID NO: 916239
accuuagguugcugguuau

SEQ ID NO: 1141013 - RNA, 19 nt, Artificial Sequence
  Description of Artificial Sequence: Synthetic oligonucleotide
  Antisense strand to SEQ ID NO: 1141012
auaaccagcaaccuaaggu

SEQ ID NO: 1141014 - RNA, 19 nt, Artificial Sequence
  Description of Artificial Sequence: Synthetic oligonucleotide
  Sense strand starting at position 717 of SEQ ID NO: 916239
ccggcuucccaaggguuaa

SEQ ID NO: 1141015 - RNA, 19 nt, Artificial Sequence
  Description of Artificial Sequence: Synthetic oligonucleotide
  Antisense strand to SEQ ID NO: 1141014
uuaacccuugggaagccgg

SEQ ID NO: 1141016 - RNA, 19 nt, Artificial Sequence
  Description of Artificial Sequence: Synthetic oligonucleotide
  Sense strand starting at position 982 of SEQ ID NO: 916239
ccguaauccugucccgaaa

SEQ ID NO: 1141017 - RNA, 19 nt, Artificial Sequence
  Description of Artificial Sequence: Synthetic oligonucleotide
  Antisense strand to SEQ ID NO: 1141016
uuucgggacaggauuacgg

SEQ ID NO: 1141018 - RNA, 19 nt, Artificial Sequence
  Description of Artificial Sequence: Synthetic oligonucleotide
  Sense strand starting at position 985 of SEQ ID NO: 916239
uaauccugucccgaaagcu

SEQ ID NO: 1141019 - RNA, 19 nt, Artificial Sequence
  Description of Artificial Sequence: Synthetic oligonucleotide
  Antisense strand to SEQ ID NO: 1141018
agcuuucgggacaggauua

SEQ ID NO: 1141020 - RNA, 19 nt, Artificial Sequence
  Description of Artificial Sequence: Synthetic oligonucleotide
  Sense strand starting at position 1217 of SEQ ID NO: 916239
cggugguccugaggucaga

SEQ ID NO: 1141021 - RNA, 19 nt, Artificial Sequence
  Description of Artificial Sequence: Synthetic oligonucleotide
  Antisense strand to SEQ ID NO: 1141020
ucugaccucaggaccaccg

SEQ ID NO: 1141022 - RNA, 19 nt, Artificial Sequence
  Description of Artificial Sequence: Synthetic oligonucleotide
  Sense strand starting at position 1417 of SEQ ID NO: 916239
uggcacaucugucacaaga

SEQ ID NO: 1141023 - RNA, 19 nt, Artificial Sequence
  Description of Artificial Sequence: Synthetic oligonucleotide
  Antisense strand to SEQ ID NO: 1141022
ucuugugacagaugugcca

SEQ ID NO: 1141024 - RNA, 19 nt, Artificial Sequence
  Description of Artificial Sequence: Synthetic oligonucleotide
  Sense strand starting at position 1419 of SEQ ID NO: 916239
gcacaucugucacaagaca

SEQ ID NO: 1141025 - RNA, 19 nt, Artificial Sequence
  Description of Artificial Sequence: Synthetic oligonucleotide
  Antisense strand to SEQ ID NO: 1141024
ugucuugugacagaugugc

SEQ ID NO: 1141026 - RNA, 19 nt, Artificial Sequence
  Description of Artificial Sequence: Synthetic oligonucleotide
  Sense strand starting at position 1638 of SEQ ID NO: 916239
acuuaaccgcaugaaagua

SEQ ID NO: 1141027 - RNA, 19 nt, Artificial Sequence
  Description of Artificial Sequence: Synthetic oligonucleotide
  Antisense strand to SEQ ID NO: 1141026
uacuuucaugcgguuaagu

SEQ ID NO: 1141028 - RNA, 19 nt, Artificial Sequence
  Description of Artificial Sequence: Synthetic oligonucleotide
  Sense strand starting at position 1643 of SEQ ID NO: 916239
accgcaugaaaguaagaua

SEQ ID NO: 1141029 - RNA, 19 nt, Artificial Sequence
  Description of Artificial Sequence: Synthetic oligonucleotide
  Antisense strand to SEQ ID NO: 1141028
uaucuuacuuucaugcggu

SEQ ID NO: 1141030 - RNA, 19 nt, Artificial Sequence
  Description of Artificial Sequence: Synthetic oligonucleotide
  Sense strand starting at position 1646 of SEQ ID NO: 916239
gcaugaaaguaagauauuu

SEQ ID NO: 1141031 - RNA, 19 nt, Artificial Sequence
  Description of Artificial Sequence: Synthetic oligonucleotide
  Antisense strand to SEQ ID NO: 1141030
aaauaucuuacuuucaugc

SEQ ID NO: 1141032 - RNA, 19 nt, Artificial Sequence
  Description of Artificial Sequence: Synthetic oligonucleotide
  Sense strand starting at position 2381 of SEQ ID NO: 916239
ugcuguuggugaguacuaa

SEQ ID NO: 1141033 - RNA, 19 nt, Artificial Sequence
  Description of Artificial Sequence: Synthetic oligonucleotide
  Antisense strand to SEQ ID NO: 1141032
uuaguacucaccaacagca

SEQ ID NO: 1141034 - RNA, 19 nt, Artificial Sequence
  Description of Artificial Sequence: Synthetic oligonucleotide
  Sense strand starting at position 2382 of SEQ ID NO: 916239
gcuguuggugaguacuaaa

SEQ ID NO: 1141035 - RNA, 19 nt, Artificial Sequence
  Description of Artificial Sequence: Synthetic oligonucleotide
  Antisense strand to SEQ ID NO: 1141034
uuuaguacucaccaacagc

SEQ ID NO: 1141036 - RNA, 19 nt, Artificial Sequence
  Description of Artificial Sequence: Synthetic oligonucleotide
  Sense strand starting at position 2496 of SEQ ID NO: 916239
aacgauaauaguggaggua

SEQ ID NO: 1141037 - RNA, 19 nt, Artificial Sequence
  Description of Artificial Sequence: Synthetic oligonucleotide
  Antisense strand to SEQ ID NO: 1141036
uaccuccacuauuaucguu

SEQ ID NO: 1141038 - RNA, 19 nt, Artificial Sequence
  Description of Artificial Sequence: Synthetic oligonucleotide
  Sense strand starting at position 2514 of SEQ ID NO: 916239
aggguagucgccuuugguu

SEQ ID NO: 1141039 - RNA, 19 nt, Artificial Sequence
  Description of Artificial Sequence: Synthetic oligonucleotide
  Antisense strand to SEQ ID NO: 1141038
aaccaaaggcgacuacccu

SEQ ID NO: 1141040 - RNA, 19 nt, Artificial Sequence
  Description of Artificial Sequence: Synthetic oligonucleotide
  Sense strand starting at position 2526 of SEQ ID NO: 916239
uuugguuggugcuaacuga

SEQ ID NO: 1141041 - RNA, 19 nt, Artificial Sequence
  Description of Artificial Sequence: Synthetic oligonucleotide
  Antisense strand to SEQ ID NO: 1141040
ucaguuagcaccaaccaaa

SEQ ID NO: 1141042 - RNA, 19 nt, Artificial Sequence
  Description of Artificial Sequence: Synthetic oligonucleotide
  Sense strand starting at position 2549 of SEQ ID NO: 916239
ucugccauccugugguuua

SEQ ID NO: 1141043 - RNA, 19 nt, Artificial Sequence
  Description of Artificial Sequence: Synthetic oligonucleotide
  Antisense strand to SEQ ID NO: 1141042
uaaaccacaggauggcaga

SEQ ID NO: 1141044 - RNA, 19 nt, Artificial Sequence
  Description of Artificial Sequence: Synthetic oligonucleotide
  Sense strand starting at position 2550 of SEQ ID NO: 916239
cugccauccugugguuuau

SEQ ID NO: 1141045 - RNA, 19 nt, Artificial Sequence
  Description of Artificial Sequence: Synthetic oligonucleotide
  Antisense strand to SEQ ID NO: 1141044
auaaaccacaggauggcag

SEQ ID NO: 1141046 - RNA, 19 nt, Artificial Sequence
  Description of Artificial Sequence: Synthetic oligonucleotide
  Sense strand starting at position 2562 of SEQ ID NO: 916239
gguuuaucugcaggccuca

SEQ ID NO: 1141047 - RNA, 19 nt, Artificial Sequence
  Description of Artificial Sequence: Synthetic oligonucleotide
  Antisense strand to SEQ ID NO: 1141046
ugaggccugcagauaaacc

SEQ ID NO: 1141048 - RNA, 19 nt, Artificial Sequence
  Description of Artificial Sequence: Synthetic oligonucleotide
  Sense strand starting at position 2663 of SEQ ID NO: 916239
ugaggagucuauggagcau

SEQ ID NO: 1141049 - RNA, 19 nt, Artificial Sequence
  Description of Artificial Sequence: Synthetic oligonucleotide
  Antisense strand to SEQ ID NO: 1141048
augcuccauagacuccuca

SEQ ID NO: 1141050 - RNA, 19 nt, Artificial Sequence
  Description of Artificial Sequence: Synthetic oligonucleotide
  Sense strand starting at position 2778 of SEQ ID NO: 916239
ggcucuacgucucgaaguu

SEQ ID NO: 1141051 - RNA, 19 nt, Artificial Sequence
  Description of Artificial Sequence: Synthetic oligonucleotide
  Antisense strand to SEQ ID NO: 1141050
aacuucgagacguagagcc

SEQ ID NO: 1141052 - RNA, 19 nt, Artificial Sequence
  Description of Artificial Sequence: Synthetic oligonucleotide
  Sense strand starting at position 2991 of SEQ ID NO: 916239
auaugugagcucugagaaa

SEQ ID NO: 1141053 - RNA, 19 nt, Artificial Sequence
  Description of Artificial Sequence: Synthetic oligonucleotide
  Antisense strand to SEQ ID NO: 1141052
uuucucagagcucacauau

SEQ ID NO: 1141054 - RNA, 19 nt, Artificial Sequence
  Description of Artificial Sequence: Synthetic oligonucleotide
  Sense strand starting at position 3058 of SEQ ID NO: 916239
ugcccugccucuuuagauu

SEQ ID NO: 1141055 - RNA, 19 nt, Artificial Sequence
  Description of Artificial Sequence: Synthetic oligonucleotide
  Antisense strand to SEQ ID NO: 1141054
aaucuaaagaggcagggca

SEQ ID NO: 1141056 - RNA, 19 nt, Artificial Sequence
  Description of Artificial Sequence: Synthetic oligonucleotide
  Sense strand starting at position 3070 of SEQ ID NO: 916239
uuagauuugcauugccauc

SEQ ID NO: 1141057 - RNA, 19 nt, Artificial Sequence
  Description of Artificial Sequence: Synthetic oligonucleotide
  Antisense strand to SEQ ID NO: 1141056
gauggcaaugcaaaucuaa

SEQ ID NO: 1141058 - RNA, 19 nt, Artificial Sequence
  Description of Artificial Sequence: Synthetic oligonucleotide
  Sense strand starting at position 3081 of SEQ ID NO: 916239
uugccaucgugaccggaua

SEQ ID NO: 1141059 - RNA, 19 nt, Artificial Sequence
  Description of Artificial Sequence: Synthetic oligonucleotide
  Antisense strand to SEQ ID NO: 1141058
uauccggucacgauggcaa

SEQ ID NO: 1141060 - RNA, 19 nt, Artificial Sequence
  Description of Artificial Sequence: Synthetic oligonucleotide
  Sense strand starting at position 3083 of SEQ ID NO: 916239
gccaucgugaccggauaua

SEQ ID NO: 1141061 - RNA, 19 nt, Artificial Sequence
  Description of Artificial Sequence: Synthetic oligonucleotide
  Antisense strand to SEQ ID NO: 1141060
uauauccggucacgauggc

SEQ ID NO: 1141062 - RNA, 19 nt, Artificial Sequence
  Description of Artificial Sequence: Synthetic oligonucleotide
  Sense strand starting at position 3249 of SEQ ID NO: 916239
guggaaggucaguggguua

SEQ ID NO: 1141063 - RNA, 19 nt, Artificial Sequence
  Description of Artificial Sequence: Synthetic oligonucleotide
  Antisense strand to SEQ ID NO: 1141062
uaacccacugaccuuccac

SEQ ID NO: 1141064 - RNA, 19 nt, Artificial Sequence
  Description of Artificial Sequence: Synthetic oligonucleotide
  Sense strand starting at position 3270 of SEQ ID NO: 916239
uguucagucugagggucaa

SEQ ID NO: 1141065 - RNA, 19 nt, Artificial Sequence
  Description of Artificial Sequence: Synthetic oligonucleotide
  Antisense strand to SEQ ID NO: 1141064
uugacccucagacugaaca

SEQ ID NO: 1141066 - RNA, 19 nt, Artificial Sequence
  Description of Artificial Sequence: Synthetic oligonucleotide
  Sense strand starting at position 3324 of SEQ ID NO: 916239
gggacuuugacccaggcua

SEQ ID NO: 1141067 - RNA, 19 nt, Artificial Sequence
  Description of Artificial Sequence: Synthetic oligonucleotide
  Antisense strand to SEQ ID NO: 1141066
uagccugggucaaaguccc

SEQ ID NO: 1141068 - RNA, 19 nt, Artificial Sequence
  Description of Artificial Sequence: Synthetic oligonucleotide
  Sense strand starting at position 3452 of SEQ ID NO: 916239
aggagcuauuuauguauuu

SEQ ID NO: 1141069 - RNA, 19 nt, Artificial Sequence
  Description of Artificial Sequence: Synthetic oligonucleotide
  Antisense strand to SEQ ID NO: 1141068
aaauacauaaauagcuccu

SEQ ID NO: 1141070 - RNA, 19 nt, Artificial Sequence
  Description of Artificial Sequence: Synthetic oligonucleotide
  Sense strand starting at position 3544 of SEQ ID NO: 916239
gugugaucauagccucgaa

SEQ ID NO: 1141071 - RNA, 19 nt, Artificial Sequence
  Description of Artificial Sequence: Synthetic oligonucleotide
  Antisense strand to SEQ ID NO: 1141070
uucgaggcuaugaucacac

SEQ ID NO: 1141072 - RNA, 19 nt, Artificial Sequence
  Description of Artificial Sequence: Synthetic oligonucleotide
  Sense strand starting at position 3673 of SEQ ID NO: 916239
ucuauagaccagugagucu

SEQ ID NO: 1141073 - RNA, 19 nt, Artificial Sequence
  Description of Artificial Sequence: Synthetic oligonucleotide
  Antisense strand to SEQ ID NO: 1141072
agacucacuggucuauaga

SEQ ID NO: 1141074 - RNA, 19 nt, Artificial Sequence
  Description of Artificial Sequence: Synthetic oligonucleotide
  Sense strand starting at position 3699 of SEQ ID NO: 916239
uuugguuuccucuauacuc

SEQ ID NO: 1141075 - RNA, 19 nt, Artificial Sequence
  Description of Artificial Sequence: Synthetic oligonucleotide
  Antisense strand to SEQ ID NO: 1141074
gaguauagaggaaaccaaa

SEQ ID NO: 1141076 - RNA, 19 nt, Artificial Sequence
  Description of Artificial Sequence: Synthetic oligonucleotide
  Sense strand starting at position 9 of SEQ ID NO: 916240
gagggaaguuugcaaauga

SEQ ID NO: 1141077 - RNA, 19 nt, Artificial Sequence
  Description of Artificial Sequence: Synthetic oligonucleotide
  Antisense strand to SEQ ID NO: 1141076
ucauuugcaaacuucccuc

SEQ ID NO: 1141078 - RNA, 19 nt, Artificial Sequence
  Description of Artificial Sequence: Synthetic oligonucleotide
  Sense strand starting at position 231 of SEQ ID NO: 916240
gugagaguucgggauggga

SEQ ID NO: 1141079 - RNA, 19 nt, Artificial Sequence
  Description of Artificial Sequence: Synthetic oligonucleotide
  Antisense strand to SEQ ID NO: 1141078
ucccaucccgaacucucac

SEQ ID NO: 1141080 - RNA, 19 nt, Artificial Sequence
  Description of Artificial Sequence: Synthetic oligonucleotide
  Sense strand starting at position 233 of SEQ ID NO: 916240
gagaguucgggaugggaca

SEQ ID NO: 1141081 - RNA, 19 nt, Artificial Sequence
  Description of Artificial Sequence: Synthetic oligonucleotide
  Antisense strand to SEQ ID NO: 1141080
ugucccaucccgaacucuc

SEQ ID NO: 1141082 - RNA, 19 nt, Artificial Sequence
  Description of Artificial Sequence: Synthetic oligonucleotide
  Sense strand starting at position 651 of SEQ ID NO: 916240
gagaaagugacugggucaa

SEQ ID NO: 1141083 - RNA, 19 nt, Artificial Sequence
  Description of Artificial Sequence: Synthetic oligonucleotide
  Antisense strand to SEQ ID NO: 1141082
uugacccagucacuuucuc

SEQ ID NO: 1141084 - RNA, 19 nt, Artificial Sequence
  Description of Artificial Sequence: Synthetic oligonucleotide
  Sense strand starting at position 653 of SEQ ID NO: 916240
gaaagugacugggucaaua

SEQ ID NO: 1141085 - RNA, 19 nt, Artificial Sequence
  Description of Artificial Sequence: Synthetic oligonucleotide
  Antisense strand to SEQ ID NO: 1141084
uauugacccagucacuuuc

SEQ ID NO: 1141086 - RNA, 19 nt, Artificial Sequence
  Description of Artificial Sequence: Synthetic oligonucleotide
  Sense strand starting at position 709 of SEQ ID NO: 916240
accuuagguugcugguuau

SEQ ID NO: 1141087 - RNA, 19 nt, Artificial Sequence
  Description of Artificial Sequence: Synthetic oligonucleotide
  Antisense strand to SEQ ID NO: 1141086
auaaccagcaaccuaaggu

SEQ ID NO: 1141088 - RNA, 19 nt, Artificial Sequence
  Description of Artificial Sequence: Synthetic oligonucleotide
  Sense strand starting at position 733 of SEQ ID NO: 916240
ccggcuucccaaggguuaa

SEQ ID NO: 1141089 - RNA, 19 nt, Artificial Sequence
  Description of Artificial Sequence: Synthetic oligonucleotide
  Antisense strand to SEQ ID NO: 1141088
uuaacccuugggaagccgg

SEQ ID NO: 1141090 - RNA, 19 nt, Artificial Sequence
  Description of Artificial Sequence: Synthetic oligonucleotide
  Sense strand starting at position 998 of SEQ ID NO: 916240
ccguaauccugucccgaaa

SEQ ID NO: 1141091 - RNA, 19 nt, Artificial Sequence
  Description of Artificial Sequence: Synthetic oligonucleotide
  Antisense strand to SEQ ID NO: 1141090
uuucgggacaggauuacgg

SEQ ID NO: 1141092 - RNA, 19 nt, Artificial Sequence
  Description of Artificial Sequence: Synthetic oligonucleotide
  Sense strand starting at position 1001 of SEQ ID NO: 916240
uaauccugucccgaaagcu

SEQ ID NO: 1141093 - RNA, 19 nt, Artificial Sequence
  Description of Artificial Sequence: Synthetic oligonucleotide
  Antisense strand to SEQ ID NO: 1141092
agcuuucgggacaggauua

SEQ ID NO: 1141094 - RNA, 19 nt, Artificial Sequence
  Description of Artificial Sequence: Synthetic oligonucleotide
  Sense strand starting at position 1233 of SEQ ID NO: 916240
cggugguccugaggucaga

SEQ ID NO: 1141095 - RNA, 19 nt, Artificial Sequence
  Description of Artificial Sequence: Synthetic oligonucleotide
  Antisense strand to SEQ ID NO: 1141094
ucugaccucaggaccaccg

SEQ ID NO: 1141096 - RNA, 19 nt, Artificial Sequence
  Description of Artificial Sequence: Synthetic oligonucleotide
  Sense strand starting at position 1433 of SEQ ID NO: 916240
uggcacaucugucacaaga

SEQ ID NO: 1141097 - RNA, 19 nt, Artificial Sequence
  Description of Artificial Sequence: Synthetic oligonucleotide
  Antisense strand to SEQ ID NO: 1141096
ucuugugacagaugugcca

SEQ ID NO: 1141098 - RNA, 19 nt, Artificial Sequence
  Description of Artificial Sequence: Synthetic oligonucleotide
  Sense strand starting at position 1435 of SEQ ID NO: 916240
gcacaucugucacaagaca

SEQ ID NO: 1141099 - RNA, 19 nt, Artificial Sequence
  Description of Artificial Sequence: Synthetic oligonucleotide
  Antisense strand to SEQ ID NO: 1141098
ugucuugugacagaugugc

SEQ ID NO: 1141100 - RNA, 19 nt, Artificial Sequence
  Description of Artificial Sequence: Synthetic oligonucleotide
  Sense strand starting at position 1654 of SEQ ID NO: 916240
acuuaaccgcaugaaagua

SEQ ID NO: 1141101 - RNA, 19 nt, Artificial Sequence
  Description of Artificial Sequence: Synthetic oligonucleotide
  Antisense strand to SEQ ID NO: 1141100
uacuuucaugcgguuaagu

SEQ ID NO: 1141102 - RNA, 19 nt, Artificial Sequence
  Description of Artificial Sequence: Synthetic oligonucleotide
  Sense strand starting at position 1659 of SEQ ID NO: 916240
accgcaugaaaguaagaua

SEQ ID NO: 1141103 - RNA, 19 nt, Artificial Sequence
  Description of Artificial Sequence: Synthetic oligonucleotide
  Antisense strand to SEQ ID NO: 1141102
uaucuuacuuucaugcggu

SEQ ID NO: 1141104 - RNA, 19 nt, Artificial Sequence
  Description of Artificial Sequence: Synthetic oligonucleotide
  Sense strand starting at position 1662 of SEQ ID NO: 916240
gcaugaaaguaagauauuu

SEQ ID NO: 1141105 - RNA, 19 nt, Artificial Sequence
  Description of Artificial Sequence: Synthetic oligonucleotide
  Antisense strand to SEQ ID NO: 1141104
aaauaucuuacuuucaugc

SEQ ID NO: 1141106 - RNA, 19 nt, Artificial Sequence
  Description of Artificial Sequence: Synthetic oligonucleotide
  Sense strand starting at position 2397 of SEQ ID NO: 916240
ugcuguuggugaguacuaa

SEQ ID NO: 1141107 - RNA, 19 nt, Artificial Sequence
  Description of Artificial Sequence: Synthetic oligonucleotide
  Antisense strand to SEQ ID NO: 1141106
uuaguacucaccaacagca

SEQ ID NO: 1141108 - RNA, 19 nt, Artificial Sequence
  Description of Artificial Sequence: Synthetic oligonucleotide
  Sense strand starting at position 2398 of SEQ ID NO: 916240
gcuguuggugaguacuaaa

SEQ ID NO: 1141109 - RNA, 19 nt, Artificial Sequence
  Description of Artificial Sequence: Synthetic oligonucleotide
  Antisense strand to SEQ ID NO: 1141108
uuuaguacucaccaacagc

SEQ ID NO: 1141110 - RNA, 19 nt, Artificial Sequence
  Description of Artificial Sequence: Synthetic oligonucleotide
  Sense strand starting at position 2512 of SEQ ID NO: 916240
aacgauaauaguggaggua

SEQ ID NO: 1141111 - RNA, 19 nt, Artificial Sequence
  Description of Artificial Sequence: Synthetic oligonucleotide
  Antisense strand to SEQ ID NO: 1141110
uaccuccacuauuaucguu

SEQ ID NO: 1141112 - RNA, 19 nt, Artificial Sequence
  Description of Artificial Sequence: Synthetic oligonucleotide
  Sense strand starting at position 2530 of SEQ ID NO: 916240
aggguagucgccuuugguu

SEQ ID NO: 1141113 - RNA, 19 nt, Artificial Sequence
  Description of Artificial Sequence: Synthetic oligonucleotide
  Antisense strand to SEQ ID NO: 1141112
aaccaaaggcgacuacccu

SEQ ID NO: 1141114 - RNA, 19 nt, Artificial Sequence
  Description of Artificial Sequence: Synthetic oligonucleotide
  Sense strand starting at position 2542 of SEQ ID NO: 916240
uuugguuggugcuaacuga

SEQ ID NO: 1141115 - RNA, 19 nt, Artificial Sequence
  Description of Artificial Sequence: Synthetic oligonucleotide
  Antisense strand to SEQ ID NO: 1141114
ucaguuagcaccaaccaaa

SEQ ID NO: 1141116 - RNA, 19 nt, Artificial Sequence
  Description of Artificial Sequence: Synthetic oligonucleotide
  Sense strand starting at position 2565 of SEQ ID NO: 916240
ucugccauccugugguuua

SEQ ID NO: 1141117 - RNA, 19 nt, Artificial Sequence
  Description of Artificial Sequence: Synthetic oligonucleotide
  Antisense strand to SEQ ID NO: 1141116
uaaaccacaggauggcaga

SEQ ID NO: 1141118 - RNA, 19 nt, Artificial Sequence
  Description of Artificial Sequence: Synthetic oligonucleotide
  Sense strand starting at position 2566 of SEQ ID NO: 916240
cugccauccugugguuuau

SEQ ID NO: 1141119 - RNA, 19 nt, Artificial Sequence
  Description of Artificial Sequence: Synthetic oligonucleotide
  Antisense strand to SEQ ID NO: 1141118
auaaaccacaggauggcag

SEQ ID NO: 1141120 - RNA, 19 nt, Artificial Sequence
  Description of Artificial Sequence: Synthetic oligonucleotide
  Sense strand starting at position 2578 of SEQ ID NO: 916240
gguuuaucugcaggccuca

SEQ ID NO: 1141121 - RNA, 19 nt, Artificial Sequence
  Description of Artificial Sequence: Synthetic oligonucleotide
  Antisense strand to SEQ ID NO: 1141120
ugaggccugcagauaaacc

SEQ ID NO: 1141122 - RNA, 19 nt, Artificial Sequence
  Description of Artificial Sequence: Synthetic oligonucleotide
  Sense strand starting at position 2679 of SEQ ID NO: 916240
ugaggagucuauggagcau

SEQ ID NO: 1141123 - RNA, 19 nt, Artificial Sequence
  Description of Artificial Sequence: Synthetic oligonucleotide
  Antisense strand to SEQ ID NO: 1141122
augcuccauagacuccuca

SEQ ID NO: 1141124 - RNA, 19 nt, Artificial Sequence
  Description of Artificial Sequence: Synthetic oligonucleotide
  Sense strand starting at position 2794 of SEQ ID NO: 916240
ggcucuacgucucgaaguu

SEQ ID NO: 1141125 - RNA, 19 nt, Artificial Sequence
  Description of Artificial Sequence: Synthetic oligonucleotide
  Antisense strand to SEQ ID NO: 1141124
aacuucgagacguagagcc

SEQ ID NO: 1141126 - RNA, 19 nt, Artificial Sequence
  Description of Artificial Sequence: Synthetic oligonucleotide
  Sense strand starting at position 3007 of SEQ ID NO: 916240
auaugugagcucugagaaa

SEQ ID NO: 1141127 - RNA, 19 nt, Artificial Sequence
  Description of Artificial Sequence: Synthetic oligonucleotide
  Antisense strand to SEQ ID NO: 1141126
uuucucagagcucacauau

SEQ ID NO: 1141128 - RNA, 19 nt, Artificial Sequence
  Description of Artificial Sequence: Synthetic oligonucleotide
  Sense strand starting at position 3074 of SEQ ID NO: 916240
ugcccugccucuuuagauu

SEQ ID NO: 1141129 - RNA, 19 nt, Artificial Sequence
  Description of Artificial Sequence: Synthetic oligonucleotide
  Antisense strand to SEQ ID NO: 1141128
aaucuaaagaggcagggca

SEQ ID NO: 1141130 - RNA, 19 nt, Artificial Sequence
  Description of Artificial Sequence: Synthetic oligonucleotide
  Sense strand starting at position 3086 of SEQ ID NO: 916240
uuagauuugcauugccauc

SEQ ID NO: 1141131 - RNA, 19 nt, Artificial Sequence
  Description of Artificial Sequence: Synthetic oligonucleotide
  Antisense strand to SEQ ID NO: 1141130
gauggcaaugcaaaucuaa

SEQ ID NO: 1141132 - RNA, 19 nt, Artificial Sequence
  Description of Artificial Sequence: Synthetic oligonucleotide
  Sense strand starting at position 3097 of SEQ ID NO: 916240
uugccaucgugaccggaua

SEQ ID NO: 1141133 - RNA, 19 nt, Artificial Sequence
  Description of Artificial Sequence: Synthetic oligonucleotide
  Antisense strand to SEQ ID NO: 1141132
uauccggucacgauggcaa

SEQ ID NO: 1141134 - RNA, 19 nt, Artificial Sequence
  Description of Artificial Sequence: Synthetic oligonucleotide
  Sense strand starting at position 3099 of SEQ ID NO: 916240
gccaucgugaccggauaua

SEQ ID NO: 1141135 - RNA, 19 nt, Artificial Sequence
  Description of Artificial Sequence: Synthetic oligonucleotide
  Antisense strand to SEQ ID NO: 1141134
uauauccggucacgauggc

SEQ ID NO: 1141136 - RNA, 19 nt, Artificial Sequence
  Description of Artificial Sequence: Synthetic oligonucleotide
  Sense strand starting at position 3265 of SEQ ID NO: 916240
guggaaggucaguggguua

SEQ ID NO: 1141137 - RNA, 19 nt, Artificial Sequence
  Description of Artificial Sequence: Synthetic oligonucleotide
  Antisense strand to SEQ ID NO: 1141136
uaacccacugaccuuccac

SEQ ID NO: 1141138 - RNA, 19 nt, Artificial Sequence
  Description of Artificial Sequence: Synthetic oligonucleotide
  Sense strand starting at position 3286 of SEQ ID NO: 916240
uguucagucugagggucaa

SEQ ID NO: 1141139 - RNA, 19 nt, Artificial Sequence
  Description of Artificial Sequence: Synthetic oligonucleotide
  Antisense strand to SEQ ID NO: 1141138
uugacccucagacugaaca

SEQ ID NO: 1141140 - RNA, 19 nt, Artificial Sequence
  Description of Artificial Sequence: Synthetic oligonucleotide
  Sense strand starting at position 3340 of SEQ ID NO: 916240
gggacuuugacccaggcua

SEQ ID NO: 1141141 - RNA, 19 nt, Artificial Sequence
  Description of Artificial Sequence: Synthetic oligonucleotide
  Antisense strand to SEQ ID NO: 1141140
uagccugggucaaaguccc

SEQ ID NO: 1141142 - RNA, 19 nt, Artificial Sequence
  Description of Artificial Sequence: Synthetic oligonucleotide
  Sense strand starting at position 3468 of SEQ ID NO: 916240
aggagcuauuuauguauuu

SEQ ID NO: 1141143 - RNA, 19 nt, Artificial Sequence
  Description of Artificial Sequence: Synthetic oligonucleotide
  Antisense strand to SEQ ID NO: 1141142
aaauacauaaauagcuccu

SEQ ID NO: 1141144 - RNA, 19 nt, Artificial Sequence
  Description of Artificial Sequence: Synthetic oligonucleotide
  Sense strand starting at position 3560 of SEQ ID NO: 916240
gugugaucauagccucgaa

SEQ ID NO: 1141145 - RNA, 19 nt, Artificial Sequence
  Description of Artificial Sequence: Synthetic oligonucleotide
  Antisense strand to SEQ ID NO: 1141144
uucgaggcuaugaucacac

SEQ ID NO: 1141146 - RNA, 19 nt, Artificial Sequence
  Description of Artificial Sequence: Synthetic oligonucleotide
  Sense strand starting at position 3689 of SEQ ID NO: 916240
ucuauagaccagugagucu

SEQ ID NO: 1141147 - RNA, 19 nt, Artificial Sequence
  Description of Artificial Sequence: Synthetic oligonucleotide
  Antisense strand to SEQ ID NO: 1141146
agacucacuggucuauaga

SEQ ID NO: 1141148 - RNA, 19 nt, Artificial Sequence
  Description of Artificial Sequence: Synthetic oligonucleotide
  Sense strand starting at position 3715 of SEQ ID NO: 916240
uuugguuuccucuauacuc

SEQ ID NO: 1141149 - RNA, 19 nt, Artificial Sequence
  Description of Artificial Sequence: Synthetic oligonucleotide
  Antisense strand to SEQ ID NO: 1141148
gaguauagaggaaaccaaa

SEQ ID NO: 1141150 - RNA, 19 nt, Artificial Sequence
  Description of Artificial Sequence: Synthetic oligonucleotide
  Sense strand starting at position 360 of SEQ ID NO: 916241
cucauaagguucuuugauu

SEQ ID NO: 1141151 - RNA, 19 nt, Artificial Sequence
  Description of Artificial Sequence: Synthetic oligonucleotide
  Antisense strand to SEQ ID NO: 1141150
aaucaaagaaccuuaugag

SEQ ID NO: 1141152 - RNA, 19 nt, Artificial Sequence
  Description of Artificial Sequence: Synthetic oligonucleotide
  Sense strand starting at position 372 of SEQ ID NO: 916241
uuugauuucucacaaaugg

SEQ ID NO: 1141153 - RNA, 19 nt, Artificial Sequence
  Description of Artificial Sequence: Synthetic oligonucleotide
  Antisense strand to SEQ ID NO: 1141152
ccauuugugagaaaucaaa

SEQ ID NO: 1141154 - RNA, 19 nt, Artificial Sequence
  Description of Artificial Sequence: Synthetic oligonucleotide
  Sense strand starting at position 519 of SEQ ID NO: 916241
cuuggaggcuguucuauuu

SEQ ID NO: 1141155 - RNA, 19 nt, Artificial Sequence
  Description of Artificial Sequence: Synthetic oligonucleotide
  Antisense strand to SEQ ID NO: 1141154
aaauagaacagccuccaag

SEQ ID NO: 1141156 - RNA, 19 nt, Artificial Sequence
  Description of Artificial Sequence: Synthetic oligonucleotide
  Sense strand starting at position 556 of SEQ ID NO: 916241
gguauacuagcauacuaua

SEQ ID NO: 1141157 - RNA, 19 nt, Artificial Sequence
  Description of Artificial Sequence: Synthetic oligonucleotide
  Antisense strand to SEQ ID NO: 1141156
uauaguaugcuaguauacc

SEQ ID NO: 1141158 - RNA, 19 nt, Artificial Sequence
  Description of Artificial Sequence: Synthetic oligonucleotide
  Sense strand starting at position 645 of SEQ ID NO: 916241
agauccuuaccugagugua

SEQ ID NO: 1141159 - RNA, 19 nt, Artificial Sequence
  Description of Artificial Sequence: Synthetic oligonucleotide
  Antisense strand to SEQ ID NO: 1141158
uacacucagguaaggaucu

SEQ ID NO: 1141160 - RNA, 19 nt, Artificial Sequence
  Description of Artificial Sequence: Synthetic oligonucleotide
  Sense strand starting at position 950 of SEQ ID NO: 916241
gggugaguacagugggaau

SEQ ID NO: 1141161 - RNA, 19 nt, Artificial Sequence
  Description of Artificial Sequence: Synthetic oligonucleotide
  Antisense strand to SEQ ID NO: 1141160
auucccacuguacucaccc

SEQ ID NO: 1141162 - RNA, 19 nt, Artificial Sequence
  Description of Artificial Sequence: Synthetic oligonucleotide
  Sense strand starting at position 998 of SEQ ID NO: 916241
agaagauaccacugcauau

SEQ ID NO: 1141163 - RNA, 19 nt, Artificial Sequence
  Description of Artificial Sequence: Synthetic oligonucleotide
  Antisense strand to SEQ ID NO: 1141162
auaugcagugguaucuucu

SEQ ID NO: 1141164 - RNA, 19 nt, Artificial Sequence
  Description of Artificial Sequence: Synthetic oligonucleotide
  Sense strand starting at position 1011 of SEQ ID NO: 916241
gcauaugaguccucuauaa

SEQ ID NO: 1141165 - RNA, 19 nt, Artificial Sequence
  Description of Artificial Sequence: Synthetic oligonucleotide
  Antisense strand to SEQ ID NO: 1141164
uuauagaggacucauaugc

SEQ ID NO: 1141166 - RNA, 19 nt, Artificial Sequence
  Description of Artificial Sequence: Synthetic oligonucleotide
  Sense strand starting at position 1060 of SEQ ID NO: 916241
uaggaaacgugacaauuua

SEQ ID NO: 1141167 - RNA, 19 nt, Artificial Sequence
  Description of Artificial Sequence: Synthetic oligonucleotide
  Antisense strand to SEQ ID NO: 1141166
uaaauugucacguuuccua

SEQ ID NO: 1141168 - RNA, 19 nt, Artificial Sequence
  Description of Artificial Sequence: Synthetic oligonucleotide
  Sense strand starting at position 1536 of SEQ ID NO: 916241
uugaucacagacugugaau

SEQ ID NO: 1141169 - RNA, 19 nt, Artificial Sequence
  Description of Artificial Sequence: Synthetic oligonucleotide
  Antisense strand to SEQ ID NO: 1141168
auucacagucugugaucaa

SEQ ID NO: 1141170 - RNA, 19 nt, Artificial Sequence
  Description of Artificial Sequence: Synthetic oligonucleotide
  Sense strand starting at position 1539 of SEQ ID NO: 916241
aucacagacugugaauuua

SEQ ID NO: 1141171 - RNA, 19 nt, Artificial Sequence
  Description of Artificial Sequence: Synthetic oligonucleotide
  Antisense strand to SEQ ID NO: 1141170
uaaauucacagucugugau

SEQ ID NO: 1141172 - RNA, 19 nt, Artificial Sequence
  Description of Artificial Sequence: Synthetic oligonucleotide
  Sense strand starting at position 1593 of SEQ ID NO: 916241
caguauuacgaagguauua

SEQ ID NO: 1141173 - RNA, 19 nt, Artificial Sequence
  Description of Artificial Sequence: Synthetic oligonucleotide
  Antisense strand to SEQ ID NO: 1141172
uaauaccuucguaauacug

SEQ ID NO: 1141174 - RNA, 19 nt, Artificial Sequence
  Description of Artificial Sequence: Synthetic oligonucleotide
  Sense strand starting at position 1595 of SEQ ID NO: 916241
guauuacgaagguauuaac

SEQ ID NO: 1141175 - RNA, 19 nt, Artificial Sequence
  Description of Artificial Sequence: Synthetic oligonucleotide
  Antisense strand to SEQ ID NO: 1141174
guuaauaccuucguaauac

SEQ ID NO: 1141176 - RNA, 19 nt, Artificial Sequence
  Description of Artificial Sequence: Synthetic oligonucleotide
  Sense strand starting at position 2009 of SEQ ID NO: 916241
agaaacggguuucuccaua

SEQ ID NO: 1141177 - RNA, 19 nt, Artificial Sequence
  Description of Artificial Sequence: Synthetic oligonucleotide
  Antisense strand to SEQ ID NO: 1141176
uauggagaaacccguuucu

SEQ ID NO: 1141178 - RNA, 19 nt, Artificial Sequence
  Description of Artificial Sequence: Synthetic oligonucleotide
  Sense strand starting at position 2014 of SEQ ID NO: 916241
cggguuucuccauauaugg

SEQ ID NO: 1141179 - RNA, 19 nt, Artificial Sequence
  Description of Artificial Sequence: Synthetic oligonucleotide
  Antisense strand to SEQ ID NO: 1141178
ccauauauggagaaacccg

SEQ ID NO: 1141180 - RNA, 19 nt, Artificial Sequence
  Description of Artificial Sequence: Synthetic oligonucleotide
  Sense strand starting at position 2295 of SEQ ID NO: 916241
aacacauagugguuggaau

SEQ ID NO: 1141181 - RNA, 19 nt, Artificial Sequence
  Description of Artificial Sequence: Synthetic oligonucleotide
  Antisense strand to SEQ ID NO: 1141180
auuccaaccacuauguguu

SEQ ID NO: 1141182 - RNA, 19 nt, Artificial Sequence
  Description of Artificial Sequence: Synthetic oligonucleotide
  Sense strand starting at position 2296 of SEQ ID NO: 916241
acacauagugguuggaaua

SEQ ID NO: 1141183 - RNA, 19 nt, Artificial Sequence
  Description of Artificial Sequence: Synthetic oligonucleotide
  Antisense strand to SEQ ID NO: 1141182
uauuccaaccacuaugugu

SEQ ID NO: 1141184 - RNA, 19 nt, Artificial Sequence
  Description of Artificial Sequence: Synthetic oligonucleotide
  Sense strand starting at position 2297 of SEQ ID NO: 916241
cacauagugguuggaauau

SEQ ID NO: 1141185 - RNA, 19 nt, Artificial Sequence
  Description of Artificial Sequence: Synthetic oligonucleotide
  Antisense strand to SEQ ID NO: 1141184
auauuccaaccacuaugug

SEQ ID NO: 1141186 - RNA, 19 nt, Artificial Sequence
  Description of Artificial Sequence: Synthetic oligonucleotide
  Sense strand starting at position 2308 of SEQ ID NO: 916241
uggaauaucugguuaacau

SEQ ID NO: 1141187 - RNA, 19 nt, Artificial Sequence
  Description of Artificial Sequence: Synthetic oligonucleotide
  Antisense strand to SEQ ID NO: 1141186
auguuaaccagauauucca

SEQ ID NO: 1141188 - RNA, 19 nt, Artificial Sequence
  Description of Artificial Sequence: Synthetic oligonucleotide
  Sense strand starting at position 2482 of SEQ ID NO: 916241
gacucaaguugagaauuua

SEQ ID NO: 1141189 - RNA, 19 nt, Artificial Sequence
  Description of Artificial Sequence: Synthetic oligonucleotide
  Antisense strand to SEQ ID NO: 1141188
uaaauucucaacuugaguc

SEQ ID NO: 1141190 - RNA, 19 nt, Artificial Sequence
  Description of Artificial Sequence: Synthetic oligonucleotide
  Sense strand starting at position 2518 of SEQ ID NO: 916241
gcuguaagaccuuggacag

SEQ ID NO: 1141191 - RNA, 19 nt, Artificial Sequence
  Description of Artificial Sequence: Synthetic oligonucleotide
  Antisense strand to SEQ ID NO: 1141190
cuguccaaggucuuacagc

SEQ ID NO: 1141192 - RNA, 19 nt, Artificial Sequence
  Description of Artificial Sequence: Synthetic oligonucleotide
  Sense strand starting at position 2561 of SEQ ID NO: 916241
ccaccuauugaaugagacu

SEQ ID NO: 1141193 - RNA, 19 nt, Artificial Sequence
  Description of Artificial Sequence: Synthetic oligonucleotide
  Antisense strand to SEQ ID NO: 1141192
agucucauucaauaggugg

SEQ ID NO: 1141194 - RNA, 19 nt, Artificial Sequence
  Description of Artificial Sequence: Synthetic oligonucleotide
  Sense strand starting at position 2608 of SEQ ID NO: 916241
agagguuuggcaggaucaa

SEQ ID NO: 1141195 - RNA, 19 nt, Artificial Sequence
  Description of Artificial Sequence: Synthetic oligonucleotide
  Antisense strand to SEQ ID NO: 1141194
uugauccugccaaaccucu

SEQ ID NO: 1141196 - RNA, 19 nt, Artificial Sequence
  Description of Artificial Sequence: Synthetic oligonucleotide
  Sense strand starting at position 2707 of SEQ ID NO: 916241
ggagcuuacagugguaaga

SEQ ID NO: 1141197 - RNA, 19 nt, Artificial Sequence
  Description of Artificial Sequence: Synthetic oligonucleotide
  Antisense strand to SEQ ID NO: 1141196
ucuuaccacuguaagcucc

SEQ ID NO: 1141198 - RNA, 19 nt, Artificial Sequence
  Description of Artificial Sequence: Synthetic oligonucleotide
  Sense strand starting at position 2718 of SEQ ID NO: 916241
ugguaagagcugugagaug

SEQ ID NO: 1141199 - RNA, 19 nt, Artificial Sequence
  Description of Artificial Sequence: Synthetic oligonucleotide
  Antisense strand to SEQ ID NO: 1141198
caucucacagcucuuacca

SEQ ID NO: 1141200 - RNA, 19 nt, Artificial Sequence
  Description of Artificial Sequence: Synthetic oligonucleotide
  Sense strand starting at position 2723 of SEQ ID NO: 916241
agagcugugagauggugau

SEQ ID NO: 1141201 - RNA, 19 nt, Artificial Sequence
  Description of Artificial Sequence: Synthetic oligonucleotide
  Antisense strand to SEQ ID NO: 1141200
aucaccaucucacagcucu

SEQ ID NO: 1141202 - RNA, 19 nt, Artificial Sequence
  Description of Artificial Sequence: Synthetic oligonucleotide
  Sense strand starting at position 2735 of SEQ ID NO: 916241
uggugaugacaaggauguu

SEQ ID NO: 1141203 - RNA, 19 nt, Artificial Sequence
  Description of Artificial Sequence: Synthetic oligonucleotide
  Antisense strand to SEQ ID NO: 1141202
aacauccuugucaucacca

SEQ ID NO: 1141204 - RNA, 19 nt, Artificial Sequence
  Description of Artificial Sequence: Synthetic oligonucleotide
  Sense strand starting at position 2894 of SEQ ID NO: 916241
cuagguguugaucaaguga

SEQ ID NO: 1141205 - RNA, 19 nt, Artificial Sequence
  Description of Artificial Sequence: Synthetic oligonucleotide
  Antisense strand to SEQ ID NO: 1141204
ucacuugaucaacaccuag

SEQ ID NO: 1141206 - RNA, 19 nt, Artificial Sequence
  Description of Artificial Sequence: Synthetic oligonucleotide
  Sense strand starting at position 2953 of SEQ ID NO: 916241
cuauauaucuaguugugaa

SEQ ID NO: 1141207 - RNA, 19 nt, Artificial Sequence
  Description of Artificial Sequence: Synthetic oligonucleotide
  Antisense strand to SEQ ID NO: 1141206
uucacaacuagauauauag

SEQ ID NO: 1141208 - RNA, 19 nt, Artificial Sequence
  Description of Artificial Sequence: Synthetic oligonucleotide
  Sense strand starting at position 2971 of SEQ ID NO: 916241
aauugaagacaugguguua

SEQ ID NO: 1141209 - RNA, 19 nt, Artificial Sequence
  Description of Artificial Sequence: Synthetic oligonucleotide
  Antisense strand to SEQ ID NO: 1141208
uaacaccaugucuucaauu

SEQ ID NO: 1141210 - RNA, 19 nt, Artificial Sequence
  Description of Artificial Sequence: Synthetic oligonucleotide
  Sense strand starting at position 2984 of SEQ ID NO: 916241
guguuauggcaagaauaga

SEQ ID NO: 1141211 - RNA, 19 nt, Artificial Sequence
  Description of Artificial Sequence: Synthetic oligonucleotide
  Antisense strand to SEQ ID NO: 1141210
ucuauucuugccauaacac

SEQ ID NO: 1141212 - RNA, 19 nt, Artificial Sequence
  Description of Artificial Sequence: Synthetic oligonucleotide
  Sense strand starting at position 3021 of SEQ ID NO: 916241
ugucucccucuguaaauau

SEQ ID NO: 1141213 - RNA, 19 nt, Artificial Sequence
  Description of Artificial Sequence: Synthetic oligonucleotide
  Antisense strand to SEQ ID NO: 1141212
auauuuacagagggagaca

SEQ ID NO: 1141214 - RNA, 19 nt, Artificial Sequence
  Description of Artificial Sequence: Synthetic oligonucleotide
  Sense strand starting at position 3032 of SEQ ID NO: 916241
guaaauauggucuguaaau

SEQ ID NO: 1141215 - RNA, 19 nt, Artificial Sequence
  Description of Artificial Sequence: Synthetic oligonucleotide
  Antisense strand to SEQ ID NO: 1141214
auuuacagaccauauuuac

SEQ ID NO: 1141216 - RNA, 19 nt, Artificial Sequence
  Description of Artificial Sequence: Synthetic oligonucleotide
  Sense strand starting at position 3054 of SEQ ID NO: 916241
uagugauucugacugguag

SEQ ID NO: 1141217 - RNA, 19 nt, Artificial Sequence
  Description of Artificial Sequence: Synthetic oligonucleotide
  Antisense strand to SEQ ID NO: 1141216
cuaccagucagaaucacua

SEQ ID NO: 1141218 - RNA, 19 nt, Artificial Sequence
  Description of Artificial Sequence: Synthetic oligonucleotide
  Sense strand starting at position 3055 of SEQ ID NO: 916241
agugauucugacugguaga

SEQ ID NO: 1141219 - RNA, 19 nt, Artificial Sequence
  Description of Artificial Sequence: Synthetic oligonucleotide
  Antisense strand to SEQ ID NO: 1141218
ucuaccagucagaaucacu

SEQ ID NO: 1141220 - RNA, 19 nt, Artificial Sequence
  Description of Artificial Sequence: Synthetic oligonucleotide
  Sense strand starting at position 3056 of SEQ ID NO: 916241
gugauucugacugguagaa

SEQ ID NO: 1141221 - RNA, 19 nt, Artificial Sequence
  Description of Artificial Sequence: Synthetic oligonucleotide
  Antisense strand to SEQ ID NO: 1141220
uucuaccagucagaaucac

SEQ ID NO: 1141222 - RNA, 19 nt, Artificial Sequence
  Description of Artificial Sequence: Synthetic oligonucleotide
  Sense strand starting at position 3198 of SEQ ID NO: 916241
caccaaagucaugggaagu

SEQ ID NO: 1141223 - RNA, 19 nt, Artificial Sequence
  Description of Artificial Sequence: Synthetic oligonucleotide
  Antisense strand to SEQ ID NO: 1141222
acuucccaugacuuuggug

SEQ ID NO: 1141224 - RNA, 19 nt, Artificial Sequence
  Description of Artificial Sequence: Synthetic oligonucleotide
  Sense strand starting at position 3199 of SEQ ID NO: 916241
accaaagucaugggaaguu

SEQ ID NO: 1141225 - RNA, 19 nt, Artificial Sequence
  Description of Artificial Sequence: Synthetic oligonucleotide
  Antisense strand to SEQ ID NO: 1141224
aacuucccaugacuuuggu

SEQ ID NO: 1141226 - RNA, 19 nt, Artificial Sequence
  Description of Artificial Sequence: Synthetic oligonucleotide
  Sense strand starting at position 3313 of SEQ ID NO: 916241
gggaaauauuucuaaugca

SEQ ID NO: 1141227 - RNA, 19 nt, Artificial Sequence
  Description of Artificial Sequence: Synthetic oligonucleotide
  Antisense strand to SEQ ID NO: 1141226
ugcauuagaaauauuuccc

SEQ ID NO: 1141228 - RNA, 19 nt, Artificial Sequence
  Description of Artificial Sequence: Synthetic oligonucleotide
  Sense strand starting at position 3924 of SEQ ID NO: 916241
cuagcaugucuuuacauua

SEQ ID NO: 1141229 - RNA, 19 nt, Artificial Sequence
  Description of Artificial Sequence: Synthetic oligonucleotide
  Antisense strand to SEQ ID NO: 1141228
uaauguaaagacaugcuag

SEQ ID NO: 1141230 - RNA, 19 nt, Artificial Sequence
  Description of Artificial Sequence: Synthetic oligonucleotide
  Sense strand starting at position 309 of SEQ ID NO: 916242
aguagucauuugcauuuaa

SEQ ID NO: 1141231 - RNA, 19 nt, Artificial Sequence
  Description of Artificial Sequence: Synthetic oligonucleotide
  Antisense strand to SEQ ID NO: 1141230
uuaaaugcaaaugacuacu

SEQ ID NO: 1141232 - RNA, 19 nt, Artificial Sequence
  Description of Artificial Sequence: Synthetic oligonucleotide
  Sense strand starting at position 482 of SEQ ID NO: 916242
uuuaaugguuauccuagau

SEQ ID NO: 1141233 - RNA, 19 nt, Artificial Sequence
  Description of Artificial Sequence: Synthetic oligonucleotide
  Antisense strand to SEQ ID NO: 1141232
aucuaggauaaccauuaaa

SEQ ID NO: 1141234 - RNA, 19 nt, Artificial Sequence
  Description of Artificial Sequence: Synthetic oligonucleotide
  Sense strand starting at position 527 of SEQ ID NO: 916242
acgguccauccagaaauau

SEQ ID NO: 1141235 - RNA, 19 nt, Artificial Sequence
  Description of Artificial Sequence: Synthetic oligonucleotide
  Antisense strand to SEQ ID NO: 1141234
auauuucuggauggaccgu

SEQ ID NO: 1141236 - RNA, 19 nt, Artificial Sequence
  Description of Artificial Sequence: Synthetic oligonucleotide
  Sense strand starting at position 536 of SEQ ID NO: 916242
ccagaaauauuauugugau

SEQ ID NO: 1141237 - RNA, 19 nt, Artificial Sequence
  Description of Artificial Sequence: Synthetic oligonucleotide
  Antisense strand to SEQ ID NO: 1141236
aucacaauaauauuucugg

SEQ ID NO: 1141238 - RNA, 19 nt, Artificial Sequence
  Description of Artificial Sequence: Synthetic oligonucleotide
  Sense strand starting at position 613 of SEQ ID NO: 916242
uuaugcauugguuauaaug

SEQ ID NO: 1141239 - RNA, 19 nt, Artificial Sequence
  Description of Artificial Sequence: Synthetic oligonucleotide
  Antisense strand to SEQ ID NO: 1141238
cauuauaaccaaugcauaa

SEQ ID NO: 1141240 - RNA, 19 nt, Artificial Sequence
  Description of Artificial Sequence: Synthetic oligonucleotide
  Sense strand starting at position 687 of SEQ ID NO: 916242
uuaaauagucaaugaguac

SEQ ID NO: 1141241 - RNA, 19 nt, Artificial Sequence
  Description of Artificial Sequence: Synthetic oligonucleotide
  Antisense strand to SEQ ID NO: 1141240
guacucauugacuauuuaa

SEQ ID NO: 1141242 - RNA, 19 nt, Artificial Sequence
  Description of Artificial Sequence: Synthetic oligonucleotide
  Sense strand starting at position 820 of SEQ ID NO: 916242
cugaauuccguugaagauu

SEQ ID NO: 1141243 - RNA, 19 nt, Artificial Sequence
  Description of Artificial Sequence: Synthetic oligonucleotide
  Antisense strand to SEQ ID NO: 1141242
aaucuucaacggaauucag

SEQ ID NO: 1141244 - RNA, 19 nt, Artificial Sequence
  Description of Artificial Sequence: Synthetic oligonucleotide
  Sense strand starting at position 874 of SEQ ID NO: 916242
gcugguaaacauuauauau

SEQ ID NO: 1141245 - RNA, 19 nt, Artificial Sequence
  Description of Artificial Sequence: Synthetic oligonucleotide
  Antisense strand to SEQ ID NO: 1141244
auauauaauguuuaccagc

SEQ ID NO: 1141246 - RNA, 19 nt, Artificial Sequence
  Description of Artificial Sequence: Synthetic oligonucleotide
  Sense strand starting at position 1097 of SEQ ID NO: 916242
ugaguuauacuguaucuac

SEQ ID NO: 1141247 - RNA, 19 nt, Artificial Sequence
  Description of Artificial Sequence: Synthetic oligonucleotide
  Antisense strand to SEQ ID NO: 1141246
guagauacaguauaacuca

SEQ ID NO: 1141248 - RNA, 19 nt, Artificial Sequence
  Description of Artificial Sequence: Synthetic oligonucleotide
  Sense strand starting at position 1406 of SEQ ID NO: 916242
cugggcuauuucuuuggua

SEQ ID NO: 1141249 - RNA, 19 nt, Artificial Sequence
  Description of Artificial Sequence: Synthetic oligonucleotide
  Antisense strand to SEQ ID NO: 1141248
uaccaaagaaauagcccag

SEQ ID NO: 1141250 - RNA, 19 nt, Artificial Sequence
  Description of Artificial Sequence: Synthetic oligonucleotide
  Sense strand starting at position 1407 of SEQ ID NO: 916242
ugggcuauuucuuugguau

SEQ ID NO: 1141251 - RNA, 19 nt, Artificial Sequence
  Description of Artificial Sequence: Synthetic oligonucleotide
  Antisense strand to SEQ ID NO: 1141250
auaccaaagaaauagccca

SEQ ID NO: 1141252 - RNA, 19 nt, Artificial Sequence
  Description of Artificial Sequence: Synthetic oligonucleotide
  Sense strand starting at position 1408 of SEQ ID NO: 916242
gggcuauuucuuugguauc

SEQ ID NO: 1141253 - RNA, 19 nt, Artificial Sequence
  Description of Artificial Sequence: Synthetic oligonucleotide
  Antisense strand to SEQ ID NO: 1141252
gauaccaaagaaauagccc

SEQ ID NO: 1141254 - RNA, 19 nt, Artificial Sequence
  Description of Artificial Sequence: Synthetic oligonucleotide
  Sense strand starting at position 1410 of SEQ ID NO: 916242
gcuauuucuuugguaucuu

SEQ ID NO: 1141255 - RNA, 19 nt, Artificial Sequence
  Description of Artificial Sequence: Synthetic oligonucleotide
  Antisense strand to SEQ ID NO: 1141254
aagauaccaaagaaauagc

SEQ ID NO: 1141256 - RNA, 19 nt, Artificial Sequence
  Description of Artificial Sequence: Synthetic oligonucleotide
  Sense strand starting at position 1511 of SEQ ID NO: 916242
acuuuaguggugcaacaaa

SEQ ID NO: 1141257 - RNA, 19 nt, Artificial Sequence
  Description of Artificial Sequence: Synthetic oligonucleotide
  Antisense strand to SEQ ID NO: 1141256
uuuguugcaccacuaaagu

SEQ ID NO: 1141258 - RNA, 19 nt, Artificial Sequence
  Description of Artificial Sequence: Synthetic oligonucleotide
  Sense strand starting at position 1611 of SEQ ID NO: 916242
cuccuaugacucuggagga

SEQ ID NO: 1141259 - RNA, 19 nt, Artificial Sequence
  Description of Artificial Sequence: Synthetic oligonucleotide
  Antisense strand to SEQ ID NO: 1141258
uccuccagagucauaggag

SEQ ID NO: 1141260 - RNA, 19 nt, Artificial Sequence
  Description of Artificial Sequence: Synthetic oligonucleotide
  Sense strand starting at position 1675 of SEQ ID NO: 916242
auguaaaguccggauugaa

SEQ ID NO: 1141261 - RNA, 19 nt, Artificial Sequence
  Description of Artificial Sequence: Synthetic oligonucleotide
  Antisense strand to SEQ ID NO: 1141260
uucaauccggacuuuacau

SEQ ID NO: 1141262 - RNA, 19 nt, Artificial Sequence
  Description of Artificial Sequence: Synthetic oligonucleotide
  Sense strand starting at position 1678 of SEQ ID NO: 916242
uaaaguccggauugaauua

SEQ ID NO: 1141263 - RNA, 19 nt, Artificial Sequence
  Description of Artificial Sequence: Synthetic oligonucleotide
  Antisense strand to SEQ ID NO: 1141262
uaauucaauccggacuuua

SEQ ID NO: 1141264 - RNA, 19 nt, Artificial Sequence
  Description of Artificial Sequence: Synthetic oligonucleotide
  Sense strand starting at position 1683 of SEQ ID NO: 916242
uccggauugaauuaguaca

SEQ ID NO: 1141265 - RNA, 19 nt, Artificial Sequence
  Description of Artificial Sequence: Synthetic oligonucleotide
  Antisense strand to SEQ ID NO: 1141264
uguacuaauucaauccgga

SEQ ID NO: 1141266 - RNA, 19 nt, Artificial Sequence
  Description of Artificial Sequence: Synthetic oligonucleotide
  Sense strand starting at position 2262 of SEQ ID NO: 916242
uguaauacagauugcaaua

SEQ ID NO: 1141267 - RNA, 19 nt, Artificial Sequence
  Description of Artificial Sequence: Synthetic oligonucleotide
  Antisense strand to SEQ ID NO: 1141266
uauugcaaucuguauuaca

SEQ ID NO: 1141268 - RNA, 19 nt, Artificial Sequence
  Description of Artificial Sequence: Synthetic oligonucleotide
  Sense strand starting at position 2339 of SEQ ID NO: 916242
agugcaaagcacuauauau

SEQ ID NO: 1141269 - RNA, 19 nt, Artificial Sequence
  Description of Artificial Sequence: Synthetic oligonucleotide
  Antisense strand to SEQ ID NO: 1141268
auauauagugcuuugcacu

SEQ ID NO: 1141270 - RNA, 19 nt, Artificial Sequence
  Description of Artificial Sequence: Synthetic oligonucleotide
  Sense strand starting at position 2370 of SEQ ID NO: 916242
cgcagcuuccguguauaga

SEQ ID NO: 1141271 - RNA, 19 nt, Artificial Sequence
  Description of Artificial Sequence: Synthetic oligonucleotide
  Antisense strand to SEQ ID NO: 1141270
ucuauacacggaagcugcg

SEQ ID NO: 1141272 - RNA, 19 nt, Artificial Sequence
  Description of Artificial Sequence: Synthetic oligonucleotide
  Sense strand starting at position 2421 of SEQ ID NO: 916242
ugccacuucccucagagau

SEQ ID NO: 1141273 - RNA, 19 nt, Artificial Sequence
  Description of Artificial Sequence: Synthetic oligonucleotide
  Antisense strand to SEQ ID NO: 1141272
aucucugagggaaguggca

SEQ ID NO: 1141274 - RNA, 19 nt, Artificial Sequence
  Description of Artificial Sequence: Synthetic oligonucleotide
  Sense strand starting at position 2545 of SEQ ID NO: 916242
gagaccgaaugcuuagaua

SEQ ID NO: 1141275 - RNA, 19 nt, Artificial Sequence
  Description of Artificial Sequence: Synthetic oligonucleotide
  Antisense strand to SEQ ID NO: 1141274
uaucuaagcauucggucuc

SEQ ID NO: 1141276 - RNA, 19 nt, Artificial Sequence
  Description of Artificial Sequence: Synthetic oligonucleotide
  Sense strand starting at position 2753 of SEQ ID NO: 916242
caacgucauuuggcuuaau

SEQ ID NO: 1141277 - RNA, 19 nt, Artificial Sequence
  Description of Artificial Sequence: Synthetic oligonucleotide
  Antisense strand to SEQ ID NO: 1141276
auuaagccaaaugacguug

SEQ ID NO: 1141278 - RNA, 19 nt, Artificial Sequence
  Description of Artificial Sequence: Synthetic oligonucleotide
  Sense strand starting at position 2756 of SEQ ID NO: 916242
cgucauuuggcuuaauguu

SEQ ID NO: 1141279 - RNA, 19 nt, Artificial Sequence
  Description of Artificial Sequence: Synthetic oligonucleotide
  Antisense strand to SEQ ID NO: 1141278
aacauuaagccaaaugacg

SEQ ID NO: 1141280 - RNA, 19 nt, Artificial Sequence
  Description of Artificial Sequence: Synthetic oligonucleotide
  Sense strand starting at position 2888 of SEQ ID NO: 916242
uuugaaguuguuuacaaug

SEQ ID NO: 1141281 - RNA, 19 nt, Artificial Sequence
  Description of Artificial Sequence: Synthetic oligonucleotide
  Antisense strand to SEQ ID NO: 1141280
cauuguaaacaacuucaaa

SEQ ID NO: 1141282 - RNA, 19 nt, Artificial Sequence
  Description of Artificial Sequence: Synthetic oligonucleotide
  Sense strand starting at position 2931 of SEQ ID NO: 916242
cuuacaucugcugaaugau

SEQ ID NO: 1141283 - RNA, 19 nt, Artificial Sequence
  Description of Artificial Sequence: Synthetic oligonucleotide
  Antisense strand to SEQ ID NO: 1141282
aucauucagcagauguaag

SEQ ID NO: 1141284 - RNA, 19 nt, Artificial Sequence
  Description of Artificial Sequence: Synthetic oligonucleotide
  Sense strand starting at position 2944 of SEQ ID NO: 916242
aaugauccgccauagucaa

SEQ ID NO: 1141285 - RNA, 19 nt, Artificial Sequence
  Description of Artificial Sequence: Synthetic oligonucleotide
  Antisense strand to SEQ ID NO: 1141284
uugacuauggcggaucauu

SEQ ID NO: 1141286 - RNA, 19 nt, Artificial Sequence
  Description of Artificial Sequence: Synthetic oligonucleotide
  Sense strand starting at position 3127 of SEQ ID NO: 916242
aauggagaauugcuguaua

SEQ ID NO: 1141287 - RNA, 19 nt, Artificial Sequence
  Description of Artificial Sequence: Synthetic oligonucleotide
  Antisense strand to SEQ ID NO: 1141286
uauacagcaauucuccauu

SEQ ID NO: 1141288 - RNA, 19 nt, Artificial Sequence
  Description of Artificial Sequence: Synthetic oligonucleotide
  Sense strand starting at position 3130 of SEQ ID NO: 916242
ggagaauugcuguauauac

SEQ ID NO: 1141289 - RNA, 19 nt, Artificial Sequence
  Description of Artificial Sequence: Synthetic oligonucleotide
  Antisense strand to SEQ ID NO: 1141288
guauauacagcaauucucc

SEQ ID NO: 1141290 - RNA, 19 nt, Artificial Sequence
  Description of Artificial Sequence: Synthetic oligonucleotide
  Sense strand starting at position 3132 of SEQ ID NO: 916242
agaauugcuguauauacua

SEQ ID NO: 1141291 - RNA, 19 nt, Artificial Sequence
  Description of Artificial Sequence: Synthetic oligonucleotide
  Antisense strand to SEQ ID NO: 1141290
uaguauauacagcaauucu

SEQ ID NO: 1141292 - RNA, 19 nt, Artificial Sequence
  Description of Artificial Sequence: Synthetic oligonucleotide
  Sense strand starting at position 3310 of SEQ ID NO: 916242
ugucucuuccuggauauaa

SEQ ID NO: 1141293 - RNA, 19 nt, Artificial Sequence
  Description of Artificial Sequence: Synthetic oligonucleotide
  Antisense strand to SEQ ID NO: 1141292
uuauauccaggaagagaca

SEQ ID NO: 1141294 - RNA, 19 nt, Artificial Sequence
  Description of Artificial Sequence: Synthetic oligonucleotide
  Sense strand starting at position 3329 of SEQ ID NO: 916242
agauaucuauaggcauaua

SEQ ID NO: 1141295 - RNA, 19 nt, Artificial Sequence
  Description of Artificial Sequence: Synthetic oligonucleotide
  Antisense strand to SEQ ID NO: 1141294
uauaugccuauagauaucu

SEQ ID NO: 1141296 - RNA, 19 nt, Artificial Sequence
  Description of Artificial Sequence: Synthetic oligonucleotide
  Sense strand starting at position 3472 of SEQ ID NO: 916242
uacagaugucuauaggcau

SEQ ID NO: 1141297 - RNA, 19 nt, Artificial Sequence
  Description of Artificial Sequence: Synthetic oligonucleotide
  Antisense strand to SEQ ID NO: 1141296
augccuauagacaucugua

SEQ ID NO: 1141298 - RNA, 19 nt, Artificial Sequence
  Description of Artificial Sequence: Synthetic oligonucleotide
  Sense strand starting at position 3475 of SEQ ID NO: 916242
agaugucuauaggcauaua

SEQ ID NO: 1141299 - RNA, 19 nt, Artificial Sequence
  Description of Artificial Sequence: Synthetic oligonucleotide
  Antisense strand to SEQ ID NO: 1141298
uauaugccuauagacaucu

SEQ ID NO: 1141300 - RNA, 19 nt, Artificial Sequence
  Description of Artificial Sequence: Synthetic oligonucleotide
  Sense strand starting at position 3478 of SEQ ID NO: 916242
ugucuauaggcauauauac

SEQ ID NO: 1141301 - RNA, 19 nt, Artificial Sequence
  Description of Artificial Sequence: Synthetic oligonucleotide
  Antisense strand to SEQ ID NO: 1141300
guauauaugccuauagaca

SEQ ID NO: 1141302 - RNA, 19 nt, Artificial Sequence
  Description of Artificial Sequence: Synthetic oligonucleotide
  Sense strand starting at position 3730 of SEQ ID NO: 916242
gccugcagugcucuuuaua

SEQ ID NO: 1141303 - RNA, 19 nt, Artificial Sequence
  Description of Artificial Sequence: Synthetic oligonucleotide
  Antisense strand to SEQ ID NO: 1141302
uauaaagagcacugcaggc

SEQ ID NO: 1141304 - RNA, 19 nt, Artificial Sequence
  Description of Artificial Sequence: Synthetic oligonucleotide
  Sense strand starting at position 3766 of SEQ ID NO: 916242
gucuucccugaucauucua

SEQ ID NO: 1141305 - RNA, 19 nt, Artificial Sequence
  Description of Artificial Sequence: Synthetic oligonucleotide
  Antisense strand to SEQ ID NO: 1141304
uagaaugaucagggaagac

SEQ ID NO: 1141306 - RNA, 19 nt, Artificial Sequence
  Description of Artificial Sequence: Synthetic oligonucleotide
  Sense strand starting at position 3797 of SEQ ID NO: 916242
gucagugccuauccauuua

SEQ ID NO: 1141307 - RNA, 19 nt, Artificial Sequence
  Description of Artificial Sequence: Synthetic oligonucleotide
  Antisense strand to SEQ ID NO: 1141306
uaaauggauaggcacugac

SEQ ID NO: 1141308 - RNA, 19 nt, Artificial Sequence
  Description of Artificial Sequence: Synthetic oligonucleotide
  Sense strand starting at position 3963 of SEQ ID NO: 916242
ggaacugaaucuuuaggcu

SEQ ID NO: 1141309 - RNA, 19 nt, Artificial Sequence
  Description of Artificial Sequence: Synthetic oligonucleotide
  Antisense strand to SEQ ID NO: 1141308
agccuaaagauucaguucc

SEQ ID NO: 1141310 - RNA, 19 nt, Artificial Sequence
  Description of Artificial Sequence: Synthetic oligonucleotide
  Sense strand starting at position 50 of SEQ ID NO: 916243
uuuaaauaagcugagugau

SEQ ID NO: 1141311 - RNA, 19 nt, Artificial Sequence
  Description of Artificial Sequence: Synthetic oligonucleotide
  Antisense strand to SEQ ID NO: 1141310
aucacucagcuuauuuaaa

SEQ ID NO: 1141312 - RNA, 19 nt, Artificial Sequence
  Description of Artificial Sequence: Synthetic oligonucleotide
  Sense strand starting at position 60 of SEQ ID NO: 916243
cugagugauguccaaaucu

SEQ ID NO: 1141313 - RNA, 19 nt, Artificial Sequence
  Description of Artificial Sequence: Synthetic oligonucleotide
  Antisense strand to SEQ ID NO: 1141312
agauuuggacaucacucag

SEQ ID NO: 1141314 - RNA, 19 nt, Artificial Sequence
  Description of Artificial Sequence: Synthetic oligonucleotide
  Sense strand starting at position 214 of SEQ ID NO: 916243
gugggacuuuaaccuauau

SEQ ID NO: 1141315 - RNA, 19 nt, Artificial Sequence
  Description of Artificial Sequence: Synthetic oligonucleotide
  Antisense strand to SEQ ID NO: 1141314
auauagguuaaagucccac

SEQ ID NO: 1141316 - RNA, 19 nt, Artificial Sequence
  Description of Artificial Sequence: Synthetic oligonucleotide
  Sense strand starting at position 283 of SEQ ID NO: 916243
gguauacagguauauuauu

SEQ ID NO: 1141317 - RNA, 19 nt, Artificial Sequence
  Description of Artificial Sequence: Synthetic oligonucleotide
  Antisense strand to SEQ ID NO: 1141316
aauaauauaccuguauacc

SEQ ID NO: 1141318 - RNA, 19 nt, Artificial Sequence
  Description of Artificial Sequence: Synthetic oligonucleotide
  Sense strand starting at position 560 of SEQ ID NO: 916243
agcauaguucuauaagaca

SEQ ID NO: 1141319 - RNA, 19 nt, Artificial Sequence
  Description of Artificial Sequence: Synthetic oligonucleotide
  Antisense strand to SEQ ID NO: 1141318
ugucuuauagaacuaugcu

SEQ ID NO: 1141320 - RNA, 19 nt, Artificial Sequence
  Description of Artificial Sequence: Synthetic oligonucleotide
  Sense strand starting at position 733 of SEQ ID NO: 916243
uguccaaaucagugaggau

SEQ ID NO: 1141321 - RNA, 19 nt, Artificial Sequence
  Description of Artificial Sequence: Synthetic oligonucleotide
  Antisense strand to SEQ ID NO: 1141320
auccucacugauuuggaca

SEQ ID NO: 1141322 - RNA, 19 nt, Artificial Sequence
  Description of Artificial Sequence: Synthetic oligonucleotide
  Sense strand starting at position 788 of SEQ ID NO: 916243
ggcacuacccuuuagcaua

SEQ ID NO: 1141323 - RNA, 19 nt, Artificial Sequence
  Description of Artificial Sequence: Synthetic oligonucleotide
  Antisense strand to SEQ ID NO: 1141322
uaugcuaaaggguagugcc

SEQ ID NO: 1141324 - RNA, 19 nt, Artificial Sequence
  Description of Artificial Sequence: Synthetic oligonucleotide
  Sense strand starting at position 904 of SEQ ID NO: 916243
aagacaugucuaggaaagu

SEQ ID NO: 1141325 - RNA, 19 nt, Artificial Sequence
  Description of Artificial Sequence: Synthetic oligonucleotide
  Antisense strand to SEQ ID NO: 1141324
acuuuccuagacaugucuu

SEQ ID NO: 1141326 - RNA, 19 nt, Artificial Sequence
  Description of Artificial Sequence: Synthetic oligonucleotide
  Sense strand starting at position 953 of SEQ ID NO: 916243
gcuucuaauucccuaagag

SEQ ID NO: 1141327 - RNA, 19 nt, Artificial Sequence
  Description of Artificial Sequence: Synthetic oligonucleotide
  Antisense strand to SEQ ID NO: 1141326
cucuuagggaauuagaagc

SEQ ID NO: 1141328 - RNA, 19 nt, Artificial Sequence
  Description of Artificial Sequence: Synthetic oligonucleotide
  Sense strand starting at position 1038 of SEQ ID NO: 916243
gggaauaguugaguuguua

SEQ ID NO: 1141329 - RNA, 19 nt, Artificial Sequence
  Description of Artificial Sequence: Synthetic oligonucleotide
  Antisense strand to SEQ ID NO: 1141328
uaacaacucaacuauuccc

SEQ ID NO: 1141330 - RNA, 19 nt, Artificial Sequence
  Description of Artificial Sequence: Synthetic oligonucleotide
  Sense strand starting at position 1085 of SEQ ID NO: 916243
aagcaagaaccgcauugua

SEQ ID NO: 1141331 - RNA, 19 nt, Artificial Sequence
  Description of Artificial Sequence: Synthetic oligonucleotide
  Antisense strand to SEQ ID NO: 1141330
uacaaugcgguucuugcuu

SEQ ID NO: 1141332 - RNA, 19 nt, Artificial Sequence
  Description of Artificial Sequence: Synthetic oligonucleotide
  Sense strand starting at position 1143 of SEQ ID NO: 916243
cugagacacuuccuuagga

SEQ ID NO: 1141333 - RNA, 19 nt, Artificial Sequence
  Description of Artificial Sequence: Synthetic oligonucleotide
  Antisense strand to SEQ ID NO: 1141332
uccuaaggaagugucucag

SEQ ID NO: 1141334 - RNA, 19 nt, Artificial Sequence
  Description of Artificial Sequence: Synthetic oligonucleotide
  Sense strand starting at position 1228 of SEQ ID NO: 916243
augugacaucgaugaugga

SEQ ID NO: 1141335 - RNA, 19 nt, Artificial Sequence
  Description of Artificial Sequence: Synthetic oligonucleotide
  Antisense strand to SEQ ID NO: 1141334
uccaucaucgaugucacau

SEQ ID NO: 1141336 - RNA, 19 nt, Artificial Sequence
  Description of Artificial Sequence: Synthetic oligonucleotide
  Sense strand starting at position 1344 of SEQ ID NO: 916243
aggaaccugucuuuguuaa

SEQ ID NO: 1141337 - RNA, 19 nt, Artificial Sequence
  Description of Artificial Sequence: Synthetic oligonucleotide
  Antisense strand to SEQ ID NO: 1141336
uuaacaaagacagguuccu

SEQ ID NO: 1141338 - RNA, 19 nt, Artificial Sequence
  Description of Artificial Sequence: Synthetic oligonucleotide
  Sense strand starting at position 2180 of SEQ ID NO: 916243
agugaagaaagcugguaau

SEQ ID NO: 1141339 - RNA, 19 nt, Artificial Sequence
  Description of Artificial Sequence: Synthetic oligonucleotide
  Antisense strand to SEQ ID NO: 1141338
auuaccagcuuucuucacu

SEQ ID NO: 1141340 - RNA, 19 nt, Artificial Sequence
  Description of Artificial Sequence: Synthetic oligonucleotide
  Sense strand starting at position 2193 of SEQ ID NO: 916243
gguaauagaugucugacaa

SEQ ID NO: 1141341 - RNA, 19 nt, Artificial Sequence
  Description of Artificial Sequence: Synthetic oligonucleotide
  Antisense strand to SEQ ID NO: 1141340
uugucagacaucuauuacc

SEQ ID NO: 1141342 - RNA, 19 nt, Artificial Sequence
  Description of Artificial Sequence: Synthetic oligonucleotide
  Sense strand starting at position 2194 of SEQ ID NO: 916243
guaauagaugucugacaaa

SEQ ID NO: 1141343 - RNA, 19 nt, Artificial Sequence
  Description of Artificial Sequence: Synthetic oligonucleotide
  Antisense strand to SEQ ID NO: 1141342
uuugucagacaucuauuac

SEQ ID NO: 1141344 - RNA, 19 nt, Artificial Sequence
  Description of Artificial Sequence: Synthetic oligonucleotide
  Sense strand starting at position 2264 of SEQ ID NO: 916243
agugaaauguuaucccgaa

SEQ ID NO: 1141345 - RNA, 19 nt, Artificial Sequence
  Description of Artificial Sequence: Synthetic oligonucleotide
  Antisense strand to SEQ ID NO: 1141344
uucgggauaacauuucacu

SEQ ID NO: 1141346 - RNA, 19 nt, Artificial Sequence
  Description of Artificial Sequence: Synthetic oligonucleotide
  Sense strand starting at position 2268 of SEQ ID NO: 916243
aaauguuaucccgaauuga

SEQ ID NO: 1141347 - RNA, 19 nt, Artificial Sequence
  Description of Artificial Sequence: Synthetic oligonucleotide
  Antisense strand to SEQ ID NO: 1141346
ucaauucgggauaacauuu

SEQ ID NO: 1141348 - RNA, 19 nt, Artificial Sequence
  Description of Artificial Sequence: Synthetic oligonucleotide
  Sense strand starting at position 2282 of SEQ ID NO: 916243
auugauuucugacacugaa

SEQ ID NO: 1141349 - RNA, 19 nt, Artificial Sequence
  Description of Artificial Sequence: Synthetic oligonucleotide
  Antisense strand to SEQ ID NO: 1141348
uucagugucagaaaucaau

SEQ ID NO: 1141350 - RNA, 19 nt, Artificial Sequence
  Description of Artificial Sequence: Synthetic oligonucleotide
  Sense strand starting at position 2313 of SEQ ID NO: 916243
auuaaugagucaucaguuu

SEQ ID NO: 1141351 - RNA, 19 nt, Artificial Sequence
  Description of Artificial Sequence: Synthetic oligonucleotide
  Antisense strand to SEQ ID NO: 1141350
aaacugaugacucauuaau

SEQ ID NO: 1141352 - RNA, 19 nt, Artificial Sequence
  Description of Artificial Sequence: Synthetic oligonucleotide
  Sense strand starting at position 2353 of SEQ ID NO: 916243
gaguaacaggucugaggaa

SEQ ID NO: 1141353 - RNA, 19 nt, Artificial Sequence
  Description of Artificial Sequence: Synthetic oligonucleotide
  Antisense strand to SEQ ID NO: 1141352
uuccucagaccuguuacuc

SEQ ID NO: 1141354 - RNA, 19 nt, Artificial Sequence
  Description of Artificial Sequence: Synthetic oligonucleotide
  Sense strand starting at position 2446 of SEQ ID NO: 916243
accuguugaguuggaaauu

SEQ ID NO: 1141355 - RNA, 19 nt, Artificial Sequence
  Description of Artificial Sequence: Synthetic oligonucleotide
  Antisense strand to SEQ ID NO: 1141354
aauuuccaacucaacaggu

SEQ ID NO: 1141356 - RNA, 19 nt, Artificial Sequence
  Description of Artificial Sequence: Synthetic oligonucleotide
  Sense strand starting at position 2510 of SEQ ID NO: 916243
acagaaauauugcuaguuc

SEQ ID NO: 1141357 - RNA, 19 nt, Artificial Sequence
  Description of Artificial Sequence: Synthetic oligonucleotide
  Antisense strand to SEQ ID NO: 1141356
gaacuagcaauauuucugu

SEQ ID NO: 1141358 - RNA, 19 nt, Artificial Sequence
  Description of Artificial Sequence: Synthetic oligonucleotide
  Sense strand starting at position 2550 of SEQ ID NO: 916243
aggccaacuuaauugauga

SEQ ID NO: 1141359 - RNA, 19 nt, Artificial Sequence
  Description of Artificial Sequence: Synthetic oligonucleotide
  Antisense strand to SEQ ID NO: 1141358
ucaucaauuaaguuggccu

SEQ ID NO: 1141360 - RNA, 19 nt, Artificial Sequence
  Description of Artificial Sequence: Synthetic oligonucleotide
  Sense strand starting at position 2873 of SEQ ID NO: 916243
acuugcuuugaagacuuua

SEQ ID NO: 1141361 - RNA, 19 nt, Artificial Sequence
  Description of Artificial Sequence: Synthetic oligonucleotide
  Antisense strand to SEQ ID NO: 1141360
uaaagucuucaaagcaagu

SEQ ID NO: 1141362 - RNA, 19 nt, Artificial Sequence
  Description of Artificial Sequence: Synthetic oligonucleotide
  Sense strand starting at position 2888 of SEQ ID NO: 916243
uuuaaauucuaagcaugga

SEQ ID NO: 1141363 - RNA, 19 nt, Artificial Sequence
  Description of Artificial Sequence: Synthetic oligonucleotide
  Antisense strand to SEQ ID NO: 1141362
uccaugcuuagaauuuaaa

SEQ ID NO: 1141364 - RNA, 19 nt, Artificial Sequence
  Description of Artificial Sequence: Synthetic oligonucleotide
  Sense strand starting at position 2957 of SEQ ID NO: 916243
gcuuaauagcauuaagcag

SEQ ID NO: 1141365 - RNA, 19 nt, Artificial Sequence
  Description of Artificial Sequence: Synthetic oligonucleotide
  Antisense strand to SEQ ID NO: 1141364
cugcuuaaugcuauuaagc

SEQ ID NO: 1141366 - RNA, 19 nt, Artificial Sequence
  Description of Artificial Sequence: Synthetic oligonucleotide
  Sense strand starting at position 3140 of SEQ ID NO: 916243
cuacuaugacugcauagua

SEQ ID NO: 1141367 - RNA, 19 nt, Artificial Sequence
  Description of Artificial Sequence: Synthetic oligonucleotide
  Antisense strand to SEQ ID NO: 1141366
uacuaugcagucauaguag

SEQ ID NO: 1141368 - RNA, 19 nt, Artificial Sequence
  Description of Artificial Sequence: Synthetic oligonucleotide
  Sense strand starting at position 3226 of SEQ ID NO: 916243
uuuagugaauuagcaauca

SEQ ID NO: 1141369 - RNA, 19 nt, Artificial Sequence
  Description of Artificial Sequence: Synthetic oligonucleotide
  Antisense strand to SEQ ID NO: 1141368
ugauugcuaauucacuaaa

SEQ ID NO: 1141370 - RNA, 19 nt, Artificial Sequence
  Description of Artificial Sequence: Synthetic oligonucleotide
  Sense strand starting at position 3311 of SEQ ID NO: 916243
agggaagccuuucuggaaa

SEQ ID NO: 1141371 - RNA, 19 nt, Artificial Sequence
  Description of Artificial Sequence: Synthetic oligonucleotide
  Antisense strand to SEQ ID NO: 1141370
uuuccagaaaggcuucccu

SEQ ID NO: 1141372 - RNA, 19 nt, Artificial Sequence
  Description of Artificial Sequence: Synthetic oligonucleotide
  Sense strand starting at position 3389 of SEQ ID NO: 916243
auguaaugugccuaaggag

SEQ ID NO: 1141373 - RNA, 19 nt, Artificial Sequence
  Description of Artificial Sequence: Synthetic oligonucleotide
  Antisense strand to SEQ ID NO: 1141372
cuccuuaggcacauuacau

SEQ ID NO: 1141374 - RNA, 19 nt, Artificial Sequence
  Description of Artificial Sequence: Synthetic oligonucleotide
  Sense strand starting at position 3413 of SEQ ID NO: 916243
gauccuaaacgcuagaagu

SEQ ID NO: 1141375 - RNA, 19 nt, Artificial Sequence
  Description of Artificial Sequence: Synthetic oligonucleotide
  Antisense strand to SEQ ID NO: 1141374
acuucuagcguuuaggauc

SEQ ID NO: 1141376 - RNA, 19 nt, Artificial Sequence
  Description of Artificial Sequence: Synthetic oligonucleotide
  Sense strand starting at position 3415 of SEQ ID NO: 916243
uccuaaacgcuagaaguau

SEQ ID NO: 1141377 - RNA, 19 nt, Artificial Sequence
  Description of Artificial Sequence: Synthetic oligonucleotide
  Antisense strand to SEQ ID NO: 1141376
auacuucuagcguuuagga

SEQ ID NO: 1141378 - RNA, 19 nt, Artificial Sequence
  Description of Artificial Sequence: Synthetic oligonucleotide
  Sense strand starting at position 3435 of SEQ ID NO: 916243
uuaguauggcuagaaccua

SEQ ID NO: 1141379 - RNA, 19 nt, Artificial Sequence
  Description of Artificial Sequence: Synthetic oligonucleotide
  Antisense strand to SEQ ID NO: 1141378
uagguucuagccauacuaa

SEQ ID NO: 1141380 - RNA, 19 nt, Artificial Sequence
  Description of Artificial Sequence: Synthetic oligonucleotide
  Sense strand starting at position 3467 of SEQ ID NO: 916243
guggcaagugcugaaagau

SEQ ID NO: 1141381 - RNA, 19 nt, Artificial Sequence
  Description of Artificial Sequence: Synthetic oligonucleotide
  Antisense strand to SEQ ID NO: 1141380
aucuuucagcacuugccac

SEQ ID NO: 1141382 - RNA, 19 nt, Artificial Sequence
  Description of Artificial Sequence: Synthetic oligonucleotide
  Sense strand starting at position 3610 of SEQ ID NO: 916243
uagguauacucuccggaac

SEQ ID NO: 1141383 - RNA, 19 nt, Artificial Sequence
  Description of Artificial Sequence: Synthetic oligonucleotide
  Antisense strand to SEQ ID NO: 1141382
guuccggagaguauaccua

SEQ ID NO: 1141384 - RNA, 19 nt, Artificial Sequence
  Description of Artificial Sequence: Synthetic oligonucleotide
  Sense strand starting at position 3611 of SEQ ID NO: 916243
agguauacucuccggaaca

SEQ ID NO: 1141385 - RNA, 19 nt, Artificial Sequence
  Description of Artificial Sequence: Synthetic oligonucleotide
  Antisense strand to SEQ ID NO: 1141384
uguuccggagaguauaccu

SEQ ID NO: 1141386 - RNA, 19 nt, Artificial Sequence
  Description of Artificial Sequence: Synthetic oligonucleotide
  Sense strand starting at position 3613 of SEQ ID NO: 916243
guauacucuccggaacauc

SEQ ID NO: 1141387 - RNA, 19 nt, Artificial Sequence
  Description of Artificial Sequence: Synthetic oligonucleotide
  Antisense strand to SEQ ID NO: 1141386
gauguuccggagaguauac

SEQ ID NO: 1141388 - RNA, 19 nt, Artificial Sequence
  Description of Artificial Sequence: Synthetic oligonucleotide
  Sense strand starting at position 3844 of SEQ ID NO: 916243
acaauacagaguggugaau

SEQ ID NO: 1141389 - RNA, 19 nt, Artificial Sequence
  Description of Artificial Sequence: Synthetic oligonucleotide
  Antisense strand to SEQ ID NO: 1141388
auucaccacucuguauugu

SEQ ID NO: 1141390 - RNA, 19 nt, Artificial Sequence
  Description of Artificial Sequence: Synthetic oligonucleotide
  Sense strand starting at position 42 of SEQ ID NO: 916244
gggcuuauccuuuaaaugu

SEQ ID NO: 1141391 - RNA, 19 nt, Artificial Sequence
  Description of Artificial Sequence: Synthetic oligonucleotide
  Antisense strand to SEQ ID NO: 1141390
acauuuaaaggauaagccc

SEQ ID NO: 1141392 - RNA, 19 nt, Artificial Sequence
  Description of Artificial Sequence: Synthetic oligonucleotide
  Sense strand starting at position 60 of SEQ ID NO: 916244
uucugugucucuuuaagaa

SEQ ID NO: 1141393 - RNA, 19 nt, Artificial Sequence
  Description of Artificial Sequence: Synthetic oligonucleotide
  Antisense strand to SEQ ID NO: 1141392
uucuuaaagagacacagaa

SEQ ID NO: 1141394 - RNA, 19 nt, Artificial Sequence
  Description of Artificial Sequence: Synthetic oligonucleotide
  Sense strand starting at position 88 of SEQ ID NO: 916244
gggaaaguacuguguaaua

SEQ ID NO: 1141395 - RNA, 19 nt, Artificial Sequence
  Description of Artificial Sequence: Synthetic oligonucleotide
  Antisense strand to SEQ ID NO: 1141394
uauuacacaguacuuuccc

SEQ ID NO: 1141396 - RNA, 19 nt, Artificial Sequence
  Description of Artificial Sequence: Synthetic oligonucleotide
  Sense strand starting at position 90 of SEQ ID NO: 916244
gaaaguacuguguaauaug

SEQ ID NO: 1141397 - RNA, 19 nt, Artificial Sequence
  Description of Artificial Sequence: Synthetic oligonucleotide
  Antisense strand to SEQ ID NO: 1141396
cauauuacacaguacuuuc

SEQ ID NO: 1141398 - RNA, 19 nt, Artificial Sequence
  Description of Artificial Sequence: Synthetic oligonucleotide
  Sense strand starting at position 99 of SEQ ID NO: 916244
guguaauauggauaagcag

SEQ ID NO: 1141399 - RNA, 19 nt, Artificial Sequence
  Description of Artificial Sequence: Synthetic oligonucleotide
  Antisense strand to SEQ ID NO: 1141398
cugcuuauccauauuacac

SEQ ID NO: 1141400 - RNA, 19 nt, Artificial Sequence
  Description of Artificial Sequence: Synthetic oligonucleotide
  Sense strand starting at position 310 of SEQ ID NO: 916244
ccagcuacucgagguaauc

SEQ ID NO: 1141401 - RNA, 19 nt, Artificial Sequence
  Description of Artificial Sequence: Synthetic oligonucleotide
  Antisense strand to SEQ ID NO: 1141400
gauuaccucgaguagcugg

SEQ ID NO: 1141402 - RNA, 19 nt, Artificial Sequence
  Description of Artificial Sequence: Synthetic oligonucleotide
  Sense strand starting at position 500 of SEQ ID NO: 916244
auuggugucccuuacgaca

SEQ ID NO: 1141403 - RNA, 19 nt, Artificial Sequence
  Description of Artificial Sequence: Synthetic oligonucleotide
  Antisense strand to SEQ ID NO: 1141402
ugucguaagggacaccaau

SEQ ID NO: 1141404 - RNA, 19 nt, Artificial Sequence
  Description of Artificial Sequence: Synthetic oligonucleotide
  Sense strand starting at position 543 of SEQ ID NO: 916244
uguugugucagagacucga

SEQ ID NO: 1141405 - RNA, 19 nt, Artificial Sequence
  Description of Artificial Sequence: Synthetic oligonucleotide
  Antisense strand to SEQ ID NO: 1141404
ucgagucucugacacaaca

SEQ ID NO: 1141406 - RNA, 19 nt, Artificial Sequence
  Description of Artificial Sequence: Synthetic oligonucleotide
  Sense strand starting at position 559 of SEQ ID NO: 916244
cgaguaguggugagguagu

SEQ ID NO: 1141407 - RNA, 19 nt, Artificial Sequence
  Description of Artificial Sequence: Synthetic oligonucleotide
  Antisense strand to SEQ ID NO: 1141406
acuaccucaccacuacucg

SEQ ID NO: 1141408 - RNA, 19 nt, Artificial Sequence
  Description of Artificial Sequence: Synthetic oligonucleotide
  Sense strand starting at position 572 of SEQ ID NO: 916244
gguaguguugugucagucu

SEQ ID NO: 1141409 - RNA, 19 nt, Artificial Sequence
  Description of Artificial Sequence: Synthetic oligonucleotide
  Antisense strand to SEQ ID NO: 1141408
agacugacacaacacuacc

SEQ ID NO: 1141410 - RNA, 19 nt, Artificial Sequence
  Description of Artificial Sequence: Synthetic oligonucleotide
  Sense strand starting at position 577 of SEQ ID NO: 916244
uguugugucagucuggcua

SEQ ID NO: 1141411 - RNA, 19 nt, Artificial Sequence
  Description of Artificial Sequence: Synthetic oligonucleotide
  Antisense strand to SEQ ID NO: 1141410
uagccagacugacacaaca

SEQ ID NO: 1141412 - RNA, 19 nt, Artificial Sequence
  Description of Artificial Sequence: Synthetic oligonucleotide
  Sense strand starting at position 599 of SEQ ID NO: 916244
uacugaugguguccauguu

SEQ ID NO: 1141413 - RNA, 19 nt, Artificial Sequence
  Description of Artificial Sequence: Synthetic oligonucleotide
  Antisense strand to SEQ ID NO: 1141412
aacauggacaccaucagua

SEQ ID NO: 1141414 - RNA, 19 nt, Artificial Sequence
  Description of Artificial Sequence: Synthetic oligonucleotide
  Sense strand starting at position 617 of SEQ ID NO: 916244
uucugagugucaucaggga

SEQ ID NO: 1141415 - RNA, 19 nt, Artificial Sequence
  Description of Artificial Sequence: Synthetic oligonucleotide
  Antisense strand to SEQ ID NO: 1141414
ucccugaugacacucagaa

SEQ ID NO: 1141416 - RNA, 19 nt, Artificial Sequence
  Description of Artificial Sequence: Synthetic oligonucleotide
  Sense strand starting at position 621 of SEQ ID NO: 916244
gagugucaucagggagaug

SEQ ID NO: 1141417 - RNA, 19 nt, Artificial Sequence
  Description of Artificial Sequence: Synthetic oligonucleotide
  Antisense strand to SEQ ID NO: 1141416
caucucccugaugacacuc

SEQ ID NO: 1141418 - RNA, 19 nt, Artificial Sequence
  Description of Artificial Sequence: Synthetic oligonucleotide
  Sense strand starting at position 818 of SEQ ID NO: 916244
uggcauccuggguggaaga

SEQ ID NO: 1141419 - RNA, 19 nt, Artificial Sequence
  Description of Artificial Sequence: Synthetic oligonucleotide
  Antisense strand to SEQ ID NO: 1141418
ucuuccacccaggaugcca

SEQ ID NO: 1141420 - RNA, 19 nt, Artificial Sequence
  Description of Artificial Sequence: Synthetic oligonucleotide
  Sense strand starting at position 900 of SEQ ID NO: 916244
cuggcucugguuugggaaa

SEQ ID NO: 1141421 - RNA, 19 nt, Artificial Sequence
  Description of Artificial Sequence: Synthetic oligonucleotide
  Antisense strand to SEQ ID NO: 1141420
uuucccaaaccagagccag

SEQ ID NO: 1141422 - RNA, 19 nt, Artificial Sequence
  Description of Artificial Sequence: Synthetic oligonucleotide
  Sense strand starting at position 912 of SEQ ID NO: 916244
ugggaaaucugcgucuuaa

SEQ ID NO: 1141423 - RNA, 19 nt, Artificial Sequence
  Description of Artificial Sequence: Synthetic oligonucleotide
  Antisense strand to SEQ ID NO: 1141422
uuaagacgcagauuuccca

SEQ ID NO: 1141424 - RNA, 19 nt, Artificial Sequence
  Description of Artificial Sequence: Synthetic oligonucleotide
  Sense strand starting at position 1042 of SEQ ID NO: 916244
guaccugcgcaccaauaau

SEQ ID NO: 1141425 - RNA, 19 nt, Artificial Sequence
  Description of Artificial Sequence: Synthetic oligonucleotide
  Antisense strand to SEQ ID NO: 1141424
auuauuggugcgcagguac

SEQ ID NO: 1141426 - RNA, 19 nt, Artificial Sequence
  Description of Artificial Sequence: Synthetic oligonucleotide
  Sense strand starting at position 1074 of SEQ ID NO: 916244
acauuaccugccgagaaca

SEQ ID NO: 1141427 - RNA, 19 nt, Artificial Sequence
  Description of Artificial Sequence: Synthetic oligonucleotide
  Antisense strand to SEQ ID NO: 1141426
uguucucggcagguaaugu

SEQ ID NO: 1141428 - RNA, 19 nt, Artificial Sequence
  Description of Artificial Sequence: Synthetic oligonucleotide
  Sense strand starting at position 1259 of SEQ ID NO: 916244
aucugugauccggguuaag

SEQ ID NO: 1141429 - RNA, 19 nt, Artificial Sequence
  Description of Artificial Sequence: Synthetic oligonucleotide
  Antisense strand to SEQ ID NO: 1141428
cuuaacccggaucacagau

SEQ ID NO: 1141430 - RNA, 19 nt, Artificial Sequence
  Description of Artificial Sequence: Synthetic oligonucleotide
  Sense strand starting at position 1969 of SEQ ID NO: 916244
gcuuucuaguggguggaga

SEQ ID NO: 1141431 - RNA, 19 nt, Artificial Sequence
  Description of Artificial Sequence: Synthetic oligonucleotide
  Antisense strand to SEQ ID NO: 1141430
ucuccacccacuagaaagc

SEQ ID NO: 1141432 - RNA, 19 nt, Artificial Sequence
  Description of Artificial Sequence: Synthetic oligonucleotide
  Sense strand starting at position 2066 of SEQ ID NO: 916244
ggguaagguugcccaauga

SEQ ID NO: 1141433 - RNA, 19 nt, Artificial Sequence
  Description of Artificial Sequence: Synthetic oligonucleotide
  Antisense strand to SEQ ID NO: 1141432
ucauugggcaaccuuaccc

SEQ ID NO: 1141434 - RNA, 19 nt, Artificial Sequence
  Description of Artificial Sequence: Synthetic oligonucleotide
  Sense strand starting at position 2242 of SEQ ID NO: 916244
gaaugauggaguugucgug

SEQ ID NO: 1141435 - RNA, 19 nt, Artificial Sequence
  Description of Artificial Sequence: Synthetic oligonucleotide
  Antisense strand to SEQ ID NO: 1141434
cacgacaacuccaucauuc

SEQ ID NO: 1141436 - RNA, 19 nt, Artificial Sequence
  Description of Artificial Sequence: Synthetic oligonucleotide
  Sense strand starting at position 2249 of SEQ ID NO: 916244
ggaguugucguguagagag

SEQ ID NO: 1141437 - RNA, 19 nt, Artificial Sequence
  Description of Artificial Sequence: Synthetic oligonucleotide
  Antisense strand to SEQ ID NO: 1141436
cucucuacacgacaacucc

SEQ ID NO: 1141438 - RNA, 19 nt, Artificial Sequence
  Description of Artificial Sequence: Synthetic oligonucleotide
  Sense strand starting at position 2540 of SEQ ID NO: 916244
ccauuuauuugguguagga

SEQ ID NO: 1141439 - RNA, 19 nt, Artificial Sequence
  Description of Artificial Sequence: Synthetic oligonucleotide
  Antisense strand to SEQ ID NO: 1141438
uccuacaccaaauaaaugg

SEQ ID NO: 1141440 - RNA, 19 nt, Artificial Sequence
  Description of Artificial Sequence: Synthetic oligonucleotide
  Sense strand starting at position 2797 of SEQ ID NO: 916244
cauauuuaguagggacuca

SEQ ID NO: 1141441 - RNA, 19 nt, Artificial Sequence
  Description of Artificial Sequence: Synthetic oligonucleotide
  Antisense strand to SEQ ID NO: 1141440
ugagucccuacuaaauaug

SEQ ID NO: 1141442 - RNA, 19 nt, Artificial Sequence
  Description of Artificial Sequence: Synthetic oligonucleotide
  Sense strand starting at position 2808 of SEQ ID NO: 916244
gggacucauuauguaaaug

SEQ ID NO: 1141443 - RNA, 19 nt, Artificial Sequence
  Description of Artificial Sequence: Synthetic oligonucleotide
  Antisense strand to SEQ ID NO: 1141442
cauuuacauaaugaguccc

SEQ ID NO: 1141444 - RNA, 19 nt, Artificial Sequence
  Description of Artificial Sequence: Synthetic oligonucleotide
  Sense strand starting at position 2898 of SEQ ID NO: 916244
aguaguuauuagucucaau

SEQ ID NO: 1141445 - RNA, 19 nt, Artificial Sequence
  Description of Artificial Sequence: Synthetic oligonucleotide
  Antisense strand to SEQ ID NO: 1141444
auugagacuaauaacuacu

SEQ ID NO: 1141446 - RNA, 19 nt, Artificial Sequence
  Description of Artificial Sequence: Synthetic oligonucleotide
  Sense strand starting at position 2901 of SEQ ID NO: 916244
aguuauuagucucaauuug

SEQ ID NO: 1141447 - RNA, 19 nt, Artificial Sequence
  Description of Artificial Sequence: Synthetic oligonucleotide
  Antisense strand to SEQ ID NO: 1141446
caaauugagacuaauaacu

SEQ ID NO: 1141448 - RNA, 19 nt, Artificial Sequence
  Description of Artificial Sequence: Synthetic oligonucleotide
  Sense strand starting at position 2938 of SEQ ID NO: 916244
cuaggaaauuaagaauucu

SEQ ID NO: 1141449 - RNA, 19 nt, Artificial Sequence
  Description of Artificial Sequence: Synthetic oligonucleotide
  Antisense strand to SEQ ID NO: 1141448
agaauucuuaauuuccuag

SEQ ID NO: 1141450 - RNA, 19 nt, Artificial Sequence
  Description of Artificial Sequence: Synthetic oligonucleotide
  Sense strand starting at position 2949 of SEQ ID NO: 916244
agaauucucgcauaaggua

SEQ ID NO: 1141451 - RNA, 19 nt, Artificial Sequence
  Description of Artificial Sequence: Synthetic oligonucleotide
  Antisense strand to SEQ ID NO: 1141450
uaccuuaugcgagaauucu

SEQ ID NO: 1141452 - RNA, 19 nt, Artificial Sequence
  Description of Artificial Sequence: Synthetic oligonucleotide
  Sense strand starting at position 3068 of SEQ ID NO: 916244
uugaauuaucccgggagaa

SEQ ID NO: 1141453 - RNA, 19 nt, Artificial Sequence
  Description of Artificial Sequence: Synthetic oligonucleotide
  Antisense strand to SEQ ID NO: 1141452
uucucccgggauaauucaa

SEQ ID NO: 1141454 - RNA, 19 nt, Artificial Sequence
  Description of Artificial Sequence: Synthetic oligonucleotide
  Sense strand starting at position 3160 of SEQ ID NO: 916244
uaguucuggcuguaucaca

SEQ ID NO: 1141455 - RNA, 19 nt, Artificial Sequence
  Description of Artificial Sequence: Synthetic oligonucleotide
  Antisense strand to SEQ ID NO: 1141454
ugugauacagccagaacua

SEQ ID NO: 1141456 - RNA, 19 nt, Artificial Sequence
  Description of Artificial Sequence: Synthetic oligonucleotide
  Sense strand starting at position 3560 of SEQ ID NO: 916244
agguguguucuguggaaag

SEQ ID NO: 1141457 - RNA, 19 nt, Artificial Sequence
  Description of Artificial Sequence: Synthetic oligonucleotide
  Antisense strand to SEQ ID NO: 1141456
cuuuccacagaacacaccu

SEQ ID NO: 1141458 - RNA, 19 nt, Artificial Sequence
  Description of Artificial Sequence: Synthetic oligonucleotide
  Sense strand starting at position 3578 of SEQ ID NO: 916244
ggcaguucuccuuugccuu

SEQ ID NO: 1141459 - RNA, 19 nt, Artificial Sequence
  Description of Artificial Sequence: Synthetic oligonucleotide
  Antisense strand to SEQ ID NO: 1141458
aaggcaaaggagaacugcc

SEQ ID NO: 1141460 - RNA, 19 nt, Artificial Sequence
  Description of Artificial Sequence: Synthetic oligonucleotide
  Sense strand starting at position 3766 of SEQ ID NO: 916244
ggcagaguucugggucuca

SEQ ID NO: 1141461 - RNA, 19 nt, Artificial Sequence
  Description of Artificial Sequence: Synthetic oligonucleotide
  Antisense strand to SEQ ID NO: 1141460
ugagacccagaacucugcc

SEQ ID NO: 1141462 - RNA, 19 nt, Artificial Sequence
  Description of Artificial Sequence: Synthetic oligonucleotide
  Sense strand starting at position 3832 of SEQ ID NO: 916244
agacgaaucuuauccuugu

SEQ ID NO: 1141463 - RNA, 19 nt, Artificial Sequence
  Description of Artificial Sequence: Synthetic oligonucleotide
  Antisense strand to SEQ ID NO: 1141462
acaaggauaagauucgucu

SEQ ID NO: 1141464 - RNA, 19 nt, Artificial Sequence
  Description of Artificial Sequence: Synthetic oligonucleotide
  Sense strand starting at position 3833 of SEQ ID NO: 916244
gacgaaucuuauccuuguu

SEQ ID NO: 1141465 - RNA, 19 nt, Artificial Sequence
  Description of Artificial Sequence: Synthetic oligonucleotide
  Antisense strand to SEQ ID NO: 1141464
aacaaggauaagauucguc

SEQ ID NO: 1141466 - RNA, 19 nt, Artificial Sequence
  Description of Artificial Sequence: Synthetic oligonucleotide
  Sense strand starting at position 3861 of SEQ ID NO: 916244
uaugauuuaucugaaacgu

SEQ ID NO: 1141467 - RNA, 19 nt, Artificial Sequence
  Description of Artificial Sequence: Synthetic oligonucleotide
  Antisense strand to SEQ ID NO: 1141466
acguuucagauaaaucaua

SEQ ID NO: 1141468 - RNA, 19 nt, Artificial Sequence
  Description of Artificial Sequence: Synthetic oligonucleotide
  Sense strand starting at position 3981 of SEQ ID NO: 916244
agcuuuauacucuaaugag

SEQ ID NO: 1141469 - RNA, 19 nt, Artificial Sequence
  Description of Artificial Sequence: Synthetic oligonucleotide
  Antisense strand to SEQ ID NO: 1141468
cucauuagaguauaaagcu

SEQ ID NO: 1141470 - RNA, 19 nt, Artificial Sequence
  Description of Artificial Sequence: Synthetic oligonucleotide
  Sense strand starting at position 446 of SEQ ID NO: 916245
agcacuaaucccuauguga

SEQ ID NO: 1141471 - RNA, 19 nt, Artificial Sequence
  Description of Artificial Sequence: Synthetic oligonucleotide
  Antisense strand to SEQ ID NO: 1141470
ucacauagggauuagugcu

SEQ ID NO: 1141472 - RNA, 19 nt, Artificial Sequence
  Description of Artificial Sequence: Synthetic oligonucleotide
  Sense strand starting at position 530 of SEQ ID NO: 916245
agggcuccucacugcuaaa

SEQ ID NO: 1141473 - RNA, 19 nt, Artificial Sequence
  Description of Artificial Sequence: Synthetic oligonucleotide
  Antisense strand to SEQ ID NO: 1141472
uuuagcagugaggagcccu

SEQ ID NO: 1141474 - RNA, 19 nt, Artificial Sequence
  Description of Artificial Sequence: Synthetic oligonucleotide
  Sense strand starting at position 591 of SEQ ID NO: 916245
caugaaaccugaguguaaa

SEQ ID NO: 1141475 - RNA, 19 nt, Artificial Sequence
  Description of Artificial Sequence: Synthetic oligonucleotide
  Antisense strand to SEQ ID NO: 1141474
uuuacacucagguuucaug

SEQ ID NO: 1141476 - RNA, 19 nt, Artificial Sequence
  Description of Artificial Sequence: Synthetic oligonucleotide
  Sense strand starting at position 592 of SEQ ID NO: 916245
augaaaccugaguguaaau

SEQ ID NO: 1141477 - RNA, 19 nt, Artificial Sequence
  Description of Artificial Sequence: Synthetic oligonucleotide
  Antisense strand to SEQ ID NO: 1141476
auuuacacucagguuucau

SEQ ID NO: 1141478 - RNA, 19 nt, Artificial Sequence
  Description of Artificial Sequence: Synthetic oligonucleotide
  Sense strand starting at position 637 of SEQ ID NO: 916245
ggauccucucuuggucauu

SEQ ID NO: 1141479 - RNA, 19 nt, Artificial Sequence
  Description of Artificial Sequence: Synthetic oligonucleotide
  Antisense strand to SEQ ID NO: 1141478
aaugaccaagagaggaucc

SEQ ID NO: 1141480 - RNA, 19 nt, Artificial Sequence
  Description of Artificial Sequence: Synthetic oligonucleotide
  Sense strand starting at position 646 of SEQ ID NO: 916245
cuuggucauuucugcuuau

SEQ ID NO: 1141481 - RNA, 19 nt, Artificial Sequence
  Description of Artificial Sequence: Synthetic oligonucleotide
  Antisense strand to SEQ ID NO: 1141480
auaagcagaaaugaccaag

SEQ ID NO: 1141482 - RNA, 19 nt, Artificial Sequence
  Description of Artificial Sequence: Synthetic oligonucleotide
  Sense strand starting at position 649 of SEQ ID NO: 916245
ggucauuucugcuuaugau

SEQ ID NO: 1141483 - RNA, 19 nt, Artificial Sequence
  Description of Artificial Sequence: Synthetic oligonucleotide
  Antisense strand to SEQ ID NO: 1141482
aucauaagcagaaaugacc

SEQ ID NO: 1141484 - RNA, 19 nt, Artificial Sequence
  Description of Artificial Sequence: Synthetic oligonucleotide
  Sense strand starting at position 658 of SEQ ID NO: 916245
ugcuuaugaucuuuaggag

SEQ ID NO: 1141485 - RNA, 19 nt, Artificial Sequence
  Description of Artificial Sequence: Synthetic oligonucleotide
  Antisense strand to SEQ ID NO: 1141484
cuccuaaagaucauaagca

SEQ ID NO: 1141486 - RNA, 19 nt, Artificial Sequence
  Description of Artificial Sequence: Synthetic oligonucleotide
  Sense strand starting at position 661 of SEQ ID NO: 916245
uuaugaucuuuaggagaaa

SEQ ID NO: 1141487 - RNA, 19 nt, Artificial Sequence
  Description of Artificial Sequence: Synthetic oligonucleotide
  Antisense strand to SEQ ID NO: 1141486
uuucuccuaaagaucauaa

SEQ ID NO: 1141488 - RNA, 19 nt, Artificial Sequence
  Description of Artificial Sequence: Synthetic oligonucleotide
  Sense strand starting at position 690 of SEQ ID NO: 916245
gggacaugaaaguguuggu

SEQ ID NO: 1141489 - RNA, 19 nt, Artificial Sequence
  Description of Artificial Sequence: Synthetic oligonucleotide
  Antisense strand to SEQ ID NO: 1141488
accaacacuuucauguccc

SEQ ID NO: 1141490 - RNA, 19 nt, Artificial Sequence
  Description of Artificial Sequence: Synthetic oligonucleotide
  Sense strand starting at position 693 of SEQ ID NO: 916245
acaugaaaguguuggugga

SEQ ID NO: 1141491 - RNA, 19 nt, Artificial Sequence
  Description of Artificial Sequence: Synthetic oligonucleotide
  Antisense strand to SEQ ID NO: 1141490
uccaccaacacuuucaugu

SEQ ID NO: 1141492 - RNA, 19 nt, Artificial Sequence
  Description of Artificial Sequence: Synthetic oligonucleotide
  Sense strand starting at position 695 of SEQ ID NO: 916245
augaaaguguugguggagu

SEQ ID NO: 1141493 - RNA, 19 nt, Artificial Sequence
  Description of Artificial Sequence: Synthetic oligonucleotide
  Antisense strand to SEQ ID NO: 1141492
acuccaccaacacuuucau

SEQ ID NO: 1141494 - RNA, 19 nt, Artificial Sequence
  Description of Artificial Sequence: Synthetic oligonucleotide
  Sense strand starting at position 697 of SEQ ID NO: 916245
gaaaguguugguggagucu

SEQ ID NO: 1141495 - RNA, 19 nt, Artificial Sequence
  Description of Artificial Sequence: Synthetic oligonucleotide
  Antisense strand to SEQ ID NO: 1141494
agacuccaccaacacuuuc

SEQ ID NO: 1141496 - RNA, 19 nt, Artificial Sequence
  Description of Artificial Sequence: Synthetic oligonucleotide
  Sense strand starting at position 1059 of SEQ ID NO: 916245
ggaaguaaaucgggaaauu

SEQ ID NO: 1141497 - RNA, 19 nt, Artificial Sequence
  Description of Artificial Sequence: Synthetic oligonucleotide
  Antisense strand to SEQ ID NO: 1141496
aauuucccgauuuacuucc

SEQ ID NO: 1141498 - RNA, 19 nt, Artificial Sequence
  Description of Artificial Sequence: Synthetic oligonucleotide
  Sense strand starting at position 1161 of SEQ ID NO: 916245
ggcucuaauccuggcacuu

SEQ ID NO: 1141499 - RNA, 19 nt, Artificial Sequence
  Description of Artificial Sequence: Synthetic oligonucleotide
  Antisense strand to SEQ ID NO: 1141498
aagugccaggauuagagcc

SEQ ID NO: 1141500 - RNA, 19 nt, Artificial Sequence
  Description of Artificial Sequence: Synthetic oligonucleotide
  Sense strand starting at position 1182 of SEQ ID NO: 916245
caggcuucgccucaaggaa

SEQ ID NO: 1141501 - RNA, 19 nt, Artificial Sequence
  Description of Artificial Sequence: Synthetic oligonucleotide
  Antisense strand to SEQ ID NO: 1141500
uuccuugaggcgaagccug

SEQ ID NO: 1141502 - RNA, 19 nt, Artificial Sequence
  Description of Artificial Sequence: Synthetic oligonucleotide
  Sense strand starting at position 1197 of SEQ ID NO: 916245
ggaauauguuuauccggcu

SEQ ID NO: 1141503 - RNA, 19 nt, Artificial Sequence
  Description of Artificial Sequence: Synthetic oligonucleotide
  Antisense strand to SEQ ID NO: 1141502
agccggauaaacauauucc

SEQ ID NO: 1141504 - RNA, 19 nt, Artificial Sequence
  Description of Artificial Sequence: Synthetic oligonucleotide
  Sense strand starting at position 1198 of SEQ ID NO: 916245
gaauauguuuauccggcua

SEQ ID NO: 1141505 - RNA, 19 nt, Artificial Sequence
  Description of Artificial Sequence: Synthetic oligonucleotide
  Antisense strand to SEQ ID NO: 1141504
uagccggauaaacauauuc

SEQ ID NO: 1141506 - RNA, 19 nt, Artificial Sequence
  Description of Artificial Sequence: Synthetic oligonucleotide
  Sense strand starting at position 1200 of SEQ ID NO: 916245
auauguuuauccggcuaau

SEQ ID NO: 1141507 - RNA, 19 nt, Artificial Sequence
  Description of Artificial Sequence: Synthetic oligonucleotide
  Antisense strand to SEQ ID NO: 1141506
auuagccggauaaacauau

SEQ ID NO: 1141508 - RNA, 19 nt, Artificial Sequence
  Description of Artificial Sequence: Synthetic oligonucleotide
  Sense strand starting at position 1203 of SEQ ID NO: 916245
uguuuauccggcuaauaca

SEQ ID NO: 1141509 - RNA, 19 nt, Artificial Sequence
  Description of Artificial Sequence: Synthetic oligonucleotide
  Antisense strand to SEQ ID NO: 1141508
uguauuagccggauaaaca

SEQ ID NO: 1141510 - RNA, 19 nt, Artificial Sequence
  Description of Artificial Sequence: Synthetic oligonucleotide
  Sense strand starting at position 2781 of SEQ ID NO: 916245
guggcaugaucagucccaa

SEQ ID NO: 1141511 - RNA, 19 nt, Artificial Sequence
  Description of Artificial Sequence: Synthetic oligonucleotide
  Antisense strand to SEQ ID NO: 1141510
uugggacugaucaugccac

SEQ ID NO: 1141512 - RNA, 19 nt, Artificial Sequence
  Description of Artificial Sequence: Synthetic oligonucleotide
  Sense strand starting at position 2891 of SEQ ID NO: 916245
gcaccugucgggugagaaa

SEQ ID NO: 1141513 - RNA, 19 nt, Artificial Sequence
  Description of Artificial Sequence: Synthetic oligonucleotide
  Antisense strand to SEQ ID NO: 1141512
uuucucacccgacaggugc

SEQ ID NO: 1141514 - RNA, 19 nt, Artificial Sequence
  Description of Artificial Sequence: Synthetic oligonucleotide
  Sense strand starting at position 2982 of SEQ ID NO: 916245
uaccuugagugagagaaau

SEQ ID NO: 1141515 - RNA, 19 nt, Artificial Sequence
  Description of Artificial Sequence: Synthetic oligonucleotide
  Antisense strand to SEQ ID NO: 1141514
auuucucucacucaaggua

SEQ ID NO: 1141516 - RNA, 19 nt, Artificial Sequence
  Description of Artificial Sequence: Synthetic oligonucleotide
  Sense strand starting at position 3009 of SEQ ID NO: 916245
gaaggaggccucuggcaaa

SEQ ID NO: 1141517 - RNA, 19 nt, Artificial Sequence
  Description of Artificial Sequence: Synthetic oligonucleotide
  Antisense strand to SEQ ID NO: 1141516
uuugccagaggccuccuuc

SEQ ID NO: 1141518 - RNA, 19 nt, Artificial Sequence
  Description of Artificial Sequence: Synthetic oligonucleotide
  Sense strand starting at position 3027 of SEQ ID NO: 916245
aaugccaucuguggauuua

SEQ ID NO: 1141519 - RNA, 19 nt, Artificial Sequence
  Description of Artificial Sequence: Synthetic oligonucleotide
  Antisense strand to SEQ ID NO: 1141518
uaaauccacagauggcauu

SEQ ID NO: 1141520 - RNA, 19 nt, Artificial Sequence
  Description of Artificial Sequence: Synthetic oligonucleotide
  Sense strand starting at position 3067 of SEQ ID NO: 916245
cuguuaaguguuuacaaag

SEQ ID NO: 1141521 - RNA, 19 nt, Artificial Sequence
  Description of Artificial Sequence: Synthetic oligonucleotide
  Antisense strand to SEQ ID NO: 1141520
cuuuguaaacacuuaacag

SEQ ID NO: 1141522 - RNA, 19 nt, Artificial Sequence
  Description of Artificial Sequence: Synthetic oligonucleotide
  Sense strand starting at position 3097 of SEQ ID NO: 916245
uuuacagaugugggacauu

SEQ ID NO: 1141523 - RNA, 19 nt, Artificial Sequence
  Description of Artificial Sequence: Synthetic oligonucleotide
  Antisense strand to SEQ ID NO: 1141522
aaugucccacaucuguaaa

SEQ ID NO: 1141524 - RNA, 19 nt, Artificial Sequence
  Description of Artificial Sequence: Synthetic oligonucleotide
  Sense strand starting at position 3115 of SEQ ID NO: 916245
ucuagugggugcccaauau

SEQ ID NO: 1141525 - RNA, 19 nt, Artificial Sequence
  Description of Artificial Sequence: Synthetic oligonucleotide
  Antisense strand to SEQ ID NO: 1141524
auauugggcacccacuaga

SEQ ID NO: 1141526 - RNA, 19 nt, Artificial Sequence
  Description of Artificial Sequence: Synthetic oligonucleotide
  Sense strand starting at position 3192 of SEQ ID NO: 916245
aagguaaagugggaaugaa

SEQ ID NO: 1141527 - RNA, 19 nt, Artificial Sequence
  Description of Artificial Sequence: Synthetic oligonucleotide
  Antisense strand to SEQ ID NO: 1141526
uucauucccacuuuaccuu

SEQ ID NO: 1141528 - RNA, 19 nt, Artificial Sequence
  Description of Artificial Sequence: Synthetic oligonucleotide
  Sense strand starting at position 3224 of SEQ ID NO: 916245
ugggauaaccaccgucagu

SEQ ID NO: 1141529 - RNA, 19 nt, Artificial Sequence
  Description of Artificial Sequence: Synthetic oligonucleotide
  Antisense strand to SEQ ID NO: 1141528
acugacggugguuauccca

SEQ ID NO: 1141530 - RNA, 19 nt, Artificial Sequence
  Description of Artificial Sequence: Synthetic oligonucleotide
  Sense strand starting at position 3365 of SEQ ID NO: 916245
cucaguguggcauggagua

SEQ ID NO: 1141531 - RNA, 19 nt, Artificial Sequence
  Description of Artificial Sequence: Synthetic oligonucleotide
  Antisense strand to SEQ ID NO: 1141530
uacuccaugccacacugag

SEQ ID NO: 1141532 - RNA, 19 nt, Artificial Sequence
  Description of Artificial Sequence: Synthetic oligonucleotide
  Sense strand starting at position 3383 of SEQ ID NO: 916245
agggaagaguuguauauca

SEQ ID NO: 1141533 - RNA, 19 nt, Artificial Sequence
  Description of Artificial Sequence: Synthetic oligonucleotide
  Antisense strand to SEQ ID NO: 1141532
ugauauacaacucuucccu

SEQ ID NO: 1141534 - RNA, 19 nt, Artificial Sequence
  Description of Artificial Sequence: Synthetic oligonucleotide
  Sense strand starting at position 3388 of SEQ ID NO: 916245
agaguuguauaucauugua

SEQ ID NO: 1141535 - RNA, 19 nt, Artificial Sequence
  Description of Artificial Sequence: Synthetic oligonucleotide
  Antisense strand to SEQ ID NO: 1141534
uacaaugauauacaacucu

SEQ ID NO: 1141536 - RNA, 19 nt, Artificial Sequence
  Description of Artificial Sequence: Synthetic oligonucleotide
  Sense strand starting at position 3390 of SEQ ID NO: 916245
aguuguauaucauuguaga

SEQ ID NO: 1141537 - RNA, 19 nt, Artificial Sequence
  Description of Artificial Sequence: Synthetic oligonucleotide
  Antisense strand to SEQ ID NO: 1141536
ucuacaaugauauacaacu

SEQ ID NO: 1141538 - RNA, 19 nt, Artificial Sequence
  Description of Artificial Sequence: Synthetic oligonucleotide
  Sense strand starting at position 3391 of SEQ ID NO: 916245
guuguauaucauuguagaa

SEQ ID NO: 1141539 - RNA, 19 nt, Artificial Sequence
  Description of Artificial Sequence: Synthetic oligonucleotide
  Antisense strand to SEQ ID NO: 1141538
uucuacaaugauauacaac

SEQ ID NO: 1141540 - RNA, 19 nt, Artificial Sequence
  Description of Artificial Sequence: Synthetic oligonucleotide
  Sense strand starting at position 3393 of SEQ ID NO: 916245
uguauaucauuguagaaca

SEQ ID NO: 1141541 - RNA, 19 nt, Artificial Sequence
  Description of Artificial Sequence: Synthetic oligonucleotide
  Antisense strand to SEQ ID NO: 1141540
uguucuacaaugauauaca

SEQ ID NO: 1141542 - RNA, 19 nt, Artificial Sequence
  Description of Artificial Sequence: Synthetic oligonucleotide
  Sense strand starting at position 3459 of SEQ ID NO: 916245
ugcucuucuuccugguauu

SEQ ID NO: 1141543 - RNA, 19 nt, Artificial Sequence
  Description of Artificial Sequence: Synthetic oligonucleotide
  Antisense strand to SEQ ID NO: 1141542
aauaccaggaagaagagca

SEQ ID NO: 1141544 - RNA, 19 nt, Artificial Sequence
  Description of Artificial Sequence: Synthetic oligonucleotide
  Sense strand starting at position 3678 of SEQ ID NO: 916245
gcggcugacuccuauaauu

SEQ ID NO: 1141545 - RNA, 19 nt, Artificial Sequence
  Description of Artificial Sequence: Synthetic oligonucleotide
  Antisense strand to SEQ ID NO: 1141544
aauuauaggagucagccgc

SEQ ID NO: 1141546 - RNA, 19 nt, Artificial Sequence
  Description of Artificial Sequence: Synthetic oligonucleotide
  Sense strand starting at position 3931 of SEQ ID NO: 916245
aagcaagacucaguguuaa

SEQ ID NO: 1141547 - RNA, 19 nt, Artificial Sequence
  Description of Artificial Sequence: Synthetic oligonucleotide
  Antisense strand to SEQ ID NO: 1141546
uuaacacugagucuugcuu

SEQ ID NO: 1141548 - RNA, 19 nt, Artificial Sequence
  Description of Artificial Sequence: Synthetic oligonucleotide
  Sense strand starting at position 3969 of SEQ ID NO: 916245
guggacuccugauauauuu

SEQ ID NO: 1141549 - RNA, 19 nt, Artificial Sequence
  Description of Artificial Sequence: Synthetic oligonucleotide
  Antisense strand to SEQ ID NO: 1141548
aaauauaucaggaguccac

SEQ ID NO: 1141550 - RNA, 19 nt, Artificial Sequence
  Description of Artificial Sequence: Synthetic oligonucleotide
  Sense strand starting at position 74 of SEQ ID NO: 916246
aaacaaguguguccagaau

SEQ ID NO: 1141551 - RNA, 19 nt, Artificial Sequence
  Description of Artificial Sequence: Synthetic oligonucleotide
  Antisense strand to SEQ ID NO: 1141550
auucuggacacacuuguuu

SEQ ID NO: 1141552 - RNA, 19 nt, Artificial Sequence
  Description of Artificial Sequence: Synthetic oligonucleotide
  Sense strand starting at position 153 of SEQ ID NO: 916246
gcgaucaacuguuugggaa

SEQ ID NO: 1141553 - RNA, 19 nt, Artificial Sequence
  Description of Artificial Sequence: Synthetic oligonucleotide
  Antisense strand to SEQ ID NO: 1141552
uucccaaacaguugaucgc

SEQ ID NO: 1141554 - RNA, 19 nt, Artificial Sequence
  Description of Artificial Sequence: Synthetic oligonucleotide
  Sense strand starting at position 154 of SEQ ID NO: 916246
cgaucaacuguuugggaau

SEQ ID NO: 1141555 - RNA, 19 nt, Artificial Sequence
  Description of Artificial Sequence: Synthetic oligonucleotide
  Antisense strand to SEQ ID NO: 1141554
auucccaaacaguugaucg

SEQ ID NO: 1141556 - RNA, 19 nt, Artificial Sequence
  Description of Artificial Sequence: Synthetic oligonucleotide
  Sense strand starting at position 167 of SEQ ID NO: 916246
gggaaucauugcguuaaac

SEQ ID NO: 1141557 - RNA, 19 nt, Artificial Sequence
  Description of Artificial Sequence: Synthetic oligonucleotide
  Antisense strand to SEQ ID NO: 1141556
guuuaacgcaaugauuccc

SEQ ID NO: 1141558 - RNA, 19 nt, Artificial Sequence
  Description of Artificial Sequence: Synthetic oligonucleotide
  Sense strand starting at position 196 of SEQ ID NO: 916246
ggauuucucuacuacagga

SEQ ID NO: 1141559 - RNA, 19 nt, Artificial Sequence
  Description of Artificial Sequence: Synthetic oligonucleotide
  Antisense strand to SEQ ID NO: 1141558
uccuguaguagagaaaucc

SEQ ID NO: 1141560 - RNA, 19 nt, Artificial Sequence
  Description of Artificial Sequence: Synthetic oligonucleotide
  Sense strand starting at position 234 of SEQ ID NO: 916246
ugcuauuaugccuugcgau

SEQ ID NO: 1141561 - RNA, 19 nt, Artificial Sequence
  Description of Artificial Sequence: Synthetic oligonucleotide
  Antisense strand to SEQ ID NO: 1141560
aucgcaaggcauaauagca

SEQ ID NO: 1141562 - RNA, 19 nt, Artificial Sequence
  Description of Artificial Sequence: Synthetic oligonucleotide
  Sense strand starting at position 249 of SEQ ID NO: 916246
cgaucucuaagaggguaau

SEQ ID NO: 1141563 - RNA, 19 nt, Artificial Sequence
  Description of Artificial Sequence: Synthetic oligonucleotide
  Antisense strand to SEQ ID NO: 1141562
auuacccucuuagagaucg

SEQ ID NO: 1141564 - RNA, 19 nt, Artificial Sequence
  Description of Artificial Sequence: Synthetic oligonucleotide
  Sense strand starting at position 276 of SEQ ID NO: 916246
cagaguuucccaugggacu

SEQ ID NO: 1141565 - RNA, 19 nt, Artificial Sequence
  Description of Artificial Sequence: Synthetic oligonucleotide
  Antisense strand to SEQ ID NO: 1141564
agucccaugggaaacucug

SEQ ID NO: 1141566 - RNA, 19 nt, Artificial Sequence
  Description of Artificial Sequence: Synthetic oligonucleotide
  Sense strand starting at position 277 of SEQ ID NO: 916246
agaguuucccaugggacua

SEQ ID NO: 1141567 - RNA, 19 nt, Artificial Sequence
  Description of Artificial Sequence: Synthetic oligonucleotide
  Antisense strand to SEQ ID NO: 1141566
uagucccaugggaaacucu

SEQ ID NO: 1141568 - RNA, 19 nt, Artificial Sequence
  Description of Artificial Sequence: Synthetic oligonucleotide
  Sense strand starting at position 302 of SEQ ID NO: 916246
cucagaacuuucuuuggaa

SEQ ID NO: 1141569 - RNA, 19 nt, Artificial Sequence
  Description of Artificial Sequence: Synthetic oligonucleotide
  Antisense strand to SEQ ID NO: 1141568
uuccaaagaaaguucugag

SEQ ID NO: 1141570 - RNA, 19 nt, Artificial Sequence
  Description of Artificial Sequence: Synthetic oligonucleotide
  Sense strand starting at position 382 of SEQ ID NO: 916246
agggcugugccuuaaugaa

SEQ ID NO: 1141571 - RNA, 19 nt, Artificial Sequence
  Description of Artificial Sequence: Synthetic oligonucleotide
  Antisense strand to SEQ ID NO: 1141570
uucauuaaggcacagcccu

SEQ ID NO: 1141572 - RNA, 19 nt, Artificial Sequence
  Description of Artificial Sequence: Synthetic oligonucleotide
  Sense strand starting at position 477 of SEQ ID NO: 916246
agaggugucugaaggaaga

SEQ ID NO: 1141573 - RNA, 19 nt, Artificial Sequence
  Description of Artificial Sequence: Synthetic oligonucleotide
  Antisense strand to SEQ ID NO: 1141572
ucuuccuucagacaccucu

SEQ ID NO: 1141574 - RNA, 19 nt, Artificial Sequence
  Description of Artificial Sequence: Synthetic oligonucleotide
  Sense strand starting at position 504 of SEQ ID NO: 916246
aagcaaagugcuggagaga

SEQ ID NO: 1141575 - RNA, 19 nt, Artificial Sequence
  Description of Artificial Sequence: Synthetic oligonucleotide
  Antisense strand to SEQ ID NO: 1141574
ucucuccagcacuuugcuu

SEQ ID NO: 1141576 - RNA, 19 nt, Artificial Sequence
  Description of Artificial Sequence: Synthetic oligonucleotide
  Sense strand starting at position 505 of SEQ ID NO: 916246
agcaaagugcuggagagau

SEQ ID NO: 1141577 - RNA, 19 nt, Artificial Sequence
  Description of Artificial Sequence: Synthetic oligonucleotide
  Antisense strand to SEQ ID NO: 1141576
aucucuccagcacuuugcu

SEQ ID NO: 1141578 - RNA, 19 nt, Artificial Sequence
  Description of Artificial Sequence: Synthetic oligonucleotide
  Sense strand starting at position 695 of SEQ ID NO: 916246
uguauuauguccucuauag

SEQ ID NO: 1141579 - RNA, 19 nt, Artificial Sequence
  Description of Artificial Sequence: Synthetic oligonucleotide
  Antisense strand to SEQ ID NO: 1141578
cuauagaggacauaauaca

SEQ ID NO: 1141580 - RNA, 19 nt, Artificial Sequence
  Description of Artificial Sequence: Synthetic oligonucleotide
  Sense strand starting at position 699 of SEQ ID NO: 916246
uuauguccucuauagacau

SEQ ID NO: 1141581 - RNA, 19 nt, Artificial Sequence
  Description of Artificial Sequence: Synthetic oligonucleotide
  Antisense strand to SEQ ID NO: 1141580
augucuauagaggacauaa

SEQ ID NO: 1141582 - RNA, 19 nt, Artificial Sequence
  Description of Artificial Sequence: Synthetic oligonucleotide
  Sense strand starting at position 756 of SEQ ID NO: 916246
ggugcaugcaguuaaacaa

SEQ ID NO: 1141583 - RNA, 19 nt, Artificial Sequence
  Description of Artificial Sequence: Synthetic oligonucleotide
  Antisense strand to SEQ ID NO: 1141582
uuguuuaacugcaugcacc

SEQ ID NO: 1141584 - RNA, 19 nt, Artificial Sequence
  Description of Artificial Sequence: Synthetic oligonucleotide
  Sense strand starting at position 788 of SEQ ID NO: 916246
gagcuuagaagguguguaa

SEQ ID NO: 1141585 - RNA, 19 nt, Artificial Sequence
  Description of Artificial Sequence: Synthetic oligonucleotide
  Antisense strand to SEQ ID NO: 1141584
uuacacaccuucuaagcuc

SEQ ID NO: 1141586 - RNA, 19 nt, Artificial Sequence
  Description of Artificial Sequence: Synthetic oligonucleotide
  Sense strand starting at position 954 of SEQ ID NO: 916246
accagaacauuuggaggaa

SEQ ID NO: 1141587 - RNA, 19 nt, Artificial Sequence
  Description of Artificial Sequence: Synthetic oligonucleotide
  Antisense strand to SEQ ID NO: 1141586
uuccuccaaauguucuggu

SEQ ID NO: 1141588 - RNA, 19 nt, Artificial Sequence
  Description of Artificial Sequence: Synthetic oligonucleotide
  Sense strand starting at position 1186 of SEQ ID NO: 916246
ugugacacuugcuuauaaa

SEQ ID NO: 1141589 - RNA, 19 nt, Artificial Sequence
  Description of Artificial Sequence: Synthetic oligonucleotide
  Antisense strand to SEQ ID NO: 1141588
uuuauaagcaagugucaca

SEQ ID NO: 1141590 - RNA, 19 nt, Artificial Sequence
  Description of Artificial Sequence: Synthetic oligonucleotide
  Sense strand starting at position 1187 of SEQ ID NO: 916246
gugacacuugcuuauaaag

SEQ ID NO: 1141591 - RNA, 19 nt, Artificial Sequence
  Description of Artificial Sequence: Synthetic oligonucleotide
  Antisense strand to SEQ ID NO: 1141590
cuuuauaagcaagugucac

SEQ ID NO: 1141592 - RNA, 19 nt, Artificial Sequence
  Description of Artificial Sequence: Synthetic oligonucleotide
  Sense strand starting at position 1364 of SEQ ID NO: 916246
augaaucaugcucaguuaa

SEQ ID NO: 1141593 - RNA, 19 nt, Artificial Sequence
  Description of Artificial Sequence: Synthetic oligonucleotide
  Antisense strand to SEQ ID NO: 1141592
uuaacugagcaugauucau

SEQ ID NO: 1141594 - RNA, 19 nt, Artificial Sequence
  Description of Artificial Sequence: Synthetic oligonucleotide
  Sense strand starting at position 1481 of SEQ ID NO: 916246
uaucauauuuguggagaga

SEQ ID NO: 1141595 - RNA, 19 nt, Artificial Sequence
  Description of Artificial Sequence: Synthetic oligonucleotide
  Antisense strand to SEQ ID NO: 1141594
ucucuccacaaauaugaua

SEQ ID NO: 1141596 - RNA, 19 nt, Artificial Sequence
  Description of Artificial Sequence: Synthetic oligonucleotide
  Sense strand starting at position 1614 of SEQ ID NO: 916246
gaaguuucugaaggcaaag

SEQ ID NO: 1141597 - RNA, 19 nt, Artificial Sequence
  Description of Artificial Sequence: Synthetic oligonucleotide
  Antisense strand to SEQ ID NO: 1141596
cuuugccuucagaaacuuc

SEQ ID NO: 1141598 - RNA, 19 nt, Artificial Sequence
  Description of Artificial Sequence: Synthetic oligonucleotide
  Sense strand starting at position 1672 of SEQ ID NO: 916246
gggucuguagcagaauaaa

SEQ ID NO: 1141599 - RNA, 19 nt, Artificial Sequence
  Description of Artificial Sequence: Synthetic oligonucleotide
  Antisense strand to SEQ ID NO: 1141598
uuuauucugcuacagaccc

SEQ ID NO: 1141600 - RNA, 19 nt, Artificial Sequence
  Description of Artificial Sequence: Synthetic oligonucleotide
  Sense strand starting at position 1736 of SEQ ID NO: 916246
gcucguaaauuucucuauu

SEQ ID NO: 1141601 - RNA, 19 nt, Artificial Sequence
  Description of Artificial Sequence: Synthetic oligonucleotide
  Antisense strand to SEQ ID NO: 1141600
aauagagaaauuuacgagc

SEQ ID NO: 1141602 - RNA, 19 nt, Artificial Sequence
  Description of Artificial Sequence: Synthetic oligonucleotide
  Sense strand starting at position 2104 of SEQ ID NO: 916246
ccagacuuccucuggcuaa

SEQ ID NO: 1141603 - RNA, 19 nt, Artificial Sequence
  Description of Artificial Sequence: Synthetic oligonucleotide
  Antisense strand to SEQ ID NO: 1141602
uuagccagaggaagucugg

SEQ ID NO: 1141604 - RNA, 19 nt, Artificial Sequence
  Description of Artificial Sequence: Synthetic oligonucleotide
  Sense strand starting at position 2143 of SEQ ID NO: 916246
aacgcuguucuggaggaaa

SEQ ID NO: 1141605 - RNA, 19 nt, Artificial Sequence
  Description of Artificial Sequence: Synthetic oligonucleotide
  Antisense strand to SEQ ID NO: 1141604
uuuccuccagaacagcguu

SEQ ID NO: 1141606 - RNA, 19 nt, Artificial Sequence
  Description of Artificial Sequence: Synthetic oligonucleotide
  Sense strand starting at position 2307 of SEQ ID NO: 916246
ucuccuagucauugaaaug

SEQ ID NO: 1141607 - RNA, 19 nt, Artificial Sequence
  Description of Artificial Sequence: Synthetic oligonucleotide
  Antisense strand to SEQ ID NO: 1141606
cauuucaaugacuaggaga

SEQ ID NO: 1141608 - RNA, 19 nt, Artificial Sequence
  Description of Artificial Sequence: Synthetic oligonucleotide
  Sense strand starting at position 2532 of SEQ ID NO: 916246
ccagcacuuugucugggau

SEQ ID NO: 1141609 - RNA, 19 nt, Artificial Sequence
  Description of Artificial Sequence: Synthetic oligonucleotide
  Antisense strand to SEQ ID NO: 1141608
aucccagacaaagugcugg

SEQ ID NO: 1141610 - RNA, 19 nt, Artificial Sequence
  Description of Artificial Sequence: Synthetic oligonucleotide
  Sense strand starting at position 2535 of SEQ ID NO: 916246
gcacuuugucugggaucac

SEQ ID NO: 1141611 - RNA, 19 nt, Artificial Sequence
  Description of Artificial Sequence: Synthetic oligonucleotide
  Antisense strand to SEQ ID NO: 1141610
gugaucccagacaaagugc

SEQ ID NO: 1141612 - RNA, 19 nt, Artificial Sequence
  Description of Artificial Sequence: Synthetic oligonucleotide
  Sense strand starting at position 2554 of SEQ ID NO: 916246
agaauuuauuucugcaaug

SEQ ID NO: 1141613 - RNA, 19 nt, Artificial Sequence
  Description of Artificial Sequence: Synthetic oligonucleotide
  Antisense strand to SEQ ID NO: 1141612
cauugcagaaauaaauucu

SEQ ID NO: 1141614 - RNA, 19 nt, Artificial Sequence
  Description of Artificial Sequence: Synthetic oligonucleotide
  Sense strand starting at position 2633 of SEQ ID NO: 916246
aguggugcucuccaacaga

SEQ ID NO: 1141615 - RNA, 19 nt, Artificial Sequence
  Description of Artificial Sequence: Synthetic oligonucleotide
  Antisense strand to SEQ ID NO: 1141614
ucuguuggagagcaccacu

SEQ ID NO: 1141616 - RNA, 19 nt, Artificial Sequence
  Description of Artificial Sequence: Synthetic oligonucleotide
  Sense strand starting at position 2636 of SEQ ID NO: 916246
ggugcucuccaacagaaau

SEQ ID NO: 1141617 - RNA, 19 nt, Artificial Sequence
  Description of Artificial Sequence: Synthetic oligonucleotide
  Antisense strand to SEQ ID NO: 1141616
auuucuguuggagagcacc

SEQ ID NO: 1141618 - RNA, 19 nt, Artificial Sequence
  Description of Artificial Sequence: Synthetic oligonucleotide
  Sense strand starting at position 3063 of SEQ ID NO: 916246
agccgugaacuucaagguu

SEQ ID NO: 1141619 - RNA, 19 nt, Artificial Sequence
  Description of Artificial Sequence: Synthetic oligonucleotide
  Antisense strand to SEQ ID NO: 1141618
aaccuugaaguucacggcu

SEQ ID NO: 1141620 - RNA, 19 nt, Artificial Sequence
  Description of Artificial Sequence: Synthetic oligonucleotide
  Sense strand starting at position 3400 of SEQ ID NO: 916246
ugaucagaacacuguaauu

SEQ ID NO: 1141621 - RNA, 19 nt, Artificial Sequence
  Description of Artificial Sequence: Synthetic oligonucleotide
  Antisense strand to SEQ ID NO: 1141620
aauuacaguguucugauca

SEQ ID NO: 1141622 - RNA, 19 nt, Artificial Sequence
  Description of Artificial Sequence: Synthetic oligonucleotide
  Sense strand starting at position 3405 of SEQ ID NO: 916246
agaacacuguaauuagcau

SEQ ID NO: 1141623 - RNA, 19 nt, Artificial Sequence
  Description of Artificial Sequence: Synthetic oligonucleotide
  Antisense strand to SEQ ID NO: 1141622
augcuaauuacaguguucu

SEQ ID NO: 1141624 - RNA, 19 nt, Artificial Sequence
  Description of Artificial Sequence: Synthetic oligonucleotide
  Sense strand starting at position 3443 of SEQ ID NO: 916246
gaugcuuauguuggaaaca

SEQ ID NO: 1141625 - RNA, 19 nt, Artificial Sequence
  Description of Artificial Sequence: Synthetic oligonucleotide
  Antisense strand to SEQ ID NO: 1141624
uguuuccaacauaagcauc

SEQ ID NO: 1141626 - RNA, 19 nt, Artificial Sequence
  Description of Artificial Sequence: Synthetic oligonucleotide
  Sense strand starting at position 3503 of SEQ ID NO: 916246
guuaacuauggccauacua

SEQ ID NO: 1141627 - RNA, 19 nt, Artificial Sequence
  Description of Artificial Sequence: Synthetic oligonucleotide
  Antisense strand to SEQ ID NO: 1141626
uaguauggccauaguuaac

SEQ ID NO: 1141628 - RNA, 19 nt, Artificial Sequence
  Description of Artificial Sequence: Synthetic oligonucleotide
  Sense strand starting at position 3906 of SEQ ID NO: 916246
aguccagguugguccaaau

SEQ ID NO: 1141629 - RNA, 19 nt, Artificial Sequence
  Description of Artificial Sequence: Synthetic oligonucleotide
  Antisense strand to SEQ ID NO: 1141628
auuuggaccaaccuggacu

SEQ ID NO: 1141630 - RNA, 19 nt, Artificial Sequence
  Description of Artificial Sequence: Synthetic oligonucleotide
  Sense strand starting at position 68 of SEQ ID NO: 916247
ggcucugacuuggaacuau

SEQ ID NO: 1141631 - RNA, 19 nt, Artificial Sequence
  Description of Artificial Sequence: Synthetic oligonucleotide
  Antisense strand to SEQ ID NO: 1141630
auaguuccaagucagagcc

SEQ ID NO: 1141632 - RNA, 19 nt, Artificial Sequence
  Description of Artificial Sequence: Synthetic oligonucleotide
  Sense strand starting at position 198 of SEQ ID NO: 916247
ccuggagagucaguauuau

SEQ ID NO: 1141633 - RNA, 19 nt, Artificial Sequence
  Description of Artificial Sequence: Synthetic oligonucleotide
  Antisense strand to SEQ ID NO: 1141632
auaauacugacucuccagg

SEQ ID NO: 1141634 - RNA, 19 nt, Artificial Sequence
  Description of Artificial Sequence: Synthetic oligonucleotide
  Sense strand starting at position 202 of SEQ ID NO: 916247
gagagucaguauuaucuca

SEQ ID NO: 1141635 - RNA, 19 nt, Artificial Sequence
  Description of Artificial Sequence: Synthetic oligonucleotide
  Antisense strand to SEQ ID NO: 1141634
ugagauaauacugacucuc

SEQ ID NO: 1141636 - RNA, 19 nt, Artificial Sequence
  Description of Artificial Sequence: Synthetic oligonucleotide
  Sense strand starting at position 204 of SEQ ID NO: 916247
gagucaguauuaucucaag

SEQ ID NO: 1141637 - RNA, 19 nt, Artificial Sequence
  Description of Artificial Sequence: Synthetic oligonucleotide
  Antisense strand to SEQ ID NO: 1141636
cuugagauaauacugacuc

SEQ ID NO: 1141638 - RNA, 19 nt, Artificial Sequence
  Description of Artificial Sequence: Synthetic oligonucleotide
  Sense strand starting at position 210 of SEQ ID NO: 916247
guauuaucucaagacugug

SEQ ID NO: 1141639 - RNA, 19 nt, Artificial Sequence
  Description of Artificial Sequence: Synthetic oligonucleotide
  Antisense strand to SEQ ID NO: 1141638
cacagucuugagauaauac

SEQ ID NO: 1141640 - RNA, 19 nt, Artificial Sequence
  Description of Artificial Sequence: Synthetic oligonucleotide
  Sense strand starting at position 213 of SEQ ID NO: 916247
uuaucucaagacugugaca

SEQ ID NO: 1141641 - RNA, 19 nt, Artificial Sequence
  Description of Artificial Sequence: Synthetic oligonucleotide
  Antisense strand to SEQ ID NO: 1141640
ugucacagucuugagauaa

SEQ ID NO: 1141642 - RNA, 19 nt, Artificial Sequence
  Description of Artificial Sequence: Synthetic oligonucleotide
  Sense strand starting at position 215 of SEQ ID NO: 916247
aucucaagacugugacacu

SEQ ID NO: 1141643 - RNA, 19 nt, Artificial Sequence
  Description of Artificial Sequence: Synthetic oligonucleotide
  Antisense strand to SEQ ID NO: 1141642
agugucacagucuugagau

SEQ ID NO: 1141644 - RNA, 19 nt, Artificial Sequence
  Description of Artificial Sequence: Synthetic oligonucleotide
  Sense strand starting at position 218 of SEQ ID NO: 916247
ucaagacugugacacugau

SEQ ID NO: 1141645 - RNA, 19 nt, Artificial Sequence
  Description of Artificial Sequence: Synthetic oligonucleotide
  Antisense strand to SEQ ID NO: 1141644
aucagugucacagucuuga

SEQ ID NO: 1141646 - RNA, 19 nt, Artificial Sequence
  Description of Artificial Sequence: Synthetic oligonucleotide
  Sense strand starting at position 224 of SEQ ID NO: 916247
cugugacacugauaauaag

SEQ ID NO: 1141647 - RNA, 19 nt, Artificial Sequence
  Description of Artificial Sequence: Synthetic oligonucleotide
  Antisense strand to SEQ ID NO: 1141646
cuuauuaucagugucacag

SEQ ID NO: 1141648 - RNA, 19 nt, Artificial Sequence
  Description of Artificial Sequence: Synthetic oligonucleotide
  Sense strand starting at position 227 of SEQ ID NO: 916247
ugacacugauaauaagaaa

SEQ ID NO: 1141649 - RNA, 19 nt, Artificial Sequence
  Description of Artificial Sequence: Synthetic oligonucleotide
  Antisense strand to SEQ ID NO: 1141648
uuucuuauuaucaguguca

SEQ ID NO: 1141650 - RNA, 19 nt, Artificial Sequence
  Description of Artificial Sequence: Synthetic oligonucleotide
  Sense strand starting at position 259 of SEQ ID NO: 916247
agcaguauugacugagcau

SEQ ID NO: 1141651 - RNA, 19 nt, Artificial Sequence
  Description of Artificial Sequence: Synthetic oligonucleotide
  Antisense strand to SEQ ID NO: 1141650
augcucagucaauacugcu

SEQ ID NO: 1141652 - RNA, 19 nt, Artificial Sequence
  Description of Artificial Sequence: Synthetic oligonucleotide
  Sense strand starting at position 260 of SEQ ID NO: 916247
gcaguauugacugagcauc

SEQ ID NO: 1141653 - RNA, 19 nt, Artificial Sequence
  Description of Artificial Sequence: Synthetic oligonucleotide
  Antisense strand to SEQ ID NO: 1141652
gaugcucagucaauacugc

SEQ ID NO: 1141654 - RNA, 19 nt, Artificial Sequence
  Description of Artificial Sequence: Synthetic oligonucleotide
  Sense strand starting at position 694 of SEQ ID NO: 916247
gucggacugucuuaagauc

SEQ ID NO: 1141655 - RNA, 19 nt, Artificial Sequence
  Description of Artificial Sequence: Synthetic oligonucleotide
  Antisense strand to SEQ ID NO: 1141654
gaucuuaagacaguccgac

SEQ ID NO: 1141656 - RNA, 19 nt, Artificial Sequence
  Description of Artificial Sequence: Synthetic oligonucleotide
  Sense strand starting at position 702 of SEQ ID NO: 916247
gucuuaagaucuccugucu

SEQ ID NO: 1141657 - RNA, 19 nt, Artificial Sequence
  Description of Artificial Sequence: Synthetic oligonucleotide
  Antisense strand to SEQ ID NO: 1141656
agacaggagaucuuaagac

SEQ ID NO: 1141658 - RNA, 19 nt, Artificial Sequence
  Description of Artificial Sequence: Synthetic oligonucleotide
  Sense strand starting at position 1243 of SEQ ID NO: 916247
gggagucuuugaucuggaa

SEQ ID NO: 1141659 - RNA, 19 nt, Artificial Sequence
  Description of Artificial Sequence: Synthetic oligonucleotide
  Antisense strand to SEQ ID NO: 1141658
uuccagaucaaagacuccc

SEQ ID NO: 1141660 - RNA, 19 nt, Artificial Sequence
  Description of Artificial Sequence: Synthetic oligonucleotide
  Sense strand starting at position 1314 of SEQ ID NO: 916247
gcuggaagcguucaaagag

SEQ ID NO: 1141661 - RNA, 19 nt, Artificial Sequence
  Description of Artificial Sequence: Synthetic oligonucleotide
  Antisense strand to SEQ ID NO: 1141660
cucuuugaacgcuuccagc

SEQ ID NO: 1141662 - RNA, 19 nt, Artificial Sequence
  Description of Artificial Sequence: Synthetic oligonucleotide
  Sense strand starting at position 1329 of SEQ ID NO: 916247
agagaaggcuuaugaaaug

SEQ ID NO: 1141663 - RNA, 19 nt, Artificial Sequence
  Description of Artificial Sequence: Synthetic oligonucleotide
  Antisense strand to SEQ ID NO: 1141662
cauuucauaagccuucucu

SEQ ID NO: 1141664 - RNA, 19 nt, Artificial Sequence
  Description of Artificial Sequence: Synthetic oligonucleotide
  Sense strand starting at position 1370 of SEQ ID NO: 916247
cgaguugagagccaucaga

SEQ ID NO: 1141665 - RNA, 19 nt, Artificial Sequence
  Description of Artificial Sequence: Synthetic oligonucleotide
  Antisense strand to SEQ ID NO: 1141664
ucugauggcucucaacucg

SEQ ID NO: 1141666 - RNA, 19 nt, Artificial Sequence
  Description of Artificial Sequence: Synthetic oligonucleotide
  Sense strand starting at position 1447 of SEQ ID NO: 916247
uggauuacagaaugccuaa

SEQ ID NO: 1141667 - RNA, 19 nt, Artificial Sequence
  Description of Artificial Sequence: Synthetic oligonucleotide
  Antisense strand to SEQ ID NO: 1141666
uuaggcauucuguaaucca

SEQ ID NO: 1141668 - RNA, 19 nt, Artificial Sequence
  Description of Artificial Sequence: Synthetic oligonucleotide
  Sense strand starting at position 1454 of SEQ ID NO: 916247
cagaaugccuaagggagau

SEQ ID NO: 1141669 - RNA, 19 nt, Artificial Sequence
  Description of Artificial Sequence: Synthetic oligonucleotide
  Antisense strand to SEQ ID NO: 1141668
aucucccuuaggcauucug

SEQ ID NO: 1141670 - RNA, 19 nt, Artificial Sequence
  Description of Artificial Sequence: Synthetic oligonucleotide
  Sense strand starting at position 1470 of SEQ ID NO: 916247
gauggaagaucauccgugu

SEQ ID NO: 1141671 - RNA, 19 nt, Artificial Sequence
  Description of Artificial Sequence: Synthetic oligonucleotide
  Antisense strand to SEQ ID NO: 1141670
acacggaugaucuuccauc

SEQ ID NO: 1141672 - RNA, 19 nt, Artificial Sequence
  Description of Artificial Sequence: Synthetic oligonucleotide
  Sense strand starting at position 1574 of SEQ ID NO: 916247
caggaugugacauguuuag

SEQ ID NO: 1141673 - RNA, 19 nt, Artificial Sequence
  Description of Artificial Sequence: Synthetic oligonucleotide
  Antisense strand to SEQ ID NO: 1141672
cuaaacaugucacauccug

SEQ ID NO: 1141674 - RNA, 19 nt, Artificial Sequence
  Description of Artificial Sequence: Synthetic oligonucleotide
  Sense strand starting at position 1605 of SEQ ID NO: 916247
uugggagugguccgggaaa

SEQ ID NO: 1141675 - RNA, 19 nt, Artificial Sequence
  Description of Artificial Sequence: Synthetic oligonucleotide
  Antisense strand to SEQ ID NO: 1141674
uuucccggaccacucccaa

SEQ ID NO: 1141676 - RNA, 19 nt, Artificial Sequence
  Description of Artificial Sequence: Synthetic oligonucleotide
  Sense strand starting at position 1624 of SEQ ID NO: 916247
gggagaauuuagggugagu

SEQ ID NO: 1141677 - RNA, 19 nt, Artificial Sequence
  Description of Artificial Sequence: Synthetic oligonucleotide
  Antisense strand to SEQ ID NO: 1141676
acucacccuaaauucuccc

SEQ ID NO: 1141678 - RNA, 19 nt, Artificial Sequence
  Description of Artificial Sequence: Synthetic oligonucleotide
  Sense strand starting at position 1686 of SEQ ID NO: 916247
gggugucuagggcagagau

SEQ ID NO: 1141679 - RNA, 19 nt, Artificial Sequence
  Description of Artificial Sequence: Synthetic oligonucleotide
  Antisense strand to SEQ ID NO: 1141678
aucucugcccuagacaccc

SEQ ID NO: 1141680 - RNA, 19 nt, Artificial Sequence
  Description of Artificial Sequence: Synthetic oligonucleotide
  Sense strand starting at position 2451 of SEQ ID NO: 916247
cgguucucuuucgcuacaa

SEQ ID NO: 1141681 - RNA, 19 nt, Artificial Sequence
  Description of Artificial Sequence: Synthetic oligonucleotide
  Antisense strand to SEQ ID NO: 1141680
uuguagcgaaagagaaccg

SEQ ID NO: 1141682 - RNA, 19 nt, Artificial Sequence
  Description of Artificial Sequence: Synthetic oligonucleotide
  Sense strand starting at position 2452 of SEQ ID NO: 916247
gguucucuuucgcuacaac

SEQ ID NO: 1141683 - RNA, 19 nt, Artificial Sequence
  Description of Artificial Sequence: Synthetic oligonucleotide
  Antisense strand to SEQ ID NO: 1141682
guuguagcgaaagagaacc

SEQ ID NO: 1141684 - RNA, 19 nt, Artificial Sequence
  Description of Artificial Sequence: Synthetic oligonucleotide
  Sense strand starting at position 2474 of SEQ ID NO: 916247
cgaggacgcucgauugcuu

SEQ ID NO: 1141685 - RNA, 19 nt, Artificial Sequence
  Description of Artificial Sequence: Synthetic oligonucleotide
  Antisense strand to SEQ ID NO: 1141684
aagcaaucgagcguccucg

SEQ ID NO: 1141686 - RNA, 19 nt, Artificial Sequence
  Description of Artificial Sequence: Synthetic oligonucleotide
  Sense strand starting at position 2481 of SEQ ID NO: 916247
gcucgauugcuugauucuu

SEQ ID NO: 1141687 - RNA, 19 nt, Artificial Sequence
  Description of Artificial Sequence: Synthetic oligonucleotide
  Antisense strand to SEQ ID NO: 1141686
aagaaucaagcaaucgagc

SEQ ID NO: 1141688 - RNA, 19 nt, Artificial Sequence
  Description of Artificial Sequence: Synthetic oligonucleotide
  Sense strand starting at position 2606 of SEQ ID NO: 916247
cccucaacagucugauguu

SEQ ID NO: 1141689 - RNA, 19 nt, Artificial Sequence
  Description of Artificial Sequence: Synthetic oligonucleotide
  Antisense strand to SEQ ID NO: 1141688
aacaucagacuguugaggg

SEQ ID NO: 1141690 - RNA, 19 nt, Artificial Sequence
  Description of Artificial Sequence: Synthetic oligonucleotide
  Sense strand starting at position 2607 of SEQ ID NO: 916247
ccucaacagucugauguua

SEQ ID NO: 1141691 - RNA, 19 nt, Artificial Sequence
  Description of Artificial Sequence: Synthetic oligonucleotide
  Antisense strand to SEQ ID NO: 1141690
uaacaucagacuguugagg

SEQ ID NO: 1141692 - RNA, 19 nt, Artificial Sequence
  Description of Artificial Sequence: Synthetic oligonucleotide
  Sense strand starting at position 3057 of SEQ ID NO: 916247
gcucaagccugcucccaaa

SEQ ID NO: 1141693 - RNA, 19 nt, Artificial Sequence
  Description of Artificial Sequence: Synthetic oligonucleotide
  Antisense strand to SEQ ID NO: 1141692
uuugggagcaggcuugagc

SEQ ID NO: 1141694 - RNA, 19 nt, Artificial Sequence
  Description of Artificial Sequence: Synthetic oligonucleotide
  Sense strand starting at position 3317 of SEQ ID NO: 916247
cuagaugcuuauguccuaa

SEQ ID NO: 1141695 - RNA, 19 nt, Artificial Sequence
  Description of Artificial Sequence: Synthetic oligonucleotide
  Antisense strand to SEQ ID NO: 1141694
uuaggacauaagcaucuag

SEQ ID NO: 1141696 - RNA, 19 nt, Artificial Sequence
  Description of Artificial Sequence: Synthetic oligonucleotide
  Sense strand starting at position 3517 of SEQ ID NO: 916247
cugacaaucugguugggaa

SEQ ID NO: 1141697 - RNA, 19 nt, Artificial Sequence
  Description of Artificial Sequence: Synthetic oligonucleotide
  Antisense strand to SEQ ID NO: 1141696
uucccaaccagauugucag

SEQ ID NO: 1141698 - RNA, 19 nt, Artificial Sequence
  Description of Artificial Sequence: Synthetic oligonucleotide
  Sense strand starting at position 3554 of SEQ ID NO: 916247
acaaauugguaagacaacu

SEQ ID NO: 1141699 - RNA, 19 nt, Artificial Sequence
  Description of Artificial Sequence: Synthetic oligonucleotide
  Antisense strand to SEQ ID NO: 1141698
aguugucuuaccaauuugu

SEQ ID NO: 1141700 - RNA, 19 nt, Artificial Sequence
  Description of Artificial Sequence: Synthetic oligonucleotide
  Sense strand starting at position 3579 of SEQ ID NO: 916247
acugaugaguaugugaaga

SEQ ID NO: 1141701 - RNA, 19 nt, Artificial Sequence
  Description of Artificial Sequence: Synthetic oligonucleotide
  Antisense strand to SEQ ID NO: 1141700
ucuucacauacucaucagu

SEQ ID NO: 1141702 - RNA, 19 nt, Artificial Sequence
  Description of Artificial Sequence: Synthetic oligonucleotide
  Sense strand starting at position 3629 of SEQ ID NO: 916247
gaagccuguuggcugagau

SEQ ID NO: 1141703 - RNA, 19 nt, Artificial Sequence
  Description of Artificial Sequence: Synthetic oligonucleotide
  Antisense strand to SEQ ID NO: 1141702
aucucagccaacaggcuuc

SEQ ID NO: 1141704 - RNA, 19 nt, Artificial Sequence
  Description of Artificial Sequence: Synthetic oligonucleotide
  Sense strand starting at position 3637 of SEQ ID NO: 916247
uuggcugagaucggaugua

SEQ ID NO: 1141705 - RNA, 19 nt, Artificial Sequence
  Description of Artificial Sequence: Synthetic oligonucleotide
  Antisense strand to SEQ ID NO: 1141704
uacauccgaucucagccaa

SEQ ID NO: 1141706 - RNA, 19 nt, Artificial Sequence
  Description of Artificial Sequence: Synthetic oligonucleotide
  Sense strand starting at position 3716 of SEQ ID NO: 916247
aggauagagccaggucaaa

SEQ ID NO: 1141707 - RNA, 19 nt, Artificial Sequence
  Description of Artificial Sequence: Synthetic oligonucleotide
  Antisense strand to SEQ ID NO: 1141706
uuugaccuggcucuauccu

SEQ ID NO: 1141708 - RNA, 19 nt, Artificial Sequence
  Description of Artificial Sequence: Synthetic oligonucleotide
  Sense strand starting at position 3743 of SEQ ID NO: 916247
gugugagucuggccaacau

SEQ ID NO: 1141709 - RNA, 19 nt, Artificial Sequence
  Description of Artificial Sequence: Synthetic oligonucleotide
  Antisense strand to SEQ ID NO: 1141708
auguuggccagacucacac

SEQ ID NO: 1141710 - RNA, 19 nt, Artificial Sequence
  Description of Artificial Sequence: Synthetic oligonucleotide
  Sense strand starting at position 25 of SEQ ID NO: 916248
ccuggagugucuuagacug

SEQ ID NO: 1141711 - RNA, 19 nt, Artificial Sequence
  Description of Artificial Sequence: Synthetic oligonucleotide
  Antisense strand to SEQ ID NO: 1141710
cagucuaagacacuccagg

SEQ ID NO: 1141712 - RNA, 19 nt, Artificial Sequence
  Description of Artificial Sequence: Synthetic oligonucleotide
  Sense strand starting at position 27 of SEQ ID NO: 916248
uggagugucuuagacugau

SEQ ID NO: 1141713 - RNA, 19 nt, Artificial Sequence
  Description of Artificial Sequence: Synthetic oligonucleotide
  Antisense strand to SEQ ID NO: 1141712
aucagucuaagacacucca

SEQ ID NO: 1141714 - RNA, 19 nt, Artificial Sequence
  Description of Artificial Sequence: Synthetic oligonucleotide
  Sense strand starting at position 71 of SEQ ID NO: 916248
agagguguguugcuuguaa

SEQ ID NO: 1141715 - RNA, 19 nt, Artificial Sequence
  Description of Artificial Sequence: Synthetic oligonucleotide
  Antisense strand to SEQ ID NO: 1141714
uuacaagcaacacaccucu

SEQ ID NO: 1141716 - RNA, 19 nt, Artificial Sequence
  Description of Artificial Sequence: Synthetic oligonucleotide
  Sense strand starting at position 73 of SEQ ID NO: 916248
agguguguugcuuguaagu

SEQ ID NO: 1141717 - RNA, 19 nt, Artificial Sequence
  Description of Artificial Sequence: Synthetic oligonucleotide
  Antisense strand to SEQ ID NO: 1141716
acuuacaagcaacacaccu

SEQ ID NO: 1141718 - RNA, 19 nt, Artificial Sequence
  Description of Artificial Sequence: Synthetic oligonucleotide
  Sense strand starting at position 78 of SEQ ID NO: 916248
uguugcuuguaaguguuua

SEQ ID NO: 1141719 - RNA, 19 nt, Artificial Sequence
  Description of Artificial Sequence: Synthetic oligonucleotide
  Antisense strand to SEQ ID NO: 1141718
uaaacacuuacaagcaaca

SEQ ID NO: 1141720 - RNA, 19 nt, Artificial Sequence
  Description of Artificial Sequence: Synthetic oligonucleotide
  Sense strand starting at position 79 of SEQ ID NO: 916248
guugcuuguaaguguuuaa

SEQ ID NO: 1141721 - RNA, 19 nt, Artificial Sequence
  Description of Artificial Sequence: Synthetic oligonucleotide
  Antisense strand to SEQ ID NO: 1141720
uuaaacacuuacaagcaac

SEQ ID NO: 1141722 - RNA, 19 nt, Artificial Sequence
  Description of Artificial Sequence: Synthetic oligonucleotide
  Sense strand starting at position 83 of SEQ ID NO: 916248
cuuguaaguguuuaacaag

SEQ ID NO: 1141723 - RNA, 19 nt, Artificial Sequence
  Description of Artificial Sequence: Synthetic oligonucleotide
  Antisense strand to SEQ ID NO: 1141722
cuuguuaaacacuuacaag

SEQ ID NO: 1141724 - RNA, 19 nt, Artificial Sequence
  Description of Artificial Sequence: Synthetic oligonucleotide
  Sense strand starting at position 131 of SEQ ID NO: 916248
gaaggugauuuccacgaua

SEQ ID NO: 1141725 - RNA, 19 nt, Artificial Sequence
  Description of Artificial Sequence: Synthetic oligonucleotide
  Antisense strand to SEQ ID NO: 1141724
uaucguggaaaucaccuuc

SEQ ID NO: 1141726 - RNA, 19 nt, Artificial Sequence
  Description of Artificial Sequence: Synthetic oligonucleotide
  Sense strand starting at position 185 of SEQ ID NO: 916248
augugaggucauuggaaac

SEQ ID NO: 1141727 - RNA, 19 nt, Artificial Sequence
  Description of Artificial Sequence: Synthetic oligonucleotide
  Antisense strand to SEQ ID NO: 1141726
guuuccaaugaccucacau

SEQ ID NO: 1141728 - RNA, 19 nt, Artificial Sequence
  Description of Artificial Sequence: Synthetic oligonucleotide
  Sense strand starting at position 331 of SEQ ID NO: 916248
uccugaaaucugugguacu

SEQ ID NO: 1141729 - RNA, 19 nt, Artificial Sequence
  Description of Artificial Sequence: Synthetic oligonucleotide
  Antisense strand to SEQ ID NO: 1141728
aguaccacagauuucagga

SEQ ID NO: 1141730 - RNA, 19 nt, Artificial Sequence
  Description of Artificial Sequence: Synthetic oligonucleotide
  Sense strand starting at position 334 of SEQ ID NO: 916248
ugaaaucugugguacuaug

SEQ ID NO: 1141731 - RNA, 19 nt, Artificial Sequence
  Description of Artificial Sequence: Synthetic oligonucleotide
  Antisense strand to SEQ ID NO: 1141730
cauaguaccacagauuuca

SEQ ID NO: 1141732 - RNA, 19 nt, Artificial Sequence
  Description of Artificial Sequence: Synthetic oligonucleotide
  Sense strand starting at position 621 of SEQ ID NO: 916248
cccugagucuguuuacuca

SEQ ID NO: 1141733 - RNA, 19 nt, Artificial Sequence
  Description of Artificial Sequence: Synthetic oligonucleotide
  Antisense strand to SEQ ID NO: 1141732
ugaguaaacagacucaggg

SEQ ID NO: 1141734 - RNA, 19 nt, Artificial Sequence
  Description of Artificial Sequence: Synthetic oligonucleotide
  Sense strand starting at position 625 of SEQ ID NO: 916248
gagucuguuuacucaaggu

SEQ ID NO: 1141735 - RNA, 19 nt, Artificial Sequence
  Description of Artificial Sequence: Synthetic oligonucleotide
  Antisense strand to SEQ ID NO: 1141734
accuugaguaaacagacuc

SEQ ID NO: 1141736 - RNA, 19 nt, Artificial Sequence
  Description of Artificial Sequence: Synthetic oligonucleotide
  Sense strand starting at position 629 of SEQ ID NO: 916248
cuguuuacucaagguguaa

SEQ ID NO: 1141737 - RNA, 19 nt, Artificial Sequence
  Description of Artificial Sequence: Synthetic oligonucleotide
  Antisense strand to SEQ ID NO: 1141736
uuacaccuugaguaaacag

SEQ ID NO: 1141738 - RNA, 19 nt, Artificial Sequence
  Description of Artificial Sequence: Synthetic oligonucleotide
  Sense strand starting at position 724 of SEQ ID NO: 916248
cccaguaucuggcucauaa

SEQ ID NO: 1141739 - RNA, 19 nt, Artificial Sequence
  Description of Artificial Sequence: Synthetic oligonucleotide
  Antisense strand to SEQ ID NO: 1141738
uuaugagccagauacuggg

SEQ ID NO: 1141740 - RNA, 19 nt, Artificial Sequence
  Description of Artificial Sequence: Synthetic oligonucleotide
  Sense strand starting at position 780 of SEQ ID NO: 916248
augcaucacuaagaaagaa

SEQ ID NO: 1141741 - RNA, 19 nt, Artificial Sequence
  Description of Artificial Sequence: Synthetic oligonucleotide
  Antisense strand to SEQ ID NO: 1141740
uucuuucuuagugaugcau

SEQ ID NO: 1141742 - RNA, 19 nt, Artificial Sequence
  Description of Artificial Sequence: Synthetic oligonucleotide
  Sense strand starting at position 930 of SEQ ID NO: 916248
cuacaagggcuuuauaauu

SEQ ID NO: 1141743 - RNA, 19 nt, Artificial Sequence
  Description of Artificial Sequence: Synthetic oligonucleotide
  Antisense strand to SEQ ID NO: 1141742
aauuauaaagcccuuguag

SEQ ID NO: 1141744 - RNA, 19 nt, Artificial Sequence
  Description of Artificial Sequence: Synthetic oligonucleotide
  Sense strand starting at position 1002 of SEQ ID NO: 916248
acucuuguucuacggauga

SEQ ID NO: 1141745 - RNA, 19 nt, Artificial Sequence
  Description of Artificial Sequence: Synthetic oligonucleotide
  Antisense strand to SEQ ID NO: 1141744
ucauccguagaacaagagu

SEQ ID NO: 1141746 - RNA, 19 nt, Artificial Sequence
  Description of Artificial Sequence: Synthetic oligonucleotide
  Sense strand starting at position 1004 of SEQ ID NO: 916248
ucuuguucuacggaugaga

SEQ ID NO: 1141747 - RNA, 19 nt, Artificial Sequence
  Description of Artificial Sequence: Synthetic oligonucleotide
  Antisense strand to SEQ ID NO: 1141746
ucucauccguagaacaaga

SEQ ID NO: 1141748 - RNA, 19 nt, Artificial Sequence
  Description of Artificial Sequence: Synthetic oligonucleotide
  Sense strand starting at position 1006 of SEQ ID NO: 916248
uuguucuacggaugagaau

SEQ ID NO: 1141749 - RNA, 19 nt, Artificial Sequence
  Description of Artificial Sequence: Synthetic oligonucleotide
  Antisense strand to SEQ ID NO: 1141748
auucucauccguagaacaa

SEQ ID NO: 1141750 - RNA, 19 nt, Artificial Sequence
  Description of Artificial Sequence: Synthetic oligonucleotide
  Sense strand starting at position 1128 of SEQ ID NO: 916248
aaggacgugcuguacuaau

SEQ ID NO: 1141751 - RNA, 19 nt, Artificial Sequence
  Description of Artificial Sequence: Synthetic oligonucleotide
  Antisense strand to SEQ ID NO: 1141750
auuaguacagcacguccuu

SEQ ID NO: 1141752 - RNA, 19 nt, Artificial Sequence
  Description of Artificial Sequence: Synthetic oligonucleotide
  Sense strand starting at position 1138 of SEQ ID NO: 916248
uguacuaaugcucggagca

SEQ ID NO: 1141753 - RNA, 19 nt, Artificial Sequence
  Description of Artificial Sequence: Synthetic oligonucleotide
  Antisense strand to SEQ ID NO: 1141752
ugcuccgagcauuaguaca

SEQ ID NO: 1141754 - RNA, 19 nt, Artificial Sequence
  Description of Artificial Sequence: Synthetic oligonucleotide
  Sense strand starting at position 1139 of SEQ ID NO: 916248
guacuaaugcucggagcaa

SEQ ID NO: 1141755 - RNA, 19 nt, Artificial Sequence
  Description of Artificial Sequence: Synthetic oligonucleotide
  Antisense strand to SEQ ID NO: 1141754
uugcuccgagcauuaguac

SEQ ID NO: 1141756 - RNA, 19 nt, Artificial Sequence
  Description of Artificial Sequence: Synthetic oligonucleotide
  Sense strand starting at position 1222 of SEQ ID NO: 916248
gggucuuaccucugccaga

SEQ ID NO: 1141757 - RNA, 19 nt, Artificial Sequence
  Description of Artificial Sequence: Synthetic oligonucleotide
  Antisense strand to SEQ ID NO: 1141756
ucuggcagagguaagaccc

SEQ ID NO: 1141758 - RNA, 19 nt, Artificial Sequence
  Description of Artificial Sequence: Synthetic oligonucleotide
  Sense strand starting at position 1370 of SEQ ID NO: 916248
ucucaaauaugcgaaccaa

SEQ ID NO: 1141759 - RNA, 19 nt, Artificial Sequence
  Description of Artificial Sequence: Synthetic oligonucleotide
  Antisense strand to SEQ ID NO: 1141758
uugguucgcauauuugaga

SEQ ID NO: 1141760 - RNA, 19 nt, Artificial Sequence
  Description of Artificial Sequence: Synthetic oligonucleotide
  Sense strand starting at position 1390 of SEQ ID NO: 916248
uuuagaaagucccugguca

SEQ ID NO: 1141761 - RNA, 19 nt, Artificial Sequence
  Description of Artificial Sequence: Synthetic oligonucleotide
  Antisense strand to SEQ ID NO: 1141760
ugaccagggacuuucuaaa

SEQ ID NO: 1141762 - RNA, 19 nt, Artificial Sequence
  Description of Artificial Sequence: Synthetic oligonucleotide
  Sense strand starting at position 1392 of SEQ ID NO: 916248
uagaaagucccuggucacu

SEQ ID NO: 1141763 - RNA, 19 nt, Artificial Sequence
  Description of Artificial Sequence: Synthetic oligonucleotide
  Antisense strand to SEQ ID NO: 1141762
agugaccagggacuuucua

SEQ ID NO: 1141764 - RNA, 19 nt, Artificial Sequence
  Description of Artificial Sequence: Synthetic oligonucleotide
  Sense strand starting at position 1404 of SEQ ID NO: 916248
ggucacuucuagucacuca

SEQ ID NO: 1141765 - RNA, 19 nt, Artificial Sequence
  Description of Artificial Sequence: Synthetic oligonucleotide
  Antisense strand to SEQ ID NO: 1141764
ugagugacuagaagugacc

SEQ ID NO: 1141766 - RNA, 19 nt, Artificial Sequence
  Description of Artificial Sequence: Synthetic oligonucleotide
  Sense strand starting at position 2191 of SEQ ID NO: 916248
gggugcuucccuggucagu

SEQ ID NO: 1141767 - RNA, 19 nt, Artificial Sequence
  Description of Artificial Sequence: Synthetic oligonucleotide
  Antisense strand to SEQ ID NO: 1141766
acugaccagggaagcaccc

SEQ ID NO: 1141768 - RNA, 19 nt, Artificial Sequence
  Description of Artificial Sequence: Synthetic oligonucleotide
  Sense strand starting at position 2250 of SEQ ID NO: 916248
agagcaaagcugugaggau

SEQ ID NO: 1141769 - RNA, 19 nt, Artificial Sequence
  Description of Artificial Sequence: Synthetic oligonucleotide
  Antisense strand to SEQ ID NO: 1141768
auccucacagcuuugcucu

SEQ ID NO: 1141770 - RNA, 19 nt, Artificial Sequence
  Description of Artificial Sequence: Synthetic oligonucleotide
  Sense strand starting at position 2251 of SEQ ID NO: 916248
gagcaaagcugugaggauu

SEQ ID NO: 1141771 - RNA, 19 nt, Artificial Sequence
  Description of Artificial Sequence: Synthetic oligonucleotide
  Antisense strand to SEQ ID NO: 1141770
aauccucacagcuuugcuc

SEQ ID NO: 1141772 - RNA, 19 nt, Artificial Sequence
  Description of Artificial Sequence: Synthetic oligonucleotide
  Sense strand starting at position 2396 of SEQ ID NO: 916248
gugggauauaagggugaua

SEQ ID NO: 1141773 - RNA, 19 nt, Artificial Sequence
  Description of Artificial Sequence: Synthetic oligonucleotide
  Antisense strand to SEQ ID NO: 1141772
uaucacccuuauaucccac

SEQ ID NO: 1141774 - RNA, 19 nt, Artificial Sequence
  Description of Artificial Sequence: Synthetic oligonucleotide
  Sense strand starting at position 2473 of SEQ ID NO: 916248
ggguuuggugaguauggga

SEQ ID NO: 1141775 - RNA, 19 nt, Artificial Sequence
  Description of Artificial Sequence: Synthetic oligonucleotide
  Antisense strand to SEQ ID NO: 1141774
ucccauacucaccaaaccc

SEQ ID NO: 1141776 - RNA, 19 nt, Artificial Sequence
  Description of Artificial Sequence: Synthetic oligonucleotide
  Sense strand starting at position 2518 of SEQ ID NO: 916248
aaggacugaucuggauaau

SEQ ID NO: 1141777 - RNA, 19 nt, Artificial Sequence
  Description of Artificial Sequence: Synthetic oligonucleotide
  Antisense strand to SEQ ID NO: 1141776
auuauccagaucaguccuu

SEQ ID NO: 1141778 - RNA, 19 nt, Artificial Sequence
  Description of Artificial Sequence: Synthetic oligonucleotide
  Sense strand starting at position 2530 of SEQ ID NO: 916248
ggauaauccuucuucucga

SEQ ID NO: 1141779 - RNA, 19 nt, Artificial Sequence
  Description of Artificial Sequence: Synthetic oligonucleotide
  Antisense strand to SEQ ID NO: 1141778
ucgagaagaaggauuaucc

SEQ ID NO: 1141780 - RNA, 19 nt, Artificial Sequence
  Description of Artificial Sequence: Synthetic oligonucleotide
  Sense strand starting at position 2716 of SEQ ID NO: 916248
cccucucgaggcugugaaa

SEQ ID NO: 1141781 - RNA, 19 nt, Artificial Sequence
  Description of Artificial Sequence: Synthetic oligonucleotide
  Antisense strand to SEQ ID NO: 1141780
uuucacagccucgagaggg

SEQ ID NO: 1141782 - RNA, 19 nt, Artificial Sequence
  Description of Artificial Sequence: Synthetic oligonucleotide
  Sense strand starting at position 2832 of SEQ ID NO: 916248
gggcuugggucauuugcau

SEQ ID NO: 1141783 - RNA, 19 nt, Artificial Sequence
  Description of Artificial Sequence: Synthetic oligonucleotide
  Antisense strand to SEQ ID NO: 1141782
augcaaaugacccaagccc

SEQ ID NO: 1141784 - RNA, 19 nt, Artificial Sequence
  Description of Artificial Sequence: Synthetic oligonucleotide
  Sense strand starting at position 3885 of SEQ ID NO: 916248
gggauuggcucucucagag

SEQ ID NO: 1141785 - RNA, 19 nt, Artificial Sequence
  Description of Artificial Sequence: Synthetic oligonucleotide
  Antisense strand to SEQ ID NO: 1141784
cucugagagagccaauccc

SEQ ID NO: 1141786 - RNA, 19 nt, Artificial Sequence
  Description of Artificial Sequence: Synthetic oligonucleotide
  Sense strand starting at position 3889 of SEQ ID NO: 916248
uuggcucucucagagaacu

SEQ ID NO: 1141787 - RNA, 19 nt, Artificial Sequence
  Description of Artificial Sequence: Synthetic oligonucleotide
  Antisense strand to SEQ ID NO: 1141786
aguucucugagagagccaa

SEQ ID NO: 1141788 - RNA, 19 nt, Artificial Sequence
  Description of Artificial Sequence: Synthetic oligonucleotide
  Sense strand starting at position 3891 of SEQ ID NO: 916248
ggcucucucagagaacuug

SEQ ID NO: 1141789 - RNA, 19 nt, Artificial Sequence
  Description of Artificial Sequence: Synthetic oligonucleotide
  Antisense strand to SEQ ID NO: 1141788
caaguucucugagagagcc

SEQ ID NO: 1141790 - RNA, 19 nt, Artificial Sequence
  Description of Artificial Sequence: Synthetic oligonucleotide
  Sense strand starting at position 16 of SEQ ID NO: 916249
aagagagugccugauaccu

SEQ ID NO: 1141791 - RNA, 19 nt, Artificial Sequence
  Description of Artificial Sequence: Synthetic oligonucleotide
  Antisense strand to SEQ ID NO: 1141790
agguaucaggcacucucuu

SEQ ID NO: 1141792 - RNA, 19 nt, Artificial Sequence
  Description of Artificial Sequence: Synthetic oligonucleotide
  Sense strand starting at position 22 of SEQ ID NO: 916249
gugccugauaccuguuaag

SEQ ID NO: 1141793 - RNA, 19 nt, Artificial Sequence
  Description of Artificial Sequence: Synthetic oligonucleotide
  Antisense strand to SEQ ID NO: 1141792
cuuaacagguaucaggcac

SEQ ID NO: 1141794 - RNA, 19 nt, Artificial Sequence
  Description of Artificial Sequence: Synthetic oligonucleotide
  Sense strand starting at position 97 of SEQ ID NO: 916249
ggccaaaucugccuaauca

SEQ ID NO: 1141795 - RNA, 19 nt, Artificial Sequence
  Description of Artificial Sequence: Synthetic oligonucleotide
  Antisense strand to SEQ ID NO: 1141794
ugauuaggcagauuuggcc

SEQ ID NO: 1141796 - RNA, 19 nt, Artificial Sequence
  Description of Artificial Sequence: Synthetic oligonucleotide
  Sense strand starting at position 210 of SEQ ID NO: 916249
ucucuugucuguuccaaac

SEQ ID NO: 1141797 - RNA, 19 nt, Artificial Sequence
  Description of Artificial Sequence: Synthetic oligonucleotide
  Antisense strand to SEQ ID NO: 1141796
guuuggaacagacaagaga

SEQ ID NO: 1141798 - RNA, 19 nt, Artificial Sequence
  Description of Artificial Sequence: Synthetic oligonucleotide
  Sense strand starting at position 228 of SEQ ID NO: 916249
ccuuaugaucuguggccau

SEQ ID NO: 1141799 - RNA, 19 nt, Artificial Sequence
  Description of Artificial Sequence: Synthetic oligonucleotide
  Antisense strand to SEQ ID NO: 1141798
auggccacagaucauaagg

SEQ ID NO: 1141800 - RNA, 19 nt, Artificial Sequence
  Description of Artificial Sequence: Synthetic oligonucleotide
  Sense strand starting at position 649 of SEQ ID NO: 916249
accugaugccuuuaaguca

SEQ ID NO: 1141801 - RNA, 19 nt, Artificial Sequence
  Description of Artificial Sequence: Synthetic oligonucleotide
  Antisense strand to SEQ ID NO: 1141800
ugacuuaaaggcaucaggu

SEQ ID NO: 1141802 - RNA, 19 nt, Artificial Sequence
  Description of Artificial Sequence: Synthetic oligonucleotide
  Sense strand starting at position 831 of SEQ ID NO: 916249
cuuacaaaucuggagcuuu

SEQ ID NO: 1141803 - RNA, 19 nt, Artificial Sequence
  Description of Artificial Sequence: Synthetic oligonucleotide
  Antisense strand to SEQ ID NO: 1141802
aaagcuccagauuuguaag

SEQ ID NO: 1141804 - RNA, 19 nt, Artificial Sequence
  Description of Artificial Sequence: Synthetic oligonucleotide
  Sense strand starting at position 842 of SEQ ID NO: 916249
ggagcuuucucacccuuau

SEQ ID NO: 1141805 - RNA, 19 nt, Artificial Sequence
  Description of Artificial Sequence: Synthetic oligonucleotide
  Antisense strand to SEQ ID NO: 1141804
auaagggugagaaagcucc

SEQ ID NO: 1141806 - RNA, 19 nt, Artificial Sequence
  Description of Artificial Sequence: Synthetic oligonucleotide
  Sense strand starting at position 846 of SEQ ID NO: 916249
cuuucucacccuuauggua

SEQ ID NO: 1141807 - RNA, 19 nt, Artificial Sequence
  Description of Artificial Sequence: Synthetic oligonucleotide
  Antisense strand to SEQ ID NO: 1141806
uaccauaagggugagaaag

SEQ ID NO: 1141808 - RNA, 19 nt, Artificial Sequence
  Description of Artificial Sequence: Synthetic oligonucleotide
  Sense strand starting at position 854 of SEQ ID NO: 916249
cccuuaugguaagacauuu

SEQ ID NO: 1141809 - RNA, 19 nt, Artificial Sequence
  Description of Artificial Sequence: Synthetic oligonucleotide
  Antisense strand to SEQ ID NO: 1141808
aaaugucuuaccauaaggg

SEQ ID NO: 1141810 - RNA, 19 nt, Artificial Sequence
  Description of Artificial Sequence: Synthetic oligonucleotide
  Sense strand starting at position 1071 of SEQ ID NO: 916249
aaauguauacuguggcauu

SEQ ID NO: 1141811 - RNA, 19 nt, Artificial Sequence
  Description of Artificial Sequence: Synthetic oligonucleotide
  Antisense strand to SEQ ID NO: 1141810
aaugccacaguauacauuu

SEQ ID NO: 1141812 - RNA, 19 nt, Artificial Sequence
  Description of Artificial Sequence: Synthetic oligonucleotide
  Sense strand starting at position 1442 of SEQ ID NO: 916249
ucugcacacguuuaugaua

SEQ ID NO: 1141813 - RNA, 19 nt, Artificial Sequence
  Description of Artificial Sequence: Synthetic oligonucleotide
  Antisense strand to SEQ ID NO: 1141812
uaucauaaacgugugcaga

SEQ ID NO: 1141814 - RNA, 19 nt, Artificial Sequence
  Description of Artificial Sequence: Synthetic oligonucleotide
  Sense strand starting at position 1447 of SEQ ID NO: 916249
acacguuuaugauaaagaa

SEQ ID NO: 1141815 - RNA, 19 nt, Artificial Sequence
  Description of Artificial Sequence: Synthetic oligonucleotide
  Antisense strand to SEQ ID NO: 1141814
uucuuuaucauaaacgugu

SEQ ID NO: 1141816 - RNA, 19 nt, Artificial Sequence
  Description of Artificial Sequence: Synthetic oligonucleotide
  Sense strand starting at position 1750 of SEQ ID NO: 916249
agcccauaccugugggaca

SEQ ID NO: 1141817 - RNA, 19 nt, Artificial Sequence
  Description of Artificial Sequence: Synthetic oligonucleotide
  Antisense strand to SEQ ID NO: 1141816
ugucccacagguaugggcu

SEQ ID NO: 1141818 - RNA, 19 nt, Artificial Sequence
  Description of Artificial Sequence: Synthetic oligonucleotide
  Sense strand starting at position 2277 of SEQ ID NO: 916249
ugccauagacgguacuaua

SEQ ID NO: 1141819 - RNA, 19 nt, Artificial Sequence
  Description of Artificial Sequence: Synthetic oligonucleotide
  Antisense strand to SEQ ID NO: 1141818
uauaguaccgucuauggca

SEQ ID NO: 1141820 - RNA, 19 nt, Artificial Sequence
  Description of Artificial Sequence: Synthetic oligonucleotide
  Sense strand starting at position 2335 of SEQ ID NO: 916249
uuagcauucucugcagagu

SEQ ID NO: 1141821 - RNA, 19 nt, Artificial Sequence
  Description of Artificial Sequence: Synthetic oligonucleotide
  Antisense strand to SEQ ID NO: 1141820
acucugcagagaaugcuaa

SEQ ID NO: 1141822 - RNA, 19 nt, Artificial Sequence
  Description of Artificial Sequence: Synthetic oligonucleotide
  Sense strand starting at position 2341 of SEQ ID NO: 916249
uucucugcagagugcuaaa

SEQ ID NO: 1141823 - RNA, 19 nt, Artificial Sequence
  Description of Artificial Sequence: Synthetic oligonucleotide
  Antisense strand to SEQ ID NO: 1141822
uuuagcacucugcagagaa

SEQ ID NO: 1141824 - RNA, 19 nt, Artificial Sequence
  Description of Artificial Sequence: Synthetic oligonucleotide
  Sense strand starting at position 2398 of SEQ ID NO: 916249
acuauauuguuugaaagag

SEQ ID NO: 1141825 - RNA, 19 nt, Artificial Sequence
  Description of Artificial Sequence: Synthetic oligonucleotide
  Antisense strand to SEQ ID NO: 1141824
cucuuucaaacaauauagu

SEQ ID NO: 1141826 - RNA, 19 nt, Artificial Sequence
  Description of Artificial Sequence: Synthetic oligonucleotide
  Sense strand starting at position 2416 of SEQ ID NO: 916249
ggaaaccuuuggguuaaau

SEQ ID NO: 1141827 - RNA, 19 nt, Artificial Sequence
  Description of Artificial Sequence: Synthetic oligonucleotide
  Antisense strand to SEQ ID NO: 1141826
auuuaacccaaagguuucc

SEQ ID NO: 1141828 - RNA, 19 nt, Artificial Sequence
  Description of Artificial Sequence: Synthetic oligonucleotide
  Sense strand starting at position 2478 of SEQ ID NO: 916249
guaauuugugccuguuagg

SEQ ID NO: 1141829 - RNA, 19 nt, Artificial Sequence
  Description of Artificial Sequence: Synthetic oligonucleotide
  Antisense strand to SEQ ID NO: 1141828
ccuaacaggcacaaauuac

SEQ ID NO: 1141830 - RNA, 19 nt, Artificial Sequence
  Description of Artificial Sequence: Synthetic oligonucleotide
  Sense strand starting at position 2504 of SEQ ID NO: 916249
gugcuuggugucagguauu

SEQ ID NO: 1141831 - RNA, 19 nt, Artificial Sequence
  Description of Artificial Sequence: Synthetic oligonucleotide
  Antisense strand to SEQ ID NO: 1141830
aauaccugacaccaagcac

SEQ ID NO: 1141832 - RNA, 19 nt, Artificial Sequence
  Description of Artificial Sequence: Synthetic oligonucleotide
  Sense strand starting at position 2593 of SEQ ID NO: 916249
auacaagaguuguuaugau

SEQ ID NO: 1141833 - RNA, 19 nt, Artificial Sequence
  Description of Artificial Sequence: Synthetic oligonucleotide
  Antisense strand to SEQ ID NO: 1141832
aucauaacaacucuuguau

SEQ ID NO: 1141834 - RNA, 19 nt, Artificial Sequence
  Description of Artificial Sequence: Synthetic oligonucleotide
  Sense strand starting at position 2597 of SEQ ID NO: 916249
aagaguuguuaugauagaa

SEQ ID NO: 1141835 - RNA, 19 nt, Artificial Sequence
  Description of Artificial Sequence: Synthetic oligonucleotide
  Antisense strand to SEQ ID NO: 1141834
uucuaucauaacaacucuu

SEQ ID NO: 1141836 - RNA, 19 nt, Artificial Sequence
  Description of Artificial Sequence: Synthetic oligonucleotide
  Sense strand starting at position 2613 of SEQ ID NO: 916249
gaaaucaugcgaugaacug

SEQ ID NO: 1141837 - RNA, 19 nt, Artificial Sequence
  Description of Artificial Sequence: Synthetic oligonucleotide
  Antisense strand to SEQ ID NO: 1141836
caguucaucgcaugauuuc

SEQ ID NO: 1141838 - RNA, 19 nt, Artificial Sequence
  Description of Artificial Sequence: Synthetic oligonucleotide
  Sense strand starting at position 2689 of SEQ ID NO: 916249
acgagauccuuuccuuggu

SEQ ID NO: 1141839 - RNA, 19 nt, Artificial Sequence
  Description of Artificial Sequence: Synthetic oligonucleotide
  Antisense strand to SEQ ID NO: 1141838
accaaggaaaggaucucgu

SEQ ID NO: 1141840 - RNA, 19 nt, Artificial Sequence
  Description of Artificial Sequence: Synthetic oligonucleotide
  Sense strand starting at position 2704 of SEQ ID NO: 916249
uggugccucugauuuacga

SEQ ID NO: 1141841 - RNA, 19 nt, Artificial Sequence
  Description of Artificial Sequence: Synthetic oligonucleotide
  Antisense strand to SEQ ID NO: 1141840
ucguaaaucagaggcacca

SEQ ID NO: 1141842 - RNA, 19 nt, Artificial Sequence
  Description of Artificial Sequence: Synthetic oligonucleotide
  Sense strand starting at position 2776 of SEQ ID NO: 916249
cuagucacccugggaaaca

SEQ ID NO: 1141843 - RNA, 19 nt, Artificial Sequence
  Description of Artificial Sequence: Synthetic oligonucleotide
  Antisense strand to SEQ ID NO: 1141842
uguuucccagggugacuag

SEQ ID NO: 1141844 - RNA, 19 nt, Artificial Sequence
  Description of Artificial Sequence: Synthetic oligonucleotide
  Sense strand starting at position 3003 of SEQ ID NO: 916249
ugauauaugcuauauguac

SEQ ID NO: 1141845 - RNA, 19 nt, Artificial Sequence
  Description of Artificial Sequence: Synthetic oligonucleotide
  Antisense strand to SEQ ID NO: 1141844
guacauauagcauauauca

SEQ ID NO: 1141846 - RNA, 19 nt, Artificial Sequence
  Description of Artificial Sequence: Synthetic oligonucleotide
  Sense strand starting at position 3038 of SEQ ID NO: 916249
gcaguuguacaagacacau

SEQ ID NO: 1141847 - RNA, 19 nt, Artificial Sequence
  Description of Artificial Sequence: Synthetic oligonucleotide
  Antisense strand to SEQ ID NO: 1141846
augugucuuguacaacugc

SEQ ID NO: 1141848 - RNA, 19 nt, Artificial Sequence
  Description of Artificial Sequence: Synthetic oligonucleotide
  Sense strand starting at position 3270 of SEQ ID NO: 916249
ucaagaaacugugaugaaa

SEQ ID NO: 1141849 - RNA, 19 nt, Artificial Sequence
  Description of Artificial Sequence: Synthetic oligonucleotide
  Antisense strand to SEQ ID NO: 1141848
uuucaucacaguuucuuga

SEQ ID NO: 1141850 - RNA, 19 nt, Artificial Sequence
  Description of Artificial Sequence: Synthetic oligonucleotide
  Sense strand starting at position 3345 of SEQ ID NO: 916249
agguacuuaggcuguagaa

SEQ ID NO: 1141851 - RNA, 19 nt, Artificial Sequence
  Description of Artificial Sequence: Synthetic oligonucleotide
  Antisense strand to SEQ ID NO: 1141850
uucuacagccuaaguaccu

SEQ ID NO: 1141852 - RNA, 19 nt, Artificial Sequence
  Description of Artificial Sequence: Synthetic oligonucleotide
  Sense strand starting at position 3347 of SEQ ID NO: 916249
guacuuaggcuguagaaca

SEQ ID NO: 1141853 - RNA, 19 nt, Artificial Sequence
  Description of Artificial Sequence: Synthetic oligonucleotide
  Antisense strand to SEQ ID NO: 1141852
uguucuacagccuaaguac

SEQ ID NO: 1141854 - RNA, 19 nt, Artificial Sequence
  Description of Artificial Sequence: Synthetic oligonucleotide
  Sense strand starting at position 3389 of SEQ ID NO: 916249
ugugaaaugagucaugcaa

SEQ ID NO: 1141855 - RNA, 19 nt, Artificial Sequence
  Description of Artificial Sequence: Synthetic oligonucleotide
  Antisense strand to SEQ ID NO: 1141854
uugcaugacucauuucaca

SEQ ID NO: 1141856 - RNA, 19 nt, Artificial Sequence
  Description of Artificial Sequence: Synthetic oligonucleotide
  Sense strand starting at position 3404 of SEQ ID NO: 916249
gcaaguuuggagugagauu

SEQ ID NO: 1141857 - RNA, 19 nt, Artificial Sequence
  Description of Artificial Sequence: Synthetic oligonucleotide
  Antisense strand to SEQ ID NO: 1141856
aaucucacuccaaacuugc

SEQ ID NO: 1141858 - RNA, 19 nt, Artificial Sequence
  Description of Artificial Sequence: Synthetic oligonucleotide
  Sense strand starting at position 3413 of SEQ ID NO: 916249
gagugagauucugucuuug

SEQ ID NO: 1141859 - RNA, 19 nt, Artificial Sequence
  Description of Artificial Sequence: Synthetic oligonucleotide
  Antisense strand to SEQ ID NO: 1141858
caaagacagaaucucacuc

SEQ ID NO: 1141860 - RNA, 19 nt, Artificial Sequence
  Description of Artificial Sequence: Synthetic oligonucleotide
  Sense strand starting at position 3415 of SEQ ID NO: 916249
gugagauucugucuuuguu

SEQ ID NO: 1141861 - RNA, 19 nt, Artificial Sequence
  Description of Artificial Sequence: Synthetic oligonucleotide
  Antisense strand to SEQ ID NO: 1141860
aacaaagacagaaucucac

SEQ ID NO: 1141862 - RNA, 19 nt, Artificial Sequence
  Description of Artificial Sequence: Synthetic oligonucleotide
  Sense strand starting at position 3417 of SEQ ID NO: 916249
gagauucugucuuuguuua

SEQ ID NO: 1141863 - RNA, 19 nt, Artificial Sequence
  Description of Artificial Sequence: Synthetic oligonucleotide
  Antisense strand to SEQ ID NO: 1141862
uaaacaaagacagaaucuc

SEQ ID NO: 1141864 - RNA, 19 nt, Artificial Sequence
  Description of Artificial Sequence: Synthetic oligonucleotide
  Sense strand starting at position 3418 of SEQ ID NO: 916249
agauucugucuuuguuuau

SEQ ID NO: 1141865 - RNA, 19 nt, Artificial Sequence
  Description of Artificial Sequence: Synthetic oligonucleotide
  Antisense strand to SEQ ID NO: 1141864
auaaacaaagacagaaucu

SEQ ID NO: 1141866 - RNA, 19 nt, Artificial Sequence
  Description of Artificial Sequence: Synthetic oligonucleotide
  Sense strand starting at position 3483 of SEQ ID NO: 916249
aauacuuugggaggucaau

SEQ ID NO: 1141867 - RNA, 19 nt, Artificial Sequence
  Description of Artificial Sequence: Synthetic oligonucleotide
  Antisense strand to SEQ ID NO: 1141866
auugaccucccaaaguauu

SEQ ID NO: 1141868 - RNA, 19 nt, Artificial Sequence
  Description of Artificial Sequence: Synthetic oligonucleotide
  Sense strand starting at position 3494 of SEQ ID NO: 916249
aggucaaugugggaggaua

SEQ ID NO: 1141869 - RNA, 19 nt, Artificial Sequence
  Description of Artificial Sequence: Synthetic oligonucleotide
  Antisense strand to SEQ ID NO: 1141868
uauccucccacauugaccu

SEQ ID NO: 1141870 - RNA, 19 nt, Artificial Sequence
  Description of Artificial Sequence: Synthetic oligonucleotide
  Sense strand starting at position 13 of SEQ ID NO: 916250
aagugcaguaguuggaaga

SEQ ID NO: 1141871 - RNA, 19 nt, Artificial Sequence
  Description of Artificial Sequence: Synthetic oligonucleotide
  Antisense strand to SEQ ID NO: 1141870
ucuuccaacuacugcacuu

SEQ ID NO: 1141872 - RNA, 19 nt, Artificial Sequence
  Description of Artificial Sequence: Synthetic oligonucleotide
  Sense strand starting at position 76 of SEQ ID NO: 916250
gucaacauggcuugguaga

SEQ ID NO: 1141873 - RNA, 19 nt, Artificial Sequence
  Description of Artificial Sequence: Synthetic oligonucleotide
  Antisense strand to SEQ ID NO: 1141872
ucuaccaagccauguugac

SEQ ID NO: 1141874 - RNA, 19 nt, Artificial Sequence
  Description of Artificial Sequence: Synthetic oligonucleotide
  Sense strand starting at position 81 of SEQ ID NO: 916250
cauggcuugguagaaacua

SEQ ID NO: 1141875 - RNA, 19 nt, Artificial Sequence
  Description of Artificial Sequence: Synthetic oligonucleotide
  Antisense strand to SEQ ID NO: 1141874
uaguuucuaccaagccaug

SEQ ID NO: 1141876 - RNA, 19 nt, Artificial Sequence
  Description of Artificial Sequence: Synthetic oligonucleotide
  Sense strand starting at position 112 of SEQ ID NO: 916250
gcauauauggcaggaagaa

SEQ ID NO: 1141877 - RNA, 19 nt, Artificial Sequence
  Description of Artificial Sequence: Synthetic oligonucleotide
  Antisense strand to SEQ ID NO: 1141876
uucuuccugccauauaugc

SEQ ID NO: 1141878 - RNA, 19 nt, Artificial Sequence
  Description of Artificial Sequence: Synthetic oligonucleotide
  Sense strand starting at position 184 of SEQ ID NO: 916250
gcucuugagcaucaaccua

SEQ ID NO: 1141879 - RNA, 19 nt, Artificial Sequence
  Description of Artificial Sequence: Synthetic oligonucleotide
  Antisense strand to SEQ ID NO: 1141878
uagguugaugcucaagagc

SEQ ID NO: 1141880 - RNA, 19 nt, Artificial Sequence
  Description of Artificial Sequence: Synthetic oligonucleotide
  Sense strand starting at position 245 of SEQ ID NO: 916250
ugauuaccuuuaucaagug

SEQ ID NO: 1141881 - RNA, 19 nt, Artificial Sequence
  Description of Artificial Sequence: Synthetic oligonucleotide
  Antisense strand to SEQ ID NO: 1141880
cacuugauaaagguaauca

SEQ ID NO: 1141882 - RNA, 19 nt, Artificial Sequence
  Description of Artificial Sequence: Synthetic oligonucleotide
  Sense strand starting at position 252 of SEQ ID NO: 916250
cuuuaucaaguguaacaca

SEQ ID NO: 1141883 - RNA, 19 nt, Artificial Sequence
  Description of Artificial Sequence: Synthetic oligonucleotide
  Antisense strand to SEQ ID NO: 1141882
uguguuacacuugauaaag

SEQ ID NO: 1141884 - RNA, 19 nt, Artificial Sequence
  Description of Artificial Sequence: Synthetic oligonucleotide
  Sense strand starting at position 324 of SEQ ID NO: 916250
aaauguugguaguuacuca

SEQ ID NO: 1141885 - RNA, 19 nt, Artificial Sequence
  Description of Artificial Sequence: Synthetic oligonucleotide
  Antisense strand to SEQ ID NO: 1141884
ugaguaacuaccaacauuu

SEQ ID NO: 1141886 - RNA, 19 nt, Artificial Sequence
  Description of Artificial Sequence: Synthetic oligonucleotide
  Sense strand starting at position 328 of SEQ ID NO: 916250
guugguaguuacucacuaa

SEQ ID NO: 1141887 - RNA, 19 nt, Artificial Sequence
  Description of Artificial Sequence: Synthetic oligonucleotide
  Antisense strand to SEQ ID NO: 1141886
uuagugaguaacuaccaac

SEQ ID NO: 1141888 - RNA, 19 nt, Artificial Sequence
  Description of Artificial Sequence: Synthetic oligonucleotide
  Sense strand starting at position 331 of SEQ ID NO: 916250
gguaguuacucacuaaacu

SEQ ID NO: 1141889 - RNA, 19 nt, Artificial Sequence
  Description of Artificial Sequence: Synthetic oligonucleotide
  Antisense strand to SEQ ID NO: 1141888
aguuuagugaguaacuacc

SEQ ID NO: 1141890 - RNA, 19 nt, Artificial Sequence
  Description of Artificial Sequence: Synthetic oligonucleotide
  Sense strand starting at position 332 of SEQ ID NO: 916250
guaguuacucacuaaacug

SEQ ID NO: 1141891 - RNA, 19 nt, Artificial Sequence
  Description of Artificial Sequence: Synthetic oligonucleotide
  Antisense strand to SEQ ID NO: 1141890
caguuuagugaguaacuac

SEQ ID NO: 1141892 - RNA, 19 nt, Artificial Sequence
  Description of Artificial Sequence: Synthetic oligonucleotide
  Sense strand starting at position 1235 of SEQ ID NO: 916250
uggucuaggucccucauaa

SEQ ID NO: 1141893 - RNA, 19 nt, Artificial Sequence
  Description of Artificial Sequence: Synthetic oligonucleotide
  Antisense strand to SEQ ID NO: 1141892
uuaugagggaccuagacca

SEQ ID NO: 1141894 - RNA, 19 nt, Artificial Sequence
  Description of Artificial Sequence: Synthetic oligonucleotide
  Sense strand starting at position 1259 of SEQ ID NO: 916250
acuggacuugucugugauc

SEQ ID NO: 1141895 - RNA, 19 nt, Artificial Sequence
  Description of Artificial Sequence: Synthetic oligonucleotide
  Antisense strand to SEQ ID NO: 1141894
gaucacagacaaguccagu

SEQ ID NO: 1141896 - RNA, 19 nt, Artificial Sequence
  Description of Artificial Sequence: Synthetic oligonucleotide
  Sense strand starting at position 1365 of SEQ ID NO: 916250
ccacauguuuaucuugaga

SEQ ID NO: 1141897 - RNA, 19 nt, Artificial Sequence
  Description of Artificial Sequence: Synthetic oligonucleotide
  Antisense strand to SEQ ID NO: 1141896
ucucaagauaaacaugugg

SEQ ID NO: 1141898 - RNA, 19 nt, Artificial Sequence
  Description of Artificial Sequence: Synthetic oligonucleotide
  Sense strand starting at position 2224 of SEQ ID NO: 916250
cucggguugcguucuggua

SEQ ID NO: 1141899 - RNA, 19 nt, Artificial Sequence
  Description of Artificial Sequence: Synthetic oligonucleotide
  Antisense strand to SEQ ID NO: 1141898
uaccagaacgcaacccgag

SEQ ID NO: 1141900 - RNA, 19 nt, Artificial Sequence
  Description of Artificial Sequence: Synthetic oligonucleotide
  Sense strand starting at position 2305 of SEQ ID NO: 916250
gcaggaaagaguuggcaaa

SEQ ID NO: 1141901 - RNA, 19 nt, Artificial Sequence
  Description of Artificial Sequence: Synthetic oligonucleotide
  Antisense strand to SEQ ID NO: 1141900
uuugccaacucuuuccugc

SEQ ID NO: 1141902 - RNA, 19 nt, Artificial Sequence
  Description of Artificial Sequence: Synthetic oligonucleotide
  Sense strand starting at position 2306 of SEQ ID NO: 916250
caggaaagaguuggcaaau

SEQ ID NO: 1141903 - RNA, 19 nt, Artificial Sequence
  Description of Artificial Sequence: Synthetic oligonucleotide
  Antisense strand to SEQ ID NO: 1141902
auuugccaacucuuuccug

SEQ ID NO: 1141904 - RNA, 19 nt, Artificial Sequence
  Description of Artificial Sequence: Synthetic oligonucleotide
  Sense strand starting at position 2395 of SEQ ID NO: 916250
aguggacucuaccauauuu

SEQ ID NO: 1141905 - RNA, 19 nt, Artificial Sequence
  Description of Artificial Sequence: Synthetic oligonucleotide
  Antisense strand to SEQ ID NO: 1141904
aaauaugguagaguccacu

SEQ ID NO: 1141906 - RNA, 19 nt, Artificial Sequence
  Description of Artificial Sequence: Synthetic oligonucleotide
  Sense strand starting at position 2504 of SEQ ID NO: 916250
ucauuuggcucagacauua

SEQ ID NO: 1141907 - RNA, 19 nt, Artificial Sequence
  Description of Artificial Sequence: Synthetic oligonucleotide
  Antisense strand to SEQ ID NO: 1141906
uaaugucugagccaaauga

SEQ ID NO: 1141908 - RNA, 19 nt, Artificial Sequence
  Description of Artificial Sequence: Synthetic oligonucleotide
  Sense strand starting at position 2606 of SEQ ID NO: 916250
uagggauguccugacagcu

SEQ ID NO: 1141909 - RNA, 19 nt, Artificial Sequence
  Description of Artificial Sequence: Synthetic oligonucleotide
  Antisense strand to SEQ ID NO: 1141908
agcugucaggacaucccua

SEQ ID NO: 1141910 - RNA, 19 nt, Artificial Sequence
  Description of Artificial Sequence: Synthetic oligonucleotide
  Sense strand starting at position 2640 of SEQ ID NO: 916250
uccuaaugguccuugguga

SEQ ID NO: 1141911 - RNA, 19 nt, Artificial Sequence
  Description of Artificial Sequence: Synthetic oligonucleotide
  Antisense strand to SEQ ID NO: 1141910
ucaccaaggaccauuagga

SEQ ID NO: 1141912 - RNA, 19 nt, Artificial Sequence
  Description of Artificial Sequence: Synthetic oligonucleotide
  Sense strand starting at position 2687 of SEQ ID NO: 916250
ggaggaugugcagaucgaa

SEQ ID NO: 1141913 - RNA, 19 nt, Artificial Sequence
  Description of Artificial Sequence: Synthetic oligonucleotide
  Antisense strand to SEQ ID NO: 1141912
uucgaucugcacauccucc

SEQ ID NO: 1141914 - RNA, 19 nt, Artificial Sequence
  Description of Artificial Sequence: Synthetic oligonucleotide
  Sense strand starting at position 2690 of SEQ ID NO: 916250
ggaugugcagaucgaacaa

SEQ ID NO: 1141915 - RNA, 19 nt, Artificial Sequence
  Description of Artificial Sequence: Synthetic oligonucleotide
  Antisense strand to SEQ ID NO: 1141914
uuguucgaucugcacaucc

SEQ ID NO: 1141916 - RNA, 19 nt, Artificial Sequence
  Description of Artificial Sequence: Synthetic oligonucleotide
  Sense strand starting at position 2713 of SEQ ID NO: 916250
cuugaaacguggucaucca

SEQ ID NO: 1141917 - RNA, 19 nt, Artificial Sequence
  Description of Artificial Sequence: Synthetic oligonucleotide
  Antisense strand to SEQ ID NO: 1141916
uggaugaccacguuucaag

SEQ ID NO: 1141918 - RNA, 19 nt, Artificial Sequence
  Description of Artificial Sequence: Synthetic oligonucleotide
  Sense strand starting at position 2714 of SEQ ID NO: 916250
uugaaacguggucauccaa

SEQ ID NO: 1141919 - RNA, 19 nt, Artificial Sequence
  Description of Artificial Sequence: Synthetic oligonucleotide
  Antisense strand to SEQ ID NO: 1141918
uuggaugaccacguuucaa

SEQ ID NO: 1141920 - RNA, 19 nt, Artificial Sequence
  Description of Artificial Sequence: Synthetic oligonucleotide
  Sense strand starting at position 2758 of SEQ ID NO: 916250
gggaauagcccuugaaacu

SEQ ID NO: 1141921 - RNA, 19 nt, Artificial Sequence
  Description of Artificial Sequence: Synthetic oligonucleotide
  Antisense strand to SEQ ID NO: 1141920
aguuucaagggcuauuccc

SEQ ID NO: 1141922 - RNA, 19 nt, Artificial Sequence
  Description of Artificial Sequence: Synthetic oligonucleotide
  Sense strand starting at position 2793 of SEQ ID NO: 916250
guggucgcucuggaauaau

SEQ ID NO: 1141923 - RNA, 19 nt, Artificial Sequence
  Description of Artificial Sequence: Synthetic oligonucleotide
  Antisense strand to SEQ ID NO: 1141922
auuauuccagagcgaccac

SEQ ID NO: 1141924 - RNA, 19 nt, Artificial Sequence
  Description of Artificial Sequence: Synthetic oligonucleotide
  Sense strand starting at position 3134 of SEQ ID NO: 916250
agagauauuccuggcaagg

SEQ ID NO: 1141925 - RNA, 19 nt, Artificial Sequence
  Description of Artificial Sequence: Synthetic oligonucleotide
  Antisense strand to SEQ ID NO: 1141924
ccuugccaggaauaucucu

SEQ ID NO: 1141926 - RNA, 19 nt, Artificial Sequence
  Description of Artificial Sequence: Synthetic oligonucleotide
  Sense strand starting at position 3178 of SEQ ID NO: 916250
ccgauauaacaagguauac

SEQ ID NO: 1141927 - RNA, 19 nt, Artificial Sequence
  Description of Artificial Sequence: Synthetic oligonucleotide
  Antisense strand to SEQ ID NO: 1141926
guauaccuuguuauaucgg

SEQ ID NO: 1141928 - RNA, 19 nt, Artificial Sequence
  Description of Artificial Sequence: Synthetic oligonucleotide
  Sense strand starting at position 3226 of SEQ ID NO: 916250
guugaacuguuugccaaga

SEQ ID NO: 1141929 - RNA, 19 nt, Artificial Sequence
  Description of Artificial Sequence: Synthetic oligonucleotide
  Antisense strand to SEQ ID NO: 1141928
ucuuggcaaacaguucaac

SEQ ID NO: 1141930 - RNA, 19 nt, Artificial Sequence
  Description of Artificial Sequence: Synthetic oligonucleotide
  Sense strand starting at position 3231 of SEQ ID NO: 916250
acuguuugccaagaagagu

SEQ ID NO: 1141931 - RNA, 19 nt, Artificial Sequence
  Description of Artificial Sequence: Synthetic oligonucleotide
  Antisense strand to SEQ ID NO: 1141930
acucuucuuggcaaacagu

SEQ ID NO: 1141932 - RNA, 19 nt, Artificial Sequence
  Description of Artificial Sequence: Synthetic oligonucleotide
  Sense strand starting at position 3431 of SEQ ID NO: 916250
gguaaugcgcggaguccua

SEQ ID NO: 1141933 - RNA, 19 nt, Artificial Sequence
  Description of Artificial Sequence: Synthetic oligonucleotide
  Antisense strand to SEQ ID NO: 1141932
uaggacuccgcgcauuacc

SEQ ID NO: 1141934 - RNA, 19 nt, Artificial Sequence
  Description of Artificial Sequence: Synthetic oligonucleotide
  Sense strand starting at position 3442 of SEQ ID NO: 916250
gaguccuaacaagguuuga

SEQ ID NO: 1141935 - RNA, 19 nt, Artificial Sequence
  Description of Artificial Sequence: Synthetic oligonucleotide
  Antisense strand to SEQ ID NO: 1141934
ucaaaccuuguuaggacuc

SEQ ID NO: 1141936 - RNA, 19 nt, Artificial Sequence
  Description of Artificial Sequence: Synthetic oligonucleotide
  Sense strand starting at position 3446 of SEQ ID NO: 916250
ccuaacaagguuugaggua

SEQ ID NO: 1141937 - RNA, 19 nt, Artificial Sequence
  Description of Artificial Sequence: Synthetic oligonucleotide
  Antisense strand to SEQ ID NO: 1141936
uaccucaaaccuuguuagg

SEQ ID NO: 1141938 - RNA, 19 nt, Artificial Sequence
  Description of Artificial Sequence: Synthetic oligonucleotide
  Sense strand starting at position 3608 of SEQ ID NO: 916250
acaauuaugccggaagugu

SEQ ID NO: 1141939 - RNA, 19 nt, Artificial Sequence
  Description of Artificial Sequence: Synthetic oligonucleotide
  Antisense strand to SEQ ID NO: 1141938
acacuuccggcauaauugu

SEQ ID NO: 1141940 - RNA, 19 nt, Artificial Sequence
  Description of Artificial Sequence: Synthetic oligonucleotide
  Sense strand starting at position 3648 of SEQ ID NO: 916250
accagaauacuugguuaca

SEQ ID NO: 1141941 - RNA, 19 nt, Artificial Sequence
  Description of Artificial Sequence: Synthetic oligonucleotide
  Antisense strand to SEQ ID NO: 1141940
uguaaccaaguauucuggu

SEQ ID NO: 1141942 - RNA, 19 nt, Artificial Sequence
  Description of Artificial Sequence: Synthetic oligonucleotide
  Sense strand starting at position 3649 of SEQ ID NO: 916250
ccagaauacuugguuacag

SEQ ID NO: 1141943 - RNA, 19 nt, Artificial Sequence
  Description of Artificial Sequence: Synthetic oligonucleotide
  Antisense strand to SEQ ID NO: 1141942
cuguaaccaaguauucugg

SEQ ID NO: 1141944 - RNA, 19 nt, Artificial Sequence
  Description of Artificial Sequence: Synthetic oligonucleotide
  Sense strand starting at position 3850 of SEQ ID NO: 916250
gccagaaauuguguaauua

SEQ ID NO: 1141945 - RNA, 19 nt, Artificial Sequence
  Description of Artificial Sequence: Synthetic oligonucleotide
  Antisense strand to SEQ ID NO: 1141944
uaauuacacaauuucuggc

SEQ ID NO: 1141946 - RNA, 19 nt, Artificial Sequence
  Description of Artificial Sequence: Synthetic oligonucleotide
  Sense strand starting at position 3854 of SEQ ID NO: 916250
gaaauuguguaauuaguug

SEQ ID NO: 1141947 - RNA, 19 nt, Artificial Sequence
  Description of Artificial Sequence: Synthetic oligonucleotide
  Antisense strand to SEQ ID NO: 1141946
caacuaauuacacaauuuc

SEQ ID NO: 1141948 - RNA, 19 nt, Artificial Sequence
  Description of Artificial Sequence: Synthetic oligonucleotide
  Sense strand starting at position 3974 of SEQ ID NO: 916250
uucccagaugguuaugcau

SEQ ID NO: 1141949 - RNA, 19 nt, Artificial Sequence
  Description of Artificial Sequence: Synthetic oligonucleotide
  Antisense strand to SEQ ID NO: 1141948
augcauaaccaucugggaa

SEQ ID NO: 1141950 - RNA, 19 nt, Artificial Sequence
  Description of Artificial Sequence: Synthetic oligonucleotide
  Sense strand starting at position 37 of SEQ ID NO: 916251
acagaaagcugguacuaca

SEQ ID NO: 1141951 - RNA, 19 nt, Artificial Sequence
  Description of Artificial Sequence: Synthetic oligonucleotide
  Antisense strand to SEQ ID NO: 1141950
uguaguaccagcuuucugu

SEQ ID NO: 1141952 - RNA, 19 nt, Artificial Sequence
  Description of Artificial Sequence: Synthetic oligonucleotide
  Sense strand starting at position 116 of SEQ ID NO: 916251
acuccugcgucucuagaga

SEQ ID NO: 1141953 - RNA, 19 nt, Artificial Sequence
  Description of Artificial Sequence: Synthetic oligonucleotide
  Antisense strand to SEQ ID NO: 1141952
ucucuagagacgcaggagu

SEQ ID NO: 1141954 - RNA, 19 nt, Artificial Sequence
  Description of Artificial Sequence: Synthetic oligonucleotide
  Sense strand starting at position 154 of SEQ ID NO: 916251
gucacuuagaacugcgaaa

SEQ ID NO: 1141955 - RNA, 19 nt, Artificial Sequence
  Description of Artificial Sequence: Synthetic oligonucleotide
  Antisense strand to SEQ ID NO: 1141954
uuucgcaguucuaagugac

SEQ ID NO: 1141956 - RNA, 19 nt, Artificial Sequence
  Description of Artificial Sequence: Synthetic oligonucleotide
  Sense strand starting at position 328 of SEQ ID NO: 916251
guuccuaucggguauuaga

SEQ ID NO: 1141957 - RNA, 19 nt, Artificial Sequence
  Description of Artificial Sequence: Synthetic oligonucleotide
  Antisense strand to SEQ ID NO: 1141956
ucuaauacccgauaggaac

SEQ ID NO: 1141958 - RNA, 19 nt, Artificial Sequence
  Description of Artificial Sequence: Synthetic oligonucleotide
  Sense strand starting at position 463 of SEQ ID NO: 916251
gcaagcaagccucauguca

SEQ ID NO: 1141959 - RNA, 19 nt, Artificial Sequence
  Description of Artificial Sequence: Synthetic oligonucleotide
  Antisense strand to SEQ ID NO: 1141958
ugacaugaggcuugcuugc

SEQ ID NO: 1141960 - RNA, 19 nt, Artificial Sequence
  Description of Artificial Sequence: Synthetic oligonucleotide
  Sense strand starting at position 556 of SEQ ID NO: 916251
gagagccugggcuaaagau

SEQ ID NO: 1141961 - RNA, 19 nt, Artificial Sequence
  Description of Artificial Sequence: Synthetic oligonucleotide
  Antisense strand to SEQ ID NO: 1141960
aucuuuagcccaggcucuc

SEQ ID NO: 1141962 - RNA, 19 nt, Artificial Sequence
  Description of Artificial Sequence: Synthetic oligonucleotide
  Sense strand starting at position 592 of SEQ ID NO: 916251
ccuguuuccucaccaguaa

SEQ ID NO: 1141963 - RNA, 19 nt, Artificial Sequence
  Description of Artificial Sequence: Synthetic oligonucleotide
  Antisense strand to SEQ ID NO: 1141962
uuacuggugaggaaacagg

SEQ ID NO: 1141964 - RNA, 19 nt, Artificial Sequence
  Description of Artificial Sequence: Synthetic oligonucleotide
  Sense strand starting at position 670 of SEQ ID NO: 916251
ugucccguguccucaauaa

SEQ ID NO: 1141965 - RNA, 19 nt, Artificial Sequence
  Description of Artificial Sequence: Synthetic oligonucleotide
  Antisense strand to SEQ ID NO: 1141964
uuauugaggacacgggaca

SEQ ID NO: 1141966 - RNA, 19 nt, Artificial Sequence
  Description of Artificial Sequence: Synthetic oligonucleotide
  Sense strand starting at position 716 of SEQ ID NO: 916251
uuuaguuguugcuugucaa

SEQ ID NO: 1141967 - RNA, 19 nt, Artificial Sequence
  Description of Artificial Sequence: Synthetic oligonucleotide
  Antisense strand to SEQ ID NO: 1141966
uugacaagcaacaacuaaa

SEQ ID NO: 1141968 - RNA, 19 nt, Artificial Sequence
  Description of Artificial Sequence: Synthetic oligonucleotide
  Sense strand starting at position 717 of SEQ ID NO: 916251
uuaguuguugcuugucaaa

SEQ ID NO: 1141969 - RNA, 19 nt, Artificial Sequence
  Description of Artificial Sequence: Synthetic oligonucleotide
  Antisense strand to SEQ ID NO: 1141968
uuugacaagcaacaacuaa

SEQ ID NO: 1141970 - RNA, 19 nt, Artificial Sequence
  Description of Artificial Sequence: Synthetic oligonucleotide
  Sense strand starting at position 754 of SEQ ID NO: 916251
aaggcauucucacuuggga

SEQ ID NO: 1141971 - RNA, 19 nt, Artificial Sequence
  Description of Artificial Sequence: Synthetic oligonucleotide
  Antisense strand to SEQ ID NO: 1141970
ucccaagugagaaugccuu

SEQ ID NO: 1141972 - RNA, 19 nt, Artificial Sequence
  Description of Artificial Sequence: Synthetic oligonucleotide
  Sense strand starting at position 756 of SEQ ID NO: 916251
ggcauucucacuugggaaa

SEQ ID NO: 1141973 - RNA, 19 nt, Artificial Sequence
  Description of Artificial Sequence: Synthetic oligonucleotide
  Antisense strand to SEQ ID NO: 1141972
uuucccaagugagaaugcc

SEQ ID NO: 1141974 - RNA, 19 nt, Artificial Sequence
  Description of Artificial Sequence: Synthetic oligonucleotide
  Sense strand starting at position 757 of SEQ ID NO: 916251
gcauucucacuugggaaag

SEQ ID NO: 1141975 - RNA, 19 nt, Artificial Sequence
  Description of Artificial Sequence: Synthetic oligonucleotide
  Antisense strand to SEQ ID NO: 1141974
cuuucccaagugagaaugc

SEQ ID NO: 1141976 - RNA, 19 nt, Artificial Sequence
  Description of Artificial Sequence: Synthetic oligonucleotide
  Sense strand starting at position 759 of SEQ ID NO: 916251
auucucacuugggaaagua

SEQ ID NO: 1141977 - RNA, 19 nt, Artificial Sequence
  Description of Artificial Sequence: Synthetic oligonucleotide
  Antisense strand to SEQ ID NO: 1141976
uacuuucccaagugagaau

SEQ ID NO: 1141978 - RNA, 19 nt, Artificial Sequence
  Description of Artificial Sequence: Synthetic oligonucleotide
  Sense strand starting at position 767 of SEQ ID NO: 916251
uugggaaaguaugcuacuu

SEQ ID NO: 1141979 - RNA, 19 nt, Artificial Sequence
  Description of Artificial Sequence: Synthetic oligonucleotide
  Antisense strand to SEQ ID NO: 1141978
aaguagcauacuuucccaa

SEQ ID NO: 1141980 - RNA, 19 nt, Artificial Sequence
  Description of Artificial Sequence: Synthetic oligonucleotide
  Sense strand starting at position 892 of SEQ ID NO: 916251
guuauaaagcgcuauguug

SEQ ID NO: 1141981 - RNA, 19 nt, Artificial Sequence
  Description of Artificial Sequence: Synthetic oligonucleotide
  Antisense strand to SEQ ID NO: 1141980
caacauagcgcuuuauaac

SEQ ID NO: 1141982 - RNA, 19 nt, Artificial Sequence
  Description of Artificial Sequence: Synthetic oligonucleotide
  Sense strand starting at position 894 of SEQ ID NO: 916251
uauaaagcgcuauguugau

SEQ ID NO: 1141983 - RNA, 19 nt, Artificial Sequence
  Description of Artificial Sequence: Synthetic oligonucleotide
  Antisense strand to SEQ ID NO: 1141982
aucaacauagcgcuuuaua

SEQ ID NO: 1141984 - RNA, 19 nt, Artificial Sequence
  Description of Artificial Sequence: Synthetic oligonucleotide
  Sense strand starting at position 1081 of SEQ ID NO: 916251
auccaugagucaucuguaa

SEQ ID NO: 1141985 - RNA, 19 nt, Artificial Sequence
  Description of Artificial Sequence: Synthetic oligonucleotide
  Antisense strand to SEQ ID NO: 1141984
uuacagaugacucauggau

SEQ ID NO: 1141986 - RNA, 19 nt, Artificial Sequence
  Description of Artificial Sequence: Synthetic oligonucleotide
  Sense strand starting at position 1279 of SEQ ID NO: 916251
gcuugcuucucgucauaga

SEQ ID NO: 1141987 - RNA, 19 nt, Artificial Sequence
  Description of Artificial Sequence: Synthetic oligonucleotide
  Antisense strand to SEQ ID NO: 1141986
ucuaugacgagaagcaagc

SEQ ID NO: 1141988 - RNA, 19 nt, Artificial Sequence
  Description of Artificial Sequence: Synthetic oligonucleotide
  Sense strand starting at position 1280 of SEQ ID NO: 916251
cuugcuucucgucauagag

SEQ ID NO: 1141989 - RNA, 19 nt, Artificial Sequence
  Description of Artificial Sequence: Synthetic oligonucleotide
  Antisense strand to SEQ ID NO: 1141988
cucuaugacgagaagcaag

SEQ ID NO: 1141990 - RNA, 19 nt, Artificial Sequence
  Description of Artificial Sequence: Synthetic oligonucleotide
  Sense strand starting at position 1463 of SEQ ID NO: 916251
gacugacauucgucggguu

SEQ ID NO: 1141991 - RNA, 19 nt, Artificial Sequence
  Description of Artificial Sequence: Synthetic oligonucleotide
  Antisense strand to SEQ ID NO: 1141990
aacccgacgaaugucaguc

SEQ ID NO: 1141992 - RNA, 19 nt, Artificial Sequence
  Description of Artificial Sequence: Synthetic oligonucleotide
  Sense strand starting at position 1465 of SEQ ID NO: 916251
cugacauucgucggguuca

SEQ ID NO: 1141993 - RNA, 19 nt, Artificial Sequence
  Description of Artificial Sequence: Synthetic oligonucleotide
  Antisense strand to SEQ ID NO: 1141992
ugaacccgacgaaugucag

SEQ ID NO: 1141994 - RNA, 19 nt, Artificial Sequence
  Description of Artificial Sequence: Synthetic oligonucleotide
  Sense strand starting at position 2081 of SEQ ID NO: 916251
cgcuacuuucguuccggaa

SEQ ID NO: 1141995 - RNA, 19 nt, Artificial Sequence
  Description of Artificial Sequence: Synthetic oligonucleotide
  Antisense strand to SEQ ID NO: 1141994
uuccggaacgaaaguagcg

SEQ ID NO: 1141996 - RNA, 19 nt, Artificial Sequence
  Description of Artificial Sequence: Synthetic oligonucleotide
  Sense strand starting at position 2085 of SEQ ID NO: 916251
acuuucguuccggaacaga

SEQ ID NO: 1141997 - RNA, 19 nt, Artificial Sequence
  Description of Artificial Sequence: Synthetic oligonucleotide
  Antisense strand to SEQ ID NO: 1141996
ucuguuccggaacgaaagu

SEQ ID NO: 1141998 - RNA, 19 nt, Artificial Sequence
  Description of Artificial Sequence: Synthetic oligonucleotide
  Sense strand starting at position 2100 of SEQ ID NO: 916251
cagagaacguccuccucuu

SEQ ID NO: 1141999 - RNA, 19 nt, Artificial Sequence
  Description of Artificial Sequence: Synthetic oligonucleotide
  Antisense strand to SEQ ID NO: 1141998
aagaggaggacguucucug

SEQ ID NO: 1142000 - RNA, 19 nt, Artificial Sequence
  Description of Artificial Sequence: Synthetic oligonucleotide
  Sense strand starting at position 2226 of SEQ ID NO: 916251
cggaccuuucccuaguaga

SEQ ID NO: 1142001 - RNA, 19 nt, Artificial Sequence
  Description of Artificial Sequence: Synthetic oligonucleotide
  Antisense strand to SEQ ID NO: 1142000
ucuacuagggaaagguccg

SEQ ID NO: 1142002 - RNA, 19 nt, Artificial Sequence
  Description of Artificial Sequence: Synthetic oligonucleotide
  Sense strand starting at position 2621 of SEQ ID NO: 916251
cgcucaucucugcggauuu

SEQ ID NO: 1142003 - RNA, 19 nt, Artificial Sequence
  Description of Artificial Sequence: Synthetic oligonucleotide
  Antisense strand to SEQ ID NO: 1142002
aaauccgcagagaugagcg

SEQ ID NO: 1142004 - RNA, 19 nt, Artificial Sequence
  Description of Artificial Sequence: Synthetic oligonucleotide
  Sense strand starting at position 2890 of SEQ ID NO: 916251
acuguuggucuacacaaau

SEQ ID NO: 1142005 - RNA, 19 nt, Artificial Sequence
  Description of Artificial Sequence: Synthetic oligonucleotide
  Antisense strand to SEQ ID NO: 1142004
auuuguguagaccaacagu

SEQ ID NO: 1142006 - RNA, 19 nt, Artificial Sequence
  Description of Artificial Sequence: Synthetic oligonucleotide
  Sense strand starting at position 2896 of SEQ ID NO: 916251
ggucuacacaaaugugaug

SEQ ID NO: 1142007 - RNA, 19 nt, Artificial Sequence
  Description of Artificial Sequence: Synthetic oligonucleotide
  Antisense strand to SEQ ID NO: 1142006
caucacauuuguguagacc

SEQ ID NO: 1142008 - RNA, 19 nt, Artificial Sequence
  Description of Artificial Sequence: Synthetic oligonucleotide
  Sense strand starting at position 2901 of SEQ ID NO: 916251
acacaaaugugaugaauuc

SEQ ID NO: 1142009 - RNA, 19 nt, Artificial Sequence
  Description of Artificial Sequence: Synthetic oligonucleotide
  Antisense strand to SEQ ID NO: 1142008
gaauucaucacauuugugu

SEQ ID NO: 1142010 - RNA, 19 nt, Artificial Sequence
  Description of Artificial Sequence: Synthetic oligonucleotide
  Sense strand starting at position 2910 of SEQ ID NO: 916251
ugaugaauucuauguugau

SEQ ID NO: 1142011 - RNA, 19 nt, Artificial Sequence
  Description of Artificial Sequence: Synthetic oligonucleotide
  Antisense strand to SEQ ID NO: 1142010
aucaacauagaauucauca

SEQ ID NO: 1142012 - RNA, 19 nt, Artificial Sequence
  Description of Artificial Sequence: Synthetic oligonucleotide
  Sense strand starting at position 2911 of SEQ ID NO: 916251
gaugaauucuauguugauu

SEQ ID NO: 1142013 - RNA, 19 nt, Artificial Sequence
  Description of Artificial Sequence: Synthetic oligonucleotide
  Antisense strand to SEQ ID NO: 1142012
aaucaacauagaauucauc

SEQ ID NO: 1142014 - RNA, 19 nt, Artificial Sequence
  Description of Artificial Sequence: Synthetic oligonucleotide
  Sense strand starting at position 2947 of SEQ ID NO: 916251
cgcugaacucauuaguuug

SEQ ID NO: 1142015 - RNA, 19 nt, Artificial Sequence
  Description of Artificial Sequence: Synthetic oligonucleotide
  Antisense strand to SEQ ID NO: 1142014
caaacuaaugaguucagcg

SEQ ID NO: 1142016 - RNA, 19 nt, Artificial Sequence
  Description of Artificial Sequence: Synthetic oligonucleotide
  Sense strand starting at position 2952 of SEQ ID NO: 916251
aacucauuaguuugagggu

SEQ ID NO: 1142017 - RNA, 19 nt, Artificial Sequence
  Description of Artificial Sequence: Synthetic oligonucleotide
  Antisense strand to SEQ ID NO: 1142016
acccucaaacuaaugaguu

SEQ ID NO: 1142018 - RNA, 19 nt, Artificial Sequence
  Description of Artificial Sequence: Synthetic oligonucleotide
  Sense strand starting at position 3023 of SEQ ID NO: 916251
gccaucauguuaucugcaa

SEQ ID NO: 1142019 - RNA, 19 nt, Artificial Sequence
  Description of Artificial Sequence: Synthetic oligonucleotide
  Antisense strand to SEQ ID NO: 1142018
uugcagauaacaugauggc

SEQ ID NO: 1142020 - RNA, 19 nt, Artificial Sequence
  Description of Artificial Sequence: Synthetic oligonucleotide
  Sense strand starting at position 3136 of SEQ ID NO: 916251
guucuuagaucugaccaaa

SEQ ID NO: 1142021 - RNA, 19 nt, Artificial Sequence
  Description of Artificial Sequence: Synthetic oligonucleotide
  Antisense strand to SEQ ID NO: 1142020
uuuggucagaucuaagaac

SEQ ID NO: 1142022 - RNA, 19 nt, Artificial Sequence
  Description of Artificial Sequence: Synthetic oligonucleotide
  Sense strand starting at position 3602 of SEQ ID NO: 916251
ugaacccugucucuaugaa

SEQ ID NO: 1142023 - RNA, 19 nt, Artificial Sequence
  Description of Artificial Sequence: Synthetic oligonucleotide
  Antisense strand to SEQ ID NO: 1142022
uucauagagacaggguuca

SEQ ID NO: 1142024 - RNA, 19 nt, Artificial Sequence
  Description of Artificial Sequence: Synthetic oligonucleotide
  Sense strand starting at position 3835 of SEQ ID NO: 916251
ugaguuacagacugugaga

SEQ ID NO: 1142025 - RNA, 19 nt, Artificial Sequence
  Description of Artificial Sequence: Synthetic oligonucleotide
  Antisense strand to SEQ ID NO: 1142024
ucucacagucuguaacuca

SEQ ID NO: 1142026 - RNA, 19 nt, Artificial Sequence
  Description of Artificial Sequence: Synthetic oligonucleotide
  Sense strand starting at position 3837 of SEQ ID NO: 916251
aguuacagacugugagaaa

SEQ ID NO: 1142027 - RNA, 19 nt, Artificial Sequence
  Description of Artificial Sequence: Synthetic oligonucleotide
  Antisense strand to SEQ ID NO: 1142026
uuucucacagucuguaacu

SEQ ID NO: 1142028 - RNA, 19 nt, Artificial Sequence
  Description of Artificial Sequence: Synthetic oligonucleotide
  Sense strand starting at position 3936 of SEQ ID NO: 916251
acaauuauucugggcacaa

SEQ ID NO: 1142029 - RNA, 19 nt, Artificial Sequence
  Description of Artificial Sequence: Synthetic oligonucleotide
  Antisense strand to SEQ ID NO: 1142028
uugugcccagaauaauugu

SEQ ID NO: 1142030 - RNA, 19 nt, Artificial Sequence
  Description of Artificial Sequence: Synthetic oligonucleotide
  Sense strand starting at position 3 of SEQ ID NO: 916252
agugauacuucucccugua

SEQ ID NO: 1142031 - RNA, 19 nt, Artificial Sequence
  Description of Artificial Sequence: Synthetic oligonucleotide
  Antisense strand to SEQ ID NO: 1142030
uacagggagaaguaucacu

SEQ ID NO: 1142032 - RNA, 19 nt, Artificial Sequence
  Description of Artificial Sequence: Synthetic oligonucleotide
  Sense strand starting at position 49 of SEQ ID NO: 916252
uucccagucuugcuugauu

SEQ ID NO: 1142033 - RNA, 19 nt, Artificial Sequence
  Description of Artificial Sequence: Synthetic oligonucleotide
  Antisense strand to SEQ ID NO: 1142032
aaucaagcaagacugggaa

SEQ ID NO: 1142034 - RNA, 19 nt, Artificial Sequence
  Description of Artificial Sequence: Synthetic oligonucleotide
  Sense strand starting at position 81 of SEQ ID NO: 916252
uggaaugacucagucguca

SEQ ID NO: 1142035 - RNA, 19 nt, Artificial Sequence
  Description of Artificial Sequence: Synthetic oligonucleotide
  Antisense strand to SEQ ID NO: 1142034
ugacgacugagucauucca

SEQ ID NO: 1142036 - RNA, 19 nt, Artificial Sequence
  Description of Artificial Sequence: Synthetic oligonucleotide
  Sense strand starting at position 175 of SEQ ID NO: 916252
acagaaagcugguacuaca

SEQ ID NO: 1142037 - RNA, 19 nt, Artificial Sequence
  Description of Artificial Sequence: Synthetic oligonucleotide
  Antisense strand to SEQ ID NO: 1142036
uguaguaccagcuuucugu

SEQ ID NO: 1142038 - RNA, 19 nt, Artificial Sequence
  Description of Artificial Sequence: Synthetic oligonucleotide
  Sense strand starting at position 254 of SEQ ID NO: 916252
acuccugcgucucuagaga

SEQ ID NO: 1142039 - RNA, 19 nt, Artificial Sequence
  Description of Artificial Sequence: Synthetic oligonucleotide
  Antisense strand to SEQ ID NO: 1142038
ucucuagagacgcaggagu

SEQ ID NO: 1142040 - RNA, 19 nt, Artificial Sequence
  Description of Artificial Sequence: Synthetic oligonucleotide
  Sense strand starting at position 292 of SEQ ID NO: 916252
gucacuuagaacugcgaaa

SEQ ID NO: 1142041 - RNA, 19 nt, Artificial Sequence
  Description of Artificial Sequence: Synthetic oligonucleotide
  Antisense strand to SEQ ID NO: 1142040
uuucgcaguucuaagugac

SEQ ID NO: 1142042 - RNA, 19 nt, Artificial Sequence
  Description of Artificial Sequence: Synthetic oligonucleotide
  Sense strand starting at position 466 of SEQ ID NO: 916252
guuccuaucggguauuaga

SEQ ID NO: 1142043 - RNA, 19 nt, Artificial Sequence
  Description of Artificial Sequence: Synthetic oligonucleotide
  Antisense strand to SEQ ID NO: 1142042
ucuaauacccgauaggaac

SEQ ID NO: 1142044 - RNA, 19 nt, Artificial Sequence
  Description of Artificial Sequence: Synthetic oligonucleotide
  Sense strand starting at position 601 of SEQ ID NO: 916252
gcaagcaagccucauguca

SEQ ID NO: 1142045 - RNA, 19 nt, Artificial Sequence
  Description of Artificial Sequence: Synthetic oligonucleotide
  Antisense strand to SEQ ID NO: 1142044
ugacaugaggcuugcuugc

SEQ ID NO: 1142046 - RNA, 19 nt, Artificial Sequence
  Description of Artificial Sequence: Synthetic oligonucleotide
  Sense strand starting at position 694 of SEQ ID NO: 916252
gagagccugggcuaaagau

SEQ ID NO: 1142047 - RNA, 19 nt, Artificial Sequence
  Description of Artificial Sequence: Synthetic oligonucleotide
  Antisense strand to SEQ ID NO: 1142046
aucuuuagcccaggcucuc

SEQ ID NO: 1142048 - RNA, 19 nt, Artificial Sequence
  Description of Artificial Sequence: Synthetic oligonucleotide
  Sense strand starting at position 730 of SEQ ID NO: 916252
ccuguuuccucaccaguaa

SEQ ID NO: 1142049 - RNA, 19 nt, Artificial Sequence
  Description of Artificial Sequence: Synthetic oligonucleotide
  Antisense strand to SEQ ID NO: 1142048
uuacuggugaggaaacagg

SEQ ID NO: 1142050 - RNA, 19 nt, Artificial Sequence
  Description of Artificial Sequence: Synthetic oligonucleotide
  Sense strand starting at position 808 of SEQ ID NO: 916252
ugucccguguccucaauaa

SEQ ID NO: 1142051 - RNA, 19 nt, Artificial Sequence
  Description of Artificial Sequence: Synthetic oligonucleotide
  Antisense strand to SEQ ID NO: 1142050
uuauugaggacacgggaca

SEQ ID NO: 1142052 - RNA, 19 nt, Artificial Sequence
  Description of Artificial Sequence: Synthetic oligonucleotide
  Sense strand starting at position 854 of SEQ ID NO: 916252
uuuaguuguugcuugucaa

SEQ ID NO: 1142053 - RNA, 19 nt, Artificial Sequence
  Description of Artificial Sequence: Synthetic oligonucleotide
  Antisense strand to SEQ ID NO: 1142052
uugacaagcaacaacuaaa

SEQ ID NO: 1142054 - RNA, 19 nt, Artificial Sequence
  Description of Artificial Sequence: Synthetic oligonucleotide
  Sense strand starting at position 855 of SEQ ID NO: 916252
uuaguuguugcuugucaaa

SEQ ID NO: 1142055 - RNA, 19 nt, Artificial Sequence
  Description of Artificial Sequence: Synthetic oligonucleotide
  Antisense strand to SEQ ID NO: 1142054
uuugacaagcaacaacuaa

SEQ ID NO: 1142056 - RNA, 19 nt, Artificial Sequence
  Description of Artificial Sequence: Synthetic oligonucleotide
  Sense strand starting at position 892 of SEQ ID NO: 916252
aaggcauucucacuuggga

SEQ ID NO: 1142057 - RNA, 19 nt, Artificial Sequence
  Description of Artificial Sequence: Synthetic oligonucleotide
  Antisense strand to SEQ ID NO: 1142056
ucccaagugagaaugccuu

SEQ ID NO: 1142058 - RNA, 19 nt, Artificial Sequence
  Description of Artificial Sequence: Synthetic oligonucleotide
  Sense strand starting at position 894 of SEQ ID NO: 916252
ggcauucucacuugggaaa

SEQ ID NO: 1142059 - RNA, 19 nt, Artificial Sequence
  Description of Artificial Sequence: Synthetic oligonucleotide
  Antisense strand to SEQ ID NO: 1142058
uuucccaagugagaaugcc

SEQ ID NO: 1142060 - RNA, 19 nt, Artificial Sequence
  Description of Artificial Sequence: Synthetic oligonucleotide
  Sense strand starting at position 895 of SEQ ID NO: 916252
gcauucucacuugggaaag

SEQ ID NO: 1142061 - RNA, 19 nt, Artificial Sequence
  Description of Artificial Sequence: Synthetic oligonucleotide
  Antisense strand to SEQ ID NO: 1142060
cuuucccaagugagaaugc

SEQ ID NO: 1142062 - RNA, 19 nt, Artificial Sequence
  Description of Artificial Sequence: Synthetic oligonucleotide
  Sense strand starting at position 897 of SEQ ID NO: 916252
auucucacuugggaaagua

SEQ ID NO: 1142063 - RNA, 19 nt, Artificial Sequence
  Description of Artificial Sequence: Synthetic oligonucleotide
  Antisense strand to SEQ ID NO: 1142062
uacuuucccaagugagaau

SEQ ID NO: 1142064 - RNA, 19 nt, Artificial Sequence
  Description of Artificial Sequence: Synthetic oligonucleotide
  Sense strand starting at position 905 of SEQ ID NO: 916252
uugggaaaguaugcuacuu

SEQ ID NO: 1142065 - RNA, 19 nt, Artificial Sequence
  Description of Artificial Sequence: Synthetic oligonucleotide
  Antisense strand to SEQ ID NO: 1142064
aaguagcauacuuucccaa

SEQ ID NO: 1142066 - RNA, 19 nt, Artificial Sequence
  Description of Artificial Sequence: Synthetic oligonucleotide
  Sense strand starting at position 1030 of SEQ ID NO: 916252
guuauaaagcgcuauguug

SEQ ID NO: 1142067 - RNA, 19 nt, Artificial Sequence
  Description of Artificial Sequence: Synthetic oligonucleotide
  Antisense strand to SEQ ID NO: 1142066
caacauagcgcuuuauaac

SEQ ID NO: 1142068 - RNA, 19 nt, Artificial Sequence
  Description of Artificial Sequence: Synthetic oligonucleotide
  Sense strand starting at position 1032 of SEQ ID NO: 916252
uauaaagcgcuauguugau

SEQ ID NO: 1142069 - RNA, 19 nt, Artificial Sequence
  Description of Artificial Sequence: Synthetic oligonucleotide
  Antisense strand to SEQ ID NO: 1142068
aucaacauagcgcuuuaua

SEQ ID NO: 1142070 - RNA, 19 nt, Artificial Sequence
  Description of Artificial Sequence: Synthetic oligonucleotide
  Sense strand starting at position 1219 of SEQ ID NO: 916252
auccaugagucaucuguaa

SEQ ID NO: 1142071 - RNA, 19 nt, Artificial Sequence
  Description of Artificial Sequence: Synthetic oligonucleotide
  Antisense strand to SEQ ID NO: 1142070
uuacagaugacucauggau

SEQ ID NO: 1142072 - RNA, 19 nt, Artificial Sequence
  Description of Artificial Sequence: Synthetic oligonucleotide
  Sense strand starting at position 1418 of SEQ ID NO: 916252
cuugcuucucgucauagag

SEQ ID NO: 1142073 - RNA, 19 nt, Artificial Sequence
  Description of Artificial Sequence: Synthetic oligonucleotide
  Antisense strand to SEQ ID NO: 1142072
cucuaugacgagaagcaag

SEQ ID NO: 1142074 - RNA, 19 nt, Artificial Sequence
  Description of Artificial Sequence: Synthetic oligonucleotide
  Sense strand starting at position 1601 of SEQ ID NO: 916252
gacugacauucgucggguu

SEQ ID NO: 1142075 - RNA, 19 nt, Artificial Sequence
  Description of Artificial Sequence: Synthetic oligonucleotide
  Antisense strand to SEQ ID NO: 1142074
aacccgacgaaugucaguc

SEQ ID NO: 1142076 - RNA, 19 nt, Artificial Sequence
  Description of Artificial Sequence: Synthetic oligonucleotide
  Sense strand starting at position 1603 of SEQ ID NO: 916252
cugacauucgucggguuca

SEQ ID NO: 1142077 - RNA, 19 nt, Artificial Sequence
  Description of Artificial Sequence: Synthetic oligonucleotide
  Antisense strand to SEQ ID NO: 1142076
ugaacccgacgaaugucag

SEQ ID NO: 1142078 - RNA, 19 nt, Artificial Sequence
  Description of Artificial Sequence: Synthetic oligonucleotide
  Sense strand starting at position 2219 of SEQ ID NO: 916252
cgcuacuuucguuccggaa

SEQ ID NO: 1142079 - RNA, 19 nt, Artificial Sequence
  Description of Artificial Sequence: Synthetic oligonucleotide
  Antisense strand to SEQ ID NO: 1142078
uuccggaacgaaaguagcg

SEQ ID NO: 1142080 - RNA, 19 nt, Artificial Sequence
  Description of Artificial Sequence: Synthetic oligonucleotide
  Sense strand starting at position 2223 of SEQ ID NO: 916252
acuuucguuccggaacaga

SEQ ID NO: 1142081 - RNA, 19 nt, Artificial Sequence
  Description of Artificial Sequence: Synthetic oligonucleotide
  Antisense strand to SEQ ID NO: 1142080
ucuguuccggaacgaaagu

SEQ ID NO: 1142082 - RNA, 19 nt, Artificial Sequence
  Description of Artificial Sequence: Synthetic oligonucleotide
  Sense strand starting at position 2238 of SEQ ID NO: 916252
cagagaacguccuccucuu

SEQ ID NO: 1142083 - RNA, 19 nt, Artificial Sequence
  Description of Artificial Sequence: Synthetic oligonucleotide
  Antisense strand to SEQ ID NO: 1142082
aagaggaggacguucucug

SEQ ID NO: 1142084 - RNA, 19 nt, Artificial Sequence
  Description of Artificial Sequence: Synthetic oligonucleotide
  Sense strand starting at position 2364 of SEQ ID NO: 916252
cggaccuuucccuaguaga

SEQ ID NO: 1142085 - RNA, 19 nt, Artificial Sequence
  Description of Artificial Sequence: Synthetic oligonucleotide
  Antisense strand to SEQ ID NO: 1142084
ucuacuagggaaagguccg

SEQ ID NO: 1142086 - RNA, 19 nt, Artificial Sequence
  Description of Artificial Sequence: Synthetic oligonucleotide
  Sense strand starting at position 2759 of SEQ ID NO: 916252
cgcucaucucugcggauuu

SEQ ID NO: 1142087 - RNA, 19 nt, Artificial Sequence
  Description of Artificial Sequence: Synthetic oligonucleotide
  Antisense strand to SEQ ID NO: 1142086
aaauccgcagagaugagcg

SEQ ID NO: 1142088 - RNA, 19 nt, Artificial Sequence
  Description of Artificial Sequence: Synthetic oligonucleotide
  Sense strand starting at position 3028 of SEQ ID NO: 916252
acuguuggucuacacaaau

SEQ ID NO: 1142089 - RNA, 19 nt, Artificial Sequence
  Description of Artificial Sequence: Synthetic oligonucleotide
  Antisense strand to SEQ ID NO: 1142088
auuuguguagaccaacagu

SEQ ID NO: 1142090 - RNA, 19 nt, Artificial Sequence
  Description of Artificial Sequence: Synthetic oligonucleotide
  Sense strand starting at position 3034 of SEQ ID NO: 916252
ggucuacacaaaugugaug

SEQ ID NO: 1142091 - RNA, 19 nt, Artificial Sequence
  Description of Artificial Sequence: Synthetic oligonucleotide
  Antisense strand to SEQ ID NO: 1142090
caucacauuuguguagacc

SEQ ID NO: 1142092 - RNA, 19 nt, Artificial Sequence
  Description of Artificial Sequence: Synthetic oligonucleotide
  Sense strand starting at position 3048 of SEQ ID NO: 916252
ugaugaauucuauguugau

SEQ ID NO: 1142093 - RNA, 19 nt, Artificial Sequence
  Description of Artificial Sequence: Synthetic oligonucleotide
  Antisense strand to SEQ ID NO: 1142092
aucaacauagaauucauca

SEQ ID NO: 1142094 - RNA, 19 nt, Artificial Sequence
  Description of Artificial Sequence: Synthetic oligonucleotide
  Sense strand starting at position 3049 of SEQ ID NO: 916252
gaugaauucuauguugauu

SEQ ID NO: 1142095 - RNA, 19 nt, Artificial Sequence
  Description of Artificial Sequence: Synthetic oligonucleotide
  Antisense strand to SEQ ID NO: 1142094
aaucaacauagaauucauc

SEQ ID NO: 1142096 - RNA, 19 nt, Artificial Sequence
  Description of Artificial Sequence: Synthetic oligonucleotide
  Sense strand starting at position 3085 of SEQ ID NO: 916252
cgcugaacucauuaguuug

SEQ ID NO: 1142097 - RNA, 19 nt, Artificial Sequence
  Description of Artificial Sequence: Synthetic oligonucleotide
  Antisense strand to SEQ ID NO: 1142096
caaacuaaugaguucagcg

SEQ ID NO: 1142098 - RNA, 19 nt, Artificial Sequence
  Description of Artificial Sequence: Synthetic oligonucleotide
  Sense strand starting at position 3090 of SEQ ID NO: 916252
aacucauuaguuugagggu

SEQ ID NO: 1142099 - RNA, 19 nt, Artificial Sequence
  Description of Artificial Sequence: Synthetic oligonucleotide
  Antisense strand to SEQ ID NO: 1142098
acccucaaacuaaugaguu

SEQ ID NO: 1142100 - RNA, 19 nt, Artificial Sequence
  Description of Artificial Sequence: Synthetic oligonucleotide
  Sense strand starting at position 3161 of SEQ ID NO: 916252
gccaucauguuaucugcaa

SEQ ID NO: 1142101 - RNA, 19 nt, Artificial Sequence
  Description of Artificial Sequence: Synthetic oligonucleotide
  Antisense strand to SEQ ID NO: 1142100
uugcagauaacaugauggc

SEQ ID NO: 1142102 - RNA, 19 nt, Artificial Sequence
  Description of Artificial Sequence: Synthetic oligonucleotide
  Sense strand starting at position 3274 of SEQ ID NO: 916252
guucuuagaucugaccaaa

SEQ ID NO: 1142103 - RNA, 19 nt, Artificial Sequence
  Description of Artificial Sequence: Synthetic oligonucleotide
  Antisense strand to SEQ ID NO: 1142102
uuuggucagaucuaagaac

SEQ ID NO: 1142104 - RNA, 19 nt, Artificial Sequence
  Description of Artificial Sequence: Synthetic oligonucleotide
  Sense strand starting at position 3740 of SEQ ID NO: 916252
ugaacccugucucuaugaa

SEQ ID NO: 1142105 - RNA, 19 nt, Artificial Sequence
  Description of Artificial Sequence: Synthetic oligonucleotide
  Antisense strand to SEQ ID NO: 1142104
uucauagagacaggguuca

SEQ ID NO: 1142106 - RNA, 19 nt, Artificial Sequence
  Description of Artificial Sequence: Synthetic oligonucleotide
  Sense strand starting at position 3973 of SEQ ID NO: 916252
ugaguuacagacugugaga

SEQ ID NO: 1142107 - RNA, 19 nt, Artificial Sequence
  Description of Artificial Sequence: Synthetic oligonucleotide
  Antisense strand to SEQ ID NO: 1142106
ucucacagucuguaacuca

SEQ ID NO: 1142108 - RNA, 19 nt, Artificial Sequence
  Description of Artificial Sequence: Synthetic oligonucleotide
  Sense strand starting at position 3975 of SEQ ID NO: 916252
aguuacagacugugagaaa

SEQ ID NO: 1142109 - RNA, 19 nt, Artificial Sequence
  Description of Artificial Sequence: Synthetic oligonucleotide
  Antisense strand to SEQ ID NO: 1142108
uuucucacagucuguaacu

SEQ ID NO: 1142110 - RNA, 19 nt, Artificial Sequence
  Description of Artificial Sequence: Synthetic oligonucleotide
  Sense strand starting at position 190 of SEQ ID NO: 916253
ggagaaugcuucucaggga

SEQ ID NO: 1142111 - RNA, 19 nt, Artificial Sequence
  Description of Artificial Sequence: Synthetic oligonucleotide
  Antisense strand to SEQ ID NO: 1142110
ucccugagaagcauucucc

SEQ ID NO: 1142112 - RNA, 19 nt, Artificial Sequence
  Description of Artificial Sequence: Synthetic oligonucleotide
  Sense strand starting at position 194 of SEQ ID NO: 916253
aaugcuucucagggagaau

SEQ ID NO: 1142113 - RNA, 19 nt, Artificial Sequence
  Description of Artificial Sequence: Synthetic oligonucleotide
  Antisense strand to SEQ ID NO: 1142112
auucucccugagaagcauu

SEQ ID NO: 1142114 - RNA, 19 nt, Artificial Sequence
  Description of Artificial Sequence: Synthetic oligonucleotide
  Sense strand starting at position 206 of SEQ ID NO: 916253
ggagaaugcccauagucca

SEQ ID NO: 1142115 - RNA, 19 nt, Artificial Sequence
  Description of Artificial Sequence: Synthetic oligonucleotide
  Antisense strand to SEQ ID NO: 1142114
uggacuaugggcauucucc

SEQ ID NO: 1142116 - RNA, 19 nt, Artificial Sequence
  Description of Artificial Sequence: Synthetic oligonucleotide
  Sense strand starting at position 249 of SEQ ID NO: 916253
gcaggcacucaucacuaua

SEQ ID NO: 1142117 - RNA, 19 nt, Artificial Sequence
  Description of Artificial Sequence: Synthetic oligonucleotide
  Antisense strand to SEQ ID NO: 1142116
uauagugaugagugccugc

SEQ ID NO: 1142118 - RNA, 19 nt, Artificial Sequence
  Description of Artificial Sequence: Synthetic oligonucleotide
  Sense strand starting at position 294 of SEQ ID NO: 916253
ugcacagauuauucucaga

SEQ ID NO: 1142119 - RNA, 19 nt, Artificial Sequence
  Description of Artificial Sequence: Synthetic oligonucleotide
  Antisense strand to SEQ ID NO: 1142118
ucugagaauaaucugugca

SEQ ID NO: 1142120 - RNA, 19 nt, Artificial Sequence
  Description of Artificial Sequence: Synthetic oligonucleotide
  Sense strand starting at position 450 of SEQ ID NO: 916253
ucauuuaacuuaugaaagg

SEQ ID NO: 1142121 - RNA, 19 nt, Artificial Sequence
  Description of Artificial Sequence: Synthetic oligonucleotide
  Antisense strand to SEQ ID NO: 1142120
ccuuucauaaguuaaauga

SEQ ID NO: 1142122 - RNA, 19 nt, Artificial Sequence
  Description of Artificial Sequence: Synthetic oligonucleotide
  Sense strand starting at position 896 of SEQ ID NO: 916253
aguuaacuggagugaaaug

SEQ ID NO: 1142123 - RNA, 19 nt, Artificial Sequence
  Description of Artificial Sequence: Synthetic oligonucleotide
  Antisense strand to SEQ ID NO: 1142122
cauuucacuccaguuaacu

SEQ ID NO: 1142124 - RNA, 19 nt, Artificial Sequence
  Description of Artificial Sequence: Synthetic oligonucleotide
  Sense strand starting at position 1029 of SEQ ID NO: 916253
gcaguaggaaaguggaaau

SEQ ID NO: 1142125 - RNA, 19 nt, Artificial Sequence
  Description of Artificial Sequence: Synthetic oligonucleotide
  Antisense strand to SEQ ID NO: 1142124
auuuccacuuuccuacugc

SEQ ID NO: 1142126 - RNA, 19 nt, Artificial Sequence
  Description of Artificial Sequence: Synthetic oligonucleotide
  Sense strand starting at position 1081 of SEQ ID NO: 916253
gcuagcuuuagagaugaaa

SEQ ID NO: 1142127 - RNA, 19 nt, Artificial Sequence
  Description of Artificial Sequence: Synthetic oligonucleotide
  Antisense strand to SEQ ID NO: 1142126
uuucaucucuaaagcuagc

SEQ ID NO: 1142128 - RNA, 19 nt, Artificial Sequence
  Description of Artificial Sequence: Synthetic oligonucleotide
  Sense strand starting at position 1181 of SEQ ID NO: 916253
cgaaauauauccuuuaaug

SEQ ID NO: 1142129 - RNA, 19 nt, Artificial Sequence
  Description of Artificial Sequence: Synthetic oligonucleotide
  Antisense strand to SEQ ID NO: 1142128
cauuaaaggauauauuucg

SEQ ID NO: 1142130 - RNA, 19 nt, Artificial Sequence
  Description of Artificial Sequence: Synthetic oligonucleotide
  Sense strand starting at position 1229 of SEQ ID NO: 916253
gaaacuuuagcagguagaa

SEQ ID NO: 1142131 - RNA, 19 nt, Artificial Sequence
  Description of Artificial Sequence: Synthetic oligonucleotide
  Antisense strand to SEQ ID NO: 1142130
uucuaccugcuaaaguuuc

SEQ ID NO: 1142132 - RNA, 19 nt, Artificial Sequence
  Description of Artificial Sequence: Synthetic oligonucleotide
  Sense strand starting at position 1988 of SEQ ID NO: 916253
gagcgcuuccuauuggcga

SEQ ID NO: 1142133 - RNA, 19 nt, Artificial Sequence
  Description of Artificial Sequence: Synthetic oligonucleotide
  Antisense strand to SEQ ID NO: 1142132
ucgccaauaggaagcgcuc

SEQ ID NO: 1142134 - RNA, 19 nt, Artificial Sequence
  Description of Artificial Sequence: Synthetic oligonucleotide
  Sense strand starting at position 2088 of SEQ ID NO: 916253
aagggaguuaucugugauu

SEQ ID NO: 1142135 - RNA, 19 nt, Artificial Sequence
  Description of Artificial Sequence: Synthetic oligonucleotide
  Antisense strand to SEQ ID NO: 1142134
aaucacagauaacucccuu

SEQ ID NO: 1142136 - RNA, 19 nt, Artificial Sequence
  Description of Artificial Sequence: Synthetic oligonucleotide
  Sense strand starting at position 2090 of SEQ ID NO: 916253
gggaguuaucugugauugg

SEQ ID NO: 1142137 - RNA, 19 nt, Artificial Sequence
  Description of Artificial Sequence: Synthetic oligonucleotide
  Antisense strand to SEQ ID NO: 1142136
ccaaucacagauaacuccc

SEQ ID NO: 1142138 - RNA, 19 nt, Artificial Sequence
  Description of Artificial Sequence: Synthetic oligonucleotide
  Sense strand starting at position 2099 of SEQ ID NO: 916253
cugugauuggcugaacgga

SEQ ID NO: 1142139 - RNA, 19 nt, Artificial Sequence
  Description of Artificial Sequence: Synthetic oligonucleotide
  Antisense strand to SEQ ID NO: 1142138
uccguucagccaaucacag

SEQ ID NO: 1142140 - RNA, 19 nt, Artificial Sequence
  Description of Artificial Sequence: Synthetic oligonucleotide
  Sense strand starting at position 2167 of SEQ ID NO: 916253
ucccgaguagcggaaagau

SEQ ID NO: 1142141 - RNA, 19 nt, Artificial Sequence
  Description of Artificial Sequence: Synthetic oligonucleotide
  Antisense strand to SEQ ID NO: 1142140
aucuuuccgcuacucggga

SEQ ID NO: 1142142 - RNA, 19 nt, Artificial Sequence
  Description of Artificial Sequence: Synthetic oligonucleotide
  Sense strand starting at position 2270 of SEQ ID NO: 916253
agucaaacaccggagaguu

SEQ ID NO: 1142143 - RNA, 19 nt, Artificial Sequence
  Description of Artificial Sequence: Synthetic oligonucleotide
  Antisense strand to SEQ ID NO: 1142142
aacucuccgguguuugacu

SEQ ID NO: 1142144 - RNA, 19 nt, Artificial Sequence
  Description of Artificial Sequence: Synthetic oligonucleotide
  Sense strand starting at position 2584 of SEQ ID NO: 916253
cugccauuuguugguaaau

SEQ ID NO: 1142145 - RNA, 19 nt, Artificial Sequence
  Description of Artificial Sequence: Synthetic oligonucleotide
  Antisense strand to SEQ ID NO: 1142144
auuuaccaacaaauggcag

SEQ ID NO: 1142146 - RNA, 19 nt, Artificial Sequence
  Description of Artificial Sequence: Synthetic oligonucleotide
  Sense strand starting at position 2585 of SEQ ID NO: 916253
ugccauuuguugguaaaua

SEQ ID NO: 1142147 - RNA, 19 nt, Artificial Sequence
  Description of Artificial Sequence: Synthetic oligonucleotide
  Antisense strand to SEQ ID NO: 1142146
uauuuaccaacaaauggca

SEQ ID NO: 1142148 - RNA, 19 nt, Artificial Sequence
  Description of Artificial Sequence: Synthetic oligonucleotide
  Sense strand starting at position 2735 of SEQ ID NO: 916253
cguuuccuccaacauugau

SEQ ID NO: 1142149 - RNA, 19 nt, Artificial Sequence
  Description of Artificial Sequence: Synthetic oligonucleotide
  Antisense strand to SEQ ID NO: 1142148
aucaauguuggaggaaacg

SEQ ID NO: 1142150 - RNA, 19 nt, Artificial Sequence
  Description of Artificial Sequence: Synthetic oligonucleotide
  Sense strand starting at position 2798 of SEQ ID NO: 916253
uauacugcugagugacaga

SEQ ID NO: 1142151 - RNA, 19 nt, Artificial Sequence
  Description of Artificial Sequence: Synthetic oligonucleotide
  Antisense strand to SEQ ID NO: 1142150
ucugucacucagcaguaua

SEQ ID NO: 1142152 - RNA, 19 nt, Artificial Sequence
  Description of Artificial Sequence: Synthetic oligonucleotide
  Sense strand starting at position 2907 of SEQ ID NO: 916253
cgcauaaucaaaggaguca

SEQ ID NO: 1142153 - RNA, 19 nt, Artificial Sequence
  Description of Artificial Sequence: Synthetic oligonucleotide
  Antisense strand to SEQ ID NO: 1142152
ugacuccuuugauuaugcg

SEQ ID NO: 1142154 - RNA, 19 nt, Artificial Sequence
  Description of Artificial Sequence: Synthetic oligonucleotide
  Sense strand starting at position 2948 of SEQ ID NO: 916253
ggauauagacugugucuuu

SEQ ID NO: 1142155 - RNA, 19 nt, Artificial Sequence
  Description of Artificial Sequence: Synthetic oligonucleotide
  Antisense strand to SEQ ID NO: 1142154
aaagacacagucuauaucc

SEQ ID NO: 1142156 - RNA, 19 nt, Artificial Sequence
  Description of Artificial Sequence: Synthetic oligonucleotide
  Sense strand starting at position 3127 of SEQ ID NO: 916253
ugaagagauguuuguauag

SEQ ID NO: 1142157 - RNA, 19 nt, Artificial Sequence
  Description of Artificial Sequence: Synthetic oligonucleotide
  Antisense strand to SEQ ID NO: 1142156
cuauacaaacaucucuuca

SEQ ID NO: 1142158 - RNA, 19 nt, Artificial Sequence
  Description of Artificial Sequence: Synthetic oligonucleotide
  Sense strand starting at position 3153 of SEQ ID NO: 916253
auuagaaauccuugguuua

SEQ ID NO: 1142159 - RNA, 19 nt, Artificial Sequence
  Description of Artificial Sequence: Synthetic oligonucleotide
  Antisense strand to SEQ ID NO: 1142158
uaaaccaaggauuucuaau

SEQ ID NO: 1142160 - RNA, 19 nt, Artificial Sequence
  Description of Artificial Sequence: Synthetic oligonucleotide
  Sense strand starting at position 3154 of SEQ ID NO: 916253
uuagaaauccuugguuuac

SEQ ID NO: 1142161 - RNA, 19 nt, Artificial Sequence
  Description of Artificial Sequence: Synthetic oligonucleotide
  Antisense strand to SEQ ID NO: 1142160
guaaaccaaggauuucuaa

SEQ ID NO: 1142162 - RNA, 19 nt, Artificial Sequence
  Description of Artificial Sequence: Synthetic oligonucleotide
  Sense strand starting at position 3200 of SEQ ID NO: 916253
gugguuauuccacauucuu

SEQ ID NO: 1142163 - RNA, 19 nt, Artificial Sequence
  Description of Artificial Sequence: Synthetic oligonucleotide
  Antisense strand to SEQ ID NO: 1142162
aagaauguggaauaaccac

SEQ ID NO: 1142164 - RNA, 19 nt, Artificial Sequence
  Description of Artificial Sequence: Synthetic oligonucleotide
  Sense strand starting at position 3293 of SEQ ID NO: 916253
aggucagcagucuaaggau

SEQ ID NO: 1142165 - RNA, 19 nt, Artificial Sequence
  Description of Artificial Sequence: Synthetic oligonucleotide
  Antisense strand to SEQ ID NO: 1142164
auccuuagacugcugaccu

SEQ ID NO: 1142166 - RNA, 19 nt, Artificial Sequence
  Description of Artificial Sequence: Synthetic oligonucleotide
  Sense strand starting at position 3310 of SEQ ID NO: 916253
auagguguugcagaaguga

SEQ ID NO: 1142167 - RNA, 19 nt, Artificial Sequence
  Description of Artificial Sequence: Synthetic oligonucleotide
  Antisense strand to SEQ ID NO: 1142166
ucacuucugcaacaccuau

SEQ ID NO: 1142168 - RNA, 19 nt, Artificial Sequence
  Description of Artificial Sequence: Synthetic oligonucleotide
  Sense strand starting at position 3593 of SEQ ID NO: 916253
aacgcaagggcucaauaaa

SEQ ID NO: 1142169 - RNA, 19 nt, Artificial Sequence
  Description of Artificial Sequence: Synthetic oligonucleotide
  Antisense strand to SEQ ID NO: 1142168
uuuauugagcccuugcguu

SEQ ID NO: 1142170 - RNA, 19 nt, Artificial Sequence
  Description of Artificial Sequence: Synthetic oligonucleotide
  Sense strand starting at position 3793 of SEQ ID NO: 916253
gcuagaccuguugaauguu

SEQ ID NO: 1142171 - RNA, 19 nt, Artificial Sequence
  Description of Artificial Sequence: Synthetic oligonucleotide
  Antisense strand to SEQ ID NO: 1142170
aacauucaacaggucuagc

SEQ ID NO: 1142172 - RNA, 19 nt, Artificial Sequence
  Description of Artificial Sequence: Synthetic oligonucleotide
  Sense strand starting at position 3872 of SEQ ID NO: 916253
guauuugucauguauacgu

SEQ ID NO: 1142173 - RNA, 19 nt, Artificial Sequence
  Description of Artificial Sequence: Synthetic oligonucleotide
  Antisense strand to SEQ ID NO: 1142172
acguauacaugacaaauac

SEQ ID NO: 1142174 - RNA, 19 nt, Artificial Sequence
  Description of Artificial Sequence: Synthetic oligonucleotide
  Sense strand starting at position 3874 of SEQ ID NO: 916253
auuugucauguauacguuu

SEQ ID NO: 1142175 - RNA, 19 nt, Artificial Sequence
  Description of Artificial Sequence: Synthetic oligonucleotide
  Antisense strand to SEQ ID NO: 1142174
aaacguauacaugacaaau

SEQ ID NO: 1142176 - RNA, 19 nt, Artificial Sequence
  Description of Artificial Sequence: Synthetic oligonucleotide
  Sense strand starting at position 3900 of SEQ ID NO: 916253
uuuggacacuucucugaaa

SEQ ID NO: 1142177 - RNA, 19 nt, Artificial Sequence
  Description of Artificial Sequence: Synthetic oligonucleotide
  Antisense strand to SEQ ID NO: 1142176
uuucagagaaguguccaaa

SEQ ID NO: 1142178 - RNA, 19 nt, Artificial Sequence
  Description of Artificial Sequence: Synthetic oligonucleotide
  Sense strand starting at position 3901 of SEQ ID NO: 916253
uuggacacuucucugaaau

SEQ ID NO: 1142179 - RNA, 19 nt, Artificial Sequence
  Description of Artificial Sequence: Synthetic oligonucleotide
  Antisense strand to SEQ ID NO: 1142178
auuucagagaaguguccaa

SEQ ID NO: 1142180 - RNA, 19 nt, Artificial Sequence
  Description of Artificial Sequence: Synthetic oligonucleotide
  Sense strand starting at position 3902 of SEQ ID NO: 916253
uggacacuucucugaaauc

SEQ ID NO: 1142181 - RNA, 19 nt, Artificial Sequence
  Description of Artificial Sequence: Synthetic oligonucleotide
  Antisense strand to SEQ ID NO: 1142180
gauuucagagaagugucca

SEQ ID NO: 1142182 - RNA, 19 nt, Artificial Sequence
  Description of Artificial Sequence: Synthetic oligonucleotide
  Sense strand starting at position 3940 of SEQ ID NO: 916253
aguguuguggguuauuaag

SEQ ID NO: 1142183 - RNA, 19 nt, Artificial Sequence
  Description of Artificial Sequence: Synthetic oligonucleotide
  Antisense strand to SEQ ID NO: 1142182
cuuaauaacccacaacacu

SEQ ID NO: 1142184 - RNA, 19 nt, Artificial Sequence
  Description of Artificial Sequence: Synthetic oligonucleotide
  Sense strand starting at position 3946 of SEQ ID NO: 916253
guggguuauuaagcugaaa

SEQ ID NO: 1142185 - RNA, 19 nt, Artificial Sequence
  Description of Artificial Sequence: Synthetic oligonucleotide
  Antisense strand to SEQ ID NO: 1142184
uuucagcuuaauaacccac

SEQ ID NO: 1142186 - RNA, 19 nt, Artificial Sequence
  Description of Artificial Sequence: Synthetic oligonucleotide
  Sense strand starting at position 3948 of SEQ ID NO: 916253
ggguuauuaagcugaaaua

SEQ ID NO: 1142187 - RNA, 19 nt, Artificial Sequence
  Description of Artificial Sequence: Synthetic oligonucleotide
  Antisense strand to SEQ ID NO: 1142186
uauuucagcuuaauaaccc

SEQ ID NO: 1142188 - RNA, 19 nt, Artificial Sequence
  Description of Artificial Sequence: Synthetic oligonucleotide
  Sense strand starting at position 3949 of SEQ ID NO: 916253
gguuauuaagcugaaauau

SEQ ID NO: 1142189 - RNA, 19 nt, Artificial Sequence
  Description of Artificial Sequence: Synthetic oligonucleotide
  Antisense strand to SEQ ID NO: 1142188
auauuucagcuuaauaacc

SEQ ID NO: 1142190 - RNA, 19 nt, Artificial Sequence
  Description of Artificial Sequence: Synthetic oligonucleotide
  Sense strand starting at position 385 of SEQ ID NO: 916254
cuuguuugggacugaaucu

SEQ ID NO: 1142191 - RNA, 19 nt, Artificial Sequence
  Description of Artificial Sequence: Synthetic oligonucleotide
  Antisense strand to SEQ ID NO: 1142190
agauucagucccaaacaag

SEQ ID NO: 1142192 - RNA, 19 nt, Artificial Sequence
  Description of Artificial Sequence: Synthetic oligonucleotide
  Sense strand starting at position 691 of SEQ ID NO: 916254
ccacguggauuugaccaaa

SEQ ID NO: 1142193 - RNA, 19 nt, Artificial Sequence
  Description of Artificial Sequence: Synthetic oligonucleotide
  Antisense strand to SEQ ID NO: 1142192
uuuggucaaauccacgugg

SEQ ID NO: 1142194 - RNA, 19 nt, Artificial Sequence
  Description of Artificial Sequence: Synthetic oligonucleotide
  Sense strand starting at position 740 of SEQ ID NO: 916254
cggcuacucacucagugaa

SEQ ID NO: 1142195 - RNA, 19 nt, Artificial Sequence
  Description of Artificial Sequence: Synthetic oligonucleotide
  Antisense strand to SEQ ID NO: 1142194
uucacugagugaguagccg

SEQ ID NO: 1142196 - RNA, 19 nt, Artificial Sequence
  Description of Artificial Sequence: Synthetic oligonucleotide
  Sense strand starting at position 742 of SEQ ID NO: 916254
gcuacucacucagugaaug

SEQ ID NO: 1142197 - RNA, 19 nt, Artificial Sequence
  Description of Artificial Sequence: Synthetic oligonucleotide
  Antisense strand to SEQ ID NO: 1142196
cauucacugagugaguagc

SEQ ID NO: 1142198 - RNA, 19 nt, Artificial Sequence
  Description of Artificial Sequence: Synthetic oligonucleotide
  Sense strand starting at position 743 of SEQ ID NO: 916254
cuacucacucagugaauga

SEQ ID NO: 1142199 - RNA, 19 nt, Artificial Sequence
  Description of Artificial Sequence: Synthetic oligonucleotide
  Antisense strand to SEQ ID NO: 1142198
ucauucacugagugaguag

SEQ ID NO: 1142200 - RNA, 19 nt, Artificial Sequence
  Description of Artificial Sequence: Synthetic oligonucleotide
  Sense strand starting at position 747 of SEQ ID NO: 916254
ucacucagugaaugaguaa

SEQ ID NO: 1142201 - RNA, 19 nt, Artificial Sequence
  Description of Artificial Sequence: Synthetic oligonucleotide
  Antisense strand to SEQ ID NO: 1142200
uuacucauucacugaguga

SEQ ID NO: 1142202 - RNA, 19 nt, Artificial Sequence
  Description of Artificial Sequence: Synthetic oligonucleotide
  Sense strand starting at position 767 of SEQ ID NO: 916254
aggauuagugccggaggca

SEQ ID NO: 1142203 - RNA, 19 nt, Artificial Sequence
  Description of Artificial Sequence: Synthetic oligonucleotide
  Antisense strand to SEQ ID NO: 1142202
ugccuccggcacuaauccu

SEQ ID NO: 1142204 - RNA, 19 nt, Artificial Sequence
  Description of Artificial Sequence: Synthetic oligonucleotide
  Sense strand starting at position 902 of SEQ ID NO: 916254
ucuccucaguccucaggaa

SEQ ID NO: 1142205 - RNA, 19 nt, Artificial Sequence
  Description of Artificial Sequence: Synthetic oligonucleotide
  Antisense strand to SEQ ID NO: 1142204
uuccugaggacugaggaga

SEQ ID NO: 1142206 - RNA, 19 nt, Artificial Sequence
  Description of Artificial Sequence: Synthetic oligonucleotide
  Sense strand starting at position 999 of SEQ ID NO: 916254
ugaguaaggucggcuccaa

SEQ ID NO: 1142207 - RNA, 19 nt, Artificial Sequence
  Description of Artificial Sequence: Synthetic oligonucleotide
  Antisense strand to SEQ ID NO: 1142206
uuggagccgaccuuacuca

SEQ ID NO: 1142208 - RNA, 19 nt, Artificial Sequence
  Description of Artificial Sequence: Synthetic oligonucleotide
  Sense strand starting at position 1520 of SEQ ID NO: 916254
gacgccuucccauggugaa

SEQ ID NO: 1142209 - RNA, 19 nt, Artificial Sequence
  Description of Artificial Sequence: Synthetic oligonucleotide
  Antisense strand to SEQ ID NO: 1142208
uucaccaugggaaggcguc

SEQ ID NO: 1142210 - RNA, 19 nt, Artificial Sequence
  Description of Artificial Sequence: Synthetic oligonucleotide
  Sense strand starting at position 1590 of SEQ ID NO: 916254
uguccugugcugcuaugau

SEQ ID NO: 1142211 - RNA, 19 nt, Artificial Sequence
  Description of Artificial Sequence: Synthetic oligonucleotide
  Antisense strand to SEQ ID NO: 1142210
aucauagcagcacaggaca

SEQ ID NO: 1142212 - RNA, 19 nt, Artificial Sequence
  Description of Artificial Sequence: Synthetic oligonucleotide
  Sense strand starting at position 1598 of SEQ ID NO: 916254
gcugcuaugauagaagaua

SEQ ID NO: 1142213 - RNA, 19 nt, Artificial Sequence
  Description of Artificial Sequence: Synthetic oligonucleotide
  Antisense strand to SEQ ID NO: 1142212
uaucuucuaucauagcagc

SEQ ID NO: 1142214 - RNA, 19 nt, Artificial Sequence
  Description of Artificial Sequence: Synthetic oligonucleotide
  Sense strand starting at position 1714 of SEQ ID NO: 916254
gacagagcugcuuaccagu

SEQ ID NO: 1142215 - RNA, 19 nt, Artificial Sequence
  Description of Artificial Sequence: Synthetic oligonucleotide
  Antisense strand to SEQ ID NO: 1142214
acugguaagcagcucuguc

SEQ ID NO: 1142216 - RNA, 19 nt, Artificial Sequence
  Description of Artificial Sequence: Synthetic oligonucleotide
  Sense strand starting at position 2201 of SEQ ID NO: 916254
gagguaggcuccuccauga

SEQ ID NO: 1142217 - RNA, 19 nt, Artificial Sequence
  Description of Artificial Sequence: Synthetic oligonucleotide
  Antisense strand to SEQ ID NO: 1142216
ucauggaggagccuaccuc

SEQ ID NO: 1142218 - RNA, 19 nt, Artificial Sequence
  Description of Artificial Sequence: Synthetic oligonucleotide
  Sense strand starting at position 2243 of SEQ ID NO: 916254
gccacauauccucacagga

SEQ ID NO: 1142219 - RNA, 19 nt, Artificial Sequence
  Description of Artificial Sequence: Synthetic oligonucleotide
  Antisense strand to SEQ ID NO: 1142218
uccugugaggauauguggc

SEQ ID NO: 1142220 - RNA, 19 nt, Artificial Sequence
  Description of Artificial Sequence: Synthetic oligonucleotide
  Sense strand starting at position 2544 of SEQ ID NO: 916254
guuagagagcucugagaau

SEQ ID NO: 1142221 - RNA, 19 nt, Artificial Sequence
  Description of Artificial Sequence: Synthetic oligonucleotide
  Antisense strand to SEQ ID NO: 1142220
auucucagagcucucuaac

SEQ ID NO: 1142222 - RNA, 19 nt, Artificial Sequence
  Description of Artificial Sequence: Synthetic oligonucleotide
  Sense strand starting at position 2551 of SEQ ID NO: 916254
agcucugagaauugcggua

SEQ ID NO: 1142223 - RNA, 19 nt, Artificial Sequence
  Description of Artificial Sequence: Synthetic oligonucleotide
  Antisense strand to SEQ ID NO: 1142222
uaccgcaauucucagagcu

SEQ ID NO: 1142224 - RNA, 19 nt, Artificial Sequence
  Description of Artificial Sequence: Synthetic oligonucleotide
  Sense strand starting at position 2556 of SEQ ID NO: 916254
ugagaauugcgguacacaa

SEQ ID NO: 1142225 - RNA, 19 nt, Artificial Sequence
  Description of Artificial Sequence: Synthetic oligonucleotide
  Antisense strand to SEQ ID NO: 1142224
uuguguaccgcaauucuca

SEQ ID NO: 1142226 - RNA, 19 nt, Artificial Sequence
  Description of Artificial Sequence: Synthetic oligonucleotide
  Sense strand starting at position 2558 of SEQ ID NO: 916254
agaauugcgguacacaauu

SEQ ID NO: 1142227 - RNA, 19 nt, Artificial Sequence
  Description of Artificial Sequence: Synthetic oligonucleotide
  Antisense strand to SEQ ID NO: 1142226
aauuguguaccgcaauucu

SEQ ID NO: 1142228 - RNA, 19 nt, Artificial Sequence
  Description of Artificial Sequence: Synthetic oligonucleotide
  Sense strand starting at position 2630 of SEQ ID NO: 916254
ugcacacuguccuugaaag

SEQ ID NO: 1142229 - RNA, 19 nt, Artificial Sequence
  Description of Artificial Sequence: Synthetic oligonucleotide
  Antisense strand to SEQ ID NO: 1142228
cuuucaaggacagugugca

SEQ ID NO: 1142230 - RNA, 19 nt, Artificial Sequence
  Description of Artificial Sequence: Synthetic oligonucleotide
  Sense strand starting at position 2815 of SEQ ID NO: 916254
guaaguuugguguauguuu

SEQ ID NO: 1142231 - RNA, 19 nt, Artificial Sequence
  Description of Artificial Sequence: Synthetic oligonucleotide
  Antisense strand to SEQ ID NO: 1142230
aaacauacaccaaacuuac

SEQ ID NO: 1142232 - RNA, 19 nt, Artificial Sequence
  Description of Artificial Sequence: Synthetic oligonucleotide
  Sense strand starting at position 2896 of SEQ ID NO: 916254
gccaucuguuugucuaaga

SEQ ID NO: 1142233 - RNA, 19 nt, Artificial Sequence
  Description of Artificial Sequence: Synthetic oligonucleotide
  Antisense strand to SEQ ID NO: 1142232
ucuuagacaaacagauggc

SEQ ID NO: 1142234 - RNA, 19 nt, Artificial Sequence
  Description of Artificial Sequence: Synthetic oligonucleotide
  Sense strand starting at position 2897 of SEQ ID NO: 916254
ccaucuguuugucuaagac

SEQ ID NO: 1142235 - RNA, 19 nt, Artificial Sequence
  Description of Artificial Sequence: Synthetic oligonucleotide
  Antisense strand to SEQ ID NO: 1142234
gucuuagacaaacagaugg

SEQ ID NO: 1142236 - RNA, 19 nt, Artificial Sequence
  Description of Artificial Sequence: Synthetic oligonucleotide
  Sense strand starting at position 3167 of SEQ ID NO: 916254
agaaauggcuuucuaaguu

SEQ ID NO: 1142237 - RNA, 19 nt, Artificial Sequence
  Description of Artificial Sequence: Synthetic oligonucleotide
  Antisense strand to SEQ ID NO: 1142236
aacuuagaaagccauuucu

SEQ ID NO: 1142238 - RNA, 19 nt, Artificial Sequence
  Description of Artificial Sequence: Synthetic oligonucleotide
  Sense strand starting at position 3252 of SEQ ID NO: 916254
cggacaugaaaucaguagu

SEQ ID NO: 1142239 - RNA, 19 nt, Artificial Sequence
  Description of Artificial Sequence: Synthetic oligonucleotide
  Antisense strand to SEQ ID NO: 1142238
acuacugauuucauguccg

SEQ ID NO: 1142240 - RNA, 19 nt, Artificial Sequence
  Description of Artificial Sequence: Synthetic oligonucleotide
  Sense strand starting at position 3388 of SEQ ID NO: 916254
acugauuacgggugaugga

SEQ ID NO: 1142241 - RNA, 19 nt, Artificial Sequence
  Description of Artificial Sequence: Synthetic oligonucleotide
  Antisense strand to SEQ ID NO: 1142240
uccaucacccguaaucagu

SEQ ID NO: 1142242 - RNA, 19 nt, Artificial Sequence
  Description of Artificial Sequence: Synthetic oligonucleotide
  Sense strand starting at position 3456 of SEQ ID NO: 916254
auggauguuuaugcauaaa

SEQ ID NO: 1142243 - RNA, 19 nt, Artificial Sequence
  Description of Artificial Sequence: Synthetic oligonucleotide
  Antisense strand to SEQ ID NO: 1142242
uuuaugcauaaacauccau

SEQ ID NO: 1142244 - RNA, 19 nt, Artificial Sequence
  Description of Artificial Sequence: Synthetic oligonucleotide
  Sense strand starting at position 3547 of SEQ ID NO: 916254
gacuaagaaugugcucauu

SEQ ID NO: 1142245 - RNA, 19 nt, Artificial Sequence
  Description of Artificial Sequence: Synthetic oligonucleotide
  Antisense strand to SEQ ID NO: 1142244
aaugagcacauucuuaguc

SEQ ID NO: 1142246 - RNA, 19 nt, Artificial Sequence
  Description of Artificial Sequence: Synthetic oligonucleotide
  Sense strand starting at position 3561 of SEQ ID NO: 916254
ucauuuacaugggaauaaa

SEQ ID NO: 1142247 - RNA, 19 nt, Artificial Sequence
  Description of Artificial Sequence: Synthetic oligonucleotide
  Antisense strand to SEQ ID NO: 1142246
uuuauucccauguaaauga

SEQ ID NO: 1142248 - RNA, 19 nt, Artificial Sequence
  Description of Artificial Sequence: Synthetic oligonucleotide
  Sense strand starting at position 3594 of SEQ ID NO: 916254
ucagaaucggcucaucaca

SEQ ID NO: 1142249 - RNA, 19 nt, Artificial Sequence
  Description of Artificial Sequence: Synthetic oligonucleotide
  Antisense strand to SEQ ID NO: 1142248
ugugaugagccgauucuga

SEQ ID NO: 1142250 - RNA, 19 nt, Artificial Sequence
  Description of Artificial Sequence: Synthetic oligonucleotide
  Sense strand starting at position 3601 of SEQ ID NO: 916254
cggcucaucacaggaaguu

SEQ ID NO: 1142251 - RNA, 19 nt, Artificial Sequence
  Description of Artificial Sequence: Synthetic oligonucleotide
  Antisense strand to SEQ ID NO: 1142250
aacuuccugugaugagccg

SEQ ID NO: 1142252 - RNA, 19 nt, Artificial Sequence
  Description of Artificial Sequence: Synthetic oligonucleotide
  Sense strand starting at position 3602 of SEQ ID NO: 916254
ggcucaucacaggaaguua

SEQ ID NO: 1142253 - RNA, 19 nt, Artificial Sequence
  Description of Artificial Sequence: Synthetic oligonucleotide
  Antisense strand to SEQ ID NO: 1142252
uaacuuccugugaugagcc

SEQ ID NO: 1142254 - RNA, 19 nt, Artificial Sequence
  Description of Artificial Sequence: Synthetic oligonucleotide
  Sense strand starting at position 3610 of SEQ ID NO: 916254
acaggaaguuaucuguauc

SEQ ID NO: 1142255 - RNA, 19 nt, Artificial Sequence
  Description of Artificial Sequence: Synthetic oligonucleotide
  Antisense strand to SEQ ID NO: 1142254
gauacagauaacuuccugu

SEQ ID NO: 1142256 - RNA, 19 nt, Artificial Sequence
  Description of Artificial Sequence: Synthetic oligonucleotide
  Sense strand starting at position 3613 of SEQ ID NO: 916254
ggaaguuaucuguaucacu

SEQ ID NO: 1142257 - RNA, 19 nt, Artificial Sequence
  Description of Artificial Sequence: Synthetic oligonucleotide
  Antisense strand to SEQ ID NO: 1142256
agugauacagauaacuucc

SEQ ID NO: 1142258 - RNA, 19 nt, Artificial Sequence
  Description of Artificial Sequence: Synthetic oligonucleotide
  Sense strand starting at position 3704 of SEQ ID NO: 916254
auguaauuagccuggguaa

SEQ ID NO: 1142259 - RNA, 19 nt, Artificial Sequence
  Description of Artificial Sequence: Synthetic oligonucleotide
  Antisense strand to SEQ ID NO: 1142258
uuacccaggcuaauuacau

SEQ ID NO: 1142260 - RNA, 19 nt, Artificial Sequence
  Description of Artificial Sequence: Synthetic oligonucleotide
  Sense strand starting at position 3705 of SEQ ID NO: 916254
uguaauuagccuggguaaa

SEQ ID NO: 1142261 - RNA, 19 nt, Artificial Sequence
  Description of Artificial Sequence: Synthetic oligonucleotide
  Antisense strand to SEQ ID NO: 1142260
uuuacccaggcuaauuaca

SEQ ID NO: 1142262 - RNA, 19 nt, Artificial Sequence
  Description of Artificial Sequence: Synthetic oligonucleotide
  Sense strand starting at position 3836 of SEQ ID NO: 916254
uaggaacagugguuggauu

SEQ ID NO: 1142263 - RNA, 19 nt, Artificial Sequence
  Description of Artificial Sequence: Synthetic oligonucleotide
  Antisense strand to SEQ ID NO: 1142262
aauccaaccacuguuccua

SEQ ID NO: 1142264 - RNA, 19 nt, Artificial Sequence
  Description of Artificial Sequence: Synthetic oligonucleotide
  Sense strand starting at position 3884 of SEQ ID NO: 916254
caggcaauacuagaauguu

SEQ ID NO: 1142265 - RNA, 19 nt, Artificial Sequence
  Description of Artificial Sequence: Synthetic oligonucleotide
  Antisense strand to SEQ ID NO: 1142264
aacauucuaguauugccug

SEQ ID NO: 1142266 - RNA, 19 nt, Artificial Sequence
  Description of Artificial Sequence: Synthetic oligonucleotide
  Sense strand starting at position 3942 of SEQ ID NO: 916254
uuuggaaagugguuguacu

SEQ ID NO: 1142267 - RNA, 19 nt, Artificial Sequence
  Description of Artificial Sequence: Synthetic oligonucleotide
  Antisense strand to SEQ ID NO: 1142266
aguacaaccacuuuccaaa

SEQ ID NO: 1142268 - RNA, 19 nt, Artificial Sequence
  Description of Artificial Sequence: Synthetic oligonucleotide
  Sense strand starting at position 3953 of SEQ ID NO: 916254
guuguacucugauccuaua

SEQ ID NO: 1142269 - RNA, 19 nt, Artificial Sequence
  Description of Artificial Sequence: Synthetic oligonucleotide
  Antisense strand to SEQ ID NO: 1142268
uauaggaucagaguacaac

SEQ ID NO: 1142270 - RNA, 19 nt, Artificial Sequence
  Description of Artificial Sequence: Synthetic oligonucleotide
  Sense strand starting at position 128 of SEQ ID NO: 916255
uacagacucuggguaaguu

SEQ ID NO: 1142271 - RNA, 19 nt, Artificial Sequence
  Description of Artificial Sequence: Synthetic oligonucleotide
  Antisense strand to SEQ ID NO: 1142270
aacuuacccagagucugua

SEQ ID NO: 1142272 - RNA, 19 nt, Artificial Sequence
  Description of Artificial Sequence: Synthetic oligonucleotide
  Sense strand starting at position 138 of SEQ ID NO: 916255
ggguaaguuaaaggccaua

SEQ ID NO: 1142273 - RNA, 19 nt, Artificial Sequence
  Description of Artificial Sequence: Synthetic oligonucleotide
  Antisense strand to SEQ ID NO: 1142272
uauggccuuuaacuuaccc

SEQ ID NO: 1142274 - RNA, 19 nt, Artificial Sequence
  Description of Artificial Sequence: Synthetic oligonucleotide
  Sense strand starting at position 143 of SEQ ID NO: 916255
aguuaaaggccauagguau

SEQ ID NO: 1142275 - RNA, 19 nt, Artificial Sequence
  Description of Artificial Sequence: Synthetic oligonucleotide
  Antisense strand to SEQ ID NO: 1142274
auaccuauggccuuuaacu

SEQ ID NO: 1142276 - RNA, 19 nt, Artificial Sequence
  Description of Artificial Sequence: Synthetic oligonucleotide
  Sense strand starting at position 150 of SEQ ID NO: 916255
ggccauagguaucuuaguu

SEQ ID NO: 1142277 - RNA, 19 nt, Artificial Sequence
  Description of Artificial Sequence: Synthetic oligonucleotide
  Antisense strand to SEQ ID NO: 1142276
aacuaagauaccuauggcc

SEQ ID NO: 1142278 - RNA, 19 nt, Artificial Sequence
  Description of Artificial Sequence: Synthetic oligonucleotide
  Sense strand starting at position 154 of SEQ ID NO: 916255
auagguaucuuaguuacau

SEQ ID NO: 1142279 - RNA, 19 nt, Artificial Sequence
  Description of Artificial Sequence: Synthetic oligonucleotide
  Antisense strand to SEQ ID NO: 1142278
auguaacuaagauaccuau

SEQ ID NO: 1142280 - RNA, 19 nt, Artificial Sequence
  Description of Artificial Sequence: Synthetic oligonucleotide
  Sense strand starting at position 155 of SEQ ID NO: 916255
uagguaucuuaguuacaug

SEQ ID NO: 1142281 - RNA, 19 nt, Artificial Sequence
  Description of Artificial Sequence: Synthetic oligonucleotide
  Antisense strand to SEQ ID NO: 1142280
cauguaacuaagauaccua

SEQ ID NO: 1142282 - RNA, 19 nt, Artificial Sequence
  Description of Artificial Sequence: Synthetic oligonucleotide
  Sense strand starting at position 156 of SEQ ID NO: 916255
agguaucuuaguuacaugu

SEQ ID NO: 1142283 - RNA, 19 nt, Artificial Sequence
  Description of Artificial Sequence: Synthetic oligonucleotide
  Antisense strand to SEQ ID NO: 1142282
acauguaacuaagauaccu

SEQ ID NO: 1142284 - RNA, 19 nt, Artificial Sequence
  Description of Artificial Sequence: Synthetic oligonucleotide
  Sense strand starting at position 196 of SEQ ID NO: 916255
gucaacagcuuagaacaau

SEQ ID NO: 1142285 - RNA, 19 nt, Artificial Sequence
  Description of Artificial Sequence: Synthetic oligonucleotide
  Antisense strand to SEQ ID NO: 1142284
auuguucuaagcuguugac

SEQ ID NO: 1142286 - RNA, 19 nt, Artificial Sequence
  Description of Artificial Sequence: Synthetic oligonucleotide
  Sense strand starting at position 202 of SEQ ID NO: 916255
agcuuagaacaauguguuu

SEQ ID NO: 1142287 - RNA, 19 nt, Artificial Sequence
  Description of Artificial Sequence: Synthetic oligonucleotide
  Antisense strand to SEQ ID NO: 1142286
aaacacauuguucuaagcu

SEQ ID NO: 1142288 - RNA, 19 nt, Artificial Sequence
  Description of Artificial Sequence: Synthetic oligonucleotide
  Sense strand starting at position 205 of SEQ ID NO: 916255
uuagaacaauguguuuguu

SEQ ID NO: 1142289 - RNA, 19 nt, Artificial Sequence
  Description of Artificial Sequence: Synthetic oligonucleotide
  Antisense strand to SEQ ID NO: 1142288
aacaaacacauuguucuaa

SEQ ID NO: 1142290 - RNA, 19 nt, Artificial Sequence
  Description of Artificial Sequence: Synthetic oligonucleotide
  Sense strand starting at position 207 of SEQ ID NO: 916255
agaacaauguguuuguuaa

SEQ ID NO: 1142291 - RNA, 19 nt, Artificial Sequence
  Description of Artificial Sequence: Synthetic oligonucleotide
  Antisense strand to SEQ ID NO: 1142290
uuaacaaacacauuguucu

SEQ ID NO: 1142292 - RNA, 19 nt, Artificial Sequence
  Description of Artificial Sequence: Synthetic oligonucleotide
  Sense strand starting at position 208 of SEQ ID NO: 916255
gaacaauguguuuguuaaa

SEQ ID NO: 1142293 - RNA, 19 nt, Artificial Sequence
  Description of Artificial Sequence: Synthetic oligonucleotide
  Antisense strand to SEQ ID NO: 1142292
uuuaacaaacacauuguuc

SEQ ID NO: 1142294 - RNA, 19 nt, Artificial Sequence
  Description of Artificial Sequence: Synthetic oligonucleotide
  Sense strand starting at position 209 of SEQ ID NO: 916255
aacaauguguuuguuaaag

SEQ ID NO: 1142295 - RNA, 19 nt, Artificial Sequence
  Description of Artificial Sequence: Synthetic oligonucleotide
  Antisense strand to SEQ ID NO: 1142294
cuuuaacaaacacauuguu

SEQ ID NO: 1142296 - RNA, 19 nt, Artificial Sequence
  Description of Artificial Sequence: Synthetic oligonucleotide
  Sense strand starting at position 211 of SEQ ID NO: 916255
caauguguuuguuaaagac

SEQ ID NO: 1142297 - RNA, 19 nt, Artificial Sequence
  Description of Artificial Sequence: Synthetic oligonucleotide
  Antisense strand to SEQ ID NO: 1142296
gucuuuaacaaacacauug

SEQ ID NO: 1142298 - RNA, 19 nt, Artificial Sequence
  Description of Artificial Sequence: Synthetic oligonucleotide
  Sense strand starting at position 252 of SEQ ID NO: 916255
agacucuaguguuuccaca

SEQ ID NO: 1142299 - RNA, 19 nt, Artificial Sequence
  Description of Artificial Sequence: Synthetic oligonucleotide
  Antisense strand to SEQ ID NO: 1142298
uguggaaacacuagagucu

SEQ ID NO: 1142300 - RNA, 19 nt, Artificial Sequence
  Description of Artificial Sequence: Synthetic oligonucleotide
  Sense strand starting at position 254 of SEQ ID NO: 916255
acucuaguguuuccacacu

SEQ ID NO: 1142301 - RNA, 19 nt, Artificial Sequence
  Description of Artificial Sequence: Synthetic oligonucleotide
  Antisense strand to SEQ ID NO: 1142300
aguguggaaacacuagagu

SEQ ID NO: 1142302 - RNA, 19 nt, Artificial Sequence
  Description of Artificial Sequence: Synthetic oligonucleotide
  Sense strand starting at position 576 of SEQ ID NO: 916255
ccacacauauguuauuuga

SEQ ID NO: 1142303 - RNA, 19 nt, Artificial Sequence
  Description of Artificial Sequence: Synthetic oligonucleotide
  Antisense strand to SEQ ID NO: 1142302
ucaaauaacauaugugugg

SEQ ID NO: 1142304 - RNA, 19 nt, Artificial Sequence
  Description of Artificial Sequence: Synthetic oligonucleotide
  Sense strand starting at position 822 of SEQ ID NO: 916255
ggauuaaagaagugcugaa

SEQ ID NO: 1142305 - RNA, 19 nt, Artificial Sequence
  Description of Artificial Sequence: Synthetic oligonucleotide
  Antisense strand to SEQ ID NO: 1142304
uucagcacuucuuuaaucc

SEQ ID NO: 1142306 - RNA, 19 nt, Artificial Sequence
  Description of Artificial Sequence: Synthetic oligonucleotide
  Sense strand starting at position 875 of SEQ ID NO: 916255
augcgaaguugagaacuga

SEQ ID NO: 1142307 - RNA, 19 nt, Artificial Sequence
  Description of Artificial Sequence: Synthetic oligonucleotide
  Antisense strand to SEQ ID NO: 1142306
ucaguucucaacuucgcau

SEQ ID NO: 1142308 - RNA, 19 nt, Artificial Sequence
  Description of Artificial Sequence: Synthetic oligonucleotide
  Sense strand starting at position 931 of SEQ ID NO: 916255
aucugaugcuccuuaaugu

SEQ ID NO: 1142309 - RNA, 19 nt, Artificial Sequence
  Description of Artificial Sequence: Synthetic oligonucleotide
  Antisense strand to SEQ ID NO: 1142308
acauuaaggagcaucagau

SEQ ID NO: 1142310 - RNA, 19 nt, Artificial Sequence
  Description of Artificial Sequence: Synthetic oligonucleotide
  Sense strand starting at position 1003 of SEQ ID NO: 916255
gucccaaguucugagaaac

SEQ ID NO: 1142311 - RNA, 19 nt, Artificial Sequence
  Description of Artificial Sequence: Synthetic oligonucleotide
  Antisense strand to SEQ ID NO: 1142310
guuucucagaacuugggac

SEQ ID NO: 1142312 - RNA, 19 nt, Artificial Sequence
  Description of Artificial Sequence: Synthetic oligonucleotide
  Sense strand starting at position 1067 of SEQ ID NO: 916255
gccggauucuggaguugag

SEQ ID NO: 1142313 - RNA, 19 nt, Artificial Sequence
  Description of Artificial Sequence: Synthetic oligonucleotide
  Antisense strand to SEQ ID NO: 1142312
cucaacuccagaauccggc

SEQ ID NO: 1142314 - RNA, 19 nt, Artificial Sequence
  Description of Artificial Sequence: Synthetic oligonucleotide
  Sense strand starting at position 1070 of SEQ ID NO: 916255
ggauucuggaguugagaca

SEQ ID NO: 1142315 - RNA, 19 nt, Artificial Sequence
  Description of Artificial Sequence: Synthetic oligonucleotide
  Antisense strand to SEQ ID NO: 1142314
ugucucaacuccagaaucc

SEQ ID NO: 1142316 - RNA, 19 nt, Artificial Sequence
  Description of Artificial Sequence: Synthetic oligonucleotide
  Sense strand starting at position 1194 of SEQ ID NO: 916255
agaaauaagcgaggcguuu

SEQ ID NO: 1142317 - RNA, 19 nt, Artificial Sequence
  Description of Artificial Sequence: Synthetic oligonucleotide
  Antisense strand to SEQ ID NO: 1142316
aaacgccucgcuuauuucu

SEQ ID NO: 1142318 - RNA, 19 nt, Artificial Sequence
  Description of Artificial Sequence: Synthetic oligonucleotide
  Sense strand starting at position 1531 of SEQ ID NO: 916255
cccacugagcuccgggaaa

SEQ ID NO: 1142319 - RNA, 19 nt, Artificial Sequence
  Description of Artificial Sequence: Synthetic oligonucleotide
  Antisense strand to SEQ ID NO: 1142318
uuucccggagcucaguggg

SEQ ID NO: 1142320 - RNA, 19 nt, Artificial Sequence
  Description of Artificial Sequence: Synthetic oligonucleotide
  Sense strand starting at position 1533 of SEQ ID NO: 916255
cacugagcuccgggaaagu

SEQ ID NO: 1142321 - RNA, 19 nt, Artificial Sequence
  Description of Artificial Sequence: Synthetic oligonucleotide
  Antisense strand to SEQ ID NO: 1142320
acuuucccggagcucagug

SEQ ID NO: 1142322 - RNA, 19 nt, Artificial Sequence
  Description of Artificial Sequence: Synthetic oligonucleotide
  Sense strand starting at position 1630 of SEQ ID NO: 916255
ggccaaaucccgugagaaa

SEQ ID NO: 1142323 - RNA, 19 nt, Artificial Sequence
  Description of Artificial Sequence: Synthetic oligonucleotide
  Antisense strand to SEQ ID NO: 1142322
uuucucacgggauuuggcc

SEQ ID NO: 1142324 - RNA, 19 nt, Artificial Sequence
  Description of Artificial Sequence: Synthetic oligonucleotide
  Sense strand starting at position 1631 of SEQ ID NO: 916255
gccaaaucccgugagaaac

SEQ ID NO: 1142325 - RNA, 19 nt, Artificial Sequence
  Description of Artificial Sequence: Synthetic oligonucleotide
  Antisense strand to SEQ ID NO: 1142324
guuucucacgggauuuggc

SEQ ID NO: 1142326 - RNA, 19 nt, Artificial Sequence
  Description of Artificial Sequence: Synthetic oligonucleotide
  Sense strand starting at position 1683 of SEQ ID NO: 916255
aggauuugcgcgugcgcaa

SEQ ID NO: 1142327 - RNA, 19 nt, Artificial Sequence
  Description of Artificial Sequence: Synthetic oligonucleotide
  Antisense strand to SEQ ID NO: 1142326
uugcgcacgcgcaaauccu

SEQ ID NO: 1142328 - RNA, 19 nt, Artificial Sequence
  Description of Artificial Sequence: Synthetic oligonucleotide
  Sense strand starting at position 2497 of SEQ ID NO: 916255
gggucucugagggaagcuu

SEQ ID NO: 1142329 - RNA, 19 nt, Artificial Sequence
  Description of Artificial Sequence: Synthetic oligonucleotide
  Antisense strand to SEQ ID NO: 1142328
aagcuucccucagagaccc

SEQ ID NO: 1142330 - RNA, 19 nt, Artificial Sequence
  Description of Artificial Sequence: Synthetic oligonucleotide
  Sense strand starting at position 2608 of SEQ ID NO: 916255
ggacguuugcugucuggca

SEQ ID NO: 1142331 - RNA, 19 nt, Artificial Sequence
  Description of Artificial Sequence: Synthetic oligonucleotide
  Antisense strand to SEQ ID NO: 1142330
ugccagacagcaaacgucc

SEQ ID NO: 1142332 - RNA, 19 nt, Artificial Sequence
  Description of Artificial Sequence: Synthetic oligonucleotide
  Sense strand starting at position 3246 of SEQ ID NO: 916255
uguugaagucacugcugga

SEQ ID NO: 1142333 - RNA, 19 nt, Artificial Sequence
  Description of Artificial Sequence: Synthetic oligonucleotide
  Antisense strand to SEQ ID NO: 1142332
uccagcagugacuucaaca

SEQ ID NO: 1142334 - RNA, 19 nt, Artificial Sequence
  Description of Artificial Sequence: Synthetic oligonucleotide
  Sense strand starting at position 3307 of SEQ ID NO: 916255
caagaacugcgauauguuu

SEQ ID NO: 1142335 - RNA, 19 nt, Artificial Sequence
  Description of Artificial Sequence: Synthetic oligonucleotide
  Antisense strand to SEQ ID NO: 1142334
aaacauaucgcaguucuug

SEQ ID NO: 1142336 - RNA, 19 nt, Artificial Sequence
  Description of Artificial Sequence: Synthetic oligonucleotide
  Sense strand starting at position 3318 of SEQ ID NO: 916255
auauguuugccguucagua

SEQ ID NO: 1142337 - RNA, 19 nt, Artificial Sequence
  Description of Artificial Sequence: Synthetic oligonucleotide
  Antisense strand to SEQ ID NO: 1142336
uacugaacggcaaacauau

SEQ ID NO: 1142338 - RNA, 19 nt, Artificial Sequence
  Description of Artificial Sequence: Synthetic oligonucleotide
  Sense strand starting at position 3320 of SEQ ID NO: 916255
auguuugccguucaguaca

SEQ ID NO: 1142339 - RNA, 19 nt, Artificial Sequence
  Description of Artificial Sequence: Synthetic oligonucleotide
  Antisense strand to SEQ ID NO: 1142338
uguacugaacggcaaacau

SEQ ID NO: 1142340 - RNA, 19 nt, Artificial Sequence
  Description of Artificial Sequence: Synthetic oligonucleotide
  Sense strand starting at position 3733 of SEQ ID NO: 916255
gguguaucaggagauacgu

SEQ ID NO: 1142341 - RNA, 19 nt, Artificial Sequence
  Description of Artificial Sequence: Synthetic oligonucleotide
  Antisense strand to SEQ ID NO: 1142340
acguaucuccugauacacc

SEQ ID NO: 1142342 - RNA, 19 nt, Artificial Sequence
  Description of Artificial Sequence: Synthetic oligonucleotide
  Sense strand starting at position 3910 of SEQ ID NO: 916255
ccacguaccuggcuaauuu

SEQ ID NO: 1142343 - RNA, 19 nt, Artificial Sequence
  Description of Artificial Sequence: Synthetic oligonucleotide
  Antisense strand to SEQ ID NO: 1142342
aaauuagccagguacgugg

SEQ ID NO: 1142344 - RNA, 19 nt, Artificial Sequence
  Description of Artificial Sequence: Synthetic oligonucleotide
  Sense strand starting at position 3956 of SEQ ID NO: 916255
gccuguaauccuggaaggu

SEQ ID NO: 1142345 - RNA, 19 nt, Artificial Sequence
  Description of Artificial Sequence: Synthetic oligonucleotide
  Antisense strand to SEQ ID NO: 1142344
accuuccaggauuacaggc

SEQ ID NO: 1142346 - RNA, 19 nt, Artificial Sequence
  Description of Artificial Sequence: Synthetic oligonucleotide
  Sense strand starting at position 3957 of SEQ ID NO: 916255
ccuguaauccuggaagguu

SEQ ID NO: 1142347 - RNA, 19 nt, Artificial Sequence
  Description of Artificial Sequence: Synthetic oligonucleotide
  Antisense strand to SEQ ID NO: 1142346
aaccuuccaggauuacagg

SEQ ID NO: 1142348 - RNA, 19 nt, Artificial Sequence
  Description of Artificial Sequence: Synthetic oligonucleotide
  Sense strand starting at position 3965 of SEQ ID NO: 916255
ccuggaagguucuauuaug

SEQ ID NO: 1142349 - RNA, 19 nt, Artificial Sequence
  Description of Artificial Sequence: Synthetic oligonucleotide
  Antisense strand to SEQ ID NO: 1142348
cauaauagaaccuuccagg

SEQ ID NO: 1142350 - RNA, 19 nt, Artificial Sequence
  Description of Artificial Sequence: Synthetic oligonucleotide
  Sense strand starting at position 38 of SEQ ID NO: 916256
gaacguacucaaggaaugu

SEQ ID NO: 1142351 - RNA, 19 nt, Artificial Sequence
  Description of Artificial Sequence: Synthetic oligonucleotide
  Antisense strand to SEQ ID NO: 1142350
acauuccuugaguacguuc

SEQ ID NO: 1142352 - RNA, 19 nt, Artificial Sequence
  Description of Artificial Sequence: Synthetic oligonucleotide
  Sense strand starting at position 47 of SEQ ID NO: 916256
caaggaauguuucugauag

SEQ ID NO: 1142353 - RNA, 19 nt, Artificial Sequence
  Description of Artificial Sequence: Synthetic oligonucleotide
  Antisense strand to SEQ ID NO: 1142352
cuaucagaaacauuccuug

SEQ ID NO: 1142354 - RNA, 19 nt, Artificial Sequence
  Description of Artificial Sequence: Synthetic oligonucleotide
  Sense strand starting at position 49 of SEQ ID NO: 916256
aggaauguuucugauagua

SEQ ID NO: 1142355 - RNA, 19 nt, Artificial Sequence
  Description of Artificial Sequence: Synthetic oligonucleotide
  Antisense strand to SEQ ID NO: 1142354
uacuaucagaaacauuccu

SEQ ID NO: 1142356 - RNA, 19 nt, Artificial Sequence
  Description of Artificial Sequence: Synthetic oligonucleotide
  Sense strand starting at position 51 of SEQ ID NO: 916256
gaauguuucugauaguaag

SEQ ID NO: 1142357 - RNA, 19 nt, Artificial Sequence
  Description of Artificial Sequence: Synthetic oligonucleotide
  Antisense strand to SEQ ID NO: 1142356
cuuacuaucagaaacauuc

SEQ ID NO: 1142358 - RNA, 19 nt, Artificial Sequence
  Description of Artificial Sequence: Synthetic oligonucleotide
  Sense strand starting at position 57 of SEQ ID NO: 916256
uucugauaguaagcaucaa

SEQ ID NO: 1142359 - RNA, 19 nt, Artificial Sequence
  Description of Artificial Sequence: Synthetic oligonucleotide
  Antisense strand to SEQ ID NO: 1142358
uugaugcuuacuaucagaa

SEQ ID NO: 1142360 - RNA, 19 nt, Artificial Sequence
  Description of Artificial Sequence: Synthetic oligonucleotide
  Sense strand starting at position 177 of SEQ ID NO: 916256
uguugucucugucuggaau

SEQ ID NO: 1142361 - RNA, 19 nt, Artificial Sequence
  Description of Artificial Sequence: Synthetic oligonucleotide
  Antisense strand to SEQ ID NO: 1142360
auuccagacagagacaaca

SEQ ID NO: 1142362 - RNA, 19 nt, Artificial Sequence
  Description of Artificial Sequence: Synthetic oligonucleotide
  Sense strand starting at position 565 of SEQ ID NO: 916256
uacagacucuggguaaguu

SEQ ID NO: 1142363 - RNA, 19 nt, Artificial Sequence
  Description of Artificial Sequence: Synthetic oligonucleotide
  Antisense strand to SEQ ID NO: 1142362
aacuuacccagagucugua

SEQ ID NO: 1142364 - RNA, 19 nt, Artificial Sequence
  Description of Artificial Sequence: Synthetic oligonucleotide
  Sense strand starting at position 575 of SEQ ID NO: 916256
ggguaaguuaaaggccaua

SEQ ID NO: 1142365 - RNA, 19 nt, Artificial Sequence
  Description of Artificial Sequence: Synthetic oligonucleotide
  Antisense strand to SEQ ID NO: 1142364
uauggccuuuaacuuaccc

SEQ ID NO: 1142366 - RNA, 19 nt, Artificial Sequence
  Description of Artificial Sequence: Synthetic oligonucleotide
  Sense strand starting at position 580 of SEQ ID NO: 916256
aguuaaaggccauagguau

SEQ ID NO: 1142367 - RNA, 19 nt, Artificial Sequence
  Description of Artificial Sequence: Synthetic oligonucleotide
  Antisense strand to SEQ ID NO: 1142366
auaccuauggccuuuaacu

SEQ ID NO: 1142368 - RNA, 19 nt, Artificial Sequence
  Description of Artificial Sequence: Synthetic oligonucleotide
  Sense strand starting at position 587 of SEQ ID NO: 916256
ggccauagguaucuuaguu

SEQ ID NO: 1142369 - RNA, 19 nt, Artificial Sequence
  Description of Artificial Sequence: Synthetic oligonucleotide
  Antisense strand to SEQ ID NO: 1142368
aacuaagauaccuauggcc

SEQ ID NO: 1142370 - RNA, 19 nt, Artificial Sequence
  Description of Artificial Sequence: Synthetic oligonucleotide
  Sense strand starting at position 591 of SEQ ID NO: 916256
auagguaucuuaguuacau

SEQ ID NO: 1142371 - RNA, 19 nt, Artificial Sequence
  Description of Artificial Sequence: Synthetic oligonucleotide
  Antisense strand to SEQ ID NO: 1142370
auguaacuaagauaccuau

SEQ ID NO: 1142372 - RNA, 19 nt, Artificial Sequence
  Description of Artificial Sequence: Synthetic oligonucleotide
  Sense strand starting at position 592 of SEQ ID NO: 916256
uagguaucuuaguuacaug

SEQ ID NO: 1142373 - RNA, 19 nt, Artificial Sequence
  Description of Artificial Sequence: Synthetic oligonucleotide
  Antisense strand to SEQ ID NO: 1142372
cauguaacuaagauaccua

SEQ ID NO: 1142374 - RNA, 19 nt, Artificial Sequence
  Description of Artificial Sequence: Synthetic oligonucleotide
  Sense strand starting at position 593 of SEQ ID NO: 916256
agguaucuuaguuacaugu

SEQ ID NO: 1142375 - RNA, 19 nt, Artificial Sequence
  Description of Artificial Sequence: Synthetic oligonucleotide
  Antisense strand to SEQ ID NO: 1142374
acauguaacuaagauaccu

SEQ ID NO: 1142376 - RNA, 19 nt, Artificial Sequence
  Description of Artificial Sequence: Synthetic oligonucleotide
  Sense strand starting at position 633 of SEQ ID NO: 916256
gucaacagcuuagaacaau

SEQ ID NO: 1142377 - RNA, 19 nt, Artificial Sequence
  Description of Artificial Sequence: Synthetic oligonucleotide
  Antisense strand to SEQ ID NO: 1142376
auuguucuaagcuguugac

SEQ ID NO: 1142378 - RNA, 19 nt, Artificial Sequence
  Description of Artificial Sequence: Synthetic oligonucleotide
  Sense strand starting at position 639 of SEQ ID NO: 916256
agcuuagaacaauguguuu

SEQ ID NO: 1142379 - RNA, 19 nt, Artificial Sequence
  Description of Artificial Sequence: Synthetic oligonucleotide
  Antisense strand to SEQ ID NO: 1142378
aaacacauuguucuaagcu

SEQ ID NO: 1142380 - RNA, 19 nt, Artificial Sequence
  Description of Artificial Sequence: Synthetic oligonucleotide
  Sense strand starting at position 642 of SEQ ID NO: 916256
uuagaacaauguguuuguu

SEQ ID NO: 1142381 - RNA, 19 nt, Artificial Sequence
  Description of Artificial Sequence: Synthetic oligonucleotide
  Antisense strand to SEQ ID NO: 1142380
aacaaacacauuguucuaa

SEQ ID NO: 1142382 - RNA, 19 nt, Artificial Sequence
  Description of Artificial Sequence: Synthetic oligonucleotide
  Sense strand starting at position 644 of SEQ ID NO: 916256
agaacaauguguuuguuaa

SEQ ID NO: 1142383 - RNA, 19 nt, Artificial Sequence
  Description of Artificial Sequence: Synthetic oligonucleotide
  Antisense strand to SEQ ID NO: 1142382
uuaacaaacacauuguucu

SEQ ID NO: 1142384 - RNA, 19 nt, Artificial Sequence
  Description of Artificial Sequence: Synthetic oligonucleotide
  Sense strand starting at position 645 of SEQ ID NO: 916256
gaacaauguguuuguuaaa

SEQ ID NO: 1142385 - RNA, 19 nt, Artificial Sequence
  Description of Artificial Sequence: Synthetic oligonucleotide
  Antisense strand to SEQ ID NO: 1142384
uuuaacaaacacauuguuc

SEQ ID NO: 1142386 - RNA, 19 nt, Artificial Sequence
  Description of Artificial Sequence: Synthetic oligonucleotide
  Sense strand starting at position 646 of SEQ ID NO: 916256
aacaauguguuuguuaaag

SEQ ID NO: 1142387 - RNA, 19 nt, Artificial Sequence
  Description of Artificial Sequence: Synthetic oligonucleotide
  Antisense strand to SEQ ID NO: 1142386
cuuuaacaaacacauuguu

SEQ ID NO: 1142388 - RNA, 19 nt, Artificial Sequence
  Description of Artificial Sequence: Synthetic oligonucleotide
  Sense strand starting at position 689 of SEQ ID NO: 916256
agacucuaguguuuccaca

SEQ ID NO: 1142389 - RNA, 19 nt, Artificial Sequence
  Description of Artificial Sequence: Synthetic oligonucleotide
  Antisense strand to SEQ ID NO: 1142388
uguggaaacacuagagucu

SEQ ID NO: 1142390 - RNA, 19 nt, Artificial Sequence
  Description of Artificial Sequence: Synthetic oligonucleotide
  Sense strand starting at position 691 of SEQ ID NO: 916256
acucuaguguuuccacacu

SEQ ID NO: 1142391 - RNA, 19 nt, Artificial Sequence
  Description of Artificial Sequence: Synthetic oligonucleotide
  Antisense strand to SEQ ID NO: 1142390
aguguggaaacacuagagu

SEQ ID NO: 1142392 - RNA, 19 nt, Artificial Sequence
  Description of Artificial Sequence: Synthetic oligonucleotide
  Sense strand starting at position 1013 of SEQ ID NO: 916256
ccacacauauguuauuuga

SEQ ID NO: 1142393 - RNA, 19 nt, Artificial Sequence
  Description of Artificial Sequence: Synthetic oligonucleotide
  Antisense strand to SEQ ID NO: 1142392
ucaaauaacauaugugugg

SEQ ID NO: 1142394 - RNA, 19 nt, Artificial Sequence
  Description of Artificial Sequence: Synthetic oligonucleotide
  Sense strand starting at position 1259 of SEQ ID NO: 916256
ggauuaaagaagugcugaa

SEQ ID NO: 1142395 - RNA, 19 nt, Artificial Sequence
  Description of Artificial Sequence: Synthetic oligonucleotide
  Antisense strand to SEQ ID NO: 1142394
uucagcacuucuuuaaucc

SEQ ID NO: 1142396 - RNA, 19 nt, Artificial Sequence
  Description of Artificial Sequence: Synthetic oligonucleotide
  Sense strand starting at position 1312 of SEQ ID NO: 916256
augcgaaguugagaacuga

SEQ ID NO: 1142397 - RNA, 19 nt, Artificial Sequence
  Description of Artificial Sequence: Synthetic oligonucleotide
  Antisense strand to SEQ ID NO: 1142396
ucaguucucaacuucgcau

SEQ ID NO: 1142398 - RNA, 19 nt, Artificial Sequence
  Description of Artificial Sequence: Synthetic oligonucleotide
  Sense strand starting at position 1368 of SEQ ID NO: 916256
aucugaugcuccuuaaugu

SEQ ID NO: 1142399 - RNA, 19 nt, Artificial Sequence
  Description of Artificial Sequence: Synthetic oligonucleotide
  Antisense strand to SEQ ID NO: 1142398
acauuaaggagcaucagau

SEQ ID NO: 1142400 - RNA, 19 nt, Artificial Sequence
  Description of Artificial Sequence: Synthetic oligonucleotide
  Sense strand starting at position 1440 of SEQ ID NO: 916256
gucccaaguucugagaaac

SEQ ID NO: 1142401 - RNA, 19 nt, Artificial Sequence
  Description of Artificial Sequence: Synthetic oligonucleotide
  Antisense strand to SEQ ID NO: 1142400
guuucucagaacuugggac

SEQ ID NO: 1142402 - RNA, 19 nt, Artificial Sequence
  Description of Artificial Sequence: Synthetic oligonucleotide
  Sense strand starting at position 1504 of SEQ ID NO: 916256
gccggauucuggaguugag

SEQ ID NO: 1142403 - RNA, 19 nt, Artificial Sequence
  Description of Artificial Sequence: Synthetic oligonucleotide
  Antisense strand to SEQ ID NO: 1142402
cucaacuccagaauccggc

SEQ ID NO: 1142404 - RNA, 19 nt, Artificial Sequence
  Description of Artificial Sequence: Synthetic oligonucleotide
  Sense strand starting at position 1507 of SEQ ID NO: 916256
ggauucuggaguugagaca

SEQ ID NO: 1142405 - RNA, 19 nt, Artificial Sequence
  Description of Artificial Sequence: Synthetic oligonucleotide
  Antisense strand to SEQ ID NO: 1142404
ugucucaacuccagaaucc

SEQ ID NO: 1142406 - RNA, 19 nt, Artificial Sequence
  Description of Artificial Sequence: Synthetic oligonucleotide
  Sense strand starting at position 1631 of SEQ ID NO: 916256
agaaauaagcgaggcguuu

SEQ ID NO: 1142407 - RNA, 19 nt, Artificial Sequence
  Description of Artificial Sequence: Synthetic oligonucleotide
  Antisense strand to SEQ ID NO: 1142406
aaacgccucgcuuauuucu

SEQ ID NO: 1142408 - RNA, 19 nt, Artificial Sequence
  Description of Artificial Sequence: Synthetic oligonucleotide
  Sense strand starting at position 1968 of SEQ ID NO: 916256
cccacugagcuccgggaaa

SEQ ID NO: 1142409 - RNA, 19 nt, Artificial Sequence
  Description of Artificial Sequence: Synthetic oligonucleotide
  Antisense strand to SEQ ID NO: 1142408
uuucccggagcucaguggg

SEQ ID NO: 1142410 - RNA, 19 nt, Artificial Sequence
  Description of Artificial Sequence: Synthetic oligonucleotide
  Sense strand starting at position 1970 of SEQ ID NO: 916256
cacugagcuccgggaaagu

SEQ ID NO: 1142411 - RNA, 19 nt, Artificial Sequence
  Description of Artificial Sequence: Synthetic oligonucleotide
  Antisense strand to SEQ ID NO: 1142410
acuuucccggagcucagug

SEQ ID NO: 1142412 - RNA, 19 nt, Artificial Sequence
  Description of Artificial Sequence: Synthetic oligonucleotide
  Sense strand starting at position 2067 of SEQ ID NO: 916256
ggccaaaucccgugagaaa

SEQ ID NO: 1142413 - RNA, 19 nt, Artificial Sequence
  Description of Artificial Sequence: Synthetic oligonucleotide
  Antisense strand to SEQ ID NO: 1142412
uuucucacgggauuuggcc

SEQ ID NO: 1142414 - RNA, 19 nt, Artificial Sequence
  Description of Artificial Sequence: Synthetic oligonucleotide
  Sense strand starting at position 2068 of SEQ ID NO: 916256
gccaaaucccgugagaaac

SEQ ID NO: 1142415 - RNA, 19 nt, Artificial Sequence
  Description of Artificial Sequence: Synthetic oligonucleotide
  Antisense strand to SEQ ID NO: 1142414
guuucucacgggauuuggc

SEQ ID NO: 1142416 - RNA, 19 nt, Artificial Sequence
  Description of Artificial Sequence: Synthetic oligonucleotide
  Sense strand starting at position 2120 of SEQ ID NO: 916256
aggauuugcgcgugcgcaa

SEQ ID NO: 1142417 - RNA, 19 nt, Artificial Sequence
  Description of Artificial Sequence: Synthetic oligonucleotide
  Antisense strand to SEQ ID NO: 1142416
uugcgcacgcgcaaauccu

SEQ ID NO: 1142418 - RNA, 19 nt, Artificial Sequence
  Description of Artificial Sequence: Synthetic oligonucleotide
  Sense strand starting at position 2934 of SEQ ID NO: 916256
gggucucugagggaagcuu

SEQ ID NO: 1142419 - RNA, 19 nt, Artificial Sequence
  Description of Artificial Sequence: Synthetic oligonucleotide
  Antisense strand to SEQ ID NO: 1142418
aagcuucccucagagaccc

SEQ ID NO: 1142420 - RNA, 19 nt, Artificial Sequence
  Description of Artificial Sequence: Synthetic oligonucleotide
  Sense strand starting at position 3045 of SEQ ID NO: 916256
ggacguuugcugucuggca

SEQ ID NO: 1142421 - RNA, 19 nt, Artificial Sequence
  Description of Artificial Sequence: Synthetic oligonucleotide
  Antisense strand to SEQ ID NO: 1142420
ugccagacagcaaacgucc

SEQ ID NO: 1142422 - RNA, 19 nt, Artificial Sequence
  Description of Artificial Sequence: Synthetic oligonucleotide
  Sense strand starting at position 3683 of SEQ ID NO: 916256
uguugaagucacugcugga

SEQ ID NO: 1142423 - RNA, 19 nt, Artificial Sequence
  Description of Artificial Sequence: Synthetic oligonucleotide
  Antisense strand to SEQ ID NO: 1142422
uccagcagugacuucaaca

SEQ ID NO: 1142424 - RNA, 19 nt, Artificial Sequence
  Description of Artificial Sequence: Synthetic oligonucleotide
  Sense strand starting at position 3744 of SEQ ID NO: 916256
caagaacugcgauauguuu

SEQ ID NO: 1142425 - RNA, 19 nt, Artificial Sequence
  Description of Artificial Sequence: Synthetic oligonucleotide
  Antisense strand to SEQ ID NO: 1142424
aaacauaucgcaguucuug

SEQ ID NO: 1142426 - RNA, 19 nt, Artificial Sequence
  Description of Artificial Sequence: Synthetic oligonucleotide
  Sense strand starting at position 3755 of SEQ ID NO: 916256
auauguuugccguucagua

SEQ ID NO: 1142427 - RNA, 19 nt, Artificial Sequence
  Description of Artificial Sequence: Synthetic oligonucleotide
  Antisense strand to SEQ ID NO: 1142426
uacugaacggcaaacauau

SEQ ID NO: 1142428 - RNA, 19 nt, Artificial Sequence
  Description of Artificial Sequence: Synthetic oligonucleotide
  Sense strand starting at position 3757 of SEQ ID NO: 916256
auguuugccguucaguaca

SEQ ID NO: 1142429 - RNA, 19 nt, Artificial Sequence
  Description of Artificial Sequence: Synthetic oligonucleotide
  Antisense strand to SEQ ID NO: 1142428
uguacugaacggcaaacau

SEQ ID NO: 1142430 - RNA, 19 nt, Artificial Sequence
  Description of Artificial Sequence: Synthetic oligonucleotide
  Sense strand starting at position 419 of SEQ ID NO: 916257
cccugucuucccgagagaa

SEQ ID NO: 1142431 - RNA, 19 nt, Artificial Sequence
  Description of Artificial Sequence: Synthetic oligonucleotide
  Antisense strand to SEQ ID NO: 1142430
uucucucgggaagacaggg

SEQ ID NO: 1142432 - RNA, 19 nt, Artificial Sequence
  Description of Artificial Sequence: Synthetic oligonucleotide
  Sense strand starting at position 620 of SEQ ID NO: 916257
cagugaaucugcccugaag

SEQ ID NO: 1142433 - RNA, 19 nt, Artificial Sequence
  Description of Artificial Sequence: Synthetic oligonucleotide
  Antisense strand to SEQ ID NO: 1142432
cuucagggcagauucacug

SEQ ID NO: 1142434 - RNA, 19 nt, Artificial Sequence
  Description of Artificial Sequence: Synthetic oligonucleotide
  Sense strand starting at position 622 of SEQ ID NO: 916257
gugaaucugcccugaagac

SEQ ID NO: 1142435 - RNA, 19 nt, Artificial Sequence
  Description of Artificial Sequence: Synthetic oligonucleotide
  Antisense strand to SEQ ID NO: 1142434
gucuucagggcagauucac

SEQ ID NO: 1142436 - RNA, 19 nt, Artificial Sequence
  Description of Artificial Sequence: Synthetic oligonucleotide
  Sense strand starting at position 1176 of SEQ ID NO: 916257
ugggcuguuccugagauac

SEQ ID NO: 1142437 - RNA, 19 nt, Artificial Sequence
  Description of Artificial Sequence: Synthetic oligonucleotide
  Antisense strand to SEQ ID NO: 1142436
guaucucaggaacagccca

SEQ ID NO: 1142438 - RNA, 19 nt, Artificial Sequence
  Description of Artificial Sequence: Synthetic oligonucleotide
  Sense strand starting at position 1178 of SEQ ID NO: 916257
ggcuguuccugagauaccu

SEQ ID NO: 1142439 - RNA, 19 nt, Artificial Sequence
  Description of Artificial Sequence: Synthetic oligonucleotide
  Antisense strand to SEQ ID NO: 1142438
agguaucucaggaacagcc

SEQ ID NO: 1142440 - RNA, 19 nt, Artificial Sequence
  Description of Artificial Sequence: Synthetic oligonucleotide
  Sense strand starting at position 1214 of SEQ ID NO: 916257
agcggugcucagagugaga

SEQ ID NO: 1142441 - RNA, 19 nt, Artificial Sequence
  Description of Artificial Sequence: Synthetic oligonucleotide
  Antisense strand to SEQ ID NO: 1142440
ucucacucugagcaccgcu

SEQ ID NO: 1142442 - RNA, 19 nt, Artificial Sequence
  Description of Artificial Sequence: Synthetic oligonucleotide
  Sense strand starting at position 1320 of SEQ ID NO: 916257
gggaaagccuccggagaaa

SEQ ID NO: 1142443 - RNA, 19 nt, Artificial Sequence
  Description of Artificial Sequence: Synthetic oligonucleotide
  Antisense strand to SEQ ID NO: 1142442
uuucuccggaggcuuuccc

SEQ ID NO: 1142444 - RNA, 19 nt, Artificial Sequence
  Description of Artificial Sequence: Synthetic oligonucleotide
  Sense strand starting at position 1992 of SEQ ID NO: 916257
gggagugagugauguaagu

SEQ ID NO: 1142445 - RNA, 19 nt, Artificial Sequence
  Description of Artificial Sequence: Synthetic oligonucleotide
  Antisense strand to SEQ ID NO: 1142444
acuuacaucacucacuccc

SEQ ID NO: 1142446 - RNA, 19 nt, Artificial Sequence
  Description of Artificial Sequence: Synthetic oligonucleotide
  Sense strand starting at position 1994 of SEQ ID NO: 916257
gagugagugauguaagucu

SEQ ID NO: 1142447 - RNA, 19 nt, Artificial Sequence
  Description of Artificial Sequence: Synthetic oligonucleotide
  Antisense strand to SEQ ID NO: 1142446
agacuuacaucacucacuc

SEQ ID NO: 1142448 - RNA, 19 nt, Artificial Sequence
  Description of Artificial Sequence: Synthetic oligonucleotide
  Sense strand starting at position 2104 of SEQ ID NO: 916257
cugaaauauuuccaggauc

SEQ ID NO: 1142449 - RNA, 19 nt, Artificial Sequence
  Description of Artificial Sequence: Synthetic oligonucleotide
  Antisense strand to SEQ ID NO: 1142448
gauccuggaaauauuucag

SEQ ID NO: 1142450 - RNA, 19 nt, Artificial Sequence
  Description of Artificial Sequence: Synthetic oligonucleotide
  Sense strand starting at position 2264 of SEQ ID NO: 916257
cuguuuagaucugagucuu

SEQ ID NO: 1142451 - RNA, 19 nt, Artificial Sequence
  Description of Artificial Sequence: Synthetic oligonucleotide
  Antisense strand to SEQ ID NO: 1142450
aagacucagaucuaaacag

SEQ ID NO: 1142452 - RNA, 19 nt, Artificial Sequence
  Description of Artificial Sequence: Synthetic oligonucleotide
  Sense strand starting at position 2378 of SEQ ID NO: 916257
ucucucuaauccuuucgga

SEQ ID NO: 1142453 - RNA, 19 nt, Artificial Sequence
  Description of Artificial Sequence: Synthetic oligonucleotide
  Antisense strand to SEQ ID NO: 1142452
uccgaaaggauuagagaga

SEQ ID NO: 1142454 - RNA, 19 nt, Artificial Sequence
  Description of Artificial Sequence: Synthetic oligonucleotide
  Sense strand starting at position 2398 of SEQ ID NO: 916257
gucagugaaagcuacggaa

SEQ ID NO: 1142455 - RNA, 19 nt, Artificial Sequence
  Description of Artificial Sequence: Synthetic oligonucleotide
  Antisense strand to SEQ ID NO: 1142454
uuccguagcuuucacugac

SEQ ID NO: 1142456 - RNA, 19 nt, Artificial Sequence
  Description of Artificial Sequence: Synthetic oligonucleotide
  Sense strand starting at position 2400 of SEQ ID NO: 916257
cagugaaagcuacggaauu

SEQ ID NO: 1142457 - RNA, 19 nt, Artificial Sequence
  Description of Artificial Sequence: Synthetic oligonucleotide
  Antisense strand to SEQ ID NO: 1142456
aauuccguagcuuucacug

SEQ ID NO: 1142458 - RNA, 19 nt, Artificial Sequence
  Description of Artificial Sequence: Synthetic oligonucleotide
  Sense strand starting at position 2401 of SEQ ID NO: 916257
agugaaagcuacggaauua

SEQ ID NO: 1142459 - RNA, 19 nt, Artificial Sequence
  Description of Artificial Sequence: Synthetic oligonucleotide
  Antisense strand to SEQ ID NO: 1142458
uaauuccguagcuuucacu

SEQ ID NO: 1142460 - RNA, 19 nt, Artificial Sequence
  Description of Artificial Sequence: Synthetic oligonucleotide
  Sense strand starting at position 2402 of SEQ ID NO: 916257
gugaaagcuacggaauuaa

SEQ ID NO: 1142461 - RNA, 19 nt, Artificial Sequence
  Description of Artificial Sequence: Synthetic oligonucleotide
  Antisense strand to SEQ ID NO: 1142460
uuaauuccguagcuuucac

SEQ ID NO: 1142462 - RNA, 19 nt, Artificial Sequence
  Description of Artificial Sequence: Synthetic oligonucleotide
  Sense strand starting at position 2412 of SEQ ID NO: 916257
cggaauuaauuacaaggua

SEQ ID NO: 1142463 - RNA, 19 nt, Artificial Sequence
  Description of Artificial Sequence: Synthetic oligonucleotide
  Antisense strand to SEQ ID NO: 1142462
uaccuuguaauuaauuccg

SEQ ID NO: 1142464 - RNA, 19 nt, Artificial Sequence
  Description of Artificial Sequence: Synthetic oligonucleotide
  Sense strand starting at position 2474 of SEQ ID NO: 916257
ccaggaggauguucucaau

SEQ ID NO: 1142465 - RNA, 19 nt, Artificial Sequence
  Description of Artificial Sequence: Synthetic oligonucleotide
  Antisense strand to SEQ ID NO: 1142464
auugagaacauccuccugg

SEQ ID NO: 1142466 - RNA, 19 nt, Artificial Sequence
  Description of Artificial Sequence: Synthetic oligonucleotide
  Sense strand starting at position 2480 of SEQ ID NO: 916257
ggauguucucaaugggaua

SEQ ID NO: 1142467 - RNA, 19 nt, Artificial Sequence
  Description of Artificial Sequence: Synthetic oligonucleotide
  Antisense strand to SEQ ID NO: 1142466
uaucccauugagaacaucc

SEQ ID NO: 1142468 - RNA, 19 nt, Artificial Sequence
  Description of Artificial Sequence: Synthetic oligonucleotide
  Sense strand starting at position 2482 of SEQ ID NO: 916257
auguucucaaugggauaga

SEQ ID NO: 1142469 - RNA, 19 nt, Artificial Sequence
  Description of Artificial Sequence: Synthetic oligonucleotide
  Antisense strand to SEQ ID NO: 1142468
ucuaucccauugagaacau

SEQ ID NO: 1142470 - RNA, 19 nt, Artificial Sequence
  Description of Artificial Sequence: Synthetic oligonucleotide
  Sense strand starting at position 2483 of SEQ ID NO: 916257
uguucucaaugggauagaa

SEQ ID NO: 1142471 - RNA, 19 nt, Artificial Sequence
  Description of Artificial Sequence: Synthetic oligonucleotide
  Antisense strand to SEQ ID NO: 1142470
uucuaucccauugagaaca

SEQ ID NO: 1142472 - RNA, 19 nt, Artificial Sequence
  Description of Artificial Sequence: Synthetic oligonucleotide
  Sense strand starting at position 2519 of SEQ ID NO: 916257
ccagacaugccucaguuua

SEQ ID NO: 1142473 - RNA, 19 nt, Artificial Sequence
  Description of Artificial Sequence: Synthetic oligonucleotide
  Antisense strand to SEQ ID NO: 1142472
uaaacugaggcaugucugg

SEQ ID NO: 1142474 - RNA, 19 nt, Artificial Sequence
  Description of Artificial Sequence: Synthetic oligonucleotide
  Sense strand starting at position 2543 of SEQ ID NO: 916257
gaccaaaguuuauccgauc

SEQ ID NO: 1142475 - RNA, 19 nt, Artificial Sequence
  Description of Artificial Sequence: Synthetic oligonucleotide
  Antisense strand to SEQ ID NO: 1142474
gaucggauaaacuuugguc

SEQ ID NO: 1142476 - RNA, 19 nt, Artificial Sequence
  Description of Artificial Sequence: Synthetic oligonucleotide
  Sense strand starting at position 2615 of SEQ ID NO: 916257
agcuauauuugcuauguga

SEQ ID NO: 1142477 - RNA, 19 nt, Artificial Sequence
  Description of Artificial Sequence: Synthetic oligonucleotide
  Antisense strand to SEQ ID NO: 1142476
ucacauagcaaauauagcu

SEQ ID NO: 1142478 - RNA, 19 nt, Artificial Sequence
  Description of Artificial Sequence: Synthetic oligonucleotide
  Sense strand starting at position 2617 of SEQ ID NO: 916257
cuauauuugcuaugugauu

SEQ ID NO: 1142479 - RNA, 19 nt, Artificial Sequence
  Description of Artificial Sequence: Synthetic oligonucleotide
  Antisense strand to SEQ ID NO: 1142478
aaucacauagcaaauauag

SEQ ID NO: 1142480 - RNA, 19 nt, Artificial Sequence
  Description of Artificial Sequence: Synthetic oligonucleotide
  Sense strand starting at position 2622 of SEQ ID NO: 916257
uuugcuaugugauuuaagu

SEQ ID NO: 1142481 - RNA, 19 nt, Artificial Sequence
  Description of Artificial Sequence: Synthetic oligonucleotide
  Antisense strand to SEQ ID NO: 1142480
acuuaaaucacauagcaaa

SEQ ID NO: 1142482 - RNA, 19 nt, Artificial Sequence
  Description of Artificial Sequence: Synthetic oligonucleotide
  Sense strand starting at position 2679 of SEQ ID NO: 916257
cugugcuccuaggcaaauu

SEQ ID NO: 1142483 - RNA, 19 nt, Artificial Sequence
  Description of Artificial Sequence: Synthetic oligonucleotide
  Antisense strand to SEQ ID NO: 1142482
aauuugccuaggagcacag

SEQ ID NO: 1142484 - RNA, 19 nt, Artificial Sequence
  Description of Artificial Sequence: Synthetic oligonucleotide
  Sense strand starting at position 2758 of SEQ ID NO: 916257
uccucagggcuguaacaau

SEQ ID NO: 1142485 - RNA, 19 nt, Artificial Sequence
  Description of Artificial Sequence: Synthetic oligonucleotide
  Antisense strand to SEQ ID NO: 1142484
auuguuacagcccugagga

SEQ ID NO: 1142486 - RNA, 19 nt, Artificial Sequence
  Description of Artificial Sequence: Synthetic oligonucleotide
  Sense strand starting at position 2864 of SEQ ID NO: 916257
auuaucacucaguaaaugu

SEQ ID NO: 1142487 - RNA, 19 nt, Artificial Sequence
  Description of Artificial Sequence: Synthetic oligonucleotide
  Antisense strand to SEQ ID NO: 1142486
acauuuacugagugauaau

SEQ ID NO: 1142488 - RNA, 19 nt, Artificial Sequence
  Description of Artificial Sequence: Synthetic oligonucleotide
  Sense strand starting at position 2921 of SEQ ID NO: 916257
aguaaauguuagcugauac

SEQ ID NO: 1142489 - RNA, 19 nt, Artificial Sequence
  Description of Artificial Sequence: Synthetic oligonucleotide
  Antisense strand to SEQ ID NO: 1142488
guaucagcuaacauuuacu

SEQ ID NO: 1142490 - RNA, 19 nt, Artificial Sequence
  Description of Artificial Sequence: Synthetic oligonucleotide
  Sense strand starting at position 2925 of SEQ ID NO: 916257
aauguuagcugauacaguu

SEQ ID NO: 1142491 - RNA, 19 nt, Artificial Sequence
  Description of Artificial Sequence: Synthetic oligonucleotide
  Antisense strand to SEQ ID NO: 1142490
aacuguaucagcuaacauu

SEQ ID NO: 1142492 - RNA, 19 nt, Artificial Sequence
  Description of Artificial Sequence: Synthetic oligonucleotide
  Sense strand starting at position 3022 of SEQ ID NO: 916257
uuccaaucucugugggaca

SEQ ID NO: 1142493 - RNA, 19 nt, Artificial Sequence
  Description of Artificial Sequence: Synthetic oligonucleotide
  Antisense strand to SEQ ID NO: 1142492
ugucccacagagauuggaa

SEQ ID NO: 1142494 - RNA, 19 nt, Artificial Sequence
  Description of Artificial Sequence: Synthetic oligonucleotide
  Sense strand starting at position 3024 of SEQ ID NO: 916257
ccaaucucugugggacaga

SEQ ID NO: 1142495 - RNA, 19 nt, Artificial Sequence
  Description of Artificial Sequence: Synthetic oligonucleotide
  Antisense strand to SEQ ID NO: 1142494
ucugucccacagagauugg

SEQ ID NO: 1142496 - RNA, 19 nt, Artificial Sequence
  Description of Artificial Sequence: Synthetic oligonucleotide
  Sense strand starting at position 3025 of SEQ ID NO: 916257
caaucucugugggacagaa

SEQ ID NO: 1142497 - RNA, 19 nt, Artificial Sequence
  Description of Artificial Sequence: Synthetic oligonucleotide
  Antisense strand to SEQ ID NO: 1142496
uucugucccacagagauug

SEQ ID NO: 1142498 - RNA, 19 nt, Artificial Sequence
  Description of Artificial Sequence: Synthetic oligonucleotide
  Sense strand starting at position 3105 of SEQ ID NO: 916257
ccgcucagauccucugaua

SEQ ID NO: 1142499 - RNA, 19 nt, Artificial Sequence
  Description of Artificial Sequence: Synthetic oligonucleotide
  Antisense strand to SEQ ID NO: 1142498
uaucagaggaucugagcgg

SEQ ID NO: 1142500 - RNA, 19 nt, Artificial Sequence
  Description of Artificial Sequence: Synthetic oligonucleotide
  Sense strand starting at position 3169 of SEQ ID NO: 916257
aucuccuagcaauggagaa

SEQ ID NO: 1142501 - RNA, 19 nt, Artificial Sequence
  Description of Artificial Sequence: Synthetic oligonucleotide
  Antisense strand to SEQ ID NO: 1142500
uucuccauugcuaggagau

SEQ ID NO: 1142502 - RNA, 19 nt, Artificial Sequence
  Description of Artificial Sequence: Synthetic oligonucleotide
  Sense strand starting at position 3397 of SEQ ID NO: 916257
ucaacagauugcugaauau

SEQ ID NO: 1142503 - RNA, 19 nt, Artificial Sequence
  Description of Artificial Sequence: Synthetic oligonucleotide
  Antisense strand to SEQ ID NO: 1142502
auauucagcaaucuguuga

SEQ ID NO: 1142504 - RNA, 19 nt, Artificial Sequence
  Description of Artificial Sequence: Synthetic oligonucleotide
  Sense strand starting at position 3407 of SEQ ID NO: 916257
gcugaauaugcggaccuuu

SEQ ID NO: 1142505 - RNA, 19 nt, Artificial Sequence
  Description of Artificial Sequence: Synthetic oligonucleotide
  Antisense strand to SEQ ID NO: 1142504
aaagguccgcauauucagc

SEQ ID NO: 1142506 - RNA, 19 nt, Artificial Sequence
  Description of Artificial Sequence: Synthetic oligonucleotide
  Sense strand starting at position 3701 of SEQ ID NO: 916257
uguccugaagccuggagau

SEQ ID NO: 1142507 - RNA, 19 nt, Artificial Sequence
  Description of Artificial Sequence: Synthetic oligonucleotide
  Antisense strand to SEQ ID NO: 1142506
aucuccaggcuucaggaca

SEQ ID NO: 1142508 - RNA, 19 nt, Artificial Sequence
  Description of Artificial Sequence: Synthetic oligonucleotide
  Sense strand starting at position 3765 of SEQ ID NO: 916257
ucugaugucucugagcauc

SEQ ID NO: 1142509 - RNA, 19 nt, Artificial Sequence
  Description of Artificial Sequence: Synthetic oligonucleotide
  Antisense strand to SEQ ID NO: 1142508
gaugcucagagacaucaga

SEQ ID NO: 1142510 - RNA, 19 nt, Artificial Sequence
  Description of Artificial Sequence: Synthetic oligonucleotide
  Sense strand starting at position 426 of SEQ ID NO: 916258
aggcaugacugauuacuaa

SEQ ID NO: 1142511 - RNA, 19 nt, Artificial Sequence
  Description of Artificial Sequence: Synthetic oligonucleotide
  Antisense strand to SEQ ID NO: 1142510
uuaguaaucagucaugccu

SEQ ID NO: 1142512 - RNA, 19 nt, Artificial Sequence
  Description of Artificial Sequence: Synthetic oligonucleotide
  Sense strand starting at position 506 of SEQ ID NO: 916258
agaugagagccgcacucuu

SEQ ID NO: 1142513 - RNA, 19 nt, Artificial Sequence
  Description of Artificial Sequence: Synthetic oligonucleotide
  Antisense strand to SEQ ID NO: 1142512
aagagugcggcucucaucu

SEQ ID NO: 1142514 - RNA, 19 nt, Artificial Sequence
  Description of Artificial Sequence: Synthetic oligonucleotide
  Sense strand starting at position 596 of SEQ ID NO: 916258
ccagguuccuucuuagaac

SEQ ID NO: 1142515 - RNA, 19 nt, Artificial Sequence
  Description of Artificial Sequence: Synthetic oligonucleotide
  Antisense strand to SEQ ID NO: 1142514
guucuaagaaggaaccugg

SEQ ID NO: 1142516 - RNA, 19 nt, Artificial Sequence
  Description of Artificial Sequence: Synthetic oligonucleotide
  Sense strand starting at position 599 of SEQ ID NO: 916258
gguuccuucuuagaacauc

SEQ ID NO: 1142517 - RNA, 19 nt, Artificial Sequence
  Description of Artificial Sequence: Synthetic oligonucleotide
  Antisense strand to SEQ ID NO: 1142516
gauguucuaagaaggaacc

SEQ ID NO: 1142518 - RNA, 19 nt, Artificial Sequence
  Description of Artificial Sequence: Synthetic oligonucleotide
  Sense strand starting at position 668 of SEQ ID NO: 916258
cagaacuacugaugggaga

SEQ ID NO: 1142519 - RNA, 19 nt, Artificial Sequence
  Description of Artificial Sequence: Synthetic oligonucleotide
  Antisense strand to SEQ ID NO: 1142518
ucucccaucaguaguucug

SEQ ID NO: 1142520 - RNA, 19 nt, Artificial Sequence
  Description of Artificial Sequence: Synthetic oligonucleotide
  Sense strand starting at position 694 of SEQ ID NO: 916258
cugguuuccucuugagggu

SEQ ID NO: 1142521 - RNA, 19 nt, Artificial Sequence
  Description of Artificial Sequence: Synthetic oligonucleotide
  Antisense strand to SEQ ID NO: 1142520
acccucaagaggaaaccag

SEQ ID NO: 1142522 - RNA, 19 nt, Artificial Sequence
  Description of Artificial Sequence: Synthetic oligonucleotide
  Sense strand starting at position 957 of SEQ ID NO: 916258
aggagaguuugagcagaag

SEQ ID NO: 1142523 - RNA, 19 nt, Artificial Sequence
  Description of Artificial Sequence: Synthetic oligonucleotide
  Antisense strand to SEQ ID NO: 1142522
cuucugcucaaacucuccu

SEQ ID NO: 1142524 - RNA, 19 nt, Artificial Sequence
  Description of Artificial Sequence: Synthetic oligonucleotide
  Sense strand starting at position 1308 of SEQ ID NO: 916258
acauaauggcuuuagggua

SEQ ID NO: 1142525 - RNA, 19 nt, Artificial Sequence
  Description of Artificial Sequence: Synthetic oligonucleotide
  Antisense strand to SEQ ID NO: 1142524
uacccuaaagccauuaugu

SEQ ID NO: 1142526 - RNA, 19 nt, Artificial Sequence
  Description of Artificial Sequence: Synthetic oligonucleotide
  Sense strand starting at position 1361 of SEQ ID NO: 916258
ucuguuucccauggaagca

SEQ ID NO: 1142527 - RNA, 19 nt, Artificial Sequence
  Description of Artificial Sequence: Synthetic oligonucleotide
  Antisense strand to SEQ ID NO: 1142526
ugcuuccaugggaaacaga

SEQ ID NO: 1142528 - RNA, 19 nt, Artificial Sequence
  Description of Artificial Sequence: Synthetic oligonucleotide
  Sense strand starting at position 1574 of SEQ ID NO: 916258
gugggcucaggaugaaaga

SEQ ID NO: 1142529 - RNA, 19 nt, Artificial Sequence
  Description of Artificial Sequence: Synthetic oligonucleotide
  Antisense strand to SEQ ID NO: 1142528
ucuuucauccugagcccac

SEQ ID NO: 1142530 - RNA, 19 nt, Artificial Sequence
  Description of Artificial Sequence: Synthetic oligonucleotide
  Sense strand starting at position 2293 of SEQ ID NO: 916258
ccggcuucauuggugaaau

SEQ ID NO: 1142531 - RNA, 19 nt, Artificial Sequence
  Description of Artificial Sequence: Synthetic oligonucleotide
  Antisense strand to SEQ ID NO: 1142530
auuucaccaaugaagccgg

SEQ ID NO: 1142532 - RNA, 19 nt, Artificial Sequence
  Description of Artificial Sequence: Synthetic oligonucleotide
  Sense strand starting at position 2294 of SEQ ID NO: 916258
cggcuucauuggugaaaug

SEQ ID NO: 1142533 - RNA, 19 nt, Artificial Sequence
  Description of Artificial Sequence: Synthetic oligonucleotide
  Antisense strand to SEQ ID NO: 1142532
cauuucaccaaugaagccg

SEQ ID NO: 1142534 - RNA, 19 nt, Artificial Sequence
  Description of Artificial Sequence: Synthetic oligonucleotide
  Sense strand starting at position 2412 of SEQ ID NO: 916258
ggaggaagcgugugucacu

SEQ ID NO: 1142535 - RNA, 19 nt, Artificial Sequence
  Description of Artificial Sequence: Synthetic oligonucleotide
  Antisense strand to SEQ ID NO: 1142534
agugacacacgcuuccucc

SEQ ID NO: 1142536 - RNA, 19 nt, Artificial Sequence
  Description of Artificial Sequence: Synthetic oligonucleotide
  Sense strand starting at position 2419 of SEQ ID NO: 916258
gcgugugucacugugugua

SEQ ID NO: 1142537 - RNA, 19 nt, Artificial Sequence
  Description of Artificial Sequence: Synthetic oligonucleotide
  Antisense strand to SEQ ID NO: 1142536
uacacacagugacacacgc

SEQ ID NO: 1142538 - RNA, 19 nt, Artificial Sequence
  Description of Artificial Sequence: Synthetic oligonucleotide
  Sense strand starting at position 2514 of SEQ ID NO: 916258
ggugguugugcacaagcua

SEQ ID NO: 1142539 - RNA, 19 nt, Artificial Sequence
  Description of Artificial Sequence: Synthetic oligonucleotide
  Antisense strand to SEQ ID NO: 1142538
uagcuugugcacaaccacc

SEQ ID NO: 1142540 - RNA, 19 nt, Artificial Sequence
  Description of Artificial Sequence: Synthetic oligonucleotide
  Sense strand starting at position 2630 of SEQ ID NO: 916258
uguuacaguuucucauagu

SEQ ID NO: 1142541 - RNA, 19 nt, Artificial Sequence
  Description of Artificial Sequence: Synthetic oligonucleotide
  Antisense strand to SEQ ID NO: 1142540
acuaugagaaacuguaaca

SEQ ID NO: 1142542 - RNA, 19 nt, Artificial Sequence
  Description of Artificial Sequence: Synthetic oligonucleotide
  Sense strand starting at position 2631 of SEQ ID NO: 916258
guuacaguuucucauaguc

SEQ ID NO: 1142543 - RNA, 19 nt, Artificial Sequence
  Description of Artificial Sequence: Synthetic oligonucleotide
  Antisense strand to SEQ ID NO: 1142542
gacuaugagaaacuguaac

SEQ ID NO: 1142544 - RNA, 19 nt, Artificial Sequence
  Description of Artificial Sequence: Synthetic oligonucleotide
  Sense strand starting at position 2982 of SEQ ID NO: 916258
cgaagagcaucuuuauagu

SEQ ID NO: 1142545 - RNA, 19 nt, Artificial Sequence
  Description of Artificial Sequence: Synthetic oligonucleotide
  Antisense strand to SEQ ID NO: 1142544
acuauaaagaugcucuucg

SEQ ID NO: 1142546 - RNA, 19 nt, Artificial Sequence
  Description of Artificial Sequence: Synthetic oligonucleotide
  Sense strand starting at position 2985 of SEQ ID NO: 916258
agagcaucuuuauaguaag

SEQ ID NO: 1142547 - RNA, 19 nt, Artificial Sequence
  Description of Artificial Sequence: Synthetic oligonucleotide
  Antisense strand to SEQ ID NO: 1142546
cuuacuauaaagaugcucu

SEQ ID NO: 1142548 - RNA, 19 nt, Artificial Sequence
  Description of Artificial Sequence: Synthetic oligonucleotide
  Sense strand starting at position 1423 of SEQ ID NO: 916259
agccuuguguccucaaggu

SEQ ID NO: 1142549 - RNA, 19 nt, Artificial Sequence
  Description of Artificial Sequence: Synthetic oligonucleotide
  Antisense strand to SEQ ID NO: 1142548
accuugaggacacaaggcu

SEQ ID NO: 1142550 - RNA, 19 nt, Artificial Sequence
  Description of Artificial Sequence: Synthetic oligonucleotide
  Sense strand starting at position 1605 of SEQ ID NO: 916259
gacuguugguguccaccaa

SEQ ID NO: 1142551 - RNA, 19 nt, Artificial Sequence
  Description of Artificial Sequence: Synthetic oligonucleotide
  Antisense strand to SEQ ID NO: 1142550
uugguggacaccaacaguc

SEQ ID NO: 1142552 - RNA, 19 nt, Artificial Sequence
  Description of Artificial Sequence: Synthetic oligonucleotide
  Sense strand starting at position 1609 of SEQ ID NO: 916259
guugguguccaccaacauu

SEQ ID NO: 1142553 - RNA, 19 nt, Artificial Sequence
  Description of Artificial Sequence: Synthetic oligonucleotide
  Antisense strand to SEQ ID NO: 1142552
aauguugguggacaccaac

SEQ ID NO: 1142554 - RNA, 19 nt, Artificial Sequence
  Description of Artificial Sequence: Synthetic oligonucleotide
  Sense strand starting at position 1775 of SEQ ID NO: 916259
uguuauuuggaccgugagu

SEQ ID NO: 1142555 - RNA, 19 nt, Artificial Sequence
  Description of Artificial Sequence: Synthetic oligonucleotide
  Antisense strand to SEQ ID NO: 1142554
acucacgguccaaauaaca

SEQ ID NO: 1142556 - RNA, 19 nt, Artificial Sequence
  Description of Artificial Sequence: Synthetic oligonucleotide
  Sense strand starting at position 1777 of SEQ ID NO: 916259
uuauuuggaccgugagugu

SEQ ID NO: 1142557 - RNA, 19 nt, Artificial Sequence
  Description of Artificial Sequence: Synthetic oligonucleotide
  Antisense strand to SEQ ID NO: 1142556
acacucacgguccaaauaa

SEQ ID NO: 1142558 - RNA, 19 nt, Artificial Sequence
  Description of Artificial Sequence: Synthetic oligonucleotide
  Sense strand starting at position 1865 of SEQ ID NO: 916259
gauagccaguugucuccaa

SEQ ID NO: 1142559 - RNA, 19 nt, Artificial Sequence
  Description of Artificial Sequence: Synthetic oligonucleotide
  Antisense strand to SEQ ID NO: 1142558
uuggagacaacuggcuauc

SEQ ID NO: 1142560 - RNA, 19 nt, Artificial Sequence
  Description of Artificial Sequence: Synthetic oligonucleotide
  Sense strand starting at position 1892 of SEQ ID NO: 916259
ucccaucuucccugggaga

SEQ ID NO: 1142561 - RNA, 19 nt, Artificial Sequence
  Description of Artificial Sequence: Synthetic oligonucleotide
  Antisense strand to SEQ ID NO: 1142560
ucucccagggaagauggga

SEQ ID NO: 1142562 - RNA, 19 nt, Artificial Sequence
  Description of Artificial Sequence: Synthetic oligonucleotide
  Sense strand starting at position 2050 of SEQ ID NO: 916259
ccuucucauccgggaagua

SEQ ID NO: 1142563 - RNA, 19 nt, Artificial Sequence
  Description of Artificial Sequence: Synthetic oligonucleotide
  Antisense strand to SEQ ID NO: 1142562
uacuucccggaugagaagg

SEQ ID NO: 1142564 - RNA, 19 nt, Artificial Sequence
  Description of Artificial Sequence: Synthetic oligonucleotide
  Sense strand starting at position 2059 of SEQ ID NO: 916259
ccgggaaguagcugucacu

SEQ ID NO: 1142565 - RNA, 19 nt, Artificial Sequence
  Description of Artificial Sequence: Synthetic oligonucleotide
  Antisense strand to SEQ ID NO: 1142564
agugacagcuacuucccgg

SEQ ID NO: 1142566 - RNA, 19 nt, Artificial Sequence
  Description of Artificial Sequence: Synthetic oligonucleotide
  Sense strand starting at position 2250 of SEQ ID NO: 916259
agugcucuccucugcaaag

SEQ ID NO: 1142567 - RNA, 19 nt, Artificial Sequence
  Description of Artificial Sequence: Synthetic oligonucleotide
  Antisense strand to SEQ ID NO: 1142566
cuuugcagaggagagcacu

SEQ ID NO: 1142568 - RNA, 19 nt, Artificial Sequence
  Description of Artificial Sequence: Synthetic oligonucleotide
  Sense strand starting at position 2325 of SEQ ID NO: 916259
agggaaagugcuuagcuca

SEQ ID NO: 1142569 - RNA, 19 nt, Artificial Sequence
  Description of Artificial Sequence: Synthetic oligonucleotide
  Antisense strand to SEQ ID NO: 1142568
ugagcuaagcacuuucccu

SEQ ID NO: 1142570 - RNA, 19 nt, Artificial Sequence
  Description of Artificial Sequence: Synthetic oligonucleotide
  Sense strand starting at position 2350 of SEQ ID NO: 916259
gccuguggcaaaugcuuua

SEQ ID NO: 1142571 - RNA, 19 nt, Artificial Sequence
  Description of Artificial Sequence: Synthetic oligonucleotide
  Antisense strand to SEQ ID NO: 1142570
uaaagcauuugccacaggc

SEQ ID NO: 1142572 - RNA, 19 nt, Artificial Sequence
  Description of Artificial Sequence: Synthetic oligonucleotide
  Sense strand starting at position 2355 of SEQ ID NO: 916259
uggcaaaugcuuuacguau

SEQ ID NO: 1142573 - RNA, 19 nt, Artificial Sequence
  Description of Artificial Sequence: Synthetic oligonucleotide
  Antisense strand to SEQ ID NO: 1142572
auacguaaagcauuugcca

SEQ ID NO: 1142574 - RNA, 19 nt, Artificial Sequence
  Description of Artificial Sequence: Synthetic oligonucleotide
  Sense strand starting at position 2361 of SEQ ID NO: 916259
augcuuuacguauguaugu

SEQ ID NO: 1142575 - RNA, 19 nt, Artificial Sequence
  Description of Artificial Sequence: Synthetic oligonucleotide
  Antisense strand to SEQ ID NO: 1142574
acauacauacguaaagcau

SEQ ID NO: 1142576 - RNA, 19 nt, Artificial Sequence
  Description of Artificial Sequence: Synthetic oligonucleotide
  Sense strand starting at position 2362 of SEQ ID NO: 916259
ugcuuuacguauguaugua

SEQ ID NO: 1142577 - RNA, 19 nt, Artificial Sequence
  Description of Artificial Sequence: Synthetic oligonucleotide
  Antisense strand to SEQ ID NO: 1142576
uacauacauacguaaagca

SEQ ID NO: 1142578 - RNA, 19 nt, Artificial Sequence
  Description of Artificial Sequence: Synthetic oligonucleotide
  Sense strand starting at position 2363 of SEQ ID NO: 916259
gcuuuacguauguauguau

SEQ ID NO: 1142579 - RNA, 19 nt, Artificial Sequence
  Description of Artificial Sequence: Synthetic oligonucleotide
  Antisense strand to SEQ ID NO: 1142578
auacauacauacguaaagc

SEQ ID NO: 1142580 - RNA, 19 nt, Artificial Sequence
  Description of Artificial Sequence: Synthetic oligonucleotide
  Sense strand starting at position 2429 of SEQ ID NO: 916259
uuccuacuagagugaaauu

SEQ ID NO: 1142581 - RNA, 19 nt, Artificial Sequence
  Description of Artificial Sequence: Synthetic oligonucleotide
  Antisense strand to SEQ ID NO: 1142580
aauuucacucuaguaggaa

SEQ ID NO: 1142582 - RNA, 19 nt, Artificial Sequence
  Description of Artificial Sequence: Synthetic oligonucleotide
  Sense strand starting at position 2572 of SEQ ID NO: 916259
ugugauuggaggugagaau

SEQ ID NO: 1142583 - RNA, 19 nt, Artificial Sequence
  Description of Artificial Sequence: Synthetic oligonucleotide
  Antisense strand to SEQ ID NO: 1142582
auucucaccuccaaucaca

SEQ ID NO: 1142584 - RNA, 19 nt, Artificial Sequence
  Description of Artificial Sequence: Synthetic oligonucleotide
  Sense strand starting at position 2583 of SEQ ID NO: 916259
gugagaaucugggaaagaa

SEQ ID NO: 1142585 - RNA, 19 nt, Artificial Sequence
  Description of Artificial Sequence: Synthetic oligonucleotide
  Antisense strand to SEQ ID NO: 1142584
uucuuucccagauucucac

SEQ ID NO: 1142586 - RNA, 19 nt, Artificial Sequence
  Description of Artificial Sequence: Synthetic oligonucleotide
  Sense strand starting at position 2807 of SEQ ID NO: 916259
cagggagauuccugaguag

SEQ ID NO: 1142587 - RNA, 19 nt, Artificial Sequence
  Description of Artificial Sequence: Synthetic oligonucleotide
  Antisense strand to SEQ ID NO: 1142586
cuacucaggaaucucccug

SEQ ID NO: 1142588 - RNA, 19 nt, Artificial Sequence
  Description of Artificial Sequence: Synthetic oligonucleotide
  Sense strand starting at position 2862 of SEQ ID NO: 916259
ucuauacuucucugcguga

SEQ ID NO: 1142589 - RNA, 19 nt, Artificial Sequence
  Description of Artificial Sequence: Synthetic oligonucleotide
  Antisense strand to SEQ ID NO: 1142588
ucacgcagagaaguauaga

SEQ ID NO: 1142590 - RNA, 19 nt, Artificial Sequence
  Description of Artificial Sequence: Synthetic oligonucleotide
  Sense strand starting at position 2863 of SEQ ID NO: 916259
cuauacuucucugcgugaa

SEQ ID NO: 1142591 - RNA, 19 nt, Artificial Sequence
  Description of Artificial Sequence: Synthetic oligonucleotide
  Antisense strand to SEQ ID NO: 1142590
uucacgcagagaaguauag

SEQ ID NO: 1142592 - RNA, 19 nt, Artificial Sequence
  Description of Artificial Sequence: Synthetic oligonucleotide
  Sense strand starting at position 2864 of SEQ ID NO: 916259
uauacuucucugcgugaag

SEQ ID NO: 1142593 - RNA, 19 nt, Artificial Sequence
  Description of Artificial Sequence: Synthetic oligonucleotide
  Antisense strand to SEQ ID NO: 1142592
cuucacgcagagaaguaua

SEQ ID NO: 1142594 - RNA, 19 nt, Artificial Sequence
  Description of Artificial Sequence: Synthetic oligonucleotide
  Sense strand starting at position 2975 of SEQ ID NO: 916259
gacucuaagccacguguua

SEQ ID NO: 1142595 - RNA, 19 nt, Artificial Sequence
  Description of Artificial Sequence: Synthetic oligonucleotide
  Antisense strand to SEQ ID NO: 1142594
uaacacguggcuuagaguc

SEQ ID NO: 1142596 - RNA, 19 nt, Artificial Sequence
  Description of Artificial Sequence: Synthetic oligonucleotide
  Sense strand starting at position 2977 of SEQ ID NO: 916259
cucuaagccacguguuaug

SEQ ID NO: 1142597 - RNA, 19 nt, Artificial Sequence
  Description of Artificial Sequence: Synthetic oligonucleotide
  Antisense strand to SEQ ID NO: 1142596
cauaacacguggcuuagag

SEQ ID NO: 1142598 - RNA, 19 nt, Artificial Sequence
  Description of Artificial Sequence: Synthetic oligonucleotide
  Sense strand starting at position 2984 of SEQ ID NO: 916259
ccacguguuauggguaaac

SEQ ID NO: 1142599 - RNA, 19 nt, Artificial Sequence
  Description of Artificial Sequence: Synthetic oligonucleotide
  Antisense strand to SEQ ID NO: 1142598
guuuacccauaacacgugg

SEQ ID NO: 1142600 - RNA, 19 nt, Artificial Sequence
  Description of Artificial Sequence: Synthetic oligonucleotide
  Sense strand starting at position 2986 of SEQ ID NO: 916259
acguguuauggguaaacau

SEQ ID NO: 1142601 - RNA, 19 nt, Artificial Sequence
  Description of Artificial Sequence: Synthetic oligonucleotide
  Antisense strand to SEQ ID NO: 1142600
auguuuacccauaacacgu

SEQ ID NO: 1142602 - RNA, 19 nt, Artificial Sequence
  Description of Artificial Sequence: Synthetic oligonucleotide
  Sense strand starting at position 3107 of SEQ ID NO: 916259
cuuugaggcccagagaagu

SEQ ID NO: 1142603 - RNA, 19 nt, Artificial Sequence
  Description of Artificial Sequence: Synthetic oligonucleotide
  Antisense strand to SEQ ID NO: 1142602
acuucucugggccucaaag

SEQ ID NO: 1142604 - RNA, 19 nt, Artificial Sequence
  Description of Artificial Sequence: Synthetic oligonucleotide
  Sense strand starting at position 3117 of SEQ ID NO: 916259
cagagaaguugucuguuac

SEQ ID NO: 1142605 - RNA, 19 nt, Artificial Sequence
  Description of Artificial Sequence: Synthetic oligonucleotide
  Antisense strand to SEQ ID NO: 1142604
guaacagacaacuucucug

SEQ ID NO: 1142606 - RNA, 19 nt, Artificial Sequence
  Description of Artificial Sequence: Synthetic oligonucleotide
  Sense strand starting at position 3118 of SEQ ID NO: 916259
agagaaguugucuguuaca

SEQ ID NO: 1142607 - RNA, 19 nt, Artificial Sequence
  Description of Artificial Sequence: Synthetic oligonucleotide
  Antisense strand to SEQ ID NO: 1142606
uguaacagacaacuucucu

SEQ ID NO: 1142608 - RNA, 19 nt, Artificial Sequence
  Description of Artificial Sequence: Synthetic oligonucleotide
  Sense strand starting at position 3209 of SEQ ID NO: 916259
auauauuaagucgagguga

SEQ ID NO: 1142609 - RNA, 19 nt, Artificial Sequence
  Description of Artificial Sequence: Synthetic oligonucleotide
  Antisense strand to SEQ ID NO: 1142608
ucaccucgacuuaauauau

SEQ ID NO: 1142610 - RNA, 19 nt, Artificial Sequence
  Description of Artificial Sequence: Synthetic oligonucleotide
  Sense strand starting at position 3211 of SEQ ID NO: 916259
auauuaagucgaggugaaa

SEQ ID NO: 1142611 - RNA, 19 nt, Artificial Sequence
  Description of Artificial Sequence: Synthetic oligonucleotide
  Antisense strand to SEQ ID NO: 1142610
uuucaccucgacuuaauau

SEQ ID NO: 1142612 - RNA, 19 nt, Artificial Sequence
  Description of Artificial Sequence: Synthetic oligonucleotide
  Sense strand starting at position 3224 of SEQ ID NO: 916259
gugaaauucccauagcaua

SEQ ID NO: 1142613 - RNA, 19 nt, Artificial Sequence
  Description of Artificial Sequence: Synthetic oligonucleotide
  Antisense strand to SEQ ID NO: 1142612
uaugcuaugggaauuucac

SEQ ID NO: 1142614 - RNA, 19 nt, Artificial Sequence
  Description of Artificial Sequence: Synthetic oligonucleotide
  Sense strand starting at position 3264 of SEQ ID NO: 916259
gugauuuaauggcauuuag

SEQ ID NO: 1142615 - RNA, 19 nt, Artificial Sequence
  Description of Artificial Sequence: Synthetic oligonucleotide
  Antisense strand to SEQ ID NO: 1142614
cuaaaugccauuaaaucac

SEQ ID NO: 1142616 - RNA, 19 nt, Artificial Sequence
  Description of Artificial Sequence: Synthetic oligonucleotide
  Sense strand starting at position 3427 of SEQ ID NO: 916259
cuggauacuuaauagaaag

SEQ ID NO: 1142617 - RNA, 19 nt, Artificial Sequence
  Description of Artificial Sequence: Synthetic oligonucleotide
  Antisense strand to SEQ ID NO: 1142616
cuuucuauuaaguauccag

SEQ ID NO: 1142618 - RNA, 19 nt, Artificial Sequence
  Description of Artificial Sequence: Synthetic oligonucleotide
  Sense strand starting at position 3446 of SEQ ID NO: 916259
ggaaccauaucauauguga

SEQ ID NO: 1142619 - RNA, 19 nt, Artificial Sequence
  Description of Artificial Sequence: Synthetic oligonucleotide
  Antisense strand to SEQ ID NO: 1142618
ucacauaugauaugguucc

SEQ ID NO: 1142620 - RNA, 19 nt, Artificial Sequence
  Description of Artificial Sequence: Synthetic oligonucleotide
  Sense strand starting at position 3449 of SEQ ID NO: 916259
accauaucauaugugacau

SEQ ID NO: 1142621 - RNA, 19 nt, Artificial Sequence
  Description of Artificial Sequence: Synthetic oligonucleotide
  Antisense strand to SEQ ID NO: 1142620
augucacauaugauauggu

SEQ ID NO: 1142622 - RNA, 19 nt, Artificial Sequence
  Description of Artificial Sequence: Synthetic oligonucleotide
  Sense strand starting at position 3524 of SEQ ID NO: 916259
ggagcaugcauccguacuu

SEQ ID NO: 1142623 - RNA, 19 nt, Artificial Sequence
  Description of Artificial Sequence: Synthetic oligonucleotide
  Antisense strand to SEQ ID NO: 1142622
aaguacggaugcaugcucc

SEQ ID NO: 1142624 - RNA, 19 nt, Artificial Sequence
  Description of Artificial Sequence: Synthetic oligonucleotide
  Sense strand starting at position 3685 of SEQ ID NO: 916259
uaagguuuaccacguuaac

SEQ ID NO: 1142625 - RNA, 19 nt, Artificial Sequence
  Description of Artificial Sequence: Synthetic oligonucleotide
  Antisense strand to SEQ ID NO: 1142624
guuaacgugguaaaccuua

SEQ ID NO: 1142626 - RNA, 19 nt, Artificial Sequence
  Description of Artificial Sequence: Synthetic oligonucleotide
  Sense strand starting at position 3688 of SEQ ID NO: 916259
gguuuaccacguuaaccau

SEQ ID NO: 1142627 - RNA, 19 nt, Artificial Sequence
  Description of Artificial Sequence: Synthetic oligonucleotide
  Antisense strand to SEQ ID NO: 1142626
augguuaacgugguaaacc

SEQ ID NO: 1142628 - RNA, 19 nt, Artificial Sequence
  Description of Artificial Sequence: Synthetic oligonucleotide
  Sense strand starting at position 322 of SEQ ID NO: 916260
uagaguaccugucuuaaag

SEQ ID NO: 1142629 - RNA, 19 nt, Artificial Sequence
  Description of Artificial Sequence: Synthetic oligonucleotide
  Antisense strand to SEQ ID NO: 1142628
cuuuaagacagguacucua

SEQ ID NO: 1142630 - RNA, 19 nt, Artificial Sequence
  Description of Artificial Sequence: Synthetic oligonucleotide
  Sense strand starting at position 418 of SEQ ID NO: 916260
guucuaugcuaccucauuu

SEQ ID NO: 1142631 - RNA, 19 nt, Artificial Sequence
  Description of Artificial Sequence: Synthetic oligonucleotide
  Antisense strand to SEQ ID NO: 1142630
aaaugagguagcauagaac

SEQ ID NO: 1142632 - RNA, 19 nt, Artificial Sequence
  Description of Artificial Sequence: Synthetic oligonucleotide
  Sense strand starting at position 581 of SEQ ID NO: 916260
ugacaucauaucgagaugu

SEQ ID NO: 1142633 - RNA, 19 nt, Artificial Sequence
  Description of Artificial Sequence: Synthetic oligonucleotide
  Antisense strand to SEQ ID NO: 1142632
acaucucgauaugauguca

SEQ ID NO: 1142634 - RNA, 19 nt, Artificial Sequence
  Description of Artificial Sequence: Synthetic oligonucleotide
  Sense strand starting at position 583 of SEQ ID NO: 916260
acaucauaucgagauguca

SEQ ID NO: 1142635 - RNA, 19 nt, Artificial Sequence
  Description of Artificial Sequence: Synthetic oligonucleotide
  Antisense strand to SEQ ID NO: 1142634
ugacaucucgauaugaugu

SEQ ID NO: 1142636 - RNA, 19 nt, Artificial Sequence
  Description of Artificial Sequence: Synthetic oligonucleotide
  Sense strand starting at position 585 of SEQ ID NO: 916260
aucauaucgagaugucaug

SEQ ID NO: 1142637 - RNA, 19 nt, Artificial Sequence
  Description of Artificial Sequence: Synthetic oligonucleotide
  Antisense strand to SEQ ID NO: 1142636
caugacaucucgauaugau

SEQ ID NO: 1142638 - RNA, 19 nt, Artificial Sequence
  Description of Artificial Sequence: Synthetic oligonucleotide
  Sense strand starting at position 839 of SEQ ID NO: 916260
cugggauccuucuccauca

SEQ ID NO: 1142639 - RNA, 19 nt, Artificial Sequence
  Description of Artificial Sequence: Synthetic oligonucleotide
  Antisense strand to SEQ ID NO: 1142638
ugauggagaaggaucccag

SEQ ID NO: 1142640 - RNA, 19 nt, Artificial Sequence
  Description of Artificial Sequence: Synthetic oligonucleotide
  Sense strand starting at position 877 of SEQ ID NO: 916260
ggcuuuccauauuuaguuu

SEQ ID NO: 1142641 - RNA, 19 nt, Artificial Sequence
  Description of Artificial Sequence: Synthetic oligonucleotide
  Antisense strand to SEQ ID NO: 1142640
aaacuaaauauggaaagcc

SEQ ID NO: 1142642 - RNA, 19 nt, Artificial Sequence
  Description of Artificial Sequence: Synthetic oligonucleotide
  Sense strand starting at position 909 of SEQ ID NO: 916260
agugauacucuuuaccuau

SEQ ID NO: 1142643 - RNA, 19 nt, Artificial Sequence
  Description of Artificial Sequence: Synthetic oligonucleotide
  Antisense strand to SEQ ID NO: 1142642
auagguaaagaguaucacu

SEQ ID NO: 1142644 - RNA, 19 nt, Artificial Sequence
  Description of Artificial Sequence: Synthetic oligonucleotide
  Sense strand starting at position 979 of SEQ ID NO: 916260
ccuuguacuccagauagua

SEQ ID NO: 1142645 - RNA, 19 nt, Artificial Sequence
  Description of Artificial Sequence: Synthetic oligonucleotide
  Antisense strand to SEQ ID NO: 1142644
uacuaucuggaguacaagg

SEQ ID NO: 1142646 - RNA, 19 nt, Artificial Sequence
  Description of Artificial Sequence: Synthetic oligonucleotide
  Sense strand starting at position 1019 of SEQ ID NO: 916260
agcuaaguggcauagaauu

SEQ ID NO: 1142647 - RNA, 19 nt, Artificial Sequence
  Description of Artificial Sequence: Synthetic oligonucleotide
  Antisense strand to SEQ ID NO: 1142646
aauucuaugccacuuagcu

SEQ ID NO: 1142648 - RNA, 19 nt, Artificial Sequence
  Description of Artificial Sequence: Synthetic oligonucleotide
  Sense strand starting at position 1055 of SEQ ID NO: 916260
ggacucuaauaucuaguga

SEQ ID NO: 1142649 - RNA, 19 nt, Artificial Sequence
  Description of Artificial Sequence: Synthetic oligonucleotide
  Antisense strand to SEQ ID NO: 1142648
ucacuagauauuagagucc

SEQ ID NO: 1142650 - RNA, 19 nt, Artificial Sequence
  Description of Artificial Sequence: Synthetic oligonucleotide
  Sense strand starting at position 1113 of SEQ ID NO: 916260
gugucagugacacaucuga

SEQ ID NO: 1142651 - RNA, 19 nt, Artificial Sequence
  Description of Artificial Sequence: Synthetic oligonucleotide
  Antisense strand to SEQ ID NO: 1142650
ucagaugugucacugacac

SEQ ID NO: 1142652 - RNA, 19 nt, Artificial Sequence
  Description of Artificial Sequence: Synthetic oligonucleotide
  Sense strand starting at position 1120 of SEQ ID NO: 916260
ugacacaucugaguaaugu

SEQ ID NO: 1142653 - RNA, 19 nt, Artificial Sequence
  Description of Artificial Sequence: Synthetic oligonucleotide
  Antisense strand to SEQ ID NO: 1142652
acauuacucagauguguca

SEQ ID NO: 1142654 - RNA, 19 nt, Artificial Sequence
  Description of Artificial Sequence: Synthetic oligonucleotide
  Sense strand starting at position 1312 of SEQ ID NO: 916260
ugucccauauauccugaga

SEQ ID NO: 1142655 - RNA, 19 nt, Artificial Sequence
  Description of Artificial Sequence: Synthetic oligonucleotide
  Antisense strand to SEQ ID NO: 1142654
ucucaggauauaugggaca

SEQ ID NO: 1142656 - RNA, 19 nt, Artificial Sequence
  Description of Artificial Sequence: Synthetic oligonucleotide
  Sense strand starting at position 1338 of SEQ ID NO: 916260
agaggucagauuggucaga

SEQ ID NO: 1142657 - RNA, 19 nt, Artificial Sequence
  Description of Artificial Sequence: Synthetic oligonucleotide
  Antisense strand to SEQ ID NO: 1142656
ucugaccaaucugaccucu

SEQ ID NO: 1142658 - RNA, 19 nt, Artificial Sequence
  Description of Artificial Sequence: Synthetic oligonucleotide
  Sense strand starting at position 1339 of SEQ ID NO: 916260
gaggucagauuggucagau

SEQ ID NO: 1142659 - RNA, 19 nt, Artificial Sequence
  Description of Artificial Sequence: Synthetic oligonucleotide
  Antisense strand to SEQ ID NO: 1142658
aucugaccaaucugaccuc

SEQ ID NO: 1142660 - RNA, 19 nt, Artificial Sequence
  Description of Artificial Sequence: Synthetic oligonucleotide
  Sense strand starting at position 1340 of SEQ ID NO: 916260
aggucagauuggucagauc

SEQ ID NO: 1142661 - RNA, 19 nt, Artificial Sequence
  Description of Artificial Sequence: Synthetic oligonucleotide
  Antisense strand to SEQ ID NO: 1142660
gaucugaccaaucugaccu

SEQ ID NO: 1142662 - RNA, 19 nt, Artificial Sequence
  Description of Artificial Sequence: Synthetic oligonucleotide
  Sense strand starting at position 1351 of SEQ ID NO: 916260
gucagaucccucgagacag

SEQ ID NO: 1142663 - RNA, 19 nt, Artificial Sequence
  Description of Artificial Sequence: Synthetic oligonucleotide
  Antisense strand to SEQ ID NO: 1142662
cugucucgagggaucugac

SEQ ID NO: 1142664 - RNA, 19 nt, Artificial Sequence
  Description of Artificial Sequence: Synthetic oligonucleotide
  Sense strand starting at position 1927 of SEQ ID NO: 916260
acgugaauccaucagauca

SEQ ID NO: 1142665 - RNA, 19 nt, Artificial Sequence
  Description of Artificial Sequence: Synthetic oligonucleotide
  Antisense strand to SEQ ID NO: 1142664
ugaucugauggauucacgu

SEQ ID NO: 1142666 - RNA, 19 nt, Artificial Sequence
  Description of Artificial Sequence: Synthetic oligonucleotide
  Sense strand starting at position 2080 of SEQ ID NO: 916260
ggcagaucucgcgugguuu

SEQ ID NO: 1142667 - RNA, 19 nt, Artificial Sequence
  Description of Artificial Sequence: Synthetic oligonucleotide
  Antisense strand to SEQ ID NO: 1142666
aaaccacgcgagaucugcc

SEQ ID NO: 1142668 - RNA, 19 nt, Artificial Sequence
  Description of Artificial Sequence: Synthetic oligonucleotide
  Sense strand starting at position 2295 of SEQ ID NO: 916260
cgaggaauuccacgaagaa

SEQ ID NO: 1142669 - RNA, 19 nt, Artificial Sequence
  Description of Artificial Sequence: Synthetic oligonucleotide
  Antisense strand to SEQ ID NO: 1142668
uucuucguggaauuccucg

SEQ ID NO: 1142670 - RNA, 19 nt, Artificial Sequence
  Description of Artificial Sequence: Synthetic oligonucleotide
  Sense strand starting at position 2385 of SEQ ID NO: 916260
gaggaagucagccaguuua

SEQ ID NO: 1142671 - RNA, 19 nt, Artificial Sequence
  Description of Artificial Sequence: Synthetic oligonucleotide
  Antisense strand to SEQ ID NO: 1142670
uaaacuggcugacuuccuc

SEQ ID NO: 1142672 - RNA, 19 nt, Artificial Sequence
  Description of Artificial Sequence: Synthetic oligonucleotide
  Sense strand starting at position 2399 of SEQ ID NO: 916260
guuuaucaccuuggaacca

SEQ ID NO: 1142673 - RNA, 19 nt, Artificial Sequence
  Description of Artificial Sequence: Synthetic oligonucleotide
  Antisense strand to SEQ ID NO: 1142672
ugguuccaaggugauaaac

SEQ ID NO: 1142674 - RNA, 19 nt, Artificial Sequence
  Description of Artificial Sequence: Synthetic oligonucleotide
  Sense strand starting at position 2722 of SEQ ID NO: 916260
gcgucagagcugucacgga

SEQ ID NO: 1142675 - RNA, 19 nt, Artificial Sequence
  Description of Artificial Sequence: Synthetic oligonucleotide
  Antisense strand to SEQ ID NO: 1142674
uccgugacagcucugacgc

SEQ ID NO: 1142676 - RNA, 19 nt, Artificial Sequence
  Description of Artificial Sequence: Synthetic oligonucleotide
  Sense strand starting at position 2727 of SEQ ID NO: 916260
agagcugucacggaagaug

SEQ ID NO: 1142677 - RNA, 19 nt, Artificial Sequence
  Description of Artificial Sequence: Synthetic oligonucleotide
  Antisense strand to SEQ ID NO: 1142676
caucuuccgugacagcucu

SEQ ID NO: 1142678 - RNA, 19 nt, Artificial Sequence
  Description of Artificial Sequence: Synthetic oligonucleotide
  Sense strand starting at position 2735 of SEQ ID NO: 916260
cacggaagauguuucuaau

SEQ ID NO: 1142679 - RNA, 19 nt, Artificial Sequence
  Description of Artificial Sequence: Synthetic oligonucleotide
  Antisense strand to SEQ ID NO: 1142678
auuagaaacaucuuccgug

SEQ ID NO: 1142680 - RNA, 19 nt, Artificial Sequence
  Description of Artificial Sequence: Synthetic oligonucleotide
  Sense strand starting at position 2830 of SEQ ID NO: 916260
gguggcauuuaguuacuua

SEQ ID NO: 1142681 - RNA, 19 nt, Artificial Sequence
  Description of Artificial Sequence: Synthetic oligonucleotide
  Antisense strand to SEQ ID NO: 1142680
uaaguaacuaaaugccacc

SEQ ID NO: 1142682 - RNA, 19 nt, Artificial Sequence
  Description of Artificial Sequence: Synthetic oligonucleotide
  Sense strand starting at position 3117 of SEQ ID NO: 916260
agaggauguugcuuauaaa

SEQ ID NO: 1142683 - RNA, 19 nt, Artificial Sequence
  Description of Artificial Sequence: Synthetic oligonucleotide
  Antisense strand to SEQ ID NO: 1142682
uuuauaagcaacauccucu

SEQ ID NO: 1142684 - RNA, 19 nt, Artificial Sequence
  Description of Artificial Sequence: Synthetic oligonucleotide
  Sense strand starting at position 3162 of SEQ ID NO: 916260
cagauaugacuggauucgu

SEQ ID NO: 1142685 - RNA, 19 nt, Artificial Sequence
  Description of Artificial Sequence: Synthetic oligonucleotide
  Antisense strand to SEQ ID NO: 1142684
acgaauccagucauaucug

SEQ ID NO: 1142686 - RNA, 19 nt, Artificial Sequence
  Description of Artificial Sequence: Synthetic oligonucleotide
  Sense strand starting at position 3167 of SEQ ID NO: 916260
augacuggauucguuugaa

SEQ ID NO: 1142687 - RNA, 19 nt, Artificial Sequence
  Description of Artificial Sequence: Synthetic oligonucleotide
  Antisense strand to SEQ ID NO: 1142686
uucaaacgaauccagucau

SEQ ID NO: 1142688 - RNA, 19 nt, Artificial Sequence
  Description of Artificial Sequence: Synthetic oligonucleotide
  Sense strand starting at position 3307 of SEQ ID NO: 916260
ggaucauuguuaucuuaga

SEQ ID NO: 1142689 - RNA, 19 nt, Artificial Sequence
  Description of Artificial Sequence: Synthetic oligonucleotide
  Antisense strand to SEQ ID NO: 1142688
ucuaagauaacaaugaucc

SEQ ID NO: 1142690 - RNA, 19 nt, Artificial Sequence
  Description of Artificial Sequence: Synthetic oligonucleotide
  Sense strand starting at position 3308 of SEQ ID NO: 916260
gaucauuguuaucuuagag

SEQ ID NO: 1142691 - RNA, 19 nt, Artificial Sequence
  Description of Artificial Sequence: Synthetic oligonucleotide
  Antisense strand to SEQ ID NO: 1142690
cucuaagauaacaaugauc

SEQ ID NO: 1142692 - RNA, 19 nt, Artificial Sequence
  Description of Artificial Sequence: Synthetic oligonucleotide
  Sense strand starting at position 3317 of SEQ ID NO: 916260
uaucuuagagcuggauaag

SEQ ID NO: 1142693 - RNA, 19 nt, Artificial Sequence
  Description of Artificial Sequence: Synthetic oligonucleotide
  Antisense strand to SEQ ID NO: 1142692
cuuauccagcucuaagaua

SEQ ID NO: 1142694 - RNA, 19 nt, Artificial Sequence
  Description of Artificial Sequence: Synthetic oligonucleotide
  Sense strand starting at position 3677 of SEQ ID NO: 916260
cuccauuaucuagagguac

SEQ ID NO: 1142695 - RNA, 19 nt, Artificial Sequence
  Description of Artificial Sequence: Synthetic oligonucleotide
  Antisense strand to SEQ ID NO: 1142694
guaccucuagauaauggag

SEQ ID NO: 1142696 - RNA, 19 nt, Artificial Sequence
  Description of Artificial Sequence: Synthetic oligonucleotide
  Sense strand starting at position 3695 of SEQ ID NO: 916260
cucugacuugguuaaggua

SEQ ID NO: 1142697 - RNA, 19 nt, Artificial Sequence
  Description of Artificial Sequence: Synthetic oligonucleotide
  Antisense strand to SEQ ID NO: 1142696
uaccuuaaccaagucagag

SEQ ID NO: 1142698 - RNA, 19 nt, Artificial Sequence
  Description of Artificial Sequence: Synthetic oligonucleotide
  Sense strand starting at position 3728 of SEQ ID NO: 916260
uuuccaagccaguauugaa

SEQ ID NO: 1142699 - RNA, 19 nt, Artificial Sequence
  Description of Artificial Sequence: Synthetic oligonucleotide
  Antisense strand to SEQ ID NO: 1142698
uucaauacuggcuuggaaa

SEQ ID NO: 1142700 - RNA, 19 nt, Artificial Sequence
  Description of Artificial Sequence: Synthetic oligonucleotide
  Sense strand starting at position 3783 of SEQ ID NO: 916260
uaaagugaauggguaucuu

SEQ ID NO: 1142701 - RNA, 19 nt, Artificial Sequence
  Description of Artificial Sequence: Synthetic oligonucleotide
  Antisense strand to SEQ ID NO: 1142700
aagauacccauucacuuua

SEQ ID NO: 1142702 - RNA, 19 nt, Artificial Sequence
  Description of Artificial Sequence: Synthetic oligonucleotide
  Sense strand starting at position 3949 of SEQ ID NO: 916260
aacagugacuucuuugaga

SEQ ID NO: 1142703 - RNA, 19 nt, Artificial Sequence
  Description of Artificial Sequence: Synthetic oligonucleotide
  Antisense strand to SEQ ID NO: 1142702
ucucaaagaagucacuguu

SEQ ID NO: 1142704 - RNA, 19 nt, Artificial Sequence
  Description of Artificial Sequence: Synthetic oligonucleotide
  Sense strand starting at position 3951 of SEQ ID NO: 916260
cagugacuucuuugagacu

SEQ ID NO: 1142705 - RNA, 19 nt, Artificial Sequence
  Description of Artificial Sequence: Synthetic oligonucleotide
  Antisense strand to SEQ ID NO: 1142704
agucucaaagaagucacug

SEQ ID NO: 1142706 - RNA, 19 nt, Artificial Sequence
  Description of Artificial Sequence: Synthetic oligonucleotide
  Sense strand starting at position 3976 of SEQ ID NO: 916260
ucauuuacaugugaugaaa

SEQ ID NO: 1142707 - RNA, 19 nt, Artificial Sequence
  Description of Artificial Sequence: Synthetic oligonucleotide
  Antisense strand to SEQ ID NO: 1142706
uuucaucacauguaaauga

SEQ ID NO: 1142708 - RNA, 19 nt, Artificial Sequence
  Description of Artificial Sequence: Synthetic oligonucleotide
  Sense strand starting at position 5 of SEQ ID NO: 916261
gcagucuagggcugaaaca

SEQ ID NO: 1142709 - RNA, 19 nt, Artificial Sequence
  Description of Artificial Sequence: Synthetic oligonucleotide
  Antisense strand to SEQ ID NO: 1142708
uguuucagcccuagacugc

SEQ ID NO: 1142710 - RNA, 19 nt, Artificial Sequence
  Description of Artificial Sequence: Synthetic oligonucleotide
  Sense strand starting at position 6 of SEQ ID NO: 916261
cagucuagggcugaaacau

SEQ ID NO: 1142711 - RNA, 19 nt, Artificial Sequence
  Description of Artificial Sequence: Synthetic oligonucleotide
  Antisense strand to SEQ ID NO: 1142710
auguuucagcccuagacug

SEQ ID NO: 1142712 - RNA, 19 nt, Artificial Sequence
  Description of Artificial Sequence: Synthetic oligonucleotide
  Sense strand starting at position 16 of SEQ ID NO: 916261
cugaaacauugaucaagug

SEQ ID NO: 1142713 - RNA, 19 nt, Artificial Sequence
  Description of Artificial Sequence: Synthetic oligonucleotide
  Antisense strand to SEQ ID NO: 1142712
cacuugaucaauguuucag

SEQ ID NO: 1142714 - RNA, 19 nt, Artificial Sequence
  Description of Artificial Sequence: Synthetic oligonucleotide
  Sense strand starting at position 342 of SEQ ID NO: 916261
ccagaauguugagcagcaa

SEQ ID NO: 1142715 - RNA, 19 nt, Artificial Sequence
  Description of Artificial Sequence: Synthetic oligonucleotide
  Antisense strand to SEQ ID NO: 1142714
uugcugcucaacauucugg

SEQ ID NO: 1142716 - RNA, 19 nt, Artificial Sequence
  Description of Artificial Sequence: Synthetic oligonucleotide
  Sense strand starting at position 410 of SEQ ID NO: 916261
cgagucaccuucccaaauu

SEQ ID NO: 1142717 - RNA, 19 nt, Artificial Sequence
  Description of Artificial Sequence: Synthetic oligonucleotide
  Antisense strand to SEQ ID NO: 1142716
aauuugggaaggugacucg

SEQ ID NO: 1142718 - RNA, 19 nt, Artificial Sequence
  Description of Artificial Sequence: Synthetic oligonucleotide
  Sense strand starting at position 660 of SEQ ID NO: 916261
caggcauggccucaucagu

SEQ ID NO: 1142719 - RNA, 19 nt, Artificial Sequence
  Description of Artificial Sequence: Synthetic oligonucleotide
  Antisense strand to SEQ ID NO: 1142718
acugaugaggccaugccug

SEQ ID NO: 1142720 - RNA, 19 nt, Artificial Sequence
  Description of Artificial Sequence: Synthetic oligonucleotide
  Sense strand starting at position 699 of SEQ ID NO: 916261
ggaugcuugccugucgcaa

SEQ ID NO: 1142721 - RNA, 19 nt, Artificial Sequence
  Description of Artificial Sequence: Synthetic oligonucleotide
  Antisense strand to SEQ ID NO: 1142720
uugcgacaggcaagcaucc

SEQ ID NO: 1142722 - RNA, 19 nt, Artificial Sequence
  Description of Artificial Sequence: Synthetic oligonucleotide
  Sense strand starting at position 707 of SEQ ID NO: 916261
gccugucgcaacuuguauu

SEQ ID NO: 1142723 - RNA, 19 nt, Artificial Sequence
  Description of Artificial Sequence: Synthetic oligonucleotide
  Antisense strand to SEQ ID NO: 1142722
aauacaaguugcgacaggc

SEQ ID NO: 1142724 - RNA, 19 nt, Artificial Sequence
  Description of Artificial Sequence: Synthetic oligonucleotide
  Sense strand starting at position 807 of SEQ ID NO: 916261
aguagaugcccaugaggau

SEQ ID NO: 1142725 - RNA, 19 nt, Artificial Sequence
  Description of Artificial Sequence: Synthetic oligonucleotide
  Antisense strand to SEQ ID NO: 1142724
auccucaugggcaucuacu

SEQ ID NO: 1142726 - RNA, 19 nt, Artificial Sequence
  Description of Artificial Sequence: Synthetic oligonucleotide
  Sense strand starting at position 1119 of SEQ ID NO: 916261
ggagguagguguccacaga

SEQ ID NO: 1142727 - RNA, 19 nt, Artificial Sequence
  Description of Artificial Sequence: Synthetic oligonucleotide
  Antisense strand to SEQ ID NO: 1142726
ucuguggacaccuaccucc

SEQ ID NO: 1142728 - RNA, 19 nt, Artificial Sequence
  Description of Artificial Sequence: Synthetic oligonucleotide
  Sense strand starting at position 1185 of SEQ ID NO: 916261
uggcuaugagcagguugaa

SEQ ID NO: 1142729 - RNA, 19 nt, Artificial Sequence
  Description of Artificial Sequence: Synthetic oligonucleotide
  Antisense strand to SEQ ID NO: 1142728
uucaaccugcucauagcca

SEQ ID NO: 1142730 - RNA, 19 nt, Artificial Sequence
  Description of Artificial Sequence: Synthetic oligonucleotide
  Sense strand starting at position 1346 of SEQ ID NO: 916261
gcgucagagcuguuccaca

SEQ ID NO: 1142731 - RNA, 19 nt, Artificial Sequence
  Description of Artificial Sequence: Synthetic oligonucleotide
  Antisense strand to SEQ ID NO: 1142730
uguggaacagcucugacgc

SEQ ID NO: 1142732 - RNA, 19 nt, Artificial Sequence
  Description of Artificial Sequence: Synthetic oligonucleotide
  Sense strand starting at position 1351 of SEQ ID NO: 916261
agagcuguuccacaugaua

SEQ ID NO: 1142733 - RNA, 19 nt, Artificial Sequence
  Description of Artificial Sequence: Synthetic oligonucleotide
  Antisense strand to SEQ ID NO: 1142732
uaucauguggaacagcucu

SEQ ID NO: 1142734 - RNA, 19 nt, Artificial Sequence
  Description of Artificial Sequence: Synthetic oligonucleotide
  Sense strand starting at position 1426 of SEQ ID NO: 916261
cuuagaucucuugaacagu

SEQ ID NO: 1142735 - RNA, 19 nt, Artificial Sequence
  Description of Artificial Sequence: Synthetic oligonucleotide
  Antisense strand to SEQ ID NO: 1142734
acuguucaagagaucuaag

SEQ ID NO: 1142736 - RNA, 19 nt, Artificial Sequence
  Description of Artificial Sequence: Synthetic oligonucleotide
  Sense strand starting at position 1756 of SEQ ID NO: 916261
agcaucguguauucaggau

SEQ ID NO: 1142737 - RNA, 19 nt, Artificial Sequence
  Description of Artificial Sequence: Synthetic oligonucleotide
  Antisense strand to SEQ ID NO: 1142736
auccugaauacacgaugcu

SEQ ID NO: 1142738 - RNA, 19 nt, Artificial Sequence
  Description of Artificial Sequence: Synthetic oligonucleotide
  Sense strand starting at position 1768 of SEQ ID NO: 916261
ucaggauccucucuguauu

SEQ ID NO: 1142739 - RNA, 19 nt, Artificial Sequence
  Description of Artificial Sequence: Synthetic oligonucleotide
  Antisense strand to SEQ ID NO: 1142738
aauacagagaggauccuga

SEQ ID NO: 1142740 - RNA, 19 nt, Artificial Sequence
  Description of Artificial Sequence: Synthetic oligonucleotide
  Sense strand starting at position 1817 of SEQ ID NO: 916261
acauauaggcuuuagucau

SEQ ID NO: 1142741 - RNA, 19 nt, Artificial Sequence
  Description of Artificial Sequence: Synthetic oligonucleotide
  Antisense strand to SEQ ID NO: 1142740
augacuaaagccuauaugu

SEQ ID NO: 1142742 - RNA, 19 nt, Artificial Sequence
  Description of Artificial Sequence: Synthetic oligonucleotide
  Sense strand starting at position 1823 of SEQ ID NO: 916261
aggcuuuagucauuucugu

SEQ ID NO: 1142743 - RNA, 19 nt, Artificial Sequence
  Description of Artificial Sequence: Synthetic oligonucleotide
  Antisense strand to SEQ ID NO: 1142742
acagaaaugacuaaagccu

SEQ ID NO: 1142744 - RNA, 19 nt, Artificial Sequence
  Description of Artificial Sequence: Synthetic oligonucleotide
  Sense strand starting at position 1828 of SEQ ID NO: 916261
uuagucauuucuguuuguu

SEQ ID NO: 1142745 - RNA, 19 nt, Artificial Sequence
  Description of Artificial Sequence: Synthetic oligonucleotide
  Antisense strand to SEQ ID NO: 1142744
aacaaacagaaaugacuaa

SEQ ID NO: 1142746 - RNA, 19 nt, Artificial Sequence
  Description of Artificial Sequence: Synthetic oligonucleotide
  Sense strand starting at position 1832 of SEQ ID NO: 916261
ucauuucuguuuguuacca

SEQ ID NO: 1142747 - RNA, 19 nt, Artificial Sequence
  Description of Artificial Sequence: Synthetic oligonucleotide
  Antisense strand to SEQ ID NO: 1142746
ugguaacaaacagaaauga

SEQ ID NO: 1142748 - RNA, 19 nt, Artificial Sequence
  Description of Artificial Sequence: Synthetic oligonucleotide
  Sense strand starting at position 1841 of SEQ ID NO: 916261
uuuguuaccaccugggaga

SEQ ID NO: 1142749 - RNA, 19 nt, Artificial Sequence
  Description of Artificial Sequence: Synthetic oligonucleotide
  Antisense strand to SEQ ID NO: 1142748
ucucccaggugguaacaaa

SEQ ID NO: 1142750 - RNA, 19 nt, Artificial Sequence
  Description of Artificial Sequence: Synthetic oligonucleotide
  Sense strand starting at position 1968 of SEQ ID NO: 916261
guccuuucugguggacagu

SEQ ID NO: 1142751 - RNA, 19 nt, Artificial Sequence
  Description of Artificial Sequence: Synthetic oligonucleotide
  Antisense strand to SEQ ID NO: 1142750
acuguccaccagaaaggac

SEQ ID NO: 1142752 - RNA, 19 nt, Artificial Sequence
  Description of Artificial Sequence: Synthetic oligonucleotide
  Sense strand starting at position 2001 of SEQ ID NO: 916261
gagacauccugcucuuaug

SEQ ID NO: 1142753 - RNA, 19 nt, Artificial Sequence
  Description of Artificial Sequence: Synthetic oligonucleotide
  Antisense strand to SEQ ID NO: 1142752
cauaagagcaggaugucuc

SEQ ID NO: 1142754 - RNA, 19 nt, Artificial Sequence
  Description of Artificial Sequence: Synthetic oligonucleotide
  Sense strand starting at position 2011 of SEQ ID NO: 916261
gcucuuauguauccuauua

SEQ ID NO: 1142755 - RNA, 19 nt, Artificial Sequence
  Description of Artificial Sequence: Synthetic oligonucleotide
  Antisense strand to SEQ ID NO: 1142754
uaauaggauacauaagagc

SEQ ID NO: 1142756 - RNA, 19 nt, Artificial Sequence
  Description of Artificial Sequence: Synthetic oligonucleotide
  Sense strand starting at position 2116 of SEQ ID NO: 916261
gcuagugaaaucuaggcuu

SEQ ID NO: 1142757 - RNA, 19 nt, Artificial Sequence
  Description of Artificial Sequence: Synthetic oligonucleotide
  Antisense strand to SEQ ID NO: 1142756
aagccuagauuucacuagc

SEQ ID NO: 1142758 - RNA, 19 nt, Artificial Sequence
  Description of Artificial Sequence: Synthetic oligonucleotide
  Sense strand starting at position 2118 of SEQ ID NO: 916261
uagugaaaucuaggcuucu

SEQ ID NO: 1142759 - RNA, 19 nt, Artificial Sequence
  Description of Artificial Sequence: Synthetic oligonucleotide
  Antisense strand to SEQ ID NO: 1142758
agaagccuagauuucacua

SEQ ID NO: 1142760 - RNA, 19 nt, Artificial Sequence
  Description of Artificial Sequence: Synthetic oligonucleotide
  Sense strand starting at position 2119 of SEQ ID NO: 916261
agugaaaucuaggcuucuc

SEQ ID NO: 1142761 - RNA, 19 nt, Artificial Sequence
  Description of Artificial Sequence: Synthetic oligonucleotide
  Antisense strand to SEQ ID NO: 1142760
gagaagccuagauuucacu

SEQ ID NO: 1142762 - RNA, 19 nt, Artificial Sequence
  Description of Artificial Sequence: Synthetic oligonucleotide
  Sense strand starting at position 2127 of SEQ ID NO: 916261
cuaggcuucucuguugaaa

SEQ ID NO: 1142763 - RNA, 19 nt, Artificial Sequence
  Description of Artificial Sequence: Synthetic oligonucleotide
  Antisense strand to SEQ ID NO: 1142762
uuucaacagagaagccuag

SEQ ID NO: 1142764 - RNA, 19 nt, Artificial Sequence
  Description of Artificial Sequence: Synthetic oligonucleotide
  Sense strand starting at position 2219 of SEQ ID NO: 916261
cccucuuugcauggcagaa

SEQ ID NO: 1142765 - RNA, 19 nt, Artificial Sequence
  Description of Artificial Sequence: Synthetic oligonucleotide
  Antisense strand to SEQ ID NO: 1142764
uucugccaugcaaagaggg

SEQ ID NO: 1142766 - RNA, 19 nt, Artificial Sequence
  Description of Artificial Sequence: Synthetic oligonucleotide
  Sense strand starting at position 2243 of SEQ ID NO: 916261
cuguaagaucauugccaag

SEQ ID NO: 1142767 - RNA, 19 nt, Artificial Sequence
  Description of Artificial Sequence: Synthetic oligonucleotide
  Antisense strand to SEQ ID NO: 1142766
cuuggcaaugaucuuacag

SEQ ID NO: 1142768 - RNA, 19 nt, Artificial Sequence
  Description of Artificial Sequence: Synthetic oligonucleotide
  Sense strand starting at position 2245 of SEQ ID NO: 916261
guaagaucauugccaagaa

SEQ ID NO: 1142769 - RNA, 19 nt, Artificial Sequence
  Description of Artificial Sequence: Synthetic oligonucleotide
  Antisense strand to SEQ ID NO: 1142768
uucuuggcaaugaucuuac

SEQ ID NO: 1142770 - RNA, 19 nt, Artificial Sequence
  Description of Artificial Sequence: Synthetic oligonucleotide
  Sense strand starting at position 2401 of SEQ ID NO: 916261
gucuccacggcuuagacau

SEQ ID NO: 1142771 - RNA, 19 nt, Artificial Sequence
  Description of Artificial Sequence: Synthetic oligonucleotide
  Antisense strand to SEQ ID NO: 1142770
augucuaagccguggagac

SEQ ID NO: 1142772 - RNA, 19 nt, Artificial Sequence
  Description of Artificial Sequence: Synthetic oligonucleotide
  Sense strand starting at position 2408 of SEQ ID NO: 916261
cggcuuagacaugguucaa

SEQ ID NO: 1142773 - RNA, 19 nt, Artificial Sequence
  Description of Artificial Sequence: Synthetic oligonucleotide
  Antisense strand to SEQ ID NO: 1142772
uugaaccaugucuaagccg

SEQ ID NO: 1142774 - RNA, 19 nt, Artificial Sequence
  Description of Artificial Sequence: Synthetic oligonucleotide
  Sense strand starting at position 2579 of SEQ ID NO: 916261
aguacugagugccuacuau

SEQ ID NO: 1142775 - RNA, 19 nt, Artificial Sequence
  Description of Artificial Sequence: Synthetic oligonucleotide
  Antisense strand to SEQ ID NO: 1142774
auaguaggcacucaguacu

SEQ ID NO: 1142776 - RNA, 19 nt, Artificial Sequence
  Description of Artificial Sequence: Synthetic oligonucleotide
  Sense strand starting at position 2690 of SEQ ID NO: 916261
gcaaaugcuuaaucgauuc

SEQ ID NO: 1142777 - RNA, 19 nt, Artificial Sequence
  Description of Artificial Sequence: Synthetic oligonucleotide
  Antisense strand to SEQ ID NO: 1142776
gaaucgauuaagcauuugc

SEQ ID NO: 1142778 - RNA, 19 nt, Artificial Sequence
  Description of Artificial Sequence: Synthetic oligonucleotide
  Sense strand starting at position 2701 of SEQ ID NO: 916261
aucgauucuccagagcaag

SEQ ID NO: 1142779 - RNA, 19 nt, Artificial Sequence
  Description of Artificial Sequence: Synthetic oligonucleotide
  Antisense strand to SEQ ID NO: 1142778
cuugcucuggagaaucgau

SEQ ID NO: 1142780 - RNA, 19 nt, Artificial Sequence
  Description of Artificial Sequence: Synthetic oligonucleotide
  Sense strand starting at position 2964 of SEQ ID NO: 916261
gugaugggugcgccuguaa

SEQ ID NO: 1142781 - RNA, 19 nt, Artificial Sequence
  Description of Artificial Sequence: Synthetic oligonucleotide
  Antisense strand to SEQ ID NO: 1142780
uuacaggcgcacccaucac

SEQ ID NO: 1142782 - RNA, 19 nt, Artificial Sequence
  Description of Artificial Sequence: Synthetic oligonucleotide
  Sense strand starting at position 3170 of SEQ ID NO: 916261
uuauauaagugccuaugua

SEQ ID NO: 1142783 - RNA, 19 nt, Artificial Sequence
  Description of Artificial Sequence: Synthetic oligonucleotide
  Antisense strand to SEQ ID NO: 1142782
uacauaggcacuuauauaa

SEQ ID NO: 1142784 - RNA, 19 nt, Artificial Sequence
  Description of Artificial Sequence: Synthetic oligonucleotide
  Sense strand starting at position 3174 of SEQ ID NO: 916261
auaagugccuauguaauau

SEQ ID NO: 1142785 - RNA, 19 nt, Artificial Sequence
  Description of Artificial Sequence: Synthetic oligonucleotide
  Antisense strand to SEQ ID NO: 1142784
auauuacauaggcacuuau

SEQ ID NO: 1142786 - RNA, 19 nt, Artificial Sequence
  Description of Artificial Sequence: Synthetic oligonucleotide
  Sense strand starting at position 3503 of SEQ ID NO: 916261
agacuacagugagaaagau

SEQ ID NO: 1142787 - RNA, 19 nt, Artificial Sequence
  Description of Artificial Sequence: Synthetic oligonucleotide
  Antisense strand to SEQ ID NO: 1142786
aucuuucucacuguagucu

SEQ ID NO: 1142788 - RNA, 19 nt, Artificial Sequence
  Description of Artificial Sequence: Synthetic oligonucleotide
  Sense strand starting at position 216 of SEQ ID NO: 916262
aggugugguguuuacacaa

SEQ ID NO: 1142789 - RNA, 19 nt, Artificial Sequence
  Description of Artificial Sequence: Synthetic oligonucleotide
  Antisense strand to SEQ ID NO: 1142788
uuguguaaacaccacaccu

SEQ ID NO: 1142790 - RNA, 19 nt, Artificial Sequence
  Description of Artificial Sequence: Synthetic oligonucleotide
  Sense strand starting at position 293 of SEQ ID NO: 916262
ccuugauucugagcagguu

SEQ ID NO: 1142791 - RNA, 19 nt, Artificial Sequence
  Description of Artificial Sequence: Synthetic oligonucleotide
  Antisense strand to SEQ ID NO: 1142790
aaccugcucagaaucaagg

SEQ ID NO: 1142792 - RNA, 19 nt, Artificial Sequence
  Description of Artificial Sequence: Synthetic oligonucleotide
  Sense strand starting at position 294 of SEQ ID NO: 916262
cuugauucugagcagguuu

SEQ ID NO: 1142793 - RNA, 19 nt, Artificial Sequence
  Description of Artificial Sequence: Synthetic oligonucleotide
  Antisense strand to SEQ ID NO: 1142792
aaaccugcucagaaucaag

SEQ ID NO: 1142794 - RNA, 19 nt, Artificial Sequence
  Description of Artificial Sequence: Synthetic oligonucleotide
  Sense strand starting at position 324 of SEQ ID NO: 916262
uagccuuucccauggaugu

SEQ ID NO: 1142795 - RNA, 19 nt, Artificial Sequence
  Description of Artificial Sequence: Synthetic oligonucleotide
  Antisense strand to SEQ ID NO: 1142794
acauccaugggaaaggcua

SEQ ID NO: 1142796 - RNA, 19 nt, Artificial Sequence
  Description of Artificial Sequence: Synthetic oligonucleotide
  Sense strand starting at position 325 of SEQ ID NO: 916262
agccuuucccauggauguu

SEQ ID NO: 1142797 - RNA, 19 nt, Artificial Sequence
  Description of Artificial Sequence: Synthetic oligonucleotide
  Antisense strand to SEQ ID NO: 1142796
aacauccaugggaaaggcu

SEQ ID NO: 1142798 - RNA, 19 nt, Artificial Sequence
  Description of Artificial Sequence: Synthetic oligonucleotide
  Sense strand starting at position 328 of SEQ ID NO: 916262
cuuucccauggauguuuaa

SEQ ID NO: 1142799 - RNA, 19 nt, Artificial Sequence
  Description of Artificial Sequence: Synthetic oligonucleotide
  Antisense strand to SEQ ID NO: 1142798
uuaaacauccaugggaaag

SEQ ID NO: 1142800 - RNA, 19 nt, Artificial Sequence
  Description of Artificial Sequence: Synthetic oligonucleotide
  Sense strand starting at position 728 of SEQ ID NO: 916262
ccauaaagucgguagugga

SEQ ID NO: 1142801 - RNA, 19 nt, Artificial Sequence
  Description of Artificial Sequence: Synthetic oligonucleotide
  Antisense strand to SEQ ID NO: 1142800
uccacuaccgacuuuaugg

SEQ ID NO: 1142802 - RNA, 19 nt, Artificial Sequence
  Description of Artificial Sequence: Synthetic oligonucleotide
  Sense strand starting at position 784 of SEQ ID NO: 916262
ccagguuucugagcaacuc

SEQ ID NO: 1142803 - RNA, 19 nt, Artificial Sequence
  Description of Artificial Sequence: Synthetic oligonucleotide
  Antisense strand to SEQ ID NO: 1142802
gaguugcucagaaaccugg

SEQ ID NO: 1142804 - RNA, 19 nt, Artificial Sequence
  Description of Artificial Sequence: Synthetic oligonucleotide
  Sense strand starting at position 785 of SEQ ID NO: 916262
cagguuucugagcaacuca

SEQ ID NO: 1142805 - RNA, 19 nt, Artificial Sequence
  Description of Artificial Sequence: Synthetic oligonucleotide
  Antisense strand to SEQ ID NO: 1142804
ugaguugcucagaaaccug

SEQ ID NO: 1142806 - RNA, 19 nt, Artificial Sequence
  Description of Artificial Sequence: Synthetic oligonucleotide
  Sense strand starting at position 1019 of SEQ ID NO: 916262
ccugcagagugaucccaga

SEQ ID NO: 1142807 - RNA, 19 nt, Artificial Sequence
  Description of Artificial Sequence: Synthetic oligonucleotide
  Antisense strand to SEQ ID NO: 1142806
ucugggaucacucugcagg

SEQ ID NO: 1142808 - RNA, 19 nt, Artificial Sequence
  Description of Artificial Sequence: Synthetic oligonucleotide
  Sense strand starting at position 1069 of SEQ ID NO: 916262
cuacucaaaguuuguagaa

SEQ ID NO: 1142809 - RNA, 19 nt, Artificial Sequence
  Description of Artificial Sequence: Synthetic oligonucleotide
  Antisense strand to SEQ ID NO: 1142808
uucuacaaacuuugaguag

SEQ ID NO: 1142810 - RNA, 19 nt, Artificial Sequence
  Description of Artificial Sequence: Synthetic oligonucleotide
  Sense strand starting at position 1134 of SEQ ID NO: 916262
ccucuaucuuagccuagga

SEQ ID NO: 1142811 - RNA, 19 nt, Artificial Sequence
  Description of Artificial Sequence: Synthetic oligonucleotide
  Antisense strand to SEQ ID NO: 1142810
uccuaggcuaagauagagg

SEQ ID NO: 1142812 - RNA, 19 nt, Artificial Sequence
  Description of Artificial Sequence: Synthetic oligonucleotide
  Sense strand starting at position 1136 of SEQ ID NO: 916262
ucuaucuuagccuaggaaa

SEQ ID NO: 1142813 - RNA, 19 nt, Artificial Sequence
  Description of Artificial Sequence: Synthetic oligonucleotide
  Antisense strand to SEQ ID NO: 1142812
uuuccuaggcuaagauaga

SEQ ID NO: 1142814 - RNA, 19 nt, Artificial Sequence
  Description of Artificial Sequence: Synthetic oligonucleotide
  Sense strand starting at position 1202 of SEQ ID NO: 916262
aggaacuguuuccuaggga

SEQ ID NO: 1142815 - RNA, 19 nt, Artificial Sequence
  Description of Artificial Sequence: Synthetic oligonucleotide
  Antisense strand to SEQ ID NO: 1142814
ucccuaggaaacaguuccu

SEQ ID NO: 1142816 - RNA, 19 nt, Artificial Sequence
  Description of Artificial Sequence: Synthetic oligonucleotide
  Sense strand starting at position 1205 of SEQ ID NO: 916262
aacuguuuccuagggaauu

SEQ ID NO: 1142817 - RNA, 19 nt, Artificial Sequence
  Description of Artificial Sequence: Synthetic oligonucleotide
  Antisense strand to SEQ ID NO: 1142816
aauucccuaggaaacaguu

SEQ ID NO: 1142818 - RNA, 19 nt, Artificial Sequence
  Description of Artificial Sequence: Synthetic oligonucleotide
  Sense strand starting at position 2159 of SEQ ID NO: 916262
agaucaguaucucuccuuu

SEQ ID NO: 1142819 - RNA, 19 nt, Artificial Sequence
  Description of Artificial Sequence: Synthetic oligonucleotide
  Antisense strand to SEQ ID NO: 1142818
aaaggagagauacugaucu

SEQ ID NO: 1142820 - RNA, 19 nt, Artificial Sequence
  Description of Artificial Sequence: Synthetic oligonucleotide
  Sense strand starting at position 2189 of SEQ ID NO: 916262
cuccuaaagccucgacaau

SEQ ID NO: 1142821 - RNA, 19 nt, Artificial Sequence
  Description of Artificial Sequence: Synthetic oligonucleotide
  Antisense strand to SEQ ID NO: 1142820
auugucgaggcuuuaggag

SEQ ID NO: 1142822 - RNA, 19 nt, Artificial Sequence
  Description of Artificial Sequence: Synthetic oligonucleotide
  Sense strand starting at position 2337 of SEQ ID NO: 916262
uguuuacguguggaacgau

SEQ ID NO: 1142823 - RNA, 19 nt, Artificial Sequence
  Description of Artificial Sequence: Synthetic oligonucleotide
  Antisense strand to SEQ ID NO: 1142822
aucguuccacacguaaaca

SEQ ID NO: 1142824 - RNA, 19 nt, Artificial Sequence
  Description of Artificial Sequence: Synthetic oligonucleotide
  Sense strand starting at position 2444 of SEQ ID NO: 916262
guuaucagcgcgcuuggua

SEQ ID NO: 1142825 - RNA, 19 nt, Artificial Sequence
  Description of Artificial Sequence: Synthetic oligonucleotide
  Antisense strand to SEQ ID NO: 1142824
uaccaagcgcgcugauaac

SEQ ID NO: 1142826 - RNA, 19 nt, Artificial Sequence
  Description of Artificial Sequence: Synthetic oligonucleotide
  Sense strand starting at position 2445 of SEQ ID NO: 916262
uuaucagcgcgcuugguaa

SEQ ID NO: 1142827 - RNA, 19 nt, Artificial Sequence
  Description of Artificial Sequence: Synthetic oligonucleotide
  Antisense strand to SEQ ID NO: 1142826
uuaccaagcgcgcugauaa

SEQ ID NO: 1142828 - RNA, 19 nt, Artificial Sequence
  Description of Artificial Sequence: Synthetic oligonucleotide
  Sense strand starting at position 2457 of SEQ ID NO: 916262
uugguaaacuaaucuggau

SEQ ID NO: 1142829 - RNA, 19 nt, Artificial Sequence
  Description of Artificial Sequence: Synthetic oligonucleotide
  Antisense strand to SEQ ID NO: 1142828
auccagauuaguuuaccaa

SEQ ID NO: 1142830 - RNA, 19 nt, Artificial Sequence
  Description of Artificial Sequence: Synthetic oligonucleotide
  Sense strand starting at position 2470 of SEQ ID NO: 916262
cuggauuauucugcauaug

SEQ ID NO: 1142831 - RNA, 19 nt, Artificial Sequence
  Description of Artificial Sequence: Synthetic oligonucleotide
  Antisense strand to SEQ ID NO: 1142830
cauaugcagaauaauccag

SEQ ID NO: 1142832 - RNA, 19 nt, Artificial Sequence
  Description of Artificial Sequence: Synthetic oligonucleotide
  Sense strand starting at position 2471 of SEQ ID NO: 916262
uggauuauucugcauauga

SEQ ID NO: 1142833 - RNA, 19 nt, Artificial Sequence
  Description of Artificial Sequence: Synthetic oligonucleotide
  Antisense strand to SEQ ID NO: 1142832
ucauaugcagaauaaucca

SEQ ID NO: 1142834 - RNA, 19 nt, Artificial Sequence
  Description of Artificial Sequence: Synthetic oligonucleotide
  Sense strand starting at position 2657 of SEQ ID NO: 916262
guuggaacacuuugaggua

SEQ ID NO: 1142835 - RNA, 19 nt, Artificial Sequence
  Description of Artificial Sequence: Synthetic oligonucleotide
  Antisense strand to SEQ ID NO: 1142834
uaccucaaaguguuccaac

SEQ ID NO: 1142836 - RNA, 19 nt, Artificial Sequence
  Description of Artificial Sequence: Synthetic oligonucleotide
  Sense strand starting at position 2773 of SEQ ID NO: 916262
ugcaaaugacagugcuuua

SEQ ID NO: 1142837 - RNA, 19 nt, Artificial Sequence
  Description of Artificial Sequence: Synthetic oligonucleotide
  Antisense strand to SEQ ID NO: 1142836
uaaagcacugucauuugca

SEQ ID NO: 1142838 - RNA, 19 nt, Artificial Sequence
  Description of Artificial Sequence: Synthetic oligonucleotide
  Sense strand starting at position 2776 of SEQ ID NO: 916262
aaaugacagugcuuuauag

SEQ ID NO: 1142839 - RNA, 19 nt, Artificial Sequence
  Description of Artificial Sequence: Synthetic oligonucleotide
  Antisense strand to SEQ ID NO: 1142838
cuauaaagcacugucauuu

SEQ ID NO: 1142840 - RNA, 19 nt, Artificial Sequence
  Description of Artificial Sequence: Synthetic oligonucleotide
  Sense strand starting at position 2792 of SEQ ID NO: 916262
uagugugugccauccgcua

SEQ ID NO: 1142841 - RNA, 19 nt, Artificial Sequence
  Description of Artificial Sequence: Synthetic oligonucleotide
  Antisense strand to SEQ ID NO: 1142840
uagcggauggcacacacua

SEQ ID NO: 1142842 - RNA, 19 nt, Artificial Sequence
  Description of Artificial Sequence: Synthetic oligonucleotide
  Sense strand starting at position 2837 of SEQ ID NO: 916262
cguucucgucuguucaaga

SEQ ID NO: 1142843 - RNA, 19 nt, Artificial Sequence
  Description of Artificial Sequence: Synthetic oligonucleotide
  Antisense strand to SEQ ID NO: 1142842
ucuugaacagacgagaacg

SEQ ID NO: 1142844 - RNA, 19 nt, Artificial Sequence
  Description of Artificial Sequence: Synthetic oligonucleotide
  Sense strand starting at position 2842 of SEQ ID NO: 916262
ucgucuguucaagaaguug

SEQ ID NO: 1142845 - RNA, 19 nt, Artificial Sequence
  Description of Artificial Sequence: Synthetic oligonucleotide
  Antisense strand to SEQ ID NO: 1142844
caacuucuugaacagacga

SEQ ID NO: 1142846 - RNA, 19 nt, Artificial Sequence
  Description of Artificial Sequence: Synthetic oligonucleotide
  Sense strand starting at position 3063 of SEQ ID NO: 916262
ggaccacaugugugcauua

SEQ ID NO: 1142847 - RNA, 19 nt, Artificial Sequence
  Description of Artificial Sequence: Synthetic oligonucleotide
  Antisense strand to SEQ ID NO: 1142846
uaaugcacacauguggucc

SEQ ID NO: 1142848 - RNA, 19 nt, Artificial Sequence
  Description of Artificial Sequence: Synthetic oligonucleotide
  Sense strand starting at position 3068 of SEQ ID NO: 916262
acaugugugcauuaccaca

SEQ ID NO: 1142849 - RNA, 19 nt, Artificial Sequence
  Description of Artificial Sequence: Synthetic oligonucleotide
  Antisense strand to SEQ ID NO: 1142848
ugugguaaugcacacaugu

SEQ ID NO: 1142850 - RNA, 19 nt, Artificial Sequence
  Description of Artificial Sequence: Synthetic oligonucleotide
  Sense strand starting at position 3650 of SEQ ID NO: 916262
gauagugaggacuaguugu

SEQ ID NO: 1142851 - RNA, 19 nt, Artificial Sequence
  Description of Artificial Sequence: Synthetic oligonucleotide
  Antisense strand to SEQ ID NO: 1142850
acaacuaguccucacuauc

SEQ ID NO: 1142852 - RNA, 19 nt, Artificial Sequence
  Description of Artificial Sequence: Synthetic oligonucleotide
  Sense strand starting at position 3694 of SEQ ID NO: 916262
ucugaaucaccaugucuag

SEQ ID NO: 1142853 - RNA, 19 nt, Artificial Sequence
  Description of Artificial Sequence: Synthetic oligonucleotide
  Antisense strand to SEQ ID NO: 1142852
cuagacauggugauucaga

SEQ ID NO: 1142854 - RNA, 19 nt, Artificial Sequence
  Description of Artificial Sequence: Synthetic oligonucleotide
  Sense strand starting at position 3703 of SEQ ID NO: 916262
ccaugucuagggugaguuu

SEQ ID NO: 1142855 - RNA, 19 nt, Artificial Sequence
  Description of Artificial Sequence: Synthetic oligonucleotide
  Antisense strand to SEQ ID NO: 1142854
aaacucacccuagacaugg

SEQ ID NO: 1142856 - RNA, 19 nt, Artificial Sequence
  Description of Artificial Sequence: Synthetic oligonucleotide
  Sense strand starting at position 3706 of SEQ ID NO: 916262
ugucuagggugaguuucau

SEQ ID NO: 1142857 - RNA, 19 nt, Artificial Sequence
  Description of Artificial Sequence: Synthetic oligonucleotide
  Antisense strand to SEQ ID NO: 1142856
augaaacucacccuagaca

SEQ ID NO: 1142858 - RNA, 19 nt, Artificial Sequence
  Description of Artificial Sequence: Synthetic oligonucleotide
  Sense strand starting at position 3738 of SEQ ID NO: 916262
agacgucaagucugaggau

SEQ ID NO: 1142859 - RNA, 19 nt, Artificial Sequence
  Description of Artificial Sequence: Synthetic oligonucleotide
  Antisense strand to SEQ ID NO: 1142858
auccucagacuugacgucu

SEQ ID NO: 1142860 - RNA, 19 nt, Artificial Sequence
  Description of Artificial Sequence: Synthetic oligonucleotide
  Sense strand starting at position 3745 of SEQ ID NO: 916262
aagucugaggauggugaaa

SEQ ID NO: 1142861 - RNA, 19 nt, Artificial Sequence
  Description of Artificial Sequence: Synthetic oligonucleotide
  Antisense strand to SEQ ID NO: 1142860
uuucaccauccucagacuu

SEQ ID NO: 1142862 - RNA, 19 nt, Artificial Sequence
  Description of Artificial Sequence: Synthetic oligonucleotide
  Sense strand starting at position 3841 of SEQ ID NO: 916262
uccuaaugagaaugugaug

SEQ ID NO: 1142863 - RNA, 19 nt, Artificial Sequence
  Description of Artificial Sequence: Synthetic oligonucleotide
  Antisense strand to SEQ ID NO: 1142862
caucacauucucauuagga

SEQ ID NO: 1142864 - RNA, 19 nt, Artificial Sequence
  Description of Artificial Sequence: Synthetic oligonucleotide
  Sense strand starting at position 3847 of SEQ ID NO: 916262
ugagaaugugaugagugua

SEQ ID NO: 1142865 - RNA, 19 nt, Artificial Sequence
  Description of Artificial Sequence: Synthetic oligonucleotide
  Antisense strand to SEQ ID NO: 1142864
uacacucaucacauucuca

SEQ ID NO: 1142866 - RNA, 19 nt, Artificial Sequence
  Description of Artificial Sequence: Synthetic oligonucleotide
  Sense strand starting at position 3884 of SEQ ID NO: 916262
cacuguucucuggauggua

SEQ ID NO: 1142867 - RNA, 19 nt, Artificial Sequence
  Description of Artificial Sequence: Synthetic oligonucleotide
  Antisense strand to SEQ ID NO: 1142866
uaccauccagagaacagug

SEQ ID NO: 1142868 - RNA, 19 nt, Artificial Sequence
  Description of Artificial Sequence: Synthetic oligonucleotide
  Sense strand starting at position 41 of SEQ ID NO: 916263
cgcaacuagccacagauua

SEQ ID NO: 1142869 - RNA, 19 nt, Artificial Sequence
  Description of Artificial Sequence: Synthetic oligonucleotide
  Antisense strand to SEQ ID NO: 1142868
uaaucuguggcuaguugcg

SEQ ID NO: 1142870 - RNA, 19 nt, Artificial Sequence
  Description of Artificial Sequence: Synthetic oligonucleotide
  Sense strand starting at position 87 of SEQ ID NO: 916263
aaggaagcuuaugugaauu

SEQ ID NO: 1142871 - RNA, 19 nt, Artificial Sequence
  Description of Artificial Sequence: Synthetic oligonucleotide
  Antisense strand to SEQ ID NO: 1142870
aauucacauaagcuuccuu

SEQ ID NO: 1142872 - RNA, 19 nt, Artificial Sequence
  Description of Artificial Sequence: Synthetic oligonucleotide
  Sense strand starting at position 130 of SEQ ID NO: 916263
ugugcuguacaauauauaa

SEQ ID NO: 1142873 - RNA, 19 nt, Artificial Sequence
  Description of Artificial Sequence: Synthetic oligonucleotide
  Antisense strand to SEQ ID NO: 1142872
uuauauauuguacagcaca

SEQ ID NO: 1142874 - RNA, 19 nt, Artificial Sequence
  Description of Artificial Sequence: Synthetic oligonucleotide
  Sense strand starting at position 242 of SEQ ID NO: 916263
uggauaauagcccagaugu

SEQ ID NO: 1142875 - RNA, 19 nt, Artificial Sequence
  Description of Artificial Sequence: Synthetic oligonucleotide
  Antisense strand to SEQ ID NO: 1142874
acaucugggcuauuaucca

SEQ ID NO: 1142876 - RNA, 19 nt, Artificial Sequence
  Description of Artificial Sequence: Synthetic oligonucleotide
  Sense strand starting at position 244 of SEQ ID NO: 916263
gauaauagcccagauguuu

SEQ ID NO: 1142877 - RNA, 19 nt, Artificial Sequence
  Description of Artificial Sequence: Synthetic oligonucleotide
  Antisense strand to SEQ ID NO: 1142876
aaacaucugggcuauuauc

SEQ ID NO: 1142878 - RNA, 19 nt, Artificial Sequence
  Description of Artificial Sequence: Synthetic oligonucleotide
  Sense strand starting at position 349 of SEQ ID NO: 916263
cuuguugccauggauaaug

SEQ ID NO: 1142879 - RNA, 19 nt, Artificial Sequence
  Description of Artificial Sequence: Synthetic oligonucleotide
  Antisense strand to SEQ ID NO: 1142878
cauuauccauggcaacaag

SEQ ID NO: 1142880 - RNA, 19 nt, Artificial Sequence
  Description of Artificial Sequence: Synthetic oligonucleotide
  Sense strand starting at position 351 of SEQ ID NO: 916263
uguugccauggauaaugua

SEQ ID NO: 1142881 - RNA, 19 nt, Artificial Sequence
  Description of Artificial Sequence: Synthetic oligonucleotide
  Antisense strand to SEQ ID NO: 1142880
uacauuauccauggcaaca

SEQ ID NO: 1142882 - RNA, 19 nt, Artificial Sequence
  Description of Artificial Sequence: Synthetic oligonucleotide
  Sense strand starting at position 474 of SEQ ID NO: 916263
ucacacaucugagucuuua

SEQ ID NO: 1142883 - RNA, 19 nt, Artificial Sequence
  Description of Artificial Sequence: Synthetic oligonucleotide
  Antisense strand to SEQ ID NO: 1142882
uaaagacucagauguguga

SEQ ID NO: 1142884 - RNA, 19 nt, Artificial Sequence
  Description of Artificial Sequence: Synthetic oligonucleotide
  Sense strand starting at position 478 of SEQ ID NO: 916263
acaucugagucuuuacuca

SEQ ID NO: 1142885 - RNA, 19 nt, Artificial Sequence
  Description of Artificial Sequence: Synthetic oligonucleotide
  Antisense strand to SEQ ID NO: 1142884
ugaguaaagacucagaugu

SEQ ID NO: 1142886 - RNA, 19 nt, Artificial Sequence
  Description of Artificial Sequence: Synthetic oligonucleotide
  Sense strand starting at position 482 of SEQ ID NO: 916263
cugagucuuuacucagaau

SEQ ID NO: 1142887 - RNA, 19 nt, Artificial Sequence
  Description of Artificial Sequence: Synthetic oligonucleotide
  Antisense strand to SEQ ID NO: 1142886
auucugaguaaagacucag

SEQ ID NO: 1142888 - RNA, 19 nt, Artificial Sequence
  Description of Artificial Sequence: Synthetic oligonucleotide
  Sense strand starting at position 582 of SEQ ID NO: 916263
agaagugauugggcuuuau

SEQ ID NO: 1142889 - RNA, 19 nt, Artificial Sequence
  Description of Artificial Sequence: Synthetic oligonucleotide
  Antisense strand to SEQ ID NO: 1142888
auaaagcccaaucacuucu

SEQ ID NO: 1142890 - RNA, 19 nt, Artificial Sequence
  Description of Artificial Sequence: Synthetic oligonucleotide
  Sense strand starting at position 594 of SEQ ID NO: 916263
gcuuuauggcuuuaaugag

SEQ ID NO: 1142891 - RNA, 19 nt, Artificial Sequence
  Description of Artificial Sequence: Synthetic oligonucleotide
  Antisense strand to SEQ ID NO: 1142890
cucauuaaagccauaaagc

SEQ ID NO: 1142892 - RNA, 19 nt, Artificial Sequence
  Description of Artificial Sequence: Synthetic oligonucleotide
  Sense strand starting at position 619 of SEQ ID NO: 916263
aguccugugaaucaguuua

SEQ ID NO: 1142893 - RNA, 19 nt, Artificial Sequence
  Description of Artificial Sequence: Synthetic oligonucleotide
  Antisense strand to SEQ ID NO: 1142892
uaaacugauucacaggacu

SEQ ID NO: 1142894 - RNA, 19 nt, Artificial Sequence
  Description of Artificial Sequence: Synthetic oligonucleotide
  Sense strand starting at position 621 of SEQ ID NO: 916263
uccugugaaucaguuuaag

SEQ ID NO: 1142895 - RNA, 19 nt, Artificial Sequence
  Description of Artificial Sequence: Synthetic oligonucleotide
  Antisense strand to SEQ ID NO: 1142894
cuuaaacugauucacagga

SEQ ID NO: 1142896 - RNA, 19 nt, Artificial Sequence
  Description of Artificial Sequence: Synthetic oligonucleotide
  Sense strand starting at position 624 of SEQ ID NO: 916263
ugugaaucaguuuaagauu

SEQ ID NO: 1142897 - RNA, 19 nt, Artificial Sequence
  Description of Artificial Sequence: Synthetic oligonucleotide
  Antisense strand to SEQ ID NO: 1142896
aaucuuaaacugauucaca

SEQ ID NO: 1142898 - RNA, 19 nt, Artificial Sequence
  Description of Artificial Sequence: Synthetic oligonucleotide
  Sense strand starting at position 817 of SEQ ID NO: 916263
cuuuaaccagugugaacau

SEQ ID NO: 1142899 - RNA, 19 nt, Artificial Sequence
  Description of Artificial Sequence: Synthetic oligonucleotide
  Antisense strand to SEQ ID NO: 1142898
auguucacacugguuaaag

SEQ ID NO: 1142900 - RNA, 19 nt, Artificial Sequence
  Description of Artificial Sequence: Synthetic oligonucleotide
  Sense strand starting at position 956 of SEQ ID NO: 916263
ucugcauuucuaugcuuga

SEQ ID NO: 1142901 - RNA, 19 nt, Artificial Sequence
  Description of Artificial Sequence: Synthetic oligonucleotide
  Antisense strand to SEQ ID NO: 1142900
ucaagcauagaaaugcaga

SEQ ID NO: 1142902 - RNA, 19 nt, Artificial Sequence
  Description of Artificial Sequence: Synthetic oligonucleotide
  Sense strand starting at position 957 of SEQ ID NO: 916263
cugcauuucuaugcuugaa

SEQ ID NO: 1142903 - RNA, 19 nt, Artificial Sequence
  Description of Artificial Sequence: Synthetic oligonucleotide
  Antisense strand to SEQ ID NO: 1142902
uucaagcauagaaaugcag

SEQ ID NO: 1142904 - RNA, 19 nt, Artificial Sequence
  Description of Artificial Sequence: Synthetic oligonucleotide
  Sense strand starting at position 959 of SEQ ID NO: 916263
gcauuucuaugcuugaacu

SEQ ID NO: 1142905 - RNA, 19 nt, Artificial Sequence
  Description of Artificial Sequence: Synthetic oligonucleotide
  Antisense strand to SEQ ID NO: 1142904
aguucaagcauagaaaugc

SEQ ID NO: 1142906 - RNA, 19 nt, Artificial Sequence
  Description of Artificial Sequence: Synthetic oligonucleotide
  Sense strand starting at position 1191 of SEQ ID NO: 916263
ucuacacgaucuguagaga

SEQ ID NO: 1142907 - RNA, 19 nt, Artificial Sequence
  Description of Artificial Sequence: Synthetic oligonucleotide
  Antisense strand to SEQ ID NO: 1142906
ucucuacagaucguguaga

SEQ ID NO: 1142908 - RNA, 19 nt, Artificial Sequence
  Description of Artificial Sequence: Synthetic oligonucleotide
  Sense strand starting at position 1430 of SEQ ID NO: 916263
uggcuuuggagacgaagaa

SEQ ID NO: 1142909 - RNA, 19 nt, Artificial Sequence
  Description of Artificial Sequence: Synthetic oligonucleotide
  Antisense strand to SEQ ID NO: 1142908
uucuucgucuccaaagcca

SEQ ID NO: 1142910 - RNA, 19 nt, Artificial Sequence
  Description of Artificial Sequence: Synthetic oligonucleotide
  Sense strand starting at position 1529 of SEQ ID NO: 916263
acaucauaccucuggucau

SEQ ID NO: 1142911 - RNA, 19 nt, Artificial Sequence
  Description of Artificial Sequence: Synthetic oligonucleotide
  Antisense strand to SEQ ID NO: 1142910
augaccagagguaugaugu

SEQ ID NO: 1142912 - RNA, 19 nt, Artificial Sequence
  Description of Artificial Sequence: Synthetic oligonucleotide
  Sense strand starting at position 1532 of SEQ ID NO: 916263
ucauaccucuggucaugau

SEQ ID NO: 1142913 - RNA, 19 nt, Artificial Sequence
  Description of Artificial Sequence: Synthetic oligonucleotide
  Antisense strand to SEQ ID NO: 1142912
aucaugaccagagguauga

SEQ ID NO: 1142914 - RNA, 19 nt, Artificial Sequence
  Description of Artificial Sequence: Synthetic oligonucleotide
  Sense strand starting at position 1612 of SEQ ID NO: 916263
agaauugucguccaggaga

SEQ ID NO: 1142915 - RNA, 19 nt, Artificial Sequence
  Description of Artificial Sequence: Synthetic oligonucleotide
  Antisense strand to SEQ ID NO: 1142914
ucuccuggacgacaauucu

SEQ ID NO: 1142916 - RNA, 19 nt, Artificial Sequence
  Description of Artificial Sequence: Synthetic oligonucleotide
  Sense strand starting at position 1614 of SEQ ID NO: 916263
aauugucguccaggagaag

SEQ ID NO: 1142917 - RNA, 19 nt, Artificial Sequence
  Description of Artificial Sequence: Synthetic oligonucleotide
  Antisense strand to SEQ ID NO: 1142916
cuucuccuggacgacaauu

SEQ ID NO: 1142918 - RNA, 19 nt, Artificial Sequence
  Description of Artificial Sequence: Synthetic oligonucleotide
  Sense strand starting at position 1674 of SEQ ID NO: 916263
agcuaagaggcaugagaaa

SEQ ID NO: 1142919 - RNA, 19 nt, Artificial Sequence
  Description of Artificial Sequence: Synthetic oligonucleotide
  Antisense strand to SEQ ID NO: 1142918
uuucucaugccucuuagcu

SEQ ID NO: 1142920 - RNA, 19 nt, Artificial Sequence
  Description of Artificial Sequence: Synthetic oligonucleotide
  Sense strand starting at position 1743 of SEQ ID NO: 916263
uugauugagcucgaugaug

SEQ ID NO: 1142921 - RNA, 19 nt, Artificial Sequence
  Description of Artificial Sequence: Synthetic oligonucleotide
  Antisense strand to SEQ ID NO: 1142920
caucaucgagcucaaucaa

SEQ ID NO: 1142922 - RNA, 19 nt, Artificial Sequence
  Description of Artificial Sequence: Synthetic oligonucleotide
  Sense strand starting at position 1745 of SEQ ID NO: 916263
gauugagcucgaugaugaa

SEQ ID NO: 1142923 - RNA, 19 nt, Artificial Sequence
  Description of Artificial Sequence: Synthetic oligonucleotide
  Antisense strand to SEQ ID NO: 1142922
uucaucaucgagcucaauc

SEQ ID NO: 1142924 - RNA, 19 nt, Artificial Sequence
  Description of Artificial Sequence: Synthetic oligonucleotide
  Sense strand starting at position 1847 of SEQ ID NO: 916263
ggaucuuucgcaugaggaa

SEQ ID NO: 1142925 - RNA, 19 nt, Artificial Sequence
  Description of Artificial Sequence: Synthetic oligonucleotide
  Antisense strand to SEQ ID NO: 1142924
uuccucaugcgaaagaucc

SEQ ID NO: 1142926 - RNA, 19 nt, Artificial Sequence
  Description of Artificial Sequence: Synthetic oligonucleotide
  Sense strand starting at position 1848 of SEQ ID NO: 916263
gaucuuucgcaugaggaag

SEQ ID NO: 1142927 - RNA, 19 nt, Artificial Sequence
  Description of Artificial Sequence: Synthetic oligonucleotide
  Antisense strand to SEQ ID NO: 1142926
cuuccucaugcgaaagauc

SEQ ID NO: 1142928 - RNA, 19 nt, Artificial Sequence
  Description of Artificial Sequence: Synthetic oligonucleotide
  Sense strand starting at position 1874 of SEQ ID NO: 916263
cuaagaguagcagaauugu

SEQ ID NO: 1142929 - RNA, 19 nt, Artificial Sequence
  Description of Artificial Sequence: Synthetic oligonucleotide
  Antisense strand to SEQ ID NO: 1142928
acaauucugcuacucuuag

SEQ ID NO: 1142930 - RNA, 19 nt, Artificial Sequence
  Description of Artificial Sequence: Synthetic oligonucleotide
  Sense strand starting at position 1946 of SEQ ID NO: 916263
cggcgucacagagaagaaa

SEQ ID NO: 1142931 - RNA, 19 nt, Artificial Sequence
  Description of Artificial Sequence: Synthetic oligonucleotide
  Antisense strand to SEQ ID NO: 1142930
uuucuucucugugacgccg

SEQ ID NO: 1142932 - RNA, 19 nt, Artificial Sequence
  Description of Artificial Sequence: Synthetic oligonucleotide
  Sense strand starting at position 2585 of SEQ ID NO: 916263
gcaugauggcaugcgcuua

SEQ ID NO: 1142933 - RNA, 19 nt, Artificial Sequence
  Description of Artificial Sequence: Synthetic oligonucleotide
  Antisense strand to SEQ ID NO: 1142932
uaagcgcaugccaucaugc

SEQ ID NO: 1142934 - RNA, 19 nt, Artificial Sequence
  Description of Artificial Sequence: Synthetic oligonucleotide
  Sense strand starting at position 2926 of SEQ ID NO: 916263
ucaagagccugaguuacau

SEQ ID NO: 1142935 - RNA, 19 nt, Artificial Sequence
  Description of Artificial Sequence: Synthetic oligonucleotide
  Antisense strand to SEQ ID NO: 1142934
auguaacucaggcucuuga

SEQ ID NO: 1142936 - RNA, 19 nt, Artificial Sequence
  Description of Artificial Sequence: Synthetic oligonucleotide
  Sense strand starting at position 3180 of SEQ ID NO: 916263
uguccauuuguguaugcua

SEQ ID NO: 1142937 - RNA, 19 nt, Artificial Sequence
  Description of Artificial Sequence: Synthetic oligonucleotide
  Antisense strand to SEQ ID NO: 1142936
uagcauacacaaauggaca

SEQ ID NO: 1142938 - RNA, 19 nt, Artificial Sequence
  Description of Artificial Sequence: Synthetic oligonucleotide
  Sense strand starting at position 3182 of SEQ ID NO: 916263
uccauuuguguaugcuaau

SEQ ID NO: 1142939 - RNA, 19 nt, Artificial Sequence
  Description of Artificial Sequence: Synthetic oligonucleotide
  Antisense strand to SEQ ID NO: 1142938
auuagcauacacaaaugga

SEQ ID NO: 1142940 - RNA, 19 nt, Artificial Sequence
  Description of Artificial Sequence: Synthetic oligonucleotide
  Sense strand starting at position 3188 of SEQ ID NO: 916263
uguguaugcuaauuuccaa

SEQ ID NO: 1142941 - RNA, 19 nt, Artificial Sequence
  Description of Artificial Sequence: Synthetic oligonucleotide
  Antisense strand to SEQ ID NO: 1142940
uuggaaauuagcauacaca

SEQ ID NO: 1142942 - RNA, 19 nt, Artificial Sequence
  Description of Artificial Sequence: Synthetic oligonucleotide
  Sense strand starting at position 3259 of SEQ ID NO: 916263
guuugcaugauugauggaa

SEQ ID NO: 1142943 - RNA, 19 nt, Artificial Sequence
  Description of Artificial Sequence: Synthetic oligonucleotide
  Antisense strand to SEQ ID NO: 1142942
uuccaucaaucaugcaaac

SEQ ID NO: 1142944 - RNA, 19 nt, Artificial Sequence
  Description of Artificial Sequence: Synthetic oligonucleotide
  Sense strand starting at position 3543 of SEQ ID NO: 916263
gaaaguccaugucuugacu

SEQ ID NO: 1142945 - RNA, 19 nt, Artificial Sequence
  Description of Artificial Sequence: Synthetic oligonucleotide
  Antisense strand to SEQ ID NO: 1142944
agucaagacauggacuuuc

SEQ ID NO: 1142946 - RNA, 19 nt, Artificial Sequence
  Description of Artificial Sequence: Synthetic oligonucleotide
  Sense strand starting at position 3751 of SEQ ID NO: 916263
gcuguagugcuggcaaagu

SEQ ID NO: 1142947 - RNA, 19 nt, Artificial Sequence
  Description of Artificial Sequence: Synthetic oligonucleotide
  Antisense strand to SEQ ID NO: 1142946
acuuugccagcacuacagc

SEQ ID NO: 1142948 - RNA, 19 nt, Artificial Sequence
  Description of Artificial Sequence: Synthetic oligonucleotide
  Sense strand starting at position 312 of SEQ ID NO: 916264
gguuuaguuaccuggcgag

SEQ ID NO: 1142949 - RNA, 19 nt, Artificial Sequence
  Description of Artificial Sequence: Synthetic oligonucleotide
  Antisense strand to SEQ ID NO: 1142948
cucgccagguaacuaaacc

SEQ ID NO: 1142950 - RNA, 19 nt, Artificial Sequence
  Description of Artificial Sequence: Synthetic oligonucleotide
  Sense strand starting at position 324 of SEQ ID NO: 916264
uggcgaguggguugcuaua

SEQ ID NO: 1142951 - RNA, 19 nt, Artificial Sequence
  Description of Artificial Sequence: Synthetic oligonucleotide
  Antisense strand to SEQ ID NO: 1142950
uauagcaacccacucgcca

SEQ ID NO: 1142952 - RNA, 19 nt, Artificial Sequence
  Description of Artificial Sequence: Synthetic oligonucleotide
  Sense strand starting at position 326 of SEQ ID NO: 916264
gcgaguggguugcuauaaa

SEQ ID NO: 1142953 - RNA, 19 nt, Artificial Sequence
  Description of Artificial Sequence: Synthetic oligonucleotide
  Antisense strand to SEQ ID NO: 1142952
uuuauagcaacccacucgc

SEQ ID NO: 1142954 - RNA, 19 nt, Artificial Sequence
  Description of Artificial Sequence: Synthetic oligonucleotide
  Sense strand starting at position 400 of SEQ ID NO: 916264
gcguuccugccaugagaug

SEQ ID NO: 1142955 - RNA, 19 nt, Artificial Sequence
  Description of Artificial Sequence: Synthetic oligonucleotide
  Antisense strand to SEQ ID NO: 1142954
caucucauggcaggaacgc

SEQ ID NO: 1142956 - RNA, 19 nt, Artificial Sequence
  Description of Artificial Sequence: Synthetic oligonucleotide
  Sense strand starting at position 710 of SEQ ID NO: 916264
ggaucuccugcugaagcau

SEQ ID NO: 1142957 - RNA, 19 nt, Artificial Sequence
  Description of Artificial Sequence: Synthetic oligonucleotide
  Antisense strand to SEQ ID NO: 1142956
augcuucagcaggagaucc

SEQ ID NO: 1142958 - RNA, 19 nt, Artificial Sequence
  Description of Artificial Sequence: Synthetic oligonucleotide
  Sense strand starting at position 728 of SEQ ID NO: 916264
uaauuuccuuguuagagga

SEQ ID NO: 1142959 - RNA, 19 nt, Artificial Sequence
  Description of Artificial Sequence: Synthetic oligonucleotide
  Antisense strand to SEQ ID NO: 1142958
uccucuaacaaggaaauua

SEQ ID NO: 1142960 - RNA, 19 nt, Artificial Sequence
  Description of Artificial Sequence: Synthetic oligonucleotide
  Sense strand starting at position 732 of SEQ ID NO: 916264
uuccuuguuagaggaagua

SEQ ID NO: 1142961 - RNA, 19 nt, Artificial Sequence
  Description of Artificial Sequence: Synthetic oligonucleotide
  Antisense strand to SEQ ID NO: 1142960
uacuuccucuaacaaggaa

SEQ ID NO: 1142962 - RNA, 19 nt, Artificial Sequence
  Description of Artificial Sequence: Synthetic oligonucleotide
  Sense strand starting at position 748 of SEQ ID NO: 916264
guaacauauugcuuuggga

SEQ ID NO: 1142963 - RNA, 19 nt, Artificial Sequence
  Description of Artificial Sequence: Synthetic oligonucleotide
  Antisense strand to SEQ ID NO: 1142962
ucccaaagcaauauguuac

SEQ ID NO: 1142964 - RNA, 19 nt, Artificial Sequence
  Description of Artificial Sequence: Synthetic oligonucleotide
  Sense strand starting at position 811 of SEQ ID NO: 916264
uauagugaguuaugauuac

SEQ ID NO: 1142965 - RNA, 19 nt, Artificial Sequence
  Description of Artificial Sequence: Synthetic oligonucleotide
  Antisense strand to SEQ ID NO: 1142964
guaaucauaacucacuaua

SEQ ID NO: 1142966 - RNA, 19 nt, Artificial Sequence
  Description of Artificial Sequence: Synthetic oligonucleotide
  Sense strand starting at position 906 of SEQ ID NO: 916264
gggaguaacaucgguuccu

SEQ ID NO: 1142967 - RNA, 19 nt, Artificial Sequence
  Description of Artificial Sequence: Synthetic oligonucleotide
  Antisense strand to SEQ ID NO: 1142966
aggaaccgauguuacuccc

SEQ ID NO: 1142968 - RNA, 19 nt, Artificial Sequence
  Description of Artificial Sequence: Synthetic oligonucleotide
  Sense strand starting at position 977 of SEQ ID NO: 916264
gacuuaauggaauguugcu

SEQ ID NO: 1142969 - RNA, 19 nt, Artificial Sequence
  Description of Artificial Sequence: Synthetic oligonucleotide
  Antisense strand to SEQ ID NO: 1142968
agcaacauuccauuaaguc

SEQ ID NO: 1142970 - RNA, 19 nt, Artificial Sequence
  Description of Artificial Sequence: Synthetic oligonucleotide
  Sense strand starting at position 1026 of SEQ ID NO: 916264
caggguugcugggaggaau

SEQ ID NO: 1142971 - RNA, 19 nt, Artificial Sequence
  Description of Artificial Sequence: Synthetic oligonucleotide
  Antisense strand to SEQ ID NO: 1142970
auuccucccagcaacccug

SEQ ID NO: 1142972 - RNA, 19 nt, Artificial Sequence
  Description of Artificial Sequence: Synthetic oligonucleotide
  Sense strand starting at position 1084 of SEQ ID NO: 916264
ggcagugugcccagggaau

SEQ ID NO: 1142973 - RNA, 19 nt, Artificial Sequence
  Description of Artificial Sequence: Synthetic oligonucleotide
  Antisense strand to SEQ ID NO: 1142972
auucccugggcacacugcc

SEQ ID NO: 1142974 - RNA, 19 nt, Artificial Sequence
  Description of Artificial Sequence: Synthetic oligonucleotide
  Sense strand starting at position 1444 of SEQ ID NO: 916264
aggccauaagucuguaaug

SEQ ID NO: 1142975 - RNA, 19 nt, Artificial Sequence
  Description of Artificial Sequence: Synthetic oligonucleotide
  Antisense strand to SEQ ID NO: 1142974
cauuacagacuuauggccu

SEQ ID NO: 1142976 - RNA, 19 nt, Artificial Sequence
  Description of Artificial Sequence: Synthetic oligonucleotide
  Sense strand starting at position 1446 of SEQ ID NO: 916264
gccauaagucuguaaugga

SEQ ID NO: 1142977 - RNA, 19 nt, Artificial Sequence
  Description of Artificial Sequence: Synthetic oligonucleotide
  Antisense strand to SEQ ID NO: 1142976
uccauuacagacuuauggc

SEQ ID NO: 1142978 - RNA, 19 nt, Artificial Sequence
  Description of Artificial Sequence: Synthetic oligonucleotide
  Sense strand starting at position 1449 of SEQ ID NO: 916264
auaagucuguaauggacaa

SEQ ID NO: 1142979 - RNA, 19 nt, Artificial Sequence
  Description of Artificial Sequence: Synthetic oligonucleotide
  Antisense strand to SEQ ID NO: 1142978
uuguccauuacagacuuau

SEQ ID NO: 1142980 - RNA, 19 nt, Artificial Sequence
  Description of Artificial Sequence: Synthetic oligonucleotide
  Sense strand starting at position 1604 of SEQ ID NO: 916264
agcacuuuccugcaagaga

SEQ ID NO: 1142981 - RNA, 19 nt, Artificial Sequence
  Description of Artificial Sequence: Synthetic oligonucleotide
  Antisense strand to SEQ ID NO: 1142980
ucucuugcaggaaagugcu

SEQ ID NO: 1142982 - RNA, 19 nt, Artificial Sequence
  Description of Artificial Sequence: Synthetic oligonucleotide
  Sense strand starting at position 1631 of SEQ ID NO: 916264
ucaagacaauuaggauuaa

SEQ ID NO: 1142983 - RNA, 19 nt, Artificial Sequence
  Description of Artificial Sequence: Synthetic oligonucleotide
  Antisense strand to SEQ ID NO: 1142982
uuaauccuaauugucuuga

SEQ ID NO: 1142984 - RNA, 19 nt, Artificial Sequence
  Description of Artificial Sequence: Synthetic oligonucleotide
  Sense strand starting at position 1655 of SEQ ID NO: 916264
guagaagucccauagcuug

SEQ ID NO: 1142985 - RNA, 19 nt, Artificial Sequence
  Description of Artificial Sequence: Synthetic oligonucleotide
  Antisense strand to SEQ ID NO: 1142984
caagcuaugggacuucuac

SEQ ID NO: 1142986 - RNA, 19 nt, Artificial Sequence
  Description of Artificial Sequence: Synthetic oligonucleotide
  Sense strand starting at position 1671 of SEQ ID NO: 916264
uugggccucccuggauauu

SEQ ID NO: 1142987 - RNA, 19 nt, Artificial Sequence
  Description of Artificial Sequence: Synthetic oligonucleotide
  Antisense strand to SEQ ID NO: 1142986
aauauccagggaggcccaa

SEQ ID NO: 1142988 - RNA, 19 nt, Artificial Sequence
  Description of Artificial Sequence: Synthetic oligonucleotide
  Sense strand starting at position 1687 of SEQ ID NO: 916264
auuggcaacuggucuagaa

SEQ ID NO: 1142989 - RNA, 19 nt, Artificial Sequence
  Description of Artificial Sequence: Synthetic oligonucleotide
  Antisense strand to SEQ ID NO: 1142988
uucuagaccaguugccaau

SEQ ID NO: 1142990 - RNA, 19 nt, Artificial Sequence
  Description of Artificial Sequence: Synthetic oligonucleotide
  Sense strand starting at position 1689 of SEQ ID NO: 916264
uggcaacuggucuagaaca

SEQ ID NO: 1142991 - RNA, 19 nt, Artificial Sequence
  Description of Artificial Sequence: Synthetic oligonucleotide
  Antisense strand to SEQ ID NO: 1142990
uguucuagaccaguugcca

SEQ ID NO: 1142992 - RNA, 19 nt, Artificial Sequence
  Description of Artificial Sequence: Synthetic oligonucleotide
  Sense strand starting at position 1691 of SEQ ID NO: 916264
gcaacuggucuagaacauu

SEQ ID NO: 1142993 - RNA, 19 nt, Artificial Sequence
  Description of Artificial Sequence: Synthetic oligonucleotide
  Antisense strand to SEQ ID NO: 1142992
aauguucuagaccaguugc

SEQ ID NO: 1142994 - RNA, 19 nt, Artificial Sequence
  Description of Artificial Sequence: Synthetic oligonucleotide
  Sense strand starting at position 1735 of SEQ ID NO: 916264
agcucagucucaucacaga

SEQ ID NO: 1142995 - RNA, 19 nt, Artificial Sequence
  Description of Artificial Sequence: Synthetic oligonucleotide
  Antisense strand to SEQ ID NO: 1142994
ucugugaugagacugagcu

SEQ ID NO: 1142996 - RNA, 19 nt, Artificial Sequence
  Description of Artificial Sequence: Synthetic oligonucleotide
  Sense strand starting at position 1738 of SEQ ID NO: 916264
ucagucucaucacagauua

SEQ ID NO: 1142997 - RNA, 19 nt, Artificial Sequence
  Description of Artificial Sequence: Synthetic oligonucleotide
  Antisense strand to SEQ ID NO: 1142996
uaaucugugaugagacuga

SEQ ID NO: 1142998 - RNA, 19 nt, Artificial Sequence
  Description of Artificial Sequence: Synthetic oligonucleotide
  Sense strand starting at position 1751 of SEQ ID NO: 916264
agauuauuggaaugucuuu

SEQ ID NO: 1142999 - RNA, 19 nt, Artificial Sequence
  Description of Artificial Sequence: Synthetic oligonucleotide
  Antisense strand to SEQ ID NO: 1142998
aaagacauuccaauaaucu

SEQ ID NO: 1143000 - RNA, 19 nt, Artificial Sequence
  Description of Artificial Sequence: Synthetic oligonucleotide
  Sense strand starting at position 1756 of SEQ ID NO: 916264
auuggaaugucuuucccau

SEQ ID NO: 1143001 - RNA, 19 nt, Artificial Sequence
  Description of Artificial Sequence: Synthetic oligonucleotide
  Antisense strand to SEQ ID NO: 1143000
augggaaagacauuccaau

SEQ ID NO: 1143002 - RNA, 19 nt, Artificial Sequence
  Description of Artificial Sequence: Synthetic oligonucleotide
  Sense strand starting at position 1866 of SEQ ID NO: 916264
ggaugagccggcugaguuu

SEQ ID NO: 1143003 - RNA, 19 nt, Artificial Sequence
  Description of Artificial Sequence: Synthetic oligonucleotide
  Antisense strand to SEQ ID NO: 1143002
aaacucagccggcucaucc

SEQ ID NO: 1143004 - RNA, 19 nt, Artificial Sequence
  Description of Artificial Sequence: Synthetic oligonucleotide
  Sense strand starting at position 1904 of SEQ ID NO: 916264
uccagugagcccuacagua

SEQ ID NO: 1143005 - RNA, 19 nt, Artificial Sequence
  Description of Artificial Sequence: Synthetic oligonucleotide
  Antisense strand to SEQ ID NO: 1143004
uacuguagggcucacugga

SEQ ID NO: 1143006 - RNA, 19 nt, Artificial Sequence
  Description of Artificial Sequence: Synthetic oligonucleotide
  Sense strand starting at position 2196 of SEQ ID NO: 916264
agaguuuccucugcccacu

SEQ ID NO: 1143007 - RNA, 19 nt, Artificial Sequence
  Description of Artificial Sequence: Synthetic oligonucleotide
  Antisense strand to SEQ ID NO: 1143006
agugggcagaggaaacucu

SEQ ID NO: 1143008 - RNA, 19 nt, Artificial Sequence
  Description of Artificial Sequence: Synthetic oligonucleotide
  Sense strand starting at position 2554 of SEQ ID NO: 916264
ccuuaugaucucugucaua

SEQ ID NO: 1143009 - RNA, 19 nt, Artificial Sequence
  Description of Artificial Sequence: Synthetic oligonucleotide
  Antisense strand to SEQ ID NO: 1143008
uaugacagagaucauaagg

SEQ ID NO: 1143010 - RNA, 19 nt, Artificial Sequence
  Description of Artificial Sequence: Synthetic oligonucleotide
  Sense strand starting at position 2559 of SEQ ID NO: 916264
ugaucucugucauauauug

SEQ ID NO: 1143011 - RNA, 19 nt, Artificial Sequence
  Description of Artificial Sequence: Synthetic oligonucleotide
  Antisense strand to SEQ ID NO: 1143010
caauauaugacagagauca

SEQ ID NO: 1143012 - RNA, 19 nt, Artificial Sequence
  Description of Artificial Sequence: Synthetic oligonucleotide
  Sense strand starting at position 2652 of SEQ ID NO: 916264
ucaguuugcugauccauuu

SEQ ID NO: 1143013 - RNA, 19 nt, Artificial Sequence
  Description of Artificial Sequence: Synthetic oligonucleotide
  Antisense strand to SEQ ID NO: 1143012
aaauggaucagcaaacuga

SEQ ID NO: 1143014 - RNA, 19 nt, Artificial Sequence
  Description of Artificial Sequence: Synthetic oligonucleotide
  Sense strand starting at position 3139 of SEQ ID NO: 916264
guuuaaaggcuaggagaau

SEQ ID NO: 1143015 - RNA, 19 nt, Artificial Sequence
  Description of Artificial Sequence: Synthetic oligonucleotide
  Antisense strand to SEQ ID NO: 1143014
auucuccuagccuuuaaac

SEQ ID NO: 1143016 - RNA, 19 nt, Artificial Sequence
  Description of Artificial Sequence: Synthetic oligonucleotide
  Sense strand starting at position 3308 of SEQ ID NO: 916264
gcaguaagauggucagaag

SEQ ID NO: 1143017 - RNA, 19 nt, Artificial Sequence
  Description of Artificial Sequence: Synthetic oligonucleotide
  Antisense strand to SEQ ID NO: 1143016
cuucugaccaucuuacugc

SEQ ID NO: 1143018 - RNA, 19 nt, Artificial Sequence
  Description of Artificial Sequence: Synthetic oligonucleotide
  Sense strand starting at position 3338 of SEQ ID NO: 916264
gcgggacuguccuugagca

SEQ ID NO: 1143019 - RNA, 19 nt, Artificial Sequence
  Description of Artificial Sequence: Synthetic oligonucleotide
  Antisense strand to SEQ ID NO: 1143018
ugcucaaggacagucccgc

SEQ ID NO: 1143020 - RNA, 19 nt, Artificial Sequence
  Description of Artificial Sequence: Synthetic oligonucleotide
  Sense strand starting at position 3340 of SEQ ID NO: 916264
gggacuguccuugagcaga

SEQ ID NO: 1143021 - RNA, 19 nt, Artificial Sequence
  Description of Artificial Sequence: Synthetic oligonucleotide
  Antisense strand to SEQ ID NO: 1143020
ucugcucaaggacaguccc

SEQ ID NO: 1143022 - RNA, 19 nt, Artificial Sequence
  Description of Artificial Sequence: Synthetic oligonucleotide
  Sense strand starting at position 3342 of SEQ ID NO: 916264
gacuguccuugagcagaca

SEQ ID NO: 1143023 - RNA, 19 nt, Artificial Sequence
  Description of Artificial Sequence: Synthetic oligonucleotide
  Antisense strand to SEQ ID NO: 1143022
ugucugcucaaggacaguc

SEQ ID NO: 1143024 - RNA, 19 nt, Artificial Sequence
  Description of Artificial Sequence: Synthetic oligonucleotide
  Sense strand starting at position 3364 of SEQ ID NO: 916264
agagguuacccuggacaca

SEQ ID NO: 1143025 - RNA, 19 nt, Artificial Sequence
  Description of Artificial Sequence: Synthetic oligonucleotide
  Antisense strand to SEQ ID NO: 1143024
uguguccaggguaaccucu

SEQ ID NO: 1143026 - RNA, 19 nt, Artificial Sequence
  Description of Artificial Sequence: Synthetic oligonucleotide
  Sense strand starting at position 3543 of SEQ ID NO: 916264
guuccagauccaugaaccu

SEQ ID NO: 1143027 - RNA, 19 nt, Artificial Sequence
  Description of Artificial Sequence: Synthetic oligonucleotide
  Antisense strand to SEQ ID NO: 1143026
agguucauggaucuggaac

SEQ ID NO: 1143028 - RNA, 19 nt, Artificial Sequence
  Description of Artificial Sequence: Synthetic oligonucleotide
  Sense strand starting at position 438 of SEQ ID NO: 916265
uugugcuuucugggacaaa

SEQ ID NO: 1143029 - RNA, 19 nt, Artificial Sequence
  Description of Artificial Sequence: Synthetic oligonucleotide
  Antisense strand to SEQ ID NO: 1143028
uuugucccagaaagcacaa

SEQ ID NO: 1143030 - RNA, 19 nt, Artificial Sequence
  Description of Artificial Sequence: Synthetic oligonucleotide
  Sense strand starting at position 466 of SEQ ID NO: 916265
augucaaacuugucagcaa

SEQ ID NO: 1143031 - RNA, 19 nt, Artificial Sequence
  Description of Artificial Sequence: Synthetic oligonucleotide
  Antisense strand to SEQ ID NO: 1143030
uugcugacaaguuugacau

SEQ ID NO: 1143032 - RNA, 19 nt, Artificial Sequence
  Description of Artificial Sequence: Synthetic oligonucleotide
  Sense strand starting at position 477 of SEQ ID NO: 916265
gucagcaagucucacuaaa

SEQ ID NO: 1143033 - RNA, 19 nt, Artificial Sequence
  Description of Artificial Sequence: Synthetic oligonucleotide
  Antisense strand to SEQ ID NO: 1143032
uuuagugagacuugcugac

SEQ ID NO: 1143034 - RNA, 19 nt, Artificial Sequence
  Description of Artificial Sequence: Synthetic oligonucleotide
  Sense strand starting at position 554 of SEQ ID NO: 916265
gaugaagguuccugucucu

SEQ ID NO: 1143035 - RNA, 19 nt, Artificial Sequence
  Description of Artificial Sequence: Synthetic oligonucleotide
  Antisense strand to SEQ ID NO: 1143034
agagacaggaaccuucauc

SEQ ID NO: 1143036 - RNA, 19 nt, Artificial Sequence
  Description of Artificial Sequence: Synthetic oligonucleotide
  Sense strand starting at position 574 of SEQ ID NO: 916265
caggguccuugauaaacua

SEQ ID NO: 1143037 - RNA, 19 nt, Artificial Sequence
  Description of Artificial Sequence: Synthetic oligonucleotide
  Antisense strand to SEQ ID NO: 1143036
uaguuuaucaaggacccug

SEQ ID NO: 1143038 - RNA, 19 nt, Artificial Sequence
  Description of Artificial Sequence: Synthetic oligonucleotide
  Sense strand starting at position 689 of SEQ ID NO: 916265
cuguucugugccuuugcua

SEQ ID NO: 1143039 - RNA, 19 nt, Artificial Sequence
  Description of Artificial Sequence: Synthetic oligonucleotide
  Antisense strand to SEQ ID NO: 1143038
uagcaaaggcacagaacag

SEQ ID NO: 1143040 - RNA, 19 nt, Artificial Sequence
  Description of Artificial Sequence: Synthetic oligonucleotide
  Sense strand starting at position 690 of SEQ ID NO: 916265
uguucugugccuuugcuaa

SEQ ID NO: 1143041 - RNA, 19 nt, Artificial Sequence
  Description of Artificial Sequence: Synthetic oligonucleotide
  Antisense strand to SEQ ID NO: 1143040
uuagcaaaggcacagaaca

SEQ ID NO: 1143042 - RNA, 19 nt, Artificial Sequence
  Description of Artificial Sequence: Synthetic oligonucleotide
  Sense strand starting at position 959 of SEQ ID NO: 916265
gguguuguguagguucuga

SEQ ID NO: 1143043 - RNA, 19 nt, Artificial Sequence
  Description of Artificial Sequence: Synthetic oligonucleotide
  Antisense strand to SEQ ID NO: 1143042
ucagaaccuacacaacacc

SEQ ID NO: 1143044 - RNA, 19 nt, Artificial Sequence
  Description of Artificial Sequence: Synthetic oligonucleotide
  Sense strand starting at position 2015 of SEQ ID NO: 916265
cgggucgccucccuuuaua

SEQ ID NO: 1143045 - RNA, 19 nt, Artificial Sequence
  Description of Artificial Sequence: Synthetic oligonucleotide
  Antisense strand to SEQ ID NO: 1143044
uauaaagggaggcgacccg

SEQ ID NO: 1143046 - RNA, 19 nt, Artificial Sequence
  Description of Artificial Sequence: Synthetic oligonucleotide
  Sense strand starting at position 2292 of SEQ ID NO: 916265
uugcgcaagguuugaaauu

SEQ ID NO: 1143047 - RNA, 19 nt, Artificial Sequence
  Description of Artificial Sequence: Synthetic oligonucleotide
  Antisense strand to SEQ ID NO: 1143046
aauuucaaaccuugcgcaa

SEQ ID NO: 1143048 - RNA, 19 nt, Artificial Sequence
  Description of Artificial Sequence: Synthetic oligonucleotide
  Sense strand starting at position 2293 of SEQ ID NO: 916265
ugcgcaagguuugaaauuu

SEQ ID NO: 1143049 - RNA, 19 nt, Artificial Sequence
  Description of Artificial Sequence: Synthetic oligonucleotide
  Antisense strand to SEQ ID NO: 1143048
aaauuucaaaccuugcgca

SEQ ID NO: 1143050 - RNA, 19 nt, Artificial Sequence
  Description of Artificial Sequence: Synthetic oligonucleotide
  Sense strand starting at position 2301 of SEQ ID NO: 916265
guuugaaauuuagggacga

SEQ ID NO: 1143051 - RNA, 19 nt, Artificial Sequence
  Description of Artificial Sequence: Synthetic oligonucleotide
  Antisense strand to SEQ ID NO: 1143050
ucgucccuaaauuucaaac

SEQ ID NO: 1143052 - RNA, 19 nt, Artificial Sequence
  Description of Artificial Sequence: Synthetic oligonucleotide
  Sense strand starting at position 2302 of SEQ ID NO: 916265
uuugaaauuuagggacgaa

SEQ ID NO: 1143053 - RNA, 19 nt, Artificial Sequence
  Description of Artificial Sequence: Synthetic oligonucleotide
  Antisense strand to SEQ ID NO: 1143052
uucgucccuaaauuucaaa

SEQ ID NO: 1143054 - RNA, 19 nt, Artificial Sequence
  Description of Artificial Sequence: Synthetic oligonucleotide
  Sense strand starting at position 2315 of SEQ ID NO: 916265
gacgaauagcucuggcgau

SEQ ID NO: 1143055 - RNA, 19 nt, Artificial Sequence
  Description of Artificial Sequence: Synthetic oligonucleotide
  Antisense strand to SEQ ID NO: 1143054
aucgccagagcuauucguc

SEQ ID NO: 1143056 - RNA, 19 nt, Artificial Sequence
  Description of Artificial Sequence: Synthetic oligonucleotide
  Sense strand starting at position 2316 of SEQ ID NO: 916265
acgaauagcucuggcgauu

SEQ ID NO: 1143057 - RNA, 19 nt, Artificial Sequence
  Description of Artificial Sequence: Synthetic oligonucleotide
  Antisense strand to SEQ ID NO: 1143056
aaucgccagagcuauucgu

SEQ ID NO: 1143058 - RNA, 19 nt, Artificial Sequence
  Description of Artificial Sequence: Synthetic oligonucleotide
  Sense strand starting at position 2348 of SEQ ID NO: 916265
acgguaagaggucacugua

SEQ ID NO: 1143059 - RNA, 19 nt, Artificial Sequence
  Description of Artificial Sequence: Synthetic oligonucleotide
  Antisense strand to SEQ ID NO: 1143058
uacagugaccucuuaccgu

SEQ ID NO: 1143060 - RNA, 19 nt, Artificial Sequence
  Description of Artificial Sequence: Synthetic oligonucleotide
  Sense strand starting at position 2351 of SEQ ID NO: 916265
guaagaggucacuguaaga

SEQ ID NO: 1143061 - RNA, 19 nt, Artificial Sequence
  Description of Artificial Sequence: Synthetic oligonucleotide
  Antisense strand to SEQ ID NO: 1143060
ucuuacagugaccucuuac

SEQ ID NO: 1143062 - RNA, 19 nt, Artificial Sequence
  Description of Artificial Sequence: Synthetic oligonucleotide
  Sense strand starting at position 2764 of SEQ ID NO: 916265
ggacuugacucaggagguu

SEQ ID NO: 1143063 - RNA, 19 nt, Artificial Sequence
  Description of Artificial Sequence: Synthetic oligonucleotide
  Antisense strand to SEQ ID NO: 1143062
aaccuccugagucaagucc

SEQ ID NO: 1143064 - RNA, 19 nt, Artificial Sequence
  Description of Artificial Sequence: Synthetic oligonucleotide
  Sense strand starting at position 2921 of SEQ ID NO: 916265
cgaagucucugucgucagu

SEQ ID NO: 1143065 - RNA, 19 nt, Artificial Sequence
  Description of Artificial Sequence: Synthetic oligonucleotide
  Antisense strand to SEQ ID NO: 1143064
acugacgacagagacuucg

SEQ ID NO: 1143066 - RNA, 19 nt, Artificial Sequence
  Description of Artificial Sequence: Synthetic oligonucleotide
  Sense strand starting at position 2932 of SEQ ID NO: 916265
ucgucaguggugcccgaau

SEQ ID NO: 1143067 - RNA, 19 nt, Artificial Sequence
  Description of Artificial Sequence: Synthetic oligonucleotide
  Antisense strand to SEQ ID NO: 1143066
auucgggcaccacugacga

SEQ ID NO: 1143068 - RNA, 19 nt, Artificial Sequence
  Description of Artificial Sequence: Synthetic oligonucleotide
  Sense strand starting at position 2934 of SEQ ID NO: 916265
gucaguggugcccgaauaa

SEQ ID NO: 1143069 - RNA, 19 nt, Artificial Sequence
  Description of Artificial Sequence: Synthetic oligonucleotide
  Antisense strand to SEQ ID NO: 1143068
uuauucgggcaccacugac

SEQ ID NO: 1143070 - RNA, 19 nt, Artificial Sequence
  Description of Artificial Sequence: Synthetic oligonucleotide
  Sense strand starting at position 2975 of SEQ ID NO: 916265
ggcagcgucuggugucuaa

SEQ ID NO: 1143071 - RNA, 19 nt, Artificial Sequence
  Description of Artificial Sequence: Synthetic oligonucleotide
  Antisense strand to SEQ ID NO: 1143070
uuagacaccagacgcugcc

SEQ ID NO: 1143072 - RNA, 19 nt, Artificial Sequence
  Description of Artificial Sequence: Synthetic oligonucleotide
  Sense strand starting at position 2978 of SEQ ID NO: 916265
agcgucuggugucuaaaga

SEQ ID NO: 1143073 - RNA, 19 nt, Artificial Sequence
  Description of Artificial Sequence: Synthetic oligonucleotide
  Antisense strand to SEQ ID NO: 1143072
ucuuuagacaccagacgcu

SEQ ID NO: 1143074 - RNA, 19 nt, Artificial Sequence
  Description of Artificial Sequence: Synthetic oligonucleotide
  Sense strand starting at position 2979 of SEQ ID NO: 916265
gcgucuggugucuaaagag

SEQ ID NO: 1143075 - RNA, 19 nt, Artificial Sequence
  Description of Artificial Sequence: Synthetic oligonucleotide
  Antisense strand to SEQ ID NO: 1143074
cucuuuagacaccagacgc

SEQ ID NO: 1143076 - RNA, 19 nt, Artificial Sequence
  Description of Artificial Sequence: Synthetic oligonucleotide
  Sense strand starting at position 3181 of SEQ ID NO: 916265
cacuguuuguucugugugu

SEQ ID NO: 1143077 - RNA, 19 nt, Artificial Sequence
  Description of Artificial Sequence: Synthetic oligonucleotide
  Antisense strand to SEQ ID NO: 1143076
acacacagaacaaacagug

SEQ ID NO: 1143078 - RNA, 19 nt, Artificial Sequence
  Description of Artificial Sequence: Synthetic oligonucleotide
  Sense strand starting at position 3247 of SEQ ID NO: 916265
cgaaauaagcaccauuauc

SEQ ID NO: 1143079 - RNA, 19 nt, Artificial Sequence
  Description of Artificial Sequence: Synthetic oligonucleotide
  Antisense strand to SEQ ID NO: 1143078
gauaauggugcuuauuucg

SEQ ID NO: 1143080 - RNA, 19 nt, Artificial Sequence
  Description of Artificial Sequence: Synthetic oligonucleotide
  Sense strand starting at position 3379 of SEQ ID NO: 916265
cuaaccacucugugauguu

SEQ ID NO: 1143081 - RNA, 19 nt, Artificial Sequence
  Description of Artificial Sequence: Synthetic oligonucleotide
  Antisense strand to SEQ ID NO: 1143080
aacaucacagagugguuag

SEQ ID NO: 1143082 - RNA, 19 nt, Artificial Sequence
  Description of Artificial Sequence: Synthetic oligonucleotide
  Sense strand starting at position 3388 of SEQ ID NO: 916265
cugugauguuguccaacau

SEQ ID NO: 1143083 - RNA, 19 nt, Artificial Sequence
  Description of Artificial Sequence: Synthetic oligonucleotide
  Antisense strand to SEQ ID NO: 1143082
auguuggacaacaucacag

SEQ ID NO: 1143084 - RNA, 19 nt, Artificial Sequence
  Description of Artificial Sequence: Synthetic oligonucleotide
  Sense strand starting at position 3389 of SEQ ID NO: 916265
ugugauguuguccaacauu

SEQ ID NO: 1143085 - RNA, 19 nt, Artificial Sequence
  Description of Artificial Sequence: Synthetic oligonucleotide
  Antisense strand to SEQ ID NO: 1143084
aauguuggacaacaucaca

SEQ ID NO: 1143086 - RNA, 19 nt, Artificial Sequence
  Description of Artificial Sequence: Synthetic oligonucleotide
  Sense strand starting at position 3483 of SEQ ID NO: 916265
uugcacaugugcuguguua

SEQ ID NO: 1143087 - RNA, 19 nt, Artificial Sequence
  Description of Artificial Sequence: Synthetic oligonucleotide
  Antisense strand to SEQ ID NO: 1143086
uaacacagcacaugugcaa

SEQ ID NO: 1143088 - RNA, 19 nt, Artificial Sequence
  Description of Artificial Sequence: Synthetic oligonucleotide
  Sense strand starting at position 3485 of SEQ ID NO: 916265
gcacaugugcuguguuaga

SEQ ID NO: 1143089 - RNA, 19 nt, Artificial Sequence
  Description of Artificial Sequence: Synthetic oligonucleotide
  Antisense strand to SEQ ID NO: 1143088
ucuaacacagcacaugugc

SEQ ID NO: 1143090 - RNA, 19 nt, Artificial Sequence
  Description of Artificial Sequence: Synthetic oligonucleotide
  Sense strand starting at position 3494 of SEQ ID NO: 916265
cuguguuagacacguggca

SEQ ID NO: 1143091 - RNA, 19 nt, Artificial Sequence
  Description of Artificial Sequence: Synthetic oligonucleotide
  Antisense strand to SEQ ID NO: 1143090
ugccacgugucuaacacag

SEQ ID NO: 1143092 - RNA, 19 nt, Artificial Sequence
  Description of Artificial Sequence: Synthetic oligonucleotide
  Sense strand starting at position 3496 of SEQ ID NO: 916265
guguuagacacguggcaua

SEQ ID NO: 1143093 - RNA, 19 nt, Artificial Sequence
  Description of Artificial Sequence: Synthetic oligonucleotide
  Antisense strand to SEQ ID NO: 1143092
uaugccacgugucuaacac

SEQ ID NO: 1143094 - RNA, 19 nt, Artificial Sequence
  Description of Artificial Sequence: Synthetic oligonucleotide
  Sense strand starting at position 3599 of SEQ ID NO: 916265
ggcucagucuucuucucua

SEQ ID NO: 1143095 - RNA, 19 nt, Artificial Sequence
  Description of Artificial Sequence: Synthetic oligonucleotide
  Antisense strand to SEQ ID NO: 1143094
uagagaagaagacugagcc

SEQ ID NO: 1143096 - RNA, 19 nt, Artificial Sequence
  Description of Artificial Sequence: Synthetic oligonucleotide
  Sense strand starting at position 3791 of SEQ ID NO: 916265
agagguagcucucuuagug

SEQ ID NO: 1143097 - RNA, 19 nt, Artificial Sequence
  Description of Artificial Sequence: Synthetic oligonucleotide
  Antisense strand to SEQ ID NO: 1143096
cacuaagagagcuaccucu

SEQ ID NO: 1143098 - RNA, 19 nt, Artificial Sequence
  Description of Artificial Sequence: Synthetic oligonucleotide
  Sense strand starting at position 3895 of SEQ ID NO: 916265
augggacucuauugugaag

SEQ ID NO: 1143099 - RNA, 19 nt, Artificial Sequence
  Description of Artificial Sequence: Synthetic oligonucleotide
  Antisense strand to SEQ ID NO: 1143098
cuucacaauagagucccau

SEQ ID NO: 1143100 - RNA, 19 nt, Artificial Sequence
  Description of Artificial Sequence: Synthetic oligonucleotide
  Sense strand starting at position 3897 of SEQ ID NO: 916265
gggacucuauugugaagca

SEQ ID NO: 1143101 - RNA, 19 nt, Artificial Sequence
  Description of Artificial Sequence: Synthetic oligonucleotide
  Antisense strand to SEQ ID NO: 1143100
ugcuucacaauagaguccc

SEQ ID NO: 1143102 - RNA, 19 nt, Artificial Sequence
  Description of Artificial Sequence: Synthetic oligonucleotide
  Sense strand starting at position 3898 of SEQ ID NO: 916265
ggacucuauugugaagcau

SEQ ID NO: 1143103 - RNA, 19 nt, Artificial Sequence
  Description of Artificial Sequence: Synthetic oligonucleotide
  Antisense strand to SEQ ID NO: 1143102
augcuucacaauagagucc

SEQ ID NO: 1143104 - RNA, 19 nt, Artificial Sequence
  Description of Artificial Sequence: Synthetic oligonucleotide
  Sense strand starting at position 3944 of SEQ ID NO: 916265
guugccugcuccugacaga

SEQ ID NO: 1143105 - RNA, 19 nt, Artificial Sequence
  Description of Artificial Sequence: Synthetic oligonucleotide
  Antisense strand to SEQ ID NO: 1143104
ucugucaggagcaggcaac

SEQ ID NO: 1143106 - RNA, 19 nt, Artificial Sequence
  Description of Artificial Sequence: Synthetic oligonucleotide
  Sense strand starting at position 82 of SEQ ID NO: 916266
guaugaaagcauugcacau

SEQ ID NO: 1143107 - RNA, 19 nt, Artificial Sequence
  Description of Artificial Sequence: Synthetic oligonucleotide
  Antisense strand to SEQ ID NO: 1143106
augugcaaugcuuucauac

SEQ ID NO: 1143108 - RNA, 19 nt, Artificial Sequence
  Description of Artificial Sequence: Synthetic oligonucleotide
  Sense strand starting at position 184 of SEQ ID NO: 916266
ggagaaugaguucaggugu

SEQ ID NO: 1143109 - RNA, 19 nt, Artificial Sequence
  Description of Artificial Sequence: Synthetic oligonucleotide
  Antisense strand to SEQ ID NO: 1143108
acaccugaacucauucucc

SEQ ID NO: 1143110 - RNA, 19 nt, Artificial Sequence
  Description of Artificial Sequence: Synthetic oligonucleotide
  Sense strand starting at position 248 of SEQ ID NO: 916266
uggugagaacaugguucaa

SEQ ID NO: 1143111 - RNA, 19 nt, Artificial Sequence
  Description of Artificial Sequence: Synthetic oligonucleotide
  Antisense strand to SEQ ID NO: 1143110
uugaaccauguucucacca

SEQ ID NO: 1143112 - RNA, 19 nt, Artificial Sequence
  Description of Artificial Sequence: Synthetic oligonucleotide
  Sense strand starting at position 250 of SEQ ID NO: 916266
gugagaacaugguucaaag

SEQ ID NO: 1143113 - RNA, 19 nt, Artificial Sequence
  Description of Artificial Sequence: Synthetic oligonucleotide
  Antisense strand to SEQ ID NO: 1143112
cuuugaaccauguucucac

SEQ ID NO: 1143114 - RNA, 19 nt, Artificial Sequence
  Description of Artificial Sequence: Synthetic oligonucleotide
  Sense strand starting at position 287 of SEQ ID NO: 916266
cucugauuacaccaugguu

SEQ ID NO: 1143115 - RNA, 19 nt, Artificial Sequence
  Description of Artificial Sequence: Synthetic oligonucleotide
  Antisense strand to SEQ ID NO: 1143114
aaccaugguguaaucagag

SEQ ID NO: 1143116 - RNA, 19 nt, Artificial Sequence
  Description of Artificial Sequence: Synthetic oligonucleotide
  Sense strand starting at position 290 of SEQ ID NO: 916266
ugauuacaccaugguuaca

SEQ ID NO: 1143117 - RNA, 19 nt, Artificial Sequence
  Description of Artificial Sequence: Synthetic oligonucleotide
  Antisense strand to SEQ ID NO: 1143116
uguaaccaugguguaauca

SEQ ID NO: 1143118 - RNA, 19 nt, Artificial Sequence
  Description of Artificial Sequence: Synthetic oligonucleotide
  Sense strand starting at position 418 of SEQ ID NO: 916266
cauguugagcgacaaagau

SEQ ID NO: 1143119 - RNA, 19 nt, Artificial Sequence
  Description of Artificial Sequence: Synthetic oligonucleotide
  Antisense strand to SEQ ID NO: 1143118
aucuuugucgcucaacaug

SEQ ID NO: 1143120 - RNA, 19 nt, Artificial Sequence
  Description of Artificial Sequence: Synthetic oligonucleotide
  Sense strand starting at position 566 of SEQ ID NO: 916266
augauucugcuacauguuu

SEQ ID NO: 1143121 - RNA, 19 nt, Artificial Sequence
  Description of Artificial Sequence: Synthetic oligonucleotide
  Antisense strand to SEQ ID NO: 1143120
aaacauguagcagaaucau

SEQ ID NO: 1143122 - RNA, 19 nt, Artificial Sequence
  Description of Artificial Sequence: Synthetic oligonucleotide
  Sense strand starting at position 586 of SEQ ID NO: 916266
uggagaucuuuaucccaac

SEQ ID NO: 1143123 - RNA, 19 nt, Artificial Sequence
  Description of Artificial Sequence: Synthetic oligonucleotide
  Antisense strand to SEQ ID NO: 1143122
guugggauaaagaucucca

SEQ ID NO: 1143124 - RNA, 19 nt, Artificial Sequence
  Description of Artificial Sequence: Synthetic oligonucleotide
  Sense strand starting at position 706 of SEQ ID NO: 916266
ugaucugauucucucaaga

SEQ ID NO: 1143125 - RNA, 19 nt, Artificial Sequence
  Description of Artificial Sequence: Synthetic oligonucleotide
  Antisense strand to SEQ ID NO: 1143124
ucuugagagaaucagauca

SEQ ID NO: 1143126 - RNA, 19 nt, Artificial Sequence
  Description of Artificial Sequence: Synthetic oligonucleotide
  Sense strand starting at position 711 of SEQ ID NO: 916266
ugauucucucaagaguugu

SEQ ID NO: 1143127 - RNA, 19 nt, Artificial Sequence
  Description of Artificial Sequence: Synthetic oligonucleotide
  Antisense strand to SEQ ID NO: 1143126
acaacucuugagagaauca

SEQ ID NO: 1143128 - RNA, 19 nt, Artificial Sequence
  Description of Artificial Sequence: Synthetic oligonucleotide
  Sense strand starting at position 717 of SEQ ID NO: 916266
ucucaagaguugucuugga

SEQ ID NO: 1143129 - RNA, 19 nt, Artificial Sequence
  Description of Artificial Sequence: Synthetic oligonucleotide
  Antisense strand to SEQ ID NO: 1143128
uccaagacaacucuugaga

SEQ ID NO: 1143130 - RNA, 19 nt, Artificial Sequence
  Description of Artificial Sequence: Synthetic oligonucleotide
  Sense strand starting at position 732 of SEQ ID NO: 916266
uggauugcaugagugacua

SEQ ID NO: 1143131 - RNA, 19 nt, Artificial Sequence
  Description of Artificial Sequence: Synthetic oligonucleotide
  Antisense strand to SEQ ID NO: 1143130
uagucacucaugcaaucca

SEQ ID NO: 1143132 - RNA, 19 nt, Artificial Sequence
  Description of Artificial Sequence: Synthetic oligonucleotide
  Sense strand starting at position 740 of SEQ ID NO: 916266
augagugacuagcugaaga

SEQ ID NO: 1143133 - RNA, 19 nt, Artificial Sequence
  Description of Artificial Sequence: Synthetic oligonucleotide
  Antisense strand to SEQ ID NO: 1143132
ucuucagcuagucacucau

SEQ ID NO: 1143134 - RNA, 19 nt, Artificial Sequence
  Description of Artificial Sequence: Synthetic oligonucleotide
  Sense strand starting at position 742 of SEQ ID NO: 916266
gagugacuagcugaagagu

SEQ ID NO: 1143135 - RNA, 19 nt, Artificial Sequence
  Description of Artificial Sequence: Synthetic oligonucleotide
  Antisense strand to SEQ ID NO: 1143134
acucuucagcuagucacuc

SEQ ID NO: 1143136 - RNA, 19 nt, Artificial Sequence
  Description of Artificial Sequence: Synthetic oligonucleotide
  Sense strand starting at position 745 of SEQ ID NO: 916266
ugacuagcugaagagucau

SEQ ID NO: 1143137 - RNA, 19 nt, Artificial Sequence
  Description of Artificial Sequence: Synthetic oligonucleotide
  Antisense strand to SEQ ID NO: 1143136
augacucuucagcuaguca

SEQ ID NO: 1143138 - RNA, 19 nt, Artificial Sequence
  Description of Artificial Sequence: Synthetic oligonucleotide
  Sense strand starting at position 751 of SEQ ID NO: 916266
gcugaagagucauuagcua

SEQ ID NO: 1143139 - RNA, 19 nt, Artificial Sequence
  Description of Artificial Sequence: Synthetic oligonucleotide
  Antisense strand to SEQ ID NO: 1143138
uagcuaaugacucuucagc

SEQ ID NO: 1143140 - RNA, 19 nt, Artificial Sequence
  Description of Artificial Sequence: Synthetic oligonucleotide
  Sense strand starting at position 945 of SEQ ID NO: 916266
ucacgugucgaauucugca

SEQ ID NO: 1143141 - RNA, 19 nt, Artificial Sequence
  Description of Artificial Sequence: Synthetic oligonucleotide
  Antisense strand to SEQ ID NO: 1143140
ugcagaauucgacacguga

SEQ ID NO: 1143142 - RNA, 19 nt, Artificial Sequence
  Description of Artificial Sequence: Synthetic oligonucleotide
  Sense strand starting at position 1028 of SEQ ID NO: 916266
aacaguuugcuuggaggau

SEQ ID NO: 1143143 - RNA, 19 nt, Artificial Sequence
  Description of Artificial Sequence: Synthetic oligonucleotide
  Antisense strand to SEQ ID NO: 1143142
auccuccaagcaaacuguu

SEQ ID NO: 1143144 - RNA, 19 nt, Artificial Sequence
  Description of Artificial Sequence: Synthetic oligonucleotide
  Sense strand starting at position 1040 of SEQ ID NO: 916266
ggaggauguguggguauaa

SEQ ID NO: 1143145 - RNA, 19 nt, Artificial Sequence
  Description of Artificial Sequence: Synthetic oligonucleotide
  Antisense strand to SEQ ID NO: 1143144
uuauacccacacauccucc

SEQ ID NO: 1143146 - RNA, 19 nt, Artificial Sequence
  Description of Artificial Sequence: Synthetic oligonucleotide
  Sense strand starting at position 1041 of SEQ ID NO: 916266
gaggauguguggguauaaa

SEQ ID NO: 1143147 - RNA, 19 nt, Artificial Sequence
  Description of Artificial Sequence: Synthetic oligonucleotide
  Antisense strand to SEQ ID NO: 1143146
uuuauacccacacauccuc

SEQ ID NO: 1143148 - RNA, 19 nt, Artificial Sequence
  Description of Artificial Sequence: Synthetic oligonucleotide
  Sense strand starting at position 1076 of SEQ ID NO: 916266
aggagaaauuuacagcuca

SEQ ID NO: 1143149 - RNA, 19 nt, Artificial Sequence
  Description of Artificial Sequence: Synthetic oligonucleotide
  Antisense strand to SEQ ID NO: 1143148
ugagcuguaaauuucuccu

SEQ ID NO: 1143150 - RNA, 19 nt, Artificial Sequence
  Description of Artificial Sequence: Synthetic oligonucleotide
  Sense strand starting at position 1151 of SEQ ID NO: 916266
ccuuuccgagcuuaagauu

SEQ ID NO: 1143151 - RNA, 19 nt, Artificial Sequence
  Description of Artificial Sequence: Synthetic oligonucleotide
  Antisense strand to SEQ ID NO: 1143150
aaucuuaagcucggaaagg

SEQ ID NO: 1143152 - RNA, 19 nt, Artificial Sequence
  Description of Artificial Sequence: Synthetic oligonucleotide
  Sense strand starting at position 1197 of SEQ ID NO: 916266
aauuccagguguucugaga

SEQ ID NO: 1143153 - RNA, 19 nt, Artificial Sequence
  Description of Artificial Sequence: Synthetic oligonucleotide
  Antisense strand to SEQ ID NO: 1143152
ucucagaacaccuggaauu

SEQ ID NO: 1143154 - RNA, 19 nt, Artificial Sequence
  Description of Artificial Sequence: Synthetic oligonucleotide
  Sense strand starting at position 1488 of SEQ ID NO: 916266
uuuaguucugggugaauaa

SEQ ID NO: 1143155 - RNA, 19 nt, Artificial Sequence
  Description of Artificial Sequence: Synthetic oligonucleotide
  Antisense strand to SEQ ID NO: 1143154
uuauucacccagaacuaaa

SEQ ID NO: 1143156 - RNA, 19 nt, Artificial Sequence
  Description of Artificial Sequence: Synthetic oligonucleotide
  Sense strand starting at position 1543 of SEQ ID NO: 916266
gcuggcuaugucuauagau

SEQ ID NO: 1143157 - RNA, 19 nt, Artificial Sequence
  Description of Artificial Sequence: Synthetic oligonucleotide
  Antisense strand to SEQ ID NO: 1143156
aucuauagacauagccagc

SEQ ID NO: 1143158 - RNA, 19 nt, Artificial Sequence
  Description of Artificial Sequence: Synthetic oligonucleotide
  Sense strand starting at position 1545 of SEQ ID NO: 916266
uggcuaugucuauagauau

SEQ ID NO: 1143159 - RNA, 19 nt, Artificial Sequence
  Description of Artificial Sequence: Synthetic oligonucleotide
  Antisense strand to SEQ ID NO: 1143158
auaucuauagacauagcca

SEQ ID NO: 1143160 - RNA, 19 nt, Artificial Sequence
  Description of Artificial Sequence: Synthetic oligonucleotide
  Sense strand starting at position 1835 of SEQ ID NO: 916266
ccuaccuugguuuguagaa

SEQ ID NO: 1143161 - RNA, 19 nt, Artificial Sequence
  Description of Artificial Sequence: Synthetic oligonucleotide
  Antisense strand to SEQ ID NO: 1143160
uucuacaaaccaagguagg

SEQ ID NO: 1143162 - RNA, 19 nt, Artificial Sequence
  Description of Artificial Sequence: Synthetic oligonucleotide
  Sense strand starting at position 1873 of SEQ ID NO: 916266
agauuaagggagugagcau

SEQ ID NO: 1143163 - RNA, 19 nt, Artificial Sequence
  Description of Artificial Sequence: Synthetic oligonucleotide
  Antisense strand to SEQ ID NO: 1143162
augcucacucccuuaaucu

SEQ ID NO: 1143164 - RNA, 19 nt, Artificial Sequence
  Description of Artificial Sequence: Synthetic oligonucleotide
  Sense strand starting at position 1909 of SEQ ID NO: 916266
ccuucuucucgcuugcaua

SEQ ID NO: 1143165 - RNA, 19 nt, Artificial Sequence
  Description of Artificial Sequence: Synthetic oligonucleotide
  Antisense strand to SEQ ID NO: 1143164
uaugcaagcgagaagaagg

SEQ ID NO: 1143166 - RNA, 19 nt, Artificial Sequence
  Description of Artificial Sequence: Synthetic oligonucleotide
  Sense strand starting at position 1998 of SEQ ID NO: 916266
uuaaucuugugucuugaag

SEQ ID NO: 1143167 - RNA, 19 nt, Artificial Sequence
  Description of Artificial Sequence: Synthetic oligonucleotide
  Antisense strand to SEQ ID NO: 1143166
cuucaagacacaagauuaa

SEQ ID NO: 1143168 - RNA, 19 nt, Artificial Sequence
  Description of Artificial Sequence: Synthetic oligonucleotide
  Sense strand starting at position 2006 of SEQ ID NO: 916266
gugucuugaagagaugcaa

SEQ ID NO: 1143169 - RNA, 19 nt, Artificial Sequence
  Description of Artificial Sequence: Synthetic oligonucleotide
  Antisense strand to SEQ ID NO: 1143168
uugcaucucuucaagacac

SEQ ID NO: 1143170 - RNA, 19 nt, Artificial Sequence
  Description of Artificial Sequence: Synthetic oligonucleotide
  Sense strand starting at position 2117 of SEQ ID NO: 916266
ugagguuaguggcuggaau

SEQ ID NO: 1143171 - RNA, 19 nt, Artificial Sequence
  Description of Artificial Sequence: Synthetic oligonucleotide
  Antisense strand to SEQ ID NO: 1143170
auuccagccacuaaccuca

SEQ ID NO: 1143172 - RNA, 19 nt, Artificial Sequence
  Description of Artificial Sequence: Synthetic oligonucleotide
  Sense strand starting at position 2118 of SEQ ID NO: 916266
gagguuaguggcuggaaua

SEQ ID NO: 1143173 - RNA, 19 nt, Artificial Sequence
  Description of Artificial Sequence: Synthetic oligonucleotide
  Antisense strand to SEQ ID NO: 1143172
uauuccagccacuaaccuc

SEQ ID NO: 1143174 - RNA, 19 nt, Artificial Sequence
  Description of Artificial Sequence: Synthetic oligonucleotide
  Sense strand starting at position 2193 of SEQ ID NO: 916266
ggaggcucuguguggagaa

SEQ ID NO: 1143175 - RNA, 19 nt, Artificial Sequence
  Description of Artificial Sequence: Synthetic oligonucleotide
  Antisense strand to SEQ ID NO: 1143174
uucuccacacagagccucc

SEQ ID NO: 1143176 - RNA, 19 nt, Artificial Sequence
  Description of Artificial Sequence: Synthetic oligonucleotide
  Sense strand starting at position 2238 of SEQ ID NO: 916266
ggagcauggucauucccaa

SEQ ID NO: 1143177 - RNA, 19 nt, Artificial Sequence
  Description of Artificial Sequence: Synthetic oligonucleotide
  Antisense strand to SEQ ID NO: 1143176
uugggaaugaccaugcucc

SEQ ID NO: 1143178 - RNA, 19 nt, Artificial Sequence
  Description of Artificial Sequence: Synthetic oligonucleotide
  Sense strand starting at position 2423 of SEQ ID NO: 916266
cugguaccggucuauaaau

SEQ ID NO: 1143179 - RNA, 19 nt, Artificial Sequence
  Description of Artificial Sequence: Synthetic oligonucleotide
  Antisense strand to SEQ ID NO: 1143178
auuuauagaccgguaccag

SEQ ID NO: 1143180 - RNA, 19 nt, Artificial Sequence
  Description of Artificial Sequence: Synthetic oligonucleotide
  Sense strand starting at position 2425 of SEQ ID NO: 916266
gguaccggucuauaaauaa

SEQ ID NO: 1143181 - RNA, 19 nt, Artificial Sequence
  Description of Artificial Sequence: Synthetic oligonucleotide
  Antisense strand to SEQ ID NO: 1143180
uuauuuauagaccgguacc

SEQ ID NO: 1143182 - RNA, 19 nt, Artificial Sequence
  Description of Artificial Sequence: Synthetic oligonucleotide
  Sense strand starting at position 3138 of SEQ ID NO: 916266
agagcuuuaccucaugcca

SEQ ID NO: 1143183 - RNA, 19 nt, Artificial Sequence
  Description of Artificial Sequence: Synthetic oligonucleotide
  Antisense strand to SEQ ID NO: 1143182
uggcaugagguaaagcucu

SEQ ID NO: 1143184 - RNA, 19 nt, Artificial Sequence
  Description of Artificial Sequence: Synthetic oligonucleotide
  Sense strand starting at position 3328 of SEQ ID NO: 916266
ccugcaaagcaggauuaau

SEQ ID NO: 1143185 - RNA, 19 nt, Artificial Sequence
  Description of Artificial Sequence: Synthetic oligonucleotide
  Antisense strand to SEQ ID NO: 1143184
auuaauccugcuuugcagg

SEQ ID NO: 1143186 - RNA, 19 nt, Artificial Sequence
  Description of Artificial Sequence: Synthetic oligonucleotide
  Sense strand starting at position 79 of SEQ ID NO: 916267
ggagaucaaugcuuccaua

SEQ ID NO: 1143187 - RNA, 19 nt, Artificial Sequence
  Description of Artificial Sequence: Synthetic oligonucleotide
  Antisense strand to SEQ ID NO: 1143186
uauggaagcauugaucucc

SEQ ID NO: 1143188 - RNA, 19 nt, Artificial Sequence
  Description of Artificial Sequence: Synthetic oligonucleotide
  Sense strand starting at position 348 of SEQ ID NO: 916267
cagaaaggauagucucuua

SEQ ID NO: 1143189 - RNA, 19 nt, Artificial Sequence
  Description of Artificial Sequence: Synthetic oligonucleotide
  Antisense strand to SEQ ID NO: 1143188
uaagagacuauccuuucug

SEQ ID NO: 1143190 - RNA, 19 nt, Artificial Sequence
  Description of Artificial Sequence: Synthetic oligonucleotide
  Sense strand starting at position 351 of SEQ ID NO: 916267
aaaggauagucucuuaguc

SEQ ID NO: 1143191 - RNA, 19 nt, Artificial Sequence
  Description of Artificial Sequence: Synthetic oligonucleotide
  Antisense strand to SEQ ID NO: 1143190
gacuaagagacuauccuuu

SEQ ID NO: 1143192 - RNA, 19 nt, Artificial Sequence
  Description of Artificial Sequence: Synthetic oligonucleotide
  Sense strand starting at position 355 of SEQ ID NO: 916267
gauagucucuuagucauga

SEQ ID NO: 1143193 - RNA, 19 nt, Artificial Sequence
  Description of Artificial Sequence: Synthetic oligonucleotide
  Antisense strand to SEQ ID NO: 1143192
ucaugacuaagagacuauc

SEQ ID NO: 1143194 - RNA, 19 nt, Artificial Sequence
  Description of Artificial Sequence: Synthetic oligonucleotide
  Sense strand starting at position 366 of SEQ ID NO: 916267
agucaugauuuauaaacag

SEQ ID NO: 1143195 - RNA, 19 nt, Artificial Sequence
  Description of Artificial Sequence: Synthetic oligonucleotide
  Antisense strand to SEQ ID NO: 1143194
cuguuuauaaaucaugacu

SEQ ID NO: 1143196 - RNA, 19 nt, Artificial Sequence
  Description of Artificial Sequence: Synthetic oligonucleotide
  Sense strand starting at position 546 of SEQ ID NO: 916267
uaaguuggucuacaguauu

SEQ ID NO: 1143197 - RNA, 19 nt, Artificial Sequence
  Description of Artificial Sequence: Synthetic oligonucleotide
  Antisense strand to SEQ ID NO: 1143196
aauacuguagaccaacuua

SEQ ID NO: 1143198 - RNA, 19 nt, Artificial Sequence
  Description of Artificial Sequence: Synthetic oligonucleotide
  Sense strand starting at position 574 of SEQ ID NO: 916267
uccuguuauugacucaaga

SEQ ID NO: 1143199 - RNA, 19 nt, Artificial Sequence
  Description of Artificial Sequence: Synthetic oligonucleotide
  Antisense strand to SEQ ID NO: 1143198
ucuugagucaauaacagga

SEQ ID NO: 1143200 - RNA, 19 nt, Artificial Sequence
  Description of Artificial Sequence: Synthetic oligonucleotide
  Sense strand starting at position 661 of SEQ ID NO: 916267
cacugcuggugaucaaaga

SEQ ID NO: 1143201 - RNA, 19 nt, Artificial Sequence
  Description of Artificial Sequence: Synthetic oligonucleotide
  Antisense strand to SEQ ID NO: 1143200
ucuuugaucaccagcagug

SEQ ID NO: 1143202 - RNA, 19 nt, Artificial Sequence
  Description of Artificial Sequence: Synthetic oligonucleotide
  Sense strand starting at position 1065 of SEQ ID NO: 916267
gaguucuaagagugacaau

SEQ ID NO: 1143203 - RNA, 19 nt, Artificial Sequence
  Description of Artificial Sequence: Synthetic oligonucleotide
  Antisense strand to SEQ ID NO: 1143202
auugucacucuuagaacuc

SEQ ID NO: 1143204 - RNA, 19 nt, Artificial Sequence
  Description of Artificial Sequence: Synthetic oligonucleotide
  Sense strand starting at position 1107 of SEQ ID NO: 916267
uaagauuccgagcaaugau

SEQ ID NO: 1143205 - RNA, 19 nt, Artificial Sequence
  Description of Artificial Sequence: Synthetic oligonucleotide
  Antisense strand to SEQ ID NO: 1143204
aucauugcucggaaucuua

SEQ ID NO: 1143206 - RNA, 19 nt, Artificial Sequence
  Description of Artificial Sequence: Synthetic oligonucleotide
  Sense strand starting at position 1217 of SEQ ID NO: 916267
aauuaaagcuguccaggga

SEQ ID NO: 1143207 - RNA, 19 nt, Artificial Sequence
  Description of Artificial Sequence: Synthetic oligonucleotide
  Antisense strand to SEQ ID NO: 1143206
ucccuggacagcuuuaauu

SEQ ID NO: 1143208 - RNA, 19 nt, Artificial Sequence
  Description of Artificial Sequence: Synthetic oligonucleotide
  Sense strand starting at position 1242 of SEQ ID NO: 916267
ucuuaagauguuggaaagu

SEQ ID NO: 1143209 - RNA, 19 nt, Artificial Sequence
  Description of Artificial Sequence: Synthetic oligonucleotide
  Antisense strand to SEQ ID NO: 1143208
acuuuccaacaucuuaaga

SEQ ID NO: 1143210 - RNA, 19 nt, Artificial Sequence
  Description of Artificial Sequence: Synthetic oligonucleotide
  Sense strand starting at position 1334 of SEQ ID NO: 916267
guaucauagaaaggacagu

SEQ ID NO: 1143211 - RNA, 19 nt, Artificial Sequence
  Description of Artificial Sequence: Synthetic oligonucleotide
  Antisense strand to SEQ ID NO: 1143210
acuguccuuucuaugauac

SEQ ID NO: 1143212 - RNA, 19 nt, Artificial Sequence
  Description of Artificial Sequence: Synthetic oligonucleotide
  Sense strand starting at position 1376 of SEQ ID NO: 916267
ccaguuaaucagcaugcaa

SEQ ID NO: 1143213 - RNA, 19 nt, Artificial Sequence
  Description of Artificial Sequence: Synthetic oligonucleotide
  Antisense strand to SEQ ID NO: 1143212
uugcaugcugauuaacugg

SEQ ID NO: 1143214 - RNA, 19 nt, Artificial Sequence
  Description of Artificial Sequence: Synthetic oligonucleotide
  Sense strand starting at position 1398 of SEQ ID NO: 916267
gacgguuucccacaauaac

SEQ ID NO: 1143215 - RNA, 19 nt, Artificial Sequence
  Description of Artificial Sequence: Synthetic oligonucleotide
  Antisense strand to SEQ ID NO: 1143214
guuauugugggaaaccguc

SEQ ID NO: 1143216 - RNA, 19 nt, Artificial Sequence
  Description of Artificial Sequence: Synthetic oligonucleotide
  Sense strand starting at position 1543 of SEQ ID NO: 916267
cgagucuaccuguacauau

SEQ ID NO: 1143217 - RNA, 19 nt, Artificial Sequence
  Description of Artificial Sequence: Synthetic oligonucleotide
  Antisense strand to SEQ ID NO: 1143216
auauguacagguagacucg

SEQ ID NO: 1143218 - RNA, 19 nt, Artificial Sequence
  Description of Artificial Sequence: Synthetic oligonucleotide
  Sense strand starting at position 1554 of SEQ ID NO: 916267
guacauauguaucuauaca

SEQ ID NO: 1143219 - RNA, 19 nt, Artificial Sequence
  Description of Artificial Sequence: Synthetic oligonucleotide
  Antisense strand to SEQ ID NO: 1143218
uguauagauacauauguac

SEQ ID NO: 1143220 - RNA, 19 nt, Artificial Sequence
  Description of Artificial Sequence: Synthetic oligonucleotide
  Sense strand starting at position 1638 of SEQ ID NO: 916267
ccauuaaacuguguuuaua

SEQ ID NO: 1143221 - RNA, 19 nt, Artificial Sequence
  Description of Artificial Sequence: Synthetic oligonucleotide
  Antisense strand to SEQ ID NO: 1143220
uauaaacacaguuuaaugg

SEQ ID NO: 1143222 - RNA, 19 nt, Artificial Sequence
  Description of Artificial Sequence: Synthetic oligonucleotide
  Sense strand starting at position 1641 of SEQ ID NO: 916267
uuaaacuguguuuauagga

SEQ ID NO: 1143223 - RNA, 19 nt, Artificial Sequence
  Description of Artificial Sequence: Synthetic oligonucleotide
  Antisense strand to SEQ ID NO: 1143222
uccuauaaacacaguuuaa

SEQ ID NO: 1143224 - RNA, 19 nt, Artificial Sequence
  Description of Artificial Sequence: Synthetic oligonucleotide
  Sense strand starting at position 1648 of SEQ ID NO: 916267
guguuuauaggauacugca

SEQ ID NO: 1143225 - RNA, 19 nt, Artificial Sequence
  Description of Artificial Sequence: Synthetic oligonucleotide
  Antisense strand to SEQ ID NO: 1143224
ugcaguauccuauaaacac

SEQ ID NO: 1143226 - RNA, 19 nt, Artificial Sequence
  Description of Artificial Sequence: Synthetic oligonucleotide
  Sense strand starting at position 1696 of SEQ ID NO: 916267
gcacgauaccuuuaguaag

SEQ ID NO: 1143227 - RNA, 19 nt, Artificial Sequence
  Description of Artificial Sequence: Synthetic oligonucleotide
  Antisense strand to SEQ ID NO: 1143226
cuuacuaaagguaucgugc

SEQ ID NO: 1143228 - RNA, 19 nt, Artificial Sequence
  Description of Artificial Sequence: Synthetic oligonucleotide
  Sense strand starting at position 1855 of SEQ ID NO: 916267
ggagaaagguagucccagu

SEQ ID NO: 1143229 - RNA, 19 nt, Artificial Sequence
  Description of Artificial Sequence: Synthetic oligonucleotide
  Antisense strand to SEQ ID NO: 1143228
acugggacuaccuuucucc

SEQ ID NO: 1143230 - RNA, 19 nt, Artificial Sequence
  Description of Artificial Sequence: Synthetic oligonucleotide
  Sense strand starting at position 2076 of SEQ ID NO: 916267
ggagccauuccauaaaucu

SEQ ID NO: 1143231 - RNA, 19 nt, Artificial Sequence
  Description of Artificial Sequence: Synthetic oligonucleotide
  Antisense strand to SEQ ID NO: 1143230
agauuuauggaauggcucc

SEQ ID NO: 1143232 - RNA, 19 nt, Artificial Sequence
  Description of Artificial Sequence: Synthetic oligonucleotide
  Sense strand starting at position 2255 of SEQ ID NO: 916267
ggaagaaaugcauggguca

SEQ ID NO: 1143233 - RNA, 19 nt, Artificial Sequence
  Description of Artificial Sequence: Synthetic oligonucleotide
  Antisense strand to SEQ ID NO: 1143232
ugacccaugcauuucuucc

SEQ ID NO: 1143234 - RNA, 19 nt, Artificial Sequence
  Description of Artificial Sequence: Synthetic oligonucleotide
  Sense strand starting at position 2256 of SEQ ID NO: 916267
gaagaaaugcaugggucau

SEQ ID NO: 1143235 - RNA, 19 nt, Artificial Sequence
  Description of Artificial Sequence: Synthetic oligonucleotide
  Antisense strand to SEQ ID NO: 1143234
augacccaugcauuucuuc

SEQ ID NO: 1143236 - RNA, 19 nt, Artificial Sequence
  Description of Artificial Sequence: Synthetic oligonucleotide
  Sense strand starting at position 2275 of SEQ ID NO: 916267
guacuauguucuuuaaaca

SEQ ID NO: 1143237 - RNA, 19 nt, Artificial Sequence
  Description of Artificial Sequence: Synthetic oligonucleotide
  Antisense strand to SEQ ID NO: 1143236
uguuuaaagaacauaguac

SEQ ID NO: 1143238 - RNA, 19 nt, Artificial Sequence
  Description of Artificial Sequence: Synthetic oligonucleotide
  Sense strand starting at position 2338 of SEQ ID NO: 916267
ggccguuuauauuugggau

SEQ ID NO: 1143239 - RNA, 19 nt, Artificial Sequence
  Description of Artificial Sequence: Synthetic oligonucleotide
  Antisense strand to SEQ ID NO: 1143238
aucccaaauauaaacggcc

SEQ ID NO: 1143240 - RNA, 19 nt, Artificial Sequence
  Description of Artificial Sequence: Synthetic oligonucleotide
  Sense strand starting at position 2342 of SEQ ID NO: 916267
guuuauauuugggauugag

SEQ ID NO: 1143241 - RNA, 19 nt, Artificial Sequence
  Description of Artificial Sequence: Synthetic oligonucleotide
  Antisense strand to SEQ ID NO: 1143240
cucaaucccaaauauaaac

SEQ ID NO: 1143242 - RNA, 19 nt, Artificial Sequence
  Description of Artificial Sequence: Synthetic oligonucleotide
  Sense strand starting at position 2405 of SEQ ID NO: 916267
cagagaccucuuugguacu

SEQ ID NO: 1143243 - RNA, 19 nt, Artificial Sequence
  Description of Artificial Sequence: Synthetic oligonucleotide
  Antisense strand to SEQ ID NO: 1143242
aguaccaaagaggucucug

SEQ ID NO: 1143244 - RNA, 19 nt, Artificial Sequence
  Description of Artificial Sequence: Synthetic oligonucleotide
  Sense strand starting at position 2416 of SEQ ID NO: 916267
uugguacuuccugaaccua

SEQ ID NO: 1143245 - RNA, 19 nt, Artificial Sequence
  Description of Artificial Sequence: Synthetic oligonucleotide
  Antisense strand to SEQ ID NO: 1143244
uagguucaggaaguaccaa

SEQ ID NO: 1143246 - RNA, 19 nt, Artificial Sequence
  Description of Artificial Sequence: Synthetic oligonucleotide
  Sense strand starting at position 2452 of SEQ ID NO: 916267
ucuguuuauagagggaaua

SEQ ID NO: 1143247 - RNA, 19 nt, Artificial Sequence
  Description of Artificial Sequence: Synthetic oligonucleotide
  Antisense strand to SEQ ID NO: 1143246
uauucccucuauaaacaga

SEQ ID NO: 1143248 - RNA, 19 nt, Artificial Sequence
  Description of Artificial Sequence: Synthetic oligonucleotide
  Sense strand starting at position 2566 of SEQ ID NO: 916267
agucaagacuguuucuaaa

SEQ ID NO: 1143249 - RNA, 19 nt, Artificial Sequence
  Description of Artificial Sequence: Synthetic oligonucleotide
  Antisense strand to SEQ ID NO: 1143248
uuuagaaacagucuugacu

SEQ ID NO: 1143250 - RNA, 19 nt, Artificial Sequence
  Description of Artificial Sequence: Synthetic oligonucleotide
  Sense strand starting at position 2568 of SEQ ID NO: 916267
ucaagacuguuucuaaaga

SEQ ID NO: 1143251 - RNA, 19 nt, Artificial Sequence
  Description of Artificial Sequence: Synthetic oligonucleotide
  Antisense strand to SEQ ID NO: 1143250
ucuuuagaaacagucuuga

SEQ ID NO: 1143252 - RNA, 19 nt, Artificial Sequence
  Description of Artificial Sequence: Synthetic oligonucleotide
  Sense strand starting at position 2725 of SEQ ID NO: 916267
gaguaucugcuccaaugga

SEQ ID NO: 1143253 - RNA, 19 nt, Artificial Sequence
  Description of Artificial Sequence: Synthetic oligonucleotide
  Antisense strand to SEQ ID NO: 1143252
uccauuggagcagauacuc

SEQ ID NO: 1143254 - RNA, 19 nt, Artificial Sequence
  Description of Artificial Sequence: Synthetic oligonucleotide
  Sense strand starting at position 2854 of SEQ ID NO: 916267
acuaacauuugguagggaa

SEQ ID NO: 1143255 - RNA, 19 nt, Artificial Sequence
  Description of Artificial Sequence: Synthetic oligonucleotide
  Antisense strand to SEQ ID NO: 1143254
uucccuaccaaauguuagu

SEQ ID NO: 1143256 - RNA, 19 nt, Artificial Sequence
  Description of Artificial Sequence: Synthetic oligonucleotide
  Sense strand starting at position 3450 of SEQ ID NO: 916267
cuauuagguuaucccuaga

SEQ ID NO: 1143257 - RNA, 19 nt, Artificial Sequence
  Description of Artificial Sequence: Synthetic oligonucleotide
  Antisense strand to SEQ ID NO: 1143256
ucuagggauaaccuaauag

SEQ ID NO: 1143258 - RNA, 19 nt, Artificial Sequence
  Description of Artificial Sequence: Synthetic oligonucleotide
  Sense strand starting at position 3520 of SEQ ID NO: 916267
guacuagagaacugaguua

SEQ ID NO: 1143259 - RNA, 19 nt, Artificial Sequence
  Description of Artificial Sequence: Synthetic oligonucleotide
  Antisense strand to SEQ ID NO: 1143258
uaacucaguucucuaguac

SEQ ID NO: 1143260 - RNA, 19 nt, Artificial Sequence
  Description of Artificial Sequence: Synthetic oligonucleotide
  Sense strand starting at position 3527 of SEQ ID NO: 916267
agaacugaguuacuagcua

SEQ ID NO: 1143261 - RNA, 19 nt, Artificial Sequence
  Description of Artificial Sequence: Synthetic oligonucleotide
  Antisense strand to SEQ ID NO: 1143260
uagcuaguaacucaguucu

SEQ ID NO: 1143262 - RNA, 19 nt, Artificial Sequence
  Description of Artificial Sequence: Synthetic oligonucleotide
  Sense strand starting at position 3532 of SEQ ID NO: 916267
ugaguuacuagcuaaagug

SEQ ID NO: 1143263 - RNA, 19 nt, Artificial Sequence
  Description of Artificial Sequence: Synthetic oligonucleotide
  Antisense strand to SEQ ID NO: 1143262
cacuuuagcuaguaacuca

SEQ ID NO: 1143264 - RNA, 19 nt, Artificial Sequence
  Description of Artificial Sequence: Synthetic oligonucleotide
  Sense strand starting at position 3929 of SEQ ID NO: 916267
uuugaaagguuucugagag

SEQ ID NO: 1143265 - RNA, 19 nt, Artificial Sequence
  Description of Artificial Sequence: Synthetic oligonucleotide
  Antisense strand to SEQ ID NO: 1143264
cucucagaaaccuuucaaa

SEQ ID NO: 1143266 - RNA, 19 nt, Artificial Sequence
  Description of Artificial Sequence: Synthetic oligonucleotide
  Sense strand starting at position 294 of SEQ ID NO: 916268
gaagaagagugccucuaag

SEQ ID NO: 1143267 - RNA, 19 nt, Artificial Sequence
  Description of Artificial Sequence: Synthetic oligonucleotide
  Antisense strand to SEQ ID NO: 1143266
cuuagaggcacucuucuuc

SEQ ID NO: 1143268 - RNA, 19 nt, Artificial Sequence
  Description of Artificial Sequence: Synthetic oligonucleotide
  Sense strand starting at position 500 of SEQ ID NO: 916268
gcaaucuuugaggacuguu

SEQ ID NO: 1143269 - RNA, 19 nt, Artificial Sequence
  Description of Artificial Sequence: Synthetic oligonucleotide
  Antisense strand to SEQ ID NO: 1143268
aacaguccucaaagauugc

SEQ ID NO: 1143270 - RNA, 19 nt, Artificial Sequence
  Description of Artificial Sequence: Synthetic oligonucleotide
  Sense strand starting at position 623 of SEQ ID NO: 916268
gaggcaauggauuaagugu

SEQ ID NO: 1143271 - RNA, 19 nt, Artificial Sequence
  Description of Artificial Sequence: Synthetic oligonucleotide
  Antisense strand to SEQ ID NO: 1143270
acacuuaauccauugccuc

SEQ ID NO: 1143272 - RNA, 19 nt, Artificial Sequence
  Description of Artificial Sequence: Synthetic oligonucleotide
  Sense strand starting at position 629 of SEQ ID NO: 916268
auggauuaaguguacuuua

SEQ ID NO: 1143273 - RNA, 19 nt, Artificial Sequence
  Description of Artificial Sequence: Synthetic oligonucleotide
  Antisense strand to SEQ ID NO: 1143272
uaaaguacacuuaauccau

SEQ ID NO: 1143274 - RNA, 19 nt, Artificial Sequence
  Description of Artificial Sequence: Synthetic oligonucleotide
  Sense strand starting at position 642 of SEQ ID NO: 916268
acuuuauacuucucaggua

SEQ ID NO: 1143275 - RNA, 19 nt, Artificial Sequence
  Description of Artificial Sequence: Synthetic oligonucleotide
  Antisense strand to SEQ ID NO: 1143274
uaccugagaaguauaaagu

SEQ ID NO: 1143276 - RNA, 19 nt, Artificial Sequence
  Description of Artificial Sequence: Synthetic oligonucleotide
  Sense strand starting at position 1007 of SEQ ID NO: 916268
gcuaguuugcuggcuaauu

SEQ ID NO: 1143277 - RNA, 19 nt, Artificial Sequence
  Description of Artificial Sequence: Synthetic oligonucleotide
  Antisense strand to SEQ ID NO: 1143276
aauuagccagcaaacuagc

SEQ ID NO: 1143278 - RNA, 19 nt, Artificial Sequence
  Description of Artificial Sequence: Synthetic oligonucleotide
  Sense strand starting at position 1089 of SEQ ID NO: 916268
uuaaguaauccuuagagcu

SEQ ID NO: 1143279 - RNA, 19 nt, Artificial Sequence
  Description of Artificial Sequence: Synthetic oligonucleotide
  Antisense strand to SEQ ID NO: 1143278
agcucuaaggauuacuuaa

SEQ ID NO: 1143280 - RNA, 19 nt, Artificial Sequence
  Description of Artificial Sequence: Synthetic oligonucleotide
  Sense strand starting at position 1096 of SEQ ID NO: 916268
auccuuagagcugaaaguu

SEQ ID NO: 1143281 - RNA, 19 nt, Artificial Sequence
  Description of Artificial Sequence: Synthetic oligonucleotide
  Antisense strand to SEQ ID NO: 1143280
aacuuucagcucuaaggau

SEQ ID NO: 1143282 - RNA, 19 nt, Artificial Sequence
  Description of Artificial Sequence: Synthetic oligonucleotide
  Sense strand starting at position 1129 of SEQ ID NO: 916268
uucugaauguaggucaaau

SEQ ID NO: 1143283 - RNA, 19 nt, Artificial Sequence
  Description of Artificial Sequence: Synthetic oligonucleotide
  Antisense strand to SEQ ID NO: 1143282
auuugaccuacauucagaa

SEQ ID NO: 1143284 - RNA, 19 nt, Artificial Sequence
  Description of Artificial Sequence: Synthetic oligonucleotide
  Sense strand starting at position 1186 of SEQ ID NO: 916268
cuuccuggucuggaaggau

SEQ ID NO: 1143285 - RNA, 19 nt, Artificial Sequence
  Description of Artificial Sequence: Synthetic oligonucleotide
  Antisense strand to SEQ ID NO: 1143284
auccuuccagaccaggaag

SEQ ID NO: 1143286 - RNA, 19 nt, Artificial Sequence
  Description of Artificial Sequence: Synthetic oligonucleotide
  Sense strand starting at position 1206 of SEQ ID NO: 916268
ccugaagauucugcuggau

SEQ ID NO: 1143287 - RNA, 19 nt, Artificial Sequence
  Description of Artificial Sequence: Synthetic oligonucleotide
  Antisense strand to SEQ ID NO: 1143286
auccagcagaaucuucagg

SEQ ID NO: 1143288 - RNA, 19 nt, Artificial Sequence
  Description of Artificial Sequence: Synthetic oligonucleotide
  Sense strand starting at position 1209 of SEQ ID NO: 916268
gaagauucugcuggauucu

SEQ ID NO: 1143289 - RNA, 19 nt, Artificial Sequence
  Description of Artificial Sequence: Synthetic oligonucleotide
  Antisense strand to SEQ ID NO: 1143288
agaauccagcagaaucuuc

SEQ ID NO: 1143290 - RNA, 19 nt, Artificial Sequence
  Description of Artificial Sequence: Synthetic oligonucleotide
  Sense strand starting at position 1215 of SEQ ID NO: 916268
ucugcuggauucucugaga

SEQ ID NO: 1143291 - RNA, 19 nt, Artificial Sequence
  Description of Artificial Sequence: Synthetic oligonucleotide
  Antisense strand to SEQ ID NO: 1143290
ucucagagaauccagcaga

SEQ ID NO: 1143292 - RNA, 19 nt, Artificial Sequence
  Description of Artificial Sequence: Synthetic oligonucleotide
  Sense strand starting at position 1251 of SEQ ID NO: 916268
guguguuguccuucccagu

SEQ ID NO: 1143293 - RNA, 19 nt, Artificial Sequence
  Description of Artificial Sequence: Synthetic oligonucleotide
  Antisense strand to SEQ ID NO: 1143292
acugggaaggacaacacac

SEQ ID NO: 1143294 - RNA, 19 nt, Artificial Sequence
  Description of Artificial Sequence: Synthetic oligonucleotide
  Sense strand starting at position 1252 of SEQ ID NO: 916268
uguguuguccuucccaguu

SEQ ID NO: 1143295 - RNA, 19 nt, Artificial Sequence
  Description of Artificial Sequence: Synthetic oligonucleotide
  Antisense strand to SEQ ID NO: 1143294
aacugggaaggacaacaca

SEQ ID NO: 1143296 - RNA, 19 nt, Artificial Sequence
  Description of Artificial Sequence: Synthetic oligonucleotide
  Sense strand starting at position 1621 of SEQ ID NO: 916268
uguagaacccuauagugca

SEQ ID NO: 1143297 - RNA, 19 nt, Artificial Sequence
  Description of Artificial Sequence: Synthetic oligonucleotide
  Antisense strand to SEQ ID NO: 1143296
ugcacuauaggguucuaca

SEQ ID NO: 1143298 - RNA, 19 nt, Artificial Sequence
  Description of Artificial Sequence: Synthetic oligonucleotide
  Sense strand starting at position 1716 of SEQ ID NO: 916268
aguaaagauauguguauga

SEQ ID NO: 1143299 - RNA, 19 nt, Artificial Sequence
  Description of Artificial Sequence: Synthetic oligonucleotide
  Antisense strand to SEQ ID NO: 1143298
ucauacacauaucuuuacu

SEQ ID NO: 1143300 - RNA, 19 nt, Artificial Sequence
  Description of Artificial Sequence: Synthetic oligonucleotide
  Sense strand starting at position 1720 of SEQ ID NO: 916268
aagauauguguaugagaug

SEQ ID NO: 1143301 - RNA, 19 nt, Artificial Sequence
  Description of Artificial Sequence: Synthetic oligonucleotide
  Antisense strand to SEQ ID NO: 1143300
caucucauacacauaucuu

SEQ ID NO: 1143302 - RNA, 19 nt, Artificial Sequence
  Description of Artificial Sequence: Synthetic oligonucleotide
  Sense strand starting at position 1867 of SEQ ID NO: 916268
ucucaaucaguuggguaga

SEQ ID NO: 1143303 - RNA, 19 nt, Artificial Sequence
  Description of Artificial Sequence: Synthetic oligonucleotide
  Antisense strand to SEQ ID NO: 1143302
ucuacccaacugauugaga

SEQ ID NO: 1143304 - RNA, 19 nt, Artificial Sequence
  Description of Artificial Sequence: Synthetic oligonucleotide
  Sense strand starting at position 1869 of SEQ ID NO: 916268
ucaaucaguuggguagaau

SEQ ID NO: 1143305 - RNA, 19 nt, Artificial Sequence
  Description of Artificial Sequence: Synthetic oligonucleotide
  Antisense strand to SEQ ID NO: 1143304
auucuacccaacugauuga

SEQ ID NO: 1143306 - RNA, 19 nt, Artificial Sequence
  Description of Artificial Sequence: Synthetic oligonucleotide
  Sense strand starting at position 1878 of SEQ ID NO: 916268
uggguagaaugaguguuua

SEQ ID NO: 1143307 - RNA, 19 nt, Artificial Sequence
  Description of Artificial Sequence: Synthetic oligonucleotide
  Antisense strand to SEQ ID NO: 1143306
uaaacacucauucuaccca

SEQ ID NO: 1143308 - RNA, 19 nt, Artificial Sequence
  Description of Artificial Sequence: Synthetic oligonucleotide
  Sense strand starting at position 1890 of SEQ ID NO: 916268
guguuuagcgugaggauga

SEQ ID NO: 1143309 - RNA, 19 nt, Artificial Sequence
  Description of Artificial Sequence: Synthetic oligonucleotide
  Antisense strand to SEQ ID NO: 1143308
ucauccucacgcuaaacac

SEQ ID NO: 1143310 - RNA, 19 nt, Artificial Sequence
  Description of Artificial Sequence: Synthetic oligonucleotide
  Sense strand starting at position 2067 of SEQ ID NO: 916268
agccuccucccauaaggau

SEQ ID NO: 1143311 - RNA, 19 nt, Artificial Sequence
  Description of Artificial Sequence: Synthetic oligonucleotide
  Antisense strand to SEQ ID NO: 1143310
auccuuaugggaggaggcu

SEQ ID NO: 1143312 - RNA, 19 nt, Artificial Sequence
  Description of Artificial Sequence: Synthetic oligonucleotide
  Sense strand starting at position 2120 of SEQ ID NO: 916268
ggaugucuucugaggucgu

SEQ ID NO: 1143313 - RNA, 19 nt, Artificial Sequence
  Description of Artificial Sequence: Synthetic oligonucleotide
  Antisense strand to SEQ ID NO: 1143312
acgaccucagaagacaucc

SEQ ID NO: 1143314 - RNA, 19 nt, Artificial Sequence
  Description of Artificial Sequence: Synthetic oligonucleotide
  Sense strand starting at position 2154 of SEQ ID NO: 916268
ucuuauugugcauaagauu

SEQ ID NO: 1143315 - RNA, 19 nt, Artificial Sequence
  Description of Artificial Sequence: Synthetic oligonucleotide
  Antisense strand to SEQ ID NO: 1143314
aaucuuaugcacaauaaga

SEQ ID NO: 1143316 - RNA, 19 nt, Artificial Sequence
  Description of Artificial Sequence: Synthetic oligonucleotide
  Sense strand starting at position 2198 of SEQ ID NO: 916268
gauccugacuuagucaagu

SEQ ID NO: 1143317 - RNA, 19 nt, Artificial Sequence
  Description of Artificial Sequence: Synthetic oligonucleotide
  Antisense strand to SEQ ID NO: 1143316
acuugacuaagucaggauc

SEQ ID NO: 1143318 - RNA, 19 nt, Artificial Sequence
  Description of Artificial Sequence: Synthetic oligonucleotide
  Sense strand starting at position 2254 of SEQ ID NO: 916268
accacacugaguugugaga

SEQ ID NO: 1143319 - RNA, 19 nt, Artificial Sequence
  Description of Artificial Sequence: Synthetic oligonucleotide
  Antisense strand to SEQ ID NO: 1143318
ucucacaacucaguguggu

SEQ ID NO: 1143320 - RNA, 19 nt, Artificial Sequence
  Description of Artificial Sequence: Synthetic oligonucleotide
  Sense strand starting at position 2364 of SEQ ID NO: 916268
acacacauacugugauaca

SEQ ID NO: 1143321 - RNA, 19 nt, Artificial Sequence
  Description of Artificial Sequence: Synthetic oligonucleotide
  Antisense strand to SEQ ID NO: 1143320
uguaucacaguaugugugu

SEQ ID NO: 1143322 - RNA, 19 nt, Artificial Sequence
  Description of Artificial Sequence: Synthetic oligonucleotide
  Sense strand starting at position 2432 of SEQ ID NO: 916268
caauaaaguuggguuuaau

SEQ ID NO: 1143323 - RNA, 19 nt, Artificial Sequence
  Description of Artificial Sequence: Synthetic oligonucleotide
  Antisense strand to SEQ ID NO: 1143322
auuaaacccaacuuuauug

SEQ ID NO: 1143324 - RNA, 19 nt, Artificial Sequence
  Description of Artificial Sequence: Synthetic oligonucleotide
  Sense strand starting at position 2653 of SEQ ID NO: 916268
aagggcuaguaucuggaaa

SEQ ID NO: 1143325 - RNA, 19 nt, Artificial Sequence
  Description of Artificial Sequence: Synthetic oligonucleotide
  Antisense strand to SEQ ID NO: 1143324
uuuccagauacuagcccuu

SEQ ID NO: 1143326 - RNA, 19 nt, Artificial Sequence
  Description of Artificial Sequence: Synthetic oligonucleotide
  Sense strand starting at position 2728 of SEQ ID NO: 916268
uguuaauauggaggcauaa

SEQ ID NO: 1143327 - RNA, 19 nt, Artificial Sequence
  Description of Artificial Sequence: Synthetic oligonucleotide
  Antisense strand to SEQ ID NO: 1143326
uuaugccuccauauuaaca

SEQ ID NO: 1143328 - RNA, 19 nt, Artificial Sequence
  Description of Artificial Sequence: Synthetic oligonucleotide
  Sense strand starting at position 2766 of SEQ ID NO: 916268
ggccucauccaggauucca

SEQ ID NO: 1143329 - RNA, 19 nt, Artificial Sequence
  Description of Artificial Sequence: Synthetic oligonucleotide
  Antisense strand to SEQ ID NO: 1143328
uggaauccuggaugaggcc

SEQ ID NO: 1143330 - RNA, 19 nt, Artificial Sequence
  Description of Artificial Sequence: Synthetic oligonucleotide
  Sense strand starting at position 3014 of SEQ ID NO: 916268
uguguuagucuguuucucu

SEQ ID NO: 1143331 - RNA, 19 nt, Artificial Sequence
  Description of Artificial Sequence: Synthetic oligonucleotide
  Antisense strand to SEQ ID NO: 1143330
agagaaacagacuaacaca

SEQ ID NO: 1143332 - RNA, 19 nt, Artificial Sequence
  Description of Artificial Sequence: Synthetic oligonucleotide
  Sense strand starting at position 3109 of SEQ ID NO: 916268
guagcugcucaagaaauau

SEQ ID NO: 1143333 - RNA, 19 nt, Artificial Sequence
  Description of Artificial Sequence: Synthetic oligonucleotide
  Antisense strand to SEQ ID NO: 1143332
auauuucuugagcagcuac

SEQ ID NO: 1143334 - RNA, 19 nt, Artificial Sequence
  Description of Artificial Sequence: Synthetic oligonucleotide
  Sense strand starting at position 3654 of SEQ ID NO: 916268
aggugauaucuguaaucac

SEQ ID NO: 1143335 - RNA, 19 nt, Artificial Sequence
  Description of Artificial Sequence: Synthetic oligonucleotide
  Antisense strand to SEQ ID NO: 1143334
gugauuacagauaucaccu

SEQ ID NO: 1143336 - RNA, 19 nt, Artificial Sequence
  Description of Artificial Sequence: Synthetic oligonucleotide
  Sense strand starting at position 3693 of SEQ ID NO: 916268
uaagaaauguuguugggau

SEQ ID NO: 1143337 - RNA, 19 nt, Artificial Sequence
  Description of Artificial Sequence: Synthetic oligonucleotide
  Antisense strand to SEQ ID NO: 1143336
aucccaacaacauuucuua

SEQ ID NO: 1143338 - RNA, 19 nt, Artificial Sequence
  Description of Artificial Sequence: Synthetic oligonucleotide
  Sense strand starting at position 3695 of SEQ ID NO: 916268
agaaauguuguugggauaa

SEQ ID NO: 1143339 - RNA, 19 nt, Artificial Sequence
  Description of Artificial Sequence: Synthetic oligonucleotide
  Antisense strand to SEQ ID NO: 1143338
uuaucccaacaacauuucu

SEQ ID NO: 1143340 - RNA, 19 nt, Artificial Sequence
  Description of Artificial Sequence: Synthetic oligonucleotide
  Sense strand starting at position 3808 of SEQ ID NO: 916268
augagauuauggccggaug

SEQ ID NO: 1143341 - RNA, 19 nt, Artificial Sequence
  Description of Artificial Sequence: Synthetic oligonucleotide
  Antisense strand to SEQ ID NO: 1143340
cauccggccauaaucucau

SEQ ID NO: 1143342 - RNA, 19 nt, Artificial Sequence
  Description of Artificial Sequence: Synthetic oligonucleotide
  Sense strand starting at position 3947 of SEQ ID NO: 916268
gagguugugagcgcuugua

SEQ ID NO: 1143343 - RNA, 19 nt, Artificial Sequence
  Description of Artificial Sequence: Synthetic oligonucleotide
  Antisense strand to SEQ ID NO: 1143342
uacaagcgcucacaaccuc

SEQ ID NO: 1143344 - RNA, 19 nt, Artificial Sequence
  Description of Artificial Sequence: Synthetic oligonucleotide
  Sense strand starting at position 3949 of SEQ ID NO: 916268
gguugugagcgcuuguagu

SEQ ID NO: 1143345 - RNA, 19 nt, Artificial Sequence
  Description of Artificial Sequence: Synthetic oligonucleotide
  Antisense strand to SEQ ID NO: 1143344
acuacaagcgcucacaacc

SEQ ID NO: 1143346 - RNA, 19 nt, Artificial Sequence
  Description of Artificial Sequence: Synthetic oligonucleotide
  Sense strand starting at position 62 of SEQ ID NO: 916269
guauuagacggccaacuuu

SEQ ID NO: 1143347 - RNA, 19 nt, Artificial Sequence
  Description of Artificial Sequence: Synthetic oligonucleotide
  Antisense strand to SEQ ID NO: 1143346
aaaguuggccgucuaauac

SEQ ID NO: 1143348 - RNA, 19 nt, Artificial Sequence
  Description of Artificial Sequence: Synthetic oligonucleotide
  Sense strand starting at position 233 of SEQ ID NO: 916269
guaaaccuucuugagcuuu

SEQ ID NO: 1143349 - RNA, 19 nt, Artificial Sequence
  Description of Artificial Sequence: Synthetic oligonucleotide
  Antisense strand to SEQ ID NO: 1143348
aaagcucaagaagguuuac

SEQ ID NO: 1143350 - RNA, 19 nt, Artificial Sequence
  Description of Artificial Sequence: Synthetic oligonucleotide
  Sense strand starting at position 324 of SEQ ID NO: 916269
gcuaaauggacagguccau

SEQ ID NO: 1143351 - RNA, 19 nt, Artificial Sequence
  Description of Artificial Sequence: Synthetic oligonucleotide
  Antisense strand to SEQ ID NO: 1143350
auggaccuguccauuuagc

SEQ ID NO: 1143352 - RNA, 19 nt, Artificial Sequence
  Description of Artificial Sequence: Synthetic oligonucleotide
  Sense strand starting at position 377 of SEQ ID NO: 916269
uucuacauuuaagagagaa

SEQ ID NO: 1143353 - RNA, 19 nt, Artificial Sequence
  Description of Artificial Sequence: Synthetic oligonucleotide
  Antisense strand to SEQ ID NO: 1143352
uucucucuuaaauguagaa

SEQ ID NO: 1143354 - RNA, 19 nt, Artificial Sequence
  Description of Artificial Sequence: Synthetic oligonucleotide
  Sense strand starting at position 439 of SEQ ID NO: 916269
ggacuaagacagugcauau

SEQ ID NO: 1143355 - RNA, 19 nt, Artificial Sequence
  Description of Artificial Sequence: Synthetic oligonucleotide
  Antisense strand to SEQ ID NO: 1143354
auaugcacugucuuagucc

SEQ ID NO: 1143356 - RNA, 19 nt, Artificial Sequence
  Description of Artificial Sequence: Synthetic oligonucleotide
  Sense strand starting at position 607 of SEQ ID NO: 916269
caagaauugucaguucuug

SEQ ID NO: 1143357 - RNA, 19 nt, Artificial Sequence
  Description of Artificial Sequence: Synthetic oligonucleotide
  Antisense strand to SEQ ID NO: 1143356
caagaacugacaauucuug

SEQ ID NO: 1143358 - RNA, 19 nt, Artificial Sequence
  Description of Artificial Sequence: Synthetic oligonucleotide
  Sense strand starting at position 824 of SEQ ID NO: 916269
cuuacauugcuugaauaag

SEQ ID NO: 1143359 - RNA, 19 nt, Artificial Sequence
  Description of Artificial Sequence: Synthetic oligonucleotide
  Antisense strand to SEQ ID NO: 1143358
cuuauucaagcaauguaag

SEQ ID NO: 1143360 - RNA, 19 nt, Artificial Sequence
  Description of Artificial Sequence: Synthetic oligonucleotide
  Sense strand starting at position 880 of SEQ ID NO: 916269
ugguguaaagacugaccua

SEQ ID NO: 1143361 - RNA, 19 nt, Artificial Sequence
  Description of Artificial Sequence: Synthetic oligonucleotide
  Antisense strand to SEQ ID NO: 1143360
uaggucagucuuuacacca

SEQ ID NO: 1143362 - RNA, 19 nt, Artificial Sequence
  Description of Artificial Sequence: Synthetic oligonucleotide
  Sense strand starting at position 1179 of SEQ ID NO: 916269
gaggcaauuugagaaacaa

SEQ ID NO: 1143363 - RNA, 19 nt, Artificial Sequence
  Description of Artificial Sequence: Synthetic oligonucleotide
  Antisense strand to SEQ ID NO: 1143362
uuguuucucaaauugccuc

SEQ ID NO: 1143364 - RNA, 19 nt, Artificial Sequence
  Description of Artificial Sequence: Synthetic oligonucleotide
  Sense strand starting at position 1226 of SEQ ID NO: 916269
caaagagguuccuuccaga

SEQ ID NO: 1143365 - RNA, 19 nt, Artificial Sequence
  Description of Artificial Sequence: Synthetic oligonucleotide
  Antisense strand to SEQ ID NO: 1143364
ucuggaaggaaccucuuug

SEQ ID NO: 1143366 - RNA, 19 nt, Artificial Sequence
  Description of Artificial Sequence: Synthetic oligonucleotide
  Sense strand starting at position 1296 of SEQ ID NO: 916269
cuugauaucgaaugaucau

SEQ ID NO: 1143367 - RNA, 19 nt, Artificial Sequence
  Description of Artificial Sequence: Synthetic oligonucleotide
  Antisense strand to SEQ ID NO: 1143366
augaucauucgauaucaag

SEQ ID NO: 1143368 - RNA, 19 nt, Artificial Sequence
  Description of Artificial Sequence: Synthetic oligonucleotide
  Sense strand starting at position 1302 of SEQ ID NO: 916269
aucgaaugaucaucucauu

SEQ ID NO: 1143369 - RNA, 19 nt, Artificial Sequence
  Description of Artificial Sequence: Synthetic oligonucleotide
  Antisense strand to SEQ ID NO: 1143368
aaugagaugaucauucgau

SEQ ID NO: 1143370 - RNA, 19 nt, Artificial Sequence
  Description of Artificial Sequence: Synthetic oligonucleotide
  Sense strand starting at position 1453 of SEQ ID NO: 916269
uugcaaugguuuccauaaa

SEQ ID NO: 1143371 - RNA, 19 nt, Artificial Sequence
  Description of Artificial Sequence: Synthetic oligonucleotide
  Antisense strand to SEQ ID NO: 1143370
uuuauggaaaccauugcaa

SEQ ID NO: 1143372 - RNA, 19 nt, Artificial Sequence
  Description of Artificial Sequence: Synthetic oligonucleotide
  Sense strand starting at position 1479 of SEQ ID NO: 916269
ugaagaaguaauggccaua

SEQ ID NO: 1143373 - RNA, 19 nt, Artificial Sequence
  Description of Artificial Sequence: Synthetic oligonucleotide
  Antisense strand to SEQ ID NO: 1143372
uauggccauuacuucuuca

SEQ ID NO: 1143374 - RNA, 19 nt, Artificial Sequence
  Description of Artificial Sequence: Synthetic oligonucleotide
  Sense strand starting at position 1501 of SEQ ID NO: 916269
acaacucuaucuuugugua

SEQ ID NO: 1143375 - RNA, 19 nt, Artificial Sequence
  Description of Artificial Sequence: Synthetic oligonucleotide
  Antisense strand to SEQ ID NO: 1143374
uacacaaagauagaguugu

SEQ ID NO: 1143376 - RNA, 19 nt, Artificial Sequence
  Description of Artificial Sequence: Synthetic oligonucleotide
  Sense strand starting at position 1544 of SEQ ID NO: 916269
acucuuuacucgcuagaaa

SEQ ID NO: 1143377 - RNA, 19 nt, Artificial Sequence
  Description of Artificial Sequence: Synthetic oligonucleotide
  Antisense strand to SEQ ID NO: 1143376
uuucuagcgaguaaagagu

SEQ ID NO: 1143378 - RNA, 19 nt, Artificial Sequence
  Description of Artificial Sequence: Synthetic oligonucleotide
  Sense strand starting at position 1564 of SEQ ID NO: 916269
gggacagagugguuucucu

SEQ ID NO: 1143379 - RNA, 19 nt, Artificial Sequence
  Description of Artificial Sequence: Synthetic oligonucleotide
  Antisense strand to SEQ ID NO: 1143378
agagaaaccacucuguccc

SEQ ID NO: 1143380 - RNA, 19 nt, Artificial Sequence
  Description of Artificial Sequence: Synthetic oligonucleotide
  Sense strand starting at position 1568 of SEQ ID NO: 916269
cagagugguuucucuaaca

SEQ ID NO: 1143381 - RNA, 19 nt, Artificial Sequence
  Description of Artificial Sequence: Synthetic oligonucleotide
  Antisense strand to SEQ ID NO: 1143380
uguuagagaaaccacucug

SEQ ID NO: 1143382 - RNA, 19 nt, Artificial Sequence
  Description of Artificial Sequence: Synthetic oligonucleotide
  Sense strand starting at position 1592 of SEQ ID NO: 916269
gcccuuagaucauuaggaa

SEQ ID NO: 1143383 - RNA, 19 nt, Artificial Sequence
  Description of Artificial Sequence: Synthetic oligonucleotide
  Antisense strand to SEQ ID NO: 1143382
uuccuaaugaucuaagggc

SEQ ID NO: 1143384 - RNA, 19 nt, Artificial Sequence
  Description of Artificial Sequence: Synthetic oligonucleotide
  Sense strand starting at position 1612 of SEQ ID NO: 916269
ugcguaggcgccaauguau

SEQ ID NO: 1143385 - RNA, 19 nt, Artificial Sequence
  Description of Artificial Sequence: Synthetic oligonucleotide
  Antisense strand to SEQ ID NO: 1143384
auacauuggcgccuacgca

SEQ ID NO: 1143386 - RNA, 19 nt, Artificial Sequence
  Description of Artificial Sequence: Synthetic oligonucleotide
  Sense strand starting at position 1621 of SEQ ID NO: 916269
gccaauguauaaucaguaa

SEQ ID NO: 1143387 - RNA, 19 nt, Artificial Sequence
  Description of Artificial Sequence: Synthetic oligonucleotide
  Antisense strand to SEQ ID NO: 1143386
uuacugauuauacauuggc

SEQ ID NO: 1143388 - RNA, 19 nt, Artificial Sequence
  Description of Artificial Sequence: Synthetic oligonucleotide
  Sense strand starting at position 1625 of SEQ ID NO: 916269
auguauaaucaguaacccu

SEQ ID NO: 1143389 - RNA, 19 nt, Artificial Sequence
  Description of Artificial Sequence: Synthetic oligonucleotide
  Antisense strand to SEQ ID NO: 1143388
aggguuacugauuauacau

SEQ ID NO: 1143390 - RNA, 19 nt, Artificial Sequence
  Description of Artificial Sequence: Synthetic oligonucleotide
  Sense strand starting at position 1671 of SEQ ID NO: 916269
ccagaauuagcauaggcua

SEQ ID NO: 1143391 - RNA, 19 nt, Artificial Sequence
  Description of Artificial Sequence: Synthetic oligonucleotide
  Antisense strand to SEQ ID NO: 1143390
uagccuaugcuaauucugg

SEQ ID NO: 1143392 - RNA, 19 nt, Artificial Sequence
  Description of Artificial Sequence: Synthetic oligonucleotide
  Sense strand starting at position 1814 of SEQ ID NO: 916269
gcagcuugucuggaagaac

SEQ ID NO: 1143393 - RNA, 19 nt, Artificial Sequence
  Description of Artificial Sequence: Synthetic oligonucleotide
  Antisense strand to SEQ ID NO: 1143392
guucuuccagacaagcugc

SEQ ID NO: 1143394 - RNA, 19 nt, Artificial Sequence
  Description of Artificial Sequence: Synthetic oligonucleotide
  Sense strand starting at position 1933 of SEQ ID NO: 916269
aucucauauucuuuggagu

SEQ ID NO: 1143395 - RNA, 19 nt, Artificial Sequence
  Description of Artificial Sequence: Synthetic oligonucleotide
  Antisense strand to SEQ ID NO: 1143394
acuccaaagaauaugagau

SEQ ID NO: 1143396 - RNA, 19 nt, Artificial Sequence
  Description of Artificial Sequence: Synthetic oligonucleotide
  Sense strand starting at position 1934 of SEQ ID NO: 916269
ucucauauucuuuggagug

SEQ ID NO: 1143397 - RNA, 19 nt, Artificial Sequence
  Description of Artificial Sequence: Synthetic oligonucleotide
  Antisense strand to SEQ ID NO: 1143396
cacuccaaagaauaugaga

SEQ ID NO: 1143398 - RNA, 19 nt, Artificial Sequence
  Description of Artificial Sequence: Synthetic oligonucleotide
  Sense strand starting at position 1944 of SEQ ID NO: 916269
uuuggagugccucaugauu

SEQ ID NO: 1143399 - RNA, 19 nt, Artificial Sequence
  Description of Artificial Sequence: Synthetic oligonucleotide
  Antisense strand to SEQ ID NO: 1143398
aaucaugaggcacuccaaa

SEQ ID NO: 1143400 - RNA, 19 nt, Artificial Sequence
  Description of Artificial Sequence: Synthetic oligonucleotide
  Sense strand starting at position 1984 of SEQ ID NO: 916269
acgggcauuuaauaauuga

SEQ ID NO: 1143401 - RNA, 19 nt, Artificial Sequence
  Description of Artificial Sequence: Synthetic oligonucleotide
  Antisense strand to SEQ ID NO: 1143400
ucaauuauuaaaugcccgu

SEQ ID NO: 1143402 - RNA, 19 nt, Artificial Sequence
  Description of Artificial Sequence: Synthetic oligonucleotide
  Sense strand starting at position 2122 of SEQ ID NO: 916269
aguaaaugaugguuuaguu

SEQ ID NO: 1143403 - RNA, 19 nt, Artificial Sequence
  Description of Artificial Sequence: Synthetic oligonucleotide
  Antisense strand to SEQ ID NO: 1143402
aacuaaaccaucauuuacu

SEQ ID NO: 1143404 - RNA, 19 nt, Artificial Sequence
  Description of Artificial Sequence: Synthetic oligonucleotide
  Sense strand starting at position 2148 of SEQ ID NO: 916269
ccugccauucccuagguaa

SEQ ID NO: 1143405 - RNA, 19 nt, Artificial Sequence
  Description of Artificial Sequence: Synthetic oligonucleotide
  Antisense strand to SEQ ID NO: 1143404
uuaccuagggaauggcagg

SEQ ID NO: 1143406 - RNA, 19 nt, Artificial Sequence
  Description of Artificial Sequence: Synthetic oligonucleotide
  Sense strand starting at position 2187 of SEQ ID NO: 916269
uuggauuuaugacagacga

SEQ ID NO: 1143407 - RNA, 19 nt, Artificial Sequence
  Description of Artificial Sequence: Synthetic oligonucleotide
  Antisense strand to SEQ ID NO: 1143406
ucgucugucauaaauccaa

SEQ ID NO: 1143408 - RNA, 19 nt, Artificial Sequence
  Description of Artificial Sequence: Synthetic oligonucleotide
  Sense strand starting at position 2218 of SEQ ID NO: 916269
ucaccaucacugcagaagu

SEQ ID NO: 1143409 - RNA, 19 nt, Artificial Sequence
  Description of Artificial Sequence: Synthetic oligonucleotide
  Antisense strand to SEQ ID NO: 1143408
acuucugcagugaugguga

SEQ ID NO: 1143410 - RNA, 19 nt, Artificial Sequence
  Description of Artificial Sequence: Synthetic oligonucleotide
  Sense strand starting at position 2255 of SEQ ID NO: 916269
gguuuccuaucccuuugaa

SEQ ID NO: 1143411 - RNA, 19 nt, Artificial Sequence
  Description of Artificial Sequence: Synthetic oligonucleotide
  Antisense strand to SEQ ID NO: 1143410
uucaaagggauaggaaacc

SEQ ID NO: 1143412 - RNA, 19 nt, Artificial Sequence
  Description of Artificial Sequence: Synthetic oligonucleotide
  Sense strand starting at position 2770 of SEQ ID NO: 916269
agaauaggauuggagauaa

SEQ ID NO: 1143413 - RNA, 19 nt, Artificial Sequence
  Description of Artificial Sequence: Synthetic oligonucleotide
  Antisense strand to SEQ ID NO: 1143412
uuaucuccaauccuauucu

SEQ ID NO: 1143414 - RNA, 19 nt, Artificial Sequence
  Description of Artificial Sequence: Synthetic oligonucleotide
  Sense strand starting at position 3296 of SEQ ID NO: 916269
gugcaaauuaauugggaca

SEQ ID NO: 1143415 - RNA, 19 nt, Artificial Sequence
  Description of Artificial Sequence: Synthetic oligonucleotide
  Antisense strand to SEQ ID NO: 1143414
ugucccaauuaauuugcac

SEQ ID NO: 1143416 - RNA, 19 nt, Artificial Sequence
  Description of Artificial Sequence: Synthetic oligonucleotide
  Sense strand starting at position 3307 of SEQ ID NO: 916269
uugggacaccaauguugaa

SEQ ID NO: 1143417 - RNA, 19 nt, Artificial Sequence
  Description of Artificial Sequence: Synthetic oligonucleotide
  Antisense strand to SEQ ID NO: 1143416
uucaacauuggugucccaa

SEQ ID NO: 1143418 - RNA, 19 nt, Artificial Sequence
  Description of Artificial Sequence: Synthetic oligonucleotide
  Sense strand starting at position 3527 of SEQ ID NO: 916269
ccucaugauccuugucaca

SEQ ID NO: 1143419 - RNA, 19 nt, Artificial Sequence
  Description of Artificial Sequence: Synthetic oligonucleotide
  Antisense strand to SEQ ID NO: 1143418
ugugacaaggaucaugagg

SEQ ID NO: 1143420 - RNA, 19 nt, Artificial Sequence
  Description of Artificial Sequence: Synthetic oligonucleotide
  Sense strand starting at position 3529 of SEQ ID NO: 916269
ucaugauccuugucacacu

SEQ ID NO: 1143421 - RNA, 19 nt, Artificial Sequence
  Description of Artificial Sequence: Synthetic oligonucleotide
  Antisense strand to SEQ ID NO: 1143420
agugugacaaggaucauga

SEQ ID NO: 1143422 - RNA, 19 nt, Artificial Sequence
  Description of Artificial Sequence: Synthetic oligonucleotide
  Sense strand starting at position 3752 of SEQ ID NO: 916269
auguaacuuccucaaaggu

SEQ ID NO: 1143423 - RNA, 19 nt, Artificial Sequence
  Description of Artificial Sequence: Synthetic oligonucleotide
  Antisense strand to SEQ ID NO: 1143422
accuuugaggaaguuacau

SEQ ID NO: 1143424 - RNA, 19 nt, Artificial Sequence
  Description of Artificial Sequence: Synthetic oligonucleotide
  Sense strand starting at position 3895 of SEQ ID NO: 916269
ggcccaggaauugguaauu

SEQ ID NO: 1143425 - RNA, 19 nt, Artificial Sequence
  Description of Artificial Sequence: Synthetic oligonucleotide
  Antisense strand to SEQ ID NO: 1143424
aauuaccaauuccugggcc

SEQ ID NO: 1143426 - RNA, 19 nt, Artificial Sequence
  Description of Artificial Sequence: Synthetic oligonucleotide
  Sense strand starting at position 20 of SEQ ID NO: 916270
guaaaucagaacuggugua

SEQ ID NO: 1143427 - RNA, 19 nt, Artificial Sequence
  Description of Artificial Sequence: Synthetic oligonucleotide
  Antisense strand to SEQ ID NO: 1143426
uacaccaguucugauuuac

SEQ ID NO: 1143428 - RNA, 19 nt, Artificial Sequence
  Description of Artificial Sequence: Synthetic oligonucleotide
  Sense strand starting at position 539 of SEQ ID NO: 916270
cugugucugccagacagaa

SEQ ID NO: 1143429 - RNA, 19 nt, Artificial Sequence
  Description of Artificial Sequence: Synthetic oligonucleotide
  Antisense strand to SEQ ID NO: 1143428
uucugucuggcagacacag

SEQ ID NO: 1143430 - RNA, 19 nt, Artificial Sequence
  Description of Artificial Sequence: Synthetic oligonucleotide
  Sense strand starting at position 559 of SEQ ID NO: 916270
aagcguugccuguaaagaa

SEQ ID NO: 1143431 - RNA, 19 nt, Artificial Sequence
  Description of Artificial Sequence: Synthetic oligonucleotide
  Antisense strand to SEQ ID NO: 1143430
uucuuuacaggcaacgcuu

SEQ ID NO: 1143432 - RNA, 19 nt, Artificial Sequence
  Description of Artificial Sequence: Synthetic oligonucleotide
  Sense strand starting at position 569 of SEQ ID NO: 916270
uguaaagaaaggugugcau

SEQ ID NO: 1143433 - RNA, 19 nt, Artificial Sequence
  Description of Artificial Sequence: Synthetic oligonucleotide
  Antisense strand to SEQ ID NO: 1143432
augcacaccuuucuuuaca

SEQ ID NO: 1143434 - RNA, 19 nt, Artificial Sequence
  Description of Artificial Sequence: Synthetic oligonucleotide
  Sense strand starting at position 571 of SEQ ID NO: 916270
uaaagaaaggugugcaucu

SEQ ID NO: 1143435 - RNA, 19 nt, Artificial Sequence
  Description of Artificial Sequence: Synthetic oligonucleotide
  Antisense strand to SEQ ID NO: 1143434
agaugcacaccuuucuuua

SEQ ID NO: 1143436 - RNA, 19 nt, Artificial Sequence
  Description of Artificial Sequence: Synthetic oligonucleotide
  Sense strand starting at position 572 of SEQ ID NO: 916270
aaagaaaggugugcaucua

SEQ ID NO: 1143437 - RNA, 19 nt, Artificial Sequence
  Description of Artificial Sequence: Synthetic oligonucleotide
  Antisense strand to SEQ ID NO: 1143436
uagaugcacaccuuucuuu

SEQ ID NO: 1143438 - RNA, 19 nt, Artificial Sequence
  Description of Artificial Sequence: Synthetic oligonucleotide
  Sense strand starting at position 596 of SEQ ID NO: 916270
augcaaugacccugugaau

SEQ ID NO: 1143439 - RNA, 19 nt, Artificial Sequence
  Description of Artificial Sequence: Synthetic oligonucleotide
  Antisense strand to SEQ ID NO: 1143438
auucacagggucauugcau

SEQ ID NO: 1143440 - RNA, 19 nt, Artificial Sequence
  Description of Artificial Sequence: Synthetic oligonucleotide
  Sense strand starting at position 620 of SEQ ID NO: 916270
ucuuuaguucgcuaccuca

SEQ ID NO: 1143441 - RNA, 19 nt, Artificial Sequence
  Description of Artificial Sequence: Synthetic oligonucleotide
  Antisense strand to SEQ ID NO: 1143440
ugagguagcgaacuaaaga

SEQ ID NO: 1143442 - RNA, 19 nt, Artificial Sequence
  Description of Artificial Sequence: Synthetic oligonucleotide
  Sense strand starting at position 712 of SEQ ID NO: 916270
gauggacaauuauuacagu

SEQ ID NO: 1143443 - RNA, 19 nt, Artificial Sequence
  Description of Artificial Sequence: Synthetic oligonucleotide
  Antisense strand to SEQ ID NO: 1143442
acuguaauaauuguccauc

SEQ ID NO: 1143444 - RNA, 19 nt, Artificial Sequence
  Description of Artificial Sequence: Synthetic oligonucleotide
  Sense strand starting at position 721 of SEQ ID NO: 916270
uuauuacaguuccugaaag

SEQ ID NO: 1143445 - RNA, 19 nt, Artificial Sequence
  Description of Artificial Sequence: Synthetic oligonucleotide
  Antisense strand to SEQ ID NO: 1143444
cuuucaggaacuguaauaa

SEQ ID NO: 1143446 - RNA, 19 nt, Artificial Sequence
  Description of Artificial Sequence: Synthetic oligonucleotide
  Sense strand starting at position 846 of SEQ ID NO: 916270
ucuacaaugucuuuguauu

SEQ ID NO: 1143447 - RNA, 19 nt, Artificial Sequence
  Description of Artificial Sequence: Synthetic oligonucleotide
  Antisense strand to SEQ ID NO: 1143446
aauacaaagacauuguaga

SEQ ID NO: 1143448 - RNA, 19 nt, Artificial Sequence
  Description of Artificial Sequence: Synthetic oligonucleotide
  Sense strand starting at position 847 of SEQ ID NO: 916270
cuacaaugucuuuguauug

SEQ ID NO: 1143449 - RNA, 19 nt, Artificial Sequence
  Description of Artificial Sequence: Synthetic oligonucleotide
  Antisense strand to SEQ ID NO: 1143448
caauacaaagacauuguag

SEQ ID NO: 1143450 - RNA, 19 nt, Artificial Sequence
  Description of Artificial Sequence: Synthetic oligonucleotide
  Sense strand starting at position 975 of SEQ ID NO: 916270
gacaucugacucuguaugu

SEQ ID NO: 1143451 - RNA, 19 nt, Artificial Sequence
  Description of Artificial Sequence: Synthetic oligonucleotide
  Antisense strand to SEQ ID NO: 1143450
acauacagagucagauguc

SEQ ID NO: 1143452 - RNA, 19 nt, Artificial Sequence
  Description of Artificial Sequence: Synthetic oligonucleotide
  Sense strand starting at position 994 of SEQ ID NO: 916270
gguaguuuaauguaugaau

SEQ ID NO: 1143453 - RNA, 19 nt, Artificial Sequence
  Description of Artificial Sequence: Synthetic oligonucleotide
  Antisense strand to SEQ ID NO: 1143452
auucauacauuaaacuacc

SEQ ID NO: 1143454 - RNA, 19 nt, Artificial Sequence
  Description of Artificial Sequence: Synthetic oligonucleotide
  Sense strand starting at position 1052 of SEQ ID NO: 916270
cucccuucucaguguaacu

SEQ ID NO: 1143455 - RNA, 19 nt, Artificial Sequence
  Description of Artificial Sequence: Synthetic oligonucleotide
  Antisense strand to SEQ ID NO: 1143454
aguuacacugagaagggag

SEQ ID NO: 1143456 - RNA, 19 nt, Artificial Sequence
  Description of Artificial Sequence: Synthetic oligonucleotide
  Sense strand starting at position 1063 of SEQ ID NO: 916270
guguaacuugguggcucaa

SEQ ID NO: 1143457 - RNA, 19 nt, Artificial Sequence
  Description of Artificial Sequence: Synthetic oligonucleotide
  Antisense strand to SEQ ID NO: 1143456
uugagccaccaaguuacac

SEQ ID NO: 1143458 - RNA, 19 nt, Artificial Sequence
  Description of Artificial Sequence: Synthetic oligonucleotide
  Sense strand starting at position 1214 of SEQ ID NO: 916270
guacuauuguaacuaggac

SEQ ID NO: 1143459 - RNA, 19 nt, Artificial Sequence
  Description of Artificial Sequence: Synthetic oligonucleotide
  Antisense strand to SEQ ID NO: 1143458
guccuaguuacaauaguac

SEQ ID NO: 1143460 - RNA, 19 nt, Artificial Sequence
  Description of Artificial Sequence: Synthetic oligonucleotide
  Sense strand starting at position 1334 of SEQ ID NO: 916270
gcaguacugccauaauagc

SEQ ID NO: 1143461 - RNA, 19 nt, Artificial Sequence
  Description of Artificial Sequence: Synthetic oligonucleotide
  Antisense strand to SEQ ID NO: 1143460
gcuauuauggcaguacugc

SEQ ID NO: 1143462 - RNA, 19 nt, Artificial Sequence
  Description of Artificial Sequence: Synthetic oligonucleotide
  Sense strand starting at position 1654 of SEQ ID NO: 916270
cugucacgaucucugcuaa

SEQ ID NO: 1143463 - RNA, 19 nt, Artificial Sequence
  Description of Artificial Sequence: Synthetic oligonucleotide
  Antisense strand to SEQ ID NO: 1143462
uuagcagagaucgugacag

SEQ ID NO: 1143464 - RNA, 19 nt, Artificial Sequence
  Description of Artificial Sequence: Synthetic oligonucleotide
  Sense strand starting at position 1655 of SEQ ID NO: 916270
ugucacgaucucugcuaaa

SEQ ID NO: 1143465 - RNA, 19 nt, Artificial Sequence
  Description of Artificial Sequence: Synthetic oligonucleotide
  Antisense strand to SEQ ID NO: 1143464
uuuagcagagaucgugaca

SEQ ID NO: 1143466 - RNA, 19 nt, Artificial Sequence
  Description of Artificial Sequence: Synthetic oligonucleotide
  Sense strand starting at position 1731 of SEQ ID NO: 916270
gacugaaugccuuggcuac

SEQ ID NO: 1143467 - RNA, 19 nt, Artificial Sequence
  Description of Artificial Sequence: Synthetic oligonucleotide
  Antisense strand to SEQ ID NO: 1143466
guagccaaggcauucaguc

SEQ ID NO: 1143468 - RNA, 19 nt, Artificial Sequence
  Description of Artificial Sequence: Synthetic oligonucleotide
  Sense strand starting at position 1743 of SEQ ID NO: 916270
uggcuacuccucuaaagac

SEQ ID NO: 1143469 - RNA, 19 nt, Artificial Sequence
  Description of Artificial Sequence: Synthetic oligonucleotide
  Antisense strand to SEQ ID NO: 1143468
gucuuuagaggaguagcca

SEQ ID NO: 1143470 - RNA, 19 nt, Artificial Sequence
  Description of Artificial Sequence: Synthetic oligonucleotide
  Sense strand starting at position 2269 of SEQ ID NO: 916270
ggcugagcucccgaagaga

SEQ ID NO: 1143471 - RNA, 19 nt, Artificial Sequence
  Description of Artificial Sequence: Synthetic oligonucleotide
  Antisense strand to SEQ ID NO: 1143470
ucucuucgggagcucagcc

SEQ ID NO: 1143472 - RNA, 19 nt, Artificial Sequence
  Description of Artificial Sequence: Synthetic oligonucleotide
  Sense strand starting at position 2442 of SEQ ID NO: 916270
cuuguuggaucugucauua

SEQ ID NO: 1143473 - RNA, 19 nt, Artificial Sequence
  Description of Artificial Sequence: Synthetic oligonucleotide
  Antisense strand to SEQ ID NO: 1143472
uaaugacagauccaacaag

SEQ ID NO: 1143474 - RNA, 19 nt, Artificial Sequence
  Description of Artificial Sequence: Synthetic oligonucleotide
  Sense strand starting at position 2491 of SEQ ID NO: 916270
gcucaucuaguaugguuau

SEQ ID NO: 1143475 - RNA, 19 nt, Artificial Sequence
  Description of Artificial Sequence: Synthetic oligonucleotide
  Antisense strand to SEQ ID NO: 1143474
auaaccauacuagaugagc

SEQ ID NO: 1143476 - RNA, 19 nt, Artificial Sequence
  Description of Artificial Sequence: Synthetic oligonucleotide
  Sense strand starting at position 2497 of SEQ ID NO: 916270
cuaguaugguuauuaagug

SEQ ID NO: 1143477 - RNA, 19 nt, Artificial Sequence
  Description of Artificial Sequence: Synthetic oligonucleotide
  Antisense strand to SEQ ID NO: 1143476
cacuuaauaaccauacuag

SEQ ID NO: 1143478 - RNA, 19 nt, Artificial Sequence
  Description of Artificial Sequence: Synthetic oligonucleotide
  Sense strand starting at position 2568 of SEQ ID NO: 916270
gguggaacuccauguauaa

SEQ ID NO: 1143479 - RNA, 19 nt, Artificial Sequence
  Description of Artificial Sequence: Synthetic oligonucleotide
  Antisense strand to SEQ ID NO: 1143478
uuauacauggaguuccacc

SEQ ID NO: 1143480 - RNA, 19 nt, Artificial Sequence
  Description of Artificial Sequence: Synthetic oligonucleotide
  Sense strand starting at position 2592 of SEQ ID NO: 916270
guaacauauauguguaugu

SEQ ID NO: 1143481 - RNA, 19 nt, Artificial Sequence
  Description of Artificial Sequence: Synthetic oligonucleotide
  Antisense strand to SEQ ID NO: 1143480
acauacacauauauguuac

SEQ ID NO: 1143482 - RNA, 19 nt, Artificial Sequence
  Description of Artificial Sequence: Synthetic oligonucleotide
  Sense strand starting at position 2602 of SEQ ID NO: 916270
uguguaugugaauagacau

SEQ ID NO: 1143483 - RNA, 19 nt, Artificial Sequence
  Description of Artificial Sequence: Synthetic oligonucleotide
  Antisense strand to SEQ ID NO: 1143482
augucuauucacauacaca

SEQ ID NO: 1143484 - RNA, 19 nt, Artificial Sequence
  Description of Artificial Sequence: Synthetic oligonucleotide
  Sense strand starting at position 2615 of SEQ ID NO: 916270
agacauguauuagcauaga

SEQ ID NO: 1143485 - RNA, 19 nt, Artificial Sequence
  Description of Artificial Sequence: Synthetic oligonucleotide
  Antisense strand to SEQ ID NO: 1143484
ucuaugcuaauacaugucu

SEQ ID NO: 1143486 - RNA, 19 nt, Artificial Sequence
  Description of Artificial Sequence: Synthetic oligonucleotide
  Sense strand starting at position 2650 of SEQ ID NO: 916270
aggagaaauuggcaagaug

SEQ ID NO: 1143487 - RNA, 19 nt, Artificial Sequence
  Description of Artificial Sequence: Synthetic oligonucleotide
  Antisense strand to SEQ ID NO: 1143486
caucuugccaauuucuccu

SEQ ID NO: 1143488 - RNA, 19 nt, Artificial Sequence
  Description of Artificial Sequence: Synthetic oligonucleotide
  Sense strand starting at position 2665 of SEQ ID NO: 916270
gaugguugacucugggauc

SEQ ID NO: 1143489 - RNA, 19 nt, Artificial Sequence
  Description of Artificial Sequence: Synthetic oligonucleotide
  Antisense strand to SEQ ID NO: 1143488
gaucccagagucaaccauc

SEQ ID NO: 1143490 - RNA, 19 nt, Artificial Sequence
  Description of Artificial Sequence: Synthetic oligonucleotide
  Sense strand starting at position 2676 of SEQ ID NO: 916270
cugggauccucucagauuu

SEQ ID NO: 1143491 - RNA, 19 nt, Artificial Sequence
  Description of Artificial Sequence: Synthetic oligonucleotide
  Antisense strand to SEQ ID NO: 1143490
aaaucugagaggaucccag

SEQ ID NO: 1143492 - RNA, 19 nt, Artificial Sequence
  Description of Artificial Sequence: Synthetic oligonucleotide
  Sense strand starting at position 2732 of SEQ ID NO: 916270
caucauuuacucgggcuua

SEQ ID NO: 1143493 - RNA, 19 nt, Artificial Sequence
  Description of Artificial Sequence: Synthetic oligonucleotide
  Antisense strand to SEQ ID NO: 1143492
uaagcccgaguaaaugaug

SEQ ID NO: 1143494 - RNA, 19 nt, Artificial Sequence
  Description of Artificial Sequence: Synthetic oligonucleotide
  Sense strand starting at position 3198 of SEQ ID NO: 916270
auuguuugcuucuuaaagu

SEQ ID NO: 1143495 - RNA, 19 nt, Artificial Sequence
  Description of Artificial Sequence: Synthetic oligonucleotide
  Antisense strand to SEQ ID NO: 1143494
acuuuaagaagcaaacaau

SEQ ID NO: 1143496 - RNA, 19 nt, Artificial Sequence
  Description of Artificial Sequence: Synthetic oligonucleotide
  Sense strand starting at position 3322 of SEQ ID NO: 916270
gaaagaagauccugacaug

SEQ ID NO: 1143497 - RNA, 19 nt, Artificial Sequence
  Description of Artificial Sequence: Synthetic oligonucleotide
  Antisense strand to SEQ ID NO: 1143496
caugucaggaucuucuuuc

SEQ ID NO: 1143498 - RNA, 19 nt, Artificial Sequence
  Description of Artificial Sequence: Synthetic oligonucleotide
  Sense strand starting at position 3370 of SEQ ID NO: 916270
gcuggaguucuugaagaga

SEQ ID NO: 1143499 - RNA, 19 nt, Artificial Sequence
  Description of Artificial Sequence: Synthetic oligonucleotide
  Antisense strand to SEQ ID NO: 1143498
ucucuucaagaacuccagc

SEQ ID NO: 1143500 - RNA, 19 nt, Artificial Sequence
  Description of Artificial Sequence: Synthetic oligonucleotide
  Sense strand starting at position 3399 of SEQ ID NO: 916270
uauagagagucaucuguua

SEQ ID NO: 1143501 - RNA, 19 nt, Artificial Sequence
  Description of Artificial Sequence: Synthetic oligonucleotide
  Antisense strand to SEQ ID NO: 1143500
uaacagaugacucucuaua

SEQ ID NO: 1143502 - RNA, 19 nt, Artificial Sequence
  Description of Artificial Sequence: Synthetic oligonucleotide
  Sense strand starting at position 3412 of SEQ ID NO: 916270
cuguuaacacucugggacu

SEQ ID NO: 1143503 - RNA, 19 nt, Artificial Sequence
  Description of Artificial Sequence: Synthetic oligonucleotide
  Antisense strand to SEQ ID NO: 1143502
agucccagaguguuaacag

SEQ ID NO: 1143504 - RNA, 19 nt, Artificial Sequence
  Description of Artificial Sequence: Synthetic oligonucleotide
  Sense strand starting at position 3414 of SEQ ID NO: 916270
guuaacacucugggacuua

SEQ ID NO: 1143505 - RNA, 19 nt, Artificial Sequence
  Description of Artificial Sequence: Synthetic oligonucleotide
  Antisense strand to SEQ ID NO: 1143504
uaagucccagaguguuaac

SEQ ID NO: 1143506 - RNA, 19 nt, Artificial Sequence
  Description of Artificial Sequence: Synthetic oligonucleotide
  Sense strand starting at position 14 of SEQ ID NO: 916271
ucuauuaggguuugacacu

SEQ ID NO: 1143507 - RNA, 19 nt, Artificial Sequence
  Description of Artificial Sequence: Synthetic oligonucleotide
  Antisense strand to SEQ ID NO: 1143506
agugucaaacccuaauaga

SEQ ID NO: 1143508 - RNA, 19 nt, Artificial Sequence
  Description of Artificial Sequence: Synthetic oligonucleotide
  Sense strand starting at position 374 of SEQ ID NO: 916271
cacuuaaguccaggagcua

SEQ ID NO: 1143509 - RNA, 19 nt, Artificial Sequence
  Description of Artificial Sequence: Synthetic oligonucleotide
  Antisense strand to SEQ ID NO: 1143508
uagcuccuggacuuaagug

SEQ ID NO: 1143510 - RNA, 19 nt, Artificial Sequence
  Description of Artificial Sequence: Synthetic oligonucleotide
  Sense strand starting at position 375 of SEQ ID NO: 916271
acuuaaguccaggagcuau

SEQ ID NO: 1143511 - RNA, 19 nt, Artificial Sequence
  Description of Artificial Sequence: Synthetic oligonucleotide
  Antisense strand to SEQ ID NO: 1143510
auagcuccuggacuuaagu

SEQ ID NO: 1143512 - RNA, 19 nt, Artificial Sequence
  Description of Artificial Sequence: Synthetic oligonucleotide
  Sense strand starting at position 572 of SEQ ID NO: 916271
gcuggaagucuuugacaga

SEQ ID NO: 1143513 - RNA, 19 nt, Artificial Sequence
  Description of Artificial Sequence: Synthetic oligonucleotide
  Antisense strand to SEQ ID NO: 1143512
ucugucaaagacuuccagc

SEQ ID NO: 1143514 - RNA, 19 nt, Artificial Sequence
  Description of Artificial Sequence: Synthetic oligonucleotide
  Sense strand starting at position 607 of SEQ ID NO: 916271
cuuccaauaugcuuggaaa

SEQ ID NO: 1143515 - RNA, 19 nt, Artificial Sequence
  Description of Artificial Sequence: Synthetic oligonucleotide
  Antisense strand to SEQ ID NO: 1143514
uuuccaagcauauuggaag

SEQ ID NO: 1143516 - RNA, 19 nt, Artificial Sequence
  Description of Artificial Sequence: Synthetic oligonucleotide
  Sense strand starting at position 608 of SEQ ID NO: 916271
uuccaauaugcuuggaaac

SEQ ID NO: 1143517 - RNA, 19 nt, Artificial Sequence
  Description of Artificial Sequence: Synthetic oligonucleotide
  Antisense strand to SEQ ID NO: 1143516
guuuccaagcauauuggaa

SEQ ID NO: 1143518 - RNA, 19 nt, Artificial Sequence
  Description of Artificial Sequence: Synthetic oligonucleotide
  Sense strand starting at position 609 of SEQ ID NO: 916271
uccaauaugcuuggaaaca

SEQ ID NO: 1143519 - RNA, 19 nt, Artificial Sequence
  Description of Artificial Sequence: Synthetic oligonucleotide
  Antisense strand to SEQ ID NO: 1143518
uguuuccaagcauauugga

SEQ ID NO: 1143520 - RNA, 19 nt, Artificial Sequence
  Description of Artificial Sequence: Synthetic oligonucleotide
  Sense strand starting at position 936 of SEQ ID NO: 916271
ucuauugagcacugagacu

SEQ ID NO: 1143521 - RNA, 19 nt, Artificial Sequence
  Description of Artificial Sequence: Synthetic oligonucleotide
  Antisense strand to SEQ ID NO: 1143520
agucucagugcucaauaga

SEQ ID NO: 1143522 - RNA, 19 nt, Artificial Sequence
  Description of Artificial Sequence: Synthetic oligonucleotide
  Sense strand starting at position 1111 of SEQ ID NO: 916271
agcguuagaaccuaugaua

SEQ ID NO: 1143523 - RNA, 19 nt, Artificial Sequence
  Description of Artificial Sequence: Synthetic oligonucleotide
  Antisense strand to SEQ ID NO: 1143522
uaucauagguucuaacgcu

SEQ ID NO: 1143524 - RNA, 19 nt, Artificial Sequence
  Description of Artificial Sequence: Synthetic oligonucleotide
  Sense strand starting at position 1188 of SEQ ID NO: 916271
ugacaaucauuagugaauu

SEQ ID NO: 1143525 - RNA, 19 nt, Artificial Sequence
  Description of Artificial Sequence: Synthetic oligonucleotide
  Antisense strand to SEQ ID NO: 1143524
aauucacuaaugauuguca

SEQ ID NO: 1143526 - RNA, 19 nt, Artificial Sequence
  Description of Artificial Sequence: Synthetic oligonucleotide
  Sense strand starting at position 1227 of SEQ ID NO: 916271
uauuuauguuuggaucaag

SEQ ID NO: 1143527 - RNA, 19 nt, Artificial Sequence
  Description of Artificial Sequence: Synthetic oligonucleotide
  Antisense strand to SEQ ID NO: 1143526
cuugauccaaacauaaaua

SEQ ID NO: 1143528 - RNA, 19 nt, Artificial Sequence
  Description of Artificial Sequence: Synthetic oligonucleotide
  Sense strand starting at position 1395 of SEQ ID NO: 916271
ccuauucuucccggacaaa

SEQ ID NO: 1143529 - RNA, 19 nt, Artificial Sequence
  Description of Artificial Sequence: Synthetic oligonucleotide
  Antisense strand to SEQ ID NO: 1143528
uuuguccgggaagaauagg

SEQ ID NO: 1143530 - RNA, 19 nt, Artificial Sequence
  Description of Artificial Sequence: Synthetic oligonucleotide
  Sense strand starting at position 1460 of SEQ ID NO: 916271
cacuuagccgugucuguuu

SEQ ID NO: 1143531 - RNA, 19 nt, Artificial Sequence
  Description of Artificial Sequence: Synthetic oligonucleotide
  Antisense strand to SEQ ID NO: 1143530
aaacagacacggcuaagug

SEQ ID NO: 1143532 - RNA, 19 nt, Artificial Sequence
  Description of Artificial Sequence: Synthetic oligonucleotide
  Sense strand starting at position 1497 of SEQ ID NO: 916271
aacuguuaacgggauucuu

SEQ ID NO: 1143533 - RNA, 19 nt, Artificial Sequence
  Description of Artificial Sequence: Synthetic oligonucleotide
  Antisense strand to SEQ ID NO: 1143532
aagaaucccguuaacaguu

SEQ ID NO: 1143534 - RNA, 19 nt, Artificial Sequence
  Description of Artificial Sequence: Synthetic oligonucleotide
  Sense strand starting at position 1529 of SEQ ID NO: 916271
cuacuagaucacggugaaa

SEQ ID NO: 1143535 - RNA, 19 nt, Artificial Sequence
  Description of Artificial Sequence: Synthetic oligonucleotide
  Antisense strand to SEQ ID NO: 1143534
uuucaccgugaucuaguag

SEQ ID NO: 1143536 - RNA, 19 nt, Artificial Sequence
  Description of Artificial Sequence: Synthetic oligonucleotide
  Sense strand starting at position 1531 of SEQ ID NO: 916271
acuagaucacggugaaaua

SEQ ID NO: 1143537 - RNA, 19 nt, Artificial Sequence
  Description of Artificial Sequence: Synthetic oligonucleotide
  Antisense strand to SEQ ID NO: 1143536
uauuucaccgugaucuagu

SEQ ID NO: 1143538 - RNA, 19 nt, Artificial Sequence
  Description of Artificial Sequence: Synthetic oligonucleotide
  Sense strand starting at position 1540 of SEQ ID NO: 916271
cggugaaauagacaagcua

SEQ ID NO: 1143539 - RNA, 19 nt, Artificial Sequence
  Description of Artificial Sequence: Synthetic oligonucleotide
  Antisense strand to SEQ ID NO: 1143538
uagcuugucuauuucaccg

SEQ ID NO: 1143540 - RNA, 19 nt, Artificial Sequence
  Description of Artificial Sequence: Synthetic oligonucleotide
  Sense strand starting at position 1571 of SEQ ID NO: 916271
ucaaguuuaggguauggau

SEQ ID NO: 1143541 - RNA, 19 nt, Artificial Sequence
  Description of Artificial Sequence: Synthetic oligonucleotide
  Antisense strand to SEQ ID NO: 1143540
auccauacccuaaacuuga

SEQ ID NO: 1143542 - RNA, 19 nt, Artificial Sequence
  Description of Artificial Sequence: Synthetic oligonucleotide
  Sense strand starting at position 1605 of SEQ ID NO: 916271
ugguuaaacgcuuaacaga

SEQ ID NO: 1143543 - RNA, 19 nt, Artificial Sequence
  Description of Artificial Sequence: Synthetic oligonucleotide
  Antisense strand to SEQ ID NO: 1143542
ucuguuaagcguuuaacca

SEQ ID NO: 1143544 - RNA, 19 nt, Artificial Sequence
  Description of Artificial Sequence: Synthetic oligonucleotide
  Sense strand starting at position 1622 of SEQ ID NO: 916271
gaauuccggccuuaguaaa

SEQ ID NO: 1143545 - RNA, 19 nt, Artificial Sequence
  Description of Artificial Sequence: Synthetic oligonucleotide
  Antisense strand to SEQ ID NO: 1143544
uuuacuaaggccggaauuc

SEQ ID NO: 1143546 - RNA, 19 nt, Artificial Sequence
  Description of Artificial Sequence: Synthetic oligonucleotide
  Sense strand starting at position 1869 of SEQ ID NO: 916271
gauauuagaaggugaaggu

SEQ ID NO: 1143547 - RNA, 19 nt, Artificial Sequence
  Description of Artificial Sequence: Synthetic oligonucleotide
  Antisense strand to SEQ ID NO: 1143546
accuucaccuucuaauauc

SEQ ID NO: 1143548 - RNA, 19 nt, Artificial Sequence
  Description of Artificial Sequence: Synthetic oligonucleotide
  Sense strand starting at position 2144 of SEQ ID NO: 916271
gacccuuucccacgaggau

SEQ ID NO: 1143549 - RNA, 19 nt, Artificial Sequence
  Description of Artificial Sequence: Synthetic oligonucleotide
  Antisense strand to SEQ ID NO: 1143548
auccucgugggaaaggguc

SEQ ID NO: 1143550 - RNA, 19 nt, Artificial Sequence
  Description of Artificial Sequence: Synthetic oligonucleotide
  Sense strand starting at position 2310 of SEQ ID NO: 916271
cugcgauuaccucaggagu

SEQ ID NO: 1143551 - RNA, 19 nt, Artificial Sequence
  Description of Artificial Sequence: Synthetic oligonucleotide
  Antisense strand to SEQ ID NO: 1143550
acuccugagguaaucgcag

SEQ ID NO: 1143552 - RNA, 19 nt, Artificial Sequence
  Description of Artificial Sequence: Synthetic oligonucleotide
  Sense strand starting at position 2630 of SEQ ID NO: 916271
uguggaaguugucuagaua

SEQ ID NO: 1143553 - RNA, 19 nt, Artificial Sequence
  Description of Artificial Sequence: Synthetic oligonucleotide
  Antisense strand to SEQ ID NO: 1143552
uaucuagacaacuuccaca

SEQ ID NO: 1143554 - RNA, 19 nt, Artificial Sequence
  Description of Artificial Sequence: Synthetic oligonucleotide
  Sense strand starting at position 2631 of SEQ ID NO: 916271
guggaaguugucuagauag

SEQ ID NO: 1143555 - RNA, 19 nt, Artificial Sequence
  Description of Artificial Sequence: Synthetic oligonucleotide
  Antisense strand to SEQ ID NO: 1143554
cuaucuagacaacuuccac

SEQ ID NO: 1143556 - RNA, 19 nt, Artificial Sequence
  Description of Artificial Sequence: Synthetic oligonucleotide
  Sense strand starting at position 2637 of SEQ ID NO: 916271
guugucuagauagaaaggu

SEQ ID NO: 1143557 - RNA, 19 nt, Artificial Sequence
  Description of Artificial Sequence: Synthetic oligonucleotide
  Antisense strand to SEQ ID NO: 1143556
accuuucuaucuagacaac

SEQ ID NO: 1143558 - RNA, 19 nt, Artificial Sequence
  Description of Artificial Sequence: Synthetic oligonucleotide
  Sense strand starting at position 2792 of SEQ ID NO: 916271
ggcacuaacuaucugagaa

SEQ ID NO: 1143559 - RNA, 19 nt, Artificial Sequence
  Description of Artificial Sequence: Synthetic oligonucleotide
  Antisense strand to SEQ ID NO: 1143558
uucucagauaguuagugcc

SEQ ID NO: 1143560 - RNA, 19 nt, Artificial Sequence
  Description of Artificial Sequence: Synthetic oligonucleotide
  Sense strand starting at position 2804 of SEQ ID NO: 916271
cugagaaugcuugguagga

SEQ ID NO: 1143561 - RNA, 19 nt, Artificial Sequence
  Description of Artificial Sequence: Synthetic oligonucleotide
  Antisense strand to SEQ ID NO: 1143560
uccuaccaagcauucucag

SEQ ID NO: 1143562 - RNA, 19 nt, Artificial Sequence
  Description of Artificial Sequence: Synthetic oligonucleotide
  Sense strand starting at position 2805 of SEQ ID NO: 916271
ugagaaugcuugguaggau

SEQ ID NO: 1143563 - RNA, 19 nt, Artificial Sequence
  Description of Artificial Sequence: Synthetic oligonucleotide
  Antisense strand to SEQ ID NO: 1143562
auccuaccaagcauucuca

SEQ ID NO: 1143564 - RNA, 19 nt, Artificial Sequence
  Description of Artificial Sequence: Synthetic oligonucleotide
  Sense strand starting at position 2808 of SEQ ID NO: 916271
gaaugcuugguaggaugau

SEQ ID NO: 1143565 - RNA, 19 nt, Artificial Sequence
  Description of Artificial Sequence: Synthetic oligonucleotide
  Antisense strand to SEQ ID NO: 1143564
aucauccuaccaagcauuc

SEQ ID NO: 1143566 - RNA, 19 nt, Artificial Sequence
  Description of Artificial Sequence: Synthetic oligonucleotide
  Sense strand starting at position 2937 of SEQ ID NO: 916271
cguagugugaggcuuuguu

SEQ ID NO: 1143567 - RNA, 19 nt, Artificial Sequence
  Description of Artificial Sequence: Synthetic oligonucleotide
  Antisense strand to SEQ ID NO: 1143566
aacaaagccucacacuacg

SEQ ID NO: 1143568 - RNA, 19 nt, Artificial Sequence
  Description of Artificial Sequence: Synthetic oligonucleotide
  Sense strand starting at position 3151 of SEQ ID NO: 916271
gccuuugaagguuagacaa

SEQ ID NO: 1143569 - RNA, 19 nt, Artificial Sequence
  Description of Artificial Sequence: Synthetic oligonucleotide
  Antisense strand to SEQ ID NO: 1143568
uugucuaaccuucaaaggc

SEQ ID NO: 1143570 - RNA, 19 nt, Artificial Sequence
  Description of Artificial Sequence: Synthetic oligonucleotide
  Sense strand starting at position 3178 of SEQ ID NO: 916271
agguguugacacuacaagu

SEQ ID NO: 1143571 - RNA, 19 nt, Artificial Sequence
  Description of Artificial Sequence: Synthetic oligonucleotide
  Antisense strand to SEQ ID NO: 1143570
acuuguagugucaacaccu

SEQ ID NO: 1143572 - RNA, 19 nt, Artificial Sequence
  Description of Artificial Sequence: Synthetic oligonucleotide
  Sense strand starting at position 3194 of SEQ ID NO: 916271
aguagaucuggugguaaua

SEQ ID NO: 1143573 - RNA, 19 nt, Artificial Sequence
  Description of Artificial Sequence: Synthetic oligonucleotide
  Antisense strand to SEQ ID NO: 1143572
uauuaccaccagaucuacu

SEQ ID NO: 1143574 - RNA, 19 nt, Artificial Sequence
  Description of Artificial Sequence: Synthetic oligonucleotide
  Sense strand starting at position 3272 of SEQ ID NO: 916271
gaggcagucugggugauua

SEQ ID NO: 1143575 - RNA, 19 nt, Artificial Sequence
  Description of Artificial Sequence: Synthetic oligonucleotide
  Antisense strand to SEQ ID NO: 1143574
uaaucacccagacugccuc

SEQ ID NO: 1143576 - RNA, 19 nt, Artificial Sequence
  Description of Artificial Sequence: Synthetic oligonucleotide
  Sense strand starting at position 3289 of SEQ ID NO: 916271
uagucugggcagugaaaua

SEQ ID NO: 1143577 - RNA, 19 nt, Artificial Sequence
  Description of Artificial Sequence: Synthetic oligonucleotide
  Antisense strand to SEQ ID NO: 1143576
uauuucacugcccagacua

SEQ ID NO: 1143578 - RNA, 19 nt, Artificial Sequence
  Description of Artificial Sequence: Synthetic oligonucleotide
  Sense strand starting at position 3300 of SEQ ID NO: 916271
gugaaauauugggauuucu

SEQ ID NO: 1143579 - RNA, 19 nt, Artificial Sequence
  Description of Artificial Sequence: Synthetic oligonucleotide
  Antisense strand to SEQ ID NO: 1143578
agaaaucccaauauuucac

SEQ ID NO: 1143580 - RNA, 19 nt, Artificial Sequence
  Description of Artificial Sequence: Synthetic oligonucleotide
  Sense strand starting at position 3747 of SEQ ID NO: 916271
auuaauuugugagcguuua

SEQ ID NO: 1143581 - RNA, 19 nt, Artificial Sequence
  Description of Artificial Sequence: Synthetic oligonucleotide
  Antisense strand to SEQ ID NO: 1143580
uaaacgcucacaaauuaau

SEQ ID NO: 1143582 - RNA, 19 nt, Artificial Sequence
  Description of Artificial Sequence: Synthetic oligonucleotide
  Sense strand starting at position 3748 of SEQ ID NO: 916271
uuaauuugugagcguuuau

SEQ ID NO: 1143583 - RNA, 19 nt, Artificial Sequence
  Description of Artificial Sequence: Synthetic oligonucleotide
  Antisense strand to SEQ ID NO: 1143582
auaaacgcucacaaauuaa

SEQ ID NO: 1143584 - RNA, 19 nt, Artificial Sequence
  Description of Artificial Sequence: Synthetic oligonucleotide
  Sense strand starting at position 3817 of SEQ ID NO: 916271
aagagaguuugcuccacag

SEQ ID NO: 1143585 - RNA, 19 nt, Artificial Sequence
  Description of Artificial Sequence: Synthetic oligonucleotide
  Antisense strand to SEQ ID NO: 1143584
cuguggagcaaacucucuu

SEQ ID NO: 1143586 - RNA, 19 nt, Artificial Sequence
  Description of Artificial Sequence: Synthetic oligonucleotide
  Sense strand starting at position 52 of SEQ ID NO: 916272
guuccauuauggcucuaga

SEQ ID NO: 1143587 - RNA, 19 nt, Artificial Sequence
  Description of Artificial Sequence: Synthetic oligonucleotide
  Antisense strand to SEQ ID NO: 1143586
ucuagagccauaauggaac

SEQ ID NO: 1143588 - RNA, 19 nt, Artificial Sequence
  Description of Artificial Sequence: Synthetic oligonucleotide
  Sense strand starting at position 55 of SEQ ID NO: 916272
ccauuauggcucuagauca

SEQ ID NO: 1143589 - RNA, 19 nt, Artificial Sequence
  Description of Artificial Sequence: Synthetic oligonucleotide
  Antisense strand to SEQ ID NO: 1143588
ugaucuagagccauaaugg

SEQ ID NO: 1143590 - RNA, 19 nt, Artificial Sequence
  Description of Artificial Sequence: Synthetic oligonucleotide
  Sense strand starting at position 459 of SEQ ID NO: 916272
auaauaucuggcggauauu

SEQ ID NO: 1143591 - RNA, 19 nt, Artificial Sequence
  Description of Artificial Sequence: Synthetic oligonucleotide
  Antisense strand to SEQ ID NO: 1143590
aauauccgccagauauuau

SEQ ID NO: 1143592 - RNA, 19 nt, Artificial Sequence
  Description of Artificial Sequence: Synthetic oligonucleotide
  Sense strand starting at position 460 of SEQ ID NO: 916272
uaauaucuggcggauauua

SEQ ID NO: 1143593 - RNA, 19 nt, Artificial Sequence
  Description of Artificial Sequence: Synthetic oligonucleotide
  Antisense strand to SEQ ID NO: 1143592
uaauauccgccagauauua

SEQ ID NO: 1143594 - RNA, 19 nt, Artificial Sequence
  Description of Artificial Sequence: Synthetic oligonucleotide
  Sense strand starting at position 462 of SEQ ID NO: 916272
auaucuggcggauauuaua

SEQ ID NO: 1143595 - RNA, 19 nt, Artificial Sequence
  Description of Artificial Sequence: Synthetic oligonucleotide
  Antisense strand to SEQ ID NO: 1143594
uauaauauccgccagauau

SEQ ID NO: 1143596 - RNA, 19 nt, Artificial Sequence
  Description of Artificial Sequence: Synthetic oligonucleotide
  Sense strand starting at position 520 of SEQ ID NO: 916272
aggaaagucacuugugcaa

SEQ ID NO: 1143597 - RNA, 19 nt, Artificial Sequence
  Description of Artificial Sequence: Synthetic oligonucleotide
  Antisense strand to SEQ ID NO: 1143596
uugcacaagugacuuuccu

SEQ ID NO: 1143598 - RNA, 19 nt, Artificial Sequence
  Description of Artificial Sequence: Synthetic oligonucleotide
  Sense strand starting at position 571 of SEQ ID NO: 916272
guuucuaugccauagugau

SEQ ID NO: 1143599 - RNA, 19 nt, Artificial Sequence
  Description of Artificial Sequence: Synthetic oligonucleotide
  Antisense strand to SEQ ID NO: 1143598
aucacuauggcauagaaac

SEQ ID NO: 1143600 - RNA, 19 nt, Artificial Sequence
  Description of Artificial Sequence: Synthetic oligonucleotide
  Sense strand starting at position 577 of SEQ ID NO: 916272
augccauagugaucaccaa

SEQ ID NO: 1143601 - RNA, 19 nt, Artificial Sequence
  Description of Artificial Sequence: Synthetic oligonucleotide
  Antisense strand to SEQ ID NO: 1143600
uuggugaucacuauggcau

SEQ ID NO: 1143602 - RNA, 19 nt, Artificial Sequence
  Description of Artificial Sequence: Synthetic oligonucleotide
  Sense strand starting at position 659 of SEQ ID NO: 916272
ugggaaucauggcugcuuu

SEQ ID NO: 1143603 - RNA, 19 nt, Artificial Sequence
  Description of Artificial Sequence: Synthetic oligonucleotide
  Antisense strand to SEQ ID NO: 1143602
aaagcagccaugauuccca

SEQ ID NO: 1143604 - RNA, 19 nt, Artificial Sequence
  Description of Artificial Sequence: Synthetic oligonucleotide
  Sense strand starting at position 762 of SEQ ID NO: 916272
ugaauuugauugcaaaugu

SEQ ID NO: 1143605 - RNA, 19 nt, Artificial Sequence
  Description of Artificial Sequence: Synthetic oligonucleotide
  Antisense strand to SEQ ID NO: 1143604
acauuugcaaucaaauuca

SEQ ID NO: 1143606 - RNA, 19 nt, Artificial Sequence
  Description of Artificial Sequence: Synthetic oligonucleotide
  Sense strand starting at position 1053 of SEQ ID NO: 916272
acaaaugucuuucucugga

SEQ ID NO: 1143607 - RNA, 19 nt, Artificial Sequence
  Description of Artificial Sequence: Synthetic oligonucleotide
  Antisense strand to SEQ ID NO: 1143606
uccagagaaagacauuugu

SEQ ID NO: 1143608 - RNA, 19 nt, Artificial Sequence
  Description of Artificial Sequence: Synthetic oligonucleotide
  Sense strand starting at position 1101 of SEQ ID NO: 916272
augugaaauugacugucuu

SEQ ID NO: 1143609 - RNA, 19 nt, Artificial Sequence
  Description of Artificial Sequence: Synthetic oligonucleotide
  Antisense strand to SEQ ID NO: 1143608
aagacagucaauuucacau

SEQ ID NO: 1143610 - RNA, 19 nt, Artificial Sequence
  Description of Artificial Sequence: Synthetic oligonucleotide
  Sense strand starting at position 1102 of SEQ ID NO: 916272
ugugaaauugacugucuua

SEQ ID NO: 1143611 - RNA, 19 nt, Artificial Sequence
  Description of Artificial Sequence: Synthetic oligonucleotide
  Antisense strand to SEQ ID NO: 1143610
uaagacagucaauuucaca

SEQ ID NO: 1143612 - RNA, 19 nt, Artificial Sequence
  Description of Artificial Sequence: Synthetic oligonucleotide
  Sense strand starting at position 1132 of SEQ ID NO: 916272
ugauuaguaucccugugaa

SEQ ID NO: 1143613 - RNA, 19 nt, Artificial Sequence
  Description of Artificial Sequence: Synthetic oligonucleotide
  Antisense strand to SEQ ID NO: 1143612
uucacagggauacuaauca

SEQ ID NO: 1143614 - RNA, 19 nt, Artificial Sequence
  Description of Artificial Sequence: Synthetic oligonucleotide
  Sense strand starting at position 1135 of SEQ ID NO: 916272
uuaguaucccugugaaauc

SEQ ID NO: 1143615 - RNA, 19 nt, Artificial Sequence
  Description of Artificial Sequence: Synthetic oligonucleotide
  Antisense strand to SEQ ID NO: 1143614
gauuucacagggauacuaa

SEQ ID NO: 1143616 - RNA, 19 nt, Artificial Sequence
  Description of Artificial Sequence: Synthetic oligonucleotide
  Sense strand starting at position 1146 of SEQ ID NO: 916272
gugaaaucuuaggucuaga

SEQ ID NO: 1143617 - RNA, 19 nt, Artificial Sequence
  Description of Artificial Sequence: Synthetic oligonucleotide
  Antisense strand to SEQ ID NO: 1143616
ucuagaccuaagauuucac

SEQ ID NO: 1143618 - RNA, 19 nt, Artificial Sequence
  Description of Artificial Sequence: Synthetic oligonucleotide
  Sense strand starting at position 1170 of SEQ ID NO: 916272
ucuuaccucugaguacaga

SEQ ID NO: 1143619 - RNA, 19 nt, Artificial Sequence
  Description of Artificial Sequence: Synthetic oligonucleotide
  Antisense strand to SEQ ID NO: 1143618
ucuguacucagagguaaga

SEQ ID NO: 1143620 - RNA, 19 nt, Artificial Sequence
  Description of Artificial Sequence: Synthetic oligonucleotide
  Sense strand starting at position 1214 of SEQ ID NO: 916272
cgggcaauaaacugaguuu

SEQ ID NO: 1143621 - RNA, 19 nt, Artificial Sequence
  Description of Artificial Sequence: Synthetic oligonucleotide
  Antisense strand to SEQ ID NO: 1143620
aaacucaguuuauugcccg

SEQ ID NO: 1143622 - RNA, 19 nt, Artificial Sequence
  Description of Artificial Sequence: Synthetic oligonucleotide
  Sense strand starting at position 1217 of SEQ ID NO: 916272
gcaauaaacugaguuuauu

SEQ ID NO: 1143623 - RNA, 19 nt, Artificial Sequence
  Description of Artificial Sequence: Synthetic oligonucleotide
  Antisense strand to SEQ ID NO: 1143622
aauaaacucaguuuauugc

SEQ ID NO: 1143624 - RNA, 19 nt, Artificial Sequence
  Description of Artificial Sequence: Synthetic oligonucleotide
  Sense strand starting at position 1393 of SEQ ID NO: 916272
cguuucacugccgugaaca

SEQ ID NO: 1143625 - RNA, 19 nt, Artificial Sequence
  Description of Artificial Sequence: Synthetic oligonucleotide
  Antisense strand to SEQ ID NO: 1143624
uguucacggcagugaaacg

SEQ ID NO: 1143626 - RNA, 19 nt, Artificial Sequence
  Description of Artificial Sequence: Synthetic oligonucleotide
  Sense strand starting at position 1459 of SEQ ID NO: 916272
gagugagcacagcauaaua

SEQ ID NO: 1143627 - RNA, 19 nt, Artificial Sequence
  Description of Artificial Sequence: Synthetic oligonucleotide
  Antisense strand to SEQ ID NO: 1143626
uauuaugcugugcucacuc

SEQ ID NO: 1143628 - RNA, 19 nt, Artificial Sequence
  Description of Artificial Sequence: Synthetic oligonucleotide
  Sense strand starting at position 1502 of SEQ ID NO: 916272
agcuacugucaugaaauag

SEQ ID NO: 1143629 - RNA, 19 nt, Artificial Sequence
  Description of Artificial Sequence: Synthetic oligonucleotide
  Antisense strand to SEQ ID NO: 1143628
cuauuucaugacaguagcu

SEQ ID NO: 1143630 - RNA, 19 nt, Artificial Sequence
  Description of Artificial Sequence: Synthetic oligonucleotide
  Sense strand starting at position 1541 of SEQ ID NO: 916272
cuuagagaaaguuguguga

SEQ ID NO: 1143631 - RNA, 19 nt, Artificial Sequence
  Description of Artificial Sequence: Synthetic oligonucleotide
  Antisense strand to SEQ ID NO: 1143630
ucacacaacuuucucuaag

SEQ ID NO: 1143632 - RNA, 19 nt, Artificial Sequence
  Description of Artificial Sequence: Synthetic oligonucleotide
  Sense strand starting at position 1544 of SEQ ID NO: 916272
agagaaaguugugugauca

SEQ ID NO: 1143633 - RNA, 19 nt, Artificial Sequence
  Description of Artificial Sequence: Synthetic oligonucleotide
  Antisense strand to SEQ ID NO: 1143632
ugaucacacaacuuucucu

SEQ ID NO: 1143634 - RNA, 19 nt, Artificial Sequence
  Description of Artificial Sequence: Synthetic oligonucleotide
  Sense strand starting at position 1545 of SEQ ID NO: 916272
gagaaaguugugugaucaa

SEQ ID NO: 1143635 - RNA, 19 nt, Artificial Sequence
  Description of Artificial Sequence: Synthetic oligonucleotide
  Antisense strand to SEQ ID NO: 1143634
uugaucacacaacuuucuc

SEQ ID NO: 1143636 - RNA, 19 nt, Artificial Sequence
  Description of Artificial Sequence: Synthetic oligonucleotide
  Sense strand starting at position 1548 of SEQ ID NO: 916272
aaaguugugugaucaaaga

SEQ ID NO: 1143637 - RNA, 19 nt, Artificial Sequence
  Description of Artificial Sequence: Synthetic oligonucleotide
  Antisense strand to SEQ ID NO: 1143636
ucuuugaucacacaacuuu

SEQ ID NO: 1143638 - RNA, 19 nt, Artificial Sequence
  Description of Artificial Sequence: Synthetic oligonucleotide
  Sense strand starting at position 1780 of SEQ ID NO: 916272
cugacucaccugggaacua

SEQ ID NO: 1143639 - RNA, 19 nt, Artificial Sequence
  Description of Artificial Sequence: Synthetic oligonucleotide
  Antisense strand to SEQ ID NO: 1143638
uaguucccaggugagucag

SEQ ID NO: 1143640 - RNA, 19 nt, Artificial Sequence
  Description of Artificial Sequence: Synthetic oligonucleotide
  Sense strand starting at position 2035 of SEQ ID NO: 916272
ccugcuugccaguaauuag

SEQ ID NO: 1143641 - RNA, 19 nt, Artificial Sequence
  Description of Artificial Sequence: Synthetic oligonucleotide
  Antisense strand to SEQ ID NO: 1143640
cuaauuacuggcaagcagg

SEQ ID NO: 1143642 - RNA, 19 nt, Artificial Sequence
  Description of Artificial Sequence: Synthetic oligonucleotide
  Sense strand starting at position 2058 of SEQ ID NO: 916272
uacguuauggcaggagaua

SEQ ID NO: 1143643 - RNA, 19 nt, Artificial Sequence
  Description of Artificial Sequence: Synthetic oligonucleotide
  Antisense strand to SEQ ID NO: 1143642
uaucuccugccauaacgua

SEQ ID NO: 1143644 - RNA, 19 nt, Artificial Sequence
  Description of Artificial Sequence: Synthetic oligonucleotide
  Sense strand starting at position 2059 of SEQ ID NO: 916272
acguuauggcaggagauaa

SEQ ID NO: 1143645 - RNA, 19 nt, Artificial Sequence
  Description of Artificial Sequence: Synthetic oligonucleotide
  Antisense strand to SEQ ID NO: 1143644
uuaucuccugccauaacgu

SEQ ID NO: 1143646 - RNA, 19 nt, Artificial Sequence
  Description of Artificial Sequence: Synthetic oligonucleotide
  Sense strand starting at position 2092 of SEQ ID NO: 916272
uguguuugcacccagaaag

SEQ ID NO: 1143647 - RNA, 19 nt, Artificial Sequence
  Description of Artificial Sequence: Synthetic oligonucleotide
  Antisense strand to SEQ ID NO: 1143646
cuuucugggugcaaacaca

SEQ ID NO: 1143648 - RNA, 19 nt, Artificial Sequence
  Description of Artificial Sequence: Synthetic oligonucleotide
  Sense strand starting at position 2168 of SEQ ID NO: 916272
ugugaugcaucacugggaa

SEQ ID NO: 1143649 - RNA, 19 nt, Artificial Sequence
  Description of Artificial Sequence: Synthetic oligonucleotide
  Antisense strand to SEQ ID NO: 1143648
uucccagugaugcaucaca

SEQ ID NO: 1143650 - RNA, 19 nt, Artificial Sequence
  Description of Artificial Sequence: Synthetic oligonucleotide
  Sense strand starting at position 2170 of SEQ ID NO: 916272
ugaugcaucacugggaaga

SEQ ID NO: 1143651 - RNA, 19 nt, Artificial Sequence
  Description of Artificial Sequence: Synthetic oligonucleotide
  Antisense strand to SEQ ID NO: 1143650
ucuucccagugaugcauca

SEQ ID NO: 1143652 - RNA, 19 nt, Artificial Sequence
  Description of Artificial Sequence: Synthetic oligonucleotide
  Sense strand starting at position 2222 of SEQ ID NO: 916272
guaacaaacuuugugaagu

SEQ ID NO: 1143653 - RNA, 19 nt, Artificial Sequence
  Description of Artificial Sequence: Synthetic oligonucleotide
  Antisense strand to SEQ ID NO: 1143652
acuucacaaaguuuguuac

SEQ ID NO: 1143654 - RNA, 19 nt, Artificial Sequence
  Description of Artificial Sequence: Synthetic oligonucleotide
  Sense strand starting at position 2276 of SEQ ID NO: 916272
gcuacaauugacuauuagu

SEQ ID NO: 1143655 - RNA, 19 nt, Artificial Sequence
  Description of Artificial Sequence: Synthetic oligonucleotide
  Antisense strand to SEQ ID NO: 1143654
acuaauagucaauuguagc

SEQ ID NO: 1143656 - RNA, 19 nt, Artificial Sequence
  Description of Artificial Sequence: Synthetic oligonucleotide
  Sense strand starting at position 2286 of SEQ ID NO: 916272
acuauuagugcuuaaguuu

SEQ ID NO: 1143657 - RNA, 19 nt, Artificial Sequence
  Description of Artificial Sequence: Synthetic oligonucleotide
  Antisense strand to SEQ ID NO: 1143656
aaacuuaagcacuaauagu

SEQ ID NO: 1143658 - RNA, 19 nt, Artificial Sequence
  Description of Artificial Sequence: Synthetic oligonucleotide
  Sense strand starting at position 3098 of SEQ ID NO: 916272
guagaagcguuucuauuuc

SEQ ID NO: 1143659 - RNA, 19 nt, Artificial Sequence
  Description of Artificial Sequence: Synthetic oligonucleotide
  Antisense strand to SEQ ID NO: 1143658
gaaauagaaacgcuucuac

SEQ ID NO: 1143660 - RNA, 19 nt, Artificial Sequence
  Description of Artificial Sequence: Synthetic oligonucleotide
  Sense strand starting at position 3451 of SEQ ID NO: 916272
ugacuauguguugagcauu

SEQ ID NO: 1143661 - RNA, 19 nt, Artificial Sequence
  Description of Artificial Sequence: Synthetic oligonucleotide
  Antisense strand to SEQ ID NO: 1143660
aaugcucaacacauaguca

SEQ ID NO: 1143662 - RNA, 19 nt, Artificial Sequence
  Description of Artificial Sequence: Synthetic oligonucleotide
  Sense strand starting at position 3508 of SEQ ID NO: 916272
acauuaauguccucaugga

SEQ ID NO: 1143663 - RNA, 19 nt, Artificial Sequence
  Description of Artificial Sequence: Synthetic oligonucleotide
  Antisense strand to SEQ ID NO: 1143662
uccaugaggacauuaaugu

SEQ ID NO: 1143664 - RNA, 19 nt, Artificial Sequence
  Description of Artificial Sequence: Synthetic oligonucleotide
  Sense strand starting at position 3530 of SEQ ID NO: 916272
ugcauucuaaugggagaag

SEQ ID NO: 1143665 - RNA, 19 nt, Artificial Sequence
  Description of Artificial Sequence: Synthetic oligonucleotide
  Antisense strand to SEQ ID NO: 1143664
cuucucccauuagaaugca

SEQ ID NO: 1143666 - RNA, 19 nt, Artificial Sequence
  Description of Artificial Sequence: Synthetic oligonucleotide
  Sense strand starting at position 40 of SEQ ID NO: 916273
gaguaaugcuacucaaagg

SEQ ID NO: 1143667 - RNA, 19 nt, Artificial Sequence
  Description of Artificial Sequence: Synthetic oligonucleotide
  Antisense strand to SEQ ID NO: 1143666
ccuuugaguagcauuacuc

SEQ ID NO: 1143668 - RNA, 19 nt, Artificial Sequence
  Description of Artificial Sequence: Synthetic oligonucleotide
  Sense strand starting at position 70 of SEQ ID NO: 916273
uacaguauuucgguugacu

SEQ ID NO: 1143669 - RNA, 19 nt, Artificial Sequence
  Description of Artificial Sequence: Synthetic oligonucleotide
  Antisense strand to SEQ ID NO: 1143668
agucaaccgaaauacugua

SEQ ID NO: 1143670 - RNA, 19 nt, Artificial Sequence
  Description of Artificial Sequence: Synthetic oligonucleotide
  Sense strand starting at position 72 of SEQ ID NO: 916273
caguauuucgguugacuca

SEQ ID NO: 1143671 - RNA, 19 nt, Artificial Sequence
  Description of Artificial Sequence: Synthetic oligonucleotide
  Antisense strand to SEQ ID NO: 1143670
ugagucaaccgaaauacug

SEQ ID NO: 1143672 - RNA, 19 nt, Artificial Sequence
  Description of Artificial Sequence: Synthetic oligonucleotide
  Sense strand starting at position 263 of SEQ ID NO: 916273
ugauguuaacaucagucua

SEQ ID NO: 1143673 - RNA, 19 nt, Artificial Sequence
  Description of Artificial Sequence: Synthetic oligonucleotide
  Antisense strand to SEQ ID NO: 1143672
uagacugauguuaacauca

SEQ ID NO: 1143674 - RNA, 19 nt, Artificial Sequence
  Description of Artificial Sequence: Synthetic oligonucleotide
  Sense strand starting at position 265 of SEQ ID NO: 916273
auguuaacaucagucuaau

SEQ ID NO: 1143675 - RNA, 19 nt, Artificial Sequence
  Description of Artificial Sequence: Synthetic oligonucleotide
  Antisense strand to SEQ ID NO: 1143674
auuagacugauguuaacau

SEQ ID NO: 1143676 - RNA, 19 nt, Artificial Sequence
  Description of Artificial Sequence: Synthetic oligonucleotide
  Sense strand starting at position 446 of SEQ ID NO: 916273
ugcuuucucccaggacaga

SEQ ID NO: 1143677 - RNA, 19 nt, Artificial Sequence
  Description of Artificial Sequence: Synthetic oligonucleotide
  Antisense strand to SEQ ID NO: 1143676
ucuguccugggagaaagca

SEQ ID NO: 1143678 - RNA, 19 nt, Artificial Sequence
  Description of Artificial Sequence: Synthetic oligonucleotide
  Sense strand starting at position 473 of SEQ ID NO: 916273
gguccugauguaggaauua

SEQ ID NO: 1143679 - RNA, 19 nt, Artificial Sequence
  Description of Artificial Sequence: Synthetic oligonucleotide
  Antisense strand to SEQ ID NO: 1143678
uaauuccuacaucaggacc

SEQ ID NO: 1143680 - RNA, 19 nt, Artificial Sequence
  Description of Artificial Sequence: Synthetic oligonucleotide
  Sense strand starting at position 483 of SEQ ID NO: 916273
uaggaauuacccugacugu

SEQ ID NO: 1143681 - RNA, 19 nt, Artificial Sequence
  Description of Artificial Sequence: Synthetic oligonucleotide
  Antisense strand to SEQ ID NO: 1143680
acagucaggguaauuccua

SEQ ID NO: 1143682 - RNA, 19 nt, Artificial Sequence
  Description of Artificial Sequence: Synthetic oligonucleotide
  Sense strand starting at position 791 of SEQ ID NO: 916273
ucauaaugcguugacagaa

SEQ ID NO: 1143683 - RNA, 19 nt, Artificial Sequence
  Description of Artificial Sequence: Synthetic oligonucleotide
  Antisense strand to SEQ ID NO: 1143682
uucugucaacgcauuauga

SEQ ID NO: 1143684 - RNA, 19 nt, Artificial Sequence
  Description of Artificial Sequence: Synthetic oligonucleotide
  Sense strand starting at position 935 of SEQ ID NO: 916273
acuugagcacgccaaguau

SEQ ID NO: 1143685 - RNA, 19 nt, Artificial Sequence
  Description of Artificial Sequence: Synthetic oligonucleotide
  Antisense strand to SEQ ID NO: 1143684
auacuuggcgugcucaagu

SEQ ID NO: 1143686 - RNA, 19 nt, Artificial Sequence
  Description of Artificial Sequence: Synthetic oligonucleotide
  Sense strand starting at position 943 of SEQ ID NO: 916273
acgccaaguaucgcucauu

SEQ ID NO: 1143687 - RNA, 19 nt, Artificial Sequence
  Description of Artificial Sequence: Synthetic oligonucleotide
  Antisense strand to SEQ ID NO: 1143686
aaugagcgauacuuggcgu

SEQ ID NO: 1143688 - RNA, 19 nt, Artificial Sequence
  Description of Artificial Sequence: Synthetic oligonucleotide
  Sense strand starting at position 1071 of SEQ ID NO: 916273
aaguguaagcguuaacaca

SEQ ID NO: 1143689 - RNA, 19 nt, Artificial Sequence
  Description of Artificial Sequence: Synthetic oligonucleotide
  Antisense strand to SEQ ID NO: 1143688
uguguuaacgcuuacacuu

SEQ ID NO: 1143690 - RNA, 19 nt, Artificial Sequence
  Description of Artificial Sequence: Synthetic oligonucleotide
  Sense strand starting at position 1218 of SEQ ID NO: 916273
aggaaauucucacuagcca

SEQ ID NO: 1143691 - RNA, 19 nt, Artificial Sequence
  Description of Artificial Sequence: Synthetic oligonucleotide
  Antisense strand to SEQ ID NO: 1143690
uggcuagugagaauuuccu

SEQ ID NO: 1143692 - RNA, 19 nt, Artificial Sequence
  Description of Artificial Sequence: Synthetic oligonucleotide
  Sense strand starting at position 2246 of SEQ ID NO: 916273
ggaggcaguugaccuaaau

SEQ ID NO: 1143693 - RNA, 19 nt, Artificial Sequence
  Description of Artificial Sequence: Synthetic oligonucleotide
  Antisense strand to SEQ ID NO: 1143692
auuuaggucaacugccucc

SEQ ID NO: 1143694 - RNA, 19 nt, Artificial Sequence
  Description of Artificial Sequence: Synthetic oligonucleotide
  Sense strand starting at position 2380 of SEQ ID NO: 916273
gauuaaacuguuuaacgcu

SEQ ID NO: 1143695 - RNA, 19 nt, Artificial Sequence
  Description of Artificial Sequence: Synthetic oligonucleotide
  Antisense strand to SEQ ID NO: 1143694
agcguuaaacaguuuaauc

SEQ ID NO: 1143696 - RNA, 19 nt, Artificial Sequence
  Description of Artificial Sequence: Synthetic oligonucleotide
  Sense strand starting at position 2463 of SEQ ID NO: 916273
cucuaaguuucugugauac

SEQ ID NO: 1143697 - RNA, 19 nt, Artificial Sequence
  Description of Artificial Sequence: Synthetic oligonucleotide
  Antisense strand to SEQ ID NO: 1143696
guaucacagaaacuuagag

SEQ ID NO: 1143698 - RNA, 19 nt, Artificial Sequence
  Description of Artificial Sequence: Synthetic oligonucleotide
  Sense strand starting at position 2520 of SEQ ID NO: 916273
uugcuucguguguuuggua

SEQ ID NO: 1143699 - RNA, 19 nt, Artificial Sequence
  Description of Artificial Sequence: Synthetic oligonucleotide
  Antisense strand to SEQ ID NO: 1143698
uaccaaacacacgaagcaa

SEQ ID NO: 1143700 - RNA, 19 nt, Artificial Sequence
  Description of Artificial Sequence: Synthetic oligonucleotide
  Sense strand starting at position 2567 of SEQ ID NO: 916273
gacagugaguuccuguaag

SEQ ID NO: 1143701 - RNA, 19 nt, Artificial Sequence
  Description of Artificial Sequence: Synthetic oligonucleotide
  Antisense strand to SEQ ID NO: 1143700
cuuacaggaacucacuguc

SEQ ID NO: 1143702 - RNA, 19 nt, Artificial Sequence
  Description of Artificial Sequence: Synthetic oligonucleotide
  Sense strand starting at position 2651 of SEQ ID NO: 916273
uuaguauucucuccacaga

SEQ ID NO: 1143703 - RNA, 19 nt, Artificial Sequence
  Description of Artificial Sequence: Synthetic oligonucleotide
  Antisense strand to SEQ ID NO: 1143702
ucuguggagagaauacuaa

SEQ ID NO: 1143704 - RNA, 19 nt, Artificial Sequence
  Description of Artificial Sequence: Synthetic oligonucleotide
  Sense strand starting at position 2654 of SEQ ID NO: 916273
guauucucuccacagagcu

SEQ ID NO: 1143705 - RNA, 19 nt, Artificial Sequence
  Description of Artificial Sequence: Synthetic oligonucleotide
  Antisense strand to SEQ ID NO: 1143704
agcucuguggagagaauac

SEQ ID NO: 1143706 - RNA, 19 nt, Artificial Sequence
  Description of Artificial Sequence: Synthetic oligonucleotide
  Sense strand starting at position 2912 of SEQ ID NO: 916273
cugugaguauggucaagag

SEQ ID NO: 1143707 - RNA, 19 nt, Artificial Sequence
  Description of Artificial Sequence: Synthetic oligonucleotide
  Antisense strand to SEQ ID NO: 1143706
cucuugaccauacucacag

SEQ ID NO: 1143708 - RNA, 19 nt, Artificial Sequence
  Description of Artificial Sequence: Synthetic oligonucleotide
  Sense strand starting at position 2955 of SEQ ID NO: 916273
agagucuugagucggguaa

SEQ ID NO: 1143709 - RNA, 19 nt, Artificial Sequence
  Description of Artificial Sequence: Synthetic oligonucleotide
  Antisense strand to SEQ ID NO: 1143708
uuacccgacucaagacucu

SEQ ID NO: 1143710 - RNA, 19 nt, Artificial Sequence
  Description of Artificial Sequence: Synthetic oligonucleotide
  Sense strand starting at position 2959 of SEQ ID NO: 916273
ucuugagucggguaaggga

SEQ ID NO: 1143711 - RNA, 19 nt, Artificial Sequence
  Description of Artificial Sequence: Synthetic oligonucleotide
  Antisense strand to SEQ ID NO: 1143710
ucccuuacccgacucaaga

SEQ ID NO: 1143712 - RNA, 19 nt, Artificial Sequence
  Description of Artificial Sequence: Synthetic oligonucleotide
  Sense strand starting at position 2976 of SEQ ID NO: 916273
gaaguaauuccaggcugaa

SEQ ID NO: 1143713 - RNA, 19 nt, Artificial Sequence
  Description of Artificial Sequence: Synthetic oligonucleotide
  Antisense strand to SEQ ID NO: 1143712
uucagccuggaauuacuuc

SEQ ID NO: 1143714 - RNA, 19 nt, Artificial Sequence
  Description of Artificial Sequence: Synthetic oligonucleotide
  Sense strand starting at position 3006 of SEQ ID NO: 916273
caggcucuuguguagggaa

SEQ ID NO: 1143715 - RNA, 19 nt, Artificial Sequence
  Description of Artificial Sequence: Synthetic oligonucleotide
  Antisense strand to SEQ ID NO: 1143714
uucccuacacaagagccug

SEQ ID NO: 1143716 - RNA, 19 nt, Artificial Sequence
  Description of Artificial Sequence: Synthetic oligonucleotide
  Sense strand starting at position 3035 of SEQ ID NO: 916273
guuugauaccaccagcuaa

SEQ ID NO: 1143717 - RNA, 19 nt, Artificial Sequence
  Description of Artificial Sequence: Synthetic oligonucleotide
  Antisense strand to SEQ ID NO: 1143716
uuagcuggugguaucaaac

SEQ ID NO: 1143718 - RNA, 19 nt, Artificial Sequence
  Description of Artificial Sequence: Synthetic oligonucleotide
  Sense strand starting at position 3047 of SEQ ID NO: 916273
cagcuaagugaaugcaaga

SEQ ID NO: 1143719 - RNA, 19 nt, Artificial Sequence
  Description of Artificial Sequence: Synthetic oligonucleotide
  Antisense strand to SEQ ID NO: 1143718
ucuugcauucacuuagcug

SEQ ID NO: 1143720 - RNA, 19 nt, Artificial Sequence
  Description of Artificial Sequence: Synthetic oligonucleotide
  Sense strand starting at position 3067 of SEQ ID NO: 916273
aggguaugaugagcgauaa

SEQ ID NO: 1143721 - RNA, 19 nt, Artificial Sequence
  Description of Artificial Sequence: Synthetic oligonucleotide
  Antisense strand to SEQ ID NO: 1143720
uuaucgcucaucauacccu

SEQ ID NO: 1143722 - RNA, 19 nt, Artificial Sequence
  Description of Artificial Sequence: Synthetic oligonucleotide
  Sense strand starting at position 3068 of SEQ ID NO: 916273
ggguaugaugagcgauaag

SEQ ID NO: 1143723 - RNA, 19 nt, Artificial Sequence
  Description of Artificial Sequence: Synthetic oligonucleotide
  Antisense strand to SEQ ID NO: 1143722
cuuaucgcucaucauaccc

SEQ ID NO: 1143724 - RNA, 19 nt, Artificial Sequence
  Description of Artificial Sequence: Synthetic oligonucleotide
  Sense strand starting at position 3104 of SEQ ID NO: 916273
auauuugagugcuuuguuu

SEQ ID NO: 1143725 - RNA, 19 nt, Artificial Sequence
  Description of Artificial Sequence: Synthetic oligonucleotide
  Antisense strand to SEQ ID NO: 1143724
aaacaaagcacucaaauau

SEQ ID NO: 1143726 - RNA, 19 nt, Artificial Sequence
  Description of Artificial Sequence: Synthetic oligonucleotide
  Sense strand starting at position 3106 of SEQ ID NO: 916273
auuugagugcuuuguuuag

SEQ ID NO: 1143727 - RNA, 19 nt, Artificial Sequence
  Description of Artificial Sequence: Synthetic oligonucleotide
  Antisense strand to SEQ ID NO: 1143726
cuaaacaaagcacucaaau

SEQ ID NO: 1143728 - RNA, 19 nt, Artificial Sequence
  Description of Artificial Sequence: Synthetic oligonucleotide
  Sense strand starting at position 3148 of SEQ ID NO: 916273
ucugcaagacauuagugaa

SEQ ID NO: 1143729 - RNA, 19 nt, Artificial Sequence
  Description of Artificial Sequence: Synthetic oligonucleotide
  Antisense strand to SEQ ID NO: 1143728
uucacuaaugucuugcaga

SEQ ID NO: 1143730 - RNA, 19 nt, Artificial Sequence
  Description of Artificial Sequence: Synthetic oligonucleotide
  Sense strand starting at position 3364 of SEQ ID NO: 916273
cguuuaacugcugaaauug

SEQ ID NO: 1143731 - RNA, 19 nt, Artificial Sequence
  Description of Artificial Sequence: Synthetic oligonucleotide
  Antisense strand to SEQ ID NO: 1143730
caauuucagcaguuaaacg

SEQ ID NO: 1143732 - RNA, 19 nt, Artificial Sequence
  Description of Artificial Sequence: Synthetic oligonucleotide
  Sense strand starting at position 3398 of SEQ ID NO: 916273
aaaguuuggccaugagaua

SEQ ID NO: 1143733 - RNA, 19 nt, Artificial Sequence
  Description of Artificial Sequence: Synthetic oligonucleotide
  Antisense strand to SEQ ID NO: 1143732
uaucucauggccaaacuuu

SEQ ID NO: 1143734 - RNA, 19 nt, Artificial Sequence
  Description of Artificial Sequence: Synthetic oligonucleotide
  Sense strand starting at position 3399 of SEQ ID NO: 916273
aaguuuggccaugagauac

SEQ ID NO: 1143735 - RNA, 19 nt, Artificial Sequence
  Description of Artificial Sequence: Synthetic oligonucleotide
  Antisense strand to SEQ ID NO: 1143734
guaucucauggccaaacuu

SEQ ID NO: 1143736 - RNA, 19 nt, Artificial Sequence
  Description of Artificial Sequence: Synthetic oligonucleotide
  Sense strand starting at position 3491 of SEQ ID NO: 916273
ugguucugugaccaugaua

SEQ ID NO: 1143737 - RNA, 19 nt, Artificial Sequence
  Description of Artificial Sequence: Synthetic oligonucleotide
  Antisense strand to SEQ ID NO: 1143736
uaucauggucacagaacca

SEQ ID NO: 1143738 - RNA, 19 nt, Artificial Sequence
  Description of Artificial Sequence: Synthetic oligonucleotide
  Sense strand starting at position 3570 of SEQ ID NO: 916273
ugaacauuagcaugcuauc

SEQ ID NO: 1143739 - RNA, 19 nt, Artificial Sequence
  Description of Artificial Sequence: Synthetic oligonucleotide
  Antisense strand to SEQ ID NO: 1143738
gauagcaugcuaauguuca

SEQ ID NO: 1143740 - RNA, 19 nt, Artificial Sequence
  Description of Artificial Sequence: Synthetic oligonucleotide
  Sense strand starting at position 3583 of SEQ ID NO: 916273
gcuaucaagauguguaaag

SEQ ID NO: 1143741 - RNA, 19 nt, Artificial Sequence
  Description of Artificial Sequence: Synthetic oligonucleotide
  Antisense strand to SEQ ID NO: 1143740
cuuuacacaucuugauagc

SEQ ID NO: 1143742 - RNA, 19 nt, Artificial Sequence
  Description of Artificial Sequence: Synthetic oligonucleotide
  Sense strand starting at position 3584 of SEQ ID NO: 916273
cuaucaagauguguaaaga

SEQ ID NO: 1143743 - RNA, 19 nt, Artificial Sequence
  Description of Artificial Sequence: Synthetic oligonucleotide
  Antisense strand to SEQ ID NO: 1143742
ucuuuacacaucuugauag

SEQ ID NO: 1143744 - RNA, 19 nt, Artificial Sequence
  Description of Artificial Sequence: Synthetic oligonucleotide
  Sense strand starting at position 3669 of SEQ ID NO: 916273
ggcucugaugcagaguauu

SEQ ID NO: 1143745 - RNA, 19 nt, Artificial Sequence
  Description of Artificial Sequence: Synthetic oligonucleotide
  Antisense strand to SEQ ID NO: 1143744
aauacucugcaucagagcc

SEQ ID NO: 1143746 - RNA, 19 nt, Artificial Sequence
  Description of Artificial Sequence: Synthetic oligonucleotide
  Sense strand starting at position 48 of SEQ ID NO: 916274
ggaacuugugcagagaucu

SEQ ID NO: 1143747 - RNA, 19 nt, Artificial Sequence
  Description of Artificial Sequence: Synthetic oligonucleotide
  Antisense strand to SEQ ID NO: 1143746
agaucucugcacaaguucc

SEQ ID NO: 1143748 - RNA, 19 nt, Artificial Sequence
  Description of Artificial Sequence: Synthetic oligonucleotide
  Sense strand starting at position 189 of SEQ ID NO: 916274
augugauagagaugguucu

SEQ ID NO: 1143749 - RNA, 19 nt, Artificial Sequence
  Description of Artificial Sequence: Synthetic oligonucleotide
  Antisense strand to SEQ ID NO: 1143748
agaaccaucucuaucacau

SEQ ID NO: 1143750 - RNA, 19 nt, Artificial Sequence
  Description of Artificial Sequence: Synthetic oligonucleotide
  Sense strand starting at position 204 of SEQ ID NO: 916274
uucuguucccaggaacuuu

SEQ ID NO: 1143751 - RNA, 19 nt, Artificial Sequence
  Description of Artificial Sequence: Synthetic oligonucleotide
  Antisense strand to SEQ ID NO: 1143750
aaaguuccugggaacagaa

SEQ ID NO: 1143752 - RNA, 19 nt, Artificial Sequence
  Description of Artificial Sequence: Synthetic oligonucleotide
  Sense strand starting at position 213 of SEQ ID NO: 916274
caggaacuuugggcauauu

SEQ ID NO: 1143753 - RNA, 19 nt, Artificial Sequence
  Description of Artificial Sequence: Synthetic oligonucleotide
  Antisense strand to SEQ ID NO: 1143752
aauaugcccaaaguuccug

SEQ ID NO: 1143754 - RNA, 19 nt, Artificial Sequence
  Description of Artificial Sequence: Synthetic oligonucleotide
  Sense strand starting at position 435 of SEQ ID NO: 916274
ccgugcuuuguucucuuau

SEQ ID NO: 1143755 - RNA, 19 nt, Artificial Sequence
  Description of Artificial Sequence: Synthetic oligonucleotide
  Antisense strand to SEQ ID NO: 1143754
auaagagaacaaagcacgg

SEQ ID NO: 1143756 - RNA, 19 nt, Artificial Sequence
  Description of Artificial Sequence: Synthetic oligonucleotide
  Sense strand starting at position 512 of SEQ ID NO: 916274
gcauacacacgagaacuuu

SEQ ID NO: 1143757 - RNA, 19 nt, Artificial Sequence
  Description of Artificial Sequence: Synthetic oligonucleotide
  Antisense strand to SEQ ID NO: 1143756
aaaguucucguguguaugc

SEQ ID NO: 1143758 - RNA, 19 nt, Artificial Sequence
  Description of Artificial Sequence: Synthetic oligonucleotide
  Sense strand starting at position 641 of SEQ ID NO: 916274
ucacauucugguuauuauu

SEQ ID NO: 1143759 - RNA, 19 nt, Artificial Sequence
  Description of Artificial Sequence: Synthetic oligonucleotide
  Antisense strand to SEQ ID NO: 1143758
aauaauaaccagaauguga

SEQ ID NO: 1143760 - RNA, 19 nt, Artificial Sequence
  Description of Artificial Sequence: Synthetic oligonucleotide
  Sense strand starting at position 1215 of SEQ ID NO: 916274
gaauguagaguugagguuu

SEQ ID NO: 1143761 - RNA, 19 nt, Artificial Sequence
  Description of Artificial Sequence: Synthetic oligonucleotide
  Antisense strand to SEQ ID NO: 1143760
aaaccucaacucuacauuc

SEQ ID NO: 1143762 - RNA, 19 nt, Artificial Sequence
  Description of Artificial Sequence: Synthetic oligonucleotide
  Sense strand starting at position 1460 of SEQ ID NO: 916274
uguaauagacaagguuaaa

SEQ ID NO: 1143763 - RNA, 19 nt, Artificial Sequence
  Description of Artificial Sequence: Synthetic oligonucleotide
  Antisense strand to SEQ ID NO: 1143762
uuuaaccuugucuauuaca

SEQ ID NO: 1143764 - RNA, 19 nt, Artificial Sequence
  Description of Artificial Sequence: Synthetic oligonucleotide
  Sense strand starting at position 1522 of SEQ ID NO: 916274
cuagcaauugguuaucacu

SEQ ID NO: 1143765 - RNA, 19 nt, Artificial Sequence
  Description of Artificial Sequence: Synthetic oligonucleotide
  Antisense strand to SEQ ID NO: 1143764
agugauaaccaauugcuag

SEQ ID NO: 1143766 - RNA, 19 nt, Artificial Sequence
  Description of Artificial Sequence: Synthetic oligonucleotide
  Sense strand starting at position 1530 of SEQ ID NO: 916274
ugguuaucacuagagaguu

SEQ ID NO: 1143767 - RNA, 19 nt, Artificial Sequence
  Description of Artificial Sequence: Synthetic oligonucleotide
  Antisense strand to SEQ ID NO: 1143766
aacucucuagugauaacca

SEQ ID NO: 1143768 - RNA, 19 nt, Artificial Sequence
  Description of Artificial Sequence: Synthetic oligonucleotide
  Sense strand starting at position 1538 of SEQ ID NO: 916274
acuagagaguuaucuguga

SEQ ID NO: 1143769 - RNA, 19 nt, Artificial Sequence
  Description of Artificial Sequence: Synthetic oligonucleotide
  Antisense strand to SEQ ID NO: 1143768
ucacagauaacucucuagu

SEQ ID NO: 1143770 - RNA, 19 nt, Artificial Sequence
  Description of Artificial Sequence: Synthetic oligonucleotide
  Sense strand starting at position 1542 of SEQ ID NO: 916274
gagaguuaucugugaaauc

SEQ ID NO: 1143771 - RNA, 19 nt, Artificial Sequence
  Description of Artificial Sequence: Synthetic oligonucleotide
  Antisense strand to SEQ ID NO: 1143770
gauuucacagauaacucuc

SEQ ID NO: 1143772 - RNA, 19 nt, Artificial Sequence
  Description of Artificial Sequence: Synthetic oligonucleotide
  Sense strand starting at position 1792 of SEQ ID NO: 916274
guuguaaucccaggagaag

SEQ ID NO: 1143773 - RNA, 19 nt, Artificial Sequence
  Description of Artificial Sequence: Synthetic oligonucleotide
  Antisense strand to SEQ ID NO: 1143772
cuucuccugggauuacaac

SEQ ID NO: 1143774 - RNA, 19 nt, Artificial Sequence
  Description of Artificial Sequence: Synthetic oligonucleotide
  Sense strand starting at position 1898 of SEQ ID NO: 916274
augugcuucccacagaauu

SEQ ID NO: 1143775 - RNA, 19 nt, Artificial Sequence
  Description of Artificial Sequence: Synthetic oligonucleotide
  Antisense strand to SEQ ID NO: 1143774
aauucugugggaagcacau

SEQ ID NO: 1143776 - RNA, 19 nt, Artificial Sequence
  Description of Artificial Sequence: Synthetic oligonucleotide
  Sense strand starting at position 1908 of SEQ ID NO: 916274
cacagaauuccugguggaa

SEQ ID NO: 1143777 - RNA, 19 nt, Artificial Sequence
  Description of Artificial Sequence: Synthetic oligonucleotide
  Antisense strand to SEQ ID NO: 1143776
uuccaccaggaauucugug

SEQ ID NO: 1143778 - RNA, 19 nt, Artificial Sequence
  Description of Artificial Sequence: Synthetic oligonucleotide
  Sense strand starting at position 1964 of SEQ ID NO: 916274
agguauugugaggacggua

SEQ ID NO: 1143779 - RNA, 19 nt, Artificial Sequence
  Description of Artificial Sequence: Synthetic oligonucleotide
  Antisense strand to SEQ ID NO: 1143778
uaccguccucacaauaccu

SEQ ID NO: 1143780 - RNA, 19 nt, Artificial Sequence
  Description of Artificial Sequence: Synthetic oligonucleotide
  Sense strand starting at position 1991 of SEQ ID NO: 916274
gucaguaucuacccaaaca

SEQ ID NO: 1143781 - RNA, 19 nt, Artificial Sequence
  Description of Artificial Sequence: Synthetic oligonucleotide
  Antisense strand to SEQ ID NO: 1143780
uguuuggguagauacugac

SEQ ID NO: 1143782 - RNA, 19 nt, Artificial Sequence
  Description of Artificial Sequence: Synthetic oligonucleotide
  Sense strand starting at position 2224 of SEQ ID NO: 916274
uguagacugauugggacau

SEQ ID NO: 1143783 - RNA, 19 nt, Artificial Sequence
  Description of Artificial Sequence: Synthetic oligonucleotide
  Antisense strand to SEQ ID NO: 1143782
augucccaaucagucuaca

SEQ ID NO: 1143784 - RNA, 19 nt, Artificial Sequence
  Description of Artificial Sequence: Synthetic oligonucleotide
  Sense strand starting at position 2360 of SEQ ID NO: 916274
uuuggugauagccagagau

SEQ ID NO: 1143785 - RNA, 19 nt, Artificial Sequence
  Description of Artificial Sequence: Synthetic oligonucleotide
  Antisense strand to SEQ ID NO: 1143784
aucucuggcuaucaccaaa

SEQ ID NO: 1143786 - RNA, 19 nt, Artificial Sequence
  Description of Artificial Sequence: Synthetic oligonucleotide
  Sense strand starting at position 2362 of SEQ ID NO: 916274
uggugauagccagagaucu

SEQ ID NO: 1143787 - RNA, 19 nt, Artificial Sequence
  Description of Artificial Sequence: Synthetic oligonucleotide
  Antisense strand to SEQ ID NO: 1143786
agaucucuggcuaucacca

SEQ ID NO: 1143788 - RNA, 19 nt, Artificial Sequence
  Description of Artificial Sequence: Synthetic oligonucleotide
  Sense strand starting at position 2364 of SEQ ID NO: 916274
gugauagccagagaucuug

SEQ ID NO: 1143789 - RNA, 19 nt, Artificial Sequence
  Description of Artificial Sequence: Synthetic oligonucleotide
  Antisense strand to SEQ ID NO: 1143788
caagaucucuggcuaucac

SEQ ID NO: 1143790 - RNA, 19 nt, Artificial Sequence
  Description of Artificial Sequence: Synthetic oligonucleotide
  Sense strand starting at position 2485 of SEQ ID NO: 916274
ggucaauaaucaucaguca

SEQ ID NO: 1143791 - RNA, 19 nt, Artificial Sequence
  Description of Artificial Sequence: Synthetic oligonucleotide
  Antisense strand to SEQ ID NO: 1143790
ugacugaugauuauugacc

SEQ ID NO: 1143792 - RNA, 19 nt, Artificial Sequence
  Description of Artificial Sequence: Synthetic oligonucleotide
  Sense strand starting at position 2641 of SEQ ID NO: 916274
agauaaauggcauauguuu

SEQ ID NO: 1143793 - RNA, 19 nt, Artificial Sequence
  Description of Artificial Sequence: Synthetic oligonucleotide
  Antisense strand to SEQ ID NO: 1143792
aaacauaugccauuuaucu

SEQ ID NO: 1143794 - RNA, 19 nt, Artificial Sequence
  Description of Artificial Sequence: Synthetic oligonucleotide
  Sense strand starting at position 2731 of SEQ ID NO: 916274
ccuauauuguaccuacaga

SEQ ID NO: 1143795 - RNA, 19 nt, Artificial Sequence
  Description of Artificial Sequence: Synthetic oligonucleotide
  Antisense strand to SEQ ID NO: 1143794
ucuguagguacaauauagg

SEQ ID NO: 1143796 - RNA, 19 nt, Artificial Sequence
  Description of Artificial Sequence: Synthetic oligonucleotide
  Sense strand starting at position 2780 of SEQ ID NO: 916274
uugagccaucuuuacagau

SEQ ID NO: 1143797 - RNA, 19 nt, Artificial Sequence
  Description of Artificial Sequence: Synthetic oligonucleotide
  Antisense strand to SEQ ID NO: 1143796
aucuguaaagauggcucaa

SEQ ID NO: 1143798 - RNA, 19 nt, Artificial Sequence
  Description of Artificial Sequence: Synthetic oligonucleotide
  Sense strand starting at position 2953 of SEQ ID NO: 916274
cuauauacuuggucuuaua

SEQ ID NO: 1143799 - RNA, 19 nt, Artificial Sequence
  Description of Artificial Sequence: Synthetic oligonucleotide
  Antisense strand to SEQ ID NO: 1143798
uauaagaccaaguauauag

SEQ ID NO: 1143800 - RNA, 19 nt, Artificial Sequence
  Description of Artificial Sequence: Synthetic oligonucleotide
  Sense strand starting at position 3238 of SEQ ID NO: 916274
ugacacaguugauucuuau

SEQ ID NO: 1143801 - RNA, 19 nt, Artificial Sequence
  Description of Artificial Sequence: Synthetic oligonucleotide
  Antisense strand to SEQ ID NO: 1143800
auaagaaucaacuguguca

SEQ ID NO: 1143802 - RNA, 19 nt, Artificial Sequence
  Description of Artificial Sequence: Synthetic oligonucleotide
  Sense strand starting at position 3422 of SEQ ID NO: 916274
ucacauaaccucugagagu

SEQ ID NO: 1143803 - RNA, 19 nt, Artificial Sequence
  Description of Artificial Sequence: Synthetic oligonucleotide
  Antisense strand to SEQ ID NO: 1143802
acucucagagguuauguga

SEQ ID NO: 1143804 - RNA, 19 nt, Artificial Sequence
  Description of Artificial Sequence: Synthetic oligonucleotide
  Sense strand starting at position 3481 of SEQ ID NO: 916274
uguugacaggagugagaau

SEQ ID NO: 1143805 - RNA, 19 nt, Artificial Sequence
  Description of Artificial Sequence: Synthetic oligonucleotide
  Antisense strand to SEQ ID NO: 1143804
auucucacuccugucaaca

SEQ ID NO: 1143806 - RNA, 19 nt, Artificial Sequence
  Description of Artificial Sequence: Synthetic oligonucleotide
  Sense strand starting at position 3492 of SEQ ID NO: 916274
gugagaaugggaugacagu

SEQ ID NO: 1143807 - RNA, 19 nt, Artificial Sequence
  Description of Artificial Sequence: Synthetic oligonucleotide
  Antisense strand to SEQ ID NO: 1143806
acugucaucccauucucac

SEQ ID NO: 1143808 - RNA, 19 nt, Artificial Sequence
  Description of Artificial Sequence: Synthetic oligonucleotide
  Sense strand starting at position 3585 of SEQ ID NO: 916274
ggagcacaaugauccauau

SEQ ID NO: 1143809 - RNA, 19 nt, Artificial Sequence
  Description of Artificial Sequence: Synthetic oligonucleotide
  Antisense strand to SEQ ID NO: 1143808
auauggaucauugugcucc

SEQ ID NO: 1143810 - RNA, 19 nt, Artificial Sequence
  Description of Artificial Sequence: Synthetic oligonucleotide
  Sense strand starting at position 3614 of SEQ ID NO: 916274
acaugauaaggcugaauua

SEQ ID NO: 1143811 - RNA, 19 nt, Artificial Sequence
  Description of Artificial Sequence: Synthetic oligonucleotide
  Antisense strand to SEQ ID NO: 1143810
uaauucagccuuaucaugu

SEQ ID NO: 1143812 - RNA, 19 nt, Artificial Sequence
  Description of Artificial Sequence: Synthetic oligonucleotide
  Sense strand starting at position 3703 of SEQ ID NO: 916274
cuguguaaacuugagccaa

SEQ ID NO: 1143813 - RNA, 19 nt, Artificial Sequence
  Description of Artificial Sequence: Synthetic oligonucleotide
  Antisense strand to SEQ ID NO: 1143812
uuggcucaaguuuacacag

SEQ ID NO: 1143814 - RNA, 19 nt, Artificial Sequence
  Description of Artificial Sequence: Synthetic oligonucleotide
  Sense strand starting at position 3840 of SEQ ID NO: 916274
cacauaugaugguuuagua

SEQ ID NO: 1143815 - RNA, 19 nt, Artificial Sequence
  Description of Artificial Sequence: Synthetic oligonucleotide
  Antisense strand to SEQ ID NO: 1143814
uacuaaaccaucauaugug

SEQ ID NO: 1143816 - RNA, 19 nt, Artificial Sequence
  Description of Artificial Sequence: Synthetic oligonucleotide
  Sense strand starting at position 3866 of SEQ ID NO: 916274
ucccuaauggcagagguua

SEQ ID NO: 1143817 - RNA, 19 nt, Artificial Sequence
  Description of Artificial Sequence: Synthetic oligonucleotide
  Antisense strand to SEQ ID NO: 1143816
uaaccucugccauuaggga

SEQ ID NO: 1143818 - RNA, 19 nt, Artificial Sequence
  Description of Artificial Sequence: Synthetic oligonucleotide
  Sense strand starting at position 3942 of SEQ ID NO: 916274
uuguaccaccuguauauau

SEQ ID NO: 1143819 - RNA, 19 nt, Artificial Sequence
  Description of Artificial Sequence: Synthetic oligonucleotide
  Antisense strand to SEQ ID NO: 1143818
auauauacaggugguacaa

SEQ ID NO: 1143820 - RNA, 19 nt, Artificial Sequence
  Description of Artificial Sequence: Synthetic oligonucleotide
  Sense strand starting at position 3944 of SEQ ID NO: 916274
guaccaccuguauauauua

SEQ ID NO: 1143821 - RNA, 19 nt, Artificial Sequence
  Description of Artificial Sequence: Synthetic oligonucleotide
  Antisense strand to SEQ ID NO: 1143820
uaauauauacaggugguac

SEQ ID NO: 1143822 - RNA, 19 nt, Artificial Sequence
  Description of Artificial Sequence: Synthetic oligonucleotide
  Sense strand starting at position 3952 of SEQ ID NO: 916274
uguauauauuaccugauca

SEQ ID NO: 1143823 - RNA, 19 nt, Artificial Sequence
  Description of Artificial Sequence: Synthetic oligonucleotide
  Antisense strand to SEQ ID NO: 1143822
ugaucagguaauauauaca

SEQ ID NO: 1143824 - RNA, 19 nt, Artificial Sequence
  Description of Artificial Sequence: Synthetic oligonucleotide
  Sense strand starting at position 3964 of SEQ ID NO: 916274
cugaucaaaugccuagaga

SEQ ID NO: 1143825 - RNA, 19 nt, Artificial Sequence
  Description of Artificial Sequence: Synthetic oligonucleotide
  Antisense strand to SEQ ID NO: 1143824
ucucuaggcauuugaucag

SEQ ID NO: 1143826 - RNA, 19 nt, Artificial Sequence
  Description of Artificial Sequence: Synthetic oligonucleotide
  Sense strand starting at position 127 of SEQ ID NO: 916275
gucagacuagcagaacuuu

SEQ ID NO: 1143827 - RNA, 19 nt, Artificial Sequence
  Description of Artificial Sequence: Synthetic oligonucleotide
  Antisense strand to SEQ ID NO: 1143826
aaaguucugcuagucugac

SEQ ID NO: 1143828 - RNA, 19 nt, Artificial Sequence
  Description of Artificial Sequence: Synthetic oligonucleotide
  Sense strand starting at position 136 of SEQ ID NO: 916275
gcagaacuuugacuagaau

SEQ ID NO: 1143829 - RNA, 19 nt, Artificial Sequence
  Description of Artificial Sequence: Synthetic oligonucleotide
  Antisense strand to SEQ ID NO: 1143828
auucuagucaaaguucugc

SEQ ID NO: 1143830 - RNA, 19 nt, Artificial Sequence
  Description of Artificial Sequence: Synthetic oligonucleotide
  Sense strand starting at position 147 of SEQ ID NO: 916275
acuagaaucuuggucuuac

SEQ ID NO: 1143831 - RNA, 19 nt, Artificial Sequence
  Description of Artificial Sequence: Synthetic oligonucleotide
  Antisense strand to SEQ ID NO: 1143830
guaagaccaagauucuagu

SEQ ID NO: 1143832 - RNA, 19 nt, Artificial Sequence
  Description of Artificial Sequence: Synthetic oligonucleotide
  Sense strand starting at position 148 of SEQ ID NO: 916275
cuagaaucuuggucuuacu

SEQ ID NO: 1143833 - RNA, 19 nt, Artificial Sequence
  Description of Artificial Sequence: Synthetic oligonucleotide
  Antisense strand to SEQ ID NO: 1143832
aguaagaccaagauucuag

SEQ ID NO: 1143834 - RNA, 19 nt, Artificial Sequence
  Description of Artificial Sequence: Synthetic oligonucleotide
  Sense strand starting at position 201 of SEQ ID NO: 916275
uuaccacuccaucgggaau

SEQ ID NO: 1143835 - RNA, 19 nt, Artificial Sequence
  Description of Artificial Sequence: Synthetic oligonucleotide
  Antisense strand to SEQ ID NO: 1143834
auucccgauggagugguaa

SEQ ID NO: 1143836 - RNA, 19 nt, Artificial Sequence
  Description of Artificial Sequence: Synthetic oligonucleotide
  Sense strand starting at position 241 of SEQ ID NO: 916275
cucagugaugaguaccuau

SEQ ID NO: 1143837 - RNA, 19 nt, Artificial Sequence
  Description of Artificial Sequence: Synthetic oligonucleotide
  Antisense strand to SEQ ID NO: 1143836
auagguacucaucacugag

SEQ ID NO: 1143838 - RNA, 19 nt, Artificial Sequence
  Description of Artificial Sequence: Synthetic oligonucleotide
  Sense strand starting at position 296 of SEQ ID NO: 916275
uuauuuaacugaggauuga

SEQ ID NO: 1143839 - RNA, 19 nt, Artificial Sequence
  Description of Artificial Sequence: Synthetic oligonucleotide
  Antisense strand to SEQ ID NO: 1143838
ucaauccucaguuaaauaa

SEQ ID NO: 1143840 - RNA, 19 nt, Artificial Sequence
  Description of Artificial Sequence: Synthetic oligonucleotide
  Sense strand starting at position 387 of SEQ ID NO: 916275
uugggaggacuuuguccua

SEQ ID NO: 1143841 - RNA, 19 nt, Artificial Sequence
  Description of Artificial Sequence: Synthetic oligonucleotide
  Antisense strand to SEQ ID NO: 1143840
uaggacaaaguccucccaa

SEQ ID NO: 1143842 - RNA, 19 nt, Artificial Sequence
  Description of Artificial Sequence: Synthetic oligonucleotide
  Sense strand starting at position 428 of SEQ ID NO: 916275
cuuugaaucagugggacca

SEQ ID NO: 1143843 - RNA, 19 nt, Artificial Sequence
  Description of Artificial Sequence: Synthetic oligonucleotide
  Antisense strand to SEQ ID NO: 1143842
uggucccacugauucaaag

SEQ ID NO: 1143844 - RNA, 19 nt, Artificial Sequence
  Description of Artificial Sequence: Synthetic oligonucleotide
  Sense strand starting at position 510 of SEQ ID NO: 916275
uugcuagaguaucuaacaa

SEQ ID NO: 1143845 - RNA, 19 nt, Artificial Sequence
  Description of Artificial Sequence: Synthetic oligonucleotide
  Antisense strand to SEQ ID NO: 1143844
uuguuagauacucuagcaa

SEQ ID NO: 1143846 - RNA, 19 nt, Artificial Sequence
  Description of Artificial Sequence: Synthetic oligonucleotide
  Sense strand starting at position 582 of SEQ ID NO: 916275
agacauuucucugaguucu

SEQ ID NO: 1143847 - RNA, 19 nt, Artificial Sequence
  Description of Artificial Sequence: Synthetic oligonucleotide
  Antisense strand to SEQ ID NO: 1143846
agaacucagagaaaugucu

SEQ ID NO: 1143848 - RNA, 19 nt, Artificial Sequence
  Description of Artificial Sequence: Synthetic oligonucleotide
  Sense strand starting at position 2132 of SEQ ID NO: 916275
agucaugucucccuaauuc

SEQ ID NO: 1143849 - RNA, 19 nt, Artificial Sequence
  Description of Artificial Sequence: Synthetic oligonucleotide
  Antisense strand to SEQ ID NO: 1143848
gaauuagggagacaugacu

SEQ ID NO: 1143850 - RNA, 19 nt, Artificial Sequence
  Description of Artificial Sequence: Synthetic oligonucleotide
  Sense strand starting at position 2156 of SEQ ID NO: 916275
aguggauucugugcaagag

SEQ ID NO: 1143851 - RNA, 19 nt, Artificial Sequence
  Description of Artificial Sequence: Synthetic oligonucleotide
  Antisense strand to SEQ ID NO: 1143850
cucuugcacagaauccacu

SEQ ID NO: 1143852 - RNA, 19 nt, Artificial Sequence
  Description of Artificial Sequence: Synthetic oligonucleotide
  Sense strand starting at position 2199 of SEQ ID NO: 916275
gugugaucccucuacccua

SEQ ID NO: 1143853 - RNA, 19 nt, Artificial Sequence
  Description of Artificial Sequence: Synthetic oligonucleotide
  Antisense strand to SEQ ID NO: 1143852
uaggguagagggaucacac

SEQ ID NO: 1143854 - RNA, 19 nt, Artificial Sequence
  Description of Artificial Sequence: Synthetic oligonucleotide
  Sense strand starting at position 2226 of SEQ ID NO: 916275
uucccacaccugggaaauu

SEQ ID NO: 1143855 - RNA, 19 nt, Artificial Sequence
  Description of Artificial Sequence: Synthetic oligonucleotide
  Antisense strand to SEQ ID NO: 1143854
aauuucccaggugugggaa

SEQ ID NO: 1143856 - RNA, 19 nt, Artificial Sequence
  Description of Artificial Sequence: Synthetic oligonucleotide
  Sense strand starting at position 2293 of SEQ ID NO: 916275
ugaggauacuggucuaauc

SEQ ID NO: 1143857 - RNA, 19 nt, Artificial Sequence
  Description of Artificial Sequence: Synthetic oligonucleotide
  Antisense strand to SEQ ID NO: 1143856
gauuagaccaguauccuca

SEQ ID NO: 1143858 - RNA, 19 nt, Artificial Sequence
  Description of Artificial Sequence: Synthetic oligonucleotide
  Sense strand starting at position 2372 of SEQ ID NO: 916275
cucuuugucugcccagaua

SEQ ID NO: 1143859 - RNA, 19 nt, Artificial Sequence
  Description of Artificial Sequence: Synthetic oligonucleotide
  Antisense strand to SEQ ID NO: 1143858
uaucugggcagacaaagag

SEQ ID NO: 1143860 - RNA, 19 nt, Artificial Sequence
  Description of Artificial Sequence: Synthetic oligonucleotide
  Sense strand starting at position 2375 of SEQ ID NO: 916275
uuugucugcccagauaagu

SEQ ID NO: 1143861 - RNA, 19 nt, Artificial Sequence
  Description of Artificial Sequence: Synthetic oligonucleotide
  Antisense strand to SEQ ID NO: 1143860
acuuaucugggcagacaaa

SEQ ID NO: 1143862 - RNA, 19 nt, Artificial Sequence
  Description of Artificial Sequence: Synthetic oligonucleotide
  Sense strand starting at position 2541 of SEQ ID NO: 916275
uuuggcauuagaggguaua

SEQ ID NO: 1143863 - RNA, 19 nt, Artificial Sequence
  Description of Artificial Sequence: Synthetic oligonucleotide
  Antisense strand to SEQ ID NO: 1143862
uauacccucuaaugccaaa

SEQ ID NO: 1143864 - RNA, 19 nt, Artificial Sequence
  Description of Artificial Sequence: Synthetic oligonucleotide
  Sense strand starting at position 2542 of SEQ ID NO: 916275
uuggcauuagaggguauaa

SEQ ID NO: 1143865 - RNA, 19 nt, Artificial Sequence
  Description of Artificial Sequence: Synthetic oligonucleotide
  Antisense strand to SEQ ID NO: 1143864
uuauacccucuaaugccaa

SEQ ID NO: 1143866 - RNA, 19 nt, Artificial Sequence
  Description of Artificial Sequence: Synthetic oligonucleotide
  Sense strand starting at position 2551 of SEQ ID NO: 916275
gaggguauaaugugacaca

SEQ ID NO: 1143867 - RNA, 19 nt, Artificial Sequence
  Description of Artificial Sequence: Synthetic oligonucleotide
  Antisense strand to SEQ ID NO: 1143866
ugugucacauuauacccuc

SEQ ID NO: 1143868 - RNA, 19 nt, Artificial Sequence
  Description of Artificial Sequence: Synthetic oligonucleotide
  Sense strand starting at position 2594 of SEQ ID NO: 916275
cguacuuggagcuggaaga

SEQ ID NO: 1143869 - RNA, 19 nt, Artificial Sequence
  Description of Artificial Sequence: Synthetic oligonucleotide
  Antisense strand to SEQ ID NO: 1143868
ucuuccagcuccaaguacg

SEQ ID NO: 1143870 - RNA, 19 nt, Artificial Sequence
  Description of Artificial Sequence: Synthetic oligonucleotide
  Sense strand starting at position 2595 of SEQ ID NO: 916275
guacuuggagcuggaagau

SEQ ID NO: 1143871 - RNA, 19 nt, Artificial Sequence
  Description of Artificial Sequence: Synthetic oligonucleotide
  Antisense strand to SEQ ID NO: 1143870
aucuuccagcuccaaguac

SEQ ID NO: 1143872 - RNA, 19 nt, Artificial Sequence
  Description of Artificial Sequence: Synthetic oligonucleotide
  Sense strand starting at position 2661 of SEQ ID NO: 916275
cccuuaauaucaguggugu

SEQ ID NO: 1143873 - RNA, 19 nt, Artificial Sequence
  Description of Artificial Sequence: Synthetic oligonucleotide
  Antisense strand to SEQ ID NO: 1143872
acaccacugauauuaaggg

SEQ ID NO: 1143874 - RNA, 19 nt, Artificial Sequence
  Description of Artificial Sequence: Synthetic oligonucleotide
  Sense strand starting at position 2662 of SEQ ID NO: 916275
ccuuaauaucaguggugug

SEQ ID NO: 1143875 - RNA, 19 nt, Artificial Sequence
  Description of Artificial Sequence: Synthetic oligonucleotide
  Antisense strand to SEQ ID NO: 1143874
cacaccacugauauuaagg

SEQ ID NO: 1143876 - RNA, 19 nt, Artificial Sequence
  Description of Artificial Sequence: Synthetic oligonucleotide
  Sense strand starting at position 2698 of SEQ ID NO: 916275
ccggccaucugacuucuua

SEQ ID NO: 1143877 - RNA, 19 nt, Artificial Sequence
  Description of Artificial Sequence: Synthetic oligonucleotide
  Antisense strand to SEQ ID NO: 1143876
uaagaagucagauggccgg

SEQ ID NO: 1143878 - RNA, 19 nt, Artificial Sequence
  Description of Artificial Sequence: Synthetic oligonucleotide
  Sense strand starting at position 2822 of SEQ ID NO: 916275
cuuugaauguuucugucuu

SEQ ID NO: 1143879 - RNA, 19 nt, Artificial Sequence
  Description of Artificial Sequence: Synthetic oligonucleotide
  Antisense strand to SEQ ID NO: 1143878
aagacagaaacauucaaag

SEQ ID NO: 1143880 - RNA, 19 nt, Artificial Sequence
  Description of Artificial Sequence: Synthetic oligonucleotide
  Sense strand starting at position 2865 of SEQ ID NO: 916275
ccucaagagcuauagucuu

SEQ ID NO: 1143881 - RNA, 19 nt, Artificial Sequence
  Description of Artificial Sequence: Synthetic oligonucleotide
  Antisense strand to SEQ ID NO: 1143880
aagacuauagcucuugagg

SEQ ID NO: 1143882 - RNA, 19 nt, Artificial Sequence
  Description of Artificial Sequence: Synthetic oligonucleotide
  Sense strand starting at position 2871 of SEQ ID NO: 916275
gagcuauagucuuugaacu

SEQ ID NO: 1143883 - RNA, 19 nt, Artificial Sequence
  Description of Artificial Sequence: Synthetic oligonucleotide
  Antisense strand to SEQ ID NO: 1143882
aguucaaagacuauagcuc

SEQ ID NO: 1143884 - RNA, 19 nt, Artificial Sequence
  Description of Artificial Sequence: Synthetic oligonucleotide
  Sense strand starting at position 2872 of SEQ ID NO: 916275
agcuauagucuuugaacuu

SEQ ID NO: 1143885 - RNA, 19 nt, Artificial Sequence
  Description of Artificial Sequence: Synthetic oligonucleotide
  Antisense strand to SEQ ID NO: 1143884
aaguucaaagacuauagcu

SEQ ID NO: 1143886 - RNA, 19 nt, Artificial Sequence
  Description of Artificial Sequence: Synthetic oligonucleotide
  Sense strand starting at position 2975 of SEQ ID NO: 916275
ugaggagaguuucucuaga

SEQ ID NO: 1143887 - RNA, 19 nt, Artificial Sequence
  Description of Artificial Sequence: Synthetic oligonucleotide
  Antisense strand to SEQ ID NO: 1143886
ucuagagaaacucuccuca

SEQ ID NO: 1143888 - RNA, 19 nt, Artificial Sequence
  Description of Artificial Sequence: Synthetic oligonucleotide
  Sense strand starting at position 2977 of SEQ ID NO: 916275
aggagaguuucucuagauu

SEQ ID NO: 1143889 - RNA, 19 nt, Artificial Sequence
  Description of Artificial Sequence: Synthetic oligonucleotide
  Antisense strand to SEQ ID NO: 1143888
aaucuagagaaacucuccu

SEQ ID NO: 1143890 - RNA, 19 nt, Artificial Sequence
  Description of Artificial Sequence: Synthetic oligonucleotide
  Sense strand starting at position 3008 of SEQ ID NO: 916275
uccagaagaucaggagaaa

SEQ ID NO: 1143891 - RNA, 19 nt, Artificial Sequence
  Description of Artificial Sequence: Synthetic oligonucleotide
  Antisense strand to SEQ ID NO: 1143890
uuucuccugaucuucugga

SEQ ID NO: 1143892 - RNA, 19 nt, Artificial Sequence
  Description of Artificial Sequence: Synthetic oligonucleotide
  Sense strand starting at position 3066 of SEQ ID NO: 916275
ccaaguaaggauuagcuua

SEQ ID NO: 1143893 - RNA, 19 nt, Artificial Sequence
  Description of Artificial Sequence: Synthetic oligonucleotide
  Antisense strand to SEQ ID NO: 1143892
uaagcuaauccuuacuugg

SEQ ID NO: 1143894 - RNA, 19 nt, Artificial Sequence
  Description of Artificial Sequence: Synthetic oligonucleotide
  Sense strand starting at position 3073 of SEQ ID NO: 916275
aggauuagcuuaucaagga

SEQ ID NO: 1143895 - RNA, 19 nt, Artificial Sequence
  Description of Artificial Sequence: Synthetic oligonucleotide
  Antisense strand to SEQ ID NO: 1143894
uccuugauaagcuaauccu

SEQ ID NO: 1143896 - RNA, 19 nt, Artificial Sequence
  Description of Artificial Sequence: Synthetic oligonucleotide
  Sense strand starting at position 3077 of SEQ ID NO: 916275
uuagcuuaucaaggaccua

SEQ ID NO: 1143897 - RNA, 19 nt, Artificial Sequence
  Description of Artificial Sequence: Synthetic oligonucleotide
  Antisense strand to SEQ ID NO: 1143896
uagguccuugauaagcuaa

SEQ ID NO: 1143898 - RNA, 19 nt, Artificial Sequence
  Description of Artificial Sequence: Synthetic oligonucleotide
  Sense strand starting at position 3101 of SEQ ID NO: 916275
gacacaguuuaguugggaa

SEQ ID NO: 1143899 - RNA, 19 nt, Artificial Sequence
  Description of Artificial Sequence: Synthetic oligonucleotide
  Antisense strand to SEQ ID NO: 1143898
uucccaacuaaacuguguc

SEQ ID NO: 1143900 - RNA, 19 nt, Artificial Sequence
  Description of Artificial Sequence: Synthetic oligonucleotide
  Sense strand starting at position 3103 of SEQ ID NO: 916275
cacaguuuaguugggaaua

SEQ ID NO: 1143901 - RNA, 19 nt, Artificial Sequence
  Description of Artificial Sequence: Synthetic oligonucleotide
  Antisense strand to SEQ ID NO: 1143900
uauucccaacuaaacugug

SEQ ID NO: 1143902 - RNA, 19 nt, Artificial Sequence
  Description of Artificial Sequence: Synthetic oligonucleotide
  Sense strand starting at position 3236 of SEQ ID NO: 916275
aucaaagcuccaggaagua

SEQ ID NO: 1143903 - RNA, 19 nt, Artificial Sequence
  Description of Artificial Sequence: Synthetic oligonucleotide
  Antisense strand to SEQ ID NO: 1143902
uacuuccuggagcuuugau

SEQ ID NO: 1143904 - RNA, 19 nt, Artificial Sequence
  Description of Artificial Sequence: Synthetic oligonucleotide
  Sense strand starting at position 3903 of SEQ ID NO: 916275
uuuaauacccugggauacu

SEQ ID NO: 1143905 - RNA, 19 nt, Artificial Sequence
  Description of Artificial Sequence: Synthetic oligonucleotide
  Antisense strand to SEQ ID NO: 1143904
aguaucccaggguauuaaa

SEQ ID NO: 1143906 - RNA, 19 nt, Artificial Sequence
  Description of Artificial Sequence: Synthetic oligonucleotide
  Sense strand starting at position 2031 of SEQ ID NO: 916276
caacuagcgcucuggaaga

SEQ ID NO: 1143907 - RNA, 19 nt, Artificial Sequence
  Description of Artificial Sequence: Synthetic oligonucleotide
  Antisense strand to SEQ ID NO: 1143906
ucuuccagagcgcuaguug

SEQ ID NO: 1143908 - RNA, 19 nt, Artificial Sequence
  Description of Artificial Sequence: Synthetic oligonucleotide
  Sense strand starting at position 2082 of SEQ ID NO: 916276
agagcaaucuccgaauccu

SEQ ID NO: 1143909 - RNA, 19 nt, Artificial Sequence
  Description of Artificial Sequence: Synthetic oligonucleotide
  Antisense strand to SEQ ID NO: 1143908
aggauucggagauugcucu

SEQ ID NO: 1143910 - RNA, 19 nt, Artificial Sequence
  Description of Artificial Sequence: Synthetic oligonucleotide
  Sense strand starting at position 2159 of SEQ ID NO: 916276
agaugaauuuagcgguuac

SEQ ID NO: 1143911 - RNA, 19 nt, Artificial Sequence
  Description of Artificial Sequence: Synthetic oligonucleotide
  Antisense strand to SEQ ID NO: 1143910
guaaccgcuaaauucaucu

SEQ ID NO: 1143912 - RNA, 19 nt, Artificial Sequence
  Description of Artificial Sequence: Synthetic oligonucleotide
  Sense strand starting at position 2208 of SEQ ID NO: 916276
cacauaaacucguaggaaa

SEQ ID NO: 1143913 - RNA, 19 nt, Artificial Sequence
  Description of Artificial Sequence: Synthetic oligonucleotide
  Antisense strand to SEQ ID NO: 1143912
uuuccuacgaguuuaugug

SEQ ID NO: 1143914 - RNA, 19 nt, Artificial Sequence
  Description of Artificial Sequence: Synthetic oligonucleotide
  Sense strand starting at position 2210 of SEQ ID NO: 916276
cauaaacucguaggaaaua

SEQ ID NO: 1143915 - RNA, 19 nt, Artificial Sequence
  Description of Artificial Sequence: Synthetic oligonucleotide
  Antisense strand to SEQ ID NO: 1143914
uauuuccuacgaguuuaug

SEQ ID NO: 1143916 - RNA, 19 nt, Artificial Sequence
  Description of Artificial Sequence: Synthetic oligonucleotide
  Sense strand starting at position 2211 of SEQ ID NO: 916276
auaaacucguaggaaauaa

SEQ ID NO: 1143917 - RNA, 19 nt, Artificial Sequence
  Description of Artificial Sequence: Synthetic oligonucleotide
  Antisense strand to SEQ ID NO: 1143916
uuauuuccuacgaguuuau

SEQ ID NO: 1143918 - RNA, 19 nt, Artificial Sequence
  Description of Artificial Sequence: Synthetic oligonucleotide
  Sense strand starting at position 2287 of SEQ ID NO: 916276
agacguugcuaugcuaagu

SEQ ID NO: 1143919 - RNA, 19 nt, Artificial Sequence
  Description of Artificial Sequence: Synthetic oligonucleotide
  Antisense strand to SEQ ID NO: 1143918
acuuagcauagcaacgucu

SEQ ID NO: 1143920 - RNA, 19 nt, Artificial Sequence
  Description of Artificial Sequence: Synthetic oligonucleotide
  Sense strand starting at position 2300 of SEQ ID NO: 916276
cuaaguggauguucucaua

SEQ ID NO: 1143921 - RNA, 19 nt, Artificial Sequence
  Description of Artificial Sequence: Synthetic oligonucleotide
  Antisense strand to SEQ ID NO: 1143920
uaugagaacauccacuuag

SEQ ID NO: 1143922 - RNA, 19 nt, Artificial Sequence
  Description of Artificial Sequence: Synthetic oligonucleotide
  Sense strand starting at position 2303 of SEQ ID NO: 916276
aguggauguucucauauaa

SEQ ID NO: 1143923 - RNA, 19 nt, Artificial Sequence
  Description of Artificial Sequence: Synthetic oligonucleotide
  Antisense strand to SEQ ID NO: 1143922
uuauaugagaacauccacu

SEQ ID NO: 1143924 - RNA, 19 nt, Artificial Sequence
  Description of Artificial Sequence: Synthetic oligonucleotide
  Sense strand starting at position 2328 of SEQ ID NO: 916276
guacuacucagguagguuu

SEQ ID NO: 1143925 - RNA, 19 nt, Artificial Sequence
  Description of Artificial Sequence: Synthetic oligonucleotide
  Antisense strand to SEQ ID NO: 1143924
aaaccuaccugaguaguac

SEQ ID NO: 1143926 - RNA, 19 nt, Artificial Sequence
  Description of Artificial Sequence: Synthetic oligonucleotide
  Sense strand starting at position 2339 of SEQ ID NO: 916276
guagguuucugucuccgca

SEQ ID NO: 1143927 - RNA, 19 nt, Artificial Sequence
  Description of Artificial Sequence: Synthetic oligonucleotide
  Antisense strand to SEQ ID NO: 1143926
ugcggagacagaaaccuac

SEQ ID NO: 1143928 - RNA, 19 nt, Artificial Sequence
  Description of Artificial Sequence: Synthetic oligonucleotide
  Sense strand starting at position 2381 of SEQ ID NO: 916276
acagccuguccgcggaauu

SEQ ID NO: 1143929 - RNA, 19 nt, Artificial Sequence
  Description of Artificial Sequence: Synthetic oligonucleotide
  Antisense strand to SEQ ID NO: 1143928
aauuccgcggacaggcugu

SEQ ID NO: 1143930 - RNA, 19 nt, Artificial Sequence
  Description of Artificial Sequence: Synthetic oligonucleotide
  Sense strand starting at position 2392 of SEQ ID NO: 916276
gcggaauucugccugccca

SEQ ID NO: 1143931 - RNA, 19 nt, Artificial Sequence
  Description of Artificial Sequence: Synthetic oligonucleotide
  Antisense strand to SEQ ID NO: 1143930
ugggcaggcagaauuccgc

SEQ ID NO: 1143932 - RNA, 19 nt, Artificial Sequence
  Description of Artificial Sequence: Synthetic oligonucleotide
  Sense strand starting at position 2421 of SEQ ID NO: 916276
cguggacuguuucuuauac
